United States Patent Application Publication US 2018/0305689 A1 - sequence listing, part 119

SEQ ID NO: 1711391 - RNA, 19 nt, Artificial Sequence
  Description of Artificial Sequence: Synthetic oligonucleotide
  Sense strand starting at position 3090 of SEQ ID NO: 1561962
uggacuuggccaugaggau

SEQ ID NO: 1711392 - RNA, 19 nt, Artificial Sequence
  Description of Artificial Sequence: Synthetic oligonucleotide
  Antisense strand to SEQ ID NO: 1711391
auccucauggccaagucca

SEQ ID NO: 1711393 - RNA, 19 nt, Artificial Sequence
  Description of Artificial Sequence: Synthetic oligonucleotide
  Sense strand starting at position 3103 of SEQ ID NO: 1561962
gaggauagcuccucgcaga

SEQ ID NO: 1711394 - RNA, 19 nt, Artificial Sequence
  Description of Artificial Sequence: Synthetic oligonucleotide
  Antisense strand to SEQ ID NO: 1711393
ucugcgaggagcuauccuc

SEQ ID NO: 1711395 - RNA, 19 nt, Artificial Sequence
  Description of Artificial Sequence: Synthetic oligonucleotide
  Sense strand starting at position 3106 of SEQ ID NO: 1561962
gauagcuccucgcagaguu

SEQ ID NO: 1711396 - RNA, 19 nt, Artificial Sequence
  Description of Artificial Sequence: Synthetic oligonucleotide
  Antisense strand to SEQ ID NO: 1711395
aacucugcgaggagcuauc

SEQ ID NO: 1711397 - RNA, 19 nt, Artificial Sequence
  Description of Artificial Sequence: Synthetic oligonucleotide
  Sense strand starting at position 3118 of SEQ ID NO: 1561962
cagaguugucccuguaaug

SEQ ID NO: 1711398 - RNA, 19 nt, Artificial Sequence
  Description of Artificial Sequence: Synthetic oligonucleotide
  Antisense strand to SEQ ID NO: 1711397
cauuacagggacaacucug

SEQ ID NO: 1711399 - RNA, 19 nt, Artificial Sequence
  Description of Artificial Sequence: Synthetic oligonucleotide
  Sense strand starting at position 3130 of SEQ ID NO: 1561962
uguaaugauggugguggaa

SEQ ID NO: 1711400 - RNA, 19 nt, Artificial Sequence
  Description of Artificial Sequence: Synthetic oligonucleotide
  Antisense strand to SEQ ID NO: 1711399
uuccaccaccaucauuaca

SEQ ID NO: 1711401 - RNA, 19 nt, Artificial Sequence
  Description of Artificial Sequence: Synthetic oligonucleotide
  Sense strand starting at position 3132 of SEQ ID NO: 1561962
uaaugauggugguggaaag

SEQ ID NO: 1711402 - RNA, 19 nt, Artificial Sequence
  Description of Artificial Sequence: Synthetic oligonucleotide
  Antisense strand to SEQ ID NO: 1711401
cuuuccaccaccaucauua

SEQ ID NO: 1711403 - RNA, 19 nt, Artificial Sequence
  Description of Artificial Sequence: Synthetic oligonucleotide
  Sense strand starting at position 3226 of SEQ ID NO: 1561962
uggugacauuccuuguacu

SEQ ID NO: 1711404 - RNA, 19 nt, Artificial Sequence
  Description of Artificial Sequence: Synthetic oligonucleotide
  Antisense strand to SEQ ID NO: 1711403
aguacaaggaaugucacca

SEQ ID NO: 1711405 - RNA, 19 nt, Artificial Sequence
  Description of Artificial Sequence: Synthetic oligonucleotide
  Sense strand starting at position 3227 of SEQ ID NO: 1561962
ggugacauuccuuguacug

SEQ ID NO: 1711406 - RNA, 19 nt, Artificial Sequence
  Description of Artificial Sequence: Synthetic oligonucleotide
  Antisense strand to SEQ ID NO: 1711405
caguacaaggaaugucacc

SEQ ID NO: 1711407 - RNA, 19 nt, Artificial Sequence
  Description of Artificial Sequence: Synthetic oligonucleotide
  Sense strand starting at position 3443 of SEQ ID NO: 1561962
gcuggacauuucuguaaau

SEQ ID NO: 1711408 - RNA, 19 nt, Artificial Sequence
  Description of Artificial Sequence: Synthetic oligonucleotide
  Antisense strand to SEQ ID NO: 1711407
auuuacagaaauguccagc

SEQ ID NO: 1711409 - RNA, 19 nt, Artificial Sequence
  Description of Artificial Sequence: Synthetic oligonucleotide
  Sense strand starting at position 3512 of SEQ ID NO: 1561962
gccugaccuccuuguuaga

SEQ ID NO: 1711410 - RNA, 19 nt, Artificial Sequence
  Description of Artificial Sequence: Synthetic oligonucleotide
  Antisense strand to SEQ ID NO: 1711409
ucuaacaaggaggucaggc

SEQ ID NO: 1711411 - RNA, 19 nt, Artificial Sequence
  Description of Artificial Sequence: Synthetic oligonucleotide
  Sense strand starting at position 3515 of SEQ ID NO: 1561962
ugaccuccuuguuagauga

SEQ ID NO: 1711412 - RNA, 19 nt, Artificial Sequence
  Description of Artificial Sequence: Synthetic oligonucleotide
  Antisense strand to SEQ ID NO: 1711411
ucaucuaacaaggagguca

SEQ ID NO: 1711413 - RNA, 19 nt, Artificial Sequence
  Description of Artificial Sequence: Synthetic oligonucleotide
  Sense strand starting at position 3517 of SEQ ID NO: 1561962
accuccuuguuagaugauu

SEQ ID NO: 1711414 - RNA, 19 nt, Artificial Sequence
  Description of Artificial Sequence: Synthetic oligonucleotide
  Antisense strand to SEQ ID NO: 1711413
aaucaucuaacaaggaggu

SEQ ID NO: 1711415 - RNA, 19 nt, Artificial Sequence
  Description of Artificial Sequence: Synthetic oligonucleotide
  Sense strand starting at position 3541 of SEQ ID NO: 1561962
gugggaucugguugcagca

SEQ ID NO: 1711416 - RNA, 19 nt, Artificial Sequence
  Description of Artificial Sequence: Synthetic oligonucleotide
  Antisense strand to SEQ ID NO: 1711415
ugcugcaaccagaucccac

SEQ ID NO: 1711417 - RNA, 19 nt, Artificial Sequence
  Description of Artificial Sequence: Synthetic oligonucleotide
  Sense strand starting at position 3551 of SEQ ID NO: 1561962
guugcagcaucagaauaga

SEQ ID NO: 1711418 - RNA, 19 nt, Artificial Sequence
  Description of Artificial Sequence: Synthetic oligonucleotide
  Antisense strand to SEQ ID NO: 1711417
ucuauucugaugcugcaac

SEQ ID NO: 1711419 - RNA, 19 nt, Artificial Sequence
  Description of Artificial Sequence: Synthetic oligonucleotide
  Sense strand starting at position 3611 of SEQ ID NO: 1561962
ggugcugggugguuguaua

SEQ ID NO: 1711420 - RNA, 19 nt, Artificial Sequence
  Description of Artificial Sequence: Synthetic oligonucleotide
  Antisense strand to SEQ ID NO: 1711419
uauacaaccacccagcacc

SEQ ID NO: 1711421 - RNA, 19 nt, Artificial Sequence
  Description of Artificial Sequence: Synthetic oligonucleotide
  Sense strand starting at position 3628 of SEQ ID NO: 1561962
uaggguuugggugaucuga

SEQ ID NO: 1711422 - RNA, 19 nt, Artificial Sequence
  Description of Artificial Sequence: Synthetic oligonucleotide
  Antisense strand to SEQ ID NO: 1711421
ucagaucacccaaacccua

SEQ ID NO: 1711423 - RNA, 19 nt, Artificial Sequence
  Description of Artificial Sequence: Synthetic oligonucleotide
  Sense strand starting at position 3630 of SEQ ID NO: 1561962
ggguuugggugaucugaga

SEQ ID NO: 1711424 - RNA, 19 nt, Artificial Sequence
  Description of Artificial Sequence: Synthetic oligonucleotide
  Antisense strand to SEQ ID NO: 1711423
ucucagaucacccaaaccc

SEQ ID NO: 1711425 - RNA, 19 nt, Artificial Sequence
  Description of Artificial Sequence: Synthetic oligonucleotide
  Sense strand starting at position 3709 of SEQ ID NO: 1561962
ugcugacaacauuguucua

SEQ ID NO: 1711426 - RNA, 19 nt, Artificial Sequence
  Description of Artificial Sequence: Synthetic oligonucleotide
  Antisense strand to SEQ ID NO: 1711425
uagaacaauguugucagca

SEQ ID NO: 1711427 - RNA, 19 nt, Artificial Sequence
  Description of Artificial Sequence: Synthetic oligonucleotide
  Sense strand starting at position 42 of SEQ ID NO: 1561963
gggauugacugagugccua

SEQ ID NO: 1711428 - RNA, 19 nt, Artificial Sequence
  Description of Artificial Sequence: Synthetic oligonucleotide
  Antisense strand to SEQ ID NO: 1711427
uaggcacucagucaauccc

SEQ ID NO: 1711429 - RNA, 19 nt, Artificial Sequence
  Description of Artificial Sequence: Synthetic oligonucleotide
  Sense strand starting at position 46 of SEQ ID NO: 1561963
uugacugagugccuagaau

SEQ ID NO: 1711430 - RNA, 19 nt, Artificial Sequence
  Description of Artificial Sequence: Synthetic oligonucleotide
  Antisense strand to SEQ ID NO: 1711429
auucuaggcacucagucaa

SEQ ID NO: 1711431 - RNA, 19 nt, Artificial Sequence
  Description of Artificial Sequence: Synthetic oligonucleotide
  Sense strand starting at position 76 of SEQ ID NO: 1561963
cugggagaaucacauauua

SEQ ID NO: 1711432 - RNA, 19 nt, Artificial Sequence
  Description of Artificial Sequence: Synthetic oligonucleotide
  Antisense strand to SEQ ID NO: 1711431
uaauaugugauucucccag

SEQ ID NO: 1711433 - RNA, 19 nt, Artificial Sequence
  Description of Artificial Sequence: Synthetic oligonucleotide
  Sense strand starting at position 399 of SEQ ID NO: 1561963
aaagcucuaugggaaggaa

SEQ ID NO: 1711434 - RNA, 19 nt, Artificial Sequence
  Description of Artificial Sequence: Synthetic oligonucleotide
  Antisense strand to SEQ ID NO: 1711433
uuccuucccauagagcuuu

SEQ ID NO: 1711435 - RNA, 19 nt, Artificial Sequence
  Description of Artificial Sequence: Synthetic oligonucleotide
  Sense strand starting at position 435 of SEQ ID NO: 1561963
ccaauauauugagggcugu

SEQ ID NO: 1711436 - RNA, 19 nt, Artificial Sequence
  Description of Artificial Sequence: Synthetic oligonucleotide
  Antisense strand to SEQ ID NO: 1711435
acagcccucaauauauugg

SEQ ID NO: 1711437 - RNA, 19 nt, Artificial Sequence
  Description of Artificial Sequence: Synthetic oligonucleotide
  Sense strand starting at position 759 of SEQ ID NO: 1561963
gcccaucuucguugagcuu

SEQ ID NO: 1711438 - RNA, 19 nt, Artificial Sequence
  Description of Artificial Sequence: Synthetic oligonucleotide
  Antisense strand to SEQ ID NO: 1711437
aagcucaacgaagaugggc

SEQ ID NO: 1711439 - RNA, 19 nt, Artificial Sequence
  Description of Artificial Sequence: Synthetic oligonucleotide
  Sense strand starting at position 806 of SEQ ID NO: 1561963
ggaguguuaugugggcuga

SEQ ID NO: 1711440 - RNA, 19 nt, Artificial Sequence
  Description of Artificial Sequence: Synthetic oligonucleotide
  Antisense strand to SEQ ID NO: 1711439
ucagcccacauaacacucc

SEQ ID NO: 1711441 - RNA, 19 nt, Artificial Sequence
  Description of Artificial Sequence: Synthetic oligonucleotide
  Sense strand starting at position 807 of SEQ ID NO: 1561963
gaguguuaugugggcugaa

SEQ ID NO: 1711442 - RNA, 19 nt, Artificial Sequence
  Description of Artificial Sequence: Synthetic oligonucleotide
  Antisense strand to SEQ ID NO: 1711441
uucagcccacauaacacuc

SEQ ID NO: 1711443 - RNA, 19 nt, Artificial Sequence
  Description of Artificial Sequence: Synthetic oligonucleotide
  Sense strand starting at position 808 of SEQ ID NO: 1561963
aguguuaugugggcugaau

SEQ ID NO: 1711444 - RNA, 19 nt, Artificial Sequence
  Description of Artificial Sequence: Synthetic oligonucleotide
  Antisense strand to SEQ ID NO: 1711443
auucagcccacauaacacu

SEQ ID NO: 1711445 - RNA, 19 nt, Artificial Sequence
  Description of Artificial Sequence: Synthetic oligonucleotide
  Sense strand starting at position 810 of SEQ ID NO: 1561963
uguuaugugggcugaauaa

SEQ ID NO: 1711446 - RNA, 19 nt, Artificial Sequence
  Description of Artificial Sequence: Synthetic oligonucleotide
  Antisense strand to SEQ ID NO: 1711445
uuauucagcccacauaaca

SEQ ID NO: 1711447 - RNA, 19 nt, Artificial Sequence
  Description of Artificial Sequence: Synthetic oligonucleotide
  Sense strand starting at position 1086 of SEQ ID NO: 1561963
gcauaagauccaggcugau

SEQ ID NO: 1711448 - RNA, 19 nt, Artificial Sequence
  Description of Artificial Sequence: Synthetic oligonucleotide
  Antisense strand to SEQ ID NO: 1711447
aucagccuggaucuuaugc

SEQ ID NO: 1711449 - RNA, 19 nt, Artificial Sequence
  Description of Artificial Sequence: Synthetic oligonucleotide
  Sense strand starting at position 1149 of SEQ ID NO: 1561963
cccagauacugauacuugu

SEQ ID NO: 1711450 - RNA, 19 nt, Artificial Sequence
  Description of Artificial Sequence: Synthetic oligonucleotide
  Antisense strand to SEQ ID NO: 1711449
acaaguaucaguaucuggg

SEQ ID NO: 1711451 - RNA, 19 nt, Artificial Sequence
  Description of Artificial Sequence: Synthetic oligonucleotide
  Sense strand starting at position 1156 of SEQ ID NO: 1561963
acugauacuuguccguuga

SEQ ID NO: 1711452 - RNA, 19 nt, Artificial Sequence
  Description of Artificial Sequence: Synthetic oligonucleotide
  Antisense strand to SEQ ID NO: 1711451
ucaacggacaaguaucagu

SEQ ID NO: 1711453 - RNA, 19 nt, Artificial Sequence
  Description of Artificial Sequence: Synthetic oligonucleotide
  Sense strand starting at position 1157 of SEQ ID NO: 1561963
cugauacuuguccguugaa

SEQ ID NO: 1711454 - RNA, 19 nt, Artificial Sequence
  Description of Artificial Sequence: Synthetic oligonucleotide
  Antisense strand to SEQ ID NO: 1711453
uucaacggacaaguaucag

SEQ ID NO: 1711455 - RNA, 19 nt, Artificial Sequence
  Description of Artificial Sequence: Synthetic oligonucleotide
  Sense strand starting at position 1158 of SEQ ID NO: 1561963
ugauacuuguccguugaau

SEQ ID NO: 1711456 - RNA, 19 nt, Artificial Sequence
  Description of Artificial Sequence: Synthetic oligonucleotide
  Antisense strand to SEQ ID NO: 1711455
auucaacggacaaguauca

SEQ ID NO: 1711457 - RNA, 19 nt, Artificial Sequence
  Description of Artificial Sequence: Synthetic oligonucleotide
  Sense strand starting at position 1160 of SEQ ID NO: 1561963
auacuuguccguugaauga

SEQ ID NO: 1711458 - RNA, 19 nt, Artificial Sequence
  Description of Artificial Sequence: Synthetic oligonucleotide
  Antisense strand to SEQ ID NO: 1711457
ucauucaacggacaaguau

SEQ ID NO: 1711459 - RNA, 19 nt, Artificial Sequence
  Description of Artificial Sequence: Synthetic oligonucleotide
  Sense strand starting at position 1213 of SEQ ID NO: 1561963
cccucagaguucugugaag

SEQ ID NO: 1711460 - RNA, 19 nt, Artificial Sequence
  Description of Artificial Sequence: Synthetic oligonucleotide
  Antisense strand to SEQ ID NO: 1711459
cuucacagaacucugaggg

SEQ ID NO: 1711461 - RNA, 19 nt, Artificial Sequence
  Description of Artificial Sequence: Synthetic oligonucleotide
  Sense strand starting at position 1215 of SEQ ID NO: 1561963
cucagaguucugugaaggu

SEQ ID NO: 1711462 - RNA, 19 nt, Artificial Sequence
  Description of Artificial Sequence: Synthetic oligonucleotide
  Antisense strand to SEQ ID NO: 1711461
accuucacagaacucugag

SEQ ID NO: 1711463 - RNA, 19 nt, Artificial Sequence
  Description of Artificial Sequence: Synthetic oligonucleotide
  Sense strand starting at position 1218 of SEQ ID NO: 1561963
agaguucugugaaggugua

SEQ ID NO: 1711464 - RNA, 19 nt, Artificial Sequence
  Description of Artificial Sequence: Synthetic oligonucleotide
  Antisense strand to SEQ ID NO: 1711463
uacaccuucacagaacucu

SEQ ID NO: 1711465 - RNA, 19 nt, Artificial Sequence
  Description of Artificial Sequence: Synthetic oligonucleotide
  Sense strand starting at position 1219 of SEQ ID NO: 1561963
gaguucugugaagguguaa

SEQ ID NO: 1711466 - RNA, 19 nt, Artificial Sequence
  Description of Artificial Sequence: Synthetic oligonucleotide
  Antisense strand to SEQ ID NO: 1711465
uuacaccuucacagaacuc

SEQ ID NO: 1711467 - RNA, 19 nt, Artificial Sequence
  Description of Artificial Sequence: Synthetic oligonucleotide
  Sense strand starting at position 1295 of SEQ ID NO: 1561963
gaacuauccggguggagug

SEQ ID NO: 1711468 - RNA, 19 nt, Artificial Sequence
  Description of Artificial Sequence: Synthetic oligonucleotide
  Antisense strand to SEQ ID NO: 1711467
cacuccacccggauaguuc

SEQ ID NO: 1711469 - RNA, 19 nt, Artificial Sequence
  Description of Artificial Sequence: Synthetic oligonucleotide
  Sense strand starting at position 1370 of SEQ ID NO: 1561963
cacagaugcucugcagaca

SEQ ID NO: 1711470 - RNA, 19 nt, Artificial Sequence
  Description of Artificial Sequence: Synthetic oligonucleotide
  Antisense strand to SEQ ID NO: 1711469
ugucugcagagcaucugug

SEQ ID NO: 1711471 - RNA, 19 nt, Artificial Sequence
  Description of Artificial Sequence: Synthetic oligonucleotide
  Sense strand starting at position 1427 of SEQ ID NO: 1561963
aaagcaugcugcgaugaga

SEQ ID NO: 1711472 - RNA, 19 nt, Artificial Sequence
  Description of Artificial Sequence: Synthetic oligonucleotide
  Antisense strand to SEQ ID NO: 1711471
ucucaucgcagcaugcuuu

SEQ ID NO: 1711473 - RNA, 19 nt, Artificial Sequence
  Description of Artificial Sequence: Synthetic oligonucleotide
  Sense strand starting at position 1455 of SEQ ID NO: 1561963
cacgucuguaccgagucau

SEQ ID NO: 1711474 - RNA, 19 nt, Artificial Sequence
  Description of Artificial Sequence: Synthetic oligonucleotide
  Antisense strand to SEQ ID NO: 1711473
augacucgguacagacgug

SEQ ID NO: 1711475 - RNA, 19 nt, Artificial Sequence
  Description of Artificial Sequence: Synthetic oligonucleotide
  Sense strand starting at position 1459 of SEQ ID NO: 1561963
ucuguaccgagucauaaag

SEQ ID NO: 1711476 - RNA, 19 nt, Artificial Sequence
  Description of Artificial Sequence: Synthetic oligonucleotide
  Antisense strand to SEQ ID NO: 1711475
cuuuaugacucgguacaga

SEQ ID NO: 1711477 - RNA, 19 nt, Artificial Sequence
  Description of Artificial Sequence: Synthetic oligonucleotide
  Sense strand starting at position 1461 of SEQ ID NO: 1561963
uguaccgagucauaaagga

SEQ ID NO: 1711478 - RNA, 19 nt, Artificial Sequence
  Description of Artificial Sequence: Synthetic oligonucleotide
  Antisense strand to SEQ ID NO: 1711477
uccuuuaugacucgguaca

SEQ ID NO: 1711479 - RNA, 19 nt, Artificial Sequence
  Description of Artificial Sequence: Synthetic oligonucleotide
  Sense strand starting at position 1479 of SEQ ID NO: 1561963
augagaagagucggccaaa

SEQ ID NO: 1711480 - RNA, 19 nt, Artificial Sequence
  Description of Artificial Sequence: Synthetic oligonucleotide
  Antisense strand to SEQ ID NO: 1711479
uuuggccgacucuucucau

SEQ ID NO: 1711481 - RNA, 19 nt, Artificial Sequence
  Description of Artificial Sequence: Synthetic oligonucleotide
  Sense strand starting at position 1531 of SEQ ID NO: 1561963
ggccuuaagcuuuaggaca

SEQ ID NO: 1711482 - RNA, 19 nt, Artificial Sequence
  Description of Artificial Sequence: Synthetic oligonucleotide
  Antisense strand to SEQ ID NO: 1711481
uguccuaaagcuuaaggcc

SEQ ID NO: 1711483 - RNA, 19 nt, Artificial Sequence
  Description of Artificial Sequence: Synthetic oligonucleotide
  Sense strand starting at position 1593 of SEQ ID NO: 1561963
ggagacauucggcaugacu

SEQ ID NO: 1711484 - RNA, 19 nt, Artificial Sequence
  Description of Artificial Sequence: Synthetic oligonucleotide
  Antisense strand to SEQ ID NO: 1711483
agucaugccgaaugucucc

SEQ ID NO: 1711485 - RNA, 19 nt, Artificial Sequence
  Description of Artificial Sequence: Synthetic oligonucleotide
  Sense strand starting at position 1605 of SEQ ID NO: 1561963
caugacuccggaugcaaga

SEQ ID NO: 1711486 - RNA, 19 nt, Artificial Sequence
  Description of Artificial Sequence: Synthetic oligonucleotide
  Antisense strand to SEQ ID NO: 1711485
ucuugcauccggagucaug

SEQ ID NO: 1711487 - RNA, 19 nt, Artificial Sequence
  Description of Artificial Sequence: Synthetic oligonucleotide
  Sense strand starting at position 2479 of SEQ ID NO: 1561963
ggaagugauugcucaaagg

SEQ ID NO: 1711488 - RNA, 19 nt, Artificial Sequence
  Description of Artificial Sequence: Synthetic oligonucleotide
  Antisense strand to SEQ ID NO: 1711487
ccuuugagcaaucacuucc

SEQ ID NO: 1711489 - RNA, 19 nt, Artificial Sequence
  Description of Artificial Sequence: Synthetic oligonucleotide
  Sense strand starting at position 2857 of SEQ ID NO: 1561963
gcgucagaggcugaagaaa

SEQ ID NO: 1711490 - RNA, 19 nt, Artificial Sequence
  Description of Artificial Sequence: Synthetic oligonucleotide
  Antisense strand to SEQ ID NO: 1711489
uuucuucagccucugacgc

SEQ ID NO: 1711491 - RNA, 19 nt, Artificial Sequence
  Description of Artificial Sequence: Synthetic oligonucleotide
  Sense strand starting at position 3100 of SEQ ID NO: 1561963
ucccaaagguuaugacauu

SEQ ID NO: 1711492 - RNA, 19 nt, Artificial Sequence
  Description of Artificial Sequence: Synthetic oligonucleotide
  Antisense strand to SEQ ID NO: 1711491
aaugucauaaccuuuggga

SEQ ID NO: 1711493 - RNA, 19 nt, Artificial Sequence
  Description of Artificial Sequence: Synthetic oligonucleotide
  Sense strand starting at position 3101 of SEQ ID NO: 1561963
cccaaagguuaugacauuu

SEQ ID NO: 1711494 - RNA, 19 nt, Artificial Sequence
  Description of Artificial Sequence: Synthetic oligonucleotide
  Antisense strand to SEQ ID NO: 1711493
aaaugucauaaccuuuggg

SEQ ID NO: 1711495 - RNA, 19 nt, Artificial Sequence
  Description of Artificial Sequence: Synthetic oligonucleotide
  Sense strand starting at position 3183 of SEQ ID NO: 1561963
uuuccuucuguggagcaaa

SEQ ID NO: 1711496 - RNA, 19 nt, Artificial Sequence
  Description of Artificial Sequence: Synthetic oligonucleotide
  Antisense strand to SEQ ID NO: 1711495
uuugcuccacagaaggaaa

SEQ ID NO: 1711497 - RNA, 19 nt, Artificial Sequence
  Description of Artificial Sequence: Synthetic oligonucleotide
  Sense strand starting at position 30 of SEQ ID NO: 1561964
acucucauccagugacuca

SEQ ID NO: 1711498 - RNA, 19 nt, Artificial Sequence
  Description of Artificial Sequence: Synthetic oligonucleotide
  Antisense strand to SEQ ID NO: 1711497
ugagucacuggaugagagu

SEQ ID NO: 1711499 - RNA, 19 nt, Artificial Sequence
  Description of Artificial Sequence: Synthetic oligonucleotide
  Sense strand starting at position 241 of SEQ ID NO: 1561964
ccgcacauuugugcuauua

SEQ ID NO: 1711500 - RNA, 19 nt, Artificial Sequence
  Description of Artificial Sequence: Synthetic oligonucleotide
  Antisense strand to SEQ ID NO: 1711499
uaauagcacaaaugugcgg

SEQ ID NO: 1711501 - RNA, 19 nt, Artificial Sequence
  Description of Artificial Sequence: Synthetic oligonucleotide
  Sense strand starting at position 243 of SEQ ID NO: 1561964
gcacauuugugcuauuaaa

SEQ ID NO: 1711502 - RNA, 19 nt, Artificial Sequence
  Description of Artificial Sequence: Synthetic oligonucleotide
  Antisense strand to SEQ ID NO: 1711501
uuuaauagcacaaaugugc

SEQ ID NO: 1711503 - RNA, 19 nt, Artificial Sequence
  Description of Artificial Sequence: Synthetic oligonucleotide
  Sense strand starting at position 305 of SEQ ID NO: 1561964
auuacuuuguccuugugau

SEQ ID NO: 1711504 - RNA, 19 nt, Artificial Sequence
  Description of Artificial Sequence: Synthetic oligonucleotide
  Antisense strand to SEQ ID NO: 1711503
aucacaaggacaaaguaau

SEQ ID NO: 1711505 - RNA, 19 nt, Artificial Sequence
  Description of Artificial Sequence: Synthetic oligonucleotide
  Sense strand starting at position 306 of SEQ ID NO: 1561964
uuacuuuguccuugugauu

SEQ ID NO: 1711506 - RNA, 19 nt, Artificial Sequence
  Description of Artificial Sequence: Synthetic oligonucleotide
  Antisense strand to SEQ ID NO: 1711505
aaucacaaggacaaaguaa

SEQ ID NO: 1711507 - RNA, 19 nt, Artificial Sequence
  Description of Artificial Sequence: Synthetic oligonucleotide
  Sense strand starting at position 365 of SEQ ID NO: 1561964
aguuguagcuucucaauau

SEQ ID NO: 1711508 - RNA, 19 nt, Artificial Sequence
  Description of Artificial Sequence: Synthetic oligonucleotide
  Antisense strand to SEQ ID NO: 1711507
auauugagaagcuacaacu

SEQ ID NO: 1711509 - RNA, 19 nt, Artificial Sequence
  Description of Artificial Sequence: Synthetic oligonucleotide
  Sense strand starting at position 366 of SEQ ID NO: 1561964
guuguagcuucucaauauc

SEQ ID NO: 1711510 - RNA, 19 nt, Artificial Sequence
  Description of Artificial Sequence: Synthetic oligonucleotide
  Antisense strand to SEQ ID NO: 1711509
gauauugagaagcuacaac

SEQ ID NO: 1711511 - RNA, 19 nt, Artificial Sequence
  Description of Artificial Sequence: Synthetic oligonucleotide
  Sense strand starting at position 369 of SEQ ID NO: 1561964
guagcuucucaauaucaug

SEQ ID NO: 1711512 - RNA, 19 nt, Artificial Sequence
  Description of Artificial Sequence: Synthetic oligonucleotide
  Antisense strand to SEQ ID NO: 1711511
caugauauugagaagcuac

SEQ ID NO: 1711513 - RNA, 19 nt, Artificial Sequence
  Description of Artificial Sequence: Synthetic oligonucleotide
  Sense strand starting at position 396 of SEQ ID NO: 1561964
uguagucauuaauaaagcu

SEQ ID NO: 1711514 - RNA, 19 nt, Artificial Sequence
  Description of Artificial Sequence: Synthetic oligonucleotide
  Antisense strand to SEQ ID NO: 1711513
agcuuuauuaaugacuaca

SEQ ID NO: 1711515 - RNA, 19 nt, Artificial Sequence
  Description of Artificial Sequence: Synthetic oligonucleotide
  Sense strand starting at position 606 of SEQ ID NO: 1561964
acugcaaacguguggagaa

SEQ ID NO: 1711516 - RNA, 19 nt, Artificial Sequence
  Description of Artificial Sequence: Synthetic oligonucleotide
  Antisense strand to SEQ ID NO: 1711515
uucuccacacguuugcagu

SEQ ID NO: 1711517 - RNA, 19 nt, Artificial Sequence
  Description of Artificial Sequence: Synthetic oligonucleotide
  Sense strand starting at position 607 of SEQ ID NO: 1561964
cugcaaacguguggagaaa

SEQ ID NO: 1711518 - RNA, 19 nt, Artificial Sequence
  Description of Artificial Sequence: Synthetic oligonucleotide
  Antisense strand to SEQ ID NO: 1711517
uuucuccacacguuugcag

SEQ ID NO: 1711519 - RNA, 19 nt, Artificial Sequence
  Description of Artificial Sequence: Synthetic oligonucleotide
  Sense strand starting at position 661 of SEQ ID NO: 1561964
gggaguaccugcugcaaau

SEQ ID NO: 1711520 - RNA, 19 nt, Artificial Sequence
  Description of Artificial Sequence: Synthetic oligonucleotide
  Antisense strand to SEQ ID NO: 1711519
auuugcagcagguacuccc

SEQ ID NO: 1711521 - RNA, 19 nt, Artificial Sequence
  Description of Artificial Sequence: Synthetic oligonucleotide
  Sense strand starting at position 663 of SEQ ID NO: 1561964
gaguaccugcugcaaauua

SEQ ID NO: 1711522 - RNA, 19 nt, Artificial Sequence
  Description of Artificial Sequence: Synthetic oligonucleotide
  Antisense strand to SEQ ID NO: 1711521
uaauuugcagcagguacuc

SEQ ID NO: 1711523 - RNA, 19 nt, Artificial Sequence
  Description of Artificial Sequence: Synthetic oligonucleotide
  Sense strand starting at position 926 of SEQ ID NO: 1561964
gggugagcaucccuaagca

SEQ ID NO: 1711524 - RNA, 19 nt, Artificial Sequence
  Description of Artificial Sequence: Synthetic oligonucleotide
  Antisense strand to SEQ ID NO: 1711523
ugcuuagggaugcucaccc

SEQ ID NO: 1711525 - RNA, 19 nt, Artificial Sequence
  Description of Artificial Sequence: Synthetic oligonucleotide
  Sense strand starting at position 1127 of SEQ ID NO: 1561964
gggacauagggcugaaugu

SEQ ID NO: 1711526 - RNA, 19 nt, Artificial Sequence
  Description of Artificial Sequence: Synthetic oligonucleotide
  Antisense strand to SEQ ID NO: 1711525
acauucagcccuauguccc

SEQ ID NO: 1711527 - RNA, 19 nt, Artificial Sequence
  Description of Artificial Sequence: Synthetic oligonucleotide
  Sense strand starting at position 1224 of SEQ ID NO: 1561964
gccagaagcucagcuaaga

SEQ ID NO: 1711528 - RNA, 19 nt, Artificial Sequence
  Description of Artificial Sequence: Synthetic oligonucleotide
  Antisense strand to SEQ ID NO: 1711527
ucuuagcugagcuucuggc

SEQ ID NO: 1711529 - RNA, 19 nt, Artificial Sequence
  Description of Artificial Sequence: Synthetic oligonucleotide
  Sense strand starting at position 1311 of SEQ ID NO: 1561964
agcggcaggucugugaaua

SEQ ID NO: 1711530 - RNA, 19 nt, Artificial Sequence
  Description of Artificial Sequence: Synthetic oligonucleotide
  Antisense strand to SEQ ID NO: 1711529
uauucacagaccugccgcu

SEQ ID NO: 1711531 - RNA, 19 nt, Artificial Sequence
  Description of Artificial Sequence: Synthetic oligonucleotide
  Sense strand starting at position 1312 of SEQ ID NO: 1561964
gcggcaggucugugaauau

SEQ ID NO: 1711532 - RNA, 19 nt, Artificial Sequence
  Description of Artificial Sequence: Synthetic oligonucleotide
  Antisense strand to SEQ ID NO: 1711531
auauucacagaccugccgc

SEQ ID NO: 1711533 - RNA, 19 nt, Artificial Sequence
  Description of Artificial Sequence: Synthetic oligonucleotide
  Sense strand starting at position 1340 of SEQ ID NO: 1561964
acagacaucucguggaagu

SEQ ID NO: 1711534 - RNA, 19 nt, Artificial Sequence
  Description of Artificial Sequence: Synthetic oligonucleotide
  Antisense strand to SEQ ID NO: 1711533
acuuccacgagaugucugu

SEQ ID NO: 1711535 - RNA, 19 nt, Artificial Sequence
  Description of Artificial Sequence: Synthetic oligonucleotide
  Sense strand starting at position 1341 of SEQ ID NO: 1561964
cagacaucucguggaagua

SEQ ID NO: 1711536 - RNA, 19 nt, Artificial Sequence
  Description of Artificial Sequence: Synthetic oligonucleotide
  Antisense strand to SEQ ID NO: 1711535
uacuuccacgagaugucug

SEQ ID NO: 1711537 - RNA, 19 nt, Artificial Sequence
  Description of Artificial Sequence: Synthetic oligonucleotide
  Sense strand starting at position 1342 of SEQ ID NO: 1561964
agacaucucguggaaguaa

SEQ ID NO: 1711538 - RNA, 19 nt, Artificial Sequence
  Description of Artificial Sequence: Synthetic oligonucleotide
  Antisense strand to SEQ ID NO: 1711537
uuacuuccacgagaugucu

SEQ ID NO: 1711539 - RNA, 19 nt, Artificial Sequence
  Description of Artificial Sequence: Synthetic oligonucleotide
  Sense strand starting at position 1365 of SEQ ID NO: 1561964
uacguaacagauuggacuu

SEQ ID NO: 1711540 - RNA, 19 nt, Artificial Sequence
  Description of Artificial Sequence: Synthetic oligonucleotide
  Antisense strand to SEQ ID NO: 1711539
aaguccaaucuguuacgua

SEQ ID NO: 1711541 - RNA, 19 nt, Artificial Sequence
  Description of Artificial Sequence: Synthetic oligonucleotide
  Sense strand starting at position 1413 of SEQ ID NO: 1561964
guggaauaagcacgugaau

SEQ ID NO: 1711542 - RNA, 19 nt, Artificial Sequence
  Description of Artificial Sequence: Synthetic oligonucleotide
  Antisense strand to SEQ ID NO: 1711541
auucacgugcuuauuccac

SEQ ID NO: 1711543 - RNA, 19 nt, Artificial Sequence
  Description of Artificial Sequence: Synthetic oligonucleotide
  Sense strand starting at position 1415 of SEQ ID NO: 1561964
ggaauaagcacgugaauua

SEQ ID NO: 1711544 - RNA, 19 nt, Artificial Sequence
  Description of Artificial Sequence: Synthetic oligonucleotide
  Antisense strand to SEQ ID NO: 1711543
uaauucacgugcuuauucc

SEQ ID NO: 1711545 - RNA, 19 nt, Artificial Sequence
  Description of Artificial Sequence: Synthetic oligonucleotide
  Sense strand starting at position 1416 of SEQ ID NO: 1561964
gaauaagcacgugaauuag

SEQ ID NO: 1711546 - RNA, 19 nt, Artificial Sequence
  Description of Artificial Sequence: Synthetic oligonucleotide
  Antisense strand to SEQ ID NO: 1711545
cuaauucacgugcuuauuc

SEQ ID NO: 1711547 - RNA, 19 nt, Artificial Sequence
  Description of Artificial Sequence: Synthetic oligonucleotide
  Sense strand starting at position 1422 of SEQ ID NO: 1561964
gcacgugaauuaggaaauu

SEQ ID NO: 1711548 - RNA, 19 nt, Artificial Sequence
  Description of Artificial Sequence: Synthetic oligonucleotide
  Antisense strand to SEQ ID NO: 1711547
aauuuccuaauucacgugc

SEQ ID NO: 1711549 - RNA, 19 nt, Artificial Sequence
  Description of Artificial Sequence: Synthetic oligonucleotide
  Sense strand starting at position 1447 of SEQ ID NO: 1561964
cacacuuaugagugccuga

SEQ ID NO: 1711550 - RNA, 19 nt, Artificial Sequence
  Description of Artificial Sequence: Synthetic oligonucleotide
  Antisense strand to SEQ ID NO: 1711549
ucaggcacucauaagugug

SEQ ID NO: 1711551 - RNA, 19 nt, Artificial Sequence
  Description of Artificial Sequence: Synthetic oligonucleotide
  Sense strand starting at position 1450 of SEQ ID NO: 1561964
acuuaugagugccugaaga

SEQ ID NO: 1711552 - RNA, 19 nt, Artificial Sequence
  Description of Artificial Sequence: Synthetic oligonucleotide
  Antisense strand to SEQ ID NO: 1711551
ucuucaggcacucauaagu

SEQ ID NO: 1711553 - RNA, 19 nt, Artificial Sequence
  Description of Artificial Sequence: Synthetic oligonucleotide
  Sense strand starting at position 1486 of SEQ ID NO: 1561964
guaguuaauugagaauuag

SEQ ID NO: 1711554 - RNA, 19 nt, Artificial Sequence
  Description of Artificial Sequence: Synthetic oligonucleotide
  Antisense strand to SEQ ID NO: 1711553
cuaauucucaauuaacuac

SEQ ID NO: 1711555 - RNA, 19 nt, Artificial Sequence
  Description of Artificial Sequence: Synthetic oligonucleotide
  Sense strand starting at position 1542 of SEQ ID NO: 1561964
ucuaguaucuaggacccaa

SEQ ID NO: 1711556 - RNA, 19 nt, Artificial Sequence
  Description of Artificial Sequence: Synthetic oligonucleotide
  Antisense strand to SEQ ID NO: 1711555
uuggguccuagauacuaga

SEQ ID NO: 1711557 - RNA, 19 nt, Artificial Sequence
  Description of Artificial Sequence: Synthetic oligonucleotide
  Sense strand starting at position 2046 of SEQ ID NO: 1561964
gcccaaagagucugggcua

SEQ ID NO: 1711558 - RNA, 19 nt, Artificial Sequence
  Description of Artificial Sequence: Synthetic oligonucleotide
  Antisense strand to SEQ ID NO: 1711557
uagcccagacucuuugggc

SEQ ID NO: 1711559 - RNA, 19 nt, Artificial Sequence
  Description of Artificial Sequence: Synthetic oligonucleotide
  Sense strand starting at position 2069 of SEQ ID NO: 1561964
ggagguucuuccgaccaga

SEQ ID NO: 1711560 - RNA, 19 nt, Artificial Sequence
  Description of Artificial Sequence: Synthetic oligonucleotide
  Antisense strand to SEQ ID NO: 1711559
ucuggucggaagaaccucc

SEQ ID NO: 1711561 - RNA, 19 nt, Artificial Sequence
  Description of Artificial Sequence: Synthetic oligonucleotide
  Sense strand starting at position 2072 of SEQ ID NO: 1561964
gguucuuccgaccagagaa

SEQ ID NO: 1711562 - RNA, 19 nt, Artificial Sequence
  Description of Artificial Sequence: Synthetic oligonucleotide
  Antisense strand to SEQ ID NO: 1711561
uucucuggucggaagaacc

SEQ ID NO: 1711563 - RNA, 19 nt, Artificial Sequence
  Description of Artificial Sequence: Synthetic oligonucleotide
  Sense strand starting at position 2357 of SEQ ID NO: 1561964
cgagcugucuggugggaga

SEQ ID NO: 1711564 - RNA, 19 nt, Artificial Sequence
  Description of Artificial Sequence: Synthetic oligonucleotide
  Antisense strand to SEQ ID NO: 1711563
ucucccaccagacagcucg

SEQ ID NO: 1711565 - RNA, 19 nt, Artificial Sequence
  Description of Artificial Sequence: Synthetic oligonucleotide
  Sense strand starting at position 2434 of SEQ ID NO: 1561964
uagagcucuccauguggca

SEQ ID NO: 1711566 - RNA, 19 nt, Artificial Sequence
  Description of Artificial Sequence: Synthetic oligonucleotide
  Antisense strand to SEQ ID NO: 1711565
ugccacauggagagcucua

SEQ ID NO: 1711567 - RNA, 19 nt, Artificial Sequence
  Description of Artificial Sequence: Synthetic oligonucleotide
  Sense strand starting at position 2505 of SEQ ID NO: 1561964
caguccaucggguaggaaa

SEQ ID NO: 1711568 - RNA, 19 nt, Artificial Sequence
  Description of Artificial Sequence: Synthetic oligonucleotide
  Antisense strand to SEQ ID NO: 1711567
uuuccuacccgauggacug

SEQ ID NO: 1711569 - RNA, 19 nt, Artificial Sequence
  Description of Artificial Sequence: Synthetic oligonucleotide
  Sense strand starting at position 2546 of SEQ ID NO: 1561964
aucagaaaguccuaguuga

SEQ ID NO: 1711570 - RNA, 19 nt, Artificial Sequence
  Description of Artificial Sequence: Synthetic oligonucleotide
  Antisense strand to SEQ ID NO: 1711569
ucaacuaggacuuucugau

SEQ ID NO: 1711571 - RNA, 19 nt, Artificial Sequence
  Description of Artificial Sequence: Synthetic oligonucleotide
  Sense strand starting at position 3316 of SEQ ID NO: 1561964
aggagaucgcgcugcucau

SEQ ID NO: 1711572 - RNA, 19 nt, Artificial Sequence
  Description of Artificial Sequence: Synthetic oligonucleotide
  Antisense strand to SEQ ID NO: 1711571
augagcagcgcgaucuccu

SEQ ID NO: 1711573 - RNA, 19 nt, Artificial Sequence
  Description of Artificial Sequence: Synthetic oligonucleotide
  Sense strand starting at position 3627 of SEQ ID NO: 1561964
uuauaauucuccgaaggcu

SEQ ID NO: 1711574 - RNA, 19 nt, Artificial Sequence
  Description of Artificial Sequence: Synthetic oligonucleotide
  Antisense strand to SEQ ID NO: 1711573
agccuucggagaauuauaa

SEQ ID NO: 1711575 - RNA, 19 nt, Artificial Sequence
  Description of Artificial Sequence: Synthetic oligonucleotide
  Sense strand starting at position 3895 of SEQ ID NO: 1561964
ggagaaagagccuguuuca

SEQ ID NO: 1711576 - RNA, 19 nt, Artificial Sequence
  Description of Artificial Sequence: Synthetic oligonucleotide
  Antisense strand to SEQ ID NO: 1711575
ugaaacaggcucuuucucc

SEQ ID NO: 1711577 - RNA, 19 nt, Artificial Sequence
  Description of Artificial Sequence: Synthetic oligonucleotide
  Sense strand starting at position 7 of SEQ ID NO: 1561965
guggacuguugugaagauc

SEQ ID NO: 1711578 - RNA, 19 nt, Artificial Sequence
  Description of Artificial Sequence: Synthetic oligonucleotide
  Antisense strand to SEQ ID NO: 1711577
gaucuucacaacaguccac

SEQ ID NO: 1711579 - RNA, 19 nt, Artificial Sequence
  Description of Artificial Sequence: Synthetic oligonucleotide
  Sense strand starting at position 41 of SEQ ID NO: 1561965
auacgacaugcucguaaca

SEQ ID NO: 1711580 - RNA, 19 nt, Artificial Sequence
  Description of Artificial Sequence: Synthetic oligonucleotide
  Antisense strand to SEQ ID NO: 1711579
uguuacgagcaugucguau

SEQ ID NO: 1711581 - RNA, 19 nt, Artificial Sequence
  Description of Artificial Sequence: Synthetic oligonucleotide
  Sense strand starting at position 53 of SEQ ID NO: 1561965
cguaacaguccuggaacaa

SEQ ID NO: 1711582 - RNA, 19 nt, Artificial Sequence
  Description of Artificial Sequence: Synthetic oligonucleotide
  Antisense strand to SEQ ID NO: 1711581
uuguuccaggacuguuacg

SEQ ID NO: 1711583 - RNA, 19 nt, Artificial Sequence
  Description of Artificial Sequence: Synthetic oligonucleotide
  Sense strand starting at position 79 of SEQ ID NO: 1561965
uaaauauuaucgucugcug

SEQ ID NO: 1711584 - RNA, 19 nt, Artificial Sequence
  Description of Artificial Sequence: Synthetic oligonucleotide
  Antisense strand to SEQ ID NO: 1711583
cagcagacgauaauauuua

SEQ ID NO: 1711585 - RNA, 19 nt, Artificial Sequence
  Description of Artificial Sequence: Synthetic oligonucleotide
  Sense strand starting at position 141 of SEQ ID NO: 1561965
gguaaauucuaugagggag

SEQ ID NO: 1711586 - RNA, 19 nt, Artificial Sequence
  Description of Artificial Sequence: Synthetic oligonucleotide
  Antisense strand to SEQ ID NO: 1711585
cucccucauagaauuuacc

SEQ ID NO: 1711587 - RNA, 19 nt, Artificial Sequence
  Description of Artificial Sequence: Synthetic oligonucleotide
  Sense strand starting at position 304 of SEQ ID NO: 1561965
gucagagacugugguagaa

SEQ ID NO: 1711588 - RNA, 19 nt, Artificial Sequence
  Description of Artificial Sequence: Synthetic oligonucleotide
  Antisense strand to SEQ ID NO: 1711587
uucuaccacagucucugac

SEQ ID NO: 1711589 - RNA, 19 nt, Artificial Sequence
  Description of Artificial Sequence: Synthetic oligonucleotide
  Sense strand starting at position 638 of SEQ ID NO: 1561965
ucucguuugcuucucuuau

SEQ ID NO: 1711590 - RNA, 19 nt, Artificial Sequence
  Description of Artificial Sequence: Synthetic oligonucleotide
  Antisense strand to SEQ ID NO: 1711589
auaagagaagcaaacgaga

SEQ ID NO: 1711591 - RNA, 19 nt, Artificial Sequence
  Description of Artificial Sequence: Synthetic oligonucleotide
  Sense strand starting at position 640 of SEQ ID NO: 1561965
ucguuugcuucucuuauca

SEQ ID NO: 1711592 - RNA, 19 nt, Artificial Sequence
  Description of Artificial Sequence: Synthetic oligonucleotide
  Antisense strand to SEQ ID NO: 1711591
ugauaagagaagcaaacga

SEQ ID NO: 1711593 - RNA, 19 nt, Artificial Sequence
  Description of Artificial Sequence: Synthetic oligonucleotide
  Sense strand starting at position 664 of SEQ ID NO: 1561965
gugcuacauguccggauga

SEQ ID NO: 1711594 - RNA, 19 nt, Artificial Sequence
  Description of Artificial Sequence: Synthetic oligonucleotide
  Antisense strand to SEQ ID NO: 1711593
ucauccggacauguagcac

SEQ ID NO: 1711595 - RNA, 19 nt, Artificial Sequence
  Description of Artificial Sequence: Synthetic oligonucleotide
  Sense strand starting at position 666 of SEQ ID NO: 1561965
gcuacauguccggaugaag

SEQ ID NO: 1711596 - RNA, 19 nt, Artificial Sequence
  Description of Artificial Sequence: Synthetic oligonucleotide
  Antisense strand to SEQ ID NO: 1711595
cuucauccggacauguagc

SEQ ID NO: 1711597 - RNA, 19 nt, Artificial Sequence
  Description of Artificial Sequence: Synthetic oligonucleotide
  Sense strand starting at position 859 of SEQ ID NO: 1561965
acagcaggcauucgagaaa

SEQ ID NO: 1711598 - RNA, 19 nt, Artificial Sequence
  Description of Artificial Sequence: Synthetic oligonucleotide
  Antisense strand to SEQ ID NO: 1711597
uuucucgaaugccugcugu

SEQ ID NO: 1711599 - RNA, 19 nt, Artificial Sequence
  Description of Artificial Sequence: Synthetic oligonucleotide
  Sense strand starting at position 862 of SEQ ID NO: 1561965
gcaggcauucgagaaacgu

SEQ ID NO: 1711600 - RNA, 19 nt, Artificial Sequence
  Description of Artificial Sequence: Synthetic oligonucleotide
  Antisense strand to SEQ ID NO: 1711599
acguuucucgaaugccugc

SEQ ID NO: 1711601 - RNA, 19 nt, Artificial Sequence
  Description of Artificial Sequence: Synthetic oligonucleotide
  Sense strand starting at position 866 of SEQ ID NO: 1561965
gcauucgagaaacgucuau

SEQ ID NO: 1711602 - RNA, 19 nt, Artificial Sequence
  Description of Artificial Sequence: Synthetic oligonucleotide
  Antisense strand to SEQ ID NO: 1711601
auagacguuucucgaaugc

SEQ ID NO: 1711603 - RNA, 19 nt, Artificial Sequence
  Description of Artificial Sequence: Synthetic oligonucleotide
  Sense strand starting at position 870 of SEQ ID NO: 1561965
ucgagaaacgucuauccaa

SEQ ID NO: 1711604 - RNA, 19 nt, Artificial Sequence
  Description of Artificial Sequence: Synthetic oligonucleotide
  Antisense strand to SEQ ID NO: 1711603
uuggauagacguuucucga

SEQ ID NO: 1711605 - RNA, 19 nt, Artificial Sequence
  Description of Artificial Sequence: Synthetic oligonucleotide
  Sense strand starting at position 974 of SEQ ID NO: 1561965
gaggacgguucagauagaa

SEQ ID NO: 1711606 - RNA, 19 nt, Artificial Sequence
  Description of Artificial Sequence: Synthetic oligonucleotide
  Antisense strand to SEQ ID NO: 1711605
uucuaucugaaccguccuc

SEQ ID NO: 1711607 - RNA, 19 nt, Artificial Sequence
  Description of Artificial Sequence: Synthetic oligonucleotide
  Sense strand starting at position 1120 of SEQ ID NO: 1561965
gcuuauaaacuuggaaagu

SEQ ID NO: 1711608 - RNA, 19 nt, Artificial Sequence
  Description of Artificial Sequence: Synthetic oligonucleotide
  Antisense strand to SEQ ID NO: 1711607
acuuuccaaguuuauaagc

SEQ ID NO: 1711609 - RNA, 19 nt, Artificial Sequence
  Description of Artificial Sequence: Synthetic oligonucleotide
  Sense strand starting at position 1147 of SEQ ID NO: 1561965
guauucuucugaguaccaa

SEQ ID NO: 1711610 - RNA, 19 nt, Artificial Sequence
  Description of Artificial Sequence: Synthetic oligonucleotide
  Antisense strand to SEQ ID NO: 1711609
uugguacucagaagaauac

SEQ ID NO: 1711611 - RNA, 19 nt, Artificial Sequence
  Description of Artificial Sequence: Synthetic oligonucleotide
  Sense strand starting at position 1165 of SEQ ID NO: 1561965
aaauauaacuggcgaaaga

SEQ ID NO: 1711612 - RNA, 19 nt, Artificial Sequence
  Description of Artificial Sequence: Synthetic oligonucleotide
  Antisense strand to SEQ ID NO: 1711611
ucuuucgccaguuauauuu

SEQ ID NO: 1711613 - RNA, 19 nt, Artificial Sequence
  Description of Artificial Sequence: Synthetic oligonucleotide
  Sense strand starting at position 1237 of SEQ ID NO: 1561965
aaccguguguagucugcua

SEQ ID NO: 1711614 - RNA, 19 nt, Artificial Sequence
  Description of Artificial Sequence: Synthetic oligonucleotide
  Antisense strand to SEQ ID NO: 1711613
uagcagacuacacacgguu

SEQ ID NO: 1711615 - RNA, 19 nt, Artificial Sequence
  Description of Artificial Sequence: Synthetic oligonucleotide
  Sense strand starting at position 1239 of SEQ ID NO: 1561965
ccguguguagucugcuaag

SEQ ID NO: 1711616 - RNA, 19 nt, Artificial Sequence
  Description of Artificial Sequence: Synthetic oligonucleotide
  Antisense strand to SEQ ID NO: 1711615
cuuagcagacuacacacgg

SEQ ID NO: 1711617 - RNA, 19 nt, Artificial Sequence
  Description of Artificial Sequence: Synthetic oligonucleotide
  Sense strand starting at position 1245 of SEQ ID NO: 1561965
guagucugcuaagauuuau

SEQ ID NO: 1711618 - RNA, 19 nt, Artificial Sequence
  Description of Artificial Sequence: Synthetic oligonucleotide
  Antisense strand to SEQ ID NO: 1711617
auaaaucuuagcagacuac

SEQ ID NO: 1711619 - RNA, 19 nt, Artificial Sequence
  Description of Artificial Sequence: Synthetic oligonucleotide
  Sense strand starting at position 1431 of SEQ ID NO: 1561965
gcccuaaaugcgcacgaaa

SEQ ID NO: 1711620 - RNA, 19 nt, Artificial Sequence
  Description of Artificial Sequence: Synthetic oligonucleotide
  Antisense strand to SEQ ID NO: 1711619
uuucgugcgcauuuagggc

SEQ ID NO: 1711621 - RNA, 19 nt, Artificial Sequence
  Description of Artificial Sequence: Synthetic oligonucleotide
  Sense strand starting at position 1433 of SEQ ID NO: 1561965
ccuaaaugcgcacgaaauc

SEQ ID NO: 1711622 - RNA, 19 nt, Artificial Sequence
  Description of Artificial Sequence: Synthetic oligonucleotide
  Antisense strand to SEQ ID NO: 1711621
gauuucgugcgcauuuagg

SEQ ID NO: 1711623 - RNA, 19 nt, Artificial Sequence
  Description of Artificial Sequence: Synthetic oligonucleotide
  Sense strand starting at position 1652 of SEQ ID NO: 1561965
gccggaacuuuccucccaa

SEQ ID NO: 1711624 - RNA, 19 nt, Artificial Sequence
  Description of Artificial Sequence: Synthetic oligonucleotide
  Antisense strand to SEQ ID NO: 1711623
uugggaggaaaguuccggc

SEQ ID NO: 1711625 - RNA, 19 nt, Artificial Sequence
  Description of Artificial Sequence: Synthetic oligonucleotide
  Sense strand starting at position 1653 of SEQ ID NO: 1561965
ccggaacuuuccucccaaa

SEQ ID NO: 1711626 - RNA, 19 nt, Artificial Sequence
  Description of Artificial Sequence: Synthetic oligonucleotide
  Antisense strand to SEQ ID NO: 1711625
uuugggaggaaaguuccgg

SEQ ID NO: 1711627 - RNA, 19 nt, Artificial Sequence
  Description of Artificial Sequence: Synthetic oligonucleotide
  Sense strand starting at position 2103 of SEQ ID NO: 1561965
ugcuaaucccuucgcgaag

SEQ ID NO: 1711628 - RNA, 19 nt, Artificial Sequence
  Description of Artificial Sequence: Synthetic oligonucleotide
  Antisense strand to SEQ ID NO: 1711627
cuucgcgaagggauuagca

SEQ ID NO: 1711629 - RNA, 19 nt, Artificial Sequence
  Description of Artificial Sequence: Synthetic oligonucleotide
  Sense strand starting at position 2587 of SEQ ID NO: 1561965
caggguuaagcccagaagu

SEQ ID NO: 1711630 - RNA, 19 nt, Artificial Sequence
  Description of Artificial Sequence: Synthetic oligonucleotide
  Antisense strand to SEQ ID NO: 1711629
acuucugggcuuaacccug

SEQ ID NO: 1711631 - RNA, 19 nt, Artificial Sequence
  Description of Artificial Sequence: Synthetic oligonucleotide
  Sense strand starting at position 2589 of SEQ ID NO: 1561965
ggguuaagcccagaaguuc

SEQ ID NO: 1711632 - RNA, 19 nt, Artificial Sequence
  Description of Artificial Sequence: Synthetic oligonucleotide
  Antisense strand to SEQ ID NO: 1711631
gaacuucugggcuuaaccc

SEQ ID NO: 1711633 - RNA, 19 nt, Artificial Sequence
  Description of Artificial Sequence: Synthetic oligonucleotide
  Sense strand starting at position 2597 of SEQ ID NO: 1561965
cccagaaguucuggaauca

SEQ ID NO: 1711634 - RNA, 19 nt, Artificial Sequence
  Description of Artificial Sequence: Synthetic oligonucleotide
  Antisense strand to SEQ ID NO: 1711633
ugauuccagaacuucuggg

SEQ ID NO: 1711635 - RNA, 19 nt, Artificial Sequence
  Description of Artificial Sequence: Synthetic oligonucleotide
  Sense strand starting at position 2609 of SEQ ID NO: 1561965
ggaaucagaccuggagcuu

SEQ ID NO: 1711636 - RNA, 19 nt, Artificial Sequence
  Description of Artificial Sequence: Synthetic oligonucleotide
  Antisense strand to SEQ ID NO: 1711635
aagcuccaggucugauucc

SEQ ID NO: 1711637 - RNA, 19 nt, Artificial Sequence
  Description of Artificial Sequence: Synthetic oligonucleotide
  Sense strand starting at position 2670 of SEQ ID NO: 1561965
cucucugagucugugauca

SEQ ID NO: 1711638 - RNA, 19 nt, Artificial Sequence
  Description of Artificial Sequence: Synthetic oligonucleotide
  Antisense strand to SEQ ID NO: 1711637
ugaucacagacucagagag

SEQ ID NO: 1711639 - RNA, 19 nt, Artificial Sequence
  Description of Artificial Sequence: Synthetic oligonucleotide
  Sense strand starting at position 2674 of SEQ ID NO: 1561965
cugagucugugaucacuca

SEQ ID NO: 1711640 - RNA, 19 nt, Artificial Sequence
  Description of Artificial Sequence: Synthetic oligonucleotide
  Antisense strand to SEQ ID NO: 1711639
ugagugaucacagacucag

SEQ ID NO: 1711641 - RNA, 19 nt, Artificial Sequence
  Description of Artificial Sequence: Synthetic oligonucleotide
  Sense strand starting at position 2720 of SEQ ID NO: 1561965
gucaacaucucauugaagu

SEQ ID NO: 1711642 - RNA, 19 nt, Artificial Sequence
  Description of Artificial Sequence: Synthetic oligonucleotide
  Antisense strand to SEQ ID NO: 1711641
acuucaaugagauguugac

SEQ ID NO: 1711643 - RNA, 19 nt, Artificial Sequence
  Description of Artificial Sequence: Synthetic oligonucleotide
  Sense strand starting at position 2842 of SEQ ID NO: 1561965
ggcucaguccugggacuuu

SEQ ID NO: 1711644 - RNA, 19 nt, Artificial Sequence
  Description of Artificial Sequence: Synthetic oligonucleotide
  Antisense strand to SEQ ID NO: 1711643
aaagucccaggacugagcc

SEQ ID NO: 1711645 - RNA, 19 nt, Artificial Sequence
  Description of Artificial Sequence: Synthetic oligonucleotide
  Sense strand starting at position 2965 of SEQ ID NO: 1561965
gccagucuuccacaucuca

SEQ ID NO: 1711646 - RNA, 19 nt, Artificial Sequence
  Description of Artificial Sequence: Synthetic oligonucleotide
  Antisense strand to SEQ ID NO: 1711645
ugagauguggaagacuggc

SEQ ID NO: 1711647 - RNA, 19 nt, Artificial Sequence
  Description of Artificial Sequence: Synthetic oligonucleotide
  Sense strand starting at position 3078 of SEQ ID NO: 1561965
agguccuuuccuugacuuu

SEQ ID NO: 1711648 - RNA, 19 nt, Artificial Sequence
  Description of Artificial Sequence: Synthetic oligonucleotide
  Antisense strand to SEQ ID NO: 1711647
aaagucaaggaaaggaccu

SEQ ID NO: 1711649 - RNA, 19 nt, Artificial Sequence
  Description of Artificial Sequence: Synthetic oligonucleotide
  Sense strand starting at position 3173 of SEQ ID NO: 1561965
ccuugagagcucuggcaga

SEQ ID NO: 1711650 - RNA, 19 nt, Artificial Sequence
  Description of Artificial Sequence: Synthetic oligonucleotide
  Antisense strand to SEQ ID NO: 1711649
ucugccagagcucucaagg

SEQ ID NO: 1711651 - RNA, 19 nt, Artificial Sequence
  Description of Artificial Sequence: Synthetic oligonucleotide
  Sense strand starting at position 3349 of SEQ ID NO: 1561965
guggguacucucuauaaau

SEQ ID NO: 1711652 - RNA, 19 nt, Artificial Sequence
  Description of Artificial Sequence: Synthetic oligonucleotide
  Antisense strand to SEQ ID NO: 1711651
auuuauagagaguacccac

SEQ ID NO: 1711653 - RNA, 19 nt, Artificial Sequence
  Description of Artificial Sequence: Synthetic oligonucleotide
  Sense strand starting at position 3374 of SEQ ID NO: 1561965
gcaugagugagccaaugaa

SEQ ID NO: 1711654 - RNA, 19 nt, Artificial Sequence
  Description of Artificial Sequence: Synthetic oligonucleotide
  Antisense strand to SEQ ID NO: 1711653
uucauuggcucacucaugc

SEQ ID NO: 1711655 - RNA, 19 nt, Artificial Sequence
  Description of Artificial Sequence: Synthetic oligonucleotide
  Sense strand starting at position 3605 of SEQ ID NO: 1561965
caugguuaccucugaagaa

SEQ ID NO: 1711656 - RNA, 19 nt, Artificial Sequence
  Description of Artificial Sequence: Synthetic oligonucleotide
  Antisense strand to SEQ ID NO: 1711655
uucuucagagguaaccaug

SEQ ID NO: 1711657 - RNA, 19 nt, Artificial Sequence
  Description of Artificial Sequence: Synthetic oligonucleotide
  Sense strand starting at position 3 of SEQ ID NO: 1561966
uuaaguauacacugcugaa

SEQ ID NO: 1711658 - RNA, 19 nt, Artificial Sequence
  Description of Artificial Sequence: Synthetic oligonucleotide
  Antisense strand to SEQ ID NO: 1711657
uucagcaguguauacuuaa

SEQ ID NO: 1711659 - RNA, 19 nt, Artificial Sequence
  Description of Artificial Sequence: Synthetic oligonucleotide
  Sense strand starting at position 243 of SEQ ID NO: 1561966
aggugaucacccuagaugu

SEQ ID NO: 1711660 - RNA, 19 nt, Artificial Sequence
  Description of Artificial Sequence: Synthetic oligonucleotide
  Antisense strand to SEQ ID NO: 1711659
acaucuagggugaucaccu

SEQ ID NO: 1711661 - RNA, 19 nt, Artificial Sequence
  Description of Artificial Sequence: Synthetic oligonucleotide
  Sense strand starting at position 245 of SEQ ID NO: 1561966
gugaucacccuagauguua

SEQ ID NO: 1711662 - RNA, 19 nt, Artificial Sequence
  Description of Artificial Sequence: Synthetic oligonucleotide
  Antisense strand to SEQ ID NO: 1711661
uaacaucuagggugaucac

SEQ ID NO: 1711663 - RNA, 19 nt, Artificial Sequence
  Description of Artificial Sequence: Synthetic oligonucleotide
  Sense strand starting at position 361 of SEQ ID NO: 1561966
gaaugaaguucugucuaaa

SEQ ID NO: 1711664 - RNA, 19 nt, Artificial Sequence
  Description of Artificial Sequence: Synthetic oligonucleotide
  Antisense strand to SEQ ID NO: 1711663
uuuagacagaacuucauuc

SEQ ID NO: 1711665 - RNA, 19 nt, Artificial Sequence
  Description of Artificial Sequence: Synthetic oligonucleotide
  Sense strand starting at position 364 of SEQ ID NO: 1561966
ugaaguucugucuaaacca

SEQ ID NO: 1711666 - RNA, 19 nt, Artificial Sequence
  Description of Artificial Sequence: Synthetic oligonucleotide
  Antisense strand to SEQ ID NO: 1711665
ugguuuagacagaacuuca

SEQ ID NO: 1711667 - RNA, 19 nt, Artificial Sequence
  Description of Artificial Sequence: Synthetic oligonucleotide
  Sense strand starting at position 477 of SEQ ID NO: 1561966
agaagagcauguuuguaau

SEQ ID NO: 1711668 - RNA, 19 nt, Artificial Sequence
  Description of Artificial Sequence: Synthetic oligonucleotide
  Antisense strand to SEQ ID NO: 1711667
auuacaaacaugcucuucu

SEQ ID NO: 1711669 - RNA, 19 nt, Artificial Sequence
  Description of Artificial Sequence: Synthetic oligonucleotide
  Sense strand starting at position 540 of SEQ ID NO: 1561966
caaagaaagggcuguacaa

SEQ ID NO: 1711670 - RNA, 19 nt, Artificial Sequence
  Description of Artificial Sequence: Synthetic oligonucleotide
  Antisense strand to SEQ ID NO: 1711669
uuguacagcccuuucuuug

SEQ ID NO: 1711671 - RNA, 19 nt, Artificial Sequence
  Description of Artificial Sequence: Synthetic oligonucleotide
  Sense strand starting at position 603 of SEQ ID NO: 1561966
auauuaaauuugugggaga

SEQ ID NO: 1711672 - RNA, 19 nt, Artificial Sequence
  Description of Artificial Sequence: Synthetic oligonucleotide
  Antisense strand to SEQ ID NO: 1711671
ucucccacaaauuuaauau

SEQ ID NO: 1711673 - RNA, 19 nt, Artificial Sequence
  Description of Artificial Sequence: Synthetic oligonucleotide
  Sense strand starting at position 642 of SEQ ID NO: 1561966
cagugaacucgugaaguug

SEQ ID NO: 1711674 - RNA, 19 nt, Artificial Sequence
  Description of Artificial Sequence: Synthetic oligonucleotide
  Antisense strand to SEQ ID NO: 1711673
caacuucacgaguucacug

SEQ ID NO: 1711675 - RNA, 19 nt, Artificial Sequence
  Description of Artificial Sequence: Synthetic oligonucleotide
  Sense strand starting at position 648 of SEQ ID NO: 1561966
acucgugaaguugaacaau

SEQ ID NO: 1711676 - RNA, 19 nt, Artificial Sequence
  Description of Artificial Sequence: Synthetic oligonucleotide
  Antisense strand to SEQ ID NO: 1711675
auuguucaacuucacgagu

SEQ ID NO: 1711677 - RNA, 19 nt, Artificial Sequence
  Description of Artificial Sequence: Synthetic oligonucleotide
  Sense strand starting at position 729 of SEQ ID NO: 1561966
uuaacuuugccucggauuu

SEQ ID NO: 1711678 - RNA, 19 nt, Artificial Sequence
  Description of Artificial Sequence: Synthetic oligonucleotide
  Antisense strand to SEQ ID NO: 1711677
aaauccgaggcaaaguuaa

SEQ ID NO: 1711679 - RNA, 19 nt, Artificial Sequence
  Description of Artificial Sequence: Synthetic oligonucleotide
  Sense strand starting at position 766 of SEQ ID NO: 1561966
uuacaaaguucuucuaagu

SEQ ID NO: 1711680 - RNA, 19 nt, Artificial Sequence
  Description of Artificial Sequence: Synthetic oligonucleotide
  Antisense strand to SEQ ID NO: 1711679
acuuagaagaacuuuguaa

SEQ ID NO: 1711681 - RNA, 19 nt, Artificial Sequence
  Description of Artificial Sequence: Synthetic oligonucleotide
  Sense strand starting at position 950 of SEQ ID NO: 1561966
cggguaagcguugucauca

SEQ ID NO: 1711682 - RNA, 19 nt, Artificial Sequence
  Description of Artificial Sequence: Synthetic oligonucleotide
  Antisense strand to SEQ ID NO: 1711681
ugaugacaacgcuuacccg

SEQ ID NO: 1711683 - RNA, 19 nt, Artificial Sequence
  Description of Artificial Sequence: Synthetic oligonucleotide
  Sense strand starting at position 973 of SEQ ID NO: 1561966
auuaaagauuucgaaacuc

SEQ ID NO: 1711684 - RNA, 19 nt, Artificial Sequence
  Description of Artificial Sequence: Synthetic oligonucleotide
  Antisense strand to SEQ ID NO: 1711683
gaguuucgaaaucuuuaau

SEQ ID NO: 1711685 - RNA, 19 nt, Artificial Sequence
  Description of Artificial Sequence: Synthetic oligonucleotide
  Sense strand starting at position 2163 of SEQ ID NO: 1561966
cucuguuaggugagugagu

SEQ ID NO: 1711686 - RNA, 19 nt, Artificial Sequence
  Description of Artificial Sequence: Synthetic oligonucleotide
  Antisense strand to SEQ ID NO: 1711685
acucacucaccuaacagag

SEQ ID NO: 1711687 - RNA, 19 nt, Artificial Sequence
  Description of Artificial Sequence: Synthetic oligonucleotide
  Sense strand starting at position 2579 of SEQ ID NO: 1561966
ccaucuaguaagugaggaa

SEQ ID NO: 1711688 - RNA, 19 nt, Artificial Sequence
  Description of Artificial Sequence: Synthetic oligonucleotide
  Antisense strand to SEQ ID NO: 1711687
uuccucacuuacuagaugg

SEQ ID NO: 1711689 - RNA, 19 nt, Artificial Sequence
  Description of Artificial Sequence: Synthetic oligonucleotide
  Sense strand starting at position 2595 of SEQ ID NO: 1561966
gaaguugaaccuuaucggu

SEQ ID NO: 1711690 - RNA, 19 nt, Artificial Sequence
  Description of Artificial Sequence: Synthetic oligonucleotide
  Antisense strand to SEQ ID NO: 1711689
accgauaagguucaacuuc

SEQ ID NO: 1711691 - RNA, 19 nt, Artificial Sequence
  Description of Artificial Sequence: Synthetic oligonucleotide
  Sense strand starting at position 2599 of SEQ ID NO: 1561966
uugaaccuuaucggugaau

SEQ ID NO: 1711692 - RNA, 19 nt, Artificial Sequence
  Description of Artificial Sequence: Synthetic oligonucleotide
  Antisense strand to SEQ ID NO: 1711691
auucaccgauaagguucaa

SEQ ID NO: 1711693 - RNA, 19 nt, Artificial Sequence
  Description of Artificial Sequence: Synthetic oligonucleotide
  Sense strand starting at position 2600 of SEQ ID NO: 1561966
ugaaccuuaucggugaauc

SEQ ID NO: 1711694 - RNA, 19 nt, Artificial Sequence
  Description of Artificial Sequence: Synthetic oligonucleotide
  Antisense strand to SEQ ID NO: 1711693
gauucaccgauaagguuca

SEQ ID NO: 1711695 - RNA, 19 nt, Artificial Sequence
  Description of Artificial Sequence: Synthetic oligonucleotide
  Sense strand starting at position 2601 of SEQ ID NO: 1561966
gaaccuuaucggugaaucu

SEQ ID NO: 1711696 - RNA, 19 nt, Artificial Sequence
  Description of Artificial Sequence: Synthetic oligonucleotide
  Antisense strand to SEQ ID NO: 1711695
agauucaccgauaagguuc

SEQ ID NO: 1711697 - RNA, 19 nt, Artificial Sequence
  Description of Artificial Sequence: Synthetic oligonucleotide
  Sense strand starting at position 2632 of SEQ ID NO: 1561966
cguagacuccuuugagaau

SEQ ID NO: 1711698 - RNA, 19 nt, Artificial Sequence
  Description of Artificial Sequence: Synthetic oligonucleotide
  Antisense strand to SEQ ID NO: 1711697
auucucaaaggagucuacg

SEQ ID NO: 1711699 - RNA, 19 nt, Artificial Sequence
  Description of Artificial Sequence: Synthetic oligonucleotide
  Sense strand starting at position 2650 of SEQ ID NO: 1561966
ucuggugagaacuguagau

SEQ ID NO: 1711700 - RNA, 19 nt, Artificial Sequence
  Description of Artificial Sequence: Synthetic oligonucleotide
  Antisense strand to SEQ ID NO: 1711699
aucuacaguucucaccaga

SEQ ID NO: 1711701 - RNA, 19 nt, Artificial Sequence
  Description of Artificial Sequence: Synthetic oligonucleotide
  Sense strand starting at position 2798 of SEQ ID NO: 1561966
aaaggugaucugugcaaca

SEQ ID NO: 1711702 - RNA, 19 nt, Artificial Sequence
  Description of Artificial Sequence: Synthetic oligonucleotide
  Antisense strand to SEQ ID NO: 1711701
uguugcacagaucaccuuu

SEQ ID NO: 1711703 - RNA, 19 nt, Artificial Sequence
  Description of Artificial Sequence: Synthetic oligonucleotide
  Sense strand starting at position 3033 of SEQ ID NO: 1561966
cuuaguuguagucaacuag

SEQ ID NO: 1711704 - RNA, 19 nt, Artificial Sequence
  Description of Artificial Sequence: Synthetic oligonucleotide
  Antisense strand to SEQ ID NO: 1711703
cuaguugacuacaacuaag

SEQ ID NO: 1711705 - RNA, 19 nt, Artificial Sequence
  Description of Artificial Sequence: Synthetic oligonucleotide
  Sense strand starting at position 3037 of SEQ ID NO: 1561966
guuguagucaacuagauag

SEQ ID NO: 1711706 - RNA, 19 nt, Artificial Sequence
  Description of Artificial Sequence: Synthetic oligonucleotide
  Antisense strand to SEQ ID NO: 1711705
cuaucuaguugacuacaac

SEQ ID NO: 1711707 - RNA, 19 nt, Artificial Sequence
  Description of Artificial Sequence: Synthetic oligonucleotide
  Sense strand starting at position 3114 of SEQ ID NO: 1561966
ggccuaugucuguaaauga

SEQ ID NO: 1711708 - RNA, 19 nt, Artificial Sequence
  Description of Artificial Sequence: Synthetic oligonucleotide
  Antisense strand to SEQ ID NO: 1711707
ucauuuacagacauaggcc

SEQ ID NO: 1711709 - RNA, 19 nt, Artificial Sequence
  Description of Artificial Sequence: Synthetic oligonucleotide
  Sense strand starting at position 3156 of SEQ ID NO: 1561966
guuguuaaacaugaagcau

SEQ ID NO: 1711710 - RNA, 19 nt, Artificial Sequence
  Description of Artificial Sequence: Synthetic oligonucleotide
  Antisense strand to SEQ ID NO: 1711709
augcuucauguuuaacaac

SEQ ID NO: 1711711 - RNA, 19 nt, Artificial Sequence
  Description of Artificial Sequence: Synthetic oligonucleotide
  Sense strand starting at position 3175 of SEQ ID NO: 1561966
gauguuggcccuggauaaa

SEQ ID NO: 1711712 - RNA, 19 nt, Artificial Sequence
  Description of Artificial Sequence: Synthetic oligonucleotide
  Antisense strand to SEQ ID NO: 1711711
uuuauccagggccaacauc

SEQ ID NO: 1711713 - RNA, 19 nt, Artificial Sequence
  Description of Artificial Sequence: Synthetic oligonucleotide
  Sense strand starting at position 3268 of SEQ ID NO: 1561966
uaaugaugcuaguuagaua

SEQ ID NO: 1711714 - RNA, 19 nt, Artificial Sequence
  Description of Artificial Sequence: Synthetic oligonucleotide
  Antisense strand to SEQ ID NO: 1711713
uaucuaacuagcaucauua

SEQ ID NO: 1711715 - RNA, 19 nt, Artificial Sequence
  Description of Artificial Sequence: Synthetic oligonucleotide
  Sense strand starting at position 3279 of SEQ ID NO: 1561966
guuagauagcauuagauua

SEQ ID NO: 1711716 - RNA, 19 nt, Artificial Sequence
  Description of Artificial Sequence: Synthetic oligonucleotide
  Antisense strand to SEQ ID NO: 1711715
uaaucuaaugcuaucuaac

SEQ ID NO: 1711717 - RNA, 19 nt, Artificial Sequence
  Description of Artificial Sequence: Synthetic oligonucleotide
  Sense strand starting at position 3287 of SEQ ID NO: 1561966
gcauuagauuauguuagag

SEQ ID NO: 1711718 - RNA, 19 nt, Artificial Sequence
  Description of Artificial Sequence: Synthetic oligonucleotide
  Antisense strand to SEQ ID NO: 1711717
cucuaacauaaucuaaugc

SEQ ID NO: 1711719 - RNA, 19 nt, Artificial Sequence
  Description of Artificial Sequence: Synthetic oligonucleotide
  Sense strand starting at position 3378 of SEQ ID NO: 1561966
ucaacaucucuuggacaag

SEQ ID NO: 1711720 - RNA, 19 nt, Artificial Sequence
  Description of Artificial Sequence: Synthetic oligonucleotide
  Antisense strand to SEQ ID NO: 1711719
cuuguccaagagauguuga

SEQ ID NO: 1711721 - RNA, 19 nt, Artificial Sequence
  Description of Artificial Sequence: Synthetic oligonucleotide
  Sense strand starting at position 3509 of SEQ ID NO: 1561966
cucauauauccuugagaag

SEQ ID NO: 1711722 - RNA, 19 nt, Artificial Sequence
  Description of Artificial Sequence: Synthetic oligonucleotide
  Antisense strand to SEQ ID NO: 1711721
cuucucaaggauauaugag

SEQ ID NO: 1711723 - RNA, 19 nt, Artificial Sequence
  Description of Artificial Sequence: Synthetic oligonucleotide
  Sense strand starting at position 3845 of SEQ ID NO: 1561966
gaaagaauugucuggaucg

SEQ ID NO: 1711724 - RNA, 19 nt, Artificial Sequence
  Description of Artificial Sequence: Synthetic oligonucleotide
  Antisense strand to SEQ ID NO: 1711723
cgauccagacaauucuuuc

SEQ ID NO: 1711725 - RNA, 19 nt, Artificial Sequence
  Description of Artificial Sequence: Synthetic oligonucleotide
  Sense strand starting at position 3847 of SEQ ID NO: 1561966
aagaauugucuggaucgug

SEQ ID NO: 1711726 - RNA, 19 nt, Artificial Sequence
  Description of Artificial Sequence: Synthetic oligonucleotide
  Antisense strand to SEQ ID NO: 1711725
cacgauccagacaauucuu

SEQ ID NO: 1711727 - RNA, 19 nt, Artificial Sequence
  Description of Artificial Sequence: Synthetic oligonucleotide
  Sense strand starting at position 3855 of SEQ ID NO: 1561966
ucuggaucgugauugaauu

SEQ ID NO: 1711728 - RNA, 19 nt, Artificial Sequence
  Description of Artificial Sequence: Synthetic oligonucleotide
  Antisense strand to SEQ ID NO: 1711727
aauucaaucacgauccaga

SEQ ID NO: 1711729 - RNA, 19 nt, Artificial Sequence
  Description of Artificial Sequence: Synthetic oligonucleotide
  Sense strand starting at position 3866 of SEQ ID NO: 1561966
auugaauucccagggcuua

SEQ ID NO: 1711730 - RNA, 19 nt, Artificial Sequence
  Description of Artificial Sequence: Synthetic oligonucleotide
  Antisense strand to SEQ ID NO: 1711729
uaagcccugggaauucaau

SEQ ID NO: 1711731 - RNA, 19 nt, Artificial Sequence
  Description of Artificial Sequence: Synthetic oligonucleotide
  Sense strand starting at position 3897 of SEQ ID NO: 1561966
gggauuaguagaugcucaa

SEQ ID NO: 1711732 - RNA, 19 nt, Artificial Sequence
  Description of Artificial Sequence: Synthetic oligonucleotide
  Antisense strand to SEQ ID NO: 1711731
uugagcaucuacuaauccc

SEQ ID NO: 1711733 - RNA, 19 nt, Artificial Sequence
  Description of Artificial Sequence: Synthetic oligonucleotide
  Sense strand starting at position 3900 of SEQ ID NO: 1561966
auuaguagaugcucaauac

SEQ ID NO: 1711734 - RNA, 19 nt, Artificial Sequence
  Description of Artificial Sequence: Synthetic oligonucleotide
  Antisense strand to SEQ ID NO: 1711733
guauugagcaucuacuaau

SEQ ID NO: 1711735 - RNA, 19 nt, Artificial Sequence
  Description of Artificial Sequence: Synthetic oligonucleotide
  Sense strand starting at position 3904 of SEQ ID NO: 1561966
guagaugcucaauacaguu

SEQ ID NO: 1711736 - RNA, 19 nt, Artificial Sequence
  Description of Artificial Sequence: Synthetic oligonucleotide
  Antisense strand to SEQ ID NO: 1711735
aacuguauugagcaucuac

SEQ ID NO: 1711737 - RNA, 19 nt, Artificial Sequence
  Description of Artificial Sequence: Synthetic oligonucleotide
  Sense strand starting at position 149 of SEQ ID NO: 1561967
agagaaaguuuacucaucu

SEQ ID NO: 1711738 - RNA, 19 nt, Artificial Sequence
  Description of Artificial Sequence: Synthetic oligonucleotide
  Antisense strand to SEQ ID NO: 1711737
agaugaguaaacuuucucu

SEQ ID NO: 1711739 - RNA, 19 nt, Artificial Sequence
  Description of Artificial Sequence: Synthetic oligonucleotide
  Sense strand starting at position 173 of SEQ ID NO: 1561967
cuuugacaguaguuauaaa

SEQ ID NO: 1711740 - RNA, 19 nt, Artificial Sequence
  Description of Artificial Sequence: Synthetic oligonucleotide
  Antisense strand to SEQ ID NO: 1711739
uuuauaacuacugucaaag

SEQ ID NO: 1711741 - RNA, 19 nt, Artificial Sequence
  Description of Artificial Sequence: Synthetic oligonucleotide
  Sense strand starting at position 241 of SEQ ID NO: 1561967
ggcuuuguucuauacaacu

SEQ ID NO: 1711742 - RNA, 19 nt, Artificial Sequence
  Description of Artificial Sequence: Synthetic oligonucleotide
  Antisense strand to SEQ ID NO: 1711741
aguuguauagaacaaagcc

SEQ ID NO: 1711743 - RNA, 19 nt, Artificial Sequence
  Description of Artificial Sequence: Synthetic oligonucleotide
  Sense strand starting at position 305 of SEQ ID NO: 1561967
agaucugaguccuugucua

SEQ ID NO: 1711744 - RNA, 19 nt, Artificial Sequence
  Description of Artificial Sequence: Synthetic oligonucleotide
  Antisense strand to SEQ ID NO: 1711743
uagacaaggacucagaucu

SEQ ID NO: 1711745 - RNA, 19 nt, Artificial Sequence
  Description of Artificial Sequence: Synthetic oligonucleotide
  Sense strand starting at position 537 of SEQ ID NO: 1561967
ugagaaucauagcugccaa

SEQ ID NO: 1711746 - RNA, 19 nt, Artificial Sequence
  Description of Artificial Sequence: Synthetic oligonucleotide
  Antisense strand to SEQ ID NO: 1711745
uuggcagcuaugauucuca

SEQ ID NO: 1711747 - RNA, 19 nt, Artificial Sequence
  Description of Artificial Sequence: Synthetic oligonucleotide
  Sense strand starting at position 619 of SEQ ID NO: 1561967
uaaguuaacccgcaggaau

SEQ ID NO: 1711748 - RNA, 19 nt, Artificial Sequence
  Description of Artificial Sequence: Synthetic oligonucleotide
  Antisense strand to SEQ ID NO: 1711747
auuccugcggguuaacuua

SEQ ID NO: 1711749 - RNA, 19 nt, Artificial Sequence
  Description of Artificial Sequence: Synthetic oligonucleotide
  Sense strand starting at position 630 of SEQ ID NO: 1561967
gcaggaauugugcaucuac

SEQ ID NO: 1711750 - RNA, 19 nt, Artificial Sequence
  Description of Artificial Sequence: Synthetic oligonucleotide
  Antisense strand to SEQ ID NO: 1711749
guagaugcacaauuccugc

SEQ ID NO: 1711751 - RNA, 19 nt, Artificial Sequence
  Description of Artificial Sequence: Synthetic oligonucleotide
  Sense strand starting at position 662 of SEQ ID NO: 1561967
agucuuauuucgcuacuuu

SEQ ID NO: 1711752 - RNA, 19 nt, Artificial Sequence
  Description of Artificial Sequence: Synthetic oligonucleotide
  Antisense strand to SEQ ID NO: 1711751
aaaguagcgaaauaagacu

SEQ ID NO: 1711753 - RNA, 19 nt, Artificial Sequence
  Description of Artificial Sequence: Synthetic oligonucleotide
  Sense strand starting at position 663 of SEQ ID NO: 1561967
gucuuauuucgcuacuuua

SEQ ID NO: 1711754 - RNA, 19 nt, Artificial Sequence
  Description of Artificial Sequence: Synthetic oligonucleotide
  Antisense strand to SEQ ID NO: 1711753
uaaaguagcgaaauaagac

SEQ ID NO: 1711755 - RNA, 19 nt, Artificial Sequence
  Description of Artificial Sequence: Synthetic oligonucleotide
  Sense strand starting at position 833 of SEQ ID NO: 1561967
agacuuaaauggcuuuaaa

SEQ ID NO: 1711756 - RNA, 19 nt, Artificial Sequence
  Description of Artificial Sequence: Synthetic oligonucleotide
  Antisense strand to SEQ ID NO: 1711755
uuuaaagccauuuaagucu

SEQ ID NO: 1711757 - RNA, 19 nt, Artificial Sequence
  Description of Artificial Sequence: Synthetic oligonucleotide
  Sense strand starting at position 877 of SEQ ID NO: 1561967
uaccuuuaggguugcagau

SEQ ID NO: 1711758 - RNA, 19 nt, Artificial Sequence
  Description of Artificial Sequence: Synthetic oligonucleotide
  Antisense strand to SEQ ID NO: 1711757
aucugcaacccuaaaggua

SEQ ID NO: 1711759 - RNA, 19 nt, Artificial Sequence
  Description of Artificial Sequence: Synthetic oligonucleotide
  Sense strand starting at position 977 of SEQ ID NO: 1561967
aauuaauuagggugcaaag

SEQ ID NO: 1711760 - RNA, 19 nt, Artificial Sequence
  Description of Artificial Sequence: Synthetic oligonucleotide
  Antisense strand to SEQ ID NO: 1711759
cuuugcacccuaauuaauu

SEQ ID NO: 1711761 - RNA, 19 nt, Artificial Sequence
  Description of Artificial Sequence: Synthetic oligonucleotide
  Sense strand starting at position 979 of SEQ ID NO: 1561967
uuaauuagggugcaaaguu

SEQ ID NO: 1711762 - RNA, 19 nt, Artificial Sequence
  Description of Artificial Sequence: Synthetic oligonucleotide
  Antisense strand to SEQ ID NO: 1711761
aacuuugcacccuaauuaa

SEQ ID NO: 1711763 - RNA, 19 nt, Artificial Sequence
  Description of Artificial Sequence: Synthetic oligonucleotide
  Sense strand starting at position 1049 of SEQ ID NO: 1561967
cuuggcaaaucuucucaga

SEQ ID NO: 1711764 - RNA, 19 nt, Artificial Sequence
  Description of Artificial Sequence: Synthetic oligonucleotide
  Antisense strand to SEQ ID NO: 1711763
ucugagaagauuugccaag

SEQ ID NO: 1711765 - RNA, 19 nt, Artificial Sequence
  Description of Artificial Sequence: Synthetic oligonucleotide
  Sense strand starting at position 1166 of SEQ ID NO: 1561967
uuacgaaauugaucuuucu

SEQ ID NO: 1711766 - RNA, 19 nt, Artificial Sequence
  Description of Artificial Sequence: Synthetic oligonucleotide
  Antisense strand to SEQ ID NO: 1711765
agaaagaucaauuucguaa

SEQ ID NO: 1711767 - RNA, 19 nt, Artificial Sequence
  Description of Artificial Sequence: Synthetic oligonucleotide
  Sense strand starting at position 1169 of SEQ ID NO: 1561967
cgaaauugaucuuucuuuc

SEQ ID NO: 1711768 - RNA, 19 nt, Artificial Sequence
  Description of Artificial Sequence: Synthetic oligonucleotide
  Antisense strand to SEQ ID NO: 1711767
gaaagaaagaucaauuucg

SEQ ID NO: 1711769 - RNA, 19 nt, Artificial Sequence
  Description of Artificial Sequence: Synthetic oligonucleotide
  Sense strand starting at position 1280 of SEQ ID NO: 1561967
gguugaagguagguaauca

SEQ ID NO: 1711770 - RNA, 19 nt, Artificial Sequence
  Description of Artificial Sequence: Synthetic oligonucleotide
  Antisense strand to SEQ ID NO: 1711769
ugauuaccuaccuucaacc

SEQ ID NO: 1711771 - RNA, 19 nt, Artificial Sequence
  Description of Artificial Sequence: Synthetic oligonucleotide
  Sense strand starting at position 1281 of SEQ ID NO: 1561967
guugaagguagguaaucaa

SEQ ID NO: 1711772 - RNA, 19 nt, Artificial Sequence
  Description of Artificial Sequence: Synthetic oligonucleotide
  Antisense strand to SEQ ID NO: 1711771
uugauuaccuaccuucaac

SEQ ID NO: 1711773 - RNA, 19 nt, Artificial Sequence
  Description of Artificial Sequence: Synthetic oligonucleotide
  Sense strand starting at position 1305 of SEQ ID NO: 1561967
gguuaagagcaauauucgu

SEQ ID NO: 1711774 - RNA, 19 nt, Artificial Sequence
  Description of Artificial Sequence: Synthetic oligonucleotide
  Antisense strand to SEQ ID NO: 1711773
acgaauauugcucuuaacc

SEQ ID NO: 1711775 - RNA, 19 nt, Artificial Sequence
  Description of Artificial Sequence: Synthetic oligonucleotide
  Sense strand starting at position 1310 of SEQ ID NO: 1561967
agagcaauauucgucaaua

SEQ ID NO: 1711776 - RNA, 19 nt, Artificial Sequence
  Description of Artificial Sequence: Synthetic oligonucleotide
  Antisense strand to SEQ ID NO: 1711775
uauugacgaauauugcucu

SEQ ID NO: 1711777 - RNA, 19 nt, Artificial Sequence
  Description of Artificial Sequence: Synthetic oligonucleotide
  Sense strand starting at position 1311 of SEQ ID NO: 1561967
gagcaauauucgucaauag

SEQ ID NO: 1711778 - RNA, 19 nt, Artificial Sequence
  Description of Artificial Sequence: Synthetic oligonucleotide
  Antisense strand to SEQ ID NO: 1711777
cuauugacgaauauugcuc

SEQ ID NO: 1711779 - RNA, 19 nt, Artificial Sequence
  Description of Artificial Sequence: Synthetic oligonucleotide
  Sense strand starting at position 1315 of SEQ ID NO: 1561967
aauauucgucaauaggugu

SEQ ID NO: 1711780 - RNA, 19 nt, Artificial Sequence
  Description of Artificial Sequence: Synthetic oligonucleotide
  Antisense strand to SEQ ID NO: 1711779
acaccuauugacgaauauu

SEQ ID NO: 1711781 - RNA, 19 nt, Artificial Sequence
  Description of Artificial Sequence: Synthetic oligonucleotide
  Sense strand starting at position 1322 of SEQ ID NO: 1561967
gucaauagguguuuaaauu

SEQ ID NO: 1711782 - RNA, 19 nt, Artificial Sequence
  Description of Artificial Sequence: Synthetic oligonucleotide
  Antisense strand to SEQ ID NO: 1711781
aauuuaaacaccuauugac

SEQ ID NO: 1711783 - RNA, 19 nt, Artificial Sequence
  Description of Artificial Sequence: Synthetic oligonucleotide
  Sense strand starting at position 1602 of SEQ ID NO: 1561967
auagcuggugucuauccaa

SEQ ID NO: 1711784 - RNA, 19 nt, Artificial Sequence
  Description of Artificial Sequence: Synthetic oligonucleotide
  Antisense strand to SEQ ID NO: 1711783
uuggauagacaccagcuau

SEQ ID NO: 1711785 - RNA, 19 nt, Artificial Sequence
  Description of Artificial Sequence: Synthetic oligonucleotide
  Sense strand starting at position 1669 of SEQ ID NO: 1561967
gugaauucuccguaguaag

SEQ ID NO: 1711786 - RNA, 19 nt, Artificial Sequence
  Description of Artificial Sequence: Synthetic oligonucleotide
  Antisense strand to SEQ ID NO: 1711785
cuuacuacggagaauucac

SEQ ID NO: 1711787 - RNA, 19 nt, Artificial Sequence
  Description of Artificial Sequence: Synthetic oligonucleotide
  Sense strand starting at position 1770 of SEQ ID NO: 1561967
augcuauuaguggauauau

SEQ ID NO: 1711788 - RNA, 19 nt, Artificial Sequence
  Description of Artificial Sequence: Synthetic oligonucleotide
  Antisense strand to SEQ ID NO: 1711787
auauauccacuaauagcau

SEQ ID NO: 1711789 - RNA, 19 nt, Artificial Sequence
  Description of Artificial Sequence: Synthetic oligonucleotide
  Sense strand starting at position 2029 of SEQ ID NO: 1561967
aagccagagcucuggguaa

SEQ ID NO: 1711790 - RNA, 19 nt, Artificial Sequence
  Description of Artificial Sequence: Synthetic oligonucleotide
  Antisense strand to SEQ ID NO: 1711789
uuacccagagcucuggcuu

SEQ ID NO: 1711791 - RNA, 19 nt, Artificial Sequence
  Description of Artificial Sequence: Synthetic oligonucleotide
  Sense strand starting at position 2042 of SEQ ID NO: 1561967
ggguaaauacccuggccaa

SEQ ID NO: 1711792 - RNA, 19 nt, Artificial Sequence
  Description of Artificial Sequence: Synthetic oligonucleotide
  Antisense strand to SEQ ID NO: 1711791
uuggccaggguauuuaccc

SEQ ID NO: 1711793 - RNA, 19 nt, Artificial Sequence
  Description of Artificial Sequence: Synthetic oligonucleotide
  Sense strand starting at position 2043 of SEQ ID NO: 1561967
gguaaauacccuggccaau

SEQ ID NO: 1711794 - RNA, 19 nt, Artificial Sequence
  Description of Artificial Sequence: Synthetic oligonucleotide
  Antisense strand to SEQ ID NO: 1711793
auuggccaggguauuuacc

SEQ ID NO: 1711795 - RNA, 19 nt, Artificial Sequence
  Description of Artificial Sequence: Synthetic oligonucleotide
  Sense strand starting at position 2195 of SEQ ID NO: 1561967
uguuaaagccgcuuuagca

SEQ ID NO: 1711796 - RNA, 19 nt, Artificial Sequence
  Description of Artificial Sequence: Synthetic oligonucleotide
  Antisense strand to SEQ ID NO: 1711795
ugcuaaagcggcuuuaaca

SEQ ID NO: 1711797 - RNA, 19 nt, Artificial Sequence
  Description of Artificial Sequence: Synthetic oligonucleotide
  Sense strand starting at position 2319 of SEQ ID NO: 1561967
agacauacuaguuguagga

SEQ ID NO: 1711798 - RNA, 19 nt, Artificial Sequence
  Description of Artificial Sequence: Synthetic oligonucleotide
  Antisense strand to SEQ ID NO: 1711797
uccuacaacuaguaugucu

SEQ ID NO: 1711799 - RNA, 19 nt, Artificial Sequence
  Description of Artificial Sequence: Synthetic oligonucleotide
  Sense strand starting at position 2349 of SEQ ID NO: 1561967
augugagaucuauagcaca

SEQ ID NO: 1711800 - RNA, 19 nt, Artificial Sequence
  Description of Artificial Sequence: Synthetic oligonucleotide
  Antisense strand to SEQ ID NO: 1711799
ugugcuauagaucucacau

SEQ ID NO: 1711801 - RNA, 19 nt, Artificial Sequence
  Description of Artificial Sequence: Synthetic oligonucleotide
  Sense strand starting at position 2404 of SEQ ID NO: 1561967
ggauuuacguaauagauaa

SEQ ID NO: 1711802 - RNA, 19 nt, Artificial Sequence
  Description of Artificial Sequence: Synthetic oligonucleotide
  Antisense strand to SEQ ID NO: 1711801
uuaucuauuacguaaaucc

SEQ ID NO: 1711803 - RNA, 19 nt, Artificial Sequence
  Description of Artificial Sequence: Synthetic oligonucleotide
  Sense strand starting at position 2617 of SEQ ID NO: 1561967
gucucaaaugcucaagggu

SEQ ID NO: 1711804 - RNA, 19 nt, Artificial Sequence
  Description of Artificial Sequence: Synthetic oligonucleotide
  Antisense strand to SEQ ID NO: 1711803
acccuugagcauuugagac

SEQ ID NO: 1711805 - RNA, 19 nt, Artificial Sequence
  Description of Artificial Sequence: Synthetic oligonucleotide
  Sense strand starting at position 2666 of SEQ ID NO: 1561967
aaguuuauguuaccuggaa

SEQ ID NO: 1711806 - RNA, 19 nt, Artificial Sequence
  Description of Artificial Sequence: Synthetic oligonucleotide
  Antisense strand to SEQ ID NO: 1711805
uuccagguaacauaaacuu

SEQ ID NO: 1711807 - RNA, 19 nt, Artificial Sequence
  Description of Artificial Sequence: Synthetic oligonucleotide
  Sense strand starting at position 2667 of SEQ ID NO: 1561967
aguuuauguuaccuggaac

SEQ ID NO: 1711808 - RNA, 19 nt, Artificial Sequence
  Description of Artificial Sequence: Synthetic oligonucleotide
  Antisense strand to SEQ ID NO: 1711807
guuccagguaacauaaacu

SEQ ID NO: 1711809 - RNA, 19 nt, Artificial Sequence
  Description of Artificial Sequence: Synthetic oligonucleotide
  Sense strand starting at position 2807 of SEQ ID NO: 1561967
uauaguucugggcacuaaa

SEQ ID NO: 1711810 - RNA, 19 nt, Artificial Sequence
  Description of Artificial Sequence: Synthetic oligonucleotide
  Antisense strand to SEQ ID NO: 1711809
uuuagugcccagaacuaua

SEQ ID NO: 1711811 - RNA, 19 nt, Artificial Sequence
  Description of Artificial Sequence: Synthetic oligonucleotide
  Sense strand starting at position 2810 of SEQ ID NO: 1561967
aguucugggcacuaaagau

SEQ ID NO: 1711812 - RNA, 19 nt, Artificial Sequence
  Description of Artificial Sequence: Synthetic oligonucleotide
  Antisense strand to SEQ ID NO: 1711811
aucuuuagugcccagaacu

SEQ ID NO: 1711813 - RNA, 19 nt, Artificial Sequence
  Description of Artificial Sequence: Synthetic oligonucleotide
  Sense strand starting at position 2929 of SEQ ID NO: 1561967
gcaucucucccauaaggug

SEQ ID NO: 1711814 - RNA, 19 nt, Artificial Sequence
  Description of Artificial Sequence: Synthetic oligonucleotide
  Antisense strand to SEQ ID NO: 1711813
caccuuaugggagagaugc

SEQ ID NO: 1711815 - RNA, 19 nt, Artificial Sequence
  Description of Artificial Sequence: Synthetic oligonucleotide
  Sense strand starting at position 3347 of SEQ ID NO: 1561967
gcugguccugauuggaaag

SEQ ID NO: 1711816 - RNA, 19 nt, Artificial Sequence
  Description of Artificial Sequence: Synthetic oligonucleotide
  Antisense strand to SEQ ID NO: 1711815
cuuuccaaucaggaccagc

SEQ ID NO: 1711817 - RNA, 19 nt, Artificial Sequence
  Description of Artificial Sequence: Synthetic oligonucleotide
  Sense strand starting at position 42 of SEQ ID NO: 1561968
cauggaaguucugcccgaa

SEQ ID NO: 1711818 - RNA, 19 nt, Artificial Sequence
  Description of Artificial Sequence: Synthetic oligonucleotide
  Antisense strand to SEQ ID NO: 1711817
uucgggcagaacuuccaug

SEQ ID NO: 1711819 - RNA, 19 nt, Artificial Sequence
  Description of Artificial Sequence: Synthetic oligonucleotide
  Sense strand starting at position 45 of SEQ ID NO: 1561968
ggaaguucugcccgaaagc

SEQ ID NO: 1711820 - RNA, 19 nt, Artificial Sequence
  Description of Artificial Sequence: Synthetic oligonucleotide
  Antisense strand to SEQ ID NO: 1711819
gcuuucgggcagaacuucc

SEQ ID NO: 1711821 - RNA, 19 nt, Artificial Sequence
  Description of Artificial Sequence: Synthetic oligonucleotide
  Sense strand starting at position 105 of SEQ ID NO: 1561968
gaccauagaugggaggaaa

SEQ ID NO: 1711822 - RNA, 19 nt, Artificial Sequence
  Description of Artificial Sequence: Synthetic oligonucleotide
  Antisense strand to SEQ ID NO: 1711821
uuuccucccaucuaugguc

SEQ ID NO: 1711823 - RNA, 19 nt, Artificial Sequence
  Description of Artificial Sequence: Synthetic oligonucleotide
  Sense strand starting at position 149 of SEQ ID NO: 1561968
gcucgagaaaucuguaguu

SEQ ID NO: 1711824 - RNA, 19 nt, Artificial Sequence
  Description of Artificial Sequence: Synthetic oligonucleotide
  Antisense strand to SEQ ID NO: 1711823
aacuacagauuucucgagc

SEQ ID NO: 1711825 - RNA, 19 nt, Artificial Sequence
  Description of Artificial Sequence: Synthetic oligonucleotide
  Sense strand starting at position 151 of SEQ ID NO: 1561968
ucgagaaaucuguaguuga

SEQ ID NO: 1711826 - RNA, 19 nt, Artificial Sequence
  Description of Artificial Sequence: Synthetic oligonucleotide
  Antisense strand to SEQ ID NO: 1711825
ucaacuacagauuucucga

SEQ ID NO: 1711827 - RNA, 19 nt, Artificial Sequence
  Description of Artificial Sequence: Synthetic oligonucleotide
  Sense strand starting at position 232 of SEQ ID NO: 1561968
aagccuccugucugacaga

SEQ ID NO: 1711828 - RNA, 19 nt, Artificial Sequence
  Description of Artificial Sequence: Synthetic oligonucleotide
  Antisense strand to SEQ ID NO: 1711827
ucugucagacaggaggcuu

SEQ ID NO: 1711829 - RNA, 19 nt, Artificial Sequence
  Description of Artificial Sequence: Synthetic oligonucleotide
  Sense strand starting at position 373 of SEQ ID NO: 1561968
uggaauuucugagagcgcu

SEQ ID NO: 1711830 - RNA, 19 nt, Artificial Sequence
  Description of Artificial Sequence: Synthetic oligonucleotide
  Antisense strand to SEQ ID NO: 1711829
agcgcucucagaaauucca

SEQ ID NO: 1711831 - RNA, 19 nt, Artificial Sequence
  Description of Artificial Sequence: Synthetic oligonucleotide
  Sense strand starting at position 1739 of SEQ ID NO: 1561968
ccaggaagacuuugggcau

SEQ ID NO: 1711832 - RNA, 19 nt, Artificial Sequence
  Description of Artificial Sequence: Synthetic oligonucleotide
  Antisense strand to SEQ ID NO: 1711831
augcccaaagucuuccugg

SEQ ID NO: 1711833 - RNA, 19 nt, Artificial Sequence
  Description of Artificial Sequence: Synthetic oligonucleotide
  Sense strand starting at position 1956 of SEQ ID NO: 1561968
cgacaccuaugccuuaaau

SEQ ID NO: 1711834 - RNA, 19 nt, Artificial Sequence
  Description of Artificial Sequence: Synthetic oligonucleotide
  Antisense strand to SEQ ID NO: 1711833
auuuaaggcauaggugucg

SEQ ID NO: 1711835 - RNA, 19 nt, Artificial Sequence
  Description of Artificial Sequence: Synthetic oligonucleotide
  Sense strand starting at position 1966 of SEQ ID NO: 1561968
gccuuaaaucgcgagugag

SEQ ID NO: 1711836 - RNA, 19 nt, Artificial Sequence
  Description of Artificial Sequence: Synthetic oligonucleotide
  Antisense strand to SEQ ID NO: 1711835
cucacucgcgauuuaaggc

SEQ ID NO: 1711837 - RNA, 19 nt, Artificial Sequence
  Description of Artificial Sequence: Synthetic oligonucleotide
  Sense strand starting at position 2029 of SEQ ID NO: 1561968
ccaggaaacuugggacuga

SEQ ID NO: 1711838 - RNA, 19 nt, Artificial Sequence
  Description of Artificial Sequence: Synthetic oligonucleotide
  Antisense strand to SEQ ID NO: 1711837
ucagucccaaguuuccugg

SEQ ID NO: 1711839 - RNA, 19 nt, Artificial Sequence
  Description of Artificial Sequence: Synthetic oligonucleotide
  Sense strand starting at position 2033 of SEQ ID NO: 1561968
gaaacuugggacugagcau

SEQ ID NO: 1711840 - RNA, 19 nt, Artificial Sequence
  Description of Artificial Sequence: Synthetic oligonucleotide
  Antisense strand to SEQ ID NO: 1711839
augcucagucccaaguuuc

SEQ ID NO: 1711841 - RNA, 19 nt, Artificial Sequence
  Description of Artificial Sequence: Synthetic oligonucleotide
  Sense strand starting at position 2059 of SEQ ID NO: 1561968
gcaacauaacggugucaac

SEQ ID NO: 1711842 - RNA, 19 nt, Artificial Sequence
  Description of Artificial Sequence: Synthetic oligonucleotide
  Antisense strand to SEQ ID NO: 1711841
guugacaccguuauguugc

SEQ ID NO: 1711843 - RNA, 19 nt, Artificial Sequence
  Description of Artificial Sequence: Synthetic oligonucleotide
  Sense strand starting at position 2131 of SEQ ID NO: 1561968
cuuccuuaggcaugaaugu

SEQ ID NO: 1711844 - RNA, 19 nt, Artificial Sequence
  Description of Artificial Sequence: Synthetic oligonucleotide
  Antisense strand to SEQ ID NO: 1711843
acauucaugccuaaggaag

SEQ ID NO: 1711845 - RNA, 19 nt, Artificial Sequence
  Description of Artificial Sequence: Synthetic oligonucleotide
  Sense strand starting at position 2138 of SEQ ID NO: 1561968
aggcaugaauguuugcaaa

SEQ ID NO: 1711846 - RNA, 19 nt, Artificial Sequence
  Description of Artificial Sequence: Synthetic oligonucleotide
  Antisense strand to SEQ ID NO: 1711845
uuugcaaacauucaugccu

SEQ ID NO: 1711847 - RNA, 19 nt, Artificial Sequence
  Description of Artificial Sequence: Synthetic oligonucleotide
  Sense strand starting at position 2255 of SEQ ID NO: 1561968
cgagcucuucgagguaaac

SEQ ID NO: 1711848 - RNA, 19 nt, Artificial Sequence
  Description of Artificial Sequence: Synthetic oligonucleotide
  Antisense strand to SEQ ID NO: 1711847
guuuaccucgaagagcucg

SEQ ID NO: 1711849 - RNA, 19 nt, Artificial Sequence
  Description of Artificial Sequence: Synthetic oligonucleotide
  Sense strand starting at position 2346 of SEQ ID NO: 1561968
guggauuugucuucgacga

SEQ ID NO: 1711850 - RNA, 19 nt, Artificial Sequence
  Description of Artificial Sequence: Synthetic oligonucleotide
  Antisense strand to SEQ ID NO: 1711849
ucgucgaagacaaauccac

SEQ ID NO: 1711851 - RNA, 19 nt, Artificial Sequence
  Description of Artificial Sequence: Synthetic oligonucleotide
  Sense strand starting at position 2347 of SEQ ID NO: 1561968
uggauuugucuucgacgag

SEQ ID NO: 1711852 - RNA, 19 nt, Artificial Sequence
  Description of Artificial Sequence: Synthetic oligonucleotide
  Antisense strand to SEQ ID NO: 1711851
cucgucgaagacaaaucca

SEQ ID NO: 1711853 - RNA, 19 nt, Artificial Sequence
  Description of Artificial Sequence: Synthetic oligonucleotide
  Sense strand starting at position 2350 of SEQ ID NO: 1561968
auuugucuucgacgagcca

SEQ ID NO: 1711854 - RNA, 19 nt, Artificial Sequence
  Description of Artificial Sequence: Synthetic oligonucleotide
  Antisense strand to SEQ ID NO: 1711853
uggcucgucgaagacaaau

SEQ ID NO: 1711855 - RNA, 19 nt, Artificial Sequence
  Description of Artificial Sequence: Synthetic oligonucleotide
  Sense strand starting at position 2416 of SEQ ID NO: 1561968
gaugaaaucugggcgguca

SEQ ID NO: 1711856 - RNA, 19 nt, Artificial Sequence
  Description of Artificial Sequence: Synthetic oligonucleotide
  Antisense strand to SEQ ID NO: 1711855
ugaccgcccagauuucauc

SEQ ID NO: 1711857 - RNA, 19 nt, Artificial Sequence
  Description of Artificial Sequence: Synthetic oligonucleotide
  Sense strand starting at position 2418 of SEQ ID NO: 1561968
ugaaaucugggcggucaga

SEQ ID NO: 1711858 - RNA, 19 nt, Artificial Sequence
  Description of Artificial Sequence: Synthetic oligonucleotide
  Antisense strand to SEQ ID NO: 1711857
ucugaccgcccagauuuca

SEQ ID NO: 1711859 - RNA, 19 nt, Artificial Sequence
  Description of Artificial Sequence: Synthetic oligonucleotide
  Sense strand starting at position 2501 of SEQ ID NO: 1561968
ggcuuaagcuuuccaucag

SEQ ID NO: 1711860 - RNA, 19 nt, Artificial Sequence
  Description of Artificial Sequence: Synthetic oligonucleotide
  Antisense strand to SEQ ID NO: 1711859
cugauggaaagcuuaagcc

SEQ ID NO: 1711861 - RNA, 19 nt, Artificial Sequence
  Description of Artificial Sequence: Synthetic oligonucleotide
  Sense strand starting at position 2568 of SEQ ID NO: 1561968
gcaucuuuagaccacguua

SEQ ID NO: 1711862 - RNA, 19 nt, Artificial Sequence
  Description of Artificial Sequence: Synthetic oligonucleotide
  Antisense strand to SEQ ID NO: 1711861
uaacguggucuaaagaugc

SEQ ID NO: 1711863 - RNA, 19 nt, Artificial Sequence
  Description of Artificial Sequence: Synthetic oligonucleotide
  Sense strand starting at position 2570 of SEQ ID NO: 1561968
aucuuuagaccacguuauu

SEQ ID NO: 1711864 - RNA, 19 nt, Artificial Sequence
  Description of Artificial Sequence: Synthetic oligonucleotide
  Antisense strand to SEQ ID NO: 1711863
aauaacguggucuaaagau

SEQ ID NO: 1711865 - RNA, 19 nt, Artificial Sequence
  Description of Artificial Sequence: Synthetic oligonucleotide
  Sense strand starting at position 2640 of SEQ ID NO: 1561968
gcagcuucuccucacaaga

SEQ ID NO: 1711866 - RNA, 19 nt, Artificial Sequence
  Description of Artificial Sequence: Synthetic oligonucleotide
  Antisense strand to SEQ ID NO: 1711865
ucuugugaggagaagcugc

SEQ ID NO: 1711867 - RNA, 19 nt, Artificial Sequence
  Description of Artificial Sequence: Synthetic oligonucleotide
  Sense strand starting at position 2718 of SEQ ID NO: 1561968
ggagcauauuaugcaaaug

SEQ ID NO: 1711868 - RNA, 19 nt, Artificial Sequence
  Description of Artificial Sequence: Synthetic oligonucleotide
  Antisense strand to SEQ ID NO: 1711867
cauuugcauaauaugcucc

SEQ ID NO: 1711869 - RNA, 19 nt, Artificial Sequence
  Description of Artificial Sequence: Synthetic oligonucleotide
  Sense strand starting at position 2822 of SEQ ID NO: 1561968
auaccuuuccaggaagcua

SEQ ID NO: 1711870 - RNA, 19 nt, Artificial Sequence
  Description of Artificial Sequence: Synthetic oligonucleotide
  Antisense strand to SEQ ID NO: 1711869
uagcuuccuggaaagguau

SEQ ID NO: 1711871 - RNA, 19 nt, Artificial Sequence
  Description of Artificial Sequence: Synthetic oligonucleotide
  Sense strand starting at position 2844 of SEQ ID NO: 1561968
uagugaacauuggcuacau

SEQ ID NO: 1711872 - RNA, 19 nt, Artificial Sequence
  Description of Artificial Sequence: Synthetic oligonucleotide
  Antisense strand to SEQ ID NO: 1711871
auguagccaauguucacua

SEQ ID NO: 1711873 - RNA, 19 nt, Artificial Sequence
  Description of Artificial Sequence: Synthetic oligonucleotide
  Sense strand starting at position 2887 of SEQ ID NO: 1561968
guaggaaagcuuugcauuu

SEQ ID NO: 1711874 - RNA, 19 nt, Artificial Sequence
  Description of Artificial Sequence: Synthetic oligonucleotide
  Antisense strand to SEQ ID NO: 1711873
aaaugcaaagcuuuccuac

SEQ ID NO: 1711875 - RNA, 19 nt, Artificial Sequence
  Description of Artificial Sequence: Synthetic oligonucleotide
  Sense strand starting at position 2910 of SEQ ID NO: 1561968
uuauaucuguuuguuccua

SEQ ID NO: 1711876 - RNA, 19 nt, Artificial Sequence
  Description of Artificial Sequence: Synthetic oligonucleotide
  Antisense strand to SEQ ID NO: 1711875
uaggaacaaacagauauaa

SEQ ID NO: 1711877 - RNA, 19 nt, Artificial Sequence
  Description of Artificial Sequence: Synthetic oligonucleotide
  Sense strand starting at position 2914 of SEQ ID NO: 1561968
aucuguuuguuccuaucaa

SEQ ID NO: 1711878 - RNA, 19 nt, Artificial Sequence
  Description of Artificial Sequence: Synthetic oligonucleotide
  Antisense strand to SEQ ID NO: 1711877
uugauaggaacaaacagau

SEQ ID NO: 1711879 - RNA, 19 nt, Artificial Sequence
  Description of Artificial Sequence: Synthetic oligonucleotide
  Sense strand starting at position 3316 of SEQ ID NO: 1561968
aacggauuucucggcgcua

SEQ ID NO: 1711880 - RNA, 19 nt, Artificial Sequence
  Description of Artificial Sequence: Synthetic oligonucleotide
  Antisense strand to SEQ ID NO: 1711879
uagcgccgagaaauccguu

SEQ ID NO: 1711881 - RNA, 19 nt, Artificial Sequence
  Description of Artificial Sequence: Synthetic oligonucleotide
  Sense strand starting at position 3318 of SEQ ID NO: 1561968
cggauuucucggcgcuacu

SEQ ID NO: 1711882 - RNA, 19 nt, Artificial Sequence
  Description of Artificial Sequence: Synthetic oligonucleotide
  Antisense strand to SEQ ID NO: 1711881
aguagcgccgagaaauccg

SEQ ID NO: 1711883 - RNA, 19 nt, Artificial Sequence
  Description of Artificial Sequence: Synthetic oligonucleotide
  Sense strand starting at position 3581 of SEQ ID NO: 1561968
caaggcuucuugucuauga

SEQ ID NO: 1711884 - RNA, 19 nt, Artificial Sequence
  Description of Artificial Sequence: Synthetic oligonucleotide
  Antisense strand to SEQ ID NO: 1711883
ucauagacaagaagccuug

SEQ ID NO: 1711885 - RNA, 19 nt, Artificial Sequence
  Description of Artificial Sequence: Synthetic oligonucleotide
  Sense strand starting at position 3620 of SEQ ID NO: 1561968
ggagacucugcagauguau

SEQ ID NO: 1711886 - RNA, 19 nt, Artificial Sequence
  Description of Artificial Sequence: Synthetic oligonucleotide
  Antisense strand to SEQ ID NO: 1711885
auacaucugcagagucucc

SEQ ID NO: 1711887 - RNA, 19 nt, Artificial Sequence
  Description of Artificial Sequence: Synthetic oligonucleotide
  Sense strand starting at position 3680 of SEQ ID NO: 1561968
uugggugaauggaagagua

SEQ ID NO: 1711888 - RNA, 19 nt, Artificial Sequence
  Description of Artificial Sequence: Synthetic oligonucleotide
  Antisense strand to SEQ ID NO: 1711887
uacucuuccauucacccaa

SEQ ID NO: 1711889 - RNA, 19 nt, Artificial Sequence
  Description of Artificial Sequence: Synthetic oligonucleotide
  Sense strand starting at position 3704 of SEQ ID NO: 1561968
gaaguacaacuaugaaguu

SEQ ID NO: 1711890 - RNA, 19 nt, Artificial Sequence
  Description of Artificial Sequence: Synthetic oligonucleotide
  Antisense strand to SEQ ID NO: 1711889
aacuucauaguuguacuuc

SEQ ID NO: 1711891 - RNA, 19 nt, Artificial Sequence
  Description of Artificial Sequence: Synthetic oligonucleotide
  Sense strand starting at position 3844 of SEQ ID NO: 1561968
accagugagugucuugacu

SEQ ID NO: 1711892 - RNA, 19 nt, Artificial Sequence
  Description of Artificial Sequence: Synthetic oligonucleotide
  Antisense strand to SEQ ID NO: 1711891
agucaagacacucacuggu

SEQ ID NO: 1711893 - RNA, 19 nt, Artificial Sequence
  Description of Artificial Sequence: Synthetic oligonucleotide
  Sense strand starting at position 3894 of SEQ ID NO: 1561968
auaggaugaugagguauaa

SEQ ID NO: 1711894 - RNA, 19 nt, Artificial Sequence
  Description of Artificial Sequence: Synthetic oligonucleotide
  Antisense strand to SEQ ID NO: 1711893
uuauaccucaucauccuau

SEQ ID NO: 1711895 - RNA, 19 nt, Artificial Sequence
  Description of Artificial Sequence: Synthetic oligonucleotide
  Sense strand starting at position 3914 of SEQ ID NO: 1561968
gcuagaaaccuccaaagca

SEQ ID NO: 1711896 - RNA, 19 nt, Artificial Sequence
  Description of Artificial Sequence: Synthetic oligonucleotide
  Antisense strand to SEQ ID NO: 1711895
ugcuuuggagguuucuagc

SEQ ID NO: 1711897 - RNA, 19 nt, Artificial Sequence
  Description of Artificial Sequence: Synthetic oligonucleotide
  Sense strand starting at position 266 of SEQ ID NO: 1561969
gugagauugcaucauugua

SEQ ID NO: 1711898 - RNA, 19 nt, Artificial Sequence
  Description of Artificial Sequence: Synthetic oligonucleotide
  Antisense strand to SEQ ID NO: 1711897
uacaaugaugcaaucucac

SEQ ID NO: 1711899 - RNA, 19 nt, Artificial Sequence
  Description of Artificial Sequence: Synthetic oligonucleotide
  Sense strand starting at position 330 of SEQ ID NO: 1561969
aagauuaaguuguuugaga

SEQ ID NO: 1711900 - RNA, 19 nt, Artificial Sequence
  Description of Artificial Sequence: Synthetic oligonucleotide
  Antisense strand to SEQ ID NO: 1711899
ucucaaacaacuuaaucuu

SEQ ID NO: 1711901 - RNA, 19 nt, Artificial Sequence
  Description of Artificial Sequence: Synthetic oligonucleotide
  Sense strand starting at position 331 of SEQ ID NO: 1561969
agauuaaguuguuugagac

SEQ ID NO: 1711902 - RNA, 19 nt, Artificial Sequence
  Description of Artificial Sequence: Synthetic oligonucleotide
  Antisense strand to SEQ ID NO: 1711901
gucucaaacaacuuaaucu

SEQ ID NO: 1711903 - RNA, 19 nt, Artificial Sequence
  Description of Artificial Sequence: Synthetic oligonucleotide
  Sense strand starting at position 332 of SEQ ID NO: 1561969
gauuaaguuguuugagacc

SEQ ID NO: 1711904 - RNA, 19 nt, Artificial Sequence
  Description of Artificial Sequence: Synthetic oligonucleotide
  Antisense strand to SEQ ID NO: 1711903
ggucucaaacaacuuaauc

SEQ ID NO: 1711905 - RNA, 19 nt, Artificial Sequence
  Description of Artificial Sequence: Synthetic oligonucleotide
  Sense strand starting at position 390 of SEQ ID NO: 1561969
uuaagagcuucucuuuguu

SEQ ID NO: 1711906 - RNA, 19 nt, Artificial Sequence
  Description of Artificial Sequence: Synthetic oligonucleotide
  Antisense strand to SEQ ID NO: 1711905
aacaaagagaagcucuuaa

SEQ ID NO: 1711907 - RNA, 19 nt, Artificial Sequence
  Description of Artificial Sequence: Synthetic oligonucleotide
  Sense strand starting at position 539 of SEQ ID NO: 1561969
cggucaugcuggcauucaa

SEQ ID NO: 1711908 - RNA, 19 nt, Artificial Sequence
  Description of Artificial Sequence: Synthetic oligonucleotide
  Antisense strand to SEQ ID NO: 1711907
uugaaugccagcaugaccg

SEQ ID NO: 1711909 - RNA, 19 nt, Artificial Sequence
  Description of Artificial Sequence: Synthetic oligonucleotide
  Sense strand starting at position 613 of SEQ ID NO: 1561969
gccagcuccuuggaaacau

SEQ ID NO: 1711910 - RNA, 19 nt, Artificial Sequence
  Description of Artificial Sequence: Synthetic oligonucleotide
  Antisense strand to SEQ ID NO: 1711909
auguuuccaaggagcuggc

SEQ ID NO: 1711911 - RNA, 19 nt, Artificial Sequence
  Description of Artificial Sequence: Synthetic oligonucleotide
  Sense strand starting at position 690 of SEQ ID NO: 1561969
acuucuaaguguggcucaa

SEQ ID NO: 1711912 - RNA, 19 nt, Artificial Sequence
  Description of Artificial Sequence: Synthetic oligonucleotide
  Antisense strand to SEQ ID NO: 1711911
uugagccacacuuagaagu

SEQ ID NO: 1711913 - RNA, 19 nt, Artificial Sequence
  Description of Artificial Sequence: Synthetic oligonucleotide
  Sense strand starting at position 771 of SEQ ID NO: 1561969
cucagacccuugucuguau

SEQ ID NO: 1711914 - RNA, 19 nt, Artificial Sequence
  Description of Artificial Sequence: Synthetic oligonucleotide
  Antisense strand to SEQ ID NO: 1711913
auacagacaagggucugag

SEQ ID NO: 1711915 - RNA, 19 nt, Artificial Sequence
  Description of Artificial Sequence: Synthetic oligonucleotide
  Sense strand starting at position 782 of SEQ ID NO: 1561969
gucuguauuugcucccuca

SEQ ID NO: 1711916 - RNA, 19 nt, Artificial Sequence
  Description of Artificial Sequence: Synthetic oligonucleotide
  Antisense strand to SEQ ID NO: 1711915
ugagggagcaaauacagac

SEQ ID NO: 1711917 - RNA, 19 nt, Artificial Sequence
  Description of Artificial Sequence: Synthetic oligonucleotide
  Sense strand starting at position 1083 of SEQ ID NO: 1561969
gcacuuagacacgagucaa

SEQ ID NO: 1711918 - RNA, 19 nt, Artificial Sequence
  Description of Artificial Sequence: Synthetic oligonucleotide
  Antisense strand to SEQ ID NO: 1711917
uugacucgugucuaagugc

SEQ ID NO: 1711919 - RNA, 19 nt, Artificial Sequence
  Description of Artificial Sequence: Synthetic oligonucleotide
  Sense strand starting at position 2043 of SEQ ID NO: 1561969
gucgguggagcucuguuua

SEQ ID NO: 1711920 - RNA, 19 nt, Artificial Sequence
  Description of Artificial Sequence: Synthetic oligonucleotide
  Antisense strand to SEQ ID NO: 1711919
uaaacagagcuccaccgac

SEQ ID NO: 1711921 - RNA, 19 nt, Artificial Sequence
  Description of Artificial Sequence: Synthetic oligonucleotide
  Sense strand starting at position 2057 of SEQ ID NO: 1561969
guuuaagagguugguagua

SEQ ID NO: 1711922 - RNA, 19 nt, Artificial Sequence
  Description of Artificial Sequence: Synthetic oligonucleotide
  Antisense strand to SEQ ID NO: 1711921
uacuaccaaccucuuaaac

SEQ ID NO: 1711923 - RNA, 19 nt, Artificial Sequence
  Description of Artificial Sequence: Synthetic oligonucleotide
  Sense strand starting at position 2062 of SEQ ID NO: 1561969
agagguugguaguaugauu

SEQ ID NO: 1711924 - RNA, 19 nt, Artificial Sequence
  Description of Artificial Sequence: Synthetic oligonucleotide
  Antisense strand to SEQ ID NO: 1711923
aaucauacuaccaaccucu

SEQ ID NO: 1711925 - RNA, 19 nt, Artificial Sequence
  Description of Artificial Sequence: Synthetic oligonucleotide
  Sense strand starting at position 2067 of SEQ ID NO: 1561969
uugguaguaugauugguca

SEQ ID NO: 1711926 - RNA, 19 nt, Artificial Sequence
  Description of Artificial Sequence: Synthetic oligonucleotide
  Antisense strand to SEQ ID NO: 1711925
ugaccaaucauacuaccaa

SEQ ID NO: 1711927 - RNA, 19 nt, Artificial Sequence
  Description of Artificial Sequence: Synthetic oligonucleotide
  Sense strand starting at position 2069 of SEQ ID NO: 1561969
gguaguaugauuggucaca

SEQ ID NO: 1711928 - RNA, 19 nt, Artificial Sequence
  Description of Artificial Sequence: Synthetic oligonucleotide
  Antisense strand to SEQ ID NO: 1711927
ugugaccaaucauacuacc

SEQ ID NO: 1711929 - RNA, 19 nt, Artificial Sequence
  Description of Artificial Sequence: Synthetic oligonucleotide
  Sense strand starting at position 2070 of SEQ ID NO: 1561969
guaguaugauuggucacag

SEQ ID NO: 1711930 - RNA, 19 nt, Artificial Sequence
  Description of Artificial Sequence: Synthetic oligonucleotide
  Antisense strand to SEQ ID NO: 1711929
cugugaccaaucauacuac

SEQ ID NO: 1711931 - RNA, 19 nt, Artificial Sequence
  Description of Artificial Sequence: Synthetic oligonucleotide
  Sense strand starting at position 2071 of SEQ ID NO: 1561969
uaguaugauuggucacaga

SEQ ID NO: 1711932 - RNA, 19 nt, Artificial Sequence
  Description of Artificial Sequence: Synthetic oligonucleotide
  Antisense strand to SEQ ID NO: 1711931
ucugugaccaaucauacua

SEQ ID NO: 1711933 - RNA, 19 nt, Artificial Sequence
  Description of Artificial Sequence: Synthetic oligonucleotide
  Sense strand starting at position 2172 of SEQ ID NO: 1561969
ggcuaauggucugggcaca

SEQ ID NO: 1711934 - RNA, 19 nt, Artificial Sequence
  Description of Artificial Sequence: Synthetic oligonucleotide
  Antisense strand to SEQ ID NO: 1711933
ugugcccagaccauuagcc

SEQ ID NO: 1711935 - RNA, 19 nt, Artificial Sequence
  Description of Artificial Sequence: Synthetic oligonucleotide
  Sense strand starting at position 2512 of SEQ ID NO: 1561969
accugaaacuuggauagga

SEQ ID NO: 1711936 - RNA, 19 nt, Artificial Sequence
  Description of Artificial Sequence: Synthetic oligonucleotide
  Antisense strand to SEQ ID NO: 1711935
uccuauccaaguuucaggu

SEQ ID NO: 1711937 - RNA, 19 nt, Artificial Sequence
  Description of Artificial Sequence: Synthetic oligonucleotide
  Sense strand starting at position 2540 of SEQ ID NO: 1561969
aucugucucuaaucuguaa

SEQ ID NO: 1711938 - RNA, 19 nt, Artificial Sequence
  Description of Artificial Sequence: Synthetic oligonucleotide
  Antisense strand to SEQ ID NO: 1711937
uuacagauuagagacagau

SEQ ID NO: 1711939 - RNA, 19 nt, Artificial Sequence
  Description of Artificial Sequence: Synthetic oligonucleotide
  Sense strand starting at position 2544 of SEQ ID NO: 1561969
gucucuaaucuguaacuga

SEQ ID NO: 1711940 - RNA, 19 nt, Artificial Sequence
  Description of Artificial Sequence: Synthetic oligonucleotide
  Antisense strand to SEQ ID NO: 1711939
ucaguuacagauuagagac

SEQ ID NO: 1711941 - RNA, 19 nt, Artificial Sequence
  Description of Artificial Sequence: Synthetic oligonucleotide
  Sense strand starting at position 2613 of SEQ ID NO: 1561969
uagcaauaccuguggcuuu

SEQ ID NO: 1711942 - RNA, 19 nt, Artificial Sequence
  Description of Artificial Sequence: Synthetic oligonucleotide
  Antisense strand to SEQ ID NO: 1711941
aaagccacagguauugcua

SEQ ID NO: 1711943 - RNA, 19 nt, Artificial Sequence
  Description of Artificial Sequence: Synthetic oligonucleotide
  Sense strand starting at position 2620 of SEQ ID NO: 1561969
accuguggcuuugucacaa

SEQ ID NO: 1711944 - RNA, 19 nt, Artificial Sequence
  Description of Artificial Sequence: Synthetic oligonucleotide
  Antisense strand to SEQ ID NO: 1711943
uugugacaaagccacaggu

SEQ ID NO: 1711945 - RNA, 19 nt, Artificial Sequence
  Description of Artificial Sequence: Synthetic oligonucleotide
  Sense strand starting at position 2624 of SEQ ID NO: 1561969
guggcuuugucacaaauca

SEQ ID NO: 1711946 - RNA, 19 nt, Artificial Sequence
  Description of Artificial Sequence: Synthetic oligonucleotide
  Antisense strand to SEQ ID NO: 1711945
ugauuugugacaaagccac

SEQ ID NO: 1711947 - RNA, 19 nt, Artificial Sequence
  Description of Artificial Sequence: Synthetic oligonucleotide
  Sense strand starting at position 2684 of SEQ ID NO: 1561969
cuauauacuguuuagauuc

SEQ ID NO: 1711948 - RNA, 19 nt, Artificial Sequence
  Description of Artificial Sequence: Synthetic oligonucleotide
  Antisense strand to SEQ ID NO: 1711947
gaaucuaaacaguauauag

SEQ ID NO: 1711949 - RNA, 19 nt, Artificial Sequence
  Description of Artificial Sequence: Synthetic oligonucleotide
  Sense strand starting at position 2747 of SEQ ID NO: 1561969
cuugcuaucuaaugguuaa

SEQ ID NO: 1711950 - RNA, 19 nt, Artificial Sequence
  Description of Artificial Sequence: Synthetic oligonucleotide
  Antisense strand to SEQ ID NO: 1711949
uuaaccauuagauagcaag

SEQ ID NO: 1711951 - RNA, 19 nt, Artificial Sequence
  Description of Artificial Sequence: Synthetic oligonucleotide
  Sense strand starting at position 2750 of SEQ ID NO: 1561969
gcuaucuaaugguuaaaga

SEQ ID NO: 1711952 - RNA, 19 nt, Artificial Sequence
  Description of Artificial Sequence: Synthetic oligonucleotide
  Antisense strand to SEQ ID NO: 1711951
ucuuuaaccauuagauagc

SEQ ID NO: 1711953 - RNA, 19 nt, Artificial Sequence
  Description of Artificial Sequence: Synthetic oligonucleotide
  Sense strand starting at position 2761 of SEQ ID NO: 1561969
guuaaagaagcacguuuau

SEQ ID NO: 1711954 - RNA, 19 nt, Artificial Sequence
  Description of Artificial Sequence: Synthetic oligonucleotide
  Antisense strand to SEQ ID NO: 1711953
auaaacgugcuucuuuaac

SEQ ID NO: 1711955 - RNA, 19 nt, Artificial Sequence
  Description of Artificial Sequence: Synthetic oligonucleotide
  Sense strand starting at position 2773 of SEQ ID NO: 1561969
cguuuaugacaccaucaaa

SEQ ID NO: 1711956 - RNA, 19 nt, Artificial Sequence
  Description of Artificial Sequence: Synthetic oligonucleotide
  Antisense strand to SEQ ID NO: 1711955
uuugauggugucauaaacg

SEQ ID NO: 1711957 - RNA, 19 nt, Artificial Sequence
  Description of Artificial Sequence: Synthetic oligonucleotide
  Sense strand starting at position 2997 of SEQ ID NO: 1561969
accgcuuaagccugggaau

SEQ ID NO: 1711958 - RNA, 19 nt, Artificial Sequence
  Description of Artificial Sequence: Synthetic oligonucleotide
  Antisense strand to SEQ ID NO: 1711957
auucccaggcuuaagcggu

SEQ ID NO: 1711959 - RNA, 19 nt, Artificial Sequence
  Description of Artificial Sequence: Synthetic oligonucleotide
  Sense strand starting at position 2998 of SEQ ID NO: 1561969
ccgcuuaagccugggaauu

SEQ ID NO: 1711960 - RNA, 19 nt, Artificial Sequence
  Description of Artificial Sequence: Synthetic oligonucleotide
  Antisense strand to SEQ ID NO: 1711959
aauucccaggcuuaagcgg

SEQ ID NO: 1711961 - RNA, 19 nt, Artificial Sequence
  Description of Artificial Sequence: Synthetic oligonucleotide
  Sense strand starting at position 3438 of SEQ ID NO: 1561969
cccuguaauugguuucuuu

SEQ ID NO: 1711962 - RNA, 19 nt, Artificial Sequence
  Description of Artificial Sequence: Synthetic oligonucleotide
  Antisense strand to SEQ ID NO: 1711961
aaagaaaccaauuacaggg

SEQ ID NO: 1711963 - RNA, 19 nt, Artificial Sequence
  Description of Artificial Sequence: Synthetic oligonucleotide
  Sense strand starting at position 3805 of SEQ ID NO: 1561969
gggagagguauugguagau

SEQ ID NO: 1711964 - RNA, 19 nt, Artificial Sequence
  Description of Artificial Sequence: Synthetic oligonucleotide
  Antisense strand to SEQ ID NO: 1711963
aucuaccaauaccucuccc

SEQ ID NO: 1711965 - RNA, 19 nt, Artificial Sequence
  Description of Artificial Sequence: Synthetic oligonucleotide
  Sense strand starting at position 3811 of SEQ ID NO: 1561969
gguauugguagauaucaug

SEQ ID NO: 1711966 - RNA, 19 nt, Artificial Sequence
  Description of Artificial Sequence: Synthetic oligonucleotide
  Antisense strand to SEQ ID NO: 1711965
caugauaucuaccaauacc

SEQ ID NO: 1711967 - RNA, 19 nt, Artificial Sequence
  Description of Artificial Sequence: Synthetic oligonucleotide
  Sense strand starting at position 3814 of SEQ ID NO: 1561969
auugguagauaucaugaac

SEQ ID NO: 1711968 - RNA, 19 nt, Artificial Sequence
  Description of Artificial Sequence: Synthetic oligonucleotide
  Antisense strand to SEQ ID NO: 1711967
guucaugauaucuaccaau

SEQ ID NO: 1711969 - RNA, 19 nt, Artificial Sequence
  Description of Artificial Sequence: Synthetic oligonucleotide
  Sense strand starting at position 113 of SEQ ID NO: 1561970
gugucucuccugggugaua

SEQ ID NO: 1711970 - RNA, 19 nt, Artificial Sequence
  Description of Artificial Sequence: Synthetic oligonucleotide
  Antisense strand to SEQ ID NO: 1711969
uaucacccaggagagacac

SEQ ID NO: 1711971 - RNA, 19 nt, Artificial Sequence
  Description of Artificial Sequence: Synthetic oligonucleotide
  Sense strand starting at position 115 of SEQ ID NO: 1561970
gucucuccugggugauaca

SEQ ID NO: 1711972 - RNA, 19 nt, Artificial Sequence
  Description of Artificial Sequence: Synthetic oligonucleotide
  Antisense strand to SEQ ID NO: 1711971
uguaucacccaggagagac

SEQ ID NO: 1711973 - RNA, 19 nt, Artificial Sequence
  Description of Artificial Sequence: Synthetic oligonucleotide
  Sense strand starting at position 124 of SEQ ID NO: 1561970
gggugauacacgugaccug

SEQ ID NO: 1711974 - RNA, 19 nt, Artificial Sequence
  Description of Artificial Sequence: Synthetic oligonucleotide
  Antisense strand to SEQ ID NO: 1711973
caggucacguguaucaccc

SEQ ID NO: 1711975 - RNA, 19 nt, Artificial Sequence
  Description of Artificial Sequence: Synthetic oligonucleotide
  Sense strand starting at position 153 of SEQ ID NO: 1561970
ucugcuagugcagagacau

SEQ ID NO: 1711976 - RNA, 19 nt, Artificial Sequence
  Description of Artificial Sequence: Synthetic oligonucleotide
  Antisense strand to SEQ ID NO: 1711975
augucucugcacuagcaga

SEQ ID NO: 1711977 - RNA, 19 nt, Artificial Sequence
  Description of Artificial Sequence: Synthetic oligonucleotide
  Sense strand starting at position 945 of SEQ ID NO: 1561970
gcguuuacgagguaacaag

SEQ ID NO: 1711978 - RNA, 19 nt, Artificial Sequence
  Description of Artificial Sequence: Synthetic oligonucleotide
  Antisense strand to SEQ ID NO: 1711977
cuuguuaccucguaaacgc

SEQ ID NO: 1711979 - RNA, 19 nt, Artificial Sequence
  Description of Artificial Sequence: Synthetic oligonucleotide
  Sense strand starting at position 966 of SEQ ID NO: 1561970
guuaccauucuuuaugcau

SEQ ID NO: 1711980 - RNA, 19 nt, Artificial Sequence
  Description of Artificial Sequence: Synthetic oligonucleotide
  Antisense strand to SEQ ID NO: 1711979
augcauaaagaaugguaac

SEQ ID NO: 1711981 - RNA, 19 nt, Artificial Sequence
  Description of Artificial Sequence: Synthetic oligonucleotide
  Sense strand starting at position 1001 of SEQ ID NO: 1561970
uucuuuauguuauuggaga

SEQ ID NO: 1711982 - RNA, 19 nt, Artificial Sequence
  Description of Artificial Sequence: Synthetic oligonucleotide
  Antisense strand to SEQ ID NO: 1711981
ucuccaauaacauaaagaa

SEQ ID NO: 1711983 - RNA, 19 nt, Artificial Sequence
  Description of Artificial Sequence: Synthetic oligonucleotide
  Sense strand starting at position 1110 of SEQ ID NO: 1561970
caggcaaacucaucggaca

SEQ ID NO: 1711984 - RNA, 19 nt, Artificial Sequence
  Description of Artificial Sequence: Synthetic oligonucleotide
  Antisense strand to SEQ ID NO: 1711983
uguccgaugaguuugccug

SEQ ID NO: 1711985 - RNA, 19 nt, Artificial Sequence
  Description of Artificial Sequence: Synthetic oligonucleotide
  Sense strand starting at position 1111 of SEQ ID NO: 1561970
aggcaaacucaucggacaa

SEQ ID NO: 1711986 - RNA, 19 nt, Artificial Sequence
  Description of Artificial Sequence: Synthetic oligonucleotide
  Antisense strand to SEQ ID NO: 1711985
uuguccgaugaguuugccu

SEQ ID NO: 1711987 - RNA, 19 nt, Artificial Sequence
  Description of Artificial Sequence: Synthetic oligonucleotide
  Sense strand starting at position 1112 of SEQ ID NO: 1561970
ggcaaacucaucggacaag

SEQ ID NO: 1711988 - RNA, 19 nt, Artificial Sequence
  Description of Artificial Sequence: Synthetic oligonucleotide
  Antisense strand to SEQ ID NO: 1711987
cuuguccgaugaguuugcc

SEQ ID NO: 1711989 - RNA, 19 nt, Artificial Sequence
  Description of Artificial Sequence: Synthetic oligonucleotide
  Sense strand starting at position 1122 of SEQ ID NO: 1561970
ucggacaagcucuaaucaa

SEQ ID NO: 1711990 - RNA, 19 nt, Artificial Sequence
  Description of Artificial Sequence: Synthetic oligonucleotide
  Antisense strand to SEQ ID NO: 1711989
uugauuagagcuuguccga

SEQ ID NO: 1711991 - RNA, 19 nt, Artificial Sequence
  Description of Artificial Sequence: Synthetic oligonucleotide
  Sense strand starting at position 1141 of SEQ ID NO: 1561970
ugcuaucagcucugagaaa

SEQ ID NO: 1711992 - RNA, 19 nt, Artificial Sequence
  Description of Artificial Sequence: Synthetic oligonucleotide
  Antisense strand to SEQ ID NO: 1711991
uuucucagagcugauagca

SEQ ID NO: 1711993 - RNA, 19 nt, Artificial Sequence
  Description of Artificial Sequence: Synthetic oligonucleotide
  Sense strand starting at position 1394 of SEQ ID NO: 1561970
agcucagaauggucgagua

SEQ ID NO: 1711994 - RNA, 19 nt, Artificial Sequence
  Description of Artificial Sequence: Synthetic oligonucleotide
  Antisense strand to SEQ ID NO: 1711993
uacucgaccauucugagcu

SEQ ID NO: 1711995 - RNA, 19 nt, Artificial Sequence
  Description of Artificial Sequence: Synthetic oligonucleotide
  Sense strand starting at position 1396 of SEQ ID NO: 1561970
cucagaauggucgaguaac

SEQ ID NO: 1711996 - RNA, 19 nt, Artificial Sequence
  Description of Artificial Sequence: Synthetic oligonucleotide
  Antisense strand to SEQ ID NO: 1711995
guuacucgaccauucugag

SEQ ID NO: 1711997 - RNA, 19 nt, Artificial Sequence
  Description of Artificial Sequence: Synthetic oligonucleotide
  Sense strand starting at position 1516 of SEQ ID NO: 1561970
cucuccucuguagaggaau

SEQ ID NO: 1711998 - RNA, 19 nt, Artificial Sequence
  Description of Artificial Sequence: Synthetic oligonucleotide
  Antisense strand to SEQ ID NO: 1711997
auuccucuacagaggagag

SEQ ID NO: 1711999 - RNA, 19 nt, Artificial Sequence
  Description of Artificial Sequence: Synthetic oligonucleotide
  Sense strand starting at position 2352 of SEQ ID NO: 1561970
gggaaugauucccuccuga

SEQ ID NO: 1712000 - RNA, 19 nt, Artificial Sequence
  Description of Artificial Sequence: Synthetic oligonucleotide
  Antisense strand to SEQ ID NO: 1711999
ucaggagggaaucauuccc

SEQ ID NO: 1712001 - RNA, 19 nt, Artificial Sequence
  Description of Artificial Sequence: Synthetic oligonucleotide
  Sense strand starting at position 2446 of SEQ ID NO: 1561970
aaagcuuguguagagaauu

SEQ ID NO: 1712002 - RNA, 19 nt, Artificial Sequence
  Description of Artificial Sequence: Synthetic oligonucleotide
  Antisense strand to SEQ ID NO: 1712001
aauucucuacacaagcuuu

SEQ ID NO: 1712003 - RNA, 19 nt, Artificial Sequence
  Description of Artificial Sequence: Synthetic oligonucleotide
  Sense strand starting at position 2480 of SEQ ID NO: 1561970
gaagaugucuuccuccaga

SEQ ID NO: 1712004 - RNA, 19 nt, Artificial Sequence
  Description of Artificial Sequence: Synthetic oligonucleotide
  Antisense strand to SEQ ID NO: 1712003
ucuggaggaagacaucuuc

SEQ ID NO: 1712005 - RNA, 19 nt, Artificial Sequence
  Description of Artificial Sequence: Synthetic oligonucleotide
  Sense strand starting at position 2516 of SEQ ID NO: 1561970
accguuucgcaccaaggau

SEQ ID NO: 1712006 - RNA, 19 nt, Artificial Sequence
  Description of Artificial Sequence: Synthetic oligonucleotide
  Antisense strand to SEQ ID NO: 1712005
auccuuggugcgaaacggu

SEQ ID NO: 1712007 - RNA, 19 nt, Artificial Sequence
  Description of Artificial Sequence: Synthetic oligonucleotide
  Sense strand starting at position 2541 of SEQ ID NO: 1561970
ggcuuugagacaugagaac

SEQ ID NO: 1712008 - RNA, 19 nt, Artificial Sequence
  Description of Artificial Sequence: Synthetic oligonucleotide
  Antisense strand to SEQ ID NO: 1712007
guucucaugucucaaagcc

SEQ ID NO: 1712009 - RNA, 19 nt, Artificial Sequence
  Description of Artificial Sequence: Synthetic oligonucleotide
  Sense strand starting at position 2581 of SEQ ID NO: 1561970
uugguacuggcucauauua

SEQ ID NO: 1712010 - RNA, 19 nt, Artificial Sequence
  Description of Artificial Sequence: Synthetic oligonucleotide
  Antisense strand to SEQ ID NO: 1712009
uaauaugagccaguaccaa

SEQ ID NO: 1712011 - RNA, 19 nt, Artificial Sequence
  Description of Artificial Sequence: Synthetic oligonucleotide
  Sense strand starting at position 2616 of SEQ ID NO: 1561970
ugggauauucccugucccu

SEQ ID NO: 1712012 - RNA, 19 nt, Artificial Sequence
  Description of Artificial Sequence: Synthetic oligonucleotide
  Antisense strand to SEQ ID NO: 1712011
agggacagggaauauccca

SEQ ID NO: 1712013 - RNA, 19 nt, Artificial Sequence
  Description of Artificial Sequence: Synthetic oligonucleotide
  Sense strand starting at position 2682 of SEQ ID NO: 1561970
acuuguggcucagccuaaa

SEQ ID NO: 1712014 - RNA, 19 nt, Artificial Sequence
  Description of Artificial Sequence: Synthetic oligonucleotide
  Antisense strand to SEQ ID NO: 1712013
uuuaggcugagccacaagu

SEQ ID NO: 1712015 - RNA, 19 nt, Artificial Sequence
  Description of Artificial Sequence: Synthetic oligonucleotide
  Sense strand starting at position 2693 of SEQ ID NO: 1561970
agccuaaaugcggacaauu

SEQ ID NO: 1712016 - RNA, 19 nt, Artificial Sequence
  Description of Artificial Sequence: Synthetic oligonucleotide
  Antisense strand to SEQ ID NO: 1712015
aauuguccgcauuuaggcu

SEQ ID NO: 1712017 - RNA, 19 nt, Artificial Sequence
  Description of Artificial Sequence: Synthetic oligonucleotide
  Sense strand starting at position 2741 of SEQ ID NO: 1561970
agagcaagacugugaaucu

SEQ ID NO: 1712018 - RNA, 19 nt, Artificial Sequence
  Description of Artificial Sequence: Synthetic oligonucleotide
  Antisense strand to SEQ ID NO: 1712017
agauucacagucuugcucu

SEQ ID NO: 1712019 - RNA, 19 nt, Artificial Sequence
  Description of Artificial Sequence: Synthetic oligonucleotide
  Sense strand starting at position 2857 of SEQ ID NO: 1561970
uaggacuuuccuggucuca

SEQ ID NO: 1712020 - RNA, 19 nt, Artificial Sequence
  Description of Artificial Sequence: Synthetic oligonucleotide
  Antisense strand to SEQ ID NO: 1712019
ugagaccaggaaaguccua

SEQ ID NO: 1712021 - RNA, 19 nt, Artificial Sequence
  Description of Artificial Sequence: Synthetic oligonucleotide
  Sense strand starting at position 2859 of SEQ ID NO: 1561970
ggacuuuccuggucucacu

SEQ ID NO: 1712022 - RNA, 19 nt, Artificial Sequence
  Description of Artificial Sequence: Synthetic oligonucleotide
  Antisense strand to SEQ ID NO: 1712021
agugagaccaggaaagucc

SEQ ID NO: 1712023 - RNA, 19 nt, Artificial Sequence
  Description of Artificial Sequence: Synthetic oligonucleotide
  Sense strand starting at position 2868 of SEQ ID NO: 1561970
uggucucacugauccaaca

SEQ ID NO: 1712024 - RNA, 19 nt, Artificial Sequence
  Description of Artificial Sequence: Synthetic oligonucleotide
  Antisense strand to SEQ ID NO: 1712023
uguuggaucagugagacca

SEQ ID NO: 1712025 - RNA, 19 nt, Artificial Sequence
  Description of Artificial Sequence: Synthetic oligonucleotide
  Sense strand starting at position 3060 of SEQ ID NO: 1561970
ugugguaauguggauguuu

SEQ ID NO: 1712026 - RNA, 19 nt, Artificial Sequence
  Description of Artificial Sequence: Synthetic oligonucleotide
  Antisense strand to SEQ ID NO: 1712025
aaacauccacauuaccaca

SEQ ID NO: 1712027 - RNA, 19 nt, Artificial Sequence
  Description of Artificial Sequence: Synthetic oligonucleotide
  Sense strand starting at position 3086 of SEQ ID NO: 1561970
gggcaaauccugugaggaa

SEQ ID NO: 1712028 - RNA, 19 nt, Artificial Sequence
  Description of Artificial Sequence: Synthetic oligonucleotide
  Antisense strand to SEQ ID NO: 1712027
uuccucacaggauuugccc

SEQ ID NO: 1712029 - RNA, 19 nt, Artificial Sequence
  Description of Artificial Sequence: Synthetic oligonucleotide
  Sense strand starting at position 3236 of SEQ ID NO: 1561970
gauggugggcucgaauaca

SEQ ID NO: 1712030 - RNA, 19 nt, Artificial Sequence
  Description of Artificial Sequence: Synthetic oligonucleotide
  Antisense strand to SEQ ID NO: 1712029
uguauucgagcccaccauc

SEQ ID NO: 1712031 - RNA, 19 nt, Artificial Sequence
  Description of Artificial Sequence: Synthetic oligonucleotide
  Sense strand starting at position 3301 of SEQ ID NO: 1561970
accuaauaccugcaugguu

SEQ ID NO: 1712032 - RNA, 19 nt, Artificial Sequence
  Description of Artificial Sequence: Synthetic oligonucleotide
  Antisense strand to SEQ ID NO: 1712031
aaccaugcagguauuaggu

SEQ ID NO: 1712033 - RNA, 19 nt, Artificial Sequence
  Description of Artificial Sequence: Synthetic oligonucleotide
  Sense strand starting at position 3315 of SEQ ID NO: 1561970
ugguuuguuguggaaggua

SEQ ID NO: 1712034 - RNA, 19 nt, Artificial Sequence
  Description of Artificial Sequence: Synthetic oligonucleotide
  Antisense strand to SEQ ID NO: 1712033
uaccuuccacaacaaacca

SEQ ID NO: 1712035 - RNA, 19 nt, Artificial Sequence
  Description of Artificial Sequence: Synthetic oligonucleotide
  Sense strand starting at position 3340 of SEQ ID NO: 1561970
uaucaaguaacggguguaa

SEQ ID NO: 1712036 - RNA, 19 nt, Artificial Sequence
  Description of Artificial Sequence: Synthetic oligonucleotide
  Antisense strand to SEQ ID NO: 1712035
uuacacccguuacuugaua

SEQ ID NO: 1712037 - RNA, 19 nt, Artificial Sequence
  Description of Artificial Sequence: Synthetic oligonucleotide
  Sense strand starting at position 3342 of SEQ ID NO: 1561970
ucaaguaacggguguaaag

SEQ ID NO: 1712038 - RNA, 19 nt, Artificial Sequence
  Description of Artificial Sequence: Synthetic oligonucleotide
  Antisense strand to SEQ ID NO: 1712037
cuuuacacccguuacuuga

SEQ ID NO: 1712039 - RNA, 19 nt, Artificial Sequence
  Description of Artificial Sequence: Synthetic oligonucleotide
  Sense strand starting at position 3353 of SEQ ID NO: 1561970
guguaaagaggcuguuuaa

SEQ ID NO: 1712040 - RNA, 19 nt, Artificial Sequence
  Description of Artificial Sequence: Synthetic oligonucleotide
  Antisense strand to SEQ ID NO: 1712039
uuaaacagccucuuuacac

SEQ ID NO: 1712041 - RNA, 19 nt, Artificial Sequence
  Description of Artificial Sequence: Synthetic oligonucleotide
  Sense strand starting at position 3356 of SEQ ID NO: 1561970
uaaagaggcuguuuaauua

SEQ ID NO: 1712042 - RNA, 19 nt, Artificial Sequence
  Description of Artificial Sequence: Synthetic oligonucleotide
  Antisense strand to SEQ ID NO: 1712041
uaauuaaacagccucuuua

SEQ ID NO: 1712043 - RNA, 19 nt, Artificial Sequence
  Description of Artificial Sequence: Synthetic oligonucleotide
  Sense strand starting at position 3473 of SEQ ID NO: 1561970
gugugaucagaauaguuag

SEQ ID NO: 1712044 - RNA, 19 nt, Artificial Sequence
  Description of Artificial Sequence: Synthetic oligonucleotide
  Antisense strand to SEQ ID NO: 1712043
cuaacuauucugaucacac

SEQ ID NO: 1712045 - RNA, 19 nt, Artificial Sequence
  Description of Artificial Sequence: Synthetic oligonucleotide
  Sense strand starting at position 3476 of SEQ ID NO: 1561970
ugaucagaauaguuagcua

SEQ ID NO: 1712046 - RNA, 19 nt, Artificial Sequence
  Description of Artificial Sequence: Synthetic oligonucleotide
  Antisense strand to SEQ ID NO: 1712045
uagcuaacuauucugauca

SEQ ID NO: 1712047 - RNA, 19 nt, Artificial Sequence
  Description of Artificial Sequence: Synthetic oligonucleotide
  Sense strand starting at position 3481 of SEQ ID NO: 1561970
agaauaguuagcuaggucu

SEQ ID NO: 1712048 - RNA, 19 nt, Artificial Sequence
  Description of Artificial Sequence: Synthetic oligonucleotide
  Antisense strand to SEQ ID NO: 1712047
agaccuagcuaacuauucu

SEQ ID NO: 1712049 - RNA, 19 nt, Artificial Sequence
  Description of Artificial Sequence: Synthetic oligonucleotide
  Sense strand starting at position 63 of SEQ ID NO: 1561971
gcugcagagaccuaguaca

SEQ ID NO: 1712050 - RNA, 19 nt, Artificial Sequence
  Description of Artificial Sequence: Synthetic oligonucleotide
  Antisense strand to SEQ ID NO: 1712049
uguacuaggucucugcagc

SEQ ID NO: 1712051 - RNA, 19 nt, Artificial Sequence
  Description of Artificial Sequence: Synthetic oligonucleotide
  Sense strand starting at position 199 of SEQ ID NO: 1561971
auuccaagucaagguauua

SEQ ID NO: 1712052 - RNA, 19 nt, Artificial Sequence
  Description of Artificial Sequence: Synthetic oligonucleotide
  Antisense strand to SEQ ID NO: 1712051
uaauaccuugacuuggaau

SEQ ID NO: 1712053 - RNA, 19 nt, Artificial Sequence
  Description of Artificial Sequence: Synthetic oligonucleotide
  Sense strand starting at position 212 of SEQ ID NO: 1561971
guauuaucagauuggacau

SEQ ID NO: 1712054 - RNA, 19 nt, Artificial Sequence
  Description of Artificial Sequence: Synthetic oligonucleotide
  Antisense strand to SEQ ID NO: 1712053
auguccaaucugauaauac

SEQ ID NO: 1712055 - RNA, 19 nt, Artificial Sequence
  Description of Artificial Sequence: Synthetic oligonucleotide
  Sense strand starting at position 286 of SEQ ID NO: 1561971
ugaugauacugacucauuc

SEQ ID NO: 1712056 - RNA, 19 nt, Artificial Sequence
  Description of Artificial Sequence: Synthetic oligonucleotide
  Antisense strand to SEQ ID NO: 1712055
gaaugagucaguaucauca

SEQ ID NO: 1712057 - RNA, 19 nt, Artificial Sequence
  Description of Artificial Sequence: Synthetic oligonucleotide
  Sense strand starting at position 348 of SEQ ID NO: 1561971
aggaaacugucuccaaacu

SEQ ID NO: 1712058 - RNA, 19 nt, Artificial Sequence
  Description of Artificial Sequence: Synthetic oligonucleotide
  Antisense strand to SEQ ID NO: 1712057
aguuuggagacaguuuccu

SEQ ID NO: 1712059 - RNA, 19 nt, Artificial Sequence
  Description of Artificial Sequence: Synthetic oligonucleotide
  Sense strand starting at position 469 of SEQ ID NO: 1561971
gauugaguuguugugcugu

SEQ ID NO: 1712060 - RNA, 19 nt, Artificial Sequence
  Description of Artificial Sequence: Synthetic oligonucleotide
  Antisense strand to SEQ ID NO: 1712059
acagcacaacaacucaauc

SEQ ID NO: 1712061 - RNA, 19 nt, Artificial Sequence
  Description of Artificial Sequence: Synthetic oligonucleotide
  Sense strand starting at position 472 of SEQ ID NO: 1561971
ugaguuguugugcuguuga

SEQ ID NO: 1712062 - RNA, 19 nt, Artificial Sequence
  Description of Artificial Sequence: Synthetic oligonucleotide
  Antisense strand to SEQ ID NO: 1712061
ucaacagcacaacaacuca

SEQ ID NO: 1712063 - RNA, 19 nt, Artificial Sequence
  Description of Artificial Sequence: Synthetic oligonucleotide
  Sense strand starting at position 480 of SEQ ID NO: 1561971
ugugcuguugaauauaaca

SEQ ID NO: 1712064 - RNA, 19 nt, Artificial Sequence
  Description of Artificial Sequence: Synthetic oligonucleotide
  Antisense strand to SEQ ID NO: 1712063
uguuauauucaacagcaca

SEQ ID NO: 1712065 - RNA, 19 nt, Artificial Sequence
  Description of Artificial Sequence: Synthetic oligonucleotide
  Sense strand starting at position 700 of SEQ ID NO: 1561971
gguagaacuccguagaaug

SEQ ID NO: 1712066 - RNA, 19 nt, Artificial Sequence
  Description of Artificial Sequence: Synthetic oligonucleotide
  Antisense strand to SEQ ID NO: 1712065
cauucuacggaguucuacc

SEQ ID NO: 1712067 - RNA, 19 nt, Artificial Sequence
  Description of Artificial Sequence: Synthetic oligonucleotide
  Sense strand starting at position 716 of SEQ ID NO: 1561971
augccagguuuccugauuu

SEQ ID NO: 1712068 - RNA, 19 nt, Artificial Sequence
  Description of Artificial Sequence: Synthetic oligonucleotide
  Antisense strand to SEQ ID NO: 1712067
aaaucaggaaaccuggcau

SEQ ID NO: 1712069 - RNA, 19 nt, Artificial Sequence
  Description of Artificial Sequence: Synthetic oligonucleotide
  Sense strand starting at position 870 of SEQ ID NO: 1561971
agguucccuuaauugauau

SEQ ID NO: 1712070 - RNA, 19 nt, Artificial Sequence
  Description of Artificial Sequence: Synthetic oligonucleotide
  Antisense strand to SEQ ID NO: 1712069
auaucaauuaagggaaccu

SEQ ID NO: 1712071 - RNA, 19 nt, Artificial Sequence
  Description of Artificial Sequence: Synthetic oligonucleotide
  Sense strand starting at position 916 of SEQ ID NO: 1561971
aguugaaagcuccauauac

SEQ ID NO: 1712072 - RNA, 19 nt, Artificial Sequence
  Description of Artificial Sequence: Synthetic oligonucleotide
  Antisense strand to SEQ ID NO: 1712071
guauauggagcuuucaacu

SEQ ID NO: 1712073 - RNA, 19 nt, Artificial Sequence
  Description of Artificial Sequence: Synthetic oligonucleotide
  Sense strand starting at position 954 of SEQ ID NO: 1561971
gggcgaucgcgcuuauccu

SEQ ID NO: 1712074 - RNA, 19 nt, Artificial Sequence
  Description of Artificial Sequence: Synthetic oligonucleotide
  Antisense strand to SEQ ID NO: 1712073
aggauaagcgcgaucgccc

SEQ ID NO: 1712075 - RNA, 19 nt, Artificial Sequence
  Description of Artificial Sequence: Synthetic oligonucleotide
  Sense strand starting at position 961 of SEQ ID NO: 1561971
cgcgcuuauccuccaaacu

SEQ ID NO: 1712076 - RNA, 19 nt, Artificial Sequence
  Description of Artificial Sequence: Synthetic oligonucleotide
  Antisense strand to SEQ ID NO: 1712075
aguuuggaggauaagcgcg

SEQ ID NO: 1712077 - RNA, 19 nt, Artificial Sequence
  Description of Artificial Sequence: Synthetic oligonucleotide
  Sense strand starting at position 974 of SEQ ID NO: 1561971
caaacugagcagugaugau

SEQ ID NO: 1712078 - RNA, 19 nt, Artificial Sequence
  Description of Artificial Sequence: Synthetic oligonucleotide
  Antisense strand to SEQ ID NO: 1712077
aucaucacugcucaguuug

SEQ ID NO: 1712079 - RNA, 19 nt, Artificial Sequence
  Description of Artificial Sequence: Synthetic oligonucleotide
  Sense strand starting at position 983 of SEQ ID NO: 1561971
cagugaugaucccuggacu

SEQ ID NO: 1712080 - RNA, 19 nt, Artificial Sequence
  Description of Artificial Sequence: Synthetic oligonucleotide
  Antisense strand to SEQ ID NO: 1712079
aguccagggaucaucacug

SEQ ID NO: 1712081 - RNA, 19 nt, Artificial Sequence
  Description of Artificial Sequence: Synthetic oligonucleotide
  Sense strand starting at position 984 of SEQ ID NO: 1561971
agugaugaucccuggacuu

SEQ ID NO: 1712082 - RNA, 19 nt, Artificial Sequence
  Description of Artificial Sequence: Synthetic oligonucleotide
  Antisense strand to SEQ ID NO: 1712081
aaguccagggaucaucacu

SEQ ID NO: 1712083 - RNA, 19 nt, Artificial Sequence
  Description of Artificial Sequence: Synthetic oligonucleotide
  Sense strand starting at position 1024 of SEQ ID NO: 1561971
gcugacauggcacacaauu

SEQ ID NO: 1712084 - RNA, 19 nt, Artificial Sequence
  Description of Artificial Sequence: Synthetic oligonucleotide
  Antisense strand to SEQ ID NO: 1712083
aauugugugccaugucagc

SEQ ID NO: 1712085 - RNA, 19 nt, Artificial Sequence
  Description of Artificial Sequence: Synthetic oligonucleotide
  Sense strand starting at position 1206 of SEQ ID NO: 1561971
cucauaaaggcucagcuau

SEQ ID NO: 1712086 - RNA, 19 nt, Artificial Sequence
  Description of Artificial Sequence: Synthetic oligonucleotide
  Antisense strand to SEQ ID NO: 1712085
auagcugagccuuuaugag

SEQ ID NO: 1712087 - RNA, 19 nt, Artificial Sequence
  Description of Artificial Sequence: Synthetic oligonucleotide
  Sense strand starting at position 1280 of SEQ ID NO: 1561971
uggcaauauguccaacacu

SEQ ID NO: 1712088 - RNA, 19 nt, Artificial Sequence
  Description of Artificial Sequence: Synthetic oligonucleotide
  Antisense strand to SEQ ID NO: 1712087
aguguuggacauauugcca

SEQ ID NO: 1712089 - RNA, 19 nt, Artificial Sequence
  Description of Artificial Sequence: Synthetic oligonucleotide
  Sense strand starting at position 1289 of SEQ ID NO: 1561971
guccaacacuucucgggaa

SEQ ID NO: 1712090 - RNA, 19 nt, Artificial Sequence
  Description of Artificial Sequence: Synthetic oligonucleotide
  Antisense strand to SEQ ID NO: 1712089
uucccgagaaguguuggac

SEQ ID NO: 1712091 - RNA, 19 nt, Artificial Sequence
  Description of Artificial Sequence: Synthetic oligonucleotide
  Sense strand starting at position 1560 of SEQ ID NO: 1561971
uugcaucuccuaggagaug

SEQ ID NO: 1712092 - RNA, 19 nt, Artificial Sequence
  Description of Artificial Sequence: Synthetic oligonucleotide
  Antisense strand to SEQ ID NO: 1712091
caucuccuaggagaugcaa

SEQ ID NO: 1712093 - RNA, 19 nt, Artificial Sequence
  Description of Artificial Sequence: Synthetic oligonucleotide
  Sense strand starting at position 2626 of SEQ ID NO: 1561971
gcugcugucugauuucgaa

SEQ ID NO: 1712094 - RNA, 19 nt, Artificial Sequence
  Description of Artificial Sequence: Synthetic oligonucleotide
  Antisense strand to SEQ ID NO: 1712093
uucgaaaucagacagcagc

SEQ ID NO: 1712095 - RNA, 19 nt, Artificial Sequence
  Description of Artificial Sequence: Synthetic oligonucleotide
  Sense strand starting at position 2630 of SEQ ID NO: 1561971
cugucugauuucgaauuua

SEQ ID NO: 1712096 - RNA, 19 nt, Artificial Sequence
  Description of Artificial Sequence: Synthetic oligonucleotide
  Antisense strand to SEQ ID NO: 1712095
uaaauucgaaaucagacag

SEQ ID NO: 1712097 - RNA, 19 nt, Artificial Sequence
  Description of Artificial Sequence: Synthetic oligonucleotide
  Sense strand starting at position 2774 of SEQ ID NO: 1561971
uuuccugagcugggacaaa

SEQ ID NO: 1712098 - RNA, 19 nt, Artificial Sequence
  Description of Artificial Sequence: Synthetic oligonucleotide
  Antisense strand to SEQ ID NO: 1712097
uuugucccagcucaggaaa

SEQ ID NO: 1712099 - RNA, 19 nt, Artificial Sequence
  Description of Artificial Sequence: Synthetic oligonucleotide
  Sense strand starting at position 2813 of SEQ ID NO: 1561971
guguuuauuguacaucuaa

SEQ ID NO: 1712100 - RNA, 19 nt, Artificial Sequence
  Description of Artificial Sequence: Synthetic oligonucleotide
  Antisense strand to SEQ ID NO: 1712099
uuagauguacaauaaacac

SEQ ID NO: 1712101 - RNA, 19 nt, Artificial Sequence
  Description of Artificial Sequence: Synthetic oligonucleotide
  Sense strand starting at position 2929 of SEQ ID NO: 1561971
gauguuugggcugaaguuu

SEQ ID NO: 1712102 - RNA, 19 nt, Artificial Sequence
  Description of Artificial Sequence: Synthetic oligonucleotide
  Antisense strand to SEQ ID NO: 1712101
aaacuucagcccaaacauc

SEQ ID NO: 1712103 - RNA, 19 nt, Artificial Sequence
  Description of Artificial Sequence: Synthetic oligonucleotide
  Sense strand starting at position 3004 of SEQ ID NO: 1561971
ucuugaagucuccagcauu

SEQ ID NO: 1712104 - RNA, 19 nt, Artificial Sequence
  Description of Artificial Sequence: Synthetic oligonucleotide
  Antisense strand to SEQ ID NO: 1712103
aaugcuggagacuucaaga

SEQ ID NO: 1712105 - RNA, 19 nt, Artificial Sequence
  Description of Artificial Sequence: Synthetic oligonucleotide
  Sense strand starting at position 3007 of SEQ ID NO: 1561971
ugaagucuccagcauuauc

SEQ ID NO: 1712106 - RNA, 19 nt, Artificial Sequence
  Description of Artificial Sequence: Synthetic oligonucleotide
  Antisense strand to SEQ ID NO: 1712105
gauaaugcuggagacuuca

SEQ ID NO: 1712107 - RNA, 19 nt, Artificial Sequence
  Description of Artificial Sequence: Synthetic oligonucleotide
  Sense strand starting at position 3137 of SEQ ID NO: 1561971
gcuaguaguggauauggaa

SEQ ID NO: 1712108 - RNA, 19 nt, Artificial Sequence
  Description of Artificial Sequence: Synthetic oligonucleotide
  Antisense strand to SEQ ID NO: 1712107
uuccauauccacuacuagc

SEQ ID NO: 1712109 - RNA, 19 nt, Artificial Sequence
  Description of Artificial Sequence: Synthetic oligonucleotide
  Sense strand starting at position 3192 of SEQ ID NO: 1561971
ggauuuguaucucuccguu

SEQ ID NO: 1712110 - RNA, 19 nt, Artificial Sequence
  Description of Artificial Sequence: Synthetic oligonucleotide
  Antisense strand to SEQ ID NO: 1712109
aacggagagauacaaaucc

SEQ ID NO: 1712111 - RNA, 19 nt, Artificial Sequence
  Description of Artificial Sequence: Synthetic oligonucleotide
  Sense strand starting at position 3309 of SEQ ID NO: 1561971
uuguacuggccauaucaaa

SEQ ID NO: 1712112 - RNA, 19 nt, Artificial Sequence
  Description of Artificial Sequence: Synthetic oligonucleotide
  Antisense strand to SEQ ID NO: 1712111
uuugauauggccaguacaa

SEQ ID NO: 1712113 - RNA, 19 nt, Artificial Sequence
  Description of Artificial Sequence: Synthetic oligonucleotide
  Sense strand starting at position 3550 of SEQ ID NO: 1561971
agauaucguuuauuuguca

SEQ ID NO: 1712114 - RNA, 19 nt, Artificial Sequence
  Description of Artificial Sequence: Synthetic oligonucleotide
  Antisense strand to SEQ ID NO: 1712113
ugacaaauaaacgauaucu

SEQ ID NO: 1712115 - RNA, 19 nt, Artificial Sequence
  Description of Artificial Sequence: Synthetic oligonucleotide
  Sense strand starting at position 3551 of SEQ ID NO: 1561971
gauaucguuuauuugucau

SEQ ID NO: 1712116 - RNA, 19 nt, Artificial Sequence
  Description of Artificial Sequence: Synthetic oligonucleotide
  Antisense strand to SEQ ID NO: 1712115
augacaaauaaacgauauc

SEQ ID NO: 1712117 - RNA, 19 nt, Artificial Sequence
  Description of Artificial Sequence: Synthetic oligonucleotide
  Sense strand starting at position 3557 of SEQ ID NO: 1561971
guuuauuugucauugguua

SEQ ID NO: 1712118 - RNA, 19 nt, Artificial Sequence
  Description of Artificial Sequence: Synthetic oligonucleotide
  Antisense strand to SEQ ID NO: 1712117
uaaccaaugacaaauaaac

SEQ ID NO: 1712119 - RNA, 19 nt, Artificial Sequence
  Description of Artificial Sequence: Synthetic oligonucleotide
  Sense strand starting at position 3559 of SEQ ID NO: 1561971
uuauuugucauugguuagu

SEQ ID NO: 1712120 - RNA, 19 nt, Artificial Sequence
  Description of Artificial Sequence: Synthetic oligonucleotide
  Antisense strand to SEQ ID NO: 1712119
acuaaccaaugacaaauaa

SEQ ID NO: 1712121 - RNA, 19 nt, Artificial Sequence
  Description of Artificial Sequence: Synthetic oligonucleotide
  Sense strand starting at position 3561 of SEQ ID NO: 1561971
auuugucauugguuaguau

SEQ ID NO: 1712122 - RNA, 19 nt, Artificial Sequence
  Description of Artificial Sequence: Synthetic oligonucleotide
  Antisense strand to SEQ ID NO: 1712121
auacuaaccaaugacaaau

SEQ ID NO: 1712123 - RNA, 19 nt, Artificial Sequence
  Description of Artificial Sequence: Synthetic oligonucleotide
  Sense strand starting at position 3659 of SEQ ID NO: 1561971
acauuuguuucugcuaguu

SEQ ID NO: 1712124 - RNA, 19 nt, Artificial Sequence
  Description of Artificial Sequence: Synthetic oligonucleotide
  Antisense strand to SEQ ID NO: 1712123
aacuagcagaaacaaaugu

SEQ ID NO: 1712125 - RNA, 19 nt, Artificial Sequence
  Description of Artificial Sequence: Synthetic oligonucleotide
  Sense strand starting at position 3977 of SEQ ID NO: 1561971
ucagaaugaccaugaguug

SEQ ID NO: 1712126 - RNA, 19 nt, Artificial Sequence
  Description of Artificial Sequence: Synthetic oligonucleotide
  Antisense strand to SEQ ID NO: 1712125
caacucauggucauucuga

SEQ ID NO: 1712127 - RNA, 19 nt, Artificial Sequence
  Description of Artificial Sequence: Synthetic oligonucleotide
  Sense strand starting at position 3983 of SEQ ID NO: 1561971
ugaccaugaguuggucuga

SEQ ID NO: 1712128 - RNA, 19 nt, Artificial Sequence
  Description of Artificial Sequence: Synthetic oligonucleotide
  Antisense strand to SEQ ID NO: 1712127
ucagaccaacucaugguca

SEQ ID NO: 1712129 - RNA, 19 nt, Artificial Sequence
  Description of Artificial Sequence: Synthetic oligonucleotide
  Sense strand starting at position 70 of SEQ ID NO: 1561972
ucauccauaucagagaaga

SEQ ID NO: 1712130 - RNA, 19 nt, Artificial Sequence
  Description of Artificial Sequence: Synthetic oligonucleotide
  Antisense strand to SEQ ID NO: 1712129
ucuucucugauauggauga

SEQ ID NO: 1712131 - RNA, 19 nt, Artificial Sequence
  Description of Artificial Sequence: Synthetic oligonucleotide
  Sense strand starting at position 104 of SEQ ID NO: 1561972
gggugacugggcuaaggua

SEQ ID NO: 1712132 - RNA, 19 nt, Artificial Sequence
  Description of Artificial Sequence: Synthetic oligonucleotide
  Antisense strand to SEQ ID NO: 1712131
uaccuuagcccagucaccc

SEQ ID NO: 1712133 - RNA, 19 nt, Artificial Sequence
  Description of Artificial Sequence: Synthetic oligonucleotide
  Sense strand starting at position 274 of SEQ ID NO: 1561972
auuacaguaucaggacaau

SEQ ID NO: 1712134 - RNA, 19 nt, Artificial Sequence
  Description of Artificial Sequence: Synthetic oligonucleotide
  Antisense strand to SEQ ID NO: 1712133
auuguccugauacuguaau

SEQ ID NO: 1712135 - RNA, 19 nt, Artificial Sequence
  Description of Artificial Sequence: Synthetic oligonucleotide
  Sense strand starting at position 323 of SEQ ID NO: 1561972
ggcagcgguccugaauuga

SEQ ID NO: 1712136 - RNA, 19 nt, Artificial Sequence
  Description of Artificial Sequence: Synthetic oligonucleotide
  Antisense strand to SEQ ID NO: 1712135
ucaauucaggaccgcugcc

SEQ ID NO: 1712137 - RNA, 19 nt, Artificial Sequence
  Description of Artificial Sequence: Synthetic oligonucleotide
  Sense strand starting at position 400 of SEQ ID NO: 1561972
aacggauucucugggagga

SEQ ID NO: 1712138 - RNA, 19 nt, Artificial Sequence
  Description of Artificial Sequence: Synthetic oligonucleotide
  Antisense strand to SEQ ID NO: 1712137
uccucccagagaauccguu

SEQ ID NO: 1712139 - RNA, 19 nt, Artificial Sequence
  Description of Artificial Sequence: Synthetic oligonucleotide
  Sense strand starting at position 497 of SEQ ID NO: 1561972
acaguucugaaucgugagu

SEQ ID NO: 1712140 - RNA, 19 nt, Artificial Sequence
  Description of Artificial Sequence: Synthetic oligonucleotide
  Antisense strand to SEQ ID NO: 1712139
acucacgauucagaacugu

SEQ ID NO: 1712141 - RNA, 19 nt, Artificial Sequence
  Description of Artificial Sequence: Synthetic oligonucleotide
  Sense strand starting at position 506 of SEQ ID NO: 1561972
aaucgugaguaccugcaaa

SEQ ID NO: 1712142 - RNA, 19 nt, Artificial Sequence
  Description of Artificial Sequence: Synthetic oligonucleotide
  Antisense strand to SEQ ID NO: 1712141
uuugcagguacucacgauu

SEQ ID NO: 1712143 - RNA, 19 nt, Artificial Sequence
  Description of Artificial Sequence: Synthetic oligonucleotide
  Sense strand starting at position 567 of SEQ ID NO: 1561972
ccuggauucucacgagaag

SEQ ID NO: 1712144 - RNA, 19 nt, Artificial Sequence
  Description of Artificial Sequence: Synthetic oligonucleotide
  Antisense strand to SEQ ID NO: 1712143
cuucucgugagaauccagg

SEQ ID NO: 1712145 - RNA, 19 nt, Artificial Sequence
  Description of Artificial Sequence: Synthetic oligonucleotide
  Sense strand starting at position 598 of SEQ ID NO: 1561972
cuuagaggugcacggaaua

SEQ ID NO: 1712146 - RNA, 19 nt, Artificial Sequence
  Description of Artificial Sequence: Synthetic oligonucleotide
  Antisense strand to SEQ ID NO: 1712145
uauuccgugcaccucuaag

SEQ ID NO: 1712147 - RNA, 19 nt, Artificial Sequence
  Description of Artificial Sequence: Synthetic oligonucleotide
  Sense strand starting at position 690 of SEQ ID NO: 1561972
gacuuaaaguauuagagag

SEQ ID NO: 1712148 - RNA, 19 nt, Artificial Sequence
  Description of Artificial Sequence: Synthetic oligonucleotide
  Antisense strand to SEQ ID NO: 1712147
cucucuaauacuuuaaguc

SEQ ID NO: 1712149 - RNA, 19 nt, Artificial Sequence
  Description of Artificial Sequence: Synthetic oligonucleotide
  Sense strand starting at position 704 of SEQ ID NO: 1561972
gagagcagcucuuuggaaa

SEQ ID NO: 1712150 - RNA, 19 nt, Artificial Sequence
  Description of Artificial Sequence: Synthetic oligonucleotide
  Antisense strand to SEQ ID NO: 1712149
uuuccaaagagcugcucuc

SEQ ID NO: 1712151 - RNA, 19 nt, Artificial Sequence
  Description of Artificial Sequence: Synthetic oligonucleotide
  Sense strand starting at position 788 of SEQ ID NO: 1561972
agaagccuucucgaggaua

SEQ ID NO: 1712152 - RNA, 19 nt, Artificial Sequence
  Description of Artificial Sequence: Synthetic oligonucleotide
  Antisense strand to SEQ ID NO: 1712151
uauccucgagaaggcuucu

SEQ ID NO: 1712153 - RNA, 19 nt, Artificial Sequence
  Description of Artificial Sequence: Synthetic oligonucleotide
  Sense strand starting at position 790 of SEQ ID NO: 1561972
aagccuucucgaggauaaa

SEQ ID NO: 1712154 - RNA, 19 nt, Artificial Sequence
  Description of Artificial Sequence: Synthetic oligonucleotide
  Antisense strand to SEQ ID NO: 1712153
uuuauccucgagaaggcuu

SEQ ID NO: 1712155 - RNA, 19 nt, Artificial Sequence
  Description of Artificial Sequence: Synthetic oligonucleotide
  Sense strand starting at position 893 of SEQ ID NO: 1561972
gcgggaagugcauaccaau

SEQ ID NO: 1712156 - RNA, 19 nt, Artificial Sequence
  Description of Artificial Sequence: Synthetic oligonucleotide
  Antisense strand to SEQ ID NO: 1712155
auugguaugcacuucccgc

SEQ ID NO: 1712157 - RNA, 19 nt, Artificial Sequence
  Description of Artificial Sequence: Synthetic oligonucleotide
  Sense strand starting at position 2105 of SEQ ID NO: 1561972
gguuauaaauccuucgcca

SEQ ID NO: 1712158 - RNA, 19 nt, Artificial Sequence
  Description of Artificial Sequence: Synthetic oligonucleotide
  Antisense strand to SEQ ID NO: 1712157
uggcgaaggauuuauaacc

SEQ ID NO: 1712159 - RNA, 19 nt, Artificial Sequence
  Description of Artificial Sequence: Synthetic oligonucleotide
  Sense strand starting at position 2158 of SEQ ID NO: 1561972
ggaaguagaguuggccuuu

SEQ ID NO: 1712160 - RNA, 19 nt, Artificial Sequence
  Description of Artificial Sequence: Synthetic oligonucleotide
  Antisense strand to SEQ ID NO: 1712159
aaaggccaacucuacuucc

SEQ ID NO: 1712161 - RNA, 19 nt, Artificial Sequence
  Description of Artificial Sequence: Synthetic oligonucleotide
  Sense strand starting at position 2195 of SEQ ID NO: 1561972
cccuuucugggugaugcau

SEQ ID NO: 1712162 - RNA, 19 nt, Artificial Sequence
  Description of Artificial Sequence: Synthetic oligonucleotide
  Antisense strand to SEQ ID NO: 1712161
augcaucacccagaaaggg

SEQ ID NO: 1712163 - RNA, 19 nt, Artificial Sequence
  Description of Artificial Sequence: Synthetic oligonucleotide
  Sense strand starting at position 2225 of SEQ ID NO: 1561972
gaaggauuuggcugccgcu

SEQ ID NO: 1712164 - RNA, 19 nt, Artificial Sequence
  Description of Artificial Sequence: Synthetic oligonucleotide
  Antisense strand to SEQ ID NO: 1712163
agcggcagccaaauccuuc

SEQ ID NO: 1712165 - RNA, 19 nt, Artificial Sequence
  Description of Artificial Sequence: Synthetic oligonucleotide
  Sense strand starting at position 2423 of SEQ ID NO: 1561972
acuggacugugggcuaauu

SEQ ID NO: 1712166 - RNA, 19 nt, Artificial Sequence
  Description of Artificial Sequence: Synthetic oligonucleotide
  Antisense strand to SEQ ID NO: 1712165
aauuagcccacaguccagu

SEQ ID NO: 1712167 - RNA, 19 nt, Artificial Sequence
  Description of Artificial Sequence: Synthetic oligonucleotide
  Sense strand starting at position 2425 of SEQ ID NO: 1561972
uggacugugggcuaauuaa

SEQ ID NO: 1712168 - RNA, 19 nt, Artificial Sequence
  Description of Artificial Sequence: Synthetic oligonucleotide
  Antisense strand to SEQ ID NO: 1712167
uuaauuagcccacagucca

SEQ ID NO: 1712169 - RNA, 19 nt, Artificial Sequence
  Description of Artificial Sequence: Synthetic oligonucleotide
  Sense strand starting at position 2733 of SEQ ID NO: 1561972
ucgcuugugcuugcugaau

SEQ ID NO: 1712170 - RNA, 19 nt, Artificial Sequence
  Description of Artificial Sequence: Synthetic oligonucleotide
  Antisense strand to SEQ ID NO: 1712169
auucagcaagcacaagcga

SEQ ID NO: 1712171 - RNA, 19 nt, Artificial Sequence
  Description of Artificial Sequence: Synthetic oligonucleotide
  Sense strand starting at position 2739 of SEQ ID NO: 1561972
gugcuugcugaauagaauu

SEQ ID NO: 1712172 - RNA, 19 nt, Artificial Sequence
  Description of Artificial Sequence: Synthetic oligonucleotide
  Antisense strand to SEQ ID NO: 1712171
aauucuauucagcaagcac

SEQ ID NO: 1712173 - RNA, 19 nt, Artificial Sequence
  Description of Artificial Sequence: Synthetic oligonucleotide
  Sense strand starting at position 2875 of SEQ ID NO: 1561972
ucuaaaucucagugccuga

SEQ ID NO: 1712174 - RNA, 19 nt, Artificial Sequence
  Description of Artificial Sequence: Synthetic oligonucleotide
  Antisense strand to SEQ ID NO: 1712173
ucaggcacugagauuuaga

SEQ ID NO: 1712175 - RNA, 19 nt, Artificial Sequence
  Description of Artificial Sequence: Synthetic oligonucleotide
  Sense strand starting at position 2970 of SEQ ID NO: 1561972
aagucugagcucugaucau

SEQ ID NO: 1712176 - RNA, 19 nt, Artificial Sequence
  Description of Artificial Sequence: Synthetic oligonucleotide
  Antisense strand to SEQ ID NO: 1712175
augaucagagcucagacuu

SEQ ID NO: 1712177 - RNA, 19 nt, Artificial Sequence
  Description of Artificial Sequence: Synthetic oligonucleotide
  Sense strand starting at position 2979 of SEQ ID NO: 1561972
cucugaucauccugaagaa

SEQ ID NO: 1712178 - RNA, 19 nt, Artificial Sequence
  Description of Artificial Sequence: Synthetic oligonucleotide
  Antisense strand to SEQ ID NO: 1712177
uucuucaggaugaucagag

SEQ ID NO: 1712179 - RNA, 19 nt, Artificial Sequence
  Description of Artificial Sequence: Synthetic oligonucleotide
  Sense strand starting at position 3096 of SEQ ID NO: 1561972
ucacuuaguccuugcagua

SEQ ID NO: 1712180 - RNA, 19 nt, Artificial Sequence
  Description of Artificial Sequence: Synthetic oligonucleotide
  Antisense strand to SEQ ID NO: 1712179
uacugcaaggacuaaguga

SEQ ID NO: 1712181 - RNA, 19 nt, Artificial Sequence
  Description of Artificial Sequence: Synthetic oligonucleotide
  Sense strand starting at position 3109 of SEQ ID NO: 1561972
gcaguaacauuuggaugau

SEQ ID NO: 1712182 - RNA, 19 nt, Artificial Sequence
  Description of Artificial Sequence: Synthetic oligonucleotide
  Antisense strand to SEQ ID NO: 1712181
aucauccaaauguuacugc

SEQ ID NO: 1712183 - RNA, 19 nt, Artificial Sequence
  Description of Artificial Sequence: Synthetic oligonucleotide
  Sense strand starting at position 3115 of SEQ ID NO: 1561972
acauuuggaugaugaggua

SEQ ID NO: 1712184 - RNA, 19 nt, Artificial Sequence
  Description of Artificial Sequence: Synthetic oligonucleotide
  Antisense strand to SEQ ID NO: 1712183
uaccucaucauccaaaugu

SEQ ID NO: 1712185 - RNA, 19 nt, Artificial Sequence
  Description of Artificial Sequence: Synthetic oligonucleotide
  Sense strand starting at position 3127 of SEQ ID NO: 1561972
ugagguaacuuauccagaa

SEQ ID NO: 1712186 - RNA, 19 nt, Artificial Sequence
  Description of Artificial Sequence: Synthetic oligonucleotide
  Antisense strand to SEQ ID NO: 1712185
uucuggauaaguuaccuca

SEQ ID NO: 1712187 - RNA, 19 nt, Artificial Sequence
  Description of Artificial Sequence: Synthetic oligonucleotide
  Sense strand starting at position 3131 of SEQ ID NO: 1561972
guaacuuauccagaagcac

SEQ ID NO: 1712188 - RNA, 19 nt, Artificial Sequence
  Description of Artificial Sequence: Synthetic oligonucleotide
  Antisense strand to SEQ ID NO: 1712187
gugcuucuggauaaguuac

SEQ ID NO: 1712189 - RNA, 19 nt, Artificial Sequence
  Description of Artificial Sequence: Synthetic oligonucleotide
  Sense strand starting at position 3194 of SEQ ID NO: 1561972
uacugcccgccuuaugaua

SEQ ID NO: 1712190 - RNA, 19 nt, Artificial Sequence
  Description of Artificial Sequence: Synthetic oligonucleotide
  Antisense strand to SEQ ID NO: 1712189
uaucauaaggcgggcagua

SEQ ID NO: 1712191 - RNA, 19 nt, Artificial Sequence
  Description of Artificial Sequence: Synthetic oligonucleotide
  Sense strand starting at position 3546 of SEQ ID NO: 1561972
ccacaaguucgagaccacu

SEQ ID NO: 1712192 - RNA, 19 nt, Artificial Sequence
  Description of Artificial Sequence: Synthetic oligonucleotide
  Antisense strand to SEQ ID NO: 1712191
aguggucucgaacuugugg

SEQ ID NO: 1712193 - RNA, 19 nt, Artificial Sequence
  Description of Artificial Sequence: Synthetic oligonucleotide
  Sense strand starting at position 3914 of SEQ ID NO: 1561972
ugggcuucuagauggcuaa

SEQ ID NO: 1712194 - RNA, 19 nt, Artificial Sequence
  Description of Artificial Sequence: Synthetic oligonucleotide
  Antisense strand to SEQ ID NO: 1712193
uuagccaucuagaagccca

SEQ ID NO: 1712195 - RNA, 19 nt, Artificial Sequence
  Description of Artificial Sequence: Synthetic oligonucleotide
  Sense strand starting at position 3915 of SEQ ID NO: 1561972
gggcuucuagauggcuaau

SEQ ID NO: 1712196 - RNA, 19 nt, Artificial Sequence
  Description of Artificial Sequence: Synthetic oligonucleotide
  Antisense strand to SEQ ID NO: 1712195
auuagccaucuagaagccc

SEQ ID NO: 1712197 - RNA, 19 nt, Artificial Sequence
  Description of Artificial Sequence: Synthetic oligonucleotide
  Sense strand starting at position 3917 of SEQ ID NO: 1561972
gcuucuagauggcuaauga

SEQ ID NO: 1712198 - RNA, 19 nt, Artificial Sequence
  Description of Artificial Sequence: Synthetic oligonucleotide
  Antisense strand to SEQ ID NO: 1712197
ucauuagccaucuagaagc

SEQ ID NO: 1712199 - RNA, 19 nt, Artificial Sequence
  Description of Artificial Sequence: Synthetic oligonucleotide
  Sense strand starting at position 3918 of SEQ ID NO: 1561972
cuucuagauggcuaaugau

SEQ ID NO: 1712200 - RNA, 19 nt, Artificial Sequence
  Description of Artificial Sequence: Synthetic oligonucleotide
  Antisense strand to SEQ ID NO: 1712199
aucauuagccaucuagaag

SEQ ID NO: 1712201 - RNA, 19 nt, Artificial Sequence
  Description of Artificial Sequence: Synthetic oligonucleotide
  Sense strand starting at position 3921 of SEQ ID NO: 1561972
cuagauggcuaaugauauu

SEQ ID NO: 1712202 - RNA, 19 nt, Artificial Sequence
  Description of Artificial Sequence: Synthetic oligonucleotide
  Antisense strand to SEQ ID NO: 1712201
aauaucauuagccaucuag

SEQ ID NO: 1712203 - RNA, 19 nt, Artificial Sequence
  Description of Artificial Sequence: Synthetic oligonucleotide
  Sense strand starting at position 3932 of SEQ ID NO: 1561972
augauauucuguuucuuug

SEQ ID NO: 1712204 - RNA, 19 nt, Artificial Sequence
  Description of Artificial Sequence: Synthetic oligonucleotide
  Antisense strand to SEQ ID NO: 1712203
caaagaaacagaauaucau

SEQ ID NO: 1712205 - RNA, 19 nt, Artificial Sequence
  Description of Artificial Sequence: Synthetic oligonucleotide
  Sense strand starting at position 3972 of SEQ ID NO: 1561972
guguguucccuuuguaaua

SEQ ID NO: 1712206 - RNA, 19 nt, Artificial Sequence
  Description of Artificial Sequence: Synthetic oligonucleotide
  Antisense strand to SEQ ID NO: 1712205
uauuacaaagggaacacac

SEQ ID NO: 1712207 - RNA, 19 nt, Artificial Sequence
  Description of Artificial Sequence: Synthetic oligonucleotide
  Sense strand starting at position 3973 of SEQ ID NO: 1561972
uguguucccuuuguaauau

SEQ ID NO: 1712208 - RNA, 19 nt, Artificial Sequence
  Description of Artificial Sequence: Synthetic oligonucleotide
  Antisense strand to SEQ ID NO: 1712207
auauuacaaagggaacaca

SEQ ID NO: 1712209 - RNA, 19 nt, Artificial Sequence
  Description of Artificial Sequence: Synthetic oligonucleotide
  Sense strand starting at position 67 of SEQ ID NO: 1561973
ggcuaauggcuauacucuu

SEQ ID NO: 1712210 - RNA, 19 nt, Artificial Sequence
  Description of Artificial Sequence: Synthetic oligonucleotide
  Antisense strand to SEQ ID NO: 1712209
aagaguauagccauuagcc

SEQ ID NO: 1712211 - RNA, 19 nt, Artificial Sequence
  Description of Artificial Sequence: Synthetic oligonucleotide
  Sense strand starting at position 90 of SEQ ID NO: 1561973
gcugaaucuuuggaauuua

SEQ ID NO: 1712212 - RNA, 19 nt, Artificial Sequence
  Description of Artificial Sequence: Synthetic oligonucleotide
  Antisense strand to SEQ ID NO: 1712211
uaaauuccaaagauucagc

SEQ ID NO: 1712213 - RNA, 19 nt, Artificial Sequence
  Description of Artificial Sequence: Synthetic oligonucleotide
  Sense strand starting at position 172 of SEQ ID NO: 1561973
ucaggugcuucucaaauaa

SEQ ID NO: 1712214 - RNA, 19 nt, Artificial Sequence
  Description of Artificial Sequence: Synthetic oligonucleotide
  Antisense strand to SEQ ID NO: 1712213
uuauuugagaagcaccuga

SEQ ID NO: 1712215 - RNA, 19 nt, Artificial Sequence
  Description of Artificial Sequence: Synthetic oligonucleotide
  Sense strand starting at position 241 of SEQ ID NO: 1561973
uuccaaaucuguugcaaga

SEQ ID NO: 1712216 - RNA, 19 nt, Artificial Sequence
  Description of Artificial Sequence: Synthetic oligonucleotide
  Antisense strand to SEQ ID NO: 1712215
ucuugcaacagauuuggaa

SEQ ID NO: 1712217 - RNA, 19 nt, Artificial Sequence
  Description of Artificial Sequence: Synthetic oligonucleotide
  Sense strand starting at position 243 of SEQ ID NO: 1561973
ccaaaucuguugcaagaag

SEQ ID NO: 1712218 - RNA, 19 nt, Artificial Sequence
  Description of Artificial Sequence: Synthetic oligonucleotide
  Antisense strand to SEQ ID NO: 1712217
cuucuugcaacagauuugg

SEQ ID NO: 1712219 - RNA, 19 nt, Artificial Sequence
  Description of Artificial Sequence: Synthetic oligonucleotide
  Sense strand starting at position 326 of SEQ ID NO: 1561973
ucauccauaucagagaaga

SEQ ID NO: 1712220 - RNA, 19 nt, Artificial Sequence
  Description of Artificial Sequence: Synthetic oligonucleotide
  Antisense strand to SEQ ID NO: 1712219
ucuucucugauauggauga

SEQ ID NO: 1712221 - RNA, 19 nt, Artificial Sequence
  Description of Artificial Sequence: Synthetic oligonucleotide
  Sense strand starting at position 360 of SEQ ID NO: 1561973
gggugacugggcuaaggua

SEQ ID NO: 1712222 - RNA, 19 nt, Artificial Sequence
  Description of Artificial Sequence: Synthetic oligonucleotide
  Antisense strand to SEQ ID NO: 1712221
uaccuuagcccagucaccc

SEQ ID NO: 1712223 - RNA, 19 nt, Artificial Sequence
  Description of Artificial Sequence: Synthetic oligonucleotide
  Sense strand starting at position 530 of SEQ ID NO: 1561973
auuacaguaucaggacaau

SEQ ID NO: 1712224 - RNA, 19 nt, Artificial Sequence
  Description of Artificial Sequence: Synthetic oligonucleotide
  Antisense strand to SEQ ID NO: 1712223
auuguccugauacuguaau

SEQ ID NO: 1712225 - RNA, 19 nt, Artificial Sequence
  Description of Artificial Sequence: Synthetic oligonucleotide
  Sense strand starting at position 579 of SEQ ID NO: 1561973
ggcagcgguccugaauuga

SEQ ID NO: 1712226 - RNA, 19 nt, Artificial Sequence
  Description of Artificial Sequence: Synthetic oligonucleotide
  Antisense strand to SEQ ID NO: 1712225
ucaauucaggaccgcugcc

SEQ ID NO: 1712227 - RNA, 19 nt, Artificial Sequence
  Description of Artificial Sequence: Synthetic oligonucleotide
  Sense strand starting at position 656 of SEQ ID NO: 1561973
aacggauucucugggagga

SEQ ID NO: 1712228 - RNA, 19 nt, Artificial Sequence
  Description of Artificial Sequence: Synthetic oligonucleotide
  Antisense strand to SEQ ID NO: 1712227
uccucccagagaauccguu

SEQ ID NO: 1712229 - RNA, 19 nt, Artificial Sequence
  Description of Artificial Sequence: Synthetic oligonucleotide
  Sense strand starting at position 753 of SEQ ID NO: 1561973
acaguucugaaucgugagu

SEQ ID NO: 1712230 - RNA, 19 nt, Artificial Sequence
  Description of Artificial Sequence: Synthetic oligonucleotide
  Antisense strand to SEQ ID NO: 1712229
acucacgauucagaacugu

SEQ ID NO: 1712231 - RNA, 19 nt, Artificial Sequence
  Description of Artificial Sequence: Synthetic oligonucleotide
  Sense strand starting at position 762 of SEQ ID NO: 1561973
aaucgugaguaccugcaaa

SEQ ID NO: 1712232 - RNA, 19 nt, Artificial Sequence
  Description of Artificial Sequence: Synthetic oligonucleotide
  Antisense strand to SEQ ID NO: 1712231
uuugcagguacucacgauu

SEQ ID NO: 1712233 - RNA, 19 nt, Artificial Sequence
  Description of Artificial Sequence: Synthetic oligonucleotide
  Sense strand starting at position 823 of SEQ ID NO: 1561973
ccuggauucucacgagaag

SEQ ID NO: 1712234 - RNA, 19 nt, Artificial Sequence
  Description of Artificial Sequence: Synthetic oligonucleotide
  Antisense strand to SEQ ID NO: 1712233
cuucucgugagaauccagg

SEQ ID NO: 1712235 - RNA, 19 nt, Artificial Sequence
  Description of Artificial Sequence: Synthetic oligonucleotide
  Sense strand starting at position 854 of SEQ ID NO: 1561973
cuuagaggugcacggaaua

SEQ ID NO: 1712236 - RNA, 19 nt, Artificial Sequence
  Description of Artificial Sequence: Synthetic oligonucleotide
  Antisense strand to SEQ ID NO: 1712235
uauuccgugcaccucuaag

SEQ ID NO: 1712237 - RNA, 19 nt, Artificial Sequence
  Description of Artificial Sequence: Synthetic oligonucleotide
  Sense strand starting at position 923 of SEQ ID NO: 1561973
gcccgaaauugacgaauaa

SEQ ID NO: 1712238 - RNA, 19 nt, Artificial Sequence
  Description of Artificial Sequence: Synthetic oligonucleotide
  Antisense strand to SEQ ID NO: 1712237
uuauucgucaauuucgggc

SEQ ID NO: 1712239 - RNA, 19 nt, Artificial Sequence
  Description of Artificial Sequence: Synthetic oligonucleotide
  Sense strand starting at position 946 of SEQ ID NO: 1561973
gacuuaaaguauuagagag

SEQ ID NO: 1712240 - RNA, 19 nt, Artificial Sequence
  Description of Artificial Sequence: Synthetic oligonucleotide
  Antisense strand to SEQ ID NO: 1712239
cucucuaauacuuuaaguc

SEQ ID NO: 1712241 - RNA, 19 nt, Artificial Sequence
  Description of Artificial Sequence: Synthetic oligonucleotide
  Sense strand starting at position 960 of SEQ ID NO: 1561973
gagagcagcucuuuggaaa

SEQ ID NO: 1712242 - RNA, 19 nt, Artificial Sequence
  Description of Artificial Sequence: Synthetic oligonucleotide
  Antisense strand to SEQ ID NO: 1712241
uuuccaaagagcugcucuc

SEQ ID NO: 1712243 - RNA, 19 nt, Artificial Sequence
  Description of Artificial Sequence: Synthetic oligonucleotide
  Sense strand starting at position 1044 of SEQ ID NO: 1561973
agaagccuucucgaggaua

SEQ ID NO: 1712244 - RNA, 19 nt, Artificial Sequence
  Description of Artificial Sequence: Synthetic oligonucleotide
  Antisense strand to SEQ ID NO: 1712243
uauccucgagaaggcuucu

SEQ ID NO: 1712245 - RNA, 19 nt, Artificial Sequence
  Description of Artificial Sequence: Synthetic oligonucleotide
  Sense strand starting at position 1046 of SEQ ID NO: 1561973
aagccuucucgaggauaaa

SEQ ID NO: 1712246 - RNA, 19 nt, Artificial Sequence
  Description of Artificial Sequence: Synthetic oligonucleotide
  Antisense strand to SEQ ID NO: 1712245
uuuauccucgagaaggcuu

SEQ ID NO: 1712247 - RNA, 19 nt, Artificial Sequence
  Description of Artificial Sequence: Synthetic oligonucleotide
  Sense strand starting at position 1149 of SEQ ID NO: 1561973
gcgggaagugcauaccaau

SEQ ID NO: 1712248 - RNA, 19 nt, Artificial Sequence
  Description of Artificial Sequence: Synthetic oligonucleotide
  Antisense strand to SEQ ID NO: 1712247
auugguaugcacuucccgc

SEQ ID NO: 1712249 - RNA, 19 nt, Artificial Sequence
  Description of Artificial Sequence: Synthetic oligonucleotide
  Sense strand starting at position 2361 of SEQ ID NO: 1561973
gguuauaaauccuucgcca

SEQ ID NO: 1712250 - RNA, 19 nt, Artificial Sequence
  Description of Artificial Sequence: Synthetic oligonucleotide
  Antisense strand to SEQ ID NO: 1712249
uggcgaaggauuuauaacc

SEQ ID NO: 1712251 - RNA, 19 nt, Artificial Sequence
  Description of Artificial Sequence: Synthetic oligonucleotide
  Sense strand starting at position 2414 of SEQ ID NO: 1561973
ggaaguagaguuggccuuu

SEQ ID NO: 1712252 - RNA, 19 nt, Artificial Sequence
  Description of Artificial Sequence: Synthetic oligonucleotide
  Antisense strand to SEQ ID NO: 1712251
aaaggccaacucuacuucc

SEQ ID NO: 1712253 - RNA, 19 nt, Artificial Sequence
  Description of Artificial Sequence: Synthetic oligonucleotide
  Sense strand starting at position 2451 of SEQ ID NO: 1561973
cccuuucugggugaugcau

SEQ ID NO: 1712254 - RNA, 19 nt, Artificial Sequence
  Description of Artificial Sequence: Synthetic oligonucleotide
  Antisense strand to SEQ ID NO: 1712253
augcaucacccagaaaggg

SEQ ID NO: 1712255 - RNA, 19 nt, Artificial Sequence
  Description of Artificial Sequence: Synthetic oligonucleotide
  Sense strand starting at position 2481 of SEQ ID NO: 1561973
gaaggauuuggcugccgcu

SEQ ID NO: 1712256 - RNA, 19 nt, Artificial Sequence
  Description of Artificial Sequence: Synthetic oligonucleotide
  Antisense strand to SEQ ID NO: 1712255
agcggcagccaaauccuuc

SEQ ID NO: 1712257 - RNA, 19 nt, Artificial Sequence
  Description of Artificial Sequence: Synthetic oligonucleotide
  Sense strand starting at position 2679 of SEQ ID NO: 1561973
acuggacugugggcuaauu

SEQ ID NO: 1712258 - RNA, 19 nt, Artificial Sequence
  Description of Artificial Sequence: Synthetic oligonucleotide
  Antisense strand to SEQ ID NO: 1712257
aauuagcccacaguccagu

SEQ ID NO: 1712259 - RNA, 19 nt, Artificial Sequence
  Description of Artificial Sequence: Synthetic oligonucleotide
  Sense strand starting at position 2681 of SEQ ID NO: 1561973
uggacugugggcuaauuaa

SEQ ID NO: 1712260 - RNA, 19 nt, Artificial Sequence
  Description of Artificial Sequence: Synthetic oligonucleotide
  Antisense strand to SEQ ID NO: 1712259
uuaauuagcccacagucca

SEQ ID NO: 1712261 - RNA, 19 nt, Artificial Sequence
  Description of Artificial Sequence: Synthetic oligonucleotide
  Sense strand starting at position 2988 of SEQ ID NO: 1561973
uucgcuugugcuugcugaa

SEQ ID NO: 1712262 - RNA, 19 nt, Artificial Sequence
  Description of Artificial Sequence: Synthetic oligonucleotide
  Antisense strand to SEQ ID NO: 1712261
uucagcaagcacaagcgaa

SEQ ID NO: 1712263 - RNA, 19 nt, Artificial Sequence
  Description of Artificial Sequence: Synthetic oligonucleotide
  Sense strand starting at position 2989 of SEQ ID NO: 1561973
ucgcuugugcuugcugaau

SEQ ID NO: 1712264 - RNA, 19 nt, Artificial Sequence
  Description of Artificial Sequence: Synthetic oligonucleotide
  Antisense strand to SEQ ID NO: 1712263
auucagcaagcacaagcga

SEQ ID NO: 1712265 - RNA, 19 nt, Artificial Sequence
  Description of Artificial Sequence: Synthetic oligonucleotide
  Sense strand starting at position 2995 of SEQ ID NO: 1561973
gugcuugcugaauagaauu

SEQ ID NO: 1712266 - RNA, 19 nt, Artificial Sequence
  Description of Artificial Sequence: Synthetic oligonucleotide
  Antisense strand to SEQ ID NO: 1712265
aauucuauucagcaagcac

SEQ ID NO: 1712267 - RNA, 19 nt, Artificial Sequence
  Description of Artificial Sequence: Synthetic oligonucleotide
  Sense strand starting at position 3063 of SEQ ID NO: 1561973
aauucuagcuccuguagga

SEQ ID NO: 1712268 - RNA, 19 nt, Artificial Sequence
  Description of Artificial Sequence: Synthetic oligonucleotide
  Antisense strand to SEQ ID NO: 1712267
uccuacaggagcuagaauu

SEQ ID NO: 1712269 - RNA, 19 nt, Artificial Sequence
  Description of Artificial Sequence: Synthetic oligonucleotide
  Sense strand starting at position 3131 of SEQ ID NO: 1561973
ucuaaaucucagugccuga

SEQ ID NO: 1712270 - RNA, 19 nt, Artificial Sequence
  Description of Artificial Sequence: Synthetic oligonucleotide
  Antisense strand to SEQ ID NO: 1712269
ucaggcacugagauuuaga

SEQ ID NO: 1712271 - RNA, 19 nt, Artificial Sequence
  Description of Artificial Sequence: Synthetic oligonucleotide
  Sense strand starting at position 3226 of SEQ ID NO: 1561973
aagucugagcucugaucau

SEQ ID NO: 1712272 - RNA, 19 nt, Artificial Sequence
  Description of Artificial Sequence: Synthetic oligonucleotide
  Antisense strand to SEQ ID NO: 1712271
augaucagagcucagacuu

SEQ ID NO: 1712273 - RNA, 19 nt, Artificial Sequence
  Description of Artificial Sequence: Synthetic oligonucleotide
  Sense strand starting at position 3235 of SEQ ID NO: 1561973
cucugaucauccugaagaa

SEQ ID NO: 1712274 - RNA, 19 nt, Artificial Sequence
  Description of Artificial Sequence: Synthetic oligonucleotide
  Antisense strand to SEQ ID NO: 1712273
uucuucaggaugaucagag

SEQ ID NO: 1712275 - RNA, 19 nt, Artificial Sequence
  Description of Artificial Sequence: Synthetic oligonucleotide
  Sense strand starting at position 3352 of SEQ ID NO: 1561973
ucacuuaguccuugcagua

SEQ ID NO: 1712276 - RNA, 19 nt, Artificial Sequence
  Description of Artificial Sequence: Synthetic oligonucleotide
  Antisense strand to SEQ ID NO: 1712275
uacugcaaggacuaaguga

SEQ ID NO: 1712277 - RNA, 19 nt, Artificial Sequence
  Description of Artificial Sequence: Synthetic oligonucleotide
  Sense strand starting at position 3365 of SEQ ID NO: 1561973
gcaguaacauuuggaugau

SEQ ID NO: 1712278 - RNA, 19 nt, Artificial Sequence
  Description of Artificial Sequence: Synthetic oligonucleotide
  Antisense strand to SEQ ID NO: 1712277
aucauccaaauguuacugc

SEQ ID NO: 1712279 - RNA, 19 nt, Artificial Sequence
  Description of Artificial Sequence: Synthetic oligonucleotide
  Sense strand starting at position 3371 of SEQ ID NO: 1561973
acauuuggaugaugaggua

SEQ ID NO: 1712280 - RNA, 19 nt, Artificial Sequence
  Description of Artificial Sequence: Synthetic oligonucleotide
  Antisense strand to SEQ ID NO: 1712279
uaccucaucauccaaaugu

SEQ ID NO: 1712281 - RNA, 19 nt, Artificial Sequence
  Description of Artificial Sequence: Synthetic oligonucleotide
  Sense strand starting at position 3383 of SEQ ID NO: 1561973
ugagguaacuuauccagaa

SEQ ID NO: 1712282 - RNA, 19 nt, Artificial Sequence
  Description of Artificial Sequence: Synthetic oligonucleotide
  Antisense strand to SEQ ID NO: 1712281
uucuggauaaguuaccuca

SEQ ID NO: 1712283 - RNA, 19 nt, Artificial Sequence
  Description of Artificial Sequence: Synthetic oligonucleotide
  Sense strand starting at position 3387 of SEQ ID NO: 1561973
guaacuuauccagaagcac

SEQ ID NO: 1712284 - RNA, 19 nt, Artificial Sequence
  Description of Artificial Sequence: Synthetic oligonucleotide
  Antisense strand to SEQ ID NO: 1712283
gugcuucuggauaaguuac

SEQ ID NO: 1712285 - RNA, 19 nt, Artificial Sequence
  Description of Artificial Sequence: Synthetic oligonucleotide
  Sense strand starting at position 3450 of SEQ ID NO: 1561973
uacugcccgccuuaugaua

SEQ ID NO: 1712286 - RNA, 19 nt, Artificial Sequence
  Description of Artificial Sequence: Synthetic oligonucleotide
  Antisense strand to SEQ ID NO: 1712285
uaucauaaggcgggcagua

SEQ ID NO: 1712287 - RNA, 19 nt, Artificial Sequence
  Description of Artificial Sequence: Synthetic oligonucleotide
  Sense strand starting at position 3802 of SEQ ID NO: 1561973
ccacaaguucgagaccacu

SEQ ID NO: 1712288 - RNA, 19 nt, Artificial Sequence
  Description of Artificial Sequence: Synthetic oligonucleotide
  Antisense strand to SEQ ID NO: 1712287
aguggucucgaacuugugg

SEQ ID NO: 1712289 - RNA, 19 nt, Artificial Sequence
  Description of Artificial Sequence: Synthetic oligonucleotide
  Sense strand starting at position 43 of SEQ ID NO: 1561974
uucugaguguggucuuuga

SEQ ID NO: 1712290 - RNA, 19 nt, Artificial Sequence
  Description of Artificial Sequence: Synthetic oligonucleotide
  Antisense strand to SEQ ID NO: 1712289
ucaaagaccacacucagaa

SEQ ID NO: 1712291 - RNA, 19 nt, Artificial Sequence
  Description of Artificial Sequence: Synthetic oligonucleotide
  Sense strand starting at position 47 of SEQ ID NO: 1561974
gaguguggucuuugaguca

SEQ ID NO: 1712292 - RNA, 19 nt, Artificial Sequence
  Description of Artificial Sequence: Synthetic oligonucleotide
  Antisense strand to SEQ ID NO: 1712291
ugacucaaagaccacacuc

SEQ ID NO: 1712293 - RNA, 19 nt, Artificial Sequence
  Description of Artificial Sequence: Synthetic oligonucleotide
  Sense strand starting at position 54 of SEQ ID NO: 1561974
gucuuugagucaccuguau

SEQ ID NO: 1712294 - RNA, 19 nt, Artificial Sequence
  Description of Artificial Sequence: Synthetic oligonucleotide
  Antisense strand to SEQ ID NO: 1712293
auacaggugacucaaagac

SEQ ID NO: 1712295 - RNA, 19 nt, Artificial Sequence
  Description of Artificial Sequence: Synthetic oligonucleotide
  Sense strand starting at position 71 of SEQ ID NO: 1561974
auuugaauaugaggagcuu

SEQ ID NO: 1712296 - RNA, 19 nt, Artificial Sequence
  Description of Artificial Sequence: Synthetic oligonucleotide
  Antisense strand to SEQ ID NO: 1712295
aagcuccucauauucaaau

SEQ ID NO: 1712297 - RNA, 19 nt, Artificial Sequence
  Description of Artificial Sequence: Synthetic oligonucleotide
  Sense strand starting at position 132 of SEQ ID NO: 1561974
ugcucaauauuuggaagua

SEQ ID NO: 1712298 - RNA, 19 nt, Artificial Sequence
  Description of Artificial Sequence: Synthetic oligonucleotide
  Antisense strand to SEQ ID NO: 1712297
uacuuccaaauauugagca

SEQ ID NO: 1712299 - RNA, 19 nt, Artificial Sequence
  Description of Artificial Sequence: Synthetic oligonucleotide
  Sense strand starting at position 133 of SEQ ID NO: 1561974
gcucaauauuuggaaguac

SEQ ID NO: 1712300 - RNA, 19 nt, Artificial Sequence
  Description of Artificial Sequence: Synthetic oligonucleotide
  Antisense strand to SEQ ID NO: 1712299
guacuuccaaauauugagc

SEQ ID NO: 1712301 - RNA, 19 nt, Artificial Sequence
  Description of Artificial Sequence: Synthetic oligonucleotide
  Sense strand starting at position 148 of SEQ ID NO: 1561974
guacuuccacaguaucuaa

SEQ ID NO: 1712302 - RNA, 19 nt, Artificial Sequence
  Description of Artificial Sequence: Synthetic oligonucleotide
  Antisense strand to SEQ ID NO: 1712301
uuagauacuguggaaguac

SEQ ID NO: 1712303 - RNA, 19 nt, Artificial Sequence
  Description of Artificial Sequence: Synthetic oligonucleotide
  Sense strand starting at position 178 of SEQ ID NO: 1561974
ucaaguaagucagucuuga

SEQ ID NO: 1712304 - RNA, 19 nt, Artificial Sequence
  Description of Artificial Sequence: Synthetic oligonucleotide
  Antisense strand to SEQ ID NO: 1712303
ucaagacugacuuacuuga

SEQ ID NO: 1712305 - RNA, 19 nt, Artificial Sequence
  Description of Artificial Sequence: Synthetic oligonucleotide
  Sense strand starting at position 211 of SEQ ID NO: 1561974
acuuaugcuuggucuuaga

SEQ ID NO: 1712306 - RNA, 19 nt, Artificial Sequence
  Description of Artificial Sequence: Synthetic oligonucleotide
  Antisense strand to SEQ ID NO: 1712305
ucuaagaccaagcauaagu

SEQ ID NO: 1712307 - RNA, 19 nt, Artificial Sequence
  Description of Artificial Sequence: Synthetic oligonucleotide
  Sense strand starting at position 219 of SEQ ID NO: 1561974
uuggucuuagagcaaugaa

SEQ ID NO: 1712308 - RNA, 19 nt, Artificial Sequence
  Description of Artificial Sequence: Synthetic oligonucleotide
  Antisense strand to SEQ ID NO: 1712307
uucauugcucuaagaccaa

SEQ ID NO: 1712309 - RNA, 19 nt, Artificial Sequence
  Description of Artificial Sequence: Synthetic oligonucleotide
  Sense strand starting at position 222 of SEQ ID NO: 1561974
gucuuagagcaaugaagaa

SEQ ID NO: 1712310 - RNA, 19 nt, Artificial Sequence
  Description of Artificial Sequence: Synthetic oligonucleotide
  Antisense strand to SEQ ID NO: 1712309
uucuucauugcucuaagac

SEQ ID NO: 1712311 - RNA, 19 nt, Artificial Sequence
  Description of Artificial Sequence: Synthetic oligonucleotide
  Sense strand starting at position 354 of SEQ ID NO: 1561974
gggcaaacgugucccaguu

SEQ ID NO: 1712312 - RNA, 19 nt, Artificial Sequence
  Description of Artificial Sequence: Synthetic oligonucleotide
  Antisense strand to SEQ ID NO: 1712311
aacugggacacguuugccc

SEQ ID NO: 1712313 - RNA, 19 nt, Artificial Sequence
  Description of Artificial Sequence: Synthetic oligonucleotide
  Sense strand starting at position 788 of SEQ ID NO: 1561974
ggcuaauggcuauacucuu

SEQ ID NO: 1712314 - RNA, 19 nt, Artificial Sequence
  Description of Artificial Sequence: Synthetic oligonucleotide
  Antisense strand to SEQ ID NO: 1712313
aagaguauagccauuagcc

SEQ ID NO: 1712315 - RNA, 19 nt, Artificial Sequence
  Description of Artificial Sequence: Synthetic oligonucleotide
  Sense strand starting at position 811 of SEQ ID NO: 1561974
gcugaaucuuuggaauuua

SEQ ID NO: 1712316 - RNA, 19 nt, Artificial Sequence
  Description of Artificial Sequence: Synthetic oligonucleotide
  Antisense strand to SEQ ID NO: 1712315
uaaauuccaaagauucagc

SEQ ID NO: 1712317 - RNA, 19 nt, Artificial Sequence
  Description of Artificial Sequence: Synthetic oligonucleotide
  Sense strand starting at position 964 of SEQ ID NO: 1561974
ccaaaucuguugcaagaag

SEQ ID NO: 1712318 - RNA, 19 nt, Artificial Sequence
  Description of Artificial Sequence: Synthetic oligonucleotide
  Antisense strand to SEQ ID NO: 1712317
cuucuugcaacagauuugg

SEQ ID NO: 1712319 - RNA, 19 nt, Artificial Sequence
  Description of Artificial Sequence: Synthetic oligonucleotide
  Sense strand starting at position 1047 of SEQ ID NO: 1561974
ucauccauaucagagaaga

SEQ ID NO: 1712320 - RNA, 19 nt, Artificial Sequence
  Description of Artificial Sequence: Synthetic oligonucleotide
  Antisense strand to SEQ ID NO: 1712319
ucuucucugauauggauga

SEQ ID NO: 1712321 - RNA, 19 nt, Artificial Sequence
  Description of Artificial Sequence: Synthetic oligonucleotide
  Sense strand starting at position 1081 of SEQ ID NO: 1561974
gggugacugggcuaaggua

SEQ ID NO: 1712322 - RNA, 19 nt, Artificial Sequence
  Description of Artificial Sequence: Synthetic oligonucleotide
  Antisense strand to SEQ ID NO: 1712321
uaccuuagcccagucaccc

SEQ ID NO: 1712323 - RNA, 19 nt, Artificial Sequence
  Description of Artificial Sequence: Synthetic oligonucleotide
  Sense strand starting at position 1251 of SEQ ID NO: 1561974
auuacaguaucaggacaau

SEQ ID NO: 1712324 - RNA, 19 nt, Artificial Sequence
  Description of Artificial Sequence: Synthetic oligonucleotide
  Antisense strand to SEQ ID NO: 1712323
auuguccugauacuguaau

SEQ ID NO: 1712325 - RNA, 19 nt, Artificial Sequence
  Description of Artificial Sequence: Synthetic oligonucleotide
  Sense strand starting at position 1300 of SEQ ID NO: 1561974
ggcagcgguccugaauuga

SEQ ID NO: 1712326 - RNA, 19 nt, Artificial Sequence
  Description of Artificial Sequence: Synthetic oligonucleotide
  Antisense strand to SEQ ID NO: 1712325
ucaauucaggaccgcugcc

SEQ ID NO: 1712327 - RNA, 19 nt, Artificial Sequence
  Description of Artificial Sequence: Synthetic oligonucleotide
  Sense strand starting at position 1377 of SEQ ID NO: 1561974
aacggauucucugggagga

SEQ ID NO: 1712328 - RNA, 19 nt, Artificial Sequence
  Description of Artificial Sequence: Synthetic oligonucleotide
  Antisense strand to SEQ ID NO: 1712327
uccucccagagaauccguu

SEQ ID NO: 1712329 - RNA, 19 nt, Artificial Sequence
  Description of Artificial Sequence: Synthetic oligonucleotide
  Sense strand starting at position 1474 of SEQ ID NO: 1561974
acaguucugaaucgugagu

SEQ ID NO: 1712330 - RNA, 19 nt, Artificial Sequence
  Description of Artificial Sequence: Synthetic oligonucleotide
  Antisense strand to SEQ ID NO: 1712329
acucacgauucagaacugu

SEQ ID NO: 1712331 - RNA, 19 nt, Artificial Sequence
  Description of Artificial Sequence: Synthetic oligonucleotide
  Sense strand starting at position 1483 of SEQ ID NO: 1561974
aaucgugaguaccugcaaa

SEQ ID NO: 1712332 - RNA, 19 nt, Artificial Sequence
  Description of Artificial Sequence: Synthetic oligonucleotide
  Antisense strand to SEQ ID NO: 1712331
uuugcagguacucacgauu

SEQ ID NO: 1712333 - RNA, 19 nt, Artificial Sequence
  Description of Artificial Sequence: Synthetic oligonucleotide
  Sense strand starting at position 1544 of SEQ ID NO: 1561974
ccuggauucucacgagaag

SEQ ID NO: 1712334 - RNA, 19 nt, Artificial Sequence
  Description of Artificial Sequence: Synthetic oligonucleotide
  Antisense strand to SEQ ID NO: 1712333
cuucucgugagaauccagg

SEQ ID NO: 1712335 - RNA, 19 nt, Artificial Sequence
  Description of Artificial Sequence: Synthetic oligonucleotide
  Sense strand starting at position 1575 of SEQ ID NO: 1561974
cuuagaggugcacggaaua

SEQ ID NO: 1712336 - RNA, 19 nt, Artificial Sequence
  Description of Artificial Sequence: Synthetic oligonucleotide
  Antisense strand to SEQ ID NO: 1712335
uauuccgugcaccucuaag

SEQ ID NO: 1712337 - RNA, 19 nt, Artificial Sequence
  Description of Artificial Sequence: Synthetic oligonucleotide
  Sense strand starting at position 1667 of SEQ ID NO: 1561974
gacuuaaaguauuagagag

SEQ ID NO: 1712338 - RNA, 19 nt, Artificial Sequence
  Description of Artificial Sequence: Synthetic oligonucleotide
  Antisense strand to SEQ ID NO: 1712337
cucucuaauacuuuaaguc

SEQ ID NO: 1712339 - RNA, 19 nt, Artificial Sequence
  Description of Artificial Sequence: Synthetic oligonucleotide
  Sense strand starting at position 1681 of SEQ ID NO: 1561974
gagagcagcucuuuggaaa

SEQ ID NO: 1712340 - RNA, 19 nt, Artificial Sequence
  Description of Artificial Sequence: Synthetic oligonucleotide
  Antisense strand to SEQ ID NO: 1712339
uuuccaaagagcugcucuc

SEQ ID NO: 1712341 - RNA, 19 nt, Artificial Sequence
  Description of Artificial Sequence: Synthetic oligonucleotide
  Sense strand starting at position 1765 of SEQ ID NO: 1561974
agaagccuucucgaggaua

SEQ ID NO: 1712342 - RNA, 19 nt, Artificial Sequence
  Description of Artificial Sequence: Synthetic oligonucleotide
  Antisense strand to SEQ ID NO: 1712341
uauccucgagaaggcuucu

SEQ ID NO: 1712343 - RNA, 19 nt, Artificial Sequence
  Description of Artificial Sequence: Synthetic oligonucleotide
  Sense strand starting at position 1767 of SEQ ID NO: 1561974
aagccuucucgaggauaaa

SEQ ID NO: 1712344 - RNA, 19 nt, Artificial Sequence
  Description of Artificial Sequence: Synthetic oligonucleotide
  Antisense strand to SEQ ID NO: 1712343
uuuauccucgagaaggcuu

SEQ ID NO: 1712345 - RNA, 19 nt, Artificial Sequence
  Description of Artificial Sequence: Synthetic oligonucleotide
  Sense strand starting at position 1870 of SEQ ID NO: 1561974
gcgggaagugcauaccaau

SEQ ID NO: 1712346 - RNA, 19 nt, Artificial Sequence
  Description of Artificial Sequence: Synthetic oligonucleotide
  Antisense strand to SEQ ID NO: 1712345
auugguaugcacuucccgc

SEQ ID NO: 1712347 - RNA, 19 nt, Artificial Sequence
  Description of Artificial Sequence: Synthetic oligonucleotide
  Sense strand starting at position 3082 of SEQ ID NO: 1561974
gguuauaaauccuucgcca

SEQ ID NO: 1712348 - RNA, 19 nt, Artificial Sequence
  Description of Artificial Sequence: Synthetic oligonucleotide
  Antisense strand to SEQ ID NO: 1712347
uggcgaaggauuuauaacc

SEQ ID NO: 1712349 - RNA, 19 nt, Artificial Sequence
  Description of Artificial Sequence: Synthetic oligonucleotide
  Sense strand starting at position 3135 of SEQ ID NO: 1561974
ggaaguagaguuggccuuu

SEQ ID NO: 1712350 - RNA, 19 nt, Artificial Sequence
  Description of Artificial Sequence: Synthetic oligonucleotide
  Antisense strand to SEQ ID NO: 1712349
aaaggccaacucuacuucc

SEQ ID NO: 1712351 - RNA, 19 nt, Artificial Sequence
  Description of Artificial Sequence: Synthetic oligonucleotide
  Sense strand starting at position 3172 of SEQ ID NO: 1561974
cccuuucugggugaugcau

SEQ ID NO: 1712352 - RNA, 19 nt, Artificial Sequence
  Description of Artificial Sequence: Synthetic oligonucleotide
  Antisense strand to SEQ ID NO: 1712351
augcaucacccagaaaggg

SEQ ID NO: 1712353 - RNA, 19 nt, Artificial Sequence
  Description of Artificial Sequence: Synthetic oligonucleotide
  Sense strand starting at position 3202 of SEQ ID NO: 1561974
gaaggauuuggcugccgcu

SEQ ID NO: 1712354 - RNA, 19 nt, Artificial Sequence
  Description of Artificial Sequence: Synthetic oligonucleotide
  Antisense strand to SEQ ID NO: 1712353
agcggcagccaaauccuuc

SEQ ID NO: 1712355 - RNA, 19 nt, Artificial Sequence
  Description of Artificial Sequence: Synthetic oligonucleotide
  Sense strand starting at position 3400 of SEQ ID NO: 1561974
acuggacugugggcuaauu

SEQ ID NO: 1712356 - RNA, 19 nt, Artificial Sequence
  Description of Artificial Sequence: Synthetic oligonucleotide
  Antisense strand to SEQ ID NO: 1712355
aauuagcccacaguccagu

SEQ ID NO: 1712357 - RNA, 19 nt, Artificial Sequence
  Description of Artificial Sequence: Synthetic oligonucleotide
  Sense strand starting at position 3402 of SEQ ID NO: 1561974
uggacugugggcuaauuaa

SEQ ID NO: 1712358 - RNA, 19 nt, Artificial Sequence
  Description of Artificial Sequence: Synthetic oligonucleotide
  Antisense strand to SEQ ID NO: 1712357
uuaauuagcccacagucca

SEQ ID NO: 1712359 - RNA, 19 nt, Artificial Sequence
  Description of Artificial Sequence: Synthetic oligonucleotide
  Sense strand starting at position 3710 of SEQ ID NO: 1561974
ucgcuugugcuugcugaau

SEQ ID NO: 1712360 - RNA, 19 nt, Artificial Sequence
  Description of Artificial Sequence: Synthetic oligonucleotide
  Antisense strand to SEQ ID NO: 1712359
auucagcaagcacaagcga

SEQ ID NO: 1712361 - RNA, 19 nt, Artificial Sequence
  Description of Artificial Sequence: Synthetic oligonucleotide
  Sense strand starting at position 3716 of SEQ ID NO: 1561974
gugcuugcugaauagaauu

SEQ ID NO: 1712362 - RNA, 19 nt, Artificial Sequence
  Description of Artificial Sequence: Synthetic oligonucleotide
  Antisense strand to SEQ ID NO: 1712361
aauucuauucagcaagcac

SEQ ID NO: 1712363 - RNA, 19 nt, Artificial Sequence
  Description of Artificial Sequence: Synthetic oligonucleotide
  Sense strand starting at position 3852 of SEQ ID NO: 1561974
ucuaaaucucagugccuga

SEQ ID NO: 1712364 - RNA, 19 nt, Artificial Sequence
  Description of Artificial Sequence: Synthetic oligonucleotide
  Antisense strand to SEQ ID NO: 1712363
ucaggcacugagauuuaga

SEQ ID NO: 1712365 - RNA, 19 nt, Artificial Sequence
  Description of Artificial Sequence: Synthetic oligonucleotide
  Sense strand starting at position 3947 of SEQ ID NO: 1561974
aagucugagcucugaucau

SEQ ID NO: 1712366 - RNA, 19 nt, Artificial Sequence
  Description of Artificial Sequence: Synthetic oligonucleotide
  Antisense strand to SEQ ID NO: 1712365
augaucagagcucagacuu

SEQ ID NO: 1712367 - RNA, 19 nt, Artificial Sequence
  Description of Artificial Sequence: Synthetic oligonucleotide
  Sense strand starting at position 3956 of SEQ ID NO: 1561974
cucugaucauccugaagaa

SEQ ID NO: 1712368 - RNA, 19 nt, Artificial Sequence
  Description of Artificial Sequence: Synthetic oligonucleotide
  Antisense strand to SEQ ID NO: 1712367
uucuucaggaugaucagag

SEQ ID NO: 1712369 - RNA, 19 nt, Artificial Sequence
  Description of Artificial Sequence: Synthetic oligonucleotide
  Sense strand starting at position 53 of SEQ ID NO: 1561975
uucugaaacuagugccaau

SEQ ID NO: 1712370 - RNA, 19 nt, Artificial Sequence
  Description of Artificial Sequence: Synthetic oligonucleotide
  Antisense strand to SEQ ID NO: 1712369
auuggcacuaguuucagaa

SEQ ID NO: 1712371 - RNA, 19 nt, Artificial Sequence
  Description of Artificial Sequence: Synthetic oligonucleotide
  Sense strand starting at position 63 of SEQ ID NO: 1561975
agugccaauccucauguaa

SEQ ID NO: 1712372 - RNA, 19 nt, Artificial Sequence
  Description of Artificial Sequence: Synthetic oligonucleotide
  Antisense strand to SEQ ID NO: 1712371
uuacaugaggauuggcacu

SEQ ID NO: 1712373 - RNA, 19 nt, Artificial Sequence
  Description of Artificial Sequence: Synthetic oligonucleotide
  Sense strand starting at position 426 of SEQ ID NO: 1561975
ugauguuacaaacgaaugu

SEQ ID NO: 1712374 - RNA, 19 nt, Artificial Sequence
  Description of Artificial Sequence: Synthetic oligonucleotide
  Antisense strand to SEQ ID NO: 1712373
acauucguuuguaacauca

SEQ ID NO: 1712375 - RNA, 19 nt, Artificial Sequence
  Description of Artificial Sequence: Synthetic oligonucleotide
  Sense strand starting at position 430 of SEQ ID NO: 1561975
guuacaaacgaaugucgau

SEQ ID NO: 1712376 - RNA, 19 nt, Artificial Sequence
  Description of Artificial Sequence: Synthetic oligonucleotide
  Antisense strand to SEQ ID NO: 1712375
aucgacauucguuuguaac

SEQ ID NO: 1712377 - RNA, 19 nt, Artificial Sequence
  Description of Artificial Sequence: Synthetic oligonucleotide
  Sense strand starting at position 454 of SEQ ID NO: 1561975
cgaugugauucucaguuac

SEQ ID NO: 1712378 - RNA, 19 nt, Artificial Sequence
  Description of Artificial Sequence: Synthetic oligonucleotide
  Antisense strand to SEQ ID NO: 1712377
guaacugagaaucacaucg

SEQ ID NO: 1712379 - RNA, 19 nt, Artificial Sequence
  Description of Artificial Sequence: Synthetic oligonucleotide
  Sense strand starting at position 456 of SEQ ID NO: 1561975
augugauucucaguuacag

SEQ ID NO: 1712380 - RNA, 19 nt, Artificial Sequence
  Description of Artificial Sequence: Synthetic oligonucleotide
  Antisense strand to SEQ ID NO: 1712379
cuguaacugagaaucacau

SEQ ID NO: 1712381 - RNA, 19 nt, Artificial Sequence
  Description of Artificial Sequence: Synthetic oligonucleotide
  Sense strand starting at position 533 of SEQ ID NO: 1561975
cuaggaagcuuuccuuacu

SEQ ID NO: 1712382 - RNA, 19 nt, Artificial Sequence
  Description of Artificial Sequence: Synthetic oligonucleotide
  Antisense strand to SEQ ID NO: 1712381
aguaaggaaagcuuccuag

SEQ ID NO: 1712383 - RNA, 19 nt, Artificial Sequence
  Description of Artificial Sequence: Synthetic oligonucleotide
  Sense strand starting at position 536 of SEQ ID NO: 1561975
ggaagcuuuccuuacucca

SEQ ID NO: 1712384 - RNA, 19 nt, Artificial Sequence
  Description of Artificial Sequence: Synthetic oligonucleotide
  Antisense strand to SEQ ID NO: 1712383
uggaguaaggaaagcuucc

SEQ ID NO: 1712385 - RNA, 19 nt, Artificial Sequence
  Description of Artificial Sequence: Synthetic oligonucleotide
  Sense strand starting at position 583 of SEQ ID NO: 1561975
uuuacauacuccuuaguag

SEQ ID NO: 1712386 - RNA, 19 nt, Artificial Sequence
  Description of Artificial Sequence: Synthetic oligonucleotide
  Antisense strand to SEQ ID NO: 1712385
cuacuaaggaguauguaaa

SEQ ID NO: 1712387 - RNA, 19 nt, Artificial Sequence
  Description of Artificial Sequence: Synthetic oligonucleotide
  Sense strand starting at position 584 of SEQ ID NO: 1561975
uuacauacuccuuaguagu

SEQ ID NO: 1712388 - RNA, 19 nt, Artificial Sequence
  Description of Artificial Sequence: Synthetic oligonucleotide
  Antisense strand to SEQ ID NO: 1712387
acuacuaaggaguauguaa

SEQ ID NO: 1712389 - RNA, 19 nt, Artificial Sequence
  Description of Artificial Sequence: Synthetic oligonucleotide
  Sense strand starting at position 595 of SEQ ID NO: 1561975
uuaguagucuuaccaucua

SEQ ID NO: 1712390 - RNA, 19 nt, Artificial Sequence
  Description of Artificial Sequence: Synthetic oligonucleotide
  Antisense strand to SEQ ID NO: 1712389
uagaugguaagacuacuaa

SEQ ID NO: 1712391 - RNA, 19 nt, Artificial Sequence
  Description of Artificial Sequence: Synthetic oligonucleotide
  Sense strand starting at position 736 of SEQ ID NO: 1561975
uucugcaaugucuagaagu

SEQ ID NO: 1712392 - RNA, 19 nt, Artificial Sequence
  Description of Artificial Sequence: Synthetic oligonucleotide
  Antisense strand to SEQ ID NO: 1712391
acuucuagacauugcagaa

SEQ ID NO: 1712393 - RNA, 19 nt, Artificial Sequence
  Description of Artificial Sequence: Synthetic oligonucleotide
  Sense strand starting at position 738 of SEQ ID NO: 1561975
cugcaaugucuagaaguua

SEQ ID NO: 1712394 - RNA, 19 nt, Artificial Sequence
  Description of Artificial Sequence: Synthetic oligonucleotide
  Antisense strand to SEQ ID NO: 1712393
uaacuucuagacauugcag

SEQ ID NO: 1712395 - RNA, 19 nt, Artificial Sequence
  Description of Artificial Sequence: Synthetic oligonucleotide
  Sense strand starting at position 815 of SEQ ID NO: 1561975
gccucagucuucucagaga

SEQ ID NO: 1712396 - RNA, 19 nt, Artificial Sequence
  Description of Artificial Sequence: Synthetic oligonucleotide
  Antisense strand to SEQ ID NO: 1712395
ucucugagaagacugaggc

SEQ ID NO: 1712397 - RNA, 19 nt, Artificial Sequence
  Description of Artificial Sequence: Synthetic oligonucleotide
  Sense strand starting at position 818 of SEQ ID NO: 1561975
ucagucuucucagagaauu

SEQ ID NO: 1712398 - RNA, 19 nt, Artificial Sequence
  Description of Artificial Sequence: Synthetic oligonucleotide
  Antisense strand to SEQ ID NO: 1712397
aauucucugagaagacuga

SEQ ID NO: 1712399 - RNA, 19 nt, Artificial Sequence
  Description of Artificial Sequence: Synthetic oligonucleotide
  Sense strand starting at position 824 of SEQ ID NO: 1561975
uucucagagaauugggcua

SEQ ID NO: 1712400 - RNA, 19 nt, Artificial Sequence
  Description of Artificial Sequence: Synthetic oligonucleotide
  Antisense strand to SEQ ID NO: 1712399
uagcccaauucucugagaa

SEQ ID NO: 1712401 - RNA, 19 nt, Artificial Sequence
  Description of Artificial Sequence: Synthetic oligonucleotide
  Sense strand starting at position 826 of SEQ ID NO: 1561975
cucagagaauugggcuaga

SEQ ID NO: 1712402 - RNA, 19 nt, Artificial Sequence
  Description of Artificial Sequence: Synthetic oligonucleotide
  Antisense strand to SEQ ID NO: 1712401
ucuagcccaauucucugag

SEQ ID NO: 1712403 - RNA, 19 nt, Artificial Sequence
  Description of Artificial Sequence: Synthetic oligonucleotide
  Sense strand starting at position 837 of SEQ ID NO: 1561975
gggcuagauuaucuaagcu

SEQ ID NO: 1712404 - RNA, 19 nt, Artificial Sequence
  Description of Artificial Sequence: Synthetic oligonucleotide
  Antisense strand to SEQ ID NO: 1712403
agcuuagauaaucuagccc

SEQ ID NO: 1712405 - RNA, 19 nt, Artificial Sequence
  Description of Artificial Sequence: Synthetic oligonucleotide
  Sense strand starting at position 986 of SEQ ID NO: 1561975
cucacugagccuugagauu

SEQ ID NO: 1712406 - RNA, 19 nt, Artificial Sequence
  Description of Artificial Sequence: Synthetic oligonucleotide
  Antisense strand to SEQ ID NO: 1712405
aaucucaaggcucagugag

SEQ ID NO: 1712407 - RNA, 19 nt, Artificial Sequence
  Description of Artificial Sequence: Synthetic oligonucleotide
  Sense strand starting at position 995 of SEQ ID NO: 1561975
ccuugagauuuagaaauuc

SEQ ID NO: 1712408 - RNA, 19 nt, Artificial Sequence
  Description of Artificial Sequence: Synthetic oligonucleotide
  Antisense strand to SEQ ID NO: 1712407
gaauuucuaaaucucaagg

SEQ ID NO: 1712409 - RNA, 19 nt, Artificial Sequence
  Description of Artificial Sequence: Synthetic oligonucleotide
  Sense strand starting at position 1023 of SEQ ID NO: 1561975
cgaaguaauuaucagcaga

SEQ ID NO: 1712410 - RNA, 19 nt, Artificial Sequence
  Description of Artificial Sequence: Synthetic oligonucleotide
  Antisense strand to SEQ ID NO: 1712409
ucugcugauaauuacuucg

SEQ ID NO: 1712411 - RNA, 19 nt, Artificial Sequence
  Description of Artificial Sequence: Synthetic oligonucleotide
  Sense strand starting at position 1026 of SEQ ID NO: 1561975
aguaauuaucagcagauug

SEQ ID NO: 1712412 - RNA, 19 nt, Artificial Sequence
  Description of Artificial Sequence: Synthetic oligonucleotide
  Antisense strand to SEQ ID NO: 1712411
caaucugcugauaauuacu

SEQ ID NO: 1712413 - RNA, 19 nt, Artificial Sequence
  Description of Artificial Sequence: Synthetic oligonucleotide
  Sense strand starting at position 1042 of SEQ ID NO: 1561975
uuggcauaccguuggucaa

SEQ ID NO: 1712414 - RNA, 19 nt, Artificial Sequence
  Description of Artificial Sequence: Synthetic oligonucleotide
  Antisense strand to SEQ ID NO: 1712413
uugaccaacgguaugccaa

SEQ ID NO: 1712415 - RNA, 19 nt, Artificial Sequence
  Description of Artificial Sequence: Synthetic oligonucleotide
  Sense strand starting at position 1182 of SEQ ID NO: 1561975
caaaguuagugcuagaaag

SEQ ID NO: 1712416 - RNA, 19 nt, Artificial Sequence
  Description of Artificial Sequence: Synthetic oligonucleotide
  Antisense strand to SEQ ID NO: 1712415
cuuucuagcacuaacuuug

SEQ ID NO: 1712417 - RNA, 19 nt, Artificial Sequence
  Description of Artificial Sequence: Synthetic oligonucleotide
  Sense strand starting at position 1341 of SEQ ID NO: 1561975
gcaggauucuccuacaccu

SEQ ID NO: 1712418 - RNA, 19 nt, Artificial Sequence
  Description of Artificial Sequence: Synthetic oligonucleotide
  Antisense strand to SEQ ID NO: 1712417
agguguaggagaauccugc

SEQ ID NO: 1712419 - RNA, 19 nt, Artificial Sequence
  Description of Artificial Sequence: Synthetic oligonucleotide
  Sense strand starting at position 1387 of SEQ ID NO: 1561975
gugcgccauccuuggauau

SEQ ID NO: 1712420 - RNA, 19 nt, Artificial Sequence
  Description of Artificial Sequence: Synthetic oligonucleotide
  Antisense strand to SEQ ID NO: 1712419
auauccaaggauggcgcac

SEQ ID NO: 1712421 - RNA, 19 nt, Artificial Sequence
  Description of Artificial Sequence: Synthetic oligonucleotide
  Sense strand starting at position 1388 of SEQ ID NO: 1561975
ugcgccauccuuggauaua

SEQ ID NO: 1712422 - RNA, 19 nt, Artificial Sequence
  Description of Artificial Sequence: Synthetic oligonucleotide
  Antisense strand to SEQ ID NO: 1712421
uauauccaaggauggcgca

SEQ ID NO: 1712423 - RNA, 19 nt, Artificial Sequence
  Description of Artificial Sequence: Synthetic oligonucleotide
  Sense strand starting at position 1438 of SEQ ID NO: 1561975
gaaugagauuuacggaaug

SEQ ID NO: 1712424 - RNA, 19 nt, Artificial Sequence
  Description of Artificial Sequence: Synthetic oligonucleotide
  Antisense strand to SEQ ID NO: 1712423
cauuccguaaaucucauuc

SEQ ID NO: 1712425 - RNA, 19 nt, Artificial Sequence
  Description of Artificial Sequence: Synthetic oligonucleotide
  Sense strand starting at position 1456 of SEQ ID NO: 1561975
gagauuaaaugcuggacua

SEQ ID NO: 1712426 - RNA, 19 nt, Artificial Sequence
  Description of Artificial Sequence: Synthetic oligonucleotide
  Antisense strand to SEQ ID NO: 1712425
uaguccagcauuuaaucuc

SEQ ID NO: 1712427 - RNA, 19 nt, Artificial Sequence
  Description of Artificial Sequence: Synthetic oligonucleotide
  Sense strand starting at position 2718 of SEQ ID NO: 1561975
ugcaacucuugguugcaaa

SEQ ID NO: 1712428 - RNA, 19 nt, Artificial Sequence
  Description of Artificial Sequence: Synthetic oligonucleotide
  Antisense strand to SEQ ID NO: 1712427
uuugcaaccaagaguugca

SEQ ID NO: 1712429 - RNA, 19 nt, Artificial Sequence
  Description of Artificial Sequence: Synthetic oligonucleotide
  Sense strand starting at position 2968 of SEQ ID NO: 1561975
ccgccauuccuuggccauu

SEQ ID NO: 1712430 - RNA, 19 nt, Artificial Sequence
  Description of Artificial Sequence: Synthetic oligonucleotide
  Antisense strand to SEQ ID NO: 1712429
aauggccaaggaauggcgg

SEQ ID NO: 1712431 - RNA, 19 nt, Artificial Sequence
  Description of Artificial Sequence: Synthetic oligonucleotide
  Sense strand starting at position 2979 of SEQ ID NO: 1561975
uggccauucgcuguuucua

SEQ ID NO: 1712432 - RNA, 19 nt, Artificial Sequence
  Description of Artificial Sequence: Synthetic oligonucleotide
  Antisense strand to SEQ ID NO: 1712431
uagaaacagcgaauggcca

SEQ ID NO: 1712433 - RNA, 19 nt, Artificial Sequence
  Description of Artificial Sequence: Synthetic oligonucleotide
  Sense strand starting at position 2981 of SEQ ID NO: 1561975
gccauucgcuguuucuaca

SEQ ID NO: 1712434 - RNA, 19 nt, Artificial Sequence
  Description of Artificial Sequence: Synthetic oligonucleotide
  Antisense strand to SEQ ID NO: 1712433
uguagaaacagcgaauggc

SEQ ID NO: 1712435 - RNA, 19 nt, Artificial Sequence
  Description of Artificial Sequence: Synthetic oligonucleotide
  Sense strand starting at position 3015 of SEQ ID NO: 1561975
guuguguucguuucccgga

SEQ ID NO: 1712436 - RNA, 19 nt, Artificial Sequence
  Description of Artificial Sequence: Synthetic oligonucleotide
  Antisense strand to SEQ ID NO: 1712435
uccgggaaacgaacacaac

SEQ ID NO: 1712437 - RNA, 19 nt, Artificial Sequence
  Description of Artificial Sequence: Synthetic oligonucleotide
  Sense strand starting at position 3020 of SEQ ID NO: 1561975
guucguuucccggagugac

SEQ ID NO: 1712438 - RNA, 19 nt, Artificial Sequence
  Description of Artificial Sequence: Synthetic oligonucleotide
  Antisense strand to SEQ ID NO: 1712437
gucacuccgggaaacgaac

SEQ ID NO: 1712439 - RNA, 19 nt, Artificial Sequence
  Description of Artificial Sequence: Synthetic oligonucleotide
  Sense strand starting at position 3065 of SEQ ID NO: 1561975
gcugaauccuccucucuga

SEQ ID NO: 1712440 - RNA, 19 nt, Artificial Sequence
  Description of Artificial Sequence: Synthetic oligonucleotide
  Antisense strand to SEQ ID NO: 1712439
ucagagaggaggauucagc

SEQ ID NO: 1712441 - RNA, 19 nt, Artificial Sequence
  Description of Artificial Sequence: Synthetic oligonucleotide
  Sense strand starting at position 3164 of SEQ ID NO: 1561975
aggagauucccagguccca

SEQ ID NO: 1712442 - RNA, 19 nt, Artificial Sequence
  Description of Artificial Sequence: Synthetic oligonucleotide
  Antisense strand to SEQ ID NO: 1712441
ugggaccugggaaucuccu

SEQ ID NO: 1712443 - RNA, 19 nt, Artificial Sequence
  Description of Artificial Sequence: Synthetic oligonucleotide
  Sense strand starting at position 3476 of SEQ ID NO: 1561975
ugugcuuugcuggcauuga

SEQ ID NO: 1712444 - RNA, 19 nt, Artificial Sequence
  Description of Artificial Sequence: Synthetic oligonucleotide
  Antisense strand to SEQ ID NO: 1712443
ucaaugccagcaaagcaca

SEQ ID NO: 1712445 - RNA, 19 nt, Artificial Sequence
  Description of Artificial Sequence: Synthetic oligonucleotide
  Sense strand starting at position 3787 of SEQ ID NO: 1561975
ggaaauaaagugcauguca

SEQ ID NO: 1712446 - RNA, 19 nt, Artificial Sequence
  Description of Artificial Sequence: Synthetic oligonucleotide
  Antisense strand to SEQ ID NO: 1712445
ugacaugcacuuuauuucc

SEQ ID NO: 1712447 - RNA, 19 nt, Artificial Sequence
  Description of Artificial Sequence: Synthetic oligonucleotide
  Sense strand starting at position 3897 of SEQ ID NO: 1561975
cccaaaguacuuuguuuau

SEQ ID NO: 1712448 - RNA, 19 nt, Artificial Sequence
  Description of Artificial Sequence: Synthetic oligonucleotide
  Antisense strand to SEQ ID NO: 1712447
auaaacaaaguacuuuggg

SEQ ID NO: 1712449 - RNA, 19 nt, Artificial Sequence
  Description of Artificial Sequence: Synthetic oligonucleotide
  Sense strand starting at position 14 of SEQ ID NO: 1561976
ugaccuauaguguguuaag

SEQ ID NO: 1712450 - RNA, 19 nt, Artificial Sequence
  Description of Artificial Sequence: Synthetic oligonucleotide
  Antisense strand to SEQ ID NO: 1712449
cuuaacacacuauagguca

SEQ ID NO: 1712451 - RNA, 19 nt, Artificial Sequence
  Description of Artificial Sequence: Synthetic oligonucleotide
  Sense strand starting at position 32 of SEQ ID NO: 1561976
gcuuuaguugcagauaaau

SEQ ID NO: 1712452 - RNA, 19 nt, Artificial Sequence
  Description of Artificial Sequence: Synthetic oligonucleotide
  Antisense strand to SEQ ID NO: 1712451
auuuaucugcaacuaaagc

SEQ ID NO: 1712453 - RNA, 19 nt, Artificial Sequence
  Description of Artificial Sequence: Synthetic oligonucleotide
  Sense strand starting at position 49 of SEQ ID NO: 1561976
augacaaauccuugugaag

SEQ ID NO: 1712454 - RNA, 19 nt, Artificial Sequence
  Description of Artificial Sequence: Synthetic oligonucleotide
  Antisense strand to SEQ ID NO: 1712453
cuucacaaggauuugucau

SEQ ID NO: 1712455 - RNA, 19 nt, Artificial Sequence
  Description of Artificial Sequence: Synthetic oligonucleotide
  Sense strand starting at position 207 of SEQ ID NO: 1561976
acagaacccuugggaaauc

SEQ ID NO: 1712456 - RNA, 19 nt, Artificial Sequence
  Description of Artificial Sequence: Synthetic oligonucleotide
  Antisense strand to SEQ ID NO: 1712455
gauuucccaaggguucugu

SEQ ID NO: 1712457 - RNA, 19 nt, Artificial Sequence
  Description of Artificial Sequence: Synthetic oligonucleotide
  Sense strand starting at position 219 of SEQ ID NO: 1561976
ggaaaucgugaaggauucu

SEQ ID NO: 1712458 - RNA, 19 nt, Artificial Sequence
  Description of Artificial Sequence: Synthetic oligonucleotide
  Antisense strand to SEQ ID NO: 1712457
agaauccuucacgauuucc

SEQ ID NO: 1712459 - RNA, 19 nt, Artificial Sequence
  Description of Artificial Sequence: Synthetic oligonucleotide
  Sense strand starting at position 228 of SEQ ID NO: 1561976
gaaggauucugagagcuaa

SEQ ID NO: 1712460 - RNA, 19 nt, Artificial Sequence
  Description of Artificial Sequence: Synthetic oligonucleotide
  Antisense strand to SEQ ID NO: 1712459
uuagcucucagaauccuuc

SEQ ID NO: 1712461 - RNA, 19 nt, Artificial Sequence
  Description of Artificial Sequence: Synthetic oligonucleotide
  Sense strand starting at position 347 of SEQ ID NO: 1561976
ccaaauuuguggucggcga

SEQ ID NO: 1712462 - RNA, 19 nt, Artificial Sequence
  Description of Artificial Sequence: Synthetic oligonucleotide
  Antisense strand to SEQ ID NO: 1712461
ucgccgaccacaaauuugg

SEQ ID NO: 1712463 - RNA, 19 nt, Artificial Sequence
  Description of Artificial Sequence: Synthetic oligonucleotide
  Sense strand starting at position 348 of SEQ ID NO: 1561976
caaauuuguggucggcgau

SEQ ID NO: 1712464 - RNA, 19 nt, Artificial Sequence
  Description of Artificial Sequence: Synthetic oligonucleotide
  Antisense strand to SEQ ID NO: 1712463
aucgccgaccacaaauuug

SEQ ID NO: 1712465 - RNA, 19 nt, Artificial Sequence
  Description of Artificial Sequence: Synthetic oligonucleotide
  Sense strand starting at position 349 of SEQ ID NO: 1561976
aaauuuguggucggcgauu

SEQ ID NO: 1712466 - RNA, 19 nt, Artificial Sequence
  Description of Artificial Sequence: Synthetic oligonucleotide
  Antisense strand to SEQ ID NO: 1712465
aaucgccgaccacaaauuu

SEQ ID NO: 1712467 - RNA, 19 nt, Artificial Sequence
  Description of Artificial Sequence: Synthetic oligonucleotide
  Sense strand starting at position 360 of SEQ ID NO: 1561976
cggcgauugcucuucuauu

SEQ ID NO: 1712468 - RNA, 19 nt, Artificial Sequence
  Description of Artificial Sequence: Synthetic oligonucleotide
  Antisense strand to SEQ ID NO: 1712467
aauagaagagcaaucgccg

SEQ ID NO: 1712469 - RNA, 19 nt, Artificial Sequence
  Description of Artificial Sequence: Synthetic oligonucleotide
  Sense strand starting at position 361 of SEQ ID NO: 1561976
ggcgauugcucuucuauuu

SEQ ID NO: 1712470 - RNA, 19 nt, Artificial Sequence
  Description of Artificial Sequence: Synthetic oligonucleotide
  Antisense strand to SEQ ID NO: 1712469
aaauagaagagcaaucgcc

SEQ ID NO: 1712471 - RNA, 19 nt, Artificial Sequence
  Description of Artificial Sequence: Synthetic oligonucleotide
  Sense strand starting at position 368 of SEQ ID NO: 1561976
gcucuucuauuugggaaau

SEQ ID NO: 1712472 - RNA, 19 nt, Artificial Sequence
  Description of Artificial Sequence: Synthetic oligonucleotide
  Antisense strand to SEQ ID NO: 1712471
auuucccaaauagaagagc

SEQ ID NO: 1712473 - RNA, 19 nt, Artificial Sequence
  Description of Artificial Sequence: Synthetic oligonucleotide
  Sense strand starting at position 369 of SEQ ID NO: 1561976
cucuucuauuugggaaaua

SEQ ID NO: 1712474 - RNA, 19 nt, Artificial Sequence
  Description of Artificial Sequence: Synthetic oligonucleotide
  Antisense strand to SEQ ID NO: 1712473
uauuucccaaauagaagag

SEQ ID NO: 1712475 - RNA, 19 nt, Artificial Sequence
  Description of Artificial Sequence: Synthetic oligonucleotide
  Sense strand starting at position 588 of SEQ ID NO: 1561976
cugaccuguuugcuccaua

SEQ ID NO: 1712476 - RNA, 19 nt, Artificial Sequence
  Description of Artificial Sequence: Synthetic oligonucleotide
  Antisense strand to SEQ ID NO: 1712475
uauggagcaaacaggucag

SEQ ID NO: 1712477 - RNA, 19 nt, Artificial Sequence
  Description of Artificial Sequence: Synthetic oligonucleotide
  Sense strand starting at position 589 of SEQ ID NO: 1561976
ugaccuguuugcuccauaa

SEQ ID NO: 1712478 - RNA, 19 nt, Artificial Sequence
  Description of Artificial Sequence: Synthetic oligonucleotide
  Antisense strand to SEQ ID NO: 1712477
uuauggagcaaacagguca

SEQ ID NO: 1712479 - RNA, 19 nt, Artificial Sequence
  Description of Artificial Sequence: Synthetic oligonucleotide
  Sense strand starting at position 2014 of SEQ ID NO: 1561976
acgucaaucucggcaguca

SEQ ID NO: 1712480 - RNA, 19 nt, Artificial Sequence
  Description of Artificial Sequence: Synthetic oligonucleotide
  Antisense strand to SEQ ID NO: 1712479
ugacugccgagauugacgu

SEQ ID NO: 1712481 - RNA, 19 nt, Artificial Sequence
  Description of Artificial Sequence: Synthetic oligonucleotide
  Sense strand starting at position 2043 of SEQ ID NO: 1561976
gcgcgaguuggcagcucau

SEQ ID NO: 1712482 - RNA, 19 nt, Artificial Sequence
  Description of Artificial Sequence: Synthetic oligonucleotide
  Antisense strand to SEQ ID NO: 1712481
augagcugccaacucgcgc

SEQ ID NO: 1712483 - RNA, 19 nt, Artificial Sequence
  Description of Artificial Sequence: Synthetic oligonucleotide
  Sense strand starting at position 2278 of SEQ ID NO: 1561976
cuccucuagcuuugggaau

SEQ ID NO: 1712484 - RNA, 19 nt, Artificial Sequence
  Description of Artificial Sequence: Synthetic oligonucleotide
  Antisense strand to SEQ ID NO: 1712483
auucccaaagcuagaggag

SEQ ID NO: 1712485 - RNA, 19 nt, Artificial Sequence
  Description of Artificial Sequence: Synthetic oligonucleotide
  Sense strand starting at position 2309 of SEQ ID NO: 1561976
aucucaaauugauuagugu

SEQ ID NO: 1712486 - RNA, 19 nt, Artificial Sequence
  Description of Artificial Sequence: Synthetic oligonucleotide
  Antisense strand to SEQ ID NO: 1712485
acacuaaucaauuugagau

SEQ ID NO: 1712487 - RNA, 19 nt, Artificial Sequence
  Description of Artificial Sequence: Synthetic oligonucleotide
  Sense strand starting at position 2315 of SEQ ID NO: 1561976
aauugauuaguguguuagu

SEQ ID NO: 1712488 - RNA, 19 nt, Artificial Sequence
  Description of Artificial Sequence: Synthetic oligonucleotide
  Antisense strand to SEQ ID NO: 1712487
acuaacacacuaaucaauu

SEQ ID NO: 1712489 - RNA, 19 nt, Artificial Sequence
  Description of Artificial Sequence: Synthetic oligonucleotide
  Sense strand starting at position 2316 of SEQ ID NO: 1561976
auugauuaguguguuagua

SEQ ID NO: 1712490 - RNA, 19 nt, Artificial Sequence
  Description of Artificial Sequence: Synthetic oligonucleotide
  Antisense strand to SEQ ID NO: 1712489
uacuaacacacuaaucaau

SEQ ID NO: 1712491 - RNA, 19 nt, Artificial Sequence
  Description of Artificial Sequence: Synthetic oligonucleotide
  Sense strand starting at position 2401 of SEQ ID NO: 1561976
aaaguuuaucguggaaagg

SEQ ID NO: 1712492 - RNA, 19 nt, Artificial Sequence
  Description of Artificial Sequence: Synthetic oligonucleotide
  Antisense strand to SEQ ID NO: 1712491
ccuuuccacgauaaacuuu

SEQ ID NO: 1712493 - RNA, 19 nt, Artificial Sequence
  Description of Artificial Sequence: Synthetic oligonucleotide
  Sense strand starting at position 2402 of SEQ ID NO: 1561976
aaguuuaucguggaaaggu

SEQ ID NO: 1712494 - RNA, 19 nt, Artificial Sequence
  Description of Artificial Sequence: Synthetic oligonucleotide
  Antisense strand to SEQ ID NO: 1712493
accuuuccacgauaaacuu

SEQ ID NO: 1712495 - RNA, 19 nt, Artificial Sequence
  Description of Artificial Sequence: Synthetic oligonucleotide
  Sense strand starting at position 2403 of SEQ ID NO: 1561976
aguuuaucguggaaaggug

SEQ ID NO: 1712496 - RNA, 19 nt, Artificial Sequence
  Description of Artificial Sequence: Synthetic oligonucleotide
  Antisense strand to SEQ ID NO: 1712495
caccuuuccacgauaaacu

SEQ ID NO: 1712497 - RNA, 19 nt, Artificial Sequence
  Description of Artificial Sequence: Synthetic oligonucleotide
  Sense strand starting at position 2534 of SEQ ID NO: 1561976
ggcuccugucaggaagaca

SEQ ID NO: 1712498 - RNA, 19 nt, Artificial Sequence
  Description of Artificial Sequence: Synthetic oligonucleotide
  Antisense strand to SEQ ID NO: 1712497
ugucuuccugacaggagcc

SEQ ID NO: 1712499 - RNA, 19 nt, Artificial Sequence
  Description of Artificial Sequence: Synthetic oligonucleotide
  Sense strand starting at position 2556 of SEQ ID NO: 1561976
ggcggaacuugugucccau

SEQ ID NO: 1712500 - RNA, 19 nt, Artificial Sequence
  Description of Artificial Sequence: Synthetic oligonucleotide
  Antisense strand to SEQ ID NO: 1712499
augggacacaaguuccgcc

SEQ ID NO: 1712501 - RNA, 19 nt, Artificial Sequence
  Description of Artificial Sequence: Synthetic oligonucleotide
  Sense strand starting at position 2647 of SEQ ID NO: 1561976
gggugauuucggugaugcg

SEQ ID NO: 1712502 - RNA, 19 nt, Artificial Sequence
  Description of Artificial Sequence: Synthetic oligonucleotide
  Antisense strand to SEQ ID NO: 1712501
cgcaucaccgaaaucaccc

SEQ ID NO: 1712503 - RNA, 19 nt, Artificial Sequence
  Description of Artificial Sequence: Synthetic oligonucleotide
  Sense strand starting at position 2648 of SEQ ID NO: 1561976
ggugauuucggugaugcga

SEQ ID NO: 1712504 - RNA, 19 nt, Artificial Sequence
  Description of Artificial Sequence: Synthetic oligonucleotide
  Antisense strand to SEQ ID NO: 1712503
ucgcaucaccgaaaucacc

SEQ ID NO: 1712505 - RNA, 19 nt, Artificial Sequence
  Description of Artificial Sequence: Synthetic oligonucleotide
  Sense strand starting at position 2951 of SEQ ID NO: 1561976
ucaggaagucucuguuaaa

SEQ ID NO: 1712506 - RNA, 19 nt, Artificial Sequence
  Description of Artificial Sequence: Synthetic oligonucleotide
  Antisense strand to SEQ ID NO: 1712505
uuuaacagagacuuccuga

SEQ ID NO: 1712507 - RNA, 19 nt, Artificial Sequence
  Description of Artificial Sequence: Synthetic oligonucleotide
  Sense strand starting at position 3008 of SEQ ID NO: 1561976
uugcgcagcccugaauuau

SEQ ID NO: 1712508 - RNA, 19 nt, Artificial Sequence
  Description of Artificial Sequence: Synthetic oligonucleotide
  Antisense strand to SEQ ID NO: 1712507
auaauucagggcugcgcaa

SEQ ID NO: 1712509 - RNA, 19 nt, Artificial Sequence
  Description of Artificial Sequence: Synthetic oligonucleotide
  Sense strand starting at position 3109 of SEQ ID NO: 1561976
aacuguguccgggagccau

SEQ ID NO: 1712510 - RNA, 19 nt, Artificial Sequence
  Description of Artificial Sequence: Synthetic oligonucleotide
  Antisense strand to SEQ ID NO: 1712509
auggcucccggacacaguu

SEQ ID NO: 1712511 - RNA, 19 nt, Artificial Sequence
  Description of Artificial Sequence: Synthetic oligonucleotide
  Sense strand starting at position 3191 of SEQ ID NO: 1561976
aucugagagcucugagguu

SEQ ID NO: 1712512 - RNA, 19 nt, Artificial Sequence
  Description of Artificial Sequence: Synthetic oligonucleotide
  Antisense strand to SEQ ID NO: 1712511
aaccucagagcucucagau

SEQ ID NO: 1712513 - RNA, 19 nt, Artificial Sequence
  Description of Artificial Sequence: Synthetic oligonucleotide
  Sense strand starting at position 3227 of SEQ ID NO: 1561976
aaggcauugggcugaaugu

SEQ ID NO: 1712514 - RNA, 19 nt, Artificial Sequence
  Description of Artificial Sequence: Synthetic oligonucleotide
  Antisense strand to SEQ ID NO: 1712513
acauucagcccaaugccuu

SEQ ID NO: 1712515 - RNA, 19 nt, Artificial Sequence
  Description of Artificial Sequence: Synthetic oligonucleotide
  Sense strand starting at position 3532 of SEQ ID NO: 1561976
cuaaauguaucugucagga

SEQ ID NO: 1712516 - RNA, 19 nt, Artificial Sequence
  Description of Artificial Sequence: Synthetic oligonucleotide
  Antisense strand to SEQ ID NO: 1712515
uccugacagauacauuuag

SEQ ID NO: 1712517 - RNA, 19 nt, Artificial Sequence
  Description of Artificial Sequence: Synthetic oligonucleotide
  Sense strand starting at position 3545 of SEQ ID NO: 1561976
ucaggagugacuggcucau

SEQ ID NO: 1712518 - RNA, 19 nt, Artificial Sequence
  Description of Artificial Sequence: Synthetic oligonucleotide
  Antisense strand to SEQ ID NO: 1712517
augagccagucacuccuga

SEQ ID NO: 1712519 - RNA, 19 nt, Artificial Sequence
  Description of Artificial Sequence: Synthetic oligonucleotide
  Sense strand starting at position 3547 of SEQ ID NO: 1561976
aggagugacuggcucauaa

SEQ ID NO: 1712520 - RNA, 19 nt, Artificial Sequence
  Description of Artificial Sequence: Synthetic oligonucleotide
  Antisense strand to SEQ ID NO: 1712519
uuaugagccagucacuccu

SEQ ID NO: 1712521 - RNA, 19 nt, Artificial Sequence
  Description of Artificial Sequence: Synthetic oligonucleotide
  Sense strand starting at position 3557 of SEQ ID NO: 1561976
ggcucauaauuccuggacu

SEQ ID NO: 1712522 - RNA, 19 nt, Artificial Sequence
  Description of Artificial Sequence: Synthetic oligonucleotide
  Antisense strand to SEQ ID NO: 1712521
aguccaggaauuaugagcc

SEQ ID NO: 1712523 - RNA, 19 nt, Artificial Sequence
  Description of Artificial Sequence: Synthetic oligonucleotide
  Sense strand starting at position 3782 of SEQ ID NO: 1561976
gaagauuaggccuguccau

SEQ ID NO: 1712524 - RNA, 19 nt, Artificial Sequence
  Description of Artificial Sequence: Synthetic oligonucleotide
  Antisense strand to SEQ ID NO: 1712523
auggacaggccuaaucuuc

SEQ ID NO: 1712525 - RNA, 19 nt, Artificial Sequence
  Description of Artificial Sequence: Synthetic oligonucleotide
  Sense strand starting at position 3833 of SEQ ID NO: 1561976
agggaaugguuuggauuaa

SEQ ID NO: 1712526 - RNA, 19 nt, Artificial Sequence
  Description of Artificial Sequence: Synthetic oligonucleotide
  Antisense strand to SEQ ID NO: 1712525
uuaauccaaaccauucccu

SEQ ID NO: 1712527 - RNA, 19 nt, Artificial Sequence
  Description of Artificial Sequence: Synthetic oligonucleotide
  Sense strand starting at position 3834 of SEQ ID NO: 1561976
gggaaugguuuggauuaaa

SEQ ID NO: 1712528 - RNA, 19 nt, Artificial Sequence
  Description of Artificial Sequence: Synthetic oligonucleotide
  Antisense strand to SEQ ID NO: 1712527
uuuaauccaaaccauuccc

SEQ ID NO: 1712529 - RNA, 19 nt, Artificial Sequence
  Description of Artificial Sequence: Synthetic oligonucleotide
  Sense strand starting at position 143 of SEQ ID NO: 1561977
gacuuagacgcaggagaaa

SEQ ID NO: 1712530 - RNA, 19 nt, Artificial Sequence
  Description of Artificial Sequence: Synthetic oligonucleotide
  Antisense strand to SEQ ID NO: 1712529
uuucuccugcgucuaaguc

SEQ ID NO: 1712531 - RNA, 19 nt, Artificial Sequence
  Description of Artificial Sequence: Synthetic oligonucleotide
  Sense strand starting at position 230 of SEQ ID NO: 1561977
ccaagaucaccuggcagaa

SEQ ID NO: 1712532 - RNA, 19 nt, Artificial Sequence
  Description of Artificial Sequence: Synthetic oligonucleotide
  Antisense strand to SEQ ID NO: 1712531
uucugccaggugaucuugg

SEQ ID NO: 1712533 - RNA, 19 nt, Artificial Sequence
  Description of Artificial Sequence: Synthetic oligonucleotide
  Sense strand starting at position 246 of SEQ ID NO: 1561977
gaaauuaagucggccaagu

SEQ ID NO: 1712534 - RNA, 19 nt, Artificial Sequence
  Description of Artificial Sequence: Synthetic oligonucleotide
  Antisense strand to SEQ ID NO: 1712533
acuuggccgacuuaauuuc

SEQ ID NO: 1712535 - RNA, 19 nt, Artificial Sequence
  Description of Artificial Sequence: Synthetic oligonucleotide
  Sense strand starting at position 286 of SEQ ID NO: 1561977
aaugcaacgcuuucgugau

SEQ ID NO: 1712536 - RNA, 19 nt, Artificial Sequence
  Description of Artificial Sequence: Synthetic oligonucleotide
  Antisense strand to SEQ ID NO: 1712535
aucacgaaagcguugcauu

SEQ ID NO: 1712537 - RNA, 19 nt, Artificial Sequence
  Description of Artificial Sequence: Synthetic oligonucleotide
  Sense strand starting at position 290 of SEQ ID NO: 1561977
caacgcuuucgugauggaa

SEQ ID NO: 1712538 - RNA, 19 nt, Artificial Sequence
  Description of Artificial Sequence: Synthetic oligonucleotide
  Antisense strand to SEQ ID NO: 1712537
uuccaucacgaaagcguug

SEQ ID NO: 1712539 - RNA, 19 nt, Artificial Sequence
  Description of Artificial Sequence: Synthetic oligonucleotide
  Sense strand starting at position 294 of SEQ ID NO: 1561977
gcuuucgugauggaaauua

SEQ ID NO: 1712540 - RNA, 19 nt, Artificial Sequence
  Description of Artificial Sequence: Synthetic oligonucleotide
  Antisense strand to SEQ ID NO: 1712539
uaauuuccaucacgaaagc

SEQ ID NO: 1712541 - RNA, 19 nt, Artificial Sequence
  Description of Artificial Sequence: Synthetic oligonucleotide
  Sense strand starting at position 318 of SEQ ID NO: 1561977
agcugucagggcgagaaau

SEQ ID NO: 1712542 - RNA, 19 nt, Artificial Sequence
  Description of Artificial Sequence: Synthetic oligonucleotide
  Antisense strand to SEQ ID NO: 1712541
auuucucgcccugacagcu

SEQ ID NO: 1712543 - RNA, 19 nt, Artificial Sequence
  Description of Artificial Sequence: Synthetic oligonucleotide
  Sense strand starting at position 328 of SEQ ID NO: 1561977
gcgagaaaugcugagcaag

SEQ ID NO: 1712544 - RNA, 19 nt, Artificial Sequence
  Description of Artificial Sequence: Synthetic oligonucleotide
  Antisense strand to SEQ ID NO: 1712543
cuugcucagcauuucucgc

SEQ ID NO: 1712545 - RNA, 19 nt, Artificial Sequence
  Description of Artificial Sequence: Synthetic oligonucleotide
  Sense strand starting at position 381 of SEQ ID NO: 1561977
ucaggacuccuguggaaga

SEQ ID NO: 1712546 - RNA, 19 nt, Artificial Sequence
  Description of Artificial Sequence: Synthetic oligonucleotide
  Antisense strand to SEQ ID NO: 1712545
ucuuccacaggaguccuga

SEQ ID NO: 1712547 - RNA, 19 nt, Artificial Sequence
  Description of Artificial Sequence: Synthetic oligonucleotide
  Sense strand starting at position 392 of SEQ ID NO: 1561977
guggaagaugugugggaca

SEQ ID NO: 1712548 - RNA, 19 nt, Artificial Sequence
  Description of Artificial Sequence: Synthetic oligonucleotide
  Antisense strand to SEQ ID NO: 1712547
ugucccacacaucuuccac

SEQ ID NO: 1712549 - RNA, 19 nt, Artificial Sequence
  Description of Artificial Sequence: Synthetic oligonucleotide
  Sense strand starting at position 394 of SEQ ID NO: 1561977
ggaagaugugugggacaua

SEQ ID NO: 1712550 - RNA, 19 nt, Artificial Sequence
  Description of Artificial Sequence: Synthetic oligonucleotide
  Antisense strand to SEQ ID NO: 1712549
uaugucccacacaucuucc

SEQ ID NO: 1712551 - RNA, 19 nt, Artificial Sequence
  Description of Artificial Sequence: Synthetic oligonucleotide
  Sense strand starting at position 555 of SEQ ID NO: 1561977
ccaagaugaccacgaacuu

SEQ ID NO: 1712552 - RNA, 19 nt, Artificial Sequence
  Description of Artificial Sequence: Synthetic oligonucleotide
  Antisense strand to SEQ ID NO: 1712551
aaguucguggucaucuugg

SEQ ID NO: 1712553 - RNA, 19 nt, Artificial Sequence
  Description of Artificial Sequence: Synthetic oligonucleotide
  Sense strand starting at position 1827 of SEQ ID NO: 1561977
ccggaaagaugcucagauc

SEQ ID NO: 1712554 - RNA, 19 nt, Artificial Sequence
  Description of Artificial Sequence: Synthetic oligonucleotide
  Antisense strand to SEQ ID NO: 1712553
gaucugagcaucuuuccgg

SEQ ID NO: 1712555 - RNA, 19 nt, Artificial Sequence
  Description of Artificial Sequence: Synthetic oligonucleotide
  Sense strand starting at position 1828 of SEQ ID NO: 1561977
cggaaagaugcucagaucu

SEQ ID NO: 1712556 - RNA, 19 nt, Artificial Sequence
  Description of Artificial Sequence: Synthetic oligonucleotide
  Antisense strand to SEQ ID NO: 1712555
agaucugagcaucuuuccg

SEQ ID NO: 1712557 - RNA, 19 nt, Artificial Sequence
  Description of Artificial Sequence: Synthetic oligonucleotide
  Sense strand starting at position 1838 of SEQ ID NO: 1561977
cucagaucucgcugaggga

SEQ ID NO: 1712558 - RNA, 19 nt, Artificial Sequence
  Description of Artificial Sequence: Synthetic oligonucleotide
  Antisense strand to SEQ ID NO: 1712557
ucccucagcgagaucugag

SEQ ID NO: 1712559 - RNA, 19 nt, Artificial Sequence
  Description of Artificial Sequence: Synthetic oligonucleotide
  Sense strand starting at position 2106 of SEQ ID NO: 1561977
guuacaucguuacccagau

SEQ ID NO: 1712560 - RNA, 19 nt, Artificial Sequence
  Description of Artificial Sequence: Synthetic oligonucleotide
  Antisense strand to SEQ ID NO: 1712559
aucuggguaacgauguaac

SEQ ID NO: 1712561 - RNA, 19 nt, Artificial Sequence
  Description of Artificial Sequence: Synthetic oligonucleotide
  Sense strand starting at position 2107 of SEQ ID NO: 1561977
uuacaucguuacccagauu

SEQ ID NO: 1712562 - RNA, 19 nt, Artificial Sequence
  Description of Artificial Sequence: Synthetic oligonucleotide
  Antisense strand to SEQ ID NO: 1712561
aaucuggguaacgauguaa

SEQ ID NO: 1712563 - RNA, 19 nt, Artificial Sequence
  Description of Artificial Sequence: Synthetic oligonucleotide
  Sense strand starting at position 2176 of SEQ ID NO: 1561977
aacgucuaucuguaaggca

SEQ ID NO: 1712564 - RNA, 19 nt, Artificial Sequence
  Description of Artificial Sequence: Synthetic oligonucleotide
  Antisense strand to SEQ ID NO: 1712563
ugccuuacagauagacguu

SEQ ID NO: 1712565 - RNA, 19 nt, Artificial Sequence
  Description of Artificial Sequence: Synthetic oligonucleotide
  Sense strand starting at position 2362 of SEQ ID NO: 1561977
ggguucuuucuggaacugu

SEQ ID NO: 1712566 - RNA, 19 nt, Artificial Sequence
  Description of Artificial Sequence: Synthetic oligonucleotide
  Antisense strand to SEQ ID NO: 1712565
acaguuccagaaagaaccc

SEQ ID NO: 1712567 - RNA, 19 nt, Artificial Sequence
  Description of Artificial Sequence: Synthetic oligonucleotide
  Sense strand starting at position 2372 of SEQ ID NO: 1561977
uggaacugugccugauucu

SEQ ID NO: 1712568 - RNA, 19 nt, Artificial Sequence
  Description of Artificial Sequence: Synthetic oligonucleotide
  Antisense strand to SEQ ID NO: 1712567
agaaucaggcacaguucca

SEQ ID NO: 1712569 - RNA, 19 nt, Artificial Sequence
  Description of Artificial Sequence: Synthetic oligonucleotide
  Sense strand starting at position 2454 of SEQ ID NO: 1561977
uuguauauuuaggcgacau

SEQ ID NO: 1712570 - RNA, 19 nt, Artificial Sequence
  Description of Artificial Sequence: Synthetic oligonucleotide
  Antisense strand to SEQ ID NO: 1712569
augucgccuaaauauacaa

SEQ ID NO: 1712571 - RNA, 19 nt, Artificial Sequence
  Description of Artificial Sequence: Synthetic oligonucleotide
  Sense strand starting at position 2455 of SEQ ID NO: 1561977
uguauauuuaggcgacauu

SEQ ID NO: 1712572 - RNA, 19 nt, Artificial Sequence
  Description of Artificial Sequence: Synthetic oligonucleotide
  Antisense strand to SEQ ID NO: 1712571
aaugucgccuaaauauaca

SEQ ID NO: 1712573 - RNA, 19 nt, Artificial Sequence
  Description of Artificial Sequence: Synthetic oligonucleotide
  Sense strand starting at position 2466 of SEQ ID NO: 1561977
gcgacauuuguauagguuu

SEQ ID NO: 1712574 - RNA, 19 nt, Artificial Sequence
  Description of Artificial Sequence: Synthetic oligonucleotide
  Antisense strand to SEQ ID NO: 1712573
aaaccuauacaaaugucgc

SEQ ID NO: 1712575 - RNA, 19 nt, Artificial Sequence
  Description of Artificial Sequence: Synthetic oligonucleotide
  Sense strand starting at position 2833 of SEQ ID NO: 1561977
cuuuaucaccagugcauau

SEQ ID NO: 1712576 - RNA, 19 nt, Artificial Sequence
  Description of Artificial Sequence: Synthetic oligonucleotide
  Antisense strand to SEQ ID NO: 1712575
auaugcacuggugauaaag

SEQ ID NO: 1712577 - RNA, 19 nt, Artificial Sequence
  Description of Artificial Sequence: Synthetic oligonucleotide
  Sense strand starting at position 2995 of SEQ ID NO: 1561977
gguguagggaccgauguua

SEQ ID NO: 1712578 - RNA, 19 nt, Artificial Sequence
  Description of Artificial Sequence: Synthetic oligonucleotide
  Antisense strand to SEQ ID NO: 1712577
uaacaucggucccuacacc

SEQ ID NO: 1712579 - RNA, 19 nt, Artificial Sequence
  Description of Artificial Sequence: Synthetic oligonucleotide
  Sense strand starting at position 3318 of SEQ ID NO: 1561977
agcgucauugcauucuagu

SEQ ID NO: 1712580 - RNA, 19 nt, Artificial Sequence
  Description of Artificial Sequence: Synthetic oligonucleotide
  Antisense strand to SEQ ID NO: 1712579
acuagaaugcaaugacgcu

SEQ ID NO: 1712581 - RNA, 19 nt, Artificial Sequence
  Description of Artificial Sequence: Synthetic oligonucleotide
  Sense strand starting at position 3319 of SEQ ID NO: 1561977
gcgucauugcauucuaguc

SEQ ID NO: 1712582 - RNA, 19 nt, Artificial Sequence
  Description of Artificial Sequence: Synthetic oligonucleotide
  Antisense strand to SEQ ID NO: 1712581
gacuagaaugcaaugacgc

SEQ ID NO: 1712583 - RNA, 19 nt, Artificial Sequence
  Description of Artificial Sequence: Synthetic oligonucleotide
  Sense strand starting at position 3350 of SEQ ID NO: 1561977
ugagacuccgucuauauau

SEQ ID NO: 1712584 - RNA, 19 nt, Artificial Sequence
  Description of Artificial Sequence: Synthetic oligonucleotide
  Antisense strand to SEQ ID NO: 1712583
auauauagacggagucuca

SEQ ID NO: 1712585 - RNA, 19 nt, Artificial Sequence
  Description of Artificial Sequence: Synthetic oligonucleotide
  Sense strand starting at position 3470 of SEQ ID NO: 1561977
uagacauauggauguaucu

SEQ ID NO: 1712586 - RNA, 19 nt, Artificial Sequence
  Description of Artificial Sequence: Synthetic oligonucleotide
  Antisense strand to SEQ ID NO: 1712585
agauacauccauaugucua

SEQ ID NO: 1712587 - RNA, 19 nt, Artificial Sequence
  Description of Artificial Sequence: Synthetic oligonucleotide
  Sense strand starting at position 3479 of SEQ ID NO: 1561977
ggauguaucuaucuauaga

SEQ ID NO: 1712588 - RNA, 19 nt, Artificial Sequence
  Description of Artificial Sequence: Synthetic oligonucleotide
  Antisense strand to SEQ ID NO: 1712587
ucuauagauagauacaucc

SEQ ID NO: 1712589 - RNA, 19 nt, Artificial Sequence
  Description of Artificial Sequence: Synthetic oligonucleotide
  Sense strand starting at position 3592 of SEQ ID NO: 1561977
uguaucuaucgauagauag

SEQ ID NO: 1712590 - RNA, 19 nt, Artificial Sequence
  Description of Artificial Sequence: Synthetic oligonucleotide
  Antisense strand to SEQ ID NO: 1712589
cuaucuaucgauagauaca

SEQ ID NO: 1712591 - RNA, 19 nt, Artificial Sequence
  Description of Artificial Sequence: Synthetic oligonucleotide
  Sense strand starting at position 3600 of SEQ ID NO: 1561977
ucgauagauagauguaucu

SEQ ID NO: 1712592 - RNA, 19 nt, Artificial Sequence
  Description of Artificial Sequence: Synthetic oligonucleotide
  Antisense strand to SEQ ID NO: 1712591
agauacaucuaucuaucga

SEQ ID NO: 1712593 - RNA, 19 nt, Artificial Sequence
  Description of Artificial Sequence: Synthetic oligonucleotide
  Sense strand starting at position 3662 of SEQ ID NO: 1561977
uauguuauggauugcaagu

SEQ ID NO: 1712594 - RNA, 19 nt, Artificial Sequence
  Description of Artificial Sequence: Synthetic oligonucleotide
  Antisense strand to SEQ ID NO: 1712593
acuugcaauccauaacaua

SEQ ID NO: 1712595 - RNA, 19 nt, Artificial Sequence
  Description of Artificial Sequence: Synthetic oligonucleotide
  Sense strand starting at position 3721 of SEQ ID NO: 1561977
gaagacauuuguuugugcu

SEQ ID NO: 1712596 - RNA, 19 nt, Artificial Sequence
  Description of Artificial Sequence: Synthetic oligonucleotide
  Antisense strand to SEQ ID NO: 1712595
agcacaaacaaaugucuuc

SEQ ID NO: 1712597 - RNA, 19 nt, Artificial Sequence
  Description of Artificial Sequence: Synthetic oligonucleotide
  Sense strand starting at position 3722 of SEQ ID NO: 1561977
aagacauuuguuugugcua

SEQ ID NO: 1712598 - RNA, 19 nt, Artificial Sequence
  Description of Artificial Sequence: Synthetic oligonucleotide
  Antisense strand to SEQ ID NO: 1712597
uagcacaaacaaaugucuu

SEQ ID NO: 1712599 - RNA, 19 nt, Artificial Sequence
  Description of Artificial Sequence: Synthetic oligonucleotide
  Sense strand starting at position 3723 of SEQ ID NO: 1561977
agacauuuguuugugcuaa

SEQ ID NO: 1712600 - RNA, 19 nt, Artificial Sequence
  Description of Artificial Sequence: Synthetic oligonucleotide
  Antisense strand to SEQ ID NO: 1712599
uuagcacaaacaaaugucu

SEQ ID NO: 1712601 - RNA, 19 nt, Artificial Sequence
  Description of Artificial Sequence: Synthetic oligonucleotide
  Sense strand starting at position 3725 of SEQ ID NO: 1561977
acauuuguuugugcuaaug

SEQ ID NO: 1712602 - RNA, 19 nt, Artificial Sequence
  Description of Artificial Sequence: Synthetic oligonucleotide
  Antisense strand to SEQ ID NO: 1712601
cauuagcacaaacaaaugu

SEQ ID NO: 1712603 - RNA, 19 nt, Artificial Sequence
  Description of Artificial Sequence: Synthetic oligonucleotide
  Sense strand starting at position 3805 of SEQ ID NO: 1561977
gugauauacuuccuagaug

SEQ ID NO: 1712604 - RNA, 19 nt, Artificial Sequence
  Description of Artificial Sequence: Synthetic oligonucleotide
  Antisense strand to SEQ ID NO: 1712603
caucuaggaaguauaucac

SEQ ID NO: 1712605 - RNA, 19 nt, Artificial Sequence
  Description of Artificial Sequence: Synthetic oligonucleotide
  Sense strand starting at position 3887 of SEQ ID NO: 1561977
uuagaaauaugccugugca

SEQ ID NO: 1712606 - RNA, 19 nt, Artificial Sequence
  Description of Artificial Sequence: Synthetic oligonucleotide
  Antisense strand to SEQ ID NO: 1712605
ugcacaggcauauuucuaa

SEQ ID NO: 1712607 - RNA, 19 nt, Artificial Sequence
  Description of Artificial Sequence: Synthetic oligonucleotide
  Sense strand starting at position 3888 of SEQ ID NO: 1561977
uagaaauaugccugugcaa

SEQ ID NO: 1712608 - RNA, 19 nt, Artificial Sequence
  Description of Artificial Sequence: Synthetic oligonucleotide
  Antisense strand to SEQ ID NO: 1712607
uugcacaggcauauuucua

SEQ ID NO: 1712609 - RNA, 19 nt, Artificial Sequence
  Description of Artificial Sequence: Synthetic oligonucleotide
  Sense strand starting at position 13 of SEQ ID NO: 1561978
cccgguagcucuccauuga

SEQ ID NO: 1712610 - RNA, 19 nt, Artificial Sequence
  Description of Artificial Sequence: Synthetic oligonucleotide
  Antisense strand to SEQ ID NO: 1712609
ucaauggagagcuaccggg

SEQ ID NO: 1712611 - RNA, 19 nt, Artificial Sequence
  Description of Artificial Sequence: Synthetic oligonucleotide
  Sense strand starting at position 35 of SEQ ID NO: 1561978
gcgaccauaucuguuggau

SEQ ID NO: 1712612 - RNA, 19 nt, Artificial Sequence
  Description of Artificial Sequence: Synthetic oligonucleotide
  Antisense strand to SEQ ID NO: 1712611
auccaacagauauggucgc

SEQ ID NO: 1712613 - RNA, 19 nt, Artificial Sequence
  Description of Artificial Sequence: Synthetic oligonucleotide
  Sense strand starting at position 38 of SEQ ID NO: 1561978
accauaucuguuggauaac

SEQ ID NO: 1712614 - RNA, 19 nt, Artificial Sequence
  Description of Artificial Sequence: Synthetic oligonucleotide
  Antisense strand to SEQ ID NO: 1712613
guuauccaacagauauggu

SEQ ID NO: 1712615 - RNA, 19 nt, Artificial Sequence
  Description of Artificial Sequence: Synthetic oligonucleotide
  Sense strand starting at position 515 of SEQ ID NO: 1561978
agcagugagucuuucugga

SEQ ID NO: 1712616 - RNA, 19 nt, Artificial Sequence
  Description of Artificial Sequence: Synthetic oligonucleotide
  Antisense strand to SEQ ID NO: 1712615
uccagaaagacucacugcu

SEQ ID NO: 1712617 - RNA, 19 nt, Artificial Sequence
  Description of Artificial Sequence: Synthetic oligonucleotide
  Sense strand starting at position 520 of SEQ ID NO: 1561978
ugagucuuucuggagcaag

SEQ ID NO: 1712618 - RNA, 19 nt, Artificial Sequence
  Description of Artificial Sequence: Synthetic oligonucleotide
  Antisense strand to SEQ ID NO: 1712617
cuugcuccagaaagacuca

SEQ ID NO: 1712619 - RNA, 19 nt, Artificial Sequence
  Description of Artificial Sequence: Synthetic oligonucleotide
  Sense strand starting at position 671 of SEQ ID NO: 1561978
cagcucugugguugacuua

SEQ ID NO: 1712620 - RNA, 19 nt, Artificial Sequence
  Description of Artificial Sequence: Synthetic oligonucleotide
  Antisense strand to SEQ ID NO: 1712619
uaagucaaccacagagcug

SEQ ID NO: 1712621 - RNA, 19 nt, Artificial Sequence
  Description of Artificial Sequence: Synthetic oligonucleotide
  Sense strand starting at position 684 of SEQ ID NO: 1561978
gacuuagacgcaggagaaa

SEQ ID NO: 1712622 - RNA, 19 nt, Artificial Sequence
  Description of Artificial Sequence: Synthetic oligonucleotide
  Antisense strand to SEQ ID NO: 1712621
uuucuccugcgucuaaguc

SEQ ID NO: 1712623 - RNA, 19 nt, Artificial Sequence
  Description of Artificial Sequence: Synthetic oligonucleotide
  Sense strand starting at position 771 of SEQ ID NO: 1561978
ccaagaucaccuggcagaa

SEQ ID NO: 1712624 - RNA, 19 nt, Artificial Sequence
  Description of Artificial Sequence: Synthetic oligonucleotide
  Antisense strand to SEQ ID NO: 1712623
uucugccaggugaucuugg

SEQ ID NO: 1712625 - RNA, 19 nt, Artificial Sequence
  Description of Artificial Sequence: Synthetic oligonucleotide
  Sense strand starting at position 787 of SEQ ID NO: 1561978
gaaauuaagucggccaagu

SEQ ID NO: 1712626 - RNA, 19 nt, Artificial Sequence
  Description of Artificial Sequence: Synthetic oligonucleotide
  Antisense strand to SEQ ID NO: 1712625
acuuggccgacuuaauuuc

SEQ ID NO: 1712627 - RNA, 19 nt, Artificial Sequence
  Description of Artificial Sequence: Synthetic oligonucleotide
  Sense strand starting at position 827 of SEQ ID NO: 1561978
aaugcaacgcuuucgugau

SEQ ID NO: 1712628 - RNA, 19 nt, Artificial Sequence
  Description of Artificial Sequence: Synthetic oligonucleotide
  Antisense strand to SEQ ID NO: 1712627
aucacgaaagcguugcauu

SEQ ID NO: 1712629 - RNA, 19 nt, Artificial Sequence
  Description of Artificial Sequence: Synthetic oligonucleotide
  Sense strand starting at position 831 of SEQ ID NO: 1561978
caacgcuuucgugauggaa

SEQ ID NO: 1712630 - RNA, 19 nt, Artificial Sequence
  Description of Artificial Sequence: Synthetic oligonucleotide
  Antisense strand to SEQ ID NO: 1712629
uuccaucacgaaagcguug

SEQ ID NO: 1712631 - RNA, 19 nt, Artificial Sequence
  Description of Artificial Sequence: Synthetic oligonucleotide
  Sense strand starting at position 835 of SEQ ID NO: 1561978
gcuuucgugauggaaauua

SEQ ID NO: 1712632 - RNA, 19 nt, Artificial Sequence
  Description of Artificial Sequence: Synthetic oligonucleotide
  Antisense strand to SEQ ID NO: 1712631
uaauuuccaucacgaaagc

SEQ ID NO: 1712633 - RNA, 19 nt, Artificial Sequence
  Description of Artificial Sequence: Synthetic oligonucleotide
  Sense strand starting at position 859 of SEQ ID NO: 1561978
agcugucagggcgagaaau

SEQ ID NO: 1712634 - RNA, 19 nt, Artificial Sequence
  Description of Artificial Sequence: Synthetic oligonucleotide
  Antisense strand to SEQ ID NO: 1712633
auuucucgcccugacagcu

SEQ ID NO: 1712635 - RNA, 19 nt, Artificial Sequence
  Description of Artificial Sequence: Synthetic oligonucleotide
  Sense strand starting at position 869 of SEQ ID NO: 1561978
gcgagaaaugcugagcaag

SEQ ID NO: 1712636 - RNA, 19 nt, Artificial Sequence
  Description of Artificial Sequence: Synthetic oligonucleotide
  Antisense strand to SEQ ID NO: 1712635
cuugcucagcauuucucgc

SEQ ID NO: 1712637 - RNA, 19 nt, Artificial Sequence
  Description of Artificial Sequence: Synthetic oligonucleotide
  Sense strand starting at position 922 of SEQ ID NO: 1561978
ucaggacuccuguggaaga

SEQ ID NO: 1712638 - RNA, 19 nt, Artificial Sequence
  Description of Artificial Sequence: Synthetic oligonucleotide
  Antisense strand to SEQ ID NO: 1712637
ucuuccacaggaguccuga

SEQ ID NO: 1712639 - RNA, 19 nt, Artificial Sequence
  Description of Artificial Sequence: Synthetic oligonucleotide
  Sense strand starting at position 933 of SEQ ID NO: 1561978
guggaagaugugugggaca

SEQ ID NO: 1712640 - RNA, 19 nt, Artificial Sequence
  Description of Artificial Sequence: Synthetic oligonucleotide
  Antisense strand to SEQ ID NO: 1712639
ugucccacacaucuuccac

SEQ ID NO: 1712641 - RNA, 19 nt, Artificial Sequence
  Description of Artificial Sequence: Synthetic oligonucleotide
  Sense strand starting at position 935 of SEQ ID NO: 1561978
ggaagaugugugggacaua

SEQ ID NO: 1712642 - RNA, 19 nt, Artificial Sequence
  Description of Artificial Sequence: Synthetic oligonucleotide
  Antisense strand to SEQ ID NO: 1712641
uaugucccacacaucuucc

SEQ ID NO: 1712643 - RNA, 19 nt, Artificial Sequence
  Description of Artificial Sequence: Synthetic oligonucleotide
  Sense strand starting at position 936 of SEQ ID NO: 1561978
gaagaugugugggacauaa

SEQ ID NO: 1712644 - RNA, 19 nt, Artificial Sequence
  Description of Artificial Sequence: Synthetic oligonucleotide
  Antisense strand to SEQ ID NO: 1712643
uuaugucccacacaucuuc

SEQ ID NO: 1712645 - RNA, 19 nt, Artificial Sequence
  Description of Artificial Sequence: Synthetic oligonucleotide
  Sense strand starting at position 1096 of SEQ ID NO: 1561978
ccaagaugaccacgaacuu

SEQ ID NO: 1712646 - RNA, 19 nt, Artificial Sequence
  Description of Artificial Sequence: Synthetic oligonucleotide
  Antisense strand to SEQ ID NO: 1712645
aaguucguggucaucuugg

SEQ ID NO: 1712647 - RNA, 19 nt, Artificial Sequence
  Description of Artificial Sequence: Synthetic oligonucleotide
  Sense strand starting at position 2357 of SEQ ID NO: 1561978
ucuguuagccuccggaaag

SEQ ID NO: 1712648 - RNA, 19 nt, Artificial Sequence
  Description of Artificial Sequence: Synthetic oligonucleotide
  Antisense strand to SEQ ID NO: 1712647
cuuuccggaggcuaacaga

SEQ ID NO: 1712649 - RNA, 19 nt, Artificial Sequence
  Description of Artificial Sequence: Synthetic oligonucleotide
  Sense strand starting at position 2368 of SEQ ID NO: 1561978
ccggaaagaugcucagauc

SEQ ID NO: 1712650 - RNA, 19 nt, Artificial Sequence
  Description of Artificial Sequence: Synthetic oligonucleotide
  Antisense strand to SEQ ID NO: 1712649
gaucugagcaucuuuccgg

SEQ ID NO: 1712651 - RNA, 19 nt, Artificial Sequence
  Description of Artificial Sequence: Synthetic oligonucleotide
  Sense strand starting at position 2369 of SEQ ID NO: 1561978
cggaaagaugcucagaucu

SEQ ID NO: 1712652 - RNA, 19 nt, Artificial Sequence
  Description of Artificial Sequence: Synthetic oligonucleotide
  Antisense strand to SEQ ID NO: 1712651
agaucugagcaucuuuccg

SEQ ID NO: 1712653 - RNA, 19 nt, Artificial Sequence
  Description of Artificial Sequence: Synthetic oligonucleotide
  Sense strand starting at position 2379 of SEQ ID NO: 1561978
cucagaucucgcugaggga

SEQ ID NO: 1712654 - RNA, 19 nt, Artificial Sequence
  Description of Artificial Sequence: Synthetic oligonucleotide
  Antisense strand to SEQ ID NO: 1712653
ucccucagcgagaucugag

SEQ ID NO: 1712655 - RNA, 19 nt, Artificial Sequence
  Description of Artificial Sequence: Synthetic oligonucleotide
  Sense strand starting at position 2425 of SEQ ID NO: 1561978
cagucuccugccggaaagu

SEQ ID NO: 1712656 - RNA, 19 nt, Artificial Sequence
  Description of Artificial Sequence: Synthetic oligonucleotide
  Antisense strand to SEQ ID NO: 1712655
acuuuccggcaggagacug

SEQ ID NO: 1712657 - RNA, 19 nt, Artificial Sequence
  Description of Artificial Sequence: Synthetic oligonucleotide
  Sense strand starting at position 2647 of SEQ ID NO: 1561978
guuacaucguuacccagau

SEQ ID NO: 1712658 - RNA, 19 nt, Artificial Sequence
  Description of Artificial Sequence: Synthetic oligonucleotide
  Antisense strand to SEQ ID NO: 1712657
aucuggguaacgauguaac

SEQ ID NO: 1712659 - RNA, 19 nt, Artificial Sequence
  Description of Artificial Sequence: Synthetic oligonucleotide
  Sense strand starting at position 2648 of SEQ ID NO: 1561978
uuacaucguuacccagauu

SEQ ID NO: 1712660 - RNA, 19 nt, Artificial Sequence
  Description of Artificial Sequence: Synthetic oligonucleotide
  Antisense strand to SEQ ID NO: 1712659
aaucuggguaacgauguaa

SEQ ID NO: 1712661 - RNA, 19 nt, Artificial Sequence
  Description of Artificial Sequence: Synthetic oligonucleotide
  Sense strand starting at position 2717 of SEQ ID NO: 1561978
aacgucuaucuguaaggca

SEQ ID NO: 1712662 - RNA, 19 nt, Artificial Sequence
  Description of Artificial Sequence: Synthetic oligonucleotide
  Antisense strand to SEQ ID NO: 1712661
ugccuuacagauagacguu

SEQ ID NO: 1712663 - RNA, 19 nt, Artificial Sequence
  Description of Artificial Sequence: Synthetic oligonucleotide
  Sense strand starting at position 2821 of SEQ ID NO: 1561978
ucugcaguuucuguggaua

SEQ ID NO: 1712664 - RNA, 19 nt, Artificial Sequence
  Description of Artificial Sequence: Synthetic oligonucleotide
  Antisense strand to SEQ ID NO: 1712663
uauccacagaaacugcaga

SEQ ID NO: 1712665 - RNA, 19 nt, Artificial Sequence
  Description of Artificial Sequence: Synthetic oligonucleotide
  Sense strand starting at position 2903 of SEQ ID NO: 1561978
ggguucuuucuggaacugu

SEQ ID NO: 1712666 - RNA, 19 nt, Artificial Sequence
  Description of Artificial Sequence: Synthetic oligonucleotide
  Antisense strand to SEQ ID NO: 1712665
acaguuccagaaagaaccc

SEQ ID NO: 1712667 - RNA, 19 nt, Artificial Sequence
  Description of Artificial Sequence: Synthetic oligonucleotide
  Sense strand starting at position 2913 of SEQ ID NO: 1561978
uggaacugugccugauucu

SEQ ID NO: 1712668 - RNA, 19 nt, Artificial Sequence
  Description of Artificial Sequence: Synthetic oligonucleotide
  Antisense strand to SEQ ID NO: 1712667
agaaucaggcacaguucca

SEQ ID NO: 1712669 - RNA, 19 nt, Artificial Sequence
  Description of Artificial Sequence: Synthetic oligonucleotide
  Sense strand starting at position 2995 of SEQ ID NO: 1561978
uuguauauuuaggcgacau

SEQ ID NO: 1712670 - RNA, 19 nt, Artificial Sequence
  Description of Artificial Sequence: Synthetic oligonucleotide
  Antisense strand to SEQ ID NO: 1712669
augucgccuaaauauacaa

SEQ ID NO: 1712671 - RNA, 19 nt, Artificial Sequence
  Description of Artificial Sequence: Synthetic oligonucleotide
  Sense strand starting at position 2996 of SEQ ID NO: 1561978
uguauauuuaggcgacauu

SEQ ID NO: 1712672 - RNA, 19 nt, Artificial Sequence
  Description of Artificial Sequence: Synthetic oligonucleotide
  Antisense strand to SEQ ID NO: 1712671
aaugucgccuaaauauaca

SEQ ID NO: 1712673 - RNA, 19 nt, Artificial Sequence
  Description of Artificial Sequence: Synthetic oligonucleotide
  Sense strand starting at position 3007 of SEQ ID NO: 1561978
gcgacauuuguauagguuu

SEQ ID NO: 1712674 - RNA, 19 nt, Artificial Sequence
  Description of Artificial Sequence: Synthetic oligonucleotide
  Antisense strand to SEQ ID NO: 1712673
aaaccuauacaaaugucgc

SEQ ID NO: 1712675 - RNA, 19 nt, Artificial Sequence
  Description of Artificial Sequence: Synthetic oligonucleotide
  Sense strand starting at position 3374 of SEQ ID NO: 1561978
cuuuaucaccagugcauau

SEQ ID NO: 1712676 - RNA, 19 nt, Artificial Sequence
  Description of Artificial Sequence: Synthetic oligonucleotide
  Antisense strand to SEQ ID NO: 1712675
auaugcacuggugauaaag

SEQ ID NO: 1712677 - RNA, 19 nt, Artificial Sequence
  Description of Artificial Sequence: Synthetic oligonucleotide
  Sense strand starting at position 3384 of SEQ ID NO: 1561978
agugcauauuuagaacagu

SEQ ID NO: 1712678 - RNA, 19 nt, Artificial Sequence
  Description of Artificial Sequence: Synthetic oligonucleotide
  Antisense strand to SEQ ID NO: 1712677
acuguucuaaauaugcacu

SEQ ID NO: 1712679 - RNA, 19 nt, Artificial Sequence
  Description of Artificial Sequence: Synthetic oligonucleotide
  Sense strand starting at position 3400 of SEQ ID NO: 1561978
agugcuugcuauguaauaa

SEQ ID NO: 1712680 - RNA, 19 nt, Artificial Sequence
  Description of Artificial Sequence: Synthetic oligonucleotide
  Antisense strand to SEQ ID NO: 1712679
uuauuacauagcaagcacu

SEQ ID NO: 1712681 - RNA, 19 nt, Artificial Sequence
  Description of Artificial Sequence: Synthetic oligonucleotide
  Sense strand starting at position 3536 of SEQ ID NO: 1561978
gguguagggaccgauguua

SEQ ID NO: 1712682 - RNA, 19 nt, Artificial Sequence
  Description of Artificial Sequence: Synthetic oligonucleotide
  Antisense strand to SEQ ID NO: 1712681
uaacaucggucccuacacc

SEQ ID NO: 1712683 - RNA, 19 nt, Artificial Sequence
  Description of Artificial Sequence: Synthetic oligonucleotide
  Sense strand starting at position 3859 of SEQ ID NO: 1561978
agcgucauugcauucuagu

SEQ ID NO: 1712684 - RNA, 19 nt, Artificial Sequence
  Description of Artificial Sequence: Synthetic oligonucleotide
  Antisense strand to SEQ ID NO: 1712683
acuagaaugcaaugacgcu

SEQ ID NO: 1712685 - RNA, 19 nt, Artificial Sequence
  Description of Artificial Sequence: Synthetic oligonucleotide
  Sense strand starting at position 3860 of SEQ ID NO: 1561978
gcgucauugcauucuaguc

SEQ ID NO: 1712686 - RNA, 19 nt, Artificial Sequence
  Description of Artificial Sequence: Synthetic oligonucleotide
  Antisense strand to SEQ ID NO: 1712685
gacuagaaugcaaugacgc

SEQ ID NO: 1712687 - RNA, 19 nt, Artificial Sequence
  Description of Artificial Sequence: Synthetic oligonucleotide
  Sense strand starting at position 3891 of SEQ ID NO: 1561978
ugagacuccgucuauauau

SEQ ID NO: 1712688 - RNA, 19 nt, Artificial Sequence
  Description of Artificial Sequence: Synthetic oligonucleotide
  Antisense strand to SEQ ID NO: 1712687
auauauagacggagucuca

SEQ ID NO: 1712689 - RNA, 19 nt, Artificial Sequence
  Description of Artificial Sequence: Synthetic oligonucleotide
  Sense strand starting at position 614 of SEQ ID NO: 1561979
ucugaauaaugucuugcaa

SEQ ID NO: 1712690 - RNA, 19 nt, Artificial Sequence
  Description of Artificial Sequence: Synthetic oligonucleotide
  Antisense strand to SEQ ID NO: 1712689
uugcaagacauuauucaga

SEQ ID NO: 1712691 - RNA, 19 nt, Artificial Sequence
  Description of Artificial Sequence: Synthetic oligonucleotide
  Sense strand starting at position 700 of SEQ ID NO: 1561979
agaaacauccugugauauu

SEQ ID NO: 1712692 - RNA, 19 nt, Artificial Sequence
  Description of Artificial Sequence: Synthetic oligonucleotide
  Antisense strand to SEQ ID NO: 1712691
aauaucacaggauguuucu

SEQ ID NO: 1712693 - RNA, 19 nt, Artificial Sequence
  Description of Artificial Sequence: Synthetic oligonucleotide
  Sense strand starting at position 715 of SEQ ID NO: 1561979
uauugaugcaccggguaga

SEQ ID NO: 1712694 - RNA, 19 nt, Artificial Sequence
  Description of Artificial Sequence: Synthetic oligonucleotide
  Antisense strand to SEQ ID NO: 1712693
ucuacccggugcaucaaua

SEQ ID NO: 1712695 - RNA, 19 nt, Artificial Sequence
  Description of Artificial Sequence: Synthetic oligonucleotide
  Sense strand starting at position 716 of SEQ ID NO: 1561979
auugaugcaccggguagau

SEQ ID NO: 1712696 - RNA, 19 nt, Artificial Sequence
  Description of Artificial Sequence: Synthetic oligonucleotide
  Antisense strand to SEQ ID NO: 1712695
aucuacccggugcaucaau

SEQ ID NO: 1712697 - RNA, 19 nt, Artificial Sequence
  Description of Artificial Sequence: Synthetic oligonucleotide
  Sense strand starting at position 729 of SEQ ID NO: 1561979
guagaugaacuuugcagaa

SEQ ID NO: 1712698 - RNA, 19 nt, Artificial Sequence
  Description of Artificial Sequence: Synthetic oligonucleotide
  Antisense strand to SEQ ID NO: 1712697
uucugcaaaguucaucuac

SEQ ID NO: 1712699 - RNA, 19 nt, Artificial Sequence
  Description of Artificial Sequence: Synthetic oligonucleotide
  Sense strand starting at position 820 of SEQ ID NO: 1561979
cagaaucaucuuggaguuu

SEQ ID NO: 1712700 - RNA, 19 nt, Artificial Sequence
  Description of Artificial Sequence: Synthetic oligonucleotide
  Antisense strand to SEQ ID NO: 1712699
aaacuccaagaugauucug

SEQ ID NO: 1712701 - RNA, 19 nt, Artificial Sequence
  Description of Artificial Sequence: Synthetic oligonucleotide
  Sense strand starting at position 1136 of SEQ ID NO: 1561979
gaaucacucgaccguuaua

SEQ ID NO: 1712702 - RNA, 19 nt, Artificial Sequence
  Description of Artificial Sequence: Synthetic oligonucleotide
  Antisense strand to SEQ ID NO: 1712701
uauaacggucgagugauuc

SEQ ID NO: 1712703 - RNA, 19 nt, Artificial Sequence
  Description of Artificial Sequence: Synthetic oligonucleotide
  Sense strand starting at position 1145 of SEQ ID NO: 1561979
gaccguuauauguagaguc

SEQ ID NO: 1712704 - RNA, 19 nt, Artificial Sequence
  Description of Artificial Sequence: Synthetic oligonucleotide
  Antisense strand to SEQ ID NO: 1712703
gacucuacauauaacgguc

SEQ ID NO: 1712705 - RNA, 19 nt, Artificial Sequence
  Description of Artificial Sequence: Synthetic oligonucleotide
  Sense strand starting at position 1147 of SEQ ID NO: 1561979
ccguuauauguagagucca

SEQ ID NO: 1712706 - RNA, 19 nt, Artificial Sequence
  Description of Artificial Sequence: Synthetic oligonucleotide
  Antisense strand to SEQ ID NO: 1712705
uggacucuacauauaacgg

SEQ ID NO: 1712707 - RNA, 19 nt, Artificial Sequence
  Description of Artificial Sequence: Synthetic oligonucleotide
  Sense strand starting at position 1152 of SEQ ID NO: 1561979
auauguagaguccagcauu

SEQ ID NO: 1712708 - RNA, 19 nt, Artificial Sequence
  Description of Artificial Sequence: Synthetic oligonucleotide
  Antisense strand to SEQ ID NO: 1712707
aaugcuggacucuacauau

SEQ ID NO: 1712709 - RNA, 19 nt, Artificial Sequence
  Description of Artificial Sequence: Synthetic oligonucleotide
  Sense strand starting at position 1155 of SEQ ID NO: 1561979
uguagaguccagcauugua

SEQ ID NO: 1712710 - RNA, 19 nt, Artificial Sequence
  Description of Artificial Sequence: Synthetic oligonucleotide
  Antisense strand to SEQ ID NO: 1712709
uacaaugcuggacucuaca

SEQ ID NO: 1712711 - RNA, 19 nt, Artificial Sequence
  Description of Artificial Sequence: Synthetic oligonucleotide
  Sense strand starting at position 1171 of SEQ ID NO: 1561979
guacgcucccaguaagaca

SEQ ID NO: 1712712 - RNA, 19 nt, Artificial Sequence
  Description of Artificial Sequence: Synthetic oligonucleotide
  Antisense strand to SEQ ID NO: 1712711
ugucuuacugggagcguac

SEQ ID NO: 1712713 - RNA, 19 nt, Artificial Sequence
  Description of Artificial Sequence: Synthetic oligonucleotide
  Sense strand starting at position 1185 of SEQ ID NO: 1561979
agacauaacugcucuuaag

SEQ ID NO: 1712714 - RNA, 19 nt, Artificial Sequence
  Description of Artificial Sequence: Synthetic oligonucleotide
  Antisense strand to SEQ ID NO: 1712713
cuuaagagcaguuaugucu

SEQ ID NO: 1712715 - RNA, 19 nt, Artificial Sequence
  Description of Artificial Sequence: Synthetic oligonucleotide
  Sense strand starting at position 1264 of SEQ ID NO: 1561979
accgcugcucaaggauaaa

SEQ ID NO: 1712716 - RNA, 19 nt, Artificial Sequence
  Description of Artificial Sequence: Synthetic oligonucleotide
  Antisense strand to SEQ ID NO: 1712715
uuuauccuugagcagcggu

SEQ ID NO: 1712717 - RNA, 19 nt, Artificial Sequence
  Description of Artificial Sequence: Synthetic oligonucleotide
  Sense strand starting at position 1267 of SEQ ID NO: 1561979
gcugcucaaggauaaacaa

SEQ ID NO: 1712718 - RNA, 19 nt, Artificial Sequence
  Description of Artificial Sequence: Synthetic oligonucleotide
  Antisense strand to SEQ ID NO: 1712717
uuguuuauccuugagcagc

SEQ ID NO: 1712719 - RNA, 19 nt, Artificial Sequence
  Description of Artificial Sequence: Synthetic oligonucleotide
  Sense strand starting at position 1357 of SEQ ID NO: 1561979
ggaccaucuccgcaaugua

SEQ ID NO: 1712720 - RNA, 19 nt, Artificial Sequence
  Description of Artificial Sequence: Synthetic oligonucleotide
  Antisense strand to SEQ ID NO: 1712719
uacauugcggagauggucc

SEQ ID NO: 1712721 - RNA, 19 nt, Artificial Sequence
  Description of Artificial Sequence: Synthetic oligonucleotide
  Sense strand starting at position 1379 of SEQ ID NO: 1561979
aucagaauucuccggccca

SEQ ID NO: 1712722 - RNA, 19 nt, Artificial Sequence
  Description of Artificial Sequence: Synthetic oligonucleotide
  Antisense strand to SEQ ID NO: 1712721
ugggccggagaauucugau

SEQ ID NO: 1712723 - RNA, 19 nt, Artificial Sequence
  Description of Artificial Sequence: Synthetic oligonucleotide
  Sense strand starting at position 2470 of SEQ ID NO: 1561979
ugcugcgugguguccaaau

SEQ ID NO: 1712724 - RNA, 19 nt, Artificial Sequence
  Description of Artificial Sequence: Synthetic oligonucleotide
  Antisense strand to SEQ ID NO: 1712723
auuuggacaccacgcagca

SEQ ID NO: 1712725 - RNA, 19 nt, Artificial Sequence
  Description of Artificial Sequence: Synthetic oligonucleotide
  Sense strand starting at position 2540 of SEQ ID NO: 1561979
guaaaugcucuugaguaga

SEQ ID NO: 1712726 - RNA, 19 nt, Artificial Sequence
  Description of Artificial Sequence: Synthetic oligonucleotide
  Antisense strand to SEQ ID NO: 1712725
ucuacucaagagcauuuac

SEQ ID NO: 1712727 - RNA, 19 nt, Artificial Sequence
  Description of Artificial Sequence: Synthetic oligonucleotide
  Sense strand starting at position 2542 of SEQ ID NO: 1561979
aaaugcucuugaguagaag

SEQ ID NO: 1712728 - RNA, 19 nt, Artificial Sequence
  Description of Artificial Sequence: Synthetic oligonucleotide
  Antisense strand to SEQ ID NO: 1712727
cuucuacucaagagcauuu

SEQ ID NO: 1712729 - RNA, 19 nt, Artificial Sequence
  Description of Artificial Sequence: Synthetic oligonucleotide
  Sense strand starting at position 2545 of SEQ ID NO: 1561979
ugcucuugaguagaagcaa

SEQ ID NO: 1712730 - RNA, 19 nt, Artificial Sequence
  Description of Artificial Sequence: Synthetic oligonucleotide
  Antisense strand to SEQ ID NO: 1712729
uugcuucuacucaagagca

SEQ ID NO: 1712731 - RNA, 19 nt, Artificial Sequence
  Description of Artificial Sequence: Synthetic oligonucleotide
  Sense strand starting at position 2583 of SEQ ID NO: 1561979
gcaaguaauagagauggcu

SEQ ID NO: 1712732 - RNA, 19 nt, Artificial Sequence
  Description of Artificial Sequence: Synthetic oligonucleotide
  Antisense strand to SEQ ID NO: 1712731
agccaucucuauuacuugc

SEQ ID NO: 1712733 - RNA, 19 nt, Artificial Sequence
  Description of Artificial Sequence: Synthetic oligonucleotide
  Sense strand starting at position 2650 of SEQ ID NO: 1561979
cauugacaucuguggccau

SEQ ID NO: 1712734 - RNA, 19 nt, Artificial Sequence
  Description of Artificial Sequence: Synthetic oligonucleotide
  Antisense strand to SEQ ID NO: 1712733
auggccacagaugucaaug

SEQ ID NO: 1712735 - RNA, 19 nt, Artificial Sequence
  Description of Artificial Sequence: Synthetic oligonucleotide
  Sense strand starting at position 2849 of SEQ ID NO: 1561979
cagugcuagcuugagaaga

SEQ ID NO: 1712736 - RNA, 19 nt, Artificial Sequence
  Description of Artificial Sequence: Synthetic oligonucleotide
  Antisense strand to SEQ ID NO: 1712735
ucuucucaagcuagcacug

SEQ ID NO: 1712737 - RNA, 19 nt, Artificial Sequence
  Description of Artificial Sequence: Synthetic oligonucleotide
  Sense strand starting at position 3015 of SEQ ID NO: 1561979
caccgauaugaguaguaau

SEQ ID NO: 1712738 - RNA, 19 nt, Artificial Sequence
  Description of Artificial Sequence: Synthetic oligonucleotide
  Antisense strand to SEQ ID NO: 1712737
auuacuacucauaucggug

SEQ ID NO: 1712739 - RNA, 19 nt, Artificial Sequence
  Description of Artificial Sequence: Synthetic oligonucleotide
  Sense strand starting at position 3022 of SEQ ID NO: 1561979
augaguaguaauugagaac

SEQ ID NO: 1712740 - RNA, 19 nt, Artificial Sequence
  Description of Artificial Sequence: Synthetic oligonucleotide
  Antisense strand to SEQ ID NO: 1712739
guucucaauuacuacucau

SEQ ID NO: 1712741 - RNA, 19 nt, Artificial Sequence
  Description of Artificial Sequence: Synthetic oligonucleotide
  Sense strand starting at position 3029 of SEQ ID NO: 1561979
guaauugagaacgaggguu

SEQ ID NO: 1712742 - RNA, 19 nt, Artificial Sequence
  Description of Artificial Sequence: Synthetic oligonucleotide
  Antisense strand to SEQ ID NO: 1712741
aacccucguucucaauuac

SEQ ID NO: 1712743 - RNA, 19 nt, Artificial Sequence
  Description of Artificial Sequence: Synthetic oligonucleotide
  Sense strand starting at position 3094 of SEQ ID NO: 1561979
guggccuugaaggaguuaa

SEQ ID NO: 1712744 - RNA, 19 nt, Artificial Sequence
  Description of Artificial Sequence: Synthetic oligonucleotide
  Antisense strand to SEQ ID NO: 1712743
uuaacuccuucaaggccac

SEQ ID NO: 1712745 - RNA, 19 nt, Artificial Sequence
  Description of Artificial Sequence: Synthetic oligonucleotide
  Sense strand starting at position 3125 of SEQ ID NO: 1561979
uuaguuuccucaguggaag

SEQ ID NO: 1712746 - RNA, 19 nt, Artificial Sequence
  Description of Artificial Sequence: Synthetic oligonucleotide
  Antisense strand to SEQ ID NO: 1712745
cuuccacugaggaaacuaa

SEQ ID NO: 1712747 - RNA, 19 nt, Artificial Sequence
  Description of Artificial Sequence: Synthetic oligonucleotide
  Sense strand starting at position 3126 of SEQ ID NO: 1561979
uaguuuccucaguggaaga

SEQ ID NO: 1712748 - RNA, 19 nt, Artificial Sequence
  Description of Artificial Sequence: Synthetic oligonucleotide
  Antisense strand to SEQ ID NO: 1712747
ucuuccacugaggaaacua

SEQ ID NO: 1712749 - RNA, 19 nt, Artificial Sequence
  Description of Artificial Sequence: Synthetic oligonucleotide
  Sense strand starting at position 3127 of SEQ ID NO: 1561979
aguuuccucaguggaagau

SEQ ID NO: 1712750 - RNA, 19 nt, Artificial Sequence
  Description of Artificial Sequence: Synthetic oligonucleotide
  Antisense strand to SEQ ID NO: 1712749
aucuuccacugaggaaacu

SEQ ID NO: 1712751 - RNA, 19 nt, Artificial Sequence
  Description of Artificial Sequence: Synthetic oligonucleotide
  Sense strand starting at position 3128 of SEQ ID NO: 1561979
guuuccucaguggaagaua

SEQ ID NO: 1712752 - RNA, 19 nt, Artificial Sequence
  Description of Artificial Sequence: Synthetic oligonucleotide
  Antisense strand to SEQ ID NO: 1712751
uaucuuccacugaggaaac

SEQ ID NO: 1712753 - RNA, 19 nt, Artificial Sequence
  Description of Artificial Sequence: Synthetic oligonucleotide
  Sense strand starting at position 3163 of SEQ ID NO: 1561979
cauaaagguuuggugagaa

SEQ ID NO: 1712754 - RNA, 19 nt, Artificial Sequence
  Description of Artificial Sequence: Synthetic oligonucleotide
  Antisense strand to SEQ ID NO: 1712753
uucucaccaaaccuuuaug

SEQ ID NO: 1712755 - RNA, 19 nt, Artificial Sequence
  Description of Artificial Sequence: Synthetic oligonucleotide
  Sense strand starting at position 3187 of SEQ ID NO: 1561979
ucaggugaugcaugugaag

SEQ ID NO: 1712756 - RNA, 19 nt, Artificial Sequence
  Description of Artificial Sequence: Synthetic oligonucleotide
  Antisense strand to SEQ ID NO: 1712755
cuucacaugcaucaccuga

SEQ ID NO: 1712757 - RNA, 19 nt, Artificial Sequence
  Description of Artificial Sequence: Synthetic oligonucleotide
  Sense strand starting at position 3273 of SEQ ID NO: 1561979
ugagcauugcuccaaguag

SEQ ID NO: 1712758 - RNA, 19 nt, Artificial Sequence
  Description of Artificial Sequence: Synthetic oligonucleotide
  Antisense strand to SEQ ID NO: 1712757
cuacuuggagcaaugcuca

SEQ ID NO: 1712759 - RNA, 19 nt, Artificial Sequence
  Description of Artificial Sequence: Synthetic oligonucleotide
  Sense strand starting at position 3333 of SEQ ID NO: 1561979
gcaguucugcccucgcaga

SEQ ID NO: 1712760 - RNA, 19 nt, Artificial Sequence
  Description of Artificial Sequence: Synthetic oligonucleotide
  Antisense strand to SEQ ID NO: 1712759
ucugcgagggcagaacugc

SEQ ID NO: 1712761 - RNA, 19 nt, Artificial Sequence
  Description of Artificial Sequence: Synthetic oligonucleotide
  Sense strand starting at position 3402 of SEQ ID NO: 1561979
gucucaguucuggaagggu

SEQ ID NO: 1712762 - RNA, 19 nt, Artificial Sequence
  Description of Artificial Sequence: Synthetic oligonucleotide
  Antisense strand to SEQ ID NO: 1712761
acccuuccagaacugagac

SEQ ID NO: 1712763 - RNA, 19 nt, Artificial Sequence
  Description of Artificial Sequence: Synthetic oligonucleotide
  Sense strand starting at position 3793 of SEQ ID NO: 1561979
uacugcuuugggcaguaaa

SEQ ID NO: 1712764 - RNA, 19 nt, Artificial Sequence
  Description of Artificial Sequence: Synthetic oligonucleotide
  Antisense strand to SEQ ID NO: 1712763
uuuacugcccaaagcagua

SEQ ID NO: 1712765 - RNA, 19 nt, Artificial Sequence
  Description of Artificial Sequence: Synthetic oligonucleotide
  Sense strand starting at position 3796 of SEQ ID NO: 1561979
ugcuuugggcaguaaacua

SEQ ID NO: 1712766 - RNA, 19 nt, Artificial Sequence
  Description of Artificial Sequence: Synthetic oligonucleotide
  Antisense strand to SEQ ID NO: 1712765
uaguuuacugcccaaagca

SEQ ID NO: 1712767 - RNA, 19 nt, Artificial Sequence
  Description of Artificial Sequence: Synthetic oligonucleotide
  Sense strand starting at position 3822 of SEQ ID NO: 1561979
gcucuugaccuacgggaua

SEQ ID NO: 1712768 - RNA, 19 nt, Artificial Sequence
  Description of Artificial Sequence: Synthetic oligonucleotide
  Antisense strand to SEQ ID NO: 1712767
uaucccguaggucaagagc

SEQ ID NO: 1712769 - RNA, 19 nt, Artificial Sequence
  Description of Artificial Sequence: Synthetic oligonucleotide
  Sense strand starting at position 44 of SEQ ID NO: 1561980
gaccaaaggcucugugaac

SEQ ID NO: 1712770 - RNA, 19 nt, Artificial Sequence
  Description of Artificial Sequence: Synthetic oligonucleotide
  Antisense strand to SEQ ID NO: 1712769
guucacagagccuuugguc

SEQ ID NO: 1712771 - RNA, 19 nt, Artificial Sequence
  Description of Artificial Sequence: Synthetic oligonucleotide
  Sense strand starting at position 45 of SEQ ID NO: 1561980
accaaaggcucugugaaca

SEQ ID NO: 1712772 - RNA, 19 nt, Artificial Sequence
  Description of Artificial Sequence: Synthetic oligonucleotide
  Antisense strand to SEQ ID NO: 1712771
uguucacagagccuuuggu

SEQ ID NO: 1712773 - RNA, 19 nt, Artificial Sequence
  Description of Artificial Sequence: Synthetic oligonucleotide
  Sense strand starting at position 612 of SEQ ID NO: 1561980
acccauaugcauggaacua

SEQ ID NO: 1712774 - RNA, 19 nt, Artificial Sequence
  Description of Artificial Sequence: Synthetic oligonucleotide
  Antisense strand to SEQ ID NO: 1712773
uaguuccaugcauaugggu

SEQ ID NO: 1712775 - RNA, 19 nt, Artificial Sequence
  Description of Artificial Sequence: Synthetic oligonucleotide
  Sense strand starting at position 734 of SEQ ID NO: 1561980
gggagcuuccauuauuguu

SEQ ID NO: 1712776 - RNA, 19 nt, Artificial Sequence
  Description of Artificial Sequence: Synthetic oligonucleotide
  Antisense strand to SEQ ID NO: 1712775
aacaauaauggaagcuccc

SEQ ID NO: 1712777 - RNA, 19 nt, Artificial Sequence
  Description of Artificial Sequence: Synthetic oligonucleotide
  Sense strand starting at position 1116 of SEQ ID NO: 1561980
aacaguccaucagugugaa

SEQ ID NO: 1712778 - RNA, 19 nt, Artificial Sequence
  Description of Artificial Sequence: Synthetic oligonucleotide
  Antisense strand to SEQ ID NO: 1712777
uucacacugauggacuguu

SEQ ID NO: 1712779 - RNA, 19 nt, Artificial Sequence
  Description of Artificial Sequence: Synthetic oligonucleotide
  Sense strand starting at position 1329 of SEQ ID NO: 1561980
uucucaagagucugaaacu

SEQ ID NO: 1712780 - RNA, 19 nt, Artificial Sequence
  Description of Artificial Sequence: Synthetic oligonucleotide
  Antisense strand to SEQ ID NO: 1712779
aguuucagacucuugagaa

SEQ ID NO: 1712781 - RNA, 19 nt, Artificial Sequence
  Description of Artificial Sequence: Synthetic oligonucleotide
  Sense strand starting at position 2144 of SEQ ID NO: 1561980
uugaacagauaguuguuaa

SEQ ID NO: 1712782 - RNA, 19 nt, Artificial Sequence
  Description of Artificial Sequence: Synthetic oligonucleotide
  Antisense strand to SEQ ID NO: 1712781
uuaacaacuaucuguucaa

SEQ ID NO: 1712783 - RNA, 19 nt, Artificial Sequence
  Description of Artificial Sequence: Synthetic oligonucleotide
  Sense strand starting at position 2147 of SEQ ID NO: 1561980
aacagauaguuguuaauga

SEQ ID NO: 1712784 - RNA, 19 nt, Artificial Sequence
  Description of Artificial Sequence: Synthetic oligonucleotide
  Antisense strand to SEQ ID NO: 1712783
ucauuaacaacuaucuguu

SEQ ID NO: 1712785 - RNA, 19 nt, Artificial Sequence
  Description of Artificial Sequence: Synthetic oligonucleotide
  Sense strand starting at position 2160 of SEQ ID NO: 1561980
uaaugaaugcugggagacu

SEQ ID NO: 1712786 - RNA, 19 nt, Artificial Sequence
  Description of Artificial Sequence: Synthetic oligonucleotide
  Antisense strand to SEQ ID NO: 1712785
agucucccagcauucauua

SEQ ID NO: 1712787 - RNA, 19 nt, Artificial Sequence
  Description of Artificial Sequence: Synthetic oligonucleotide
  Sense strand starting at position 2427 of SEQ ID NO: 1561980
acccuaacuugggcaaaua

SEQ ID NO: 1712788 - RNA, 19 nt, Artificial Sequence
  Description of Artificial Sequence: Synthetic oligonucleotide
  Antisense strand to SEQ ID NO: 1712787
uauuugcccaaguuagggu

SEQ ID NO: 1712789 - RNA, 19 nt, Artificial Sequence
  Description of Artificial Sequence: Synthetic oligonucleotide
  Sense strand starting at position 2428 of SEQ ID NO: 1561980
cccuaacuugggcaaauau

SEQ ID NO: 1712790 - RNA, 19 nt, Artificial Sequence
  Description of Artificial Sequence: Synthetic oligonucleotide
  Antisense strand to SEQ ID NO: 1712789
auauuugcccaaguuaggg

SEQ ID NO: 1712791 - RNA, 19 nt, Artificial Sequence
  Description of Artificial Sequence: Synthetic oligonucleotide
  Sense strand starting at position 2436 of SEQ ID NO: 1561980
ugggcaaauauguggcuua

SEQ ID NO: 1712792 - RNA, 19 nt, Artificial Sequence
  Description of Artificial Sequence: Synthetic oligonucleotide
  Antisense strand to SEQ ID NO: 1712791
uaagccacauauuugccca

SEQ ID NO: 1712793 - RNA, 19 nt, Artificial Sequence
  Description of Artificial Sequence: Synthetic oligonucleotide
  Sense strand starting at position 2439 of SEQ ID NO: 1561980
gcaaauauguggcuuauug

SEQ ID NO: 1712794 - RNA, 19 nt, Artificial Sequence
  Description of Artificial Sequence: Synthetic oligonucleotide
  Antisense strand to SEQ ID NO: 1712793
caauaagccacauauuugc

SEQ ID NO: 1712795 - RNA, 19 nt, Artificial Sequence
  Description of Artificial Sequence: Synthetic oligonucleotide
  Sense strand starting at position 2443 of SEQ ID NO: 1561980
auauguggcuuauuggcaa

SEQ ID NO: 1712796 - RNA, 19 nt, Artificial Sequence
  Description of Artificial Sequence: Synthetic oligonucleotide
  Antisense strand to SEQ ID NO: 1712795
uugccaauaagccacauau

SEQ ID NO: 1712797 - RNA, 19 nt, Artificial Sequence
  Description of Artificial Sequence: Synthetic oligonucleotide
  Sense strand starting at position 2446 of SEQ ID NO: 1561980
uguggcuuauuggcaaaga

SEQ ID NO: 1712798 - RNA, 19 nt, Artificial Sequence
  Description of Artificial Sequence: Synthetic oligonucleotide
  Antisense strand to SEQ ID NO: 1712797
ucuuugccaauaagccaca

SEQ ID NO: 1712799 - RNA, 19 nt, Artificial Sequence
  Description of Artificial Sequence: Synthetic oligonucleotide
  Sense strand starting at position 2467 of SEQ ID NO: 1561980
ggaaaugccuaaccuaacu

SEQ ID NO: 1712800 - RNA, 19 nt, Artificial Sequence
  Description of Artificial Sequence: Synthetic oligonucleotide
  Antisense strand to SEQ ID NO: 1712799
aguuagguuaggcauuucc

SEQ ID NO: 1712801 - RNA, 19 nt, Artificial Sequence
  Description of Artificial Sequence: Synthetic oligonucleotide
  Sense strand starting at position 2489 of SEQ ID NO: 1561980
ggcuaaucacuguauugau

SEQ ID NO: 1712802 - RNA, 19 nt, Artificial Sequence
  Description of Artificial Sequence: Synthetic oligonucleotide
  Antisense strand to SEQ ID NO: 1712801
aucaauacagugauuagcc

SEQ ID NO: 1712803 - RNA, 19 nt, Artificial Sequence
  Description of Artificial Sequence: Synthetic oligonucleotide
  Sense strand starting at position 2650 of SEQ ID NO: 1561980
agagcuuggcaucauuacu

SEQ ID NO: 1712804 - RNA, 19 nt, Artificial Sequence
  Description of Artificial Sequence: Synthetic oligonucleotide
  Antisense strand to SEQ ID NO: 1712803
aguaaugaugccaagcucu

SEQ ID NO: 1712805 - RNA, 19 nt, Artificial Sequence
  Description of Artificial Sequence: Synthetic oligonucleotide
  Sense strand starting at position 2720 of SEQ ID NO: 1561980
ggcagagauuguguagcca

SEQ ID NO: 1712806 - RNA, 19 nt, Artificial Sequence
  Description of Artificial Sequence: Synthetic oligonucleotide
  Antisense strand to SEQ ID NO: 1712805
uggcuacacaaucucugcc

SEQ ID NO: 1712807 - RNA, 19 nt, Artificial Sequence
  Description of Artificial Sequence: Synthetic oligonucleotide
  Sense strand starting at position 2724 of SEQ ID NO: 1561980
gagauuguguagccacuca

SEQ ID NO: 1712808 - RNA, 19 nt, Artificial Sequence
  Description of Artificial Sequence: Synthetic oligonucleotide
  Antisense strand to SEQ ID NO: 1712807
ugaguggcuacacaaucuc

SEQ ID NO: 1712809 - RNA, 19 nt, Artificial Sequence
  Description of Artificial Sequence: Synthetic oligonucleotide
  Sense strand starting at position 2763 of SEQ ID NO: 1561980
gagugaggaucugaacaug

SEQ ID NO: 1712810 - RNA, 19 nt, Artificial Sequence
  Description of Artificial Sequence: Synthetic oligonucleotide
  Antisense strand to SEQ ID NO: 1712809
cauguucagauccucacuc

SEQ ID NO: 1712811 - RNA, 19 nt, Artificial Sequence
  Description of Artificial Sequence: Synthetic oligonucleotide
  Sense strand starting at position 2859 of SEQ ID NO: 1561980
agggaguucugggcugagu

SEQ ID NO: 1712812 - RNA, 19 nt, Artificial Sequence
  Description of Artificial Sequence: Synthetic oligonucleotide
  Antisense strand to SEQ ID NO: 1712811
acucagcccagaacucccu

SEQ ID NO: 1712813 - RNA, 19 nt, Artificial Sequence
  Description of Artificial Sequence: Synthetic oligonucleotide
  Sense strand starting at position 2963 of SEQ ID NO: 1561980
gcuagauuauaugcuuaag

SEQ ID NO: 1712814 - RNA, 19 nt, Artificial Sequence
  Description of Artificial Sequence: Synthetic oligonucleotide
  Antisense strand to SEQ ID NO: 1712813
cuuaagcauauaaucuagc

SEQ ID NO: 1712815 - RNA, 19 nt, Artificial Sequence
  Description of Artificial Sequence: Synthetic oligonucleotide
  Sense strand starting at position 2966 of SEQ ID NO: 1561980
agauuauaugcuuaagcaa

SEQ ID NO: 1712816 - RNA, 19 nt, Artificial Sequence
  Description of Artificial Sequence: Synthetic oligonucleotide
  Antisense strand to SEQ ID NO: 1712815
uugcuuaagcauauaaucu

SEQ ID NO: 1712817 - RNA, 19 nt, Artificial Sequence
  Description of Artificial Sequence: Synthetic oligonucleotide
  Sense strand starting at position 2969 of SEQ ID NO: 1561980
uuauaugcuuaagcaauga

SEQ ID NO: 1712818 - RNA, 19 nt, Artificial Sequence
  Description of Artificial Sequence: Synthetic oligonucleotide
  Antisense strand to SEQ ID NO: 1712817
ucauugcuuaagcauauaa

SEQ ID NO: 1712819 - RNA, 19 nt, Artificial Sequence
  Description of Artificial Sequence: Synthetic oligonucleotide
  Sense strand starting at position 3038 of SEQ ID NO: 1561980
agucaaauuuaaugagcua

SEQ ID NO: 1712820 - RNA, 19 nt, Artificial Sequence
  Description of Artificial Sequence: Synthetic oligonucleotide
  Antisense strand to SEQ ID NO: 1712819
uagcucauuaaauuugacu

SEQ ID NO: 1712821 - RNA, 19 nt, Artificial Sequence
  Description of Artificial Sequence: Synthetic oligonucleotide
  Sense strand starting at position 3066 of SEQ ID NO: 1561980
cuugcuggaguuuggagaa

SEQ ID NO: 1712822 - RNA, 19 nt, Artificial Sequence
  Description of Artificial Sequence: Synthetic oligonucleotide
  Antisense strand to SEQ ID NO: 1712821
uucuccaaacuccagcaag

SEQ ID NO: 1712823 - RNA, 19 nt, Artificial Sequence
  Description of Artificial Sequence: Synthetic oligonucleotide
  Sense strand starting at position 3211 of SEQ ID NO: 1561980
gugggaugaucccugagau

SEQ ID NO: 1712824 - RNA, 19 nt, Artificial Sequence
  Description of Artificial Sequence: Synthetic oligonucleotide
  Antisense strand to SEQ ID NO: 1712823
aucucagggaucaucccac

SEQ ID NO: 1712825 - RNA, 19 nt, Artificial Sequence
  Description of Artificial Sequence: Synthetic oligonucleotide
  Sense strand starting at position 3353 of SEQ ID NO: 1561980
ggucacacaucaucaaguu

SEQ ID NO: 1712826 - RNA, 19 nt, Artificial Sequence
  Description of Artificial Sequence: Synthetic oligonucleotide
  Antisense strand to SEQ ID NO: 1712825
aacuugaugaugugugacc

SEQ ID NO: 1712827 - RNA, 19 nt, Artificial Sequence
  Description of Artificial Sequence: Synthetic oligonucleotide
  Sense strand starting at position 3599 of SEQ ID NO: 1561980
agcaucugacaucagugaa

SEQ ID NO: 1712828 - RNA, 19 nt, Artificial Sequence
  Description of Artificial Sequence: Synthetic oligonucleotide
  Antisense strand to SEQ ID NO: 1712827
uucacugaugucagaugcu

SEQ ID NO: 1712829 - RNA, 19 nt, Artificial Sequence
  Description of Artificial Sequence: Synthetic oligonucleotide
  Sense strand starting at position 3602 of SEQ ID NO: 1561980
aucugacaucagugaauua

SEQ ID NO: 1712830 - RNA, 19 nt, Artificial Sequence
  Description of Artificial Sequence: Synthetic oligonucleotide
  Antisense strand to SEQ ID NO: 1712829
uaauucacugaugucagau

SEQ ID NO: 1712831 - RNA, 19 nt, Artificial Sequence
  Description of Artificial Sequence: Synthetic oligonucleotide
  Sense strand starting at position 3619 of SEQ ID NO: 1561980
uagccaucccgaugcauga

SEQ ID NO: 1712832 - RNA, 19 nt, Artificial Sequence
  Description of Artificial Sequence: Synthetic oligonucleotide
  Antisense strand to SEQ ID NO: 1712831
ucaugcaucgggauggcua

SEQ ID NO: 1712833 - RNA, 19 nt, Artificial Sequence
  Description of Artificial Sequence: Synthetic oligonucleotide
  Sense strand starting at position 3637 of SEQ ID NO: 1561980
accacaauuccgugacaca

SEQ ID NO: 1712834 - RNA, 19 nt, Artificial Sequence
  Description of Artificial Sequence: Synthetic oligonucleotide
  Antisense strand to SEQ ID NO: 1712833
ugugucacggaauuguggu

SEQ ID NO: 1712835 - RNA, 19 nt, Artificial Sequence
  Description of Artificial Sequence: Synthetic oligonucleotide
  Sense strand starting at position 3638 of SEQ ID NO: 1561980
ccacaauuccgugacacac

SEQ ID NO: 1712836 - RNA, 19 nt, Artificial Sequence
  Description of Artificial Sequence: Synthetic oligonucleotide
  Antisense strand to SEQ ID NO: 1712835
gugugucacggaauugugg

SEQ ID NO: 1712837 - RNA, 19 nt, Artificial Sequence
  Description of Artificial Sequence: Synthetic oligonucleotide
  Sense strand starting at position 3681 of SEQ ID NO: 1561980
ccaccaaauugguagaaag

SEQ ID NO: 1712838 - RNA, 19 nt, Artificial Sequence
  Description of Artificial Sequence: Synthetic oligonucleotide
  Antisense strand to SEQ ID NO: 1712837
cuuucuaccaauuuggugg

SEQ ID NO: 1712839 - RNA, 19 nt, Artificial Sequence
  Description of Artificial Sequence: Synthetic oligonucleotide
  Sense strand starting at position 3726 of SEQ ID NO: 1561980
agguuugaguaccugaaag

SEQ ID NO: 1712840 - RNA, 19 nt, Artificial Sequence
  Description of Artificial Sequence: Synthetic oligonucleotide
  Antisense strand to SEQ ID NO: 1712839
cuuucagguacucaaaccu

SEQ ID NO: 1712841 - RNA, 19 nt, Artificial Sequence
  Description of Artificial Sequence: Synthetic oligonucleotide
  Sense strand starting at position 3824 of SEQ ID NO: 1561980
uguucugagucuucuggga

SEQ ID NO: 1712842 - RNA, 19 nt, Artificial Sequence
  Description of Artificial Sequence: Synthetic oligonucleotide
  Antisense strand to SEQ ID NO: 1712841
ucccagaagacucagaaca

SEQ ID NO: 1712843 - RNA, 19 nt, Artificial Sequence
  Description of Artificial Sequence: Synthetic oligonucleotide
  Sense strand starting at position 3828 of SEQ ID NO: 1561980
cugagucuucugggagaga

SEQ ID NO: 1712844 - RNA, 19 nt, Artificial Sequence
  Description of Artificial Sequence: Synthetic oligonucleotide
  Antisense strand to SEQ ID NO: 1712843
ucucucccagaagacucag

SEQ ID NO: 1712845 - RNA, 19 nt, Artificial Sequence
  Description of Artificial Sequence: Synthetic oligonucleotide
  Sense strand starting at position 3915 of SEQ ID NO: 1561980
cugcauuuacagcguggaa

SEQ ID NO: 1712846 - RNA, 19 nt, Artificial Sequence
  Description of Artificial Sequence: Synthetic oligonucleotide
  Antisense strand to SEQ ID NO: 1712845
uuccacgcuguaaaugcag

SEQ ID NO: 1712847 - RNA, 19 nt, Artificial Sequence
  Description of Artificial Sequence: Synthetic oligonucleotide
  Sense strand starting at position 3953 of SEQ ID NO: 1561980
gcaacugucccuugucaaa

SEQ ID NO: 1712848 - RNA, 19 nt, Artificial Sequence
  Description of Artificial Sequence: Synthetic oligonucleotide
  Antisense strand to SEQ ID NO: 1712847
uuugacaagggacaguugc

SEQ ID NO: 1712849 - RNA, 19 nt, Artificial Sequence
  Description of Artificial Sequence: Synthetic oligonucleotide
  Sense strand starting at position 16 of SEQ ID NO: 1561981
acugguaggauccauguga

SEQ ID NO: 1712850 - RNA, 19 nt, Artificial Sequence
  Description of Artificial Sequence: Synthetic oligonucleotide
  Antisense strand to SEQ ID NO: 1712849
ucacauggauccuaccagu

SEQ ID NO: 1712851 - RNA, 19 nt, Artificial Sequence
  Description of Artificial Sequence: Synthetic oligonucleotide
  Sense strand starting at position 20 of SEQ ID NO: 1561981
guaggauccaugugaauag

SEQ ID NO: 1712852 - RNA, 19 nt, Artificial Sequence
  Description of Artificial Sequence: Synthetic oligonucleotide
  Antisense strand to SEQ ID NO: 1712851
cuauucacauggauccuac

SEQ ID NO: 1712853 - RNA, 19 nt, Artificial Sequence
  Description of Artificial Sequence: Synthetic oligonucleotide
  Sense strand starting at position 58 of SEQ ID NO: 1561981
uuaccaucuuugucuggua

SEQ ID NO: 1712854 - RNA, 19 nt, Artificial Sequence
  Description of Artificial Sequence: Synthetic oligonucleotide
  Antisense strand to SEQ ID NO: 1712853
uaccagacaaagaugguaa

SEQ ID NO: 1712855 - RNA, 19 nt, Artificial Sequence
  Description of Artificial Sequence: Synthetic oligonucleotide
  Sense strand starting at position 60 of SEQ ID NO: 1561981
accaucuuugucugguaau

SEQ ID NO: 1712856 - RNA, 19 nt, Artificial Sequence
  Description of Artificial Sequence: Synthetic oligonucleotide
  Antisense strand to SEQ ID NO: 1712855
auuaccagacaaagauggu

SEQ ID NO: 1712857 - RNA, 19 nt, Artificial Sequence
  Description of Artificial Sequence: Synthetic oligonucleotide
  Sense strand starting at position 66 of SEQ ID NO: 1561981
uuugucugguaaucuaaca

SEQ ID NO: 1712858 - RNA, 19 nt, Artificial Sequence
  Description of Artificial Sequence: Synthetic oligonucleotide
  Antisense strand to SEQ ID NO: 1712857
uguuagauuaccagacaaa

SEQ ID NO: 1712859 - RNA, 19 nt, Artificial Sequence
  Description of Artificial Sequence: Synthetic oligonucleotide
  Sense strand starting at position 103 of SEQ ID NO: 1561981
caucgauaugaucagucau

SEQ ID NO: 1712860 - RNA, 19 nt, Artificial Sequence
  Description of Artificial Sequence: Synthetic oligonucleotide
  Antisense strand to SEQ ID NO: 1712859
augacugaucauaucgaug

SEQ ID NO: 1712861 - RNA, 19 nt, Artificial Sequence
  Description of Artificial Sequence: Synthetic oligonucleotide
  Sense strand starting at position 105 of SEQ ID NO: 1561981
ucgauaugaucagucauga

SEQ ID NO: 1712862 - RNA, 19 nt, Artificial Sequence
  Description of Artificial Sequence: Synthetic oligonucleotide
  Antisense strand to SEQ ID NO: 1712861
ucaugacugaucauaucga

SEQ ID NO: 1712863 - RNA, 19 nt, Artificial Sequence
  Description of Artificial Sequence: Synthetic oligonucleotide
  Sense strand starting at position 110 of SEQ ID NO: 1561981
augaucagucaugauguca

SEQ ID NO: 1712864 - RNA, 19 nt, Artificial Sequence
  Description of Artificial Sequence: Synthetic oligonucleotide
  Antisense strand to SEQ ID NO: 1712863
ugacaucaugacugaucau

SEQ ID NO: 1712865 - RNA, 19 nt, Artificial Sequence
  Description of Artificial Sequence: Synthetic oligonucleotide
  Sense strand starting at position 243 of SEQ ID NO: 1561981
aacgcugcacucgaugaua

SEQ ID NO: 1712866 - RNA, 19 nt, Artificial Sequence
  Description of Artificial Sequence: Synthetic oligonucleotide
  Antisense strand to SEQ ID NO: 1712865
uaucaucgagugcagcguu

SEQ ID NO: 1712867 - RNA, 19 nt, Artificial Sequence
  Description of Artificial Sequence: Synthetic oligonucleotide
  Sense strand starting at position 254 of SEQ ID NO: 1561981
cgaugauacugugcacauu

SEQ ID NO: 1712868 - RNA, 19 nt, Artificial Sequence
  Description of Artificial Sequence: Synthetic oligonucleotide
  Antisense strand to SEQ ID NO: 1712867
aaugugcacaguaucaucg

SEQ ID NO: 1712869 - RNA, 19 nt, Artificial Sequence
  Description of Artificial Sequence: Synthetic oligonucleotide
  Sense strand starting at position 338 of SEQ ID NO: 1561981
ccuggcugcuccuuacaau

SEQ ID NO: 1712870 - RNA, 19 nt, Artificial Sequence
  Description of Artificial Sequence: Synthetic oligonucleotide
  Antisense strand to SEQ ID NO: 1712869
auuguaaggagcagccagg

SEQ ID NO: 1712871 - RNA, 19 nt, Artificial Sequence
  Description of Artificial Sequence: Synthetic oligonucleotide
  Sense strand starting at position 422 of SEQ ID NO: 1561981
ugacaccugaguugugauu

SEQ ID NO: 1712872 - RNA, 19 nt, Artificial Sequence
  Description of Artificial Sequence: Synthetic oligonucleotide
  Antisense strand to SEQ ID NO: 1712871
aaucacaacucagguguca

SEQ ID NO: 1712873 - RNA, 19 nt, Artificial Sequence
  Description of Artificial Sequence: Synthetic oligonucleotide
  Sense strand starting at position 437 of SEQ ID NO: 1561981
gauuguggcugugucaaca

SEQ ID NO: 1712874 - RNA, 19 nt, Artificial Sequence
  Description of Artificial Sequence: Synthetic oligonucleotide
  Antisense strand to SEQ ID NO: 1712873
uguugacacagccacaauc

SEQ ID NO: 1712875 - RNA, 19 nt, Artificial Sequence
  Description of Artificial Sequence: Synthetic oligonucleotide
  Sense strand starting at position 520 of SEQ ID NO: 1561981
gaugucacuucuuuagggu

SEQ ID NO: 1712876 - RNA, 19 nt, Artificial Sequence
  Description of Artificial Sequence: Synthetic oligonucleotide
  Antisense strand to SEQ ID NO: 1712875
acccuaaagaagugacauc

SEQ ID NO: 1712877 - RNA, 19 nt, Artificial Sequence
  Description of Artificial Sequence: Synthetic oligonucleotide
  Sense strand starting at position 521 of SEQ ID NO: 1561981
augucacuucuuuagggua

SEQ ID NO: 1712878 - RNA, 19 nt, Artificial Sequence
  Description of Artificial Sequence: Synthetic oligonucleotide
  Antisense strand to SEQ ID NO: 1712877
uacccuaaagaagugacau

SEQ ID NO: 1712879 - RNA, 19 nt, Artificial Sequence
  Description of Artificial Sequence: Synthetic oligonucleotide
  Sense strand starting at position 598 of SEQ ID NO: 1561981
cuccuuugggcagaaugau

SEQ ID NO: 1712880 - RNA, 19 nt, Artificial Sequence
  Description of Artificial Sequence: Synthetic oligonucleotide
  Antisense strand to SEQ ID NO: 1712879
aucauucugcccaaaggag

SEQ ID NO: 1712881 - RNA, 19 nt, Artificial Sequence
  Description of Artificial Sequence: Synthetic oligonucleotide
  Sense strand starting at position 721 of SEQ ID NO: 1561981
cgacuucagguuuaacgau

SEQ ID NO: 1712882 - RNA, 19 nt, Artificial Sequence
  Description of Artificial Sequence: Synthetic oligonucleotide
  Antisense strand to SEQ ID NO: 1712881
aucguuaaaccugaagucg

SEQ ID NO: 1712883 - RNA, 19 nt, Artificial Sequence
  Description of Artificial Sequence: Synthetic oligonucleotide
  Sense strand starting at position 934 of SEQ ID NO: 1561981
ccaaguuccacuggaggua

SEQ ID NO: 1712884 - RNA, 19 nt, Artificial Sequence
  Description of Artificial Sequence: Synthetic oligonucleotide
  Antisense strand to SEQ ID NO: 1712883
uaccuccaguggaacuugg

SEQ ID NO: 1712885 - RNA, 19 nt, Artificial Sequence
  Description of Artificial Sequence: Synthetic oligonucleotide
  Sense strand starting at position 1007 of SEQ ID NO: 1561981
cucucaucaccugagugua

SEQ ID NO: 1712886 - RNA, 19 nt, Artificial Sequence
  Description of Artificial Sequence: Synthetic oligonucleotide
  Antisense strand to SEQ ID NO: 1712885
uacacucaggugaugagag

SEQ ID NO: 1712887 - RNA, 19 nt, Artificial Sequence
  Description of Artificial Sequence: Synthetic oligonucleotide
  Sense strand starting at position 1091 of SEQ ID NO: 1561981
cucauucuugaaugacagu

SEQ ID NO: 1712888 - RNA, 19 nt, Artificial Sequence
  Description of Artificial Sequence: Synthetic oligonucleotide
  Antisense strand to SEQ ID NO: 1712887
acugucauucaagaaugag

SEQ ID NO: 1712889 - RNA, 19 nt, Artificial Sequence
  Description of Artificial Sequence: Synthetic oligonucleotide
  Sense strand starting at position 1125 of SEQ ID NO: 1561981
auaggagcuguuuagccau

SEQ ID NO: 1712890 - RNA, 19 nt, Artificial Sequence
  Description of Artificial Sequence: Synthetic oligonucleotide
  Antisense strand to SEQ ID NO: 1712889
auggcuaaacagcuccuau

SEQ ID NO: 1712891 - RNA, 19 nt, Artificial Sequence
  Description of Artificial Sequence: Synthetic oligonucleotide
  Sense strand starting at position 1135 of SEQ ID NO: 1561981
uuuagccauucccuugaga

SEQ ID NO: 1712892 - RNA, 19 nt, Artificial Sequence
  Description of Artificial Sequence: Synthetic oligonucleotide
  Antisense strand to SEQ ID NO: 1712891
ucucaagggaauggcuaaa

SEQ ID NO: 1712893 - RNA, 19 nt, Artificial Sequence
  Description of Artificial Sequence: Synthetic oligonucleotide
  Sense strand starting at position 1140 of SEQ ID NO: 1561981
ccauucccuugagaagaaa

SEQ ID NO: 1712894 - RNA, 19 nt, Artificial Sequence
  Description of Artificial Sequence: Synthetic oligonucleotide
  Antisense strand to SEQ ID NO: 1712893
uuucuucucaagggaaugg

SEQ ID NO: 1712895 - RNA, 19 nt, Artificial Sequence
  Description of Artificial Sequence: Synthetic oligonucleotide
  Sense strand starting at position 1200 of SEQ ID NO: 1561981
uaaagagggcguggauauu

SEQ ID NO: 1712896 - RNA, 19 nt, Artificial Sequence
  Description of Artificial Sequence: Synthetic oligonucleotide
  Antisense strand to SEQ ID NO: 1712895
aauauccacgcccucuuua

SEQ ID NO: 1712897 - RNA, 19 nt, Artificial Sequence
  Description of Artificial Sequence: Synthetic oligonucleotide
  Sense strand starting at position 1344 of SEQ ID NO: 1561981
cuuuccaugcgugaauuga

SEQ ID NO: 1712898 - RNA, 19 nt, Artificial Sequence
  Description of Artificial Sequence: Synthetic oligonucleotide
  Antisense strand to SEQ ID NO: 1712897
ucaauucacgcauggaaag

SEQ ID NO: 1712899 - RNA, 19 nt, Artificial Sequence
  Description of Artificial Sequence: Synthetic oligonucleotide
  Sense strand starting at position 1461 of SEQ ID NO: 1561981
caaggcagacuuuguucua

SEQ ID NO: 1712900 - RNA, 19 nt, Artificial Sequence
  Description of Artificial Sequence: Synthetic oligonucleotide
  Antisense strand to SEQ ID NO: 1712899
uagaacaaagucugccuug

SEQ ID NO: 1712901 - RNA, 19 nt, Artificial Sequence
  Description of Artificial Sequence: Synthetic oligonucleotide
  Sense strand starting at position 1462 of SEQ ID NO: 1561981
aaggcagacuuuguucuaa

SEQ ID NO: 1712902 - RNA, 19 nt, Artificial Sequence
  Description of Artificial Sequence: Synthetic oligonucleotide
  Antisense strand to SEQ ID NO: 1712901
uuagaacaaagucugccuu

SEQ ID NO: 1712903 - RNA, 19 nt, Artificial Sequence
  Description of Artificial Sequence: Synthetic oligonucleotide
  Sense strand starting at position 1464 of SEQ ID NO: 1561981
ggcagacuuuguucuaaac

SEQ ID NO: 1712904 - RNA, 19 nt, Artificial Sequence
  Description of Artificial Sequence: Synthetic oligonucleotide
  Antisense strand to SEQ ID NO: 1712903
guuuagaacaaagucugcc

SEQ ID NO: 1712905 - RNA, 19 nt, Artificial Sequence
  Description of Artificial Sequence: Synthetic oligonucleotide
  Sense strand starting at position 2390 of SEQ ID NO: 1561981
ugugaaaucagcugugaaa

SEQ ID NO: 1712906 - RNA, 19 nt, Artificial Sequence
  Description of Artificial Sequence: Synthetic oligonucleotide
  Antisense strand to SEQ ID NO: 1712905
uuucacagcugauuucaca

SEQ ID NO: 1712907 - RNA, 19 nt, Artificial Sequence
  Description of Artificial Sequence: Synthetic oligonucleotide
  Sense strand starting at position 2569 of SEQ ID NO: 1561981
gaauuuaaccguugguguc

SEQ ID NO: 1712908 - RNA, 19 nt, Artificial Sequence
  Description of Artificial Sequence: Synthetic oligonucleotide
  Antisense strand to SEQ ID NO: 1712907
gacaccaacgguuaaauuc

SEQ ID NO: 1712909 - RNA, 19 nt, Artificial Sequence
  Description of Artificial Sequence: Synthetic oligonucleotide
  Sense strand starting at position 2683 of SEQ ID NO: 1561981
cuuacauguaucgauggau

SEQ ID NO: 1712910 - RNA, 19 nt, Artificial Sequence
  Description of Artificial Sequence: Synthetic oligonucleotide
  Antisense strand to SEQ ID NO: 1712909
auccaucgauacauguaag

SEQ ID NO: 1712911 - RNA, 19 nt, Artificial Sequence
  Description of Artificial Sequence: Synthetic oligonucleotide
  Sense strand starting at position 2686 of SEQ ID NO: 1561981
acauguaucgauggaugua

SEQ ID NO: 1712912 - RNA, 19 nt, Artificial Sequence
  Description of Artificial Sequence: Synthetic oligonucleotide
  Antisense strand to SEQ ID NO: 1712911
uacauccaucgauacaugu

SEQ ID NO: 1712913 - RNA, 19 nt, Artificial Sequence
  Description of Artificial Sequence: Synthetic oligonucleotide
  Sense strand starting at position 2687 of SEQ ID NO: 1561981
cauguaucgauggauguau

SEQ ID NO: 1712914 - RNA, 19 nt, Artificial Sequence
  Description of Artificial Sequence: Synthetic oligonucleotide
  Antisense strand to SEQ ID NO: 1712913
auacauccaucgauacaug

SEQ ID NO: 1712915 - RNA, 19 nt, Artificial Sequence
  Description of Artificial Sequence: Synthetic oligonucleotide
  Sense strand starting at position 2701 of SEQ ID NO: 1561981
uguauccugucucccuaaa

SEQ ID NO: 1712916 - RNA, 19 nt, Artificial Sequence
  Description of Artificial Sequence: Synthetic oligonucleotide
  Antisense strand to SEQ ID NO: 1712915
uuuagggagacaggauaca

SEQ ID NO: 1712917 - RNA, 19 nt, Artificial Sequence
  Description of Artificial Sequence: Synthetic oligonucleotide
  Sense strand starting at position 3212 of SEQ ID NO: 1561981
gagagcuugugguuauuug

SEQ ID NO: 1712918 - RNA, 19 nt, Artificial Sequence
  Description of Artificial Sequence: Synthetic oligonucleotide
  Antisense strand to SEQ ID NO: 1712917
caaauaaccacaagcucuc

SEQ ID NO: 1712919 - RNA, 19 nt, Artificial Sequence
  Description of Artificial Sequence: Synthetic oligonucleotide
  Sense strand starting at position 3222 of SEQ ID NO: 1561981
gguuauuugugacuguuuc

SEQ ID NO: 1712920 - RNA, 19 nt, Artificial Sequence
  Description of Artificial Sequence: Synthetic oligonucleotide
  Antisense strand to SEQ ID NO: 1712919
gaaacagucacaaauaacc

SEQ ID NO: 1712921 - RNA, 19 nt, Artificial Sequence
  Description of Artificial Sequence: Synthetic oligonucleotide
  Sense strand starting at position 3246 of SEQ ID NO: 1561981
acagaagcccuggagucau

SEQ ID NO: 1712922 - RNA, 19 nt, Artificial Sequence
  Description of Artificial Sequence: Synthetic oligonucleotide
  Antisense strand to SEQ ID NO: 1712921
augacuccagggcuucugu

SEQ ID NO: 1712923 - RNA, 19 nt, Artificial Sequence
  Description of Artificial Sequence: Synthetic oligonucleotide
  Sense strand starting at position 3290 of SEQ ID NO: 1561981
ggacacguccuccauacau

SEQ ID NO: 1712924 - RNA, 19 nt, Artificial Sequence
  Description of Artificial Sequence: Synthetic oligonucleotide
  Antisense strand to SEQ ID NO: 1712923
auguauggaggacgugucc

SEQ ID NO: 1712925 - RNA, 19 nt, Artificial Sequence
  Description of Artificial Sequence: Synthetic oligonucleotide
  Sense strand starting at position 3489 of SEQ ID NO: 1561981
gcaaaugagcuggagagua

SEQ ID NO: 1712926 - RNA, 19 nt, Artificial Sequence
  Description of Artificial Sequence: Synthetic oligonucleotide
  Antisense strand to SEQ ID NO: 1712925
uacucuccagcucauuugc

SEQ ID NO: 1712927 - RNA, 19 nt, Artificial Sequence
  Description of Artificial Sequence: Synthetic oligonucleotide
  Sense strand starting at position 3895 of SEQ ID NO: 1561981
aagaguuccuucguuaucu

SEQ ID NO: 1712928 - RNA, 19 nt, Artificial Sequence
  Description of Artificial Sequence: Synthetic oligonucleotide
  Antisense strand to SEQ ID NO: 1712927
agauaacgaaggaacucuu

SEQ ID NO: 1712929 - RNA, 19 nt, Artificial Sequence
  Description of Artificial Sequence: Synthetic oligonucleotide
  Sense strand starting at position 143 of SEQ ID NO: 1561982
gaauauacuugaucugagu

SEQ ID NO: 1712930 - RNA, 19 nt, Artificial Sequence
  Description of Artificial Sequence: Synthetic oligonucleotide
  Antisense strand to SEQ ID NO: 1712929
acucagaucaaguauauuc

SEQ ID NO: 1712931 - RNA, 19 nt, Artificial Sequence
  Description of Artificial Sequence: Synthetic oligonucleotide
  Sense strand starting at position 158 of SEQ ID NO: 1561982
gaguuccauuaaccugaga

SEQ ID NO: 1712932 - RNA, 19 nt, Artificial Sequence
  Description of Artificial Sequence: Synthetic oligonucleotide
  Antisense strand to SEQ ID NO: 1712931
ucucagguuaauggaacuc

SEQ ID NO: 1712933 - RNA, 19 nt, Artificial Sequence
  Description of Artificial Sequence: Synthetic oligonucleotide
  Sense strand starting at position 160 of SEQ ID NO: 1561982
guuccauuaaccugagagg

SEQ ID NO: 1712934 - RNA, 19 nt, Artificial Sequence
  Description of Artificial Sequence: Synthetic oligonucleotide
  Antisense strand to SEQ ID NO: 1712933
ccucucagguuaauggaac

SEQ ID NO: 1712935 - RNA, 19 nt, Artificial Sequence
  Description of Artificial Sequence: Synthetic oligonucleotide
  Sense strand starting at position 176 of SEQ ID NO: 1561982
agggcugaguguaauggau

SEQ ID NO: 1712936 - RNA, 19 nt, Artificial Sequence
  Description of Artificial Sequence: Synthetic oligonucleotide
  Antisense strand to SEQ ID NO: 1712935
auccauuacacucagcccu

SEQ ID NO: 1712937 - RNA, 19 nt, Artificial Sequence
  Description of Artificial Sequence: Synthetic oligonucleotide
  Sense strand starting at position 191 of SEQ ID NO: 1561982
ggaugagaaguuuguucag

SEQ ID NO: 1712938 - RNA, 19 nt, Artificial Sequence
  Description of Artificial Sequence: Synthetic oligonucleotide
  Antisense strand to SEQ ID NO: 1712937
cugaacaaacuucucaucc

SEQ ID NO: 1712939 - RNA, 19 nt, Artificial Sequence
  Description of Artificial Sequence: Synthetic oligonucleotide
  Sense strand starting at position 256 of SEQ ID NO: 1561982
cugacuuaugugcauugau

SEQ ID NO: 1712940 - RNA, 19 nt, Artificial Sequence
  Description of Artificial Sequence: Synthetic oligonucleotide
  Antisense strand to SEQ ID NO: 1712939
aucaaugcacauaagucag

SEQ ID NO: 1712941 - RNA, 19 nt, Artificial Sequence
  Description of Artificial Sequence: Synthetic oligonucleotide
  Sense strand starting at position 609 of SEQ ID NO: 1561982
ucgggcauauacucauaua

SEQ ID NO: 1712942 - RNA, 19 nt, Artificial Sequence
  Description of Artificial Sequence: Synthetic oligonucleotide
  Antisense strand to SEQ ID NO: 1712941
uauaugaguauaugcccga

SEQ ID NO: 1712943 - RNA, 19 nt, Artificial Sequence
  Description of Artificial Sequence: Synthetic oligonucleotide
  Sense strand starting at position 610 of SEQ ID NO: 1561982
cgggcauauacucauauag

SEQ ID NO: 1712944 - RNA, 19 nt, Artificial Sequence
  Description of Artificial Sequence: Synthetic oligonucleotide
  Antisense strand to SEQ ID NO: 1712943
cuauaugaguauaugcccg

SEQ ID NO: 1712945 - RNA, 19 nt, Artificial Sequence
  Description of Artificial Sequence: Synthetic oligonucleotide
  Sense strand starting at position 931 of SEQ ID NO: 1561982
ugugcaagugucucauugu

SEQ ID NO: 1712946 - RNA, 19 nt, Artificial Sequence
  Description of Artificial Sequence: Synthetic oligonucleotide
  Antisense strand to SEQ ID NO: 1712945
acaaugagacacuugcaca

SEQ ID NO: 1712947 - RNA, 19 nt, Artificial Sequence
  Description of Artificial Sequence: Synthetic oligonucleotide
  Sense strand starting at position 948 of SEQ ID NO: 1561982
gugagauuacaguaugcuu

SEQ ID NO: 1712948 - RNA, 19 nt, Artificial Sequence
  Description of Artificial Sequence: Synthetic oligonucleotide
  Antisense strand to SEQ ID NO: 1712947
aagcauacuguaaucucac

SEQ ID NO: 1712949 - RNA, 19 nt, Artificial Sequence
  Description of Artificial Sequence: Synthetic oligonucleotide
  Sense strand starting at position 950 of SEQ ID NO: 1561982
gagauuacaguaugcuuaa

SEQ ID NO: 1712950 - RNA, 19 nt, Artificial Sequence
  Description of Artificial Sequence: Synthetic oligonucleotide
  Antisense strand to SEQ ID NO: 1712949
uuaagcauacuguaaucuc

SEQ ID NO: 1712951 - RNA, 19 nt, Artificial Sequence
  Description of Artificial Sequence: Synthetic oligonucleotide
  Sense strand starting at position 1149 of SEQ ID NO: 1561982
gcacuuucuagcugggaga

SEQ ID NO: 1712952 - RNA, 19 nt, Artificial Sequence
  Description of Artificial Sequence: Synthetic oligonucleotide
  Antisense strand to SEQ ID NO: 1712951
ucucccagcuagaaagugc

SEQ ID NO: 1712953 - RNA, 19 nt, Artificial Sequence
  Description of Artificial Sequence: Synthetic oligonucleotide
  Sense strand starting at position 1287 of SEQ ID NO: 1561982
gucuuuccauaguccagaa

SEQ ID NO: 1712954 - RNA, 19 nt, Artificial Sequence
  Description of Artificial Sequence: Synthetic oligonucleotide
  Antisense strand to SEQ ID NO: 1712953
uucuggacuauggaaagac

SEQ ID NO: 1712955 - RNA, 19 nt, Artificial Sequence
  Description of Artificial Sequence: Synthetic oligonucleotide
  Sense strand starting at position 1660 of SEQ ID NO: 1561982
aagccauguguggauuaaa

SEQ ID NO: 1712956 - RNA, 19 nt, Artificial Sequence
  Description of Artificial Sequence: Synthetic oligonucleotide
  Antisense strand to SEQ ID NO: 1712955
uuuaauccacacauggcuu

SEQ ID NO: 1712957 - RNA, 19 nt, Artificial Sequence
  Description of Artificial Sequence: Synthetic oligonucleotide
  Sense strand starting at position 1663 of SEQ ID NO: 1561982
ccauguguggauuaaacga

SEQ ID NO: 1712958 - RNA, 19 nt, Artificial Sequence
  Description of Artificial Sequence: Synthetic oligonucleotide
  Antisense strand to SEQ ID NO: 1712957
ucguuuaauccacacaugg

SEQ ID NO: 1712959 - RNA, 19 nt, Artificial Sequence
  Description of Artificial Sequence: Synthetic oligonucleotide
  Sense strand starting at position 1724 of SEQ ID NO: 1561982
acaauuagugcuuaacaag

SEQ ID NO: 1712960 - RNA, 19 nt, Artificial Sequence
  Description of Artificial Sequence: Synthetic oligonucleotide
  Antisense strand to SEQ ID NO: 1712959
cuuguuaagcacuaauugu

SEQ ID NO: 1712961 - RNA, 19 nt, Artificial Sequence
  Description of Artificial Sequence: Synthetic oligonucleotide
  Sense strand starting at position 1871 of SEQ ID NO: 1561982
uacuuacuugcguaaggga

SEQ ID NO: 1712962 - RNA, 19 nt, Artificial Sequence
  Description of Artificial Sequence: Synthetic oligonucleotide
  Antisense strand to SEQ ID NO: 1712961
ucccuuacgcaaguaagua

SEQ ID NO: 1712963 - RNA, 19 nt, Artificial Sequence
  Description of Artificial Sequence: Synthetic oligonucleotide
  Sense strand starting at position 1942 of SEQ ID NO: 1561982
cgcuucucgcccucaguaa

SEQ ID NO: 1712964 - RNA, 19 nt, Artificial Sequence
  Description of Artificial Sequence: Synthetic oligonucleotide
  Antisense strand to SEQ ID NO: 1712963
uuacugagggcgagaagcg

SEQ ID NO: 1712965 - RNA, 19 nt, Artificial Sequence
  Description of Artificial Sequence: Synthetic oligonucleotide
  Sense strand starting at position 2023 of SEQ ID NO: 1561982
uggcuaaucgcacacugaa

SEQ ID NO: 1712966 - RNA, 19 nt, Artificial Sequence
  Description of Artificial Sequence: Synthetic oligonucleotide
  Antisense strand to SEQ ID NO: 1712965
uucagugugcgauuagcca

SEQ ID NO: 1712967 - RNA, 19 nt, Artificial Sequence
  Description of Artificial Sequence: Synthetic oligonucleotide
  Sense strand starting at position 2861 of SEQ ID NO: 1561982
ugaagauaugcagagccuu

SEQ ID NO: 1712968 - RNA, 19 nt, Artificial Sequence
  Description of Artificial Sequence: Synthetic oligonucleotide
  Antisense strand to SEQ ID NO: 1712967
aaggcucugcauaucuuca

SEQ ID NO: 1712969 - RNA, 19 nt, Artificial Sequence
  Description of Artificial Sequence: Synthetic oligonucleotide
  Sense strand starting at position 2869 of SEQ ID NO: 1561982
ugcagagccuucuuaggga

SEQ ID NO: 1712970 - RNA, 19 nt, Artificial Sequence
  Description of Artificial Sequence: Synthetic oligonucleotide
  Antisense strand to SEQ ID NO: 1712969
ucccuaagaaggcucugca

SEQ ID NO: 1712971 - RNA, 19 nt, Artificial Sequence
  Description of Artificial Sequence: Synthetic oligonucleotide
  Sense strand starting at position 2983 of SEQ ID NO: 1561982
ccuccugggagauguaaau

SEQ ID NO: 1712972 - RNA, 19 nt, Artificial Sequence
  Description of Artificial Sequence: Synthetic oligonucleotide
  Antisense strand to SEQ ID NO: 1712971
auuuacaucucccaggagg

SEQ ID NO: 1712973 - RNA, 19 nt, Artificial Sequence
  Description of Artificial Sequence: Synthetic oligonucleotide
  Sense strand starting at position 3001 of SEQ ID NO: 1561982
ucccuucuugggcaugaaa

SEQ ID NO: 1712974 - RNA, 19 nt, Artificial Sequence
  Description of Artificial Sequence: Synthetic oligonucleotide
  Antisense strand to SEQ ID NO: 1712973
uuucaugcccaagaaggga

SEQ ID NO: 1712975 - RNA, 19 nt, Artificial Sequence
  Description of Artificial Sequence: Synthetic oligonucleotide
  Sense strand starting at position 3003 of SEQ ID NO: 1561982
ccuucuugggcaugaaauc

SEQ ID NO: 1712976 - RNA, 19 nt, Artificial Sequence
  Description of Artificial Sequence: Synthetic oligonucleotide
  Antisense strand to SEQ ID NO: 1712975
gauuucaugcccaagaagg

SEQ ID NO: 1712977 - RNA, 19 nt, Artificial Sequence
  Description of Artificial Sequence: Synthetic oligonucleotide
  Sense strand starting at position 3004 of SEQ ID NO: 1561982
cuucuugggcaugaaauca

SEQ ID NO: 1712978 - RNA, 19 nt, Artificial Sequence
  Description of Artificial Sequence: Synthetic oligonucleotide
  Antisense strand to SEQ ID NO: 1712977
ugauuucaugcccaagaag

SEQ ID NO: 1712979 - RNA, 19 nt, Artificial Sequence
  Description of Artificial Sequence: Synthetic oligonucleotide
  Sense strand starting at position 3014 of SEQ ID NO: 1561982
augaaaucaucggcuuuga

SEQ ID NO: 1712980 - RNA, 19 nt, Artificial Sequence
  Description of Artificial Sequence: Synthetic oligonucleotide
  Antisense strand to SEQ ID NO: 1712979
ucaaagccgaugauuucau

SEQ ID NO: 1712981 - RNA, 19 nt, Artificial Sequence
  Description of Artificial Sequence: Synthetic oligonucleotide
  Sense strand starting at position 3199 of SEQ ID NO: 1561982
aguggacuccuuuggguga

SEQ ID NO: 1712982 - RNA, 19 nt, Artificial Sequence
  Description of Artificial Sequence: Synthetic oligonucleotide
  Antisense strand to SEQ ID NO: 1712981
ucacccaaaggaguccacu

SEQ ID NO: 1712983 - RNA, 19 nt, Artificial Sequence
  Description of Artificial Sequence: Synthetic oligonucleotide
  Sense strand starting at position 3202 of SEQ ID NO: 1561982
ggacuccuuugggugaagu

SEQ ID NO: 1712984 - RNA, 19 nt, Artificial Sequence
  Description of Artificial Sequence: Synthetic oligonucleotide
  Antisense strand to SEQ ID NO: 1712983
acuucacccaaaggagucc

SEQ ID NO: 1712985 - RNA, 19 nt, Artificial Sequence
  Description of Artificial Sequence: Synthetic oligonucleotide
  Sense strand starting at position 3204 of SEQ ID NO: 1561982
acuccuuugggugaaguga

SEQ ID NO: 1712986 - RNA, 19 nt, Artificial Sequence
  Description of Artificial Sequence: Synthetic oligonucleotide
  Antisense strand to SEQ ID NO: 1712985
ucacuucacccaaaggagu

SEQ ID NO: 1712987 - RNA, 19 nt, Artificial Sequence
  Description of Artificial Sequence: Synthetic oligonucleotide
  Sense strand starting at position 3217 of SEQ ID NO: 1561982
aagugaaagaucuguguag

SEQ ID NO: 1712988 - RNA, 19 nt, Artificial Sequence
  Description of Artificial Sequence: Synthetic oligonucleotide
  Antisense strand to SEQ ID NO: 1712987
cuacacagaucuuucacuu

SEQ ID NO: 1712989 - RNA, 19 nt, Artificial Sequence
  Description of Artificial Sequence: Synthetic oligonucleotide
  Sense strand starting at position 3277 of SEQ ID NO: 1561982
guugaauggcaguauagga

SEQ ID NO: 1712990 - RNA, 19 nt, Artificial Sequence
  Description of Artificial Sequence: Synthetic oligonucleotide
  Antisense strand to SEQ ID NO: 1712989
uccuauacugccauucaac

SEQ ID NO: 1712991 - RNA, 19 nt, Artificial Sequence
  Description of Artificial Sequence: Synthetic oligonucleotide
  Sense strand starting at position 3319 of SEQ ID NO: 1561982
ccgagauagcagugaucag

SEQ ID NO: 1712992 - RNA, 19 nt, Artificial Sequence
  Description of Artificial Sequence: Synthetic oligonucleotide
  Antisense strand to SEQ ID NO: 1712991
cugaucacugcuaucucgg

SEQ ID NO: 1712993 - RNA, 19 nt, Artificial Sequence
  Description of Artificial Sequence: Synthetic oligonucleotide
  Sense strand starting at position 3358 of SEQ ID NO: 1561982
ugaucagacagugaugugu

SEQ ID NO: 1712994 - RNA, 19 nt, Artificial Sequence
  Description of Artificial Sequence: Synthetic oligonucleotide
  Antisense strand to SEQ ID NO: 1712993
acacaucacugucugauca

SEQ ID NO: 1712995 - RNA, 19 nt, Artificial Sequence
  Description of Artificial Sequence: Synthetic oligonucleotide
  Sense strand starting at position 3362 of SEQ ID NO: 1561982
cagacagugauguguagaa

SEQ ID NO: 1712996 - RNA, 19 nt, Artificial Sequence
  Description of Artificial Sequence: Synthetic oligonucleotide
  Antisense strand to SEQ ID NO: 1712995
uucuacacaucacugucug

SEQ ID NO: 1712997 - RNA, 19 nt, Artificial Sequence
  Description of Artificial Sequence: Synthetic oligonucleotide
  Sense strand starting at position 3434 of SEQ ID NO: 1561982
ccaugagugaccuguagau

SEQ ID NO: 1712998 - RNA, 19 nt, Artificial Sequence
  Description of Artificial Sequence: Synthetic oligonucleotide
  Antisense strand to SEQ ID NO: 1712997
aucuacaggucacucaugg

SEQ ID NO: 1712999 - RNA, 19 nt, Artificial Sequence
  Description of Artificial Sequence: Synthetic oligonucleotide
  Sense strand starting at position 3436 of SEQ ID NO: 1561982
augagugaccuguagaugu

SEQ ID NO: 1713000 - RNA, 19 nt, Artificial Sequence
  Description of Artificial Sequence: Synthetic oligonucleotide
  Antisense strand to SEQ ID NO: 1712999
acaucuacaggucacucau

SEQ ID NO: 1713001 - RNA, 19 nt, Artificial Sequence
  Description of Artificial Sequence: Synthetic oligonucleotide
  Sense strand starting at position 3438 of SEQ ID NO: 1561982
gagugaccuguagauguuu

SEQ ID NO: 1713002 - RNA, 19 nt, Artificial Sequence
  Description of Artificial Sequence: Synthetic oligonucleotide
  Antisense strand to SEQ ID NO: 1713001
aaacaucuacaggucacuc

SEQ ID NO: 1713003 - RNA, 19 nt, Artificial Sequence
  Description of Artificial Sequence: Synthetic oligonucleotide
  Sense strand starting at position 3767 of SEQ ID NO: 1561982
gaaagauaaugagaucaug

SEQ ID NO: 1713004 - RNA, 19 nt, Artificial Sequence
  Description of Artificial Sequence: Synthetic oligonucleotide
  Antisense strand to SEQ ID NO: 1713003
caugaucucauuaucuuuc

SEQ ID NO: 1713005 - RNA, 19 nt, Artificial Sequence
  Description of Artificial Sequence: Synthetic oligonucleotide
  Sense strand starting at position 3838 of SEQ ID NO: 1561982
agagaacuguuccuaccga

SEQ ID NO: 1713006 - RNA, 19 nt, Artificial Sequence
  Description of Artificial Sequence: Synthetic oligonucleotide
  Antisense strand to SEQ ID NO: 1713005
ucgguaggaacaguucucu

SEQ ID NO: 1713007 - RNA, 19 nt, Artificial Sequence
  Description of Artificial Sequence: Synthetic oligonucleotide
  Sense strand starting at position 3886 of SEQ ID NO: 1561982
agugcugcucgccuguaau

SEQ ID NO: 1713008 - RNA, 19 nt, Artificial Sequence
  Description of Artificial Sequence: Synthetic oligonucleotide
  Antisense strand to SEQ ID NO: 1713007
auuacaggcgagcagcacu

SEQ ID NO: 1713009 - RNA, 19 nt, Artificial Sequence
  Description of Artificial Sequence: Synthetic oligonucleotide
  Sense strand starting at position 8 of SEQ ID NO: 1561983
cuccuuugguguuuauaaa

SEQ ID NO: 1713010 - RNA, 19 nt, Artificial Sequence
  Description of Artificial Sequence: Synthetic oligonucleotide
  Antisense strand to SEQ ID NO: 1713009
uuuauaaacaccaaaggag

SEQ ID NO: 1713011 - RNA, 19 nt, Artificial Sequence
  Description of Artificial Sequence: Synthetic oligonucleotide
  Sense strand starting at position 255 of SEQ ID NO: 1561983
guuguuaugaaguaggcuu

SEQ ID NO: 1713012 - RNA, 19 nt, Artificial Sequence
  Description of Artificial Sequence: Synthetic oligonucleotide
  Antisense strand to SEQ ID NO: 1713011
aagccuacuucauaacaac

SEQ ID NO: 1713013 - RNA, 19 nt, Artificial Sequence
  Description of Artificial Sequence: Synthetic oligonucleotide
  Sense strand starting at position 257 of SEQ ID NO: 1561983
uguuaugaaguaggcuuaa

SEQ ID NO: 1713014 - RNA, 19 nt, Artificial Sequence
  Description of Artificial Sequence: Synthetic oligonucleotide
  Antisense strand to SEQ ID NO: 1713013
uuaagccuacuucauaaca

SEQ ID NO: 1713015 - RNA, 19 nt, Artificial Sequence
  Description of Artificial Sequence: Synthetic oligonucleotide
  Sense strand starting at position 454 of SEQ ID NO: 1561983
ccaggaaucccagguuaga

SEQ ID NO: 1713016 - RNA, 19 nt, Artificial Sequence
  Description of Artificial Sequence: Synthetic oligonucleotide
  Antisense strand to SEQ ID NO: 1713015
ucuaaccugggauuccugg

SEQ ID NO: 1713017 - RNA, 19 nt, Artificial Sequence
  Description of Artificial Sequence: Synthetic oligonucleotide
  Sense strand starting at position 516 of SEQ ID NO: 1561983
ccaagacccugucuguaaa

SEQ ID NO: 1713018 - RNA, 19 nt, Artificial Sequence
  Description of Artificial Sequence: Synthetic oligonucleotide
  Antisense strand to SEQ ID NO: 1713017
uuuacagacagggucuugg

SEQ ID NO: 1713019 - RNA, 19 nt, Artificial Sequence
  Description of Artificial Sequence: Synthetic oligonucleotide
  Sense strand starting at position 597 of SEQ ID NO: 1561983
acugauacucacuggaauu

SEQ ID NO: 1713020 - RNA, 19 nt, Artificial Sequence
  Description of Artificial Sequence: Synthetic oligonucleotide
  Antisense strand to SEQ ID NO: 1713019
aauuccagugaguaucagu

SEQ ID NO: 1713021 - RNA, 19 nt, Artificial Sequence
  Description of Artificial Sequence: Synthetic oligonucleotide
  Sense strand starting at position 735 of SEQ ID NO: 1561983
agcuucgugacucgguaaa

SEQ ID NO: 1713022 - RNA, 19 nt, Artificial Sequence
  Description of Artificial Sequence: Synthetic oligonucleotide
  Antisense strand to SEQ ID NO: 1713021
uuuaccgagucacgaagcu

SEQ ID NO: 1713023 - RNA, 19 nt, Artificial Sequence
  Description of Artificial Sequence: Synthetic oligonucleotide
  Sense strand starting at position 790 of SEQ ID NO: 1561983
caagguauccgcguuaucu

SEQ ID NO: 1713024 - RNA, 19 nt, Artificial Sequence
  Description of Artificial Sequence: Synthetic oligonucleotide
  Antisense strand to SEQ ID NO: 1713023
agauaacgcggauaccuug

SEQ ID NO: 1713025 - RNA, 19 nt, Artificial Sequence
  Description of Artificial Sequence: Synthetic oligonucleotide
  Sense strand starting at position 791 of SEQ ID NO: 1561983
aagguauccgcguuaucuu

SEQ ID NO: 1713026 - RNA, 19 nt, Artificial Sequence
  Description of Artificial Sequence: Synthetic oligonucleotide
  Antisense strand to SEQ ID NO: 1713025
aagauaacgcggauaccuu

SEQ ID NO: 1713027 - RNA, 19 nt, Artificial Sequence
  Description of Artificial Sequence: Synthetic oligonucleotide
  Sense strand starting at position 802 of SEQ ID NO: 1561983
guuaucuucggcccuuagu

SEQ ID NO: 1713028 - RNA, 19 nt, Artificial Sequence
  Description of Artificial Sequence: Synthetic oligonucleotide
  Antisense strand to SEQ ID NO: 1713027
acuaagggccgaagauaac

SEQ ID NO: 1713029 - RNA, 19 nt, Artificial Sequence
  Description of Artificial Sequence: Synthetic oligonucleotide
  Sense strand starting at position 810 of SEQ ID NO: 1561983
cggcccuuaguguaaugau

SEQ ID NO: 1713030 - RNA, 19 nt, Artificial Sequence
  Description of Artificial Sequence: Synthetic oligonucleotide
  Antisense strand to SEQ ID NO: 1713029
aucauuacacuaagggccg

SEQ ID NO: 1713031 - RNA, 19 nt, Artificial Sequence
  Description of Artificial Sequence: Synthetic oligonucleotide
  Sense strand starting at position 1009 of SEQ ID NO: 1561983
auuauuaaugcagacguuu

SEQ ID NO: 1713032 - RNA, 19 nt, Artificial Sequence
  Description of Artificial Sequence: Synthetic oligonucleotide
  Antisense strand to SEQ ID NO: 1713031
aaacgucugcauuaauaau

SEQ ID NO: 1713033 - RNA, 19 nt, Artificial Sequence
  Description of Artificial Sequence: Synthetic oligonucleotide
  Sense strand starting at position 1033 of SEQ ID NO: 1561983
cgcaucuggcaguauuuau

SEQ ID NO: 1713034 - RNA, 19 nt, Artificial Sequence
  Description of Artificial Sequence: Synthetic oligonucleotide
  Antisense strand to SEQ ID NO: 1713033
auaaauacugccagaugcg

SEQ ID NO: 1713035 - RNA, 19 nt, Artificial Sequence
  Description of Artificial Sequence: Synthetic oligonucleotide
  Sense strand starting at position 1070 of SEQ ID NO: 1561983
gugucccuucuggauagaa

SEQ ID NO: 1713036 - RNA, 19 nt, Artificial Sequence
  Description of Artificial Sequence: Synthetic oligonucleotide
  Antisense strand to SEQ ID NO: 1713035
uucuauccagaagggacac

SEQ ID NO: 1713037 - RNA, 19 nt, Artificial Sequence
  Description of Artificial Sequence: Synthetic oligonucleotide
  Sense strand starting at position 1227 of SEQ ID NO: 1561983
gagaccgucucagaaacaa

SEQ ID NO: 1713038 - RNA, 19 nt, Artificial Sequence
  Description of Artificial Sequence: Synthetic oligonucleotide
  Antisense strand to SEQ ID NO: 1713037
uuguuucugagacggucuc

SEQ ID NO: 1713039 - RNA, 19 nt, Artificial Sequence
  Description of Artificial Sequence: Synthetic oligonucleotide
  Sense strand starting at position 2173 of SEQ ID NO: 1561983
agaacaaguccgggcauau

SEQ ID NO: 1713040 - RNA, 19 nt, Artificial Sequence
  Description of Artificial Sequence: Synthetic oligonucleotide
  Antisense strand to SEQ ID NO: 1713039
auaugcccggacuuguucu

SEQ ID NO: 1713041 - RNA, 19 nt, Artificial Sequence
  Description of Artificial Sequence: Synthetic oligonucleotide
  Sense strand starting at position 2264 of SEQ ID NO: 1561983
gguagaaaguuuccagcca

SEQ ID NO: 1713042 - RNA, 19 nt, Artificial Sequence
  Description of Artificial Sequence: Synthetic oligonucleotide
  Antisense strand to SEQ ID NO: 1713041
uggcuggaaacuuucuacc

SEQ ID NO: 1713043 - RNA, 19 nt, Artificial Sequence
  Description of Artificial Sequence: Synthetic oligonucleotide
  Sense strand starting at position 2387 of SEQ ID NO: 1561983
cagaauugaugcgcucgua

SEQ ID NO: 1713044 - RNA, 19 nt, Artificial Sequence
  Description of Artificial Sequence: Synthetic oligonucleotide
  Antisense strand to SEQ ID NO: 1713043
uacgagcgcaucaauucug

SEQ ID NO: 1713045 - RNA, 19 nt, Artificial Sequence
  Description of Artificial Sequence: Synthetic oligonucleotide
  Sense strand starting at position 2421 of SEQ ID NO: 1561983
agaggugaauuguucuguu

SEQ ID NO: 1713046 - RNA, 19 nt, Artificial Sequence
  Description of Artificial Sequence: Synthetic oligonucleotide
  Antisense strand to SEQ ID NO: 1713045
aacagaacaauucaccucu

SEQ ID NO: 1713047 - RNA, 19 nt, Artificial Sequence
  Description of Artificial Sequence: Synthetic oligonucleotide
  Sense strand starting at position 2425 of SEQ ID NO: 1561983
gugaauuguucuguuaaac

SEQ ID NO: 1713048 - RNA, 19 nt, Artificial Sequence
  Description of Artificial Sequence: Synthetic oligonucleotide
  Antisense strand to SEQ ID NO: 1713047
guuuaacagaacaauucac

SEQ ID NO: 1713049 - RNA, 19 nt, Artificial Sequence
  Description of Artificial Sequence: Synthetic oligonucleotide
  Sense strand starting at position 2564 of SEQ ID NO: 1561983
ugcacucauuccguaaaca

SEQ ID NO: 1713050 - RNA, 19 nt, Artificial Sequence
  Description of Artificial Sequence: Synthetic oligonucleotide
  Antisense strand to SEQ ID NO: 1713049
uguuuacggaaugagugca

SEQ ID NO: 1713051 - RNA, 19 nt, Artificial Sequence
  Description of Artificial Sequence: Synthetic oligonucleotide
  Sense strand starting at position 2565 of SEQ ID NO: 1561983
gcacucauuccguaaacac

SEQ ID NO: 1713052 - RNA, 19 nt, Artificial Sequence
  Description of Artificial Sequence: Synthetic oligonucleotide
  Antisense strand to SEQ ID NO: 1713051
guguuuacggaaugagugc

SEQ ID NO: 1713053 - RNA, 19 nt, Artificial Sequence
  Description of Artificial Sequence: Synthetic oligonucleotide
  Sense strand starting at position 2692 of SEQ ID NO: 1561983
aucuccuguuguuuaacua

SEQ ID NO: 1713054 - RNA, 19 nt, Artificial Sequence
  Description of Artificial Sequence: Synthetic oligonucleotide
  Antisense strand to SEQ ID NO: 1713053
uaguuaaacaacaggagau

SEQ ID NO: 1713055 - RNA, 19 nt, Artificial Sequence
  Description of Artificial Sequence: Synthetic oligonucleotide
  Sense strand starting at position 2696 of SEQ ID NO: 1561983
ccuguuguuuaacuacaaa

SEQ ID NO: 1713056 - RNA, 19 nt, Artificial Sequence
  Description of Artificial Sequence: Synthetic oligonucleotide
  Antisense strand to SEQ ID NO: 1713055
uuuguaguuaaacaacagg

SEQ ID NO: 1713057 - RNA, 19 nt, Artificial Sequence
  Description of Artificial Sequence: Synthetic oligonucleotide
  Sense strand starting at position 2759 of SEQ ID NO: 1561983
aguaauacagcugagucaa

SEQ ID NO: 1713058 - RNA, 19 nt, Artificial Sequence
  Description of Artificial Sequence: Synthetic oligonucleotide
  Antisense strand to SEQ ID NO: 1713057
uugacucagcuguauuacu

SEQ ID NO: 1713059 - RNA, 19 nt, Artificial Sequence
  Description of Artificial Sequence: Synthetic oligonucleotide
  Sense strand starting at position 2772 of SEQ ID NO: 1561983
agucaaagagcguacacau

SEQ ID NO: 1713060 - RNA, 19 nt, Artificial Sequence
  Description of Artificial Sequence: Synthetic oligonucleotide
  Antisense strand to SEQ ID NO: 1713059
auguguacgcucuuugacu

SEQ ID NO: 1713061 - RNA, 19 nt, Artificial Sequence
  Description of Artificial Sequence: Synthetic oligonucleotide
  Sense strand starting at position 3130 of SEQ ID NO: 1561983
ucaauuguuacaggaugga

SEQ ID NO: 1713062 - RNA, 19 nt, Artificial Sequence
  Description of Artificial Sequence: Synthetic oligonucleotide
  Antisense strand to SEQ ID NO: 1713061
uccauccuguaacaauuga

SEQ ID NO: 1713063 - RNA, 19 nt, Artificial Sequence
  Description of Artificial Sequence: Synthetic oligonucleotide
  Sense strand starting at position 3206 of SEQ ID NO: 1561983
auaccuuggucagcagaau

SEQ ID NO: 1713064 - RNA, 19 nt, Artificial Sequence
  Description of Artificial Sequence: Synthetic oligonucleotide
  Antisense strand to SEQ ID NO: 1713063
auucugcugaccaagguau

SEQ ID NO: 1713065 - RNA, 19 nt, Artificial Sequence
  Description of Artificial Sequence: Synthetic oligonucleotide
  Sense strand starting at position 3207 of SEQ ID NO: 1561983
uaccuuggucagcagaauu

SEQ ID NO: 1713066 - RNA, 19 nt, Artificial Sequence
  Description of Artificial Sequence: Synthetic oligonucleotide
  Antisense strand to SEQ ID NO: 1713065
aauucugcugaccaaggua

SEQ ID NO: 1713067 - RNA, 19 nt, Artificial Sequence
  Description of Artificial Sequence: Synthetic oligonucleotide
  Sense strand starting at position 3215 of SEQ ID NO: 1561983
ucagcagaauucuuuaguu

SEQ ID NO: 1713068 - RNA, 19 nt, Artificial Sequence
  Description of Artificial Sequence: Synthetic oligonucleotide
  Antisense strand to SEQ ID NO: 1713067
aacuaaagaauucugcuga

SEQ ID NO: 1713069 - RNA, 19 nt, Artificial Sequence
  Description of Artificial Sequence: Synthetic oligonucleotide
  Sense strand starting at position 3240 of SEQ ID NO: 1561983
ccauguaucuagguaugga

SEQ ID NO: 1713070 - RNA, 19 nt, Artificial Sequence
  Description of Artificial Sequence: Synthetic oligonucleotide
  Antisense strand to SEQ ID NO: 1713069
uccauaccuagauacaugg

SEQ ID NO: 1713071 - RNA, 19 nt, Artificial Sequence
  Description of Artificial Sequence: Synthetic oligonucleotide
  Sense strand starting at position 3241 of SEQ ID NO: 1561983
cauguaucuagguauggag

SEQ ID NO: 1713072 - RNA, 19 nt, Artificial Sequence
  Description of Artificial Sequence: Synthetic oligonucleotide
  Antisense strand to SEQ ID NO: 1713071
cuccauaccuagauacaug

SEQ ID NO: 1713073 - RNA, 19 nt, Artificial Sequence
  Description of Artificial Sequence: Synthetic oligonucleotide
  Sense strand starting at position 3356 of SEQ ID NO: 1561983
auucuuuaucucuggaaug

SEQ ID NO: 1713074 - RNA, 19 nt, Artificial Sequence
  Description of Artificial Sequence: Synthetic oligonucleotide
  Antisense strand to SEQ ID NO: 1713073
cauuccagagauaaagaau

SEQ ID NO: 1713075 - RNA, 19 nt, Artificial Sequence
  Description of Artificial Sequence: Synthetic oligonucleotide
  Sense strand starting at position 3427 of SEQ ID NO: 1561983
cauacaagguucuaagaug

SEQ ID NO: 1713076 - RNA, 19 nt, Artificial Sequence
  Description of Artificial Sequence: Synthetic oligonucleotide
  Antisense strand to SEQ ID NO: 1713075
caucuuagaaccuuguaug

SEQ ID NO: 1713077 - RNA, 19 nt, Artificial Sequence
  Description of Artificial Sequence: Synthetic oligonucleotide
  Sense strand starting at position 3452 of SEQ ID NO: 1561983
acagucucuucccuggauu

SEQ ID NO: 1713078 - RNA, 19 nt, Artificial Sequence
  Description of Artificial Sequence: Synthetic oligonucleotide
  Antisense strand to SEQ ID NO: 1713077
aauccagggaagagacugu

SEQ ID NO: 1713079 - RNA, 19 nt, Artificial Sequence
  Description of Artificial Sequence: Synthetic oligonucleotide
  Sense strand starting at position 3545 of SEQ ID NO: 1561983
gggcauuucuauuauaaga

SEQ ID NO: 1713080 - RNA, 19 nt, Artificial Sequence
  Description of Artificial Sequence: Synthetic oligonucleotide
  Antisense strand to SEQ ID NO: 1713079
ucuuauaauagaaaugccc

SEQ ID NO: 1713081 - RNA, 19 nt, Artificial Sequence
  Description of Artificial Sequence: Synthetic oligonucleotide
  Sense strand starting at position 3547 of SEQ ID NO: 1561983
gcauuucuauuauaagaug

SEQ ID NO: 1713082 - RNA, 19 nt, Artificial Sequence
  Description of Artificial Sequence: Synthetic oligonucleotide
  Antisense strand to SEQ ID NO: 1713081
caucuuauaauagaaaugc

SEQ ID NO: 1713083 - RNA, 19 nt, Artificial Sequence
  Description of Artificial Sequence: Synthetic oligonucleotide
  Sense strand starting at position 3714 of SEQ ID NO: 1561983
aacuucuaggcucgagaga

SEQ ID NO: 1713084 - RNA, 19 nt, Artificial Sequence
  Description of Artificial Sequence: Synthetic oligonucleotide
  Antisense strand to SEQ ID NO: 1713083
ucucucgagccuagaaguu

SEQ ID NO: 1713085 - RNA, 19 nt, Artificial Sequence
  Description of Artificial Sequence: Synthetic oligonucleotide
  Sense strand starting at position 3715 of SEQ ID NO: 1561983
acuucuaggcucgagagau

SEQ ID NO: 1713086 - RNA, 19 nt, Artificial Sequence
  Description of Artificial Sequence: Synthetic oligonucleotide
  Antisense strand to SEQ ID NO: 1713085
aucucucgagccuagaagu

SEQ ID NO: 1713087 - RNA, 19 nt, Artificial Sequence
  Description of Artificial Sequence: Synthetic oligonucleotide
  Sense strand starting at position 3879 of SEQ ID NO: 1561983
ucucccaaagugugagauu

SEQ ID NO: 1713088 - RNA, 19 nt, Artificial Sequence
  Description of Artificial Sequence: Synthetic oligonucleotide
  Antisense strand to SEQ ID NO: 1713087
aaucucacacuuugggaga

SEQ ID NO: 1713089 - RNA, 19 nt, Artificial Sequence
  Description of Artificial Sequence: Synthetic oligonucleotide
  Sense strand starting at position 93 of SEQ ID NO: 1561984
ccguuguucccggagagga

SEQ ID NO: 1713090 - RNA, 19 nt, Artificial Sequence
  Description of Artificial Sequence: Synthetic oligonucleotide
  Antisense strand to SEQ ID NO: 1713089
uccucuccgggaacaacgg

SEQ ID NO: 1713091 - RNA, 19 nt, Artificial Sequence
  Description of Artificial Sequence: Synthetic oligonucleotide
  Sense strand starting at position 195 of SEQ ID NO: 1561984
cagccucgucuguaggaaa

SEQ ID NO: 1713092 - RNA, 19 nt, Artificial Sequence
  Description of Artificial Sequence: Synthetic oligonucleotide
  Antisense strand to SEQ ID NO: 1713091
uuuccuacagacgaggcug

SEQ ID NO: 1713093 - RNA, 19 nt, Artificial Sequence
  Description of Artificial Sequence: Synthetic oligonucleotide
  Sense strand starting at position 206 of SEQ ID NO: 1561984
guaggaaacuauucuuucu

SEQ ID NO: 1713094 - RNA, 19 nt, Artificial Sequence
  Description of Artificial Sequence: Synthetic oligonucleotide
  Antisense strand to SEQ ID NO: 1713093
agaaagaauaguuuccuac

SEQ ID NO: 1713095 - RNA, 19 nt, Artificial Sequence
  Description of Artificial Sequence: Synthetic oligonucleotide
  Sense strand starting at position 242 of SEQ ID NO: 1561984
gggagacuucccuggccaa

SEQ ID NO: 1713096 - RNA, 19 nt, Artificial Sequence
  Description of Artificial Sequence: Synthetic oligonucleotide
  Antisense strand to SEQ ID NO: 1713095
uuggccagggaagucuccc

SEQ ID NO: 1713097 - RNA, 19 nt, Artificial Sequence
  Description of Artificial Sequence: Synthetic oligonucleotide
  Sense strand starting at position 245 of SEQ ID NO: 1561984
agacuucccuggccaagua

SEQ ID NO: 1713098 - RNA, 19 nt, Artificial Sequence
  Description of Artificial Sequence: Synthetic oligonucleotide
  Antisense strand to SEQ ID NO: 1713097
uacuuggccagggaagucu

SEQ ID NO: 1713099 - RNA, 19 nt, Artificial Sequence
  Description of Artificial Sequence: Synthetic oligonucleotide
  Sense strand starting at position 394 of SEQ ID NO: 1561984
gucaaagagcaguaaauua

SEQ ID NO: 1713100 - RNA, 19 nt, Artificial Sequence
  Description of Artificial Sequence: Synthetic oligonucleotide
  Antisense strand to SEQ ID NO: 1713099
uaauuuacugcucuuugac

SEQ ID NO: 1713101 - RNA, 19 nt, Artificial Sequence
  Description of Artificial Sequence: Synthetic oligonucleotide
  Sense strand starting at position 452 of SEQ ID NO: 1561984
uuacauaaccggugaaaga

SEQ ID NO: 1713102 - RNA, 19 nt, Artificial Sequence
  Description of Artificial Sequence: Synthetic oligonucleotide
  Antisense strand to SEQ ID NO: 1713101
ucuuucaccgguuauguaa

SEQ ID NO: 1713103 - RNA, 19 nt, Artificial Sequence
  Description of Artificial Sequence: Synthetic oligonucleotide
  Sense strand starting at position 512 of SEQ ID NO: 1561984
aucugcaucgcaugagaaa

SEQ ID NO: 1713104 - RNA, 19 nt, Artificial Sequence
  Description of Artificial Sequence: Synthetic oligonucleotide
  Antisense strand to SEQ ID NO: 1713103
uuucucaugcgaugcagau

SEQ ID NO: 1713105 - RNA, 19 nt, Artificial Sequence
  Description of Artificial Sequence: Synthetic oligonucleotide
  Sense strand starting at position 543 of SEQ ID NO: 1561984
gcaaaucugcaaugagauu

SEQ ID NO: 1713106 - RNA, 19 nt, Artificial Sequence
  Description of Artificial Sequence: Synthetic oligonucleotide
  Antisense strand to SEQ ID NO: 1713105
aaucucauugcagauuugc

SEQ ID NO: 1713107 - RNA, 19 nt, Artificial Sequence
  Description of Artificial Sequence: Synthetic oligonucleotide
  Sense strand starting at position 601 of SEQ ID NO: 1561984
augcgaaaugcaugggaga

SEQ ID NO: 1713108 - RNA, 19 nt, Artificial Sequence
  Description of Artificial Sequence: Synthetic oligonucleotide
  Antisense strand to SEQ ID NO: 1713107
ucucccaugcauuucgcau

SEQ ID NO: 1713109 - RNA, 19 nt, Artificial Sequence
  Description of Artificial Sequence: Synthetic oligonucleotide
  Sense strand starting at position 1421 of SEQ ID NO: 1561984
gaugucauuguuuguggga

SEQ ID NO: 1713110 - RNA, 19 nt, Artificial Sequence
  Description of Artificial Sequence: Synthetic oligonucleotide
  Antisense strand to SEQ ID NO: 1713109
ucccacaaacaaugacauc

SEQ ID NO: 1713111 - RNA, 19 nt, Artificial Sequence
  Description of Artificial Sequence: Synthetic oligonucleotide
  Sense strand starting at position 1422 of SEQ ID NO: 1561984
augucauuguuugugggaa

SEQ ID NO: 1713112 - RNA, 19 nt, Artificial Sequence
  Description of Artificial Sequence: Synthetic oligonucleotide
  Antisense strand to SEQ ID NO: 1713111
uucccacaaacaaugacau

SEQ ID NO: 1713113 - RNA, 19 nt, Artificial Sequence
  Description of Artificial Sequence: Synthetic oligonucleotide
  Sense strand starting at position 1529 of SEQ ID NO: 1561984
gcuuguuucccgcugcaaa

SEQ ID NO: 1713114 - RNA, 19 nt, Artificial Sequence
  Description of Artificial Sequence: Synthetic oligonucleotide
  Antisense strand to SEQ ID NO: 1713113
uuugcagcgggaaacaagc

SEQ ID NO: 1713115 - RNA, 19 nt, Artificial Sequence
  Description of Artificial Sequence: Synthetic oligonucleotide
  Sense strand starting at position 2100 of SEQ ID NO: 1561984
caacuaaguuauccgguua

SEQ ID NO: 1713116 - RNA, 19 nt, Artificial Sequence
  Description of Artificial Sequence: Synthetic oligonucleotide
  Antisense strand to SEQ ID NO: 1713115
uaaccggauaacuuaguug

SEQ ID NO: 1713117 - RNA, 19 nt, Artificial Sequence
  Description of Artificial Sequence: Synthetic oligonucleotide
  Sense strand starting at position 2105 of SEQ ID NO: 1561984
aaguuauccgguuaagaaa

SEQ ID NO: 1713118 - RNA, 19 nt, Artificial Sequence
  Description of Artificial Sequence: Synthetic oligonucleotide
  Antisense strand to SEQ ID NO: 1713117
uuucuuaaccggauaacuu

SEQ ID NO: 1713119 - RNA, 19 nt, Artificial Sequence
  Description of Artificial Sequence: Synthetic oligonucleotide
  Sense strand starting at position 2193 of SEQ ID NO: 1561984
acgaacguucuguauguaa

SEQ ID NO: 1713120 - RNA, 19 nt, Artificial Sequence
  Description of Artificial Sequence: Synthetic oligonucleotide
  Antisense strand to SEQ ID NO: 1713119
uuacauacagaacguucgu

SEQ ID NO: 1713121 - RNA, 19 nt, Artificial Sequence
  Description of Artificial Sequence: Synthetic oligonucleotide
  Sense strand starting at position 2201 of SEQ ID NO: 1561984
ucuguauguaacgaaauga

SEQ ID NO: 1713122 - RNA, 19 nt, Artificial Sequence
  Description of Artificial Sequence: Synthetic oligonucleotide
  Antisense strand to SEQ ID NO: 1713121
ucauuucguuacauacaga

SEQ ID NO: 1713123 - RNA, 19 nt, Artificial Sequence
  Description of Artificial Sequence: Synthetic oligonucleotide
  Sense strand starting at position 2249 of SEQ ID NO: 1561984
uguuguguuaaagaguauu

SEQ ID NO: 1713124 - RNA, 19 nt, Artificial Sequence
  Description of Artificial Sequence: Synthetic oligonucleotide
  Antisense strand to SEQ ID NO: 1713123
aauacucuuuaacacaaca

SEQ ID NO: 1713125 - RNA, 19 nt, Artificial Sequence
  Description of Artificial Sequence: Synthetic oligonucleotide
  Sense strand starting at position 2277 of SEQ ID NO: 1561984
cucauuguaucauuuagcu

SEQ ID NO: 1713126 - RNA, 19 nt, Artificial Sequence
  Description of Artificial Sequence: Synthetic oligonucleotide
  Antisense strand to SEQ ID NO: 1713125
agcuaaaugauacaaugag

SEQ ID NO: 1713127 - RNA, 19 nt, Artificial Sequence
  Description of Artificial Sequence: Synthetic oligonucleotide
  Sense strand starting at position 2479 of SEQ ID NO: 1561984
gucagaaccuaugcaagaa

SEQ ID NO: 1713128 - RNA, 19 nt, Artificial Sequence
  Description of Artificial Sequence: Synthetic oligonucleotide
  Antisense strand to SEQ ID NO: 1713127
uucuugcauagguucugac

SEQ ID NO: 1713129 - RNA, 19 nt, Artificial Sequence
  Description of Artificial Sequence: Synthetic oligonucleotide
  Sense strand starting at position 2497 of SEQ ID NO: 1561984
aaagcaccaucgguagaaa

SEQ ID NO: 1713130 - RNA, 19 nt, Artificial Sequence
  Description of Artificial Sequence: Synthetic oligonucleotide
  Antisense strand to SEQ ID NO: 1713129
uuucuaccgauggugcuuu

SEQ ID NO: 1713131 - RNA, 19 nt, Artificial Sequence
  Description of Artificial Sequence: Synthetic oligonucleotide
  Sense strand starting at position 2498 of SEQ ID NO: 1561984
aagcaccaucgguagaaau

SEQ ID NO: 1713132 - RNA, 19 nt, Artificial Sequence
  Description of Artificial Sequence: Synthetic oligonucleotide
  Antisense strand to SEQ ID NO: 1713131
auuucuaccgauggugcuu

SEQ ID NO: 1713133 - RNA, 19 nt, Artificial Sequence
  Description of Artificial Sequence: Synthetic oligonucleotide
  Sense strand starting at position 2500 of SEQ ID NO: 1561984
gcaccaucgguagaaauga

SEQ ID NO: 1713134 - RNA, 19 nt, Artificial Sequence
  Description of Artificial Sequence: Synthetic oligonucleotide
  Antisense strand to SEQ ID NO: 1713133
ucauuucuaccgauggugc

SEQ ID NO: 1713135 - RNA, 19 nt, Artificial Sequence
  Description of Artificial Sequence: Synthetic oligonucleotide
  Sense strand starting at position 2650 of SEQ ID NO: 1561984
auuagaagucuaugugaca

SEQ ID NO: 1713136 - RNA, 19 nt, Artificial Sequence
  Description of Artificial Sequence: Synthetic oligonucleotide
  Antisense strand to SEQ ID NO: 1713135
ugucacauagacuucuaau

SEQ ID NO: 1713137 - RNA, 19 nt, Artificial Sequence
  Description of Artificial Sequence: Synthetic oligonucleotide
  Sense strand starting at position 2651 of SEQ ID NO: 1561984
uuagaagucuaugugacau

SEQ ID NO: 1713138 - RNA, 19 nt, Artificial Sequence
  Description of Artificial Sequence: Synthetic oligonucleotide
  Antisense strand to SEQ ID NO: 1713137
augucacauagacuucuaa

SEQ ID NO: 1713139 - RNA, 19 nt, Artificial Sequence
  Description of Artificial Sequence: Synthetic oligonucleotide
  Sense strand starting at position 2738 of SEQ ID NO: 1561984
gaggcaagguuucuggaaa

SEQ ID NO: 1713140 - RNA, 19 nt, Artificial Sequence
  Description of Artificial Sequence: Synthetic oligonucleotide
  Antisense strand to SEQ ID NO: 1713139
uuuccagaaaccuugccuc

SEQ ID NO: 1713141 - RNA, 19 nt, Artificial Sequence
  Description of Artificial Sequence: Synthetic oligonucleotide
  Sense strand starting at position 2756 of SEQ ID NO: 1561984
aaguauuaacacggugaaa

SEQ ID NO: 1713142 - RNA, 19 nt, Artificial Sequence
  Description of Artificial Sequence: Synthetic oligonucleotide
  Antisense strand to SEQ ID NO: 1713141
uuucaccguguuaauacuu

SEQ ID NO: 1713143 - RNA, 19 nt, Artificial Sequence
  Description of Artificial Sequence: Synthetic oligonucleotide
  Sense strand starting at position 2758 of SEQ ID NO: 1561984
guauuaacacggugaaagu

SEQ ID NO: 1713144 - RNA, 19 nt, Artificial Sequence
  Description of Artificial Sequence: Synthetic oligonucleotide
  Antisense strand to SEQ ID NO: 1713143
acuuucaccguguuaauac

SEQ ID NO: 1713145 - RNA, 19 nt, Artificial Sequence
  Description of Artificial Sequence: Synthetic oligonucleotide
  Sense strand starting at position 2759 of SEQ ID NO: 1561984
uauuaacacggugaaagua

SEQ ID NO: 1713146 - RNA, 19 nt, Artificial Sequence
  Description of Artificial Sequence: Synthetic oligonucleotide
  Antisense strand to SEQ ID NO: 1713145
uacuuucaccguguuaaua

SEQ ID NO: 1713147 - RNA, 19 nt, Artificial Sequence
  Description of Artificial Sequence: Synthetic oligonucleotide
  Sense strand starting at position 2832 of SEQ ID NO: 1561984
gcucauuucugccuuuguu

SEQ ID NO: 1713148 - RNA, 19 nt, Artificial Sequence
  Description of Artificial Sequence: Synthetic oligonucleotide
  Antisense strand to SEQ ID NO: 1713147
aacaaaggcagaaaugagc

SEQ ID NO: 1713149 - RNA, 19 nt, Artificial Sequence
  Description of Artificial Sequence: Synthetic oligonucleotide
  Sense strand starting at position 2897 of SEQ ID NO: 1561984
ccauccguuugauuauaac

SEQ ID NO: 1713150 - RNA, 19 nt, Artificial Sequence
  Description of Artificial Sequence: Synthetic oligonucleotide
  Antisense strand to SEQ ID NO: 1713149
guuauaaucaaacggaugg

SEQ ID NO: 1713151 - RNA, 19 nt, Artificial Sequence
  Description of Artificial Sequence: Synthetic oligonucleotide
  Sense strand starting at position 3060 of SEQ ID NO: 1561984
auaugaaaugcugguaaau

SEQ ID NO: 1713152 - RNA, 19 nt, Artificial Sequence
  Description of Artificial Sequence: Synthetic oligonucleotide
  Antisense strand to SEQ ID NO: 1713151
auuuaccagcauuucauau

SEQ ID NO: 1713153 - RNA, 19 nt, Artificial Sequence
  Description of Artificial Sequence: Synthetic oligonucleotide
  Sense strand starting at position 3173 of SEQ ID NO: 1561984
ucuuuagugguuuacauaa

SEQ ID NO: 1713154 - RNA, 19 nt, Artificial Sequence
  Description of Artificial Sequence: Synthetic oligonucleotide
  Antisense strand to SEQ ID NO: 1713153
uuauguaaaccacuaaaga

SEQ ID NO: 1713155 - RNA, 19 nt, Artificial Sequence
  Description of Artificial Sequence: Synthetic oligonucleotide
  Sense strand starting at position 3286 of SEQ ID NO: 1561984
guaguaagcaaguggaaga

SEQ ID NO: 1713156 - RNA, 19 nt, Artificial Sequence
  Description of Artificial Sequence: Synthetic oligonucleotide
  Antisense strand to SEQ ID NO: 1713155
ucuuccacuugcuuacuac

SEQ ID NO: 1713157 - RNA, 19 nt, Artificial Sequence
  Description of Artificial Sequence: Synthetic oligonucleotide
  Sense strand starting at position 3520 of SEQ ID NO: 1561984
gcuaguacuagguauguau

SEQ ID NO: 1713158 - RNA, 19 nt, Artificial Sequence
  Description of Artificial Sequence: Synthetic oligonucleotide
  Antisense strand to SEQ ID NO: 1713157
auacauaccuaguacuagc

SEQ ID NO: 1713159 - RNA, 19 nt, Artificial Sequence
  Description of Artificial Sequence: Synthetic oligonucleotide
  Sense strand starting at position 3625 of SEQ ID NO: 1561984
agagccaaagucuauaauu

SEQ ID NO: 1713160 - RNA, 19 nt, Artificial Sequence
  Description of Artificial Sequence: Synthetic oligonucleotide
  Antisense strand to SEQ ID NO: 1713159
aauuauagacuuuggcucu

SEQ ID NO: 1713161 - RNA, 19 nt, Artificial Sequence
  Description of Artificial Sequence: Synthetic oligonucleotide
  Sense strand starting at position 3659 of SEQ ID NO: 1561984
aaacauacgcuguaaugua

SEQ ID NO: 1713162 - RNA, 19 nt, Artificial Sequence
  Description of Artificial Sequence: Synthetic oligonucleotide
  Antisense strand to SEQ ID NO: 1713161
uacauuacagcguauguuu

SEQ ID NO: 1713163 - RNA, 19 nt, Artificial Sequence
  Description of Artificial Sequence: Synthetic oligonucleotide
  Sense strand starting at position 3740 of SEQ ID NO: 1561984
ggccaacaggcauacuuau

SEQ ID NO: 1713164 - RNA, 19 nt, Artificial Sequence
  Description of Artificial Sequence: Synthetic oligonucleotide
  Antisense strand to SEQ ID NO: 1713163
auaaguaugccuguuggcc

SEQ ID NO: 1713165 - RNA, 19 nt, Artificial Sequence
  Description of Artificial Sequence: Synthetic oligonucleotide
  Sense strand starting at position 3953 of SEQ ID NO: 1561984
cccagagucucuuugaaga

SEQ ID NO: 1713166 - RNA, 19 nt, Artificial Sequence
  Description of Artificial Sequence: Synthetic oligonucleotide
  Antisense strand to SEQ ID NO: 1713165
ucuucaaagagacucuggg

SEQ ID NO: 1713167 - RNA, 19 nt, Artificial Sequence
  Description of Artificial Sequence: Synthetic oligonucleotide
  Sense strand starting at position 3966 of SEQ ID NO: 1561984
ugaagauguuguccugcaa

SEQ ID NO: 1713168 - RNA, 19 nt, Artificial Sequence
  Description of Artificial Sequence: Synthetic oligonucleotide
  Antisense strand to SEQ ID NO: 1713167
uugcaggacaacaucuuca

SEQ ID NO: 1713169 - RNA, 19 nt, Artificial Sequence
  Description of Artificial Sequence: Synthetic oligonucleotide
  Sense strand starting at position 581 of SEQ ID NO: 1561985
cuguccucccaggaugagu

SEQ ID NO: 1713170 - RNA, 19 nt, Artificial Sequence
  Description of Artificial Sequence: Synthetic oligonucleotide
  Antisense strand to SEQ ID NO: 1713169
acucauccugggaggacag

SEQ ID NO: 1713171 - RNA, 19 nt, Artificial Sequence
  Description of Artificial Sequence: Synthetic oligonucleotide
  Sense strand starting at position 592 of SEQ ID NO: 1561985
ggaugaguacccuggaguc

SEQ ID NO: 1713172 - RNA, 19 nt, Artificial Sequence
  Description of Artificial Sequence: Synthetic oligonucleotide
  Antisense strand to SEQ ID NO: 1713171
gacuccaggguacucaucc

SEQ ID NO: 1713173 - RNA, 19 nt, Artificial Sequence
  Description of Artificial Sequence: Synthetic oligonucleotide
  Sense strand starting at position 617 of SEQ ID NO: 1561985
ggagauccaagguguccaa

SEQ ID NO: 1713174 - RNA, 19 nt, Artificial Sequence
  Description of Artificial Sequence: Synthetic oligonucleotide
  Antisense strand to SEQ ID NO: 1713173
uuggacaccuuggaucucc

SEQ ID NO: 1713175 - RNA, 19 nt, Artificial Sequence
  Description of Artificial Sequence: Synthetic oligonucleotide
  Sense strand starting at position 673 of SEQ ID NO: 1561985
ucuggcaacuucuuggaau

SEQ ID NO: 1713176 - RNA, 19 nt, Artificial Sequence
  Description of Artificial Sequence: Synthetic oligonucleotide
  Antisense strand to SEQ ID NO: 1713175
auuccaagaaguugccaga

SEQ ID NO: 1713177 - RNA, 19 nt, Artificial Sequence
  Description of Artificial Sequence: Synthetic oligonucleotide
  Sense strand starting at position 754 of SEQ ID NO: 1561985
ucgacuucuccguagggaa

SEQ ID NO: 1713178 - RNA, 19 nt, Artificial Sequence
  Description of Artificial Sequence: Synthetic oligonucleotide
  Antisense strand to SEQ ID NO: 1713177
uucccuacggagaagucga

SEQ ID NO: 1713179 - RNA, 19 nt, Artificial Sequence
  Description of Artificial Sequence: Synthetic oligonucleotide
  Sense strand starting at position 756 of SEQ ID NO: 1561985
gacuucuccguagggaauc

SEQ ID NO: 1713180 - RNA, 19 nt, Artificial Sequence
  Description of Artificial Sequence: Synthetic oligonucleotide
  Antisense strand to SEQ ID NO: 1713179
gauucccuacggagaaguc

SEQ ID NO: 1713181 - RNA, 19 nt, Artificial Sequence
  Description of Artificial Sequence: Synthetic oligonucleotide
  Sense strand starting at position 938 of SEQ ID NO: 1561985
ccguuguucccggagagga

SEQ ID NO: 1713182 - RNA, 19 nt, Artificial Sequence
  Description of Artificial Sequence: Synthetic oligonucleotide
  Antisense strand to SEQ ID NO: 1713181
uccucuccgggaacaacgg

SEQ ID NO: 1713183 - RNA, 19 nt, Artificial Sequence
  Description of Artificial Sequence: Synthetic oligonucleotide
  Sense strand starting at position 1040 of SEQ ID NO: 1561985
cagccucgucuguaggaaa

SEQ ID NO: 1713184 - RNA, 19 nt, Artificial Sequence
  Description of Artificial Sequence: Synthetic oligonucleotide
  Antisense strand to SEQ ID NO: 1713183
uuuccuacagacgaggcug

SEQ ID NO: 1713185 - RNA, 19 nt, Artificial Sequence
  Description of Artificial Sequence: Synthetic oligonucleotide
  Sense strand starting at position 1051 of SEQ ID NO: 1561985
guaggaaacuauucuuucu

SEQ ID NO: 1713186 - RNA, 19 nt, Artificial Sequence
  Description of Artificial Sequence: Synthetic oligonucleotide
  Antisense strand to SEQ ID NO: 1713185
agaaagaauaguuuccuac

SEQ ID NO: 1713187 - RNA, 19 nt, Artificial Sequence
  Description of Artificial Sequence: Synthetic oligonucleotide
  Sense strand starting at position 1087 of SEQ ID NO: 1561985
gggagacuucccuggccaa

SEQ ID NO: 1713188 - RNA, 19 nt, Artificial Sequence
  Description of Artificial Sequence: Synthetic oligonucleotide
  Antisense strand to SEQ ID NO: 1713187
uuggccagggaagucuccc

SEQ ID NO: 1713189 - RNA, 19 nt, Artificial Sequence
  Description of Artificial Sequence: Synthetic oligonucleotide
  Sense strand starting at position 1090 of SEQ ID NO: 1561985
agacuucccuggccaagua

SEQ ID NO: 1713190 - RNA, 19 nt, Artificial Sequence
  Description of Artificial Sequence: Synthetic oligonucleotide
  Antisense strand to SEQ ID NO: 1713189
uacuuggccagggaagucu

SEQ ID NO: 1713191 - RNA, 19 nt, Artificial Sequence
  Description of Artificial Sequence: Synthetic oligonucleotide
  Sense strand starting at position 1204 of SEQ ID NO: 1561985
uccugugaaagguguuauc

SEQ ID NO: 1713192 - RNA, 19 nt, Artificial Sequence
  Description of Artificial Sequence: Synthetic oligonucleotide
  Antisense strand to SEQ ID NO: 1713191
gauaacaccuuucacagga

SEQ ID NO: 1713193 - RNA, 19 nt, Artificial Sequence
  Description of Artificial Sequence: Synthetic oligonucleotide
  Sense strand starting at position 1239 of SEQ ID NO: 1561985
gucaaagagcaguaaauua

SEQ ID NO: 1713194 - RNA, 19 nt, Artificial Sequence
  Description of Artificial Sequence: Synthetic oligonucleotide
  Antisense strand to SEQ ID NO: 1713193
uaauuuacugcucuuugac

SEQ ID NO: 1713195 - RNA, 19 nt, Artificial Sequence
  Description of Artificial Sequence: Synthetic oligonucleotide
  Sense strand starting at position 1297 of SEQ ID NO: 1561985
uuacauaaccggugaaaga

SEQ ID NO: 1713196 - RNA, 19 nt, Artificial Sequence
  Description of Artificial Sequence: Synthetic oligonucleotide
  Antisense strand to SEQ ID NO: 1713195
ucuuucaccgguuauguaa

SEQ ID NO: 1713197 - RNA, 19 nt, Artificial Sequence
  Description of Artificial Sequence: Synthetic oligonucleotide
  Sense strand starting at position 1357 of SEQ ID NO: 1561985
aucugcaucgcaugagaaa

SEQ ID NO: 1713198 - RNA, 19 nt, Artificial Sequence
  Description of Artificial Sequence: Synthetic oligonucleotide
  Antisense strand to SEQ ID NO: 1713197
uuucucaugcgaugcagau

SEQ ID NO: 1713199 - RNA, 19 nt, Artificial Sequence
  Description of Artificial Sequence: Synthetic oligonucleotide
  Sense strand starting at position 1388 of SEQ ID NO: 1561985
gcaaaucugcaaugagauu

SEQ ID NO: 1713200 - RNA, 19 nt, Artificial Sequence
  Description of Artificial Sequence: Synthetic oligonucleotide
  Antisense strand to SEQ ID NO: 1713199
aaucucauugcagauuugc

SEQ ID NO: 1713201 - RNA, 19 nt, Artificial Sequence
  Description of Artificial Sequence: Synthetic oligonucleotide
  Sense strand starting at position 1446 of SEQ ID NO: 1561985
augcgaaaugcaugggaga

SEQ ID NO: 1713202 - RNA, 19 nt, Artificial Sequence
  Description of Artificial Sequence: Synthetic oligonucleotide
  Antisense strand to SEQ ID NO: 1713201
ucucccaugcauuucgcau

SEQ ID NO: 1713203 - RNA, 19 nt, Artificial Sequence
  Description of Artificial Sequence: Synthetic oligonucleotide
  Sense strand starting at position 2266 of SEQ ID NO: 1561985
gaugucauuguuuguggga

SEQ ID NO: 1713204 - RNA, 19 nt, Artificial Sequence
  Description of Artificial Sequence: Synthetic oligonucleotide
  Antisense strand to SEQ ID NO: 1713203
ucccacaaacaaugacauc

SEQ ID NO: 1713205 - RNA, 19 nt, Artificial Sequence
  Description of Artificial Sequence: Synthetic oligonucleotide
  Sense strand starting at position 2267 of SEQ ID NO: 1561985
augucauuguuugugggaa

SEQ ID NO: 1713206 - RNA, 19 nt, Artificial Sequence
  Description of Artificial Sequence: Synthetic oligonucleotide
  Antisense strand to SEQ ID NO: 1713205
uucccacaaacaaugacau

SEQ ID NO: 1713207 - RNA, 19 nt, Artificial Sequence
  Description of Artificial Sequence: Synthetic oligonucleotide
  Sense strand starting at position 2374 of SEQ ID NO: 1561985
gcuuguuucccgcugcaaa

SEQ ID NO: 1713208 - RNA, 19 nt, Artificial Sequence
  Description of Artificial Sequence: Synthetic oligonucleotide
  Antisense strand to SEQ ID NO: 1713207
uuugcagcgggaaacaagc

SEQ ID NO: 1713209 - RNA, 19 nt, Artificial Sequence
  Description of Artificial Sequence: Synthetic oligonucleotide
  Sense strand starting at position 2945 of SEQ ID NO: 1561985
caacuaaguuauccgguua

SEQ ID NO: 1713210 - RNA, 19 nt, Artificial Sequence
  Description of Artificial Sequence: Synthetic oligonucleotide
  Antisense strand to SEQ ID NO: 1713209
uaaccggauaacuuaguug

SEQ ID NO: 1713211 - RNA, 19 nt, Artificial Sequence
  Description of Artificial Sequence: Synthetic oligonucleotide
  Sense strand starting at position 2950 of SEQ ID NO: 1561985
aaguuauccgguuaagaaa

SEQ ID NO: 1713212 - RNA, 19 nt, Artificial Sequence
  Description of Artificial Sequence: Synthetic oligonucleotide
  Antisense strand to SEQ ID NO: 1713211
uuucuuaaccggauaacuu

SEQ ID NO: 1713213 - RNA, 19 nt, Artificial Sequence
  Description of Artificial Sequence: Synthetic oligonucleotide
  Sense strand starting at position 3038 of SEQ ID NO: 1561985
acgaacguucuguauguaa

SEQ ID NO: 1713214 - RNA, 19 nt, Artificial Sequence
  Description of Artificial Sequence: Synthetic oligonucleotide
  Antisense strand to SEQ ID NO: 1713213
uuacauacagaacguucgu

SEQ ID NO: 1713215 - RNA, 19 nt, Artificial Sequence
  Description of Artificial Sequence: Synthetic oligonucleotide
  Sense strand starting at position 3042 of SEQ ID NO: 1561985
acguucuguauguaacgaa

SEQ ID NO: 1713216 - RNA, 19 nt, Artificial Sequence
  Description of Artificial Sequence: Synthetic oligonucleotide
  Antisense strand to SEQ ID NO: 1713215
uucguuacauacagaacgu

SEQ ID NO: 1713217 - RNA, 19 nt, Artificial Sequence
  Description of Artificial Sequence: Synthetic oligonucleotide
  Sense strand starting at position 3046 of SEQ ID NO: 1561985
ucuguauguaacgaaauga

SEQ ID NO: 1713218 - RNA, 19 nt, Artificial Sequence
  Description of Artificial Sequence: Synthetic oligonucleotide
  Antisense strand to SEQ ID NO: 1713217
ucauuucguuacauacaga

SEQ ID NO: 1713219 - RNA, 19 nt, Artificial Sequence
  Description of Artificial Sequence: Synthetic oligonucleotide
  Sense strand starting at position 3094 of SEQ ID NO: 1561985
uguuguguuaaagaguauu

SEQ ID NO: 1713220 - RNA, 19 nt, Artificial Sequence
  Description of Artificial Sequence: Synthetic oligonucleotide
  Antisense strand to SEQ ID NO: 1713219
aauacucuuuaacacaaca

SEQ ID NO: 1713221 - RNA, 19 nt, Artificial Sequence
  Description of Artificial Sequence: Synthetic oligonucleotide
  Sense strand starting at position 3122 of SEQ ID NO: 1561985
cucauuguaucauuuagcu

SEQ ID NO: 1713222 - RNA, 19 nt, Artificial Sequence
  Description of Artificial Sequence: Synthetic oligonucleotide
  Antisense strand to SEQ ID NO: 1713221
agcuaaaugauacaaugag

SEQ ID NO: 1713223 - RNA, 19 nt, Artificial Sequence
  Description of Artificial Sequence: Synthetic oligonucleotide
  Sense strand starting at position 3324 of SEQ ID NO: 1561985
gucagaaccuaugcaagaa

SEQ ID NO: 1713224 - RNA, 19 nt, Artificial Sequence
  Description of Artificial Sequence: Synthetic oligonucleotide
  Antisense strand to SEQ ID NO: 1713223
uucuugcauagguucugac

SEQ ID NO: 1713225 - RNA, 19 nt, Artificial Sequence
  Description of Artificial Sequence: Synthetic oligonucleotide
  Sense strand starting at position 3342 of SEQ ID NO: 1561985
aaagcaccaucgguagaaa

SEQ ID NO: 1713226 - RNA, 19 nt, Artificial Sequence
  Description of Artificial Sequence: Synthetic oligonucleotide
  Antisense strand to SEQ ID NO: 1713225
uuucuaccgauggugcuuu

SEQ ID NO: 1713227 - RNA, 19 nt, Artificial Sequence
  Description of Artificial Sequence: Synthetic oligonucleotide
  Sense strand starting at position 3343 of SEQ ID NO: 1561985
aagcaccaucgguagaaau

SEQ ID NO: 1713228 - RNA, 19 nt, Artificial Sequence
  Description of Artificial Sequence: Synthetic oligonucleotide
  Antisense strand to SEQ ID NO: 1713227
auuucuaccgauggugcuu

SEQ ID NO: 1713229 - RNA, 19 nt, Artificial Sequence
  Description of Artificial Sequence: Synthetic oligonucleotide
  Sense strand starting at position 3345 of SEQ ID NO: 1561985
gcaccaucgguagaaauga

SEQ ID NO: 1713230 - RNA, 19 nt, Artificial Sequence
  Description of Artificial Sequence: Synthetic oligonucleotide
  Antisense strand to SEQ ID NO: 1713229
ucauuucuaccgauggugc

SEQ ID NO: 1713231 - RNA, 19 nt, Artificial Sequence
  Description of Artificial Sequence: Synthetic oligonucleotide
  Sense strand starting at position 3495 of SEQ ID NO: 1561985
auuagaagucuaugugaca

SEQ ID NO: 1713232 - RNA, 19 nt, Artificial Sequence
  Description of Artificial Sequence: Synthetic oligonucleotide
  Antisense strand to SEQ ID NO: 1713231
ugucacauagacuucuaau

SEQ ID NO: 1713233 - RNA, 19 nt, Artificial Sequence
  Description of Artificial Sequence: Synthetic oligonucleotide
  Sense strand starting at position 3496 of SEQ ID NO: 1561985
uuagaagucuaugugacau

SEQ ID NO: 1713234 - RNA, 19 nt, Artificial Sequence
  Description of Artificial Sequence: Synthetic oligonucleotide
  Antisense strand to SEQ ID NO: 1713233
augucacauagacuucuaa

SEQ ID NO: 1713235 - RNA, 19 nt, Artificial Sequence
  Description of Artificial Sequence: Synthetic oligonucleotide
  Sense strand starting at position 3583 of SEQ ID NO: 1561985
gaggcaagguuucuggaaa

SEQ ID NO: 1713236 - RNA, 19 nt, Artificial Sequence
  Description of Artificial Sequence: Synthetic oligonucleotide
  Antisense strand to SEQ ID NO: 1713235
uuuccagaaaccuugccuc

SEQ ID NO: 1713237 - RNA, 19 nt, Artificial Sequence
  Description of Artificial Sequence: Synthetic oligonucleotide
  Sense strand starting at position 3601 of SEQ ID NO: 1561985
aaguauuaacacggugaaa

SEQ ID NO: 1713238 - RNA, 19 nt, Artificial Sequence
  Description of Artificial Sequence: Synthetic oligonucleotide
  Antisense strand to SEQ ID NO: 1713237
uuucaccguguuaauacuu

SEQ ID NO: 1713239 - RNA, 19 nt, Artificial Sequence
  Description of Artificial Sequence: Synthetic oligonucleotide
  Sense strand starting at position 3603 of SEQ ID NO: 1561985
guauuaacacggugaaagu

SEQ ID NO: 1713240 - RNA, 19 nt, Artificial Sequence
  Description of Artificial Sequence: Synthetic oligonucleotide
  Antisense strand to SEQ ID NO: 1713239
acuuucaccguguuaauac

SEQ ID NO: 1713241 - RNA, 19 nt, Artificial Sequence
  Description of Artificial Sequence: Synthetic oligonucleotide
  Sense strand starting at position 3604 of SEQ ID NO: 1561985
uauuaacacggugaaagua

SEQ ID NO: 1713242 - RNA, 19 nt, Artificial Sequence
  Description of Artificial Sequence: Synthetic oligonucleotide
  Antisense strand to SEQ ID NO: 1713241
uacuuucaccguguuaaua

SEQ ID NO: 1713243 - RNA, 19 nt, Artificial Sequence
  Description of Artificial Sequence: Synthetic oligonucleotide
  Sense strand starting at position 3677 of SEQ ID NO: 1561985
gcucauuucugccuuuguu

SEQ ID NO: 1713244 - RNA, 19 nt, Artificial Sequence
  Description of Artificial Sequence: Synthetic oligonucleotide
  Antisense strand to SEQ ID NO: 1713243
aacaaaggcagaaaugagc

SEQ ID NO: 1713245 - RNA, 19 nt, Artificial Sequence
  Description of Artificial Sequence: Synthetic oligonucleotide
  Sense strand starting at position 3742 of SEQ ID NO: 1561985
ccauccguuugauuauaac

SEQ ID NO: 1713246 - RNA, 19 nt, Artificial Sequence
  Description of Artificial Sequence: Synthetic oligonucleotide
  Antisense strand to SEQ ID NO: 1713245
guuauaaucaaacggaugg

SEQ ID NO: 1713247 - RNA, 19 nt, Artificial Sequence
  Description of Artificial Sequence: Synthetic oligonucleotide
  Sense strand starting at position 3905 of SEQ ID NO: 1561985
auaugaaaugcugguaaau

SEQ ID NO: 1713248 - RNA, 19 nt, Artificial Sequence
  Description of Artificial Sequence: Synthetic oligonucleotide
  Antisense strand to SEQ ID NO: 1713247
auuuaccagcauuucauau

SEQ ID NO: 1713249 - RNA, 19 nt, Artificial Sequence
  Description of Artificial Sequence: Synthetic oligonucleotide
  Sense strand starting at position 16 of SEQ ID NO: 1561986
cgaccugucacugaaguga

SEQ ID NO: 1713250 - RNA, 19 nt, Artificial Sequence
  Description of Artificial Sequence: Synthetic oligonucleotide
  Antisense strand to SEQ ID NO: 1713249
ucacuucagugacaggucg

SEQ ID NO: 1713251 - RNA, 19 nt, Artificial Sequence
  Description of Artificial Sequence: Synthetic oligonucleotide
  Sense strand starting at position 119 of SEQ ID NO: 1561986
ggcugaguuauacagcugu

SEQ ID NO: 1713252 - RNA, 19 nt, Artificial Sequence
  Description of Artificial Sequence: Synthetic oligonucleotide
  Antisense strand to SEQ ID NO: 1713251
acagcuguauaacucagcc

SEQ ID NO: 1713253 - RNA, 19 nt, Artificial Sequence
  Description of Artificial Sequence: Synthetic oligonucleotide
  Sense strand starting at position 270 of SEQ ID NO: 1561986
ucucgauucugauuccuuu

SEQ ID NO: 1713254 - RNA, 19 nt, Artificial Sequence
  Description of Artificial Sequence: Synthetic oligonucleotide
  Antisense strand to SEQ ID NO: 1713253
aaaggaaucagaaucgaga

SEQ ID NO: 1713255 - RNA, 19 nt, Artificial Sequence
  Description of Artificial Sequence: Synthetic oligonucleotide
  Sense strand starting at position 429 of SEQ ID NO: 1561986
auggauugaugugugaaug

SEQ ID NO: 1713256 - RNA, 19 nt, Artificial Sequence
  Description of Artificial Sequence: Synthetic oligonucleotide
  Antisense strand to SEQ ID NO: 1713255
cauucacacaucaauccau

SEQ ID NO: 1713257 - RNA, 19 nt, Artificial Sequence
  Description of Artificial Sequence: Synthetic oligonucleotide
  Sense strand starting at position 430 of SEQ ID NO: 1561986
uggauugaugugugaaugu

SEQ ID NO: 1713258 - RNA, 19 nt, Artificial Sequence
  Description of Artificial Sequence: Synthetic oligonucleotide
  Antisense strand to SEQ ID NO: 1713257
acauucacacaucaaucca

SEQ ID NO: 1713259 - RNA, 19 nt, Artificial Sequence
  Description of Artificial Sequence: Synthetic oligonucleotide
  Sense strand starting at position 439 of SEQ ID NO: 1561986
gugugaauguauuucuucu

SEQ ID NO: 1713260 - RNA, 19 nt, Artificial Sequence
  Description of Artificial Sequence: Synthetic oligonucleotide
  Antisense strand to SEQ ID NO: 1713259
agaagaaauacauucacac

SEQ ID NO: 1713261 - RNA, 19 nt, Artificial Sequence
  Description of Artificial Sequence: Synthetic oligonucleotide
  Sense strand starting at position 463 of SEQ ID NO: 1561986
ucagcuuccuggucuuaaa

SEQ ID NO: 1713262 - RNA, 19 nt, Artificial Sequence
  Description of Artificial Sequence: Synthetic oligonucleotide
  Antisense strand to SEQ ID NO: 1713261
uuuaagaccaggaagcuga

SEQ ID NO: 1713263 - RNA, 19 nt, Artificial Sequence
  Description of Artificial Sequence: Synthetic oligonucleotide
  Sense strand starting at position 545 of SEQ ID NO: 1561986
augggaaauucugcauuau

SEQ ID NO: 1713264 - RNA, 19 nt, Artificial Sequence
  Description of Artificial Sequence: Synthetic oligonucleotide
  Antisense strand to SEQ ID NO: 1713263
auaaugcagaauuucccau

SEQ ID NO: 1713265 - RNA, 19 nt, Artificial Sequence
  Description of Artificial Sequence: Synthetic oligonucleotide
  Sense strand starting at position 546 of SEQ ID NO: 1561986
ugggaaauucugcauuauc

SEQ ID NO: 1713266 - RNA, 19 nt, Artificial Sequence
  Description of Artificial Sequence: Synthetic oligonucleotide
  Antisense strand to SEQ ID NO: 1713265
gauaaugcagaauuuccca

SEQ ID NO: 1713267 - RNA, 19 nt, Artificial Sequence
  Description of Artificial Sequence: Synthetic oligonucleotide
  Sense strand starting at position 569 of SEQ ID NO: 1561986
cgaacuuuagggcauauca

SEQ ID NO: 1713268 - RNA, 19 nt, Artificial Sequence
  Description of Artificial Sequence: Synthetic oligonucleotide
  Antisense strand to SEQ ID NO: 1713267
ugauaugcccuaaaguucg

SEQ ID NO: 1713269 - RNA, 19 nt, Artificial Sequence
  Description of Artificial Sequence: Synthetic oligonucleotide
  Sense strand starting at position 625 of SEQ ID NO: 1561986
ugugauuaagcaggccuaa

SEQ ID NO: 1713270 - RNA, 19 nt, Artificial Sequence
  Description of Artificial Sequence: Synthetic oligonucleotide
  Antisense strand to SEQ ID NO: 1713269
uuaggccugcuuaaucaca

SEQ ID NO: 1713271 - RNA, 19 nt, Artificial Sequence
  Description of Artificial Sequence: Synthetic oligonucleotide
  Sense strand starting at position 677 of SEQ ID NO: 1561986
cugaacuaguaauaugaga

SEQ ID NO: 1713272 - RNA, 19 nt, Artificial Sequence
  Description of Artificial Sequence: Synthetic oligonucleotide
  Antisense strand to SEQ ID NO: 1713271
ucucauauuacuaguucag

SEQ ID NO: 1713273 - RNA, 19 nt, Artificial Sequence
  Description of Artificial Sequence: Synthetic oligonucleotide
  Sense strand starting at position 848 of SEQ ID NO: 1561986
gccucaagcuguguaauuu

SEQ ID NO: 1713274 - RNA, 19 nt, Artificial Sequence
  Description of Artificial Sequence: Synthetic oligonucleotide
  Antisense strand to SEQ ID NO: 1713273
aaauuacacagcuugaggc

SEQ ID NO: 1713275 - RNA, 19 nt, Artificial Sequence
  Description of Artificial Sequence: Synthetic oligonucleotide
  Sense strand starting at position 921 of SEQ ID NO: 1561986
agguuauugagccagcaau

SEQ ID NO: 1713276 - RNA, 19 nt, Artificial Sequence
  Description of Artificial Sequence: Synthetic oligonucleotide
  Antisense strand to SEQ ID NO: 1713275
auugcuggcucaauaaccu

SEQ ID NO: 1713277 - RNA, 19 nt, Artificial Sequence
  Description of Artificial Sequence: Synthetic oligonucleotide
  Sense strand starting at position 966 of SEQ ID NO: 1561986
cauaguaaguagcugauaa

SEQ ID NO: 1713278 - RNA, 19 nt, Artificial Sequence
  Description of Artificial Sequence: Synthetic oligonucleotide
  Antisense strand to SEQ ID NO: 1713277
uuaucagcuacuuacuaug

SEQ ID NO: 1713279 - RNA, 19 nt, Artificial Sequence
  Description of Artificial Sequence: Synthetic oligonucleotide
  Sense strand starting at position 968 of SEQ ID NO: 1561986
uaguaaguagcugauaaac

SEQ ID NO: 1713280 - RNA, 19 nt, Artificial Sequence
  Description of Artificial Sequence: Synthetic oligonucleotide
  Antisense strand to SEQ ID NO: 1713279
guuuaucagcuacuuacua

SEQ ID NO: 1713281 - RNA, 19 nt, Artificial Sequence
  Description of Artificial Sequence: Synthetic oligonucleotide
  Sense strand starting at position 1038 of SEQ ID NO: 1561986
acaggaucuugcccaaguu

SEQ ID NO: 1713282 - RNA, 19 nt, Artificial Sequence
  Description of Artificial Sequence: Synthetic oligonucleotide
  Antisense strand to SEQ ID NO: 1713281
aacuugggcaagauccugu

SEQ ID NO: 1713283 - RNA, 19 nt, Artificial Sequence
  Description of Artificial Sequence: Synthetic oligonucleotide
  Sense strand starting at position 1039 of SEQ ID NO: 1561986
caggaucuugcccaaguuu

SEQ ID NO: 1713284 - RNA, 19 nt, Artificial Sequence
  Description of Artificial Sequence: Synthetic oligonucleotide
  Antisense strand to SEQ ID NO: 1713283
aaacuugggcaagauccug

SEQ ID NO: 1713285 - RNA, 19 nt, Artificial Sequence
  Description of Artificial Sequence: Synthetic oligonucleotide
  Sense strand starting at position 1078 of SEQ ID NO: 1561986
ugacccuucuaacuggaga

SEQ ID NO: 1713286 - RNA, 19 nt, Artificial Sequence
  Description of Artificial Sequence: Synthetic oligonucleotide
  Antisense strand to SEQ ID NO: 1713285
ucuccaguuagaaggguca

SEQ ID NO: 1713287 - RNA, 19 nt, Artificial Sequence
  Description of Artificial Sequence: Synthetic oligonucleotide
  Sense strand starting at position 1210 of SEQ ID NO: 1561986
aucucuggucuggaccaua

SEQ ID NO: 1713288 - RNA, 19 nt, Artificial Sequence
  Description of Artificial Sequence: Synthetic oligonucleotide
  Antisense strand to SEQ ID NO: 1713287
uaugguccagaccagagau

SEQ ID NO: 1713289 - RNA, 19 nt, Artificial Sequence
  Description of Artificial Sequence: Synthetic oligonucleotide
  Sense strand starting at position 1277 of SEQ ID NO: 1561986
uucuguauuccacacagca

SEQ ID NO: 1713290 - RNA, 19 nt, Artificial Sequence
  Description of Artificial Sequence: Synthetic oligonucleotide
  Antisense strand to SEQ ID NO: 1713289
ugcuguguggaauacagaa

SEQ ID NO: 1713291 - RNA, 19 nt, Artificial Sequence
  Description of Artificial Sequence: Synthetic oligonucleotide
  Sense strand starting at position 2139 of SEQ ID NO: 1561986
augcuucuugagcacuuau

SEQ ID NO: 1713292 - RNA, 19 nt, Artificial Sequence
  Description of Artificial Sequence: Synthetic oligonucleotide
  Antisense strand to SEQ ID NO: 1713291
auaagugcucaagaagcau

SEQ ID NO: 1713293 - RNA, 19 nt, Artificial Sequence
  Description of Artificial Sequence: Synthetic oligonucleotide
  Sense strand starting at position 2281 of SEQ ID NO: 1561986
gcagguagugauuaggauc

SEQ ID NO: 1713294 - RNA, 19 nt, Artificial Sequence
  Description of Artificial Sequence: Synthetic oligonucleotide
  Antisense strand to SEQ ID NO: 1713293
gauccuaaucacuaccugc

SEQ ID NO: 1713295 - RNA, 19 nt, Artificial Sequence
  Description of Artificial Sequence: Synthetic oligonucleotide
  Sense strand starting at position 2350 of SEQ ID NO: 1561986
ggcagugugacuuauguuu

SEQ ID NO: 1713296 - RNA, 19 nt, Artificial Sequence
  Description of Artificial Sequence: Synthetic oligonucleotide
  Antisense strand to SEQ ID NO: 1713295
aaacauaagucacacugcc

SEQ ID NO: 1713297 - RNA, 19 nt, Artificial Sequence
  Description of Artificial Sequence: Synthetic oligonucleotide
  Sense strand starting at position 2355 of SEQ ID NO: 1561986
ugugacuuauguuuaaucu

SEQ ID NO: 1713298 - RNA, 19 nt, Artificial Sequence
  Description of Artificial Sequence: Synthetic oligonucleotide
  Antisense strand to SEQ ID NO: 1713297
agauuaaacauaagucaca

SEQ ID NO: 1713299 - RNA, 19 nt, Artificial Sequence
  Description of Artificial Sequence: Synthetic oligonucleotide
  Sense strand starting at position 2356 of SEQ ID NO: 1561986
gugacuuauguuuaaucuc

SEQ ID NO: 1713300 - RNA, 19 nt, Artificial Sequence
  Description of Artificial Sequence: Synthetic oligonucleotide
  Antisense strand to SEQ ID NO: 1713299
gagauuaaacauaagucac

SEQ ID NO: 1713301 - RNA, 19 nt, Artificial Sequence
  Description of Artificial Sequence: Synthetic oligonucleotide
  Sense strand starting at position 2837 of SEQ ID NO: 1561986
guagcuggccuauacauaa

SEQ ID NO: 1713302 - RNA, 19 nt, Artificial Sequence
  Description of Artificial Sequence: Synthetic oligonucleotide
  Antisense strand to SEQ ID NO: 1713301
uuauguauaggccagcuac

SEQ ID NO: 1713303 - RNA, 19 nt, Artificial Sequence
  Description of Artificial Sequence: Synthetic oligonucleotide
  Sense strand starting at position 3011 of SEQ ID NO: 1561986
gcccaaacuccucauugga

SEQ ID NO: 1713304 - RNA, 19 nt, Artificial Sequence
  Description of Artificial Sequence: Synthetic oligonucleotide
  Antisense strand to SEQ ID NO: 1713303
uccaaugaggaguuugggc

SEQ ID NO: 1713305 - RNA, 19 nt, Artificial Sequence
  Description of Artificial Sequence: Synthetic oligonucleotide
  Sense strand starting at position 3021 of SEQ ID NO: 1561986
cucauuggauagcuggaaa

SEQ ID NO: 1713306 - RNA, 19 nt, Artificial Sequence
  Description of Artificial Sequence: Synthetic oligonucleotide
  Antisense strand to SEQ ID NO: 1713305
uuuccagcuauccaaugag

SEQ ID NO: 1713307 - RNA, 19 nt, Artificial Sequence
  Description of Artificial Sequence: Synthetic oligonucleotide
  Sense strand starting at position 3258 of SEQ ID NO: 1561986
ccgauauuaucacucugau

SEQ ID NO: 1713308 - RNA, 19 nt, Artificial Sequence
  Description of Artificial Sequence: Synthetic oligonucleotide
  Antisense strand to SEQ ID NO: 1713307
aucagagugauaauaucgg

SEQ ID NO: 1713309 - RNA, 19 nt, Artificial Sequence
  Description of Artificial Sequence: Synthetic oligonucleotide
  Sense strand starting at position 3261 of SEQ ID NO: 1561986
auauuaucacucugauguc

SEQ ID NO: 1713310 - RNA, 19 nt, Artificial Sequence
  Description of Artificial Sequence: Synthetic oligonucleotide
  Antisense strand to SEQ ID NO: 1713309
gacaucagagugauaauau

SEQ ID NO: 1713311 - RNA, 19 nt, Artificial Sequence
  Description of Artificial Sequence: Synthetic oligonucleotide
  Sense strand starting at position 3349 of SEQ ID NO: 1561986
ugccuuacuugagugucaa

SEQ ID NO: 1713312 - RNA, 19 nt, Artificial Sequence
  Description of Artificial Sequence: Synthetic oligonucleotide
  Antisense strand to SEQ ID NO: 1713311
uugacacucaaguaaggca

SEQ ID NO: 1713313 - RNA, 19 nt, Artificial Sequence
  Description of Artificial Sequence: Synthetic oligonucleotide
  Sense strand starting at position 3350 of SEQ ID NO: 1561986
gccuuacuugagugucaaa

SEQ ID NO: 1713314 - RNA, 19 nt, Artificial Sequence
  Description of Artificial Sequence: Synthetic oligonucleotide
  Antisense strand to SEQ ID NO: 1713313
uuugacacucaaguaaggc

SEQ ID NO: 1713315 - RNA, 19 nt, Artificial Sequence
  Description of Artificial Sequence: Synthetic oligonucleotide
  Sense strand starting at position 3374 of SEQ ID NO: 1561986
cuuuguauggaugggauua

SEQ ID NO: 1713316 - RNA, 19 nt, Artificial Sequence
  Description of Artificial Sequence: Synthetic oligonucleotide
  Antisense strand to SEQ ID NO: 1713315
uaaucccauccauacaaag

SEQ ID NO: 1713317 - RNA, 19 nt, Artificial Sequence
  Description of Artificial Sequence: Synthetic oligonucleotide
  Sense strand starting at position 3375 of SEQ ID NO: 1561986
uuuguauggaugggauuau

SEQ ID NO: 1713318 - RNA, 19 nt, Artificial Sequence
  Description of Artificial Sequence: Synthetic oligonucleotide
  Antisense strand to SEQ ID NO: 1713317
auaaucccauccauacaaa

SEQ ID NO: 1713319 - RNA, 19 nt, Artificial Sequence
  Description of Artificial Sequence: Synthetic oligonucleotide
  Sense strand starting at position 3435 of SEQ ID NO: 1561986
ggcagugccucaucacaca

SEQ ID NO: 1713320 - RNA, 19 nt, Artificial Sequence
  Description of Artificial Sequence: Synthetic oligonucleotide
  Antisense strand to SEQ ID NO: 1713319
ugugugaugaggcacugcc

SEQ ID NO: 1713321 - RNA, 19 nt, Artificial Sequence
  Description of Artificial Sequence: Synthetic oligonucleotide
  Sense strand starting at position 3543 of SEQ ID NO: 1561986
cucuauguugccuagccau

SEQ ID NO: 1713322 - RNA, 19 nt, Artificial Sequence
  Description of Artificial Sequence: Synthetic oligonucleotide
  Antisense strand to SEQ ID NO: 1713321
auggcuaggcaacauagag

SEQ ID NO: 1713323 - RNA, 19 nt, Artificial Sequence
  Description of Artificial Sequence: Synthetic oligonucleotide
  Sense strand starting at position 3639 of SEQ ID NO: 1561986
aggauuccucacugagggu

SEQ ID NO: 1713324 - RNA, 19 nt, Artificial Sequence
  Description of Artificial Sequence: Synthetic oligonucleotide
  Antisense strand to SEQ ID NO: 1713323
acccucagugaggaauccu

SEQ ID NO: 1713325 - RNA, 19 nt, Artificial Sequence
  Description of Artificial Sequence: Synthetic oligonucleotide
  Sense strand starting at position 3656 of SEQ ID NO: 1561986
gugaauuugucgccaaacc

SEQ ID NO: 1713326 - RNA, 19 nt, Artificial Sequence
  Description of Artificial Sequence: Synthetic oligonucleotide
  Antisense strand to SEQ ID NO: 1713325
gguuuggcgacaaauucac

SEQ ID NO: 1713327 - RNA, 19 nt, Artificial Sequence
  Description of Artificial Sequence: Synthetic oligonucleotide
  Sense strand starting at position 3981 of SEQ ID NO: 1561986
uuuccaagacuuugaaaug

SEQ ID NO: 1713328 - RNA, 19 nt, Artificial Sequence
  Description of Artificial Sequence: Synthetic oligonucleotide
  Antisense strand to SEQ ID NO: 1713327
cauuucaaagucuuggaaa

SEQ ID NO: 1713329 - RNA, 19 nt, Artificial Sequence
  Description of Artificial Sequence: Synthetic oligonucleotide
  Sense strand starting at position 305 of SEQ ID NO: 1561987
ugacauaccgugugaauca

SEQ ID NO: 1713330 - RNA, 19 nt, Artificial Sequence
  Description of Artificial Sequence: Synthetic oligonucleotide
  Antisense strand to SEQ ID NO: 1713329
ugauucacacgguauguca

SEQ ID NO: 1713331 - RNA, 19 nt, Artificial Sequence
  Description of Artificial Sequence: Synthetic oligonucleotide
  Sense strand starting at position 440 of SEQ ID NO: 1561987
ucaaaucguccaggaauag

SEQ ID NO: 1713332 - RNA, 19 nt, Artificial Sequence
  Description of Artificial Sequence: Synthetic oligonucleotide
  Antisense strand to SEQ ID NO: 1713331
cuauuccuggacgauuuga

SEQ ID NO: 1713333 - RNA, 19 nt, Artificial Sequence
  Description of Artificial Sequence: Synthetic oligonucleotide
  Sense strand starting at position 778 of SEQ ID NO: 1561987
gucucagugaaacagguuu

SEQ ID NO: 1713334 - RNA, 19 nt, Artificial Sequence
  Description of Artificial Sequence: Synthetic oligonucleotide
  Antisense strand to SEQ ID NO: 1713333
aaaccuguuucacugagac

SEQ ID NO: 1713335 - RNA, 19 nt, Artificial Sequence
  Description of Artificial Sequence: Synthetic oligonucleotide
  Sense strand starting at position 784 of SEQ ID NO: 1561987
gugaaacagguuuaucacu

SEQ ID NO: 1713336 - RNA, 19 nt, Artificial Sequence
  Description of Artificial Sequence: Synthetic oligonucleotide
  Antisense strand to SEQ ID NO: 1713335
agugauaaaccuguuucac

SEQ ID NO: 1713337 - RNA, 19 nt, Artificial Sequence
  Description of Artificial Sequence: Synthetic oligonucleotide
  Sense strand starting at position 792 of SEQ ID NO: 1561987
gguuuaucacuuugucaga

SEQ ID NO: 1713338 - RNA, 19 nt, Artificial Sequence
  Description of Artificial Sequence: Synthetic oligonucleotide
  Antisense strand to SEQ ID NO: 1713337
ucugacaaagugauaaacc

SEQ ID NO: 1713339 - RNA, 19 nt, Artificial Sequence
  Description of Artificial Sequence: Synthetic oligonucleotide
  Sense strand starting at position 837 of SEQ ID NO: 1561987
ggcugagaugagugaauac

SEQ ID NO: 1713340 - RNA, 19 nt, Artificial Sequence
  Description of Artificial Sequence: Synthetic oligonucleotide
  Antisense strand to SEQ ID NO: 1713339
guauucacucaucucagcc

SEQ ID NO: 1713341 - RNA, 19 nt, Artificial Sequence
  Description of Artificial Sequence: Synthetic oligonucleotide
  Sense strand starting at position 860 of SEQ ID NO: 1561987
agagaaaucagcuguguaa

SEQ ID NO: 1713342 - RNA, 19 nt, Artificial Sequence
  Description of Artificial Sequence: Synthetic oligonucleotide
  Antisense strand to SEQ ID NO: 1713341
uuacacagcugauuucucu

SEQ ID NO: 1713343 - RNA, 19 nt, Artificial Sequence
  Description of Artificial Sequence: Synthetic oligonucleotide
  Sense strand starting at position 889 of SEQ ID NO: 1561987
ucaggcaugcauugaaauc

SEQ ID NO: 1713344 - RNA, 19 nt, Artificial Sequence
  Description of Artificial Sequence: Synthetic oligonucleotide
  Antisense strand to SEQ ID NO: 1713343
gauuucaaugcaugccuga

SEQ ID NO: 1713345 - RNA, 19 nt, Artificial Sequence
  Description of Artificial Sequence: Synthetic oligonucleotide
  Sense strand starting at position 925 of SEQ ID NO: 1561987
ucucucuuacaaugaugga

SEQ ID NO: 1713346 - RNA, 19 nt, Artificial Sequence
  Description of Artificial Sequence: Synthetic oligonucleotide
  Antisense strand to SEQ ID NO: 1713345
uccaucauuguaagagaga

SEQ ID NO: 1713347 - RNA, 19 nt, Artificial Sequence
  Description of Artificial Sequence: Synthetic oligonucleotide
  Sense strand starting at position 959 of SEQ ID NO: 1561987
acgacaauugugcaggaau

SEQ ID NO: 1713348 - RNA, 19 nt, Artificial Sequence
  Description of Artificial Sequence: Synthetic oligonucleotide
  Antisense strand to SEQ ID NO: 1713347
auuccugcacaauugucgu

SEQ ID NO: 1713349 - RNA, 19 nt, Artificial Sequence
  Description of Artificial Sequence: Synthetic oligonucleotide
  Sense strand starting at position 961 of SEQ ID NO: 1561987
gacaauugugcaggaauga

SEQ ID NO: 1713350 - RNA, 19 nt, Artificial Sequence
  Description of Artificial Sequence: Synthetic oligonucleotide
  Antisense strand to SEQ ID NO: 1713349
ucauuccugcacaauuguc

SEQ ID NO: 1713351 - RNA, 19 nt, Artificial Sequence
  Description of Artificial Sequence: Synthetic oligonucleotide
  Sense strand starting at position 1045 of SEQ ID NO: 1561987
ugaugcagcagaugaaaua

SEQ ID NO: 1713352 - RNA, 19 nt, Artificial Sequence
  Description of Artificial Sequence: Synthetic oligonucleotide
  Antisense strand to SEQ ID NO: 1713351
uauuucaucugcugcauca

SEQ ID NO: 1713353 - RNA, 19 nt, Artificial Sequence
  Description of Artificial Sequence: Synthetic oligonucleotide
  Sense strand starting at position 1169 of SEQ ID NO: 1561987
gugggaugaucagcgauau

SEQ ID NO: 1713354 - RNA, 19 nt, Artificial Sequence
  Description of Artificial Sequence: Synthetic oligonucleotide
  Antisense strand to SEQ ID NO: 1713353
auaucgcugaucaucccac

SEQ ID NO: 1713355 - RNA, 19 nt, Artificial Sequence
  Description of Artificial Sequence: Synthetic oligonucleotide
  Sense strand starting at position 1170 of SEQ ID NO: 1561987
ugggaugaucagcgauaug

SEQ ID NO: 1713356 - RNA, 19 nt, Artificial Sequence
  Description of Artificial Sequence: Synthetic oligonucleotide
  Antisense strand to SEQ ID NO: 1713355
cauaucgcugaucauccca

SEQ ID NO: 1713357 - RNA, 19 nt, Artificial Sequence
  Description of Artificial Sequence: Synthetic oligonucleotide
  Sense strand starting at position 1175 of SEQ ID NO: 1561987
ugaucagcgauaugauaau

SEQ ID NO: 1713358 - RNA, 19 nt, Artificial Sequence
  Description of Artificial Sequence: Synthetic oligonucleotide
  Antisense strand to SEQ ID NO: 1713357
auuaucauaucgcugauca

SEQ ID NO: 1713359 - RNA, 19 nt, Artificial Sequence
  Description of Artificial Sequence: Synthetic oligonucleotide
  Sense strand starting at position 1182 of SEQ ID NO: 1561987
cgauaugauaaucgaugga

SEQ ID NO: 1713360 - RNA, 19 nt, Artificial Sequence
  Description of Artificial Sequence: Synthetic oligonucleotide
  Antisense strand to SEQ ID NO: 1713359
uccaucgauuaucauaucg

SEQ ID NO: 1713361 - RNA, 19 nt, Artificial Sequence
  Description of Artificial Sequence: Synthetic oligonucleotide
  Sense strand starting at position 1292 of SEQ ID NO: 1561987
gcuauaucccauuggagac

SEQ ID NO: 1713362 - RNA, 19 nt, Artificial Sequence
  Description of Artificial Sequence: Synthetic oligonucleotide
  Antisense strand to SEQ ID NO: 1713361
gucuccaaugggauauagc

SEQ ID NO: 1713363 - RNA, 19 nt, Artificial Sequence
  Description of Artificial Sequence: Synthetic oligonucleotide
  Sense strand starting at position 1417 of SEQ ID NO: 1561987
agugguaggaucugggauu

SEQ ID NO: 1713364 - RNA, 19 nt, Artificial Sequence
  Description of Artificial Sequence: Synthetic oligonucleotide
  Antisense strand to SEQ ID NO: 1713363
aaucccagauccuaccacu

SEQ ID NO: 1713365 - RNA, 19 nt, Artificial Sequence
  Description of Artificial Sequence: Synthetic oligonucleotide
  Sense strand starting at position 1468 of SEQ ID NO: 1561987
acacguguagaugacagau

SEQ ID NO: 1713366 - RNA, 19 nt, Artificial Sequence
  Description of Artificial Sequence: Synthetic oligonucleotide
  Antisense strand to SEQ ID NO: 1713365
aucugucaucuacacgugu

SEQ ID NO: 1713367 - RNA, 19 nt, Artificial Sequence
  Description of Artificial Sequence: Synthetic oligonucleotide
  Sense strand starting at position 1617 of SEQ ID NO: 1561987
gccacauagccuugggaac

SEQ ID NO: 1713368 - RNA, 19 nt, Artificial Sequence
  Description of Artificial Sequence: Synthetic oligonucleotide
  Antisense strand to SEQ ID NO: 1713367
guucccaaggcuauguggc

SEQ ID NO: 1713369 - RNA, 19 nt, Artificial Sequence
  Description of Artificial Sequence: Synthetic oligonucleotide
  Sense strand starting at position 1729 of SEQ ID NO: 1561987
uugagaucccgucagugaa

SEQ ID NO: 1713370 - RNA, 19 nt, Artificial Sequence
  Description of Artificial Sequence: Synthetic oligonucleotide
  Antisense strand to SEQ ID NO: 1713369
uucacugacgggaucucaa

SEQ ID NO: 1713371 - RNA, 19 nt, Artificial Sequence
  Description of Artificial Sequence: Synthetic oligonucleotide
  Sense strand starting at position 2035 of SEQ ID NO: 1561987
ucagcaacccuuggaagaa

SEQ ID NO: 1713372 - RNA, 19 nt, Artificial Sequence
  Description of Artificial Sequence: Synthetic oligonucleotide
  Antisense strand to SEQ ID NO: 1713371
uucuuccaaggguugcuga

SEQ ID NO: 1713373 - RNA, 19 nt, Artificial Sequence
  Description of Artificial Sequence: Synthetic oligonucleotide
  Sense strand starting at position 2048 of SEQ ID NO: 1561987
gaagaaagaugauaaugaa

SEQ ID NO: 1713374 - RNA, 19 nt, Artificial Sequence
  Description of Artificial Sequence: Synthetic oligonucleotide
  Antisense strand to SEQ ID NO: 1713373
uucauuaucaucuuucuuc

SEQ ID NO: 1713375 - RNA, 19 nt, Artificial Sequence
  Description of Artificial Sequence: Synthetic oligonucleotide
  Sense strand starting at position 2150 of SEQ ID NO: 1561987
uuaaguaauguuuguagag

SEQ ID NO: 1713376 - RNA, 19 nt, Artificial Sequence
  Description of Artificial Sequence: Synthetic oligonucleotide
  Antisense strand to SEQ ID NO: 1713375
cucuacaaacauuacuuaa

SEQ ID NO: 1713377 - RNA, 19 nt, Artificial Sequence
  Description of Artificial Sequence: Synthetic oligonucleotide
  Sense strand starting at position 2301 of SEQ ID NO: 1561987
cuuugagacuugguacuuu

SEQ ID NO: 1713378 - RNA, 19 nt, Artificial Sequence
  Description of Artificial Sequence: Synthetic oligonucleotide
  Antisense strand to SEQ ID NO: 1713377
aaaguaccaagucucaaag

SEQ ID NO: 1713379 - RNA, 19 nt, Artificial Sequence
  Description of Artificial Sequence: Synthetic oligonucleotide
  Sense strand starting at position 2566 of SEQ ID NO: 1561987
gcacccugucagcaauuaa

SEQ ID NO: 1713380 - RNA, 19 nt, Artificial Sequence
  Description of Artificial Sequence: Synthetic oligonucleotide
  Antisense strand to SEQ ID NO: 1713379
uuaauugcugacagggugc

SEQ ID NO: 1713381 - RNA, 19 nt, Artificial Sequence
  Description of Artificial Sequence: Synthetic oligonucleotide
  Sense strand starting at position 2631 of SEQ ID NO: 1561987
uguacauguuaugugauaa

SEQ ID NO: 1713382 - RNA, 19 nt, Artificial Sequence
  Description of Artificial Sequence: Synthetic oligonucleotide
  Antisense strand to SEQ ID NO: 1713381
uuaucacauaacauguaca

SEQ ID NO: 1713383 - RNA, 19 nt, Artificial Sequence
  Description of Artificial Sequence: Synthetic oligonucleotide
  Sense strand starting at position 2632 of SEQ ID NO: 1561987
guacauguuaugugauaaa

SEQ ID NO: 1713384 - RNA, 19 nt, Artificial Sequence
  Description of Artificial Sequence: Synthetic oligonucleotide
  Antisense strand to SEQ ID NO: 1713383
uuuaucacauaacauguac

SEQ ID NO: 1713385 - RNA, 19 nt, Artificial Sequence
  Description of Artificial Sequence: Synthetic oligonucleotide
  Sense strand starting at position 2644 of SEQ ID NO: 1561987
ugauaaaugccagagccuu

SEQ ID NO: 1713386 - RNA, 19 nt, Artificial Sequence
  Description of Artificial Sequence: Synthetic oligonucleotide
  Antisense strand to SEQ ID NO: 1713385
aaggcucuggcauuuauca

SEQ ID NO: 1713387 - RNA, 19 nt, Artificial Sequence
  Description of Artificial Sequence: Synthetic oligonucleotide
  Sense strand starting at position 2660 of SEQ ID NO: 1561987
cuuggaucucauuaauguc

SEQ ID NO: 1713388 - RNA, 19 nt, Artificial Sequence
  Description of Artificial Sequence: Synthetic oligonucleotide
  Antisense strand to SEQ ID NO: 1713387
gacauuaaugagauccaag

SEQ ID NO: 1713389 - RNA, 19 nt, Artificial Sequence
  Description of Artificial Sequence: Synthetic oligonucleotide
  Sense strand starting at position 2693 of SEQ ID NO: 1561987
cucuaaguccagugagacu

SEQ ID NO: 1713390 - RNA, 19 nt, Artificial Sequence
  Description of Artificial Sequence: Synthetic oligonucleotide
  Antisense strand to SEQ ID NO: 1713389
agucucacuggacuuagag

SEQ ID NO: 1713391 - RNA, 19 nt, Artificial Sequence
  Description of Artificial Sequence: Synthetic oligonucleotide
  Sense strand starting at position 2702 of SEQ ID NO: 1561987
cagugagacucauugaccu

SEQ ID NO: 1713392 - RNA, 19 nt, Artificial Sequence
  Description of Artificial Sequence: Synthetic oligonucleotide
  Antisense strand to SEQ ID NO: 1713391
aggucaaugagucucacug

SEQ ID NO: 1713393 - RNA, 19 nt, Artificial Sequence
  Description of Artificial Sequence: Synthetic oligonucleotide
  Sense strand starting at position 3481 of SEQ ID NO: 1561987
gguguagugcuguuuguca

SEQ ID NO: 1713394 - RNA, 19 nt, Artificial Sequence
  Description of Artificial Sequence: Synthetic oligonucleotide
  Antisense strand to SEQ ID NO: 1713393
ugacaaacagcacuacacc

SEQ ID NO: 1713395 - RNA, 19 nt, Artificial Sequence
  Description of Artificial Sequence: Synthetic oligonucleotide
  Sense strand starting at position 3527 of SEQ ID NO: 1561987
augcguuuccaggagagug

SEQ ID NO: 1713396 - RNA, 19 nt, Artificial Sequence
  Description of Artificial Sequence: Synthetic oligonucleotide
  Antisense strand to SEQ ID NO: 1713395
cacucuccuggaaacgcau

SEQ ID NO: 1713397 - RNA, 19 nt, Artificial Sequence
  Description of Artificial Sequence: Synthetic oligonucleotide
  Sense strand starting at position 3578 of SEQ ID NO: 1561987
acagaagaguuagagaaag

SEQ ID NO: 1713398 - RNA, 19 nt, Artificial Sequence
  Description of Artificial Sequence: Synthetic oligonucleotide
  Antisense strand to SEQ ID NO: 1713397
cuuucucuaacucuucugu

SEQ ID NO: 1713399 - RNA, 19 nt, Artificial Sequence
  Description of Artificial Sequence: Synthetic oligonucleotide
  Sense strand starting at position 3842 of SEQ ID NO: 1561987
cugagacagucuucugauc

SEQ ID NO: 1713400 - RNA, 19 nt, Artificial Sequence
  Description of Artificial Sequence: Synthetic oligonucleotide
  Antisense strand to SEQ ID NO: 1713399
gaucagaagacugucucag

SEQ ID NO: 1713401 - RNA, 19 nt, Artificial Sequence
  Description of Artificial Sequence: Synthetic oligonucleotide
  Sense strand starting at position 3847 of SEQ ID NO: 1561987
acagucuucugaucacgga

SEQ ID NO: 1713402 - RNA, 19 nt, Artificial Sequence
  Description of Artificial Sequence: Synthetic oligonucleotide
  Antisense strand to SEQ ID NO: 1713401
uccgugaucagaagacugu

SEQ ID NO: 1713403 - RNA, 19 nt, Artificial Sequence
  Description of Artificial Sequence: Synthetic oligonucleotide
  Sense strand starting at position 3848 of SEQ ID NO: 1561987
cagucuucugaucacggaa

SEQ ID NO: 1713404 - RNA, 19 nt, Artificial Sequence
  Description of Artificial Sequence: Synthetic oligonucleotide
  Antisense strand to SEQ ID NO: 1713403
uuccgugaucagaagacug

SEQ ID NO: 1713405 - RNA, 19 nt, Artificial Sequence
  Description of Artificial Sequence: Synthetic oligonucleotide
  Sense strand starting at position 3975 of SEQ ID NO: 1561987
guguacauuugccugcaaa

SEQ ID NO: 1713406 - RNA, 19 nt, Artificial Sequence
  Description of Artificial Sequence: Synthetic oligonucleotide
  Antisense strand to SEQ ID NO: 1713405
uuugcaggcaaauguacac

SEQ ID NO: 1713407 - RNA, 19 nt, Artificial Sequence
  Description of Artificial Sequence: Synthetic oligonucleotide
  Sense strand starting at position 3976 of SEQ ID NO: 1561987
uguacauuugccugcaaac

SEQ ID NO: 1713408 - RNA, 19 nt, Artificial Sequence
  Description of Artificial Sequence: Synthetic oligonucleotide
  Antisense strand to SEQ ID NO: 1713407
guuugcaggcaaauguaca

SEQ ID NO: 1713409 - RNA, 19 nt, Artificial Sequence
  Description of Artificial Sequence: Synthetic oligonucleotide
  Sense strand starting at position 138 of SEQ ID NO: 1561988
gccacauagccuugggaac

SEQ ID NO: 1713410 - RNA, 19 nt, Artificial Sequence
  Description of Artificial Sequence: Synthetic oligonucleotide
  Antisense strand to SEQ ID NO: 1713409
guucccaaggcuauguggc

SEQ ID NO: 1713411 - RNA, 19 nt, Artificial Sequence
  Description of Artificial Sequence: Synthetic oligonucleotide
  Sense strand starting at position 250 of SEQ ID NO: 1561988
uugagaucccgucagugaa

SEQ ID NO: 1713412 - RNA, 19 nt, Artificial Sequence
  Description of Artificial Sequence: Synthetic oligonucleotide
  Antisense strand to SEQ ID NO: 1713411
uucacugacgggaucucaa

SEQ ID NO: 1713413 - RNA, 19 nt, Artificial Sequence
  Description of Artificial Sequence: Synthetic oligonucleotide
  Sense strand starting at position 536 of SEQ ID NO: 1561988
aaaggcaagccuuguauau

SEQ ID NO: 1713414 - RNA, 19 nt, Artificial Sequence
  Description of Artificial Sequence: Synthetic oligonucleotide
  Antisense strand to SEQ ID NO: 1713413
auauacaaggcuugccuuu

SEQ ID NO: 1713415 - RNA, 19 nt, Artificial Sequence
  Description of Artificial Sequence: Synthetic oligonucleotide
  Sense strand starting at position 556 of SEQ ID NO: 1561988
ucagcaacccuuggaagaa

SEQ ID NO: 1713416 - RNA, 19 nt, Artificial Sequence
  Description of Artificial Sequence: Synthetic oligonucleotide
  Antisense strand to SEQ ID NO: 1713415
uucuuccaaggguugcuga

SEQ ID NO: 1713417 - RNA, 19 nt, Artificial Sequence
  Description of Artificial Sequence: Synthetic oligonucleotide
  Sense strand starting at position 569 of SEQ ID NO: 1561988
gaagaaagaugauaaugaa

SEQ ID NO: 1713418 - RNA, 19 nt, Artificial Sequence
  Description of Artificial Sequence: Synthetic oligonucleotide
  Antisense strand to SEQ ID NO: 1713417
uucauuaucaucuuucuuc

SEQ ID NO: 1713419 - RNA, 19 nt, Artificial Sequence
  Description of Artificial Sequence: Synthetic oligonucleotide
  Sense strand starting at position 671 of SEQ ID NO: 1561988
uuaaguaauguuuguagag

SEQ ID NO: 1713420 - RNA, 19 nt, Artificial Sequence
  Description of Artificial Sequence: Synthetic oligonucleotide
  Antisense strand to SEQ ID NO: 1713419
cucuacaaacauuacuuaa

SEQ ID NO: 1713421 - RNA, 19 nt, Artificial Sequence
  Description of Artificial Sequence: Synthetic oligonucleotide
  Sense strand starting at position 751 of SEQ ID NO: 1561988
uggaguagucagcaggcuu

SEQ ID NO: 1713422 - RNA, 19 nt, Artificial Sequence
  Description of Artificial Sequence: Synthetic oligonucleotide
  Antisense strand to SEQ ID NO: 1713421
aagccugcugacuacucca

SEQ ID NO: 1713423 - RNA, 19 nt, Artificial Sequence
  Description of Artificial Sequence: Synthetic oligonucleotide
  Sense strand starting at position 822 of SEQ ID NO: 1561988
cuuugagacuugguacuuu

SEQ ID NO: 1713424 - RNA, 19 nt, Artificial Sequence
  Description of Artificial Sequence: Synthetic oligonucleotide
  Antisense strand to SEQ ID NO: 1713423
aaaguaccaagucucaaag

SEQ ID NO: 1713425 - RNA, 19 nt, Artificial Sequence
  Description of Artificial Sequence: Synthetic oligonucleotide
  Sense strand starting at position 907 of SEQ ID NO: 1561988
cuccucuggcuguaguuaa

SEQ ID NO: 1713426 - RNA, 19 nt, Artificial Sequence
  Description of Artificial Sequence: Synthetic oligonucleotide
  Antisense strand to SEQ ID NO: 1713425
uuaacuacagccagaggag

SEQ ID NO: 1713427 - RNA, 19 nt, Artificial Sequence
  Description of Artificial Sequence: Synthetic oligonucleotide
  Sense strand starting at position 1087 of SEQ ID NO: 1561988
gcacccugucagcaauuaa

SEQ ID NO: 1713428 - RNA, 19 nt, Artificial Sequence
  Description of Artificial Sequence: Synthetic oligonucleotide
  Antisense strand to SEQ ID NO: 1713427
uuaauugcugacagggugc

SEQ ID NO: 1713429 - RNA, 19 nt, Artificial Sequence
  Description of Artificial Sequence: Synthetic oligonucleotide
  Sense strand starting at position 1142 of SEQ ID NO: 1561988
cguacauugauguacaugu

SEQ ID NO: 1713430 - RNA, 19 nt, Artificial Sequence
  Description of Artificial Sequence: Synthetic oligonucleotide
  Antisense strand to SEQ ID NO: 1713429
acauguacaucaauguacg

SEQ ID NO: 1713431 - RNA, 19 nt, Artificial Sequence
  Description of Artificial Sequence: Synthetic oligonucleotide
  Sense strand starting at position 1152 of SEQ ID NO: 1561988
uguacauguuaugugauaa

SEQ ID NO: 1713432 - RNA, 19 nt, Artificial Sequence
  Description of Artificial Sequence: Synthetic oligonucleotide
  Antisense strand to SEQ ID NO: 1713431
uuaucacauaacauguaca

SEQ ID NO: 1713433 - RNA, 19 nt, Artificial Sequence
  Description of Artificial Sequence: Synthetic oligonucleotide
  Sense strand starting at position 1153 of SEQ ID NO: 1561988
guacauguuaugugauaaa

SEQ ID NO: 1713434 - RNA, 19 nt, Artificial Sequence
  Description of Artificial Sequence: Synthetic oligonucleotide
  Antisense strand to SEQ ID NO: 1713433
uuuaucacauaacauguac

SEQ ID NO: 1713435 - RNA, 19 nt, Artificial Sequence
  Description of Artificial Sequence: Synthetic oligonucleotide
  Sense strand starting at position 1165 of SEQ ID NO: 1561988
ugauaaaugccagagccuu

SEQ ID NO: 1713436 - RNA, 19 nt, Artificial Sequence
  Description of Artificial Sequence: Synthetic oligonucleotide
  Antisense strand to SEQ ID NO: 1713435
aaggcucuggcauuuauca

SEQ ID NO: 1713437 - RNA, 19 nt, Artificial Sequence
  Description of Artificial Sequence: Synthetic oligonucleotide
  Sense strand starting at position 1181 of SEQ ID NO: 1561988
cuuggaucucauuaauguc

SEQ ID NO: 1713438 - RNA, 19 nt, Artificial Sequence
  Description of Artificial Sequence: Synthetic oligonucleotide
  Antisense strand to SEQ ID NO: 1713437
gacauuaaugagauccaag

SEQ ID NO: 1713439 - RNA, 19 nt, Artificial Sequence
  Description of Artificial Sequence: Synthetic oligonucleotide
  Sense strand starting at position 1214 of SEQ ID NO: 1561988
cucuaaguccagugagacu

SEQ ID NO: 1713440 - RNA, 19 nt, Artificial Sequence
  Description of Artificial Sequence: Synthetic oligonucleotide
  Antisense strand to SEQ ID NO: 1713439
agucucacuggacuuagag

SEQ ID NO: 1713441 - RNA, 19 nt, Artificial Sequence
  Description of Artificial Sequence: Synthetic oligonucleotide
  Sense strand starting at position 1223 of SEQ ID NO: 1561988
cagugagacucauugaccu

SEQ ID NO: 1713442 - RNA, 19 nt, Artificial Sequence
  Description of Artificial Sequence: Synthetic oligonucleotide
  Antisense strand to SEQ ID NO: 1713441
aggucaaugagucucacug

SEQ ID NO: 1713443 - RNA, 19 nt, Artificial Sequence
  Description of Artificial Sequence: Synthetic oligonucleotide
  Sense strand starting at position 1490 of SEQ ID NO: 1561988
guaaccaccuuugcuagau

SEQ ID NO: 1713444 - RNA, 19 nt, Artificial Sequence
  Description of Artificial Sequence: Synthetic oligonucleotide
  Antisense strand to SEQ ID NO: 1713443
aucuagcaaaggugguuac

SEQ ID NO: 1713445 - RNA, 19 nt, Artificial Sequence
  Description of Artificial Sequence: Synthetic oligonucleotide
  Sense strand starting at position 2002 of SEQ ID NO: 1561988
gguguagugcuguuuguca

SEQ ID NO: 1713446 - RNA, 19 nt, Artificial Sequence
  Description of Artificial Sequence: Synthetic oligonucleotide
  Antisense strand to SEQ ID NO: 1713445
ugacaaacagcacuacacc

SEQ ID NO: 1713447 - RNA, 19 nt, Artificial Sequence
  Description of Artificial Sequence: Synthetic oligonucleotide
  Sense strand starting at position 2048 of SEQ ID NO: 1561988
augcguuuccaggagagug

SEQ ID NO: 1713448 - RNA, 19 nt, Artificial Sequence
  Description of Artificial Sequence: Synthetic oligonucleotide
  Antisense strand to SEQ ID NO: 1713447
cacucuccuggaaacgcau

SEQ ID NO: 1713449 - RNA, 19 nt, Artificial Sequence
  Description of Artificial Sequence: Synthetic oligonucleotide
  Sense strand starting at position 2099 of SEQ ID NO: 1561988
acagaagaguuagagaaag

SEQ ID NO: 1713450 - RNA, 19 nt, Artificial Sequence
  Description of Artificial Sequence: Synthetic oligonucleotide
  Antisense strand to SEQ ID NO: 1713449
cuuucucuaacucuucugu

SEQ ID NO: 1713451 - RNA, 19 nt, Artificial Sequence
  Description of Artificial Sequence: Synthetic oligonucleotide
  Sense strand starting at position 2363 of SEQ ID NO: 1561988
cugagacagucuucugauc

SEQ ID NO: 1713452 - RNA, 19 nt, Artificial Sequence
  Description of Artificial Sequence: Synthetic oligonucleotide
  Antisense strand to SEQ ID NO: 1713451
gaucagaagacugucucag

SEQ ID NO: 1713453 - RNA, 19 nt, Artificial Sequence
  Description of Artificial Sequence: Synthetic oligonucleotide
  Sense strand starting at position 2368 of SEQ ID NO: 1561988
acagucuucugaucacgga

SEQ ID NO: 1713454 - RNA, 19 nt, Artificial Sequence
  Description of Artificial Sequence: Synthetic oligonucleotide
  Antisense strand to SEQ ID NO: 1713453
uccgugaucagaagacugu

SEQ ID NO: 1713455 - RNA, 19 nt, Artificial Sequence
  Description of Artificial Sequence: Synthetic oligonucleotide
  Sense strand starting at position 2369 of SEQ ID NO: 1561988
cagucuucugaucacggaa

SEQ ID NO: 1713456 - RNA, 19 nt, Artificial Sequence
  Description of Artificial Sequence: Synthetic oligonucleotide
  Antisense strand to SEQ ID NO: 1713455
uuccgugaucagaagacug

SEQ ID NO: 1713457 - RNA, 19 nt, Artificial Sequence
  Description of Artificial Sequence: Synthetic oligonucleotide
  Sense strand starting at position 2496 of SEQ ID NO: 1561988
guguacauuugccugcaaa

SEQ ID NO: 1713458 - RNA, 19 nt, Artificial Sequence
  Description of Artificial Sequence: Synthetic oligonucleotide
  Antisense strand to SEQ ID NO: 1713457
uuugcaggcaaauguacac

SEQ ID NO: 1713459 - RNA, 19 nt, Artificial Sequence
  Description of Artificial Sequence: Synthetic oligonucleotide
  Sense strand starting at position 2497 of SEQ ID NO: 1561988
uguacauuugccugcaaac

SEQ ID NO: 1713460 - RNA, 19 nt, Artificial Sequence
  Description of Artificial Sequence: Synthetic oligonucleotide
  Antisense strand to SEQ ID NO: 1713459
guuugcaggcaaauguaca

SEQ ID NO: 1713461 - RNA, 19 nt, Artificial Sequence
  Description of Artificial Sequence: Synthetic oligonucleotide
  Sense strand starting at position 2514 of SEQ ID NO: 1561988
acggcauucggcucuggua

SEQ ID NO: 1713462 - RNA, 19 nt, Artificial Sequence
  Description of Artificial Sequence: Synthetic oligonucleotide
  Antisense strand to SEQ ID NO: 1713461
uaccagagccgaaugccgu

SEQ ID NO: 1713463 - RNA, 19 nt, Artificial Sequence
  Description of Artificial Sequence: Synthetic oligonucleotide
  Sense strand starting at position 2667 of SEQ ID NO: 1561988
ugcaauaugccucagcaca

SEQ ID NO: 1713464 - RNA, 19 nt, Artificial Sequence
  Description of Artificial Sequence: Synthetic oligonucleotide
  Antisense strand to SEQ ID NO: 1713463
ugugcugaggcauauugca

SEQ ID NO: 1713465 - RNA, 19 nt, Artificial Sequence
  Description of Artificial Sequence: Synthetic oligonucleotide
  Sense strand starting at position 2784 of SEQ ID NO: 1561988
acauaagggucuuugaguu

SEQ ID NO: 1713466 - RNA, 19 nt, Artificial Sequence
  Description of Artificial Sequence: Synthetic oligonucleotide
  Antisense strand to SEQ ID NO: 1713465
aacucaaagacccuuaugu

SEQ ID NO: 1713467 - RNA, 19 nt, Artificial Sequence
  Description of Artificial Sequence: Synthetic oligonucleotide
  Sense strand starting at position 2788 of SEQ ID NO: 1561988
aagggucuuugaguuugga

SEQ ID NO: 1713468 - RNA, 19 nt, Artificial Sequence
  Description of Artificial Sequence: Synthetic oligonucleotide
  Antisense strand to SEQ ID NO: 1713467
uccaaacucaaagacccuu

SEQ ID NO: 1713469 - RNA, 19 nt, Artificial Sequence
  Description of Artificial Sequence: Synthetic oligonucleotide
  Sense strand starting at position 2791 of SEQ ID NO: 1561988
ggucuuugaguuuggaaga

SEQ ID NO: 1713470 - RNA, 19 nt, Artificial Sequence
  Description of Artificial Sequence: Synthetic oligonucleotide
  Antisense strand to SEQ ID NO: 1713469
ucuuccaaacucaaagacc

SEQ ID NO: 1713471 - RNA, 19 nt, Artificial Sequence
  Description of Artificial Sequence: Synthetic oligonucleotide
  Sense strand starting at position 2822 of SEQ ID NO: 1561988
cuucucagucaauagcaga

SEQ ID NO: 1713472 - RNA, 19 nt, Artificial Sequence
  Description of Artificial Sequence: Synthetic oligonucleotide
  Antisense strand to SEQ ID NO: 1713471
ucugcuauugacugagaag

SEQ ID NO: 1713473 - RNA, 19 nt, Artificial Sequence
  Description of Artificial Sequence: Synthetic oligonucleotide
  Sense strand starting at position 2827 of SEQ ID NO: 1561988
cagucaauagcagacaguu

SEQ ID NO: 1713474 - RNA, 19 nt, Artificial Sequence
  Description of Artificial Sequence: Synthetic oligonucleotide
  Antisense strand to SEQ ID NO: 1713473
aacugucugcuauugacug

SEQ ID NO: 1713475 - RNA, 19 nt, Artificial Sequence
  Description of Artificial Sequence: Synthetic oligonucleotide
  Sense strand starting at position 2922 of SEQ ID NO: 1561988
uagguagaguugucagauu

SEQ ID NO: 1713476 - RNA, 19 nt, Artificial Sequence
  Description of Artificial Sequence: Synthetic oligonucleotide
  Antisense strand to SEQ ID NO: 1713475
aaucugacaacucuaccua

SEQ ID NO: 1713477 - RNA, 19 nt, Artificial Sequence
  Description of Artificial Sequence: Synthetic oligonucleotide
  Sense strand starting at position 2954 of SEQ ID NO: 1561988
cuagccaguugguuaauau

SEQ ID NO: 1713478 - RNA, 19 nt, Artificial Sequence
  Description of Artificial Sequence: Synthetic oligonucleotide
  Antisense strand to SEQ ID NO: 1713477
auauuaaccaacuggcuag

SEQ ID NO: 1713479 - RNA, 19 nt, Artificial Sequence
  Description of Artificial Sequence: Synthetic oligonucleotide
  Sense strand starting at position 2955 of SEQ ID NO: 1561988
uagccaguugguuaauauu

SEQ ID NO: 1713480 - RNA, 19 nt, Artificial Sequence
  Description of Artificial Sequence: Synthetic oligonucleotide
  Antisense strand to SEQ ID NO: 1713479
aauauuaaccaacuggcua

SEQ ID NO: 1713481 - RNA, 19 nt, Artificial Sequence
  Description of Artificial Sequence: Synthetic oligonucleotide
  Sense strand starting at position 3001 of SEQ ID NO: 1561988
agguuugagagcugagaaa

SEQ ID NO: 1713482 - RNA, 19 nt, Artificial Sequence
  Description of Artificial Sequence: Synthetic oligonucleotide
  Antisense strand to SEQ ID NO: 1713481
uuucucagcucucaaaccu

SEQ ID NO: 1713483 - RNA, 19 nt, Artificial Sequence
  Description of Artificial Sequence: Synthetic oligonucleotide
  Sense strand starting at position 3072 of SEQ ID NO: 1561988
guccaucuauccuccaagu

SEQ ID NO: 1713484 - RNA, 19 nt, Artificial Sequence
  Description of Artificial Sequence: Synthetic oligonucleotide
  Antisense strand to SEQ ID NO: 1713483
acuuggaggauagauggac

SEQ ID NO: 1713485 - RNA, 19 nt, Artificial Sequence
  Description of Artificial Sequence: Synthetic oligonucleotide
  Sense strand starting at position 3464 of SEQ ID NO: 1561988
ggcucuugugagggugaaa

SEQ ID NO: 1713486 - RNA, 19 nt, Artificial Sequence
  Description of Artificial Sequence: Synthetic oligonucleotide
  Antisense strand to SEQ ID NO: 1713485
uuucacccucacaagagcc

SEQ ID NO: 1713487 - RNA, 19 nt, Artificial Sequence
  Description of Artificial Sequence: Synthetic oligonucleotide
  Sense strand starting at position 3742 of SEQ ID NO: 1561988
ugcguccucagauggagaa

SEQ ID NO: 1713488 - RNA, 19 nt, Artificial Sequence
  Description of Artificial Sequence: Synthetic oligonucleotide
  Antisense strand to SEQ ID NO: 1713487
uucuccaucugaggacgca

SEQ ID NO: 1713489 - RNA, 19 nt, Artificial Sequence
  Description of Artificial Sequence: Synthetic oligonucleotide
  Sense strand starting at position 17 of SEQ ID NO: 1561989
acgacaauugugcaggaau

SEQ ID NO: 1713490 - RNA, 19 nt, Artificial Sequence
  Description of Artificial Sequence: Synthetic oligonucleotide
  Antisense strand to SEQ ID NO: 1713489
auuccugcacaauugucgu

SEQ ID NO: 1713491 - RNA, 19 nt, Artificial Sequence
  Description of Artificial Sequence: Synthetic oligonucleotide
  Sense strand starting at position 19 of SEQ ID NO: 1561989
gacaauugugcaggaauga

SEQ ID NO: 1713492 - RNA, 19 nt, Artificial Sequence
  Description of Artificial Sequence: Synthetic oligonucleotide
  Antisense strand to SEQ ID NO: 1713491
ucauuccugcacaauuguc

SEQ ID NO: 1713493 - RNA, 19 nt, Artificial Sequence
  Description of Artificial Sequence: Synthetic oligonucleotide
  Sense strand starting at position 103 of SEQ ID NO: 1561989
ugaugcagcagaugaaaua

SEQ ID NO: 1713494 - RNA, 19 nt, Artificial Sequence
  Description of Artificial Sequence: Synthetic oligonucleotide
  Antisense strand to SEQ ID NO: 1713493
uauuucaucugcugcauca

SEQ ID NO: 1713495 - RNA, 19 nt, Artificial Sequence
  Description of Artificial Sequence: Synthetic oligonucleotide
  Sense strand starting at position 227 of SEQ ID NO: 1561989
gugggaugaucagcgauau

SEQ ID NO: 1713496 - RNA, 19 nt, Artificial Sequence
  Description of Artificial Sequence: Synthetic oligonucleotide
  Antisense strand to SEQ ID NO: 1713495
auaucgcugaucaucccac

SEQ ID NO: 1713497 - RNA, 19 nt, Artificial Sequence
  Description of Artificial Sequence: Synthetic oligonucleotide
  Sense strand starting at position 228 of SEQ ID NO: 1561989
ugggaugaucagcgauaug

SEQ ID NO: 1713498 - RNA, 19 nt, Artificial Sequence
  Description of Artificial Sequence: Synthetic oligonucleotide
  Antisense strand to SEQ ID NO: 1713497
cauaucgcugaucauccca

SEQ ID NO: 1713499 - RNA, 19 nt, Artificial Sequence
  Description of Artificial Sequence: Synthetic oligonucleotide
  Sense strand starting at position 233 of SEQ ID NO: 1561989
ugaucagcgauaugauaau

SEQ ID NO: 1713500 - RNA, 19 nt, Artificial Sequence
  Description of Artificial Sequence: Synthetic oligonucleotide
  Antisense strand to SEQ ID NO: 1713499
auuaucauaucgcugauca

SEQ ID NO: 1713501 - RNA, 19 nt, Artificial Sequence
  Description of Artificial Sequence: Synthetic oligonucleotide
  Sense strand starting at position 240 of SEQ ID NO: 1561989
cgauaugauaaucgaugga

SEQ ID NO: 1713502 - RNA, 19 nt, Artificial Sequence
  Description of Artificial Sequence: Synthetic oligonucleotide
  Antisense strand to SEQ ID NO: 1713501
uccaucgauuaucauaucg

SEQ ID NO: 1713503 - RNA, 19 nt, Artificial Sequence
  Description of Artificial Sequence: Synthetic oligonucleotide
  Sense strand starting at position 350 of SEQ ID NO: 1561989
gcuauaucccauuggagac

SEQ ID NO: 1713504 - RNA, 19 nt, Artificial Sequence
  Description of Artificial Sequence: Synthetic oligonucleotide
  Antisense strand to SEQ ID NO: 1713503
gucuccaaugggauauagc

SEQ ID NO: 1713505 - RNA, 19 nt, Artificial Sequence
  Description of Artificial Sequence: Synthetic oligonucleotide
  Sense strand starting at position 475 of SEQ ID NO: 1561989
agugguaggaucugggauu

SEQ ID NO: 1713506 - RNA, 19 nt, Artificial Sequence
  Description of Artificial Sequence: Synthetic oligonucleotide
  Antisense strand to SEQ ID NO: 1713505
aaucccagauccuaccacu

SEQ ID NO: 1713507 - RNA, 19 nt, Artificial Sequence
  Description of Artificial Sequence: Synthetic oligonucleotide
  Sense strand starting at position 526 of SEQ ID NO: 1561989
acacguguagaugacagau

SEQ ID NO: 1713508 - RNA, 19 nt, Artificial Sequence
  Description of Artificial Sequence: Synthetic oligonucleotide
  Antisense strand to SEQ ID NO: 1713507
aucugucaucuacacgugu

SEQ ID NO: 1713509 - RNA, 19 nt, Artificial Sequence
  Description of Artificial Sequence: Synthetic oligonucleotide
  Sense strand starting at position 675 of SEQ ID NO: 1561989
gccacauagccuugggaac

SEQ ID NO: 1713510 - RNA, 19 nt, Artificial Sequence
  Description of Artificial Sequence: Synthetic oligonucleotide
  Antisense strand to SEQ ID NO: 1713509
guucccaaggcuauguggc

SEQ ID NO: 1713511 - RNA, 19 nt, Artificial Sequence
  Description of Artificial Sequence: Synthetic oligonucleotide
  Sense strand starting at position 787 of SEQ ID NO: 1561989
uugagaucccgucagugaa

SEQ ID NO: 1713512 - RNA, 19 nt, Artificial Sequence
  Description of Artificial Sequence: Synthetic oligonucleotide
  Antisense strand to SEQ ID NO: 1713511
uucacugacgggaucucaa

SEQ ID NO: 1713513 - RNA, 19 nt, Artificial Sequence
  Description of Artificial Sequence: Synthetic oligonucleotide
  Sense strand starting at position 1093 of SEQ ID NO: 1561989
ucagcaacccuuggaagaa

SEQ ID NO: 1713514 - RNA, 19 nt, Artificial Sequence
  Description of Artificial Sequence: Synthetic oligonucleotide
  Antisense strand to SEQ ID NO: 1713513
uucuuccaaggguugcuga

SEQ ID NO: 1713515 - RNA, 19 nt, Artificial Sequence
  Description of Artificial Sequence: Synthetic oligonucleotide
  Sense strand starting at position 1106 of SEQ ID NO: 1561989
gaagaaagaugauaaugaa

SEQ ID NO: 1713516 - RNA, 19 nt, Artificial Sequence
  Description of Artificial Sequence: Synthetic oligonucleotide
  Antisense strand to SEQ ID NO: 1713515
uucauuaucaucuuucuuc

SEQ ID NO: 1713517 - RNA, 19 nt, Artificial Sequence
  Description of Artificial Sequence: Synthetic oligonucleotide
  Sense strand starting at position 1208 of SEQ ID NO: 1561989
uuaaguaauguuuguagag

SEQ ID NO: 1713518 - RNA, 19 nt, Artificial Sequence
  Description of Artificial Sequence: Synthetic oligonucleotide
  Antisense strand to SEQ ID NO: 1713517
cucuacaaacauuacuuaa

SEQ ID NO: 1713519 - RNA, 19 nt, Artificial Sequence
  Description of Artificial Sequence: Synthetic oligonucleotide
  Sense strand starting at position 1359 of SEQ ID NO: 1561989
cuuugagacuugguacuuu

SEQ ID NO: 1713520 - RNA, 19 nt, Artificial Sequence
  Description of Artificial Sequence: Synthetic oligonucleotide
  Antisense strand to SEQ ID NO: 1713519
aaaguaccaagucucaaag

SEQ ID NO: 1713521 - RNA, 19 nt, Artificial Sequence
  Description of Artificial Sequence: Synthetic oligonucleotide
  Sense strand starting at position 1624 of SEQ ID NO: 1561989
gcacccugucagcaauuaa

SEQ ID NO: 1713522 - RNA, 19 nt, Artificial Sequence
  Description of Artificial Sequence: Synthetic oligonucleotide
  Antisense strand to SEQ ID NO: 1713521
uuaauugcugacagggugc

SEQ ID NO: 1713523 - RNA, 19 nt, Artificial Sequence
  Description of Artificial Sequence: Synthetic oligonucleotide
  Sense strand starting at position 1689 of SEQ ID NO: 1561989
uguacauguuaugugauaa

SEQ ID NO: 1713524 - RNA, 19 nt, Artificial Sequence
  Description of Artificial Sequence: Synthetic oligonucleotide
  Antisense strand to SEQ ID NO: 1713523
uuaucacauaacauguaca

SEQ ID NO: 1713525 - RNA, 19 nt, Artificial Sequence
  Description of Artificial Sequence: Synthetic oligonucleotide
  Sense strand starting at position 1690 of SEQ ID NO: 1561989
guacauguuaugugauaaa

SEQ ID NO: 1713526 - RNA, 19 nt, Artificial Sequence
  Description of Artificial Sequence: Synthetic oligonucleotide
  Antisense strand to SEQ ID NO: 1713525
uuuaucacauaacauguac

SEQ ID NO: 1713527 - RNA, 19 nt, Artificial Sequence
  Description of Artificial Sequence: Synthetic oligonucleotide
  Sense strand starting at position 1702 of SEQ ID NO: 1561989
ugauaaaugccagagccuu

SEQ ID NO: 1713528 - RNA, 19 nt, Artificial Sequence
  Description of Artificial Sequence: Synthetic oligonucleotide
  Antisense strand to SEQ ID NO: 1713527
aaggcucuggcauuuauca

SEQ ID NO: 1713529 - RNA, 19 nt, Artificial Sequence
  Description of Artificial Sequence: Synthetic oligonucleotide
  Sense strand starting at position 1718 of SEQ ID NO: 1561989
cuuggaucucauuaauguc

SEQ ID NO: 1713530 - RNA, 19 nt, Artificial Sequence
  Description of Artificial Sequence: Synthetic oligonucleotide
  Antisense strand to SEQ ID NO: 1713529
gacauuaaugagauccaag

SEQ ID NO: 1713531 - RNA, 19 nt, Artificial Sequence
  Description of Artificial Sequence: Synthetic oligonucleotide
  Sense strand starting at position 1751 of SEQ ID NO: 1561989
cucuaaguccagugagacu

SEQ ID NO: 1713532 - RNA, 19 nt, Artificial Sequence
  Description of Artificial Sequence: Synthetic oligonucleotide
  Antisense strand to SEQ ID NO: 1713531
agucucacuggacuuagag

SEQ ID NO: 1713533 - RNA, 19 nt, Artificial Sequence
  Description of Artificial Sequence: Synthetic oligonucleotide
  Sense strand starting at position 1760 of SEQ ID NO: 1561989
cagugagacucauugaccu

SEQ ID NO: 1713534 - RNA, 19 nt, Artificial Sequence
  Description of Artificial Sequence: Synthetic oligonucleotide
  Antisense strand to SEQ ID NO: 1713533
aggucaaugagucucacug

SEQ ID NO: 1713535 - RNA, 19 nt, Artificial Sequence
  Description of Artificial Sequence: Synthetic oligonucleotide
  Sense strand starting at position 2539 of SEQ ID NO: 1561989
gguguagugcuguuuguca

SEQ ID NO: 1713536 - RNA, 19 nt, Artificial Sequence
  Description of Artificial Sequence: Synthetic oligonucleotide
  Antisense strand to SEQ ID NO: 1713535
ugacaaacagcacuacacc

SEQ ID NO: 1713537 - RNA, 19 nt, Artificial Sequence
  Description of Artificial Sequence: Synthetic oligonucleotide
  Sense strand starting at position 2585 of SEQ ID NO: 1561989
augcguuuccaggagagug

SEQ ID NO: 1713538 - RNA, 19 nt, Artificial Sequence
  Description of Artificial Sequence: Synthetic oligonucleotide
  Antisense strand to SEQ ID NO: 1713537
cacucuccuggaaacgcau

SEQ ID NO: 1713539 - RNA, 19 nt, Artificial Sequence
  Description of Artificial Sequence: Synthetic oligonucleotide
  Sense strand starting at position 2636 of SEQ ID NO: 1561989
acagaagaguuagagaaag

SEQ ID NO: 1713540 - RNA, 19 nt, Artificial Sequence
  Description of Artificial Sequence: Synthetic oligonucleotide
  Antisense strand to SEQ ID NO: 1713539
cuuucucuaacucuucugu

SEQ ID NO: 1713541 - RNA, 19 nt, Artificial Sequence
  Description of Artificial Sequence: Synthetic oligonucleotide
  Sense strand starting at position 2900 of SEQ ID NO: 1561989
cugagacagucuucugauc

SEQ ID NO: 1713542 - RNA, 19 nt, Artificial Sequence
  Description of Artificial Sequence: Synthetic oligonucleotide
  Antisense strand to SEQ ID NO: 1713541
gaucagaagacugucucag

SEQ ID NO: 1713543 - RNA, 19 nt, Artificial Sequence
  Description of Artificial Sequence: Synthetic oligonucleotide
  Sense strand starting at position 2905 of SEQ ID NO: 1561989
acagucuucugaucacgga

SEQ ID NO: 1713544 - RNA, 19 nt, Artificial Sequence
  Description of Artificial Sequence: Synthetic oligonucleotide
  Antisense strand to SEQ ID NO: 1713543
uccgugaucagaagacugu

SEQ ID NO: 1713545 - RNA, 19 nt, Artificial Sequence
  Description of Artificial Sequence: Synthetic oligonucleotide
  Sense strand starting at position 2906 of SEQ ID NO: 1561989
cagucuucugaucacggaa

SEQ ID NO: 1713546 - RNA, 19 nt, Artificial Sequence
  Description of Artificial Sequence: Synthetic oligonucleotide
  Antisense strand to SEQ ID NO: 1713545
uuccgugaucagaagacug

SEQ ID NO: 1713547 - RNA, 19 nt, Artificial Sequence
  Description of Artificial Sequence: Synthetic oligonucleotide
  Sense strand starting at position 3033 of SEQ ID NO: 1561989
guguacauuugccugcaaa

SEQ ID NO: 1713548 - RNA, 19 nt, Artificial Sequence
  Description of Artificial Sequence: Synthetic oligonucleotide
  Antisense strand to SEQ ID NO: 1713547
uuugcaggcaaauguacac

SEQ ID NO: 1713549 - RNA, 19 nt, Artificial Sequence
  Description of Artificial Sequence: Synthetic oligonucleotide
  Sense strand starting at position 3034 of SEQ ID NO: 1561989
uguacauuugccugcaaac

SEQ ID NO: 1713550 - RNA, 19 nt, Artificial Sequence
  Description of Artificial Sequence: Synthetic oligonucleotide
  Antisense strand to SEQ ID NO: 1713549
guuugcaggcaaauguaca

SEQ ID NO: 1713551 - RNA, 19 nt, Artificial Sequence
  Description of Artificial Sequence: Synthetic oligonucleotide
  Sense strand starting at position 3051 of SEQ ID NO: 1561989
acggcauucggcucuggua

SEQ ID NO: 1713552 - RNA, 19 nt, Artificial Sequence
  Description of Artificial Sequence: Synthetic oligonucleotide
  Antisense strand to SEQ ID NO: 1713551
uaccagagccgaaugccgu

SEQ ID NO: 1713553 - RNA, 19 nt, Artificial Sequence
  Description of Artificial Sequence: Synthetic oligonucleotide
  Sense strand starting at position 3321 of SEQ ID NO: 1561989
acauaagggucuuugaguu

SEQ ID NO: 1713554 - RNA, 19 nt, Artificial Sequence
  Description of Artificial Sequence: Synthetic oligonucleotide
  Antisense strand to SEQ ID NO: 1713553
aacucaaagacccuuaugu

SEQ ID NO: 1713555 - RNA, 19 nt, Artificial Sequence
  Description of Artificial Sequence: Synthetic oligonucleotide
  Sense strand starting at position 3325 of SEQ ID NO: 1561989
aagggucuuugaguuugga

SEQ ID NO: 1713556 - RNA, 19 nt, Artificial Sequence
  Description of Artificial Sequence: Synthetic oligonucleotide
  Antisense strand to SEQ ID NO: 1713555
uccaaacucaaagacccuu

SEQ ID NO: 1713557 - RNA, 19 nt, Artificial Sequence
  Description of Artificial Sequence: Synthetic oligonucleotide
  Sense strand starting at position 3328 of SEQ ID NO: 1561989
ggucuuugaguuuggaaga

SEQ ID NO: 1713558 - RNA, 19 nt, Artificial Sequence
  Description of Artificial Sequence: Synthetic oligonucleotide
  Antisense strand to SEQ ID NO: 1713557
ucuuccaaacucaaagacc

SEQ ID NO: 1713559 - RNA, 19 nt, Artificial Sequence
  Description of Artificial Sequence: Synthetic oligonucleotide
  Sense strand starting at position 3359 of SEQ ID NO: 1561989
cuucucagucaauagcaga

SEQ ID NO: 1713560 - RNA, 19 nt, Artificial Sequence
  Description of Artificial Sequence: Synthetic oligonucleotide
  Antisense strand to SEQ ID NO: 1713559
ucugcuauugacugagaag

SEQ ID NO: 1713561 - RNA, 19 nt, Artificial Sequence
  Description of Artificial Sequence: Synthetic oligonucleotide
  Sense strand starting at position 3364 of SEQ ID NO: 1561989
cagucaauagcagacaguu

SEQ ID NO: 1713562 - RNA, 19 nt, Artificial Sequence
  Description of Artificial Sequence: Synthetic oligonucleotide
  Antisense strand to SEQ ID NO: 1713561
aacugucugcuauugacug

SEQ ID NO: 1713563 - RNA, 19 nt, Artificial Sequence
  Description of Artificial Sequence: Synthetic oligonucleotide
  Sense strand starting at position 3459 of SEQ ID NO: 1561989
uagguagaguugucagauu

SEQ ID NO: 1713564 - RNA, 19 nt, Artificial Sequence
  Description of Artificial Sequence: Synthetic oligonucleotide
  Antisense strand to SEQ ID NO: 1713563
aaucugacaacucuaccua

SEQ ID NO: 1713565 - RNA, 19 nt, Artificial Sequence
  Description of Artificial Sequence: Synthetic oligonucleotide
  Sense strand starting at position 3492 of SEQ ID NO: 1561989
uagccaguugguuaauauu

SEQ ID NO: 1713566 - RNA, 19 nt, Artificial Sequence
  Description of Artificial Sequence: Synthetic oligonucleotide
  Antisense strand to SEQ ID NO: 1713565
aauauuaaccaacuggcua

SEQ ID NO: 1713567 - RNA, 19 nt, Artificial Sequence
  Description of Artificial Sequence: Synthetic oligonucleotide
  Sense strand starting at position 3538 of SEQ ID NO: 1561989
agguuugagagcugagaaa

SEQ ID NO: 1713568 - RNA, 19 nt, Artificial Sequence
  Description of Artificial Sequence: Synthetic oligonucleotide
  Antisense strand to SEQ ID NO: 1713567
uuucucagcucucaaaccu

SEQ ID NO: 1713569 - RNA, 19 nt, Artificial Sequence
  Description of Artificial Sequence: Synthetic oligonucleotide
  Sense strand starting at position 21 of SEQ ID NO: 1561990
gugguagacggucaggaau

SEQ ID NO: 1713570 - RNA, 19 nt, Artificial Sequence
  Description of Artificial Sequence: Synthetic oligonucleotide
  Antisense strand to SEQ ID NO: 1713569
auuccugaccgucuaccac

SEQ ID NO: 1713571 - RNA, 19 nt, Artificial Sequence
  Description of Artificial Sequence: Synthetic oligonucleotide
  Sense strand starting at position 94 of SEQ ID NO: 1561990
gcuaaucauuuguccuagu

SEQ ID NO: 1713572 - RNA, 19 nt, Artificial Sequence
  Description of Artificial Sequence: Synthetic oligonucleotide
  Antisense strand to SEQ ID NO: 1713571
acuaggacaaaugauuagc

SEQ ID NO: 1713573 - RNA, 19 nt, Artificial Sequence
  Description of Artificial Sequence: Synthetic oligonucleotide
  Sense strand starting at position 284 of SEQ ID NO: 1561990
gugcuuaguccuguguuaa

SEQ ID NO: 1713574 - RNA, 19 nt, Artificial Sequence
  Description of Artificial Sequence: Synthetic oligonucleotide
  Antisense strand to SEQ ID NO: 1713573
uuaacacaggacuaagcac

SEQ ID NO: 1713575 - RNA, 19 nt, Artificial Sequence
  Description of Artificial Sequence: Synthetic oligonucleotide
  Sense strand starting at position 352 of SEQ ID NO: 1561990
aggagauucugguuuaaau

SEQ ID NO: 1713576 - RNA, 19 nt, Artificial Sequence
  Description of Artificial Sequence: Synthetic oligonucleotide
  Antisense strand to SEQ ID NO: 1713575
auuuaaaccagaaucuccu

SEQ ID NO: 1713577 - RNA, 19 nt, Artificial Sequence
  Description of Artificial Sequence: Synthetic oligonucleotide
  Sense strand starting at position 497 of SEQ ID NO: 1561990
gacgucagaucaucuguca

SEQ ID NO: 1713578 - RNA, 19 nt, Artificial Sequence
  Description of Artificial Sequence: Synthetic oligonucleotide
  Antisense strand to SEQ ID NO: 1713577
ugacagaugaucugacguc

SEQ ID NO: 1713579 - RNA, 19 nt, Artificial Sequence
  Description of Artificial Sequence: Synthetic oligonucleotide
  Sense strand starting at position 500 of SEQ ID NO: 1561990
gucagaucaucugucauac

SEQ ID NO: 1713580 - RNA, 19 nt, Artificial Sequence
  Description of Artificial Sequence: Synthetic oligonucleotide
  Antisense strand to SEQ ID NO: 1713579
guaugacagaugaucugac

SEQ ID NO: 1713581 - RNA, 19 nt, Artificial Sequence
  Description of Artificial Sequence: Synthetic oligonucleotide
  Sense strand starting at position 666 of SEQ ID NO: 1561990
auuguuaagucaucucaac

SEQ ID NO: 1713582 - RNA, 19 nt, Artificial Sequence
  Description of Artificial Sequence: Synthetic oligonucleotide
  Antisense strand to SEQ ID NO: 1713581
guugagaugacuuaacaau

SEQ ID NO: 1713583 - RNA, 19 nt, Artificial Sequence
  Description of Artificial Sequence: Synthetic oligonucleotide
  Sense strand starting at position 950 of SEQ ID NO: 1561990
ggucgugaaucacugauag

SEQ ID NO: 1713584 - RNA, 19 nt, Artificial Sequence
  Description of Artificial Sequence: Synthetic oligonucleotide
  Antisense strand to SEQ ID NO: 1713583
cuaucagugauucacgacc

SEQ ID NO: 1713585 - RNA, 19 nt, Artificial Sequence
  Description of Artificial Sequence: Synthetic oligonucleotide
  Sense strand starting at position 952 of SEQ ID NO: 1561990
ucgugaaucacugauagac

SEQ ID NO: 1713586 - RNA, 19 nt, Artificial Sequence
  Description of Artificial Sequence: Synthetic oligonucleotide
  Antisense strand to SEQ ID NO: 1713585
gucuaucagugauucacga

SEQ ID NO: 1713587 - RNA, 19 nt, Artificial Sequence
  Description of Artificial Sequence: Synthetic oligonucleotide
  Sense strand starting at position 1036 of SEQ ID NO: 1561990
guaaucacccauuaaaggu

SEQ ID NO: 1713588 - RNA, 19 nt, Artificial Sequence
  Description of Artificial Sequence: Synthetic oligonucleotide
  Antisense strand to SEQ ID NO: 1713587
accuuuaaugggugauuac

SEQ ID NO: 1713589 - RNA, 19 nt, Artificial Sequence
  Description of Artificial Sequence: Synthetic oligonucleotide
  Sense strand starting at position 1044 of SEQ ID NO: 1561990
ccauuaaaggucugucaac

SEQ ID NO: 1713590 - RNA, 19 nt, Artificial Sequence
  Description of Artificial Sequence: Synthetic oligonucleotide
  Antisense strand to SEQ ID NO: 1713589
guugacagaccuuuaaugg

SEQ ID NO: 1713591 - RNA, 19 nt, Artificial Sequence
  Description of Artificial Sequence: Synthetic oligonucleotide
  Sense strand starting at position 1053 of SEQ ID NO: 1561990
gucugucaacuugaauaag

SEQ ID NO: 1713592 - RNA, 19 nt, Artificial Sequence
  Description of Artificial Sequence: Synthetic oligonucleotide
  Antisense strand to SEQ ID NO: 1713591
cuuauucaaguugacagac

SEQ ID NO: 1713593 - RNA, 19 nt, Artificial Sequence
  Description of Artificial Sequence: Synthetic oligonucleotide
  Sense strand starting at position 1094 of SEQ ID NO: 1561990
acagaauagucacugcuga

SEQ ID NO: 1713594 - RNA, 19 nt, Artificial Sequence
  Description of Artificial Sequence: Synthetic oligonucleotide
  Antisense strand to SEQ ID NO: 1713593
ucagcagugacuauucugu

SEQ ID NO: 1713595 - RNA, 19 nt, Artificial Sequence
  Description of Artificial Sequence: Synthetic oligonucleotide
  Sense strand starting at position 1095 of SEQ ID NO: 1561990
cagaauagucacugcugau

SEQ ID NO: 1713596 - RNA, 19 nt, Artificial Sequence
  Description of Artificial Sequence: Synthetic oligonucleotide
  Antisense strand to SEQ ID NO: 1713595
aucagcagugacuauucug

SEQ ID NO: 1713597 - RNA, 19 nt, Artificial Sequence
  Description of Artificial Sequence: Synthetic oligonucleotide
  Sense strand starting at position 1123 of SEQ ID NO: 1561990
acggauauuuccugaaaua

SEQ ID NO: 1713598 - RNA, 19 nt, Artificial Sequence
  Description of Artificial Sequence: Synthetic oligonucleotide
  Antisense strand to SEQ ID NO: 1713597
uauuucaggaaauauccgu

SEQ ID NO: 1713599 - RNA, 19 nt, Artificial Sequence
  Description of Artificial Sequence: Synthetic oligonucleotide
  Sense strand starting at position 1163 of SEQ ID NO: 1561990
uggagacuguuaucucuau

SEQ ID NO: 1713600 - RNA, 19 nt, Artificial Sequence
  Description of Artificial Sequence: Synthetic oligonucleotide
  Antisense strand to SEQ ID NO: 1713599
auagagauaacagucucca

SEQ ID NO: 1713601 - RNA, 19 nt, Artificial Sequence
  Description of Artificial Sequence: Synthetic oligonucleotide
  Sense strand starting at position 1186 of SEQ ID NO: 1561990
cccagauucuaguuuccau

SEQ ID NO: 1713602 - RNA, 19 nt, Artificial Sequence
  Description of Artificial Sequence: Synthetic oligonucleotide
  Antisense strand to SEQ ID NO: 1713601
auggaaacuagaaucuggg

SEQ ID NO: 1713603 - RNA, 19 nt, Artificial Sequence
  Description of Artificial Sequence: Synthetic oligonucleotide
  Sense strand starting at position 1246 of SEQ ID NO: 1561990
aaauuaucuuggucaaagg

SEQ ID NO: 1713604 - RNA, 19 nt, Artificial Sequence
  Description of Artificial Sequence: Synthetic oligonucleotide
  Antisense strand to SEQ ID NO: 1713603
ccuuugaccaagauaauuu

SEQ ID NO: 1713605 - RNA, 19 nt, Artificial Sequence
  Description of Artificial Sequence: Synthetic oligonucleotide
  Sense strand starting at position 1292 of SEQ ID NO: 1561990
gcucccuuaccaugggaua

SEQ ID NO: 1713606 - RNA, 19 nt, Artificial Sequence
  Description of Artificial Sequence: Synthetic oligonucleotide
  Antisense strand to SEQ ID NO: 1713605
uaucccaugguaagggagc

SEQ ID NO: 1713607 - RNA, 19 nt, Artificial Sequence
  Description of Artificial Sequence: Synthetic oligonucleotide
  Sense strand starting at position 1293 of SEQ ID NO: 1561990
cucccuuaccaugggauaa

SEQ ID NO: 1713608 - RNA, 19 nt, Artificial Sequence
  Description of Artificial Sequence: Synthetic oligonucleotide
  Antisense strand to SEQ ID NO: 1713607
uuaucccaugguaagggag

SEQ ID NO: 1713609 - RNA, 19 nt, Artificial Sequence
  Description of Artificial Sequence: Synthetic oligonucleotide
  Sense strand starting at position 1428 of SEQ ID NO: 1561990
gcccaagugagauguggaa

SEQ ID NO: 1713610 - RNA, 19 nt, Artificial Sequence
  Description of Artificial Sequence: Synthetic oligonucleotide
  Antisense strand to SEQ ID NO: 1713609
uuccacaucucacuugggc

SEQ ID NO: 1713611 - RNA, 19 nt, Artificial Sequence
  Description of Artificial Sequence: Synthetic oligonucleotide
  Sense strand starting at position 2316 of SEQ ID NO: 1561990
cugacugauccagaagcuu

SEQ ID NO: 1713612 - RNA, 19 nt, Artificial Sequence
  Description of Artificial Sequence: Synthetic oligonucleotide
  Antisense strand to SEQ ID NO: 1713611
aagcuucuggaucagucag

SEQ ID NO: 1713613 - RNA, 19 nt, Artificial Sequence
  Description of Artificial Sequence: Synthetic oligonucleotide
  Sense strand starting at position 2529 of SEQ ID NO: 1561990
ucaggcucggauuauuauu

SEQ ID NO: 1713614 - RNA, 19 nt, Artificial Sequence
  Description of Artificial Sequence: Synthetic oligonucleotide
  Antisense strand to SEQ ID NO: 1713613
aauaauaauccgagccuga

SEQ ID NO: 1713615 - RNA, 19 nt, Artificial Sequence
  Description of Artificial Sequence: Synthetic oligonucleotide
  Sense strand starting at position 2568 of SEQ ID NO: 1561990
gauacagagucucugucua

SEQ ID NO: 1713616 - RNA, 19 nt, Artificial Sequence
  Description of Artificial Sequence: Synthetic oligonucleotide
  Antisense strand to SEQ ID NO: 1713615
uagacagagacucuguauc

SEQ ID NO: 1713617 - RNA, 19 nt, Artificial Sequence
  Description of Artificial Sequence: Synthetic oligonucleotide
  Sense strand starting at position 2660 of SEQ ID NO: 1561990
ucagccucccgagaggauu

SEQ ID NO: 1713618 - RNA, 19 nt, Artificial Sequence
  Description of Artificial Sequence: Synthetic oligonucleotide
  Antisense strand to SEQ ID NO: 1713617
aauccucucgggaggcuga

SEQ ID NO: 1713619 - RNA, 19 nt, Artificial Sequence
  Description of Artificial Sequence: Synthetic oligonucleotide
  Sense strand starting at position 2734 of SEQ ID NO: 1561990
ccaaguuuccgcgccagua

SEQ ID NO: 1713620 - RNA, 19 nt, Artificial Sequence
  Description of Artificial Sequence: Synthetic oligonucleotide
  Antisense strand to SEQ ID NO: 1713619
uacuggcgcggaaacuugg

SEQ ID NO: 1713621 - RNA, 19 nt, Artificial Sequence
  Description of Artificial Sequence: Synthetic oligonucleotide
  Sense strand starting at position 2735 of SEQ ID NO: 1561990
caaguuuccgcgccaguaa

SEQ ID NO: 1713622 - RNA, 19 nt, Artificial Sequence
  Description of Artificial Sequence: Synthetic oligonucleotide
  Antisense strand to SEQ ID NO: 1713621
uuacuggcgcggaaacuug

SEQ ID NO: 1713623 - RNA, 19 nt, Artificial Sequence
  Description of Artificial Sequence: Synthetic oligonucleotide
  Sense strand starting at position 2784 of SEQ ID NO: 1561990
uugcguugggaauaguuaa

SEQ ID NO: 1713624 - RNA, 19 nt, Artificial Sequence
  Description of Artificial Sequence: Synthetic oligonucleotide
  Antisense strand to SEQ ID NO: 1713623
uuaacuauucccaacgcaa

SEQ ID NO: 1713625 - RNA, 19 nt, Artificial Sequence
  Description of Artificial Sequence: Synthetic oligonucleotide
  Sense strand starting at position 2792 of SEQ ID NO: 1561990
ggaauaguuaagcaauugu

SEQ ID NO: 1713626 - RNA, 19 nt, Artificial Sequence
  Description of Artificial Sequence: Synthetic oligonucleotide
  Antisense strand to SEQ ID NO: 1713625
acaauugcuuaacuauucc

SEQ ID NO: 1713627 - RNA, 19 nt, Artificial Sequence
  Description of Artificial Sequence: Synthetic oligonucleotide
  Sense strand starting at position 2965 of SEQ ID NO: 1561990
ggcuauaggcaguauugau

SEQ ID NO: 1713628 - RNA, 19 nt, Artificial Sequence
  Description of Artificial Sequence: Synthetic oligonucleotide
  Antisense strand to SEQ ID NO: 1713627
aucaauacugccuauagcc

SEQ ID NO: 1713629 - RNA, 19 nt, Artificial Sequence
  Description of Artificial Sequence: Synthetic oligonucleotide
  Sense strand starting at position 2972 of SEQ ID NO: 1561990
ggcaguauugauuaagccu

SEQ ID NO: 1713630 - RNA, 19 nt, Artificial Sequence
  Description of Artificial Sequence: Synthetic oligonucleotide
  Antisense strand to SEQ ID NO: 1713629
aggcuuaaucaauacugcc

SEQ ID NO: 1713631 - RNA, 19 nt, Artificial Sequence
  Description of Artificial Sequence: Synthetic oligonucleotide
  Sense strand starting at position 3026 of SEQ ID NO: 1561990
agugcuuugcuauuccagu

SEQ ID NO: 1713632 - RNA, 19 nt, Artificial Sequence
  Description of Artificial Sequence: Synthetic oligonucleotide
  Antisense strand to SEQ ID NO: 1713631
acuggaauagcaaagcacu

SEQ ID NO: 1713633 - RNA, 19 nt, Artificial Sequence
  Description of Artificial Sequence: Synthetic oligonucleotide
  Sense strand starting at position 3179 of SEQ ID NO: 1561990
gaguucuugcuguaaugaa

SEQ ID NO: 1713634 - RNA, 19 nt, Artificial Sequence
  Description of Artificial Sequence: Synthetic oligonucleotide
  Antisense strand to SEQ ID NO: 1713633
uucauuacagcaagaacuc

SEQ ID NO: 1713635 - RNA, 19 nt, Artificial Sequence
  Description of Artificial Sequence: Synthetic oligonucleotide
  Sense strand starting at position 3218 of SEQ ID NO: 1561990
caggguguauuugcauauu

SEQ ID NO: 1713636 - RNA, 19 nt, Artificial Sequence
  Description of Artificial Sequence: Synthetic oligonucleotide
  Antisense strand to SEQ ID NO: 1713635
aauaugcaaauacacccug

SEQ ID NO: 1713637 - RNA, 19 nt, Artificial Sequence
  Description of Artificial Sequence: Synthetic oligonucleotide
  Sense strand starting at position 3266 of SEQ ID NO: 1561990
uuauucgugguauauccua

SEQ ID NO: 1713638 - RNA, 19 nt, Artificial Sequence
  Description of Artificial Sequence: Synthetic oligonucleotide
  Antisense strand to SEQ ID NO: 1713637
uaggauauaccacgaauaa

SEQ ID NO: 1713639 - RNA, 19 nt, Artificial Sequence
  Description of Artificial Sequence: Synthetic oligonucleotide
  Sense strand starting at position 3329 of SEQ ID NO: 1561990
guccuuagaguguacauca

SEQ ID NO: 1713640 - RNA, 19 nt, Artificial Sequence
  Description of Artificial Sequence: Synthetic oligonucleotide
  Antisense strand to SEQ ID NO: 1713639
ugauguacacucuaaggac

SEQ ID NO: 1713641 - RNA, 19 nt, Artificial Sequence
  Description of Artificial Sequence: Synthetic oligonucleotide
  Sense strand starting at position 3337 of SEQ ID NO: 1561990
aguguacaucagggaauua

SEQ ID NO: 1713642 - RNA, 19 nt, Artificial Sequence
  Description of Artificial Sequence: Synthetic oligonucleotide
  Antisense strand to SEQ ID NO: 1713641
uaauucccugauguacacu

SEQ ID NO: 1713643 - RNA, 19 nt, Artificial Sequence
  Description of Artificial Sequence: Synthetic oligonucleotide
  Sense strand starting at position 3615 of SEQ ID NO: 1561990
acugauuugugagagugac

SEQ ID NO: 1713644 - RNA, 19 nt, Artificial Sequence
  Description of Artificial Sequence: Synthetic oligonucleotide
  Antisense strand to SEQ ID NO: 1713643
gucacucucacaaaucagu

SEQ ID NO: 1713645 - RNA, 19 nt, Artificial Sequence
  Description of Artificial Sequence: Synthetic oligonucleotide
  Sense strand starting at position 3621 of SEQ ID NO: 1561990
uugugagagugacugcaua

SEQ ID NO: 1713646 - RNA, 19 nt, Artificial Sequence
  Description of Artificial Sequence: Synthetic oligonucleotide
  Antisense strand to SEQ ID NO: 1713645
uaugcagucacucucacaa

SEQ ID NO: 1713647 - RNA, 19 nt, Artificial Sequence
  Description of Artificial Sequence: Synthetic oligonucleotide
  Sense strand starting at position 3739 of SEQ ID NO: 1561990
gggugaucucacugcaacc

SEQ ID NO: 1713648 - RNA, 19 nt, Artificial Sequence
  Description of Artificial Sequence: Synthetic oligonucleotide
  Antisense strand to SEQ ID NO: 1713647
gguugcagugagaucaccc

SEQ ID NO: 1713649 - RNA, 19 nt, Artificial Sequence
  Description of Artificial Sequence: Synthetic oligonucleotide
  Sense strand starting at position 23 of SEQ ID NO: 1561991
cugucugacuaucugagua

SEQ ID NO: 1713650 - RNA, 19 nt, Artificial Sequence
  Description of Artificial Sequence: Synthetic oligonucleotide
  Antisense strand to SEQ ID NO: 1713649
uacucagauagucagacag

SEQ ID NO: 1713651 - RNA, 19 nt, Artificial Sequence
  Description of Artificial Sequence: Synthetic oligonucleotide
  Sense strand starting at position 47 of SEQ ID NO: 1561991
ugcucugcccuggaacaua

SEQ ID NO: 1713652 - RNA, 19 nt, Artificial Sequence
  Description of Artificial Sequence: Synthetic oligonucleotide
  Antisense strand to SEQ ID NO: 1713651
uauguuccagggcagagca

SEQ ID NO: 1713653 - RNA, 19 nt, Artificial Sequence
  Description of Artificial Sequence: Synthetic oligonucleotide
  Sense strand starting at position 97 of SEQ ID NO: 1561991
agagcuuucucacugguca

SEQ ID NO: 1713654 - RNA, 19 nt, Artificial Sequence
  Description of Artificial Sequence: Synthetic oligonucleotide
  Antisense strand to SEQ ID NO: 1713653
ugaccagugagaaagcucu

SEQ ID NO: 1713655 - RNA, 19 nt, Artificial Sequence
  Description of Artificial Sequence: Synthetic oligonucleotide
  Sense strand starting at position 138 of SEQ ID NO: 1561991
cugagacuacgccauauua

SEQ ID NO: 1713656 - RNA, 19 nt, Artificial Sequence
  Description of Artificial Sequence: Synthetic oligonucleotide
  Antisense strand to SEQ ID NO: 1713655
uaauauggcguagucucag

SEQ ID NO: 1713657 - RNA, 19 nt, Artificial Sequence
  Description of Artificial Sequence: Synthetic oligonucleotide
  Sense strand starting at position 330 of SEQ ID NO: 1561991
aguaucuuccaaggaauua

SEQ ID NO: 1713658 - RNA, 19 nt, Artificial Sequence
  Description of Artificial Sequence: Synthetic oligonucleotide
  Antisense strand to SEQ ID NO: 1713657
uaauuccuuggaagauacu

SEQ ID NO: 1713659 - RNA, 19 nt, Artificial Sequence
  Description of Artificial Sequence: Synthetic oligonucleotide
  Sense strand starting at position 482 of SEQ ID NO: 1561991
agaauaguagggugagcaa

SEQ ID NO: 1713660 - RNA, 19 nt, Artificial Sequence
  Description of Artificial Sequence: Synthetic oligonucleotide
  Antisense strand to SEQ ID NO: 1713659
uugcucacccuacuauucu

SEQ ID NO: 1713661 - RNA, 19 nt, Artificial Sequence
  Description of Artificial Sequence: Synthetic oligonucleotide
  Sense strand starting at position 593 of SEQ ID NO: 1561991
uggcauagacuauguggua

SEQ ID NO: 1713662 - RNA, 19 nt, Artificial Sequence
  Description of Artificial Sequence: Synthetic oligonucleotide
  Antisense strand to SEQ ID NO: 1713661
uaccacauagucuaugcca

SEQ ID NO: 1713663 - RNA, 19 nt, Artificial Sequence
  Description of Artificial Sequence: Synthetic oligonucleotide
  Sense strand starting at position 635 of SEQ ID NO: 1561991
guucuaauguggucuuaaa

SEQ ID NO: 1713664 - RNA, 19 nt, Artificial Sequence
  Description of Artificial Sequence: Synthetic oligonucleotide
  Antisense strand to SEQ ID NO: 1713663
uuuaagaccacauuagaac

SEQ ID NO: 1713665 - RNA, 19 nt, Artificial Sequence
  Description of Artificial Sequence: Synthetic oligonucleotide
  Sense strand starting at position 736 of SEQ ID NO: 1561991
cagaaugccuguguuuaaa

SEQ ID NO: 1713666 - RNA, 19 nt, Artificial Sequence
  Description of Artificial Sequence: Synthetic oligonucleotide
  Antisense strand to SEQ ID NO: 1713665
uuuaaacacaggcauucug

SEQ ID NO: 1713667 - RNA, 19 nt, Artificial Sequence
  Description of Artificial Sequence: Synthetic oligonucleotide
  Sense strand starting at position 738 of SEQ ID NO: 1561991
gaaugccuguguuuaaaug

SEQ ID NO: 1713668 - RNA, 19 nt, Artificial Sequence
  Description of Artificial Sequence: Synthetic oligonucleotide
  Antisense strand to SEQ ID NO: 1713667
cauuuaaacacaggcauuc

SEQ ID NO: 1713669 - RNA, 19 nt, Artificial Sequence
  Description of Artificial Sequence: Synthetic oligonucleotide
  Sense strand starting at position 1141 of SEQ ID NO: 1561991
agaggaacccauugcacuu

SEQ ID NO: 1713670 - RNA, 19 nt, Artificial Sequence
  Description of Artificial Sequence: Synthetic oligonucleotide
  Antisense strand to SEQ ID NO: 1713669
aagugcaauggguuccucu

SEQ ID NO: 1713671 - RNA, 19 nt, Artificial Sequence
  Description of Artificial Sequence: Synthetic oligonucleotide
  Sense strand starting at position 2053 of SEQ ID NO: 1561991
ggacuugguacaugccaau

SEQ ID NO: 1713672 - RNA, 19 nt, Artificial Sequence
  Description of Artificial Sequence: Synthetic oligonucleotide
  Antisense strand to SEQ ID NO: 1713671
auuggcauguaccaagucc

SEQ ID NO: 1713673 - RNA, 19 nt, Artificial Sequence
  Description of Artificial Sequence: Synthetic oligonucleotide
  Sense strand starting at position 2227 of SEQ ID NO: 1561991
acagacuugcauugagaaa

SEQ ID NO: 1713674 - RNA, 19 nt, Artificial Sequence
  Description of Artificial Sequence: Synthetic oligonucleotide
  Antisense strand to SEQ ID NO: 1713673
uuucucaaugcaagucugu

SEQ ID NO: 1713675 - RNA, 19 nt, Artificial Sequence
  Description of Artificial Sequence: Synthetic oligonucleotide
  Sense strand starting at position 2272 of SEQ ID NO: 1561991
aacgaauggccuuggcaaa

SEQ ID NO: 1713676 - RNA, 19 nt, Artificial Sequence
  Description of Artificial Sequence: Synthetic oligonucleotide
  Antisense strand to SEQ ID NO: 1713675
uuugccaaggccauucguu

SEQ ID NO: 1713677 - RNA, 19 nt, Artificial Sequence
  Description of Artificial Sequence: Synthetic oligonucleotide
  Sense strand starting at position 2273 of SEQ ID NO: 1561991
acgaauggccuuggcaaau

SEQ ID NO: 1713678 - RNA, 19 nt, Artificial Sequence
  Description of Artificial Sequence: Synthetic oligonucleotide
  Antisense strand to SEQ ID NO: 1713677
auuugccaaggccauucgu

SEQ ID NO: 1713679 - RNA, 19 nt, Artificial Sequence
  Description of Artificial Sequence: Synthetic oligonucleotide
  Sense strand starting at position 2284 of SEQ ID NO: 1561991
uggcaaauagggugugaga

SEQ ID NO: 1713680 - RNA, 19 nt, Artificial Sequence
  Description of Artificial Sequence: Synthetic oligonucleotide
  Antisense strand to SEQ ID NO: 1713679
ucucacacccuauuugcca

SEQ ID NO: 1713681 - RNA, 19 nt, Artificial Sequence
  Description of Artificial Sequence: Synthetic oligonucleotide
  Sense strand starting at position 2286 of SEQ ID NO: 1561991
gcaaauagggugugagauu

SEQ ID NO: 1713682 - RNA, 19 nt, Artificial Sequence
  Description of Artificial Sequence: Synthetic oligonucleotide
  Antisense strand to SEQ ID NO: 1713681
aaucucacacccuauuugc

SEQ ID NO: 1713683 - RNA, 19 nt, Artificial Sequence
  Description of Artificial Sequence: Synthetic oligonucleotide
  Sense strand starting at position 2287 of SEQ ID NO: 1561991
caaauagggugugagauuu

SEQ ID NO: 1713684 - RNA, 19 nt, Artificial Sequence
  Description of Artificial Sequence: Synthetic oligonucleotide
  Antisense strand to SEQ ID NO: 1713683
aaaucucacacccuauuug

SEQ ID NO: 1713685 - RNA, 19 nt, Artificial Sequence
  Description of Artificial Sequence: Synthetic oligonucleotide
  Sense strand starting at position 2297 of SEQ ID NO: 1561991
gugagauuuaugugccaug

SEQ ID NO: 1713686 - RNA, 19 nt, Artificial Sequence
  Description of Artificial Sequence: Synthetic oligonucleotide
  Antisense strand to SEQ ID NO: 1713685
cauggcacauaaaucucac

SEQ ID NO: 1713687 - RNA, 19 nt, Artificial Sequence
  Description of Artificial Sequence: Synthetic oligonucleotide
  Sense strand starting at position 2386 of SEQ ID NO: 1561991
guaugugugccgguuuauu

SEQ ID NO: 1713688 - RNA, 19 nt, Artificial Sequence
  Description of Artificial Sequence: Synthetic oligonucleotide
  Antisense strand to SEQ ID NO: 1713687
aauaaaccggcacacauac

SEQ ID NO: 1713689 - RNA, 19 nt, Artificial Sequence
  Description of Artificial Sequence: Synthetic oligonucleotide
  Sense strand starting at position 2396 of SEQ ID NO: 1561991
cgguuuauuacauggauau

SEQ ID NO: 1713690 - RNA, 19 nt, Artificial Sequence
  Description of Artificial Sequence: Synthetic oligonucleotide
  Antisense strand to SEQ ID NO: 1713689
auauccauguaauaaaccg

SEQ ID NO: 1713691 - RNA, 19 nt, Artificial Sequence
  Description of Artificial Sequence: Synthetic oligonucleotide
  Sense strand starting at position 2550 of SEQ ID NO: 1561991
caccuuuauguccacgagu

SEQ ID NO: 1713692 - RNA, 19 nt, Artificial Sequence
  Description of Artificial Sequence: Synthetic oligonucleotide
  Antisense strand to SEQ ID NO: 1713691
acucguggacauaaaggug

SEQ ID NO: 1713693 - RNA, 19 nt, Artificial Sequence
  Description of Artificial Sequence: Synthetic oligonucleotide
  Sense strand starting at position 2599 of SEQ ID NO: 1561991
gaacaugagugguugguuu

SEQ ID NO: 1713694 - RNA, 19 nt, Artificial Sequence
  Description of Artificial Sequence: Synthetic oligonucleotide
  Antisense strand to SEQ ID NO: 1713693
aaaccaaccacucauguuc

SEQ ID NO: 1713695 - RNA, 19 nt, Artificial Sequence
  Description of Artificial Sequence: Synthetic oligonucleotide
  Sense strand starting at position 2858 of SEQ ID NO: 1561991
ugacacuugugucucccaa

SEQ ID NO: 1713696 - RNA, 19 nt, Artificial Sequence
  Description of Artificial Sequence: Synthetic oligonucleotide
  Antisense strand to SEQ ID NO: 1713695
uugggagacacaaguguca

SEQ ID NO: 1713697 - RNA, 19 nt, Artificial Sequence
  Description of Artificial Sequence: Synthetic oligonucleotide
  Sense strand starting at position 2953 of SEQ ID NO: 1561991
uuguuuauguggguuauuu

SEQ ID NO: 1713698 - RNA, 19 nt, Artificial Sequence
  Description of Artificial Sequence: Synthetic oligonucleotide
  Antisense strand to SEQ ID NO: 1713697
aaauaacccacauaaacaa

SEQ ID NO: 1713699 - RNA, 19 nt, Artificial Sequence
  Description of Artificial Sequence: Synthetic oligonucleotide
  Sense strand starting at position 3110 of SEQ ID NO: 1561991
aauugagaagauugucauc

SEQ ID NO: 1713700 - RNA, 19 nt, Artificial Sequence
  Description of Artificial Sequence: Synthetic oligonucleotide
  Antisense strand to SEQ ID NO: 1713699
gaugacaaucuucucaauu

SEQ ID NO: 1713701 - RNA, 19 nt, Artificial Sequence
  Description of Artificial Sequence: Synthetic oligonucleotide
  Sense strand starting at position 3112 of SEQ ID NO: 1561991
uugagaagauugucaucau

SEQ ID NO: 1713702 - RNA, 19 nt, Artificial Sequence
  Description of Artificial Sequence: Synthetic oligonucleotide
  Antisense strand to SEQ ID NO: 1713701
augaugacaaucuucucaa

SEQ ID NO: 1713703 - RNA, 19 nt, Artificial Sequence
  Description of Artificial Sequence: Synthetic oligonucleotide
  Sense strand starting at position 3161 of SEQ ID NO: 1561991
ggcuuaauggaagguuaca

SEQ ID NO: 1713704 - RNA, 19 nt, Artificial Sequence
  Description of Artificial Sequence: Synthetic oligonucleotide
  Antisense strand to SEQ ID NO: 1713703
uguaaccuuccauuaagcc

SEQ ID NO: 1713705 - RNA, 19 nt, Artificial Sequence
  Description of Artificial Sequence: Synthetic oligonucleotide
  Sense strand starting at position 3230 of SEQ ID NO: 1561991
ccuaguuguagguaugaaa

SEQ ID NO: 1713706 - RNA, 19 nt, Artificial Sequence
  Description of Artificial Sequence: Synthetic oligonucleotide
  Antisense strand to SEQ ID NO: 1713705
uuucauaccuacaacuagg

SEQ ID NO: 1713707 - RNA, 19 nt, Artificial Sequence
  Description of Artificial Sequence: Synthetic oligonucleotide
  Sense strand starting at position 3264 of SEQ ID NO: 1561991
caaaucauguaguugggaa

SEQ ID NO: 1713708 - RNA, 19 nt, Artificial Sequence
  Description of Artificial Sequence: Synthetic oligonucleotide
  Antisense strand to SEQ ID NO: 1713707
uucccaacuacaugauuug

SEQ ID NO: 1713709 - RNA, 19 nt, Artificial Sequence
  Description of Artificial Sequence: Synthetic oligonucleotide
  Sense strand starting at position 3391 of SEQ ID NO: 1561991
uuccucuuugguuaaauga

SEQ ID NO: 1713710 - RNA, 19 nt, Artificial Sequence
  Description of Artificial Sequence: Synthetic oligonucleotide
  Antisense strand to SEQ ID NO: 1713709
ucauuuaaccaaagaggaa

SEQ ID NO: 1713711 - RNA, 19 nt, Artificial Sequence
  Description of Artificial Sequence: Synthetic oligonucleotide
  Sense strand starting at position 3475 of SEQ ID NO: 1561991
gccuguucuccugccuauu

SEQ ID NO: 1713712 - RNA, 19 nt, Artificial Sequence
  Description of Artificial Sequence: Synthetic oligonucleotide
  Antisense strand to SEQ ID NO: 1713711
aauaggcaggagaacaggc

SEQ ID NO: 1713713 - RNA, 19 nt, Artificial Sequence
  Description of Artificial Sequence: Synthetic oligonucleotide
  Sense strand starting at position 3500 of SEQ ID NO: 1561991
ucuccaggcccuuaguauu

SEQ ID NO: 1713714 - RNA, 19 nt, Artificial Sequence
  Description of Artificial Sequence: Synthetic oligonucleotide
  Antisense strand to SEQ ID NO: 1713713
aauacuaagggccuggaga

SEQ ID NO: 1713715 - RNA, 19 nt, Artificial Sequence
  Description of Artificial Sequence: Synthetic oligonucleotide
  Sense strand starting at position 3620 of SEQ ID NO: 1561991
gaugcuccaucagugauau

SEQ ID NO: 1713716 - RNA, 19 nt, Artificial Sequence
  Description of Artificial Sequence: Synthetic oligonucleotide
  Antisense strand to SEQ ID NO: 1713715
auaucacugauggagcauc

SEQ ID NO: 1713717 - RNA, 19 nt, Artificial Sequence
  Description of Artificial Sequence: Synthetic oligonucleotide
  Sense strand starting at position 3621 of SEQ ID NO: 1561991
augcuccaucagugauauc

SEQ ID NO: 1713718 - RNA, 19 nt, Artificial Sequence
  Description of Artificial Sequence: Synthetic oligonucleotide
  Antisense strand to SEQ ID NO: 1713717
gauaucacugauggagcau

SEQ ID NO: 1713719 - RNA, 19 nt, Artificial Sequence
  Description of Artificial Sequence: Synthetic oligonucleotide
  Sense strand starting at position 3632 of SEQ ID NO: 1561991
gugauaucuguuuauucca

SEQ ID NO: 1713720 - RNA, 19 nt, Artificial Sequence
  Description of Artificial Sequence: Synthetic oligonucleotide
  Antisense strand to SEQ ID NO: 1713719
uggaauaaacagauaucac

SEQ ID NO: 1713721 - RNA, 19 nt, Artificial Sequence
  Description of Artificial Sequence: Synthetic oligonucleotide
  Sense strand starting at position 3639 of SEQ ID NO: 1561991
cuguuuauuccagagcuca

SEQ ID NO: 1713722 - RNA, 19 nt, Artificial Sequence
  Description of Artificial Sequence: Synthetic oligonucleotide
  Antisense strand to SEQ ID NO: 1713721
ugagcucuggaauaaacag

SEQ ID NO: 1713723 - RNA, 19 nt, Artificial Sequence
  Description of Artificial Sequence: Synthetic oligonucleotide
  Sense strand starting at position 3800 of SEQ ID NO: 1561991
ggagcuggccucuaagcua

SEQ ID NO: 1713724 - RNA, 19 nt, Artificial Sequence
  Description of Artificial Sequence: Synthetic oligonucleotide
  Antisense strand to SEQ ID NO: 1713723
uagcuuagaggccagcucc

SEQ ID NO: 1713725 - RNA, 19 nt, Artificial Sequence
  Description of Artificial Sequence: Synthetic oligonucleotide
  Sense strand starting at position 3896 of SEQ ID NO: 1561991
ccuggugagacaugguaga

SEQ ID NO: 1713726 - RNA, 19 nt, Artificial Sequence
  Description of Artificial Sequence: Synthetic oligonucleotide
  Antisense strand to SEQ ID NO: 1713725
ucuaccaugucucaccagg

SEQ ID NO: 1713727 - RNA, 19 nt, Artificial Sequence
  Description of Artificial Sequence: Synthetic oligonucleotide
  Sense strand starting at position 3958 of SEQ ID NO: 1561991
gccagaucugggcauguuu

SEQ ID NO: 1713728 - RNA, 19 nt, Artificial Sequence
  Description of Artificial Sequence: Synthetic oligonucleotide
  Antisense strand to SEQ ID NO: 1713727
aaacaugcccagaucuggc

SEQ ID NO: 1713729 - RNA, 19 nt, Artificial Sequence
  Description of Artificial Sequence: Synthetic oligonucleotide
  Sense strand starting at position 44 of SEQ ID NO: 1561992
agugaauucucaccucagg

SEQ ID NO: 1713730 - RNA, 19 nt, Artificial Sequence
  Description of Artificial Sequence: Synthetic oligonucleotide
  Antisense strand to SEQ ID NO: 1713729
ccugaggugagaauucacu

SEQ ID NO: 1713731 - RNA, 19 nt, Artificial Sequence
  Description of Artificial Sequence: Synthetic oligonucleotide
  Sense strand starting at position 90 of SEQ ID NO: 1561992
caucuagaucagugccuga

SEQ ID NO: 1713732 - RNA, 19 nt, Artificial Sequence
  Description of Artificial Sequence: Synthetic oligonucleotide
  Antisense strand to SEQ ID NO: 1713731
ucaggcacugaucuagaug

SEQ ID NO: 1713733 - RNA, 19 nt, Artificial Sequence
  Description of Artificial Sequence: Synthetic oligonucleotide
  Sense strand starting at position 94 of SEQ ID NO: 1561992
uagaucagugccugaagca

SEQ ID NO: 1713734 - RNA, 19 nt, Artificial Sequence
  Description of Artificial Sequence: Synthetic oligonucleotide
  Antisense strand to SEQ ID NO: 1713733
ugcuucaggcacugaucua

SEQ ID NO: 1713735 - RNA, 19 nt, Artificial Sequence
  Description of Artificial Sequence: Synthetic oligonucleotide
  Sense strand starting at position 95 of SEQ ID NO: 1561992
agaucagugccugaagcau

SEQ ID NO: 1713736 - RNA, 19 nt, Artificial Sequence
  Description of Artificial Sequence: Synthetic oligonucleotide
  Antisense strand to SEQ ID NO: 1713735
augcuucaggcacugaucu

SEQ ID NO: 1713737 - RNA, 19 nt, Artificial Sequence
  Description of Artificial Sequence: Synthetic oligonucleotide
  Sense strand starting at position 283 of SEQ ID NO: 1561992
ugaggaguugcguaauuac

SEQ ID NO: 1713738 - RNA, 19 nt, Artificial Sequence
  Description of Artificial Sequence: Synthetic oligonucleotide
  Antisense strand to SEQ ID NO: 1713737
guaauuacgcaacuccuca

SEQ ID NO: 1713739 - RNA, 19 nt, Artificial Sequence
  Description of Artificial Sequence: Synthetic oligonucleotide
  Sense strand starting at position 294 of SEQ ID NO: 1561992
guaauuacugcaggcagaa

SEQ ID NO: 1713740 - RNA, 19 nt, Artificial Sequence
  Description of Artificial Sequence: Synthetic oligonucleotide
  Antisense strand to SEQ ID NO: 1713739
uucugccugcaguaauuac

SEQ ID NO: 1713741 - RNA, 19 nt, Artificial Sequence
  Description of Artificial Sequence: Synthetic oligonucleotide
  Sense strand starting at position 408 of SEQ ID NO: 1561992
uguucuuaguacucaugca

SEQ ID NO: 1713742 - RNA, 19 nt, Artificial Sequence
  Description of Artificial Sequence: Synthetic oligonucleotide
  Antisense strand to SEQ ID NO: 1713741
ugcaugaguacuaagaaca

SEQ ID NO: 1713743 - RNA, 19 nt, Artificial Sequence
  Description of Artificial Sequence: Synthetic oligonucleotide
  Sense strand starting at position 416 of SEQ ID NO: 1561992
guacucaugcacugccaaa

SEQ ID NO: 1713744 - RNA, 19 nt, Artificial Sequence
  Description of Artificial Sequence: Synthetic oligonucleotide
  Antisense strand to SEQ ID NO: 1713743
uuuggcagugcaugaguac

SEQ ID NO: 1713745 - RNA, 19 nt, Artificial Sequence
  Description of Artificial Sequence: Synthetic oligonucleotide
  Sense strand starting at position 601 of SEQ ID NO: 1561992
ggcucaauauuccugauga

SEQ ID NO: 1713746 - RNA, 19 nt, Artificial Sequence
  Description of Artificial Sequence: Synthetic oligonucleotide
  Antisense strand to SEQ ID NO: 1713745
ucaucaggaauauugagcc

SEQ ID NO: 1713747 - RNA, 19 nt, Artificial Sequence
  Description of Artificial Sequence: Synthetic oligonucleotide
  Sense strand starting at position 603 of SEQ ID NO: 1561992
cucaauauuccugaugagu

SEQ ID NO: 1713748 - RNA, 19 nt, Artificial Sequence
  Description of Artificial Sequence: Synthetic oligonucleotide
  Antisense strand to SEQ ID NO: 1713747
acucaucaggaauauugag

SEQ ID NO: 1713749 - RNA, 19 nt, Artificial Sequence
  Description of Artificial Sequence: Synthetic oligonucleotide
  Sense strand starting at position 608 of SEQ ID NO: 1561992
uauuccugaugaguggauu

SEQ ID NO: 1713750 - RNA, 19 nt, Artificial Sequence
  Description of Artificial Sequence: Synthetic oligonucleotide
  Antisense strand to SEQ ID NO: 1713749
aauccacucaucaggaaua

SEQ ID NO: 1713751 - RNA, 19 nt, Artificial Sequence
  Description of Artificial Sequence: Synthetic oligonucleotide
  Sense strand starting at position 745 of SEQ ID NO: 1561992
cuuucuugacuuugugacu

SEQ ID NO: 1713752 - RNA, 19 nt, Artificial Sequence
  Description of Artificial Sequence: Synthetic oligonucleotide
  Antisense strand to SEQ ID NO: 1713751
agucacaaagucaagaaag

SEQ ID NO: 1713753 - RNA, 19 nt, Artificial Sequence
  Description of Artificial Sequence: Synthetic oligonucleotide
  Sense strand starting at position 1029 of SEQ ID NO: 1561992
cacagauucucccaggaga

SEQ ID NO: 1713754 - RNA, 19 nt, Artificial Sequence
  Description of Artificial Sequence: Synthetic oligonucleotide
  Antisense strand to SEQ ID NO: 1713753
ucuccugggagaaucugug

SEQ ID NO: 1713755 - RNA, 19 nt, Artificial Sequence
  Description of Artificial Sequence: Synthetic oligonucleotide
  Sense strand starting at position 1031 of SEQ ID NO: 1561992
cagauucucccaggagauu

SEQ ID NO: 1713756 - RNA, 19 nt, Artificial Sequence
  Description of Artificial Sequence: Synthetic oligonucleotide
  Antisense strand to SEQ ID NO: 1713755
aaucuccugggagaaucug

SEQ ID NO: 1713757 - RNA, 19 nt, Artificial Sequence
  Description of Artificial Sequence: Synthetic oligonucleotide
  Sense strand starting at position 1675 of SEQ ID NO: 1561992
gggagagacucuggugacu

SEQ ID NO: 1713758 - RNA, 19 nt, Artificial Sequence
  Description of Artificial Sequence: Synthetic oligonucleotide
  Antisense strand to SEQ ID NO: 1713757
agucaccagagucucuccc

SEQ ID NO: 1713759 - RNA, 19 nt, Artificial Sequence
  Description of Artificial Sequence: Synthetic oligonucleotide
  Sense strand starting at position 1677 of SEQ ID NO: 1561992
gagagacucuggugacuuu

SEQ ID NO: 1713760 - RNA, 19 nt, Artificial Sequence
  Description of Artificial Sequence: Synthetic oligonucleotide
  Antisense strand to SEQ ID NO: 1713759
aaagucaccagagucucuc

SEQ ID NO: 1713761 - RNA, 19 nt, Artificial Sequence
  Description of Artificial Sequence: Synthetic oligonucleotide
  Sense strand starting at position 2440 of SEQ ID NO: 1561992
cuuggcugccuuuaaugua

SEQ ID NO: 1713762 - RNA, 19 nt, Artificial Sequence
  Description of Artificial Sequence: Synthetic oligonucleotide
  Antisense strand to SEQ ID NO: 1713761
uacauuaaaggcagccaag

SEQ ID NO: 1713763 - RNA, 19 nt, Artificial Sequence
  Description of Artificial Sequence: Synthetic oligonucleotide
  Sense strand starting at position 2471 of SEQ ID NO: 1561992
ggcacugcugccuuucgaa

SEQ ID NO: 1713764 - RNA, 19 nt, Artificial Sequence
  Description of Artificial Sequence: Synthetic oligonucleotide
  Antisense strand to SEQ ID NO: 1713763
uucgaaaggcagcagugcc

SEQ ID NO: 1713765 - RNA, 19 nt, Artificial Sequence
  Description of Artificial Sequence: Synthetic oligonucleotide
  Sense strand starting at position 2758 of SEQ ID NO: 1561992
gcaggauccuggccugaga

SEQ ID NO: 1713766 - RNA, 19 nt, Artificial Sequence
  Description of Artificial Sequence: Synthetic oligonucleotide
  Antisense strand to SEQ ID NO: 1713765
ucucaggccaggauccugc

SEQ ID NO: 1713767 - RNA, 19 nt, Artificial Sequence
  Description of Artificial Sequence: Synthetic oligonucleotide
  Sense strand starting at position 2821 of SEQ ID NO: 1561992
cagaguuccggguaaccuu

SEQ ID NO: 1713768 - RNA, 19 nt, Artificial Sequence
  Description of Artificial Sequence: Synthetic oligonucleotide
  Antisense strand to SEQ ID NO: 1713767
aagguuacccggaacucug

SEQ ID NO: 1713769 - RNA, 19 nt, Artificial Sequence
  Description of Artificial Sequence: Synthetic oligonucleotide
  Sense strand starting at position 3111 of SEQ ID NO: 1561992
cugcuuaacggugguaaca

SEQ ID NO: 1713770 - RNA, 19 nt, Artificial Sequence
  Description of Artificial Sequence: Synthetic oligonucleotide
  Antisense strand to SEQ ID NO: 1713769
uguuaccaccguuaagcag

SEQ ID NO: 1713771 - RNA, 19 nt, Artificial Sequence
  Description of Artificial Sequence: Synthetic oligonucleotide
  Sense strand starting at position 3295 of SEQ ID NO: 1561992
ccuguuugcuccuccauca

SEQ ID NO: 1713772 - RNA, 19 nt, Artificial Sequence
  Description of Artificial Sequence: Synthetic oligonucleotide
  Antisense strand to SEQ ID NO: 1713771
ugauggaggagcaaacagg

SEQ ID NO: 1713773 - RNA, 19 nt, Artificial Sequence
  Description of Artificial Sequence: Synthetic oligonucleotide
  Sense strand starting at position 3308 of SEQ ID NO: 1561992
ccaucagcuccuggagaga

SEQ ID NO: 1713774 - RNA, 19 nt, Artificial Sequence
  Description of Artificial Sequence: Synthetic oligonucleotide
  Antisense strand to SEQ ID NO: 1713773
ucucuccaggagcugaugg

SEQ ID NO: 1713775 - RNA, 19 nt, Artificial Sequence
  Description of Artificial Sequence: Synthetic oligonucleotide
  Sense strand starting at position 3377 of SEQ ID NO: 1561992
aagugaaguuacuugccua

SEQ ID NO: 1713776 - RNA, 19 nt, Artificial Sequence
  Description of Artificial Sequence: Synthetic oligonucleotide
  Antisense strand to SEQ ID NO: 1713775
uaggcaaguaacuucacuu

SEQ ID NO: 1713777 - RNA, 19 nt, Artificial Sequence
  Description of Artificial Sequence: Synthetic oligonucleotide
  Sense strand starting at position 3380 of SEQ ID NO: 1561992
ugaaguuacuugccuagaa

SEQ ID NO: 1713778 - RNA, 19 nt, Artificial Sequence
  Description of Artificial Sequence: Synthetic oligonucleotide
  Antisense strand to SEQ ID NO: 1713777
uucuaggcaaguaacuuca

SEQ ID NO: 1713779 - RNA, 19 nt, Artificial Sequence
  Description of Artificial Sequence: Synthetic oligonucleotide
  Sense strand starting at position 3381 of SEQ ID NO: 1561992
gaaguuacuugccuagaaa

SEQ ID NO: 1713780 - RNA, 19 nt, Artificial Sequence
  Description of Artificial Sequence: Synthetic oligonucleotide
  Antisense strand to SEQ ID NO: 1713779
uuucuaggcaaguaacuuc

SEQ ID NO: 1713781 - RNA, 19 nt, Artificial Sequence
  Description of Artificial Sequence: Synthetic oligonucleotide
  Sense strand starting at position 3382 of SEQ ID NO: 1561992
aaguuacuugccuagaaag

SEQ ID NO: 1713782 - RNA, 19 nt, Artificial Sequence
  Description of Artificial Sequence: Synthetic oligonucleotide
  Antisense strand to SEQ ID NO: 1713781
cuuucuaggcaaguaacuu

SEQ ID NO: 1713783 - RNA, 19 nt, Artificial Sequence
  Description of Artificial Sequence: Synthetic oligonucleotide
  Sense strand starting at position 3384 of SEQ ID NO: 1561992
guuacuugccuagaaagug

SEQ ID NO: 1713784 - RNA, 19 nt, Artificial Sequence
  Description of Artificial Sequence: Synthetic oligonucleotide
  Antisense strand to SEQ ID NO: 1713783
cacuuucuaggcaaguaac

SEQ ID NO: 1713785 - RNA, 19 nt, Artificial Sequence
  Description of Artificial Sequence: Synthetic oligonucleotide
  Sense strand starting at position 3389 of SEQ ID NO: 1561992
uugccuagaaagugagaaa

SEQ ID NO: 1713786 - RNA, 19 nt, Artificial Sequence
  Description of Artificial Sequence: Synthetic oligonucleotide
  Antisense strand to SEQ ID NO: 1713785
uuucucacuuucuaggcaa

SEQ ID NO: 1713787 - RNA, 19 nt, Artificial Sequence
  Description of Artificial Sequence: Synthetic oligonucleotide
  Sense strand starting at position 3472 of SEQ ID NO: 1561992
auugguuugcccuggugaa

SEQ ID NO: 1713788 - RNA, 19 nt, Artificial Sequence
  Description of Artificial Sequence: Synthetic oligonucleotide
  Antisense strand to SEQ ID NO: 1713787
uucaccagggcaaaccaau

SEQ ID NO: 1713789 - RNA, 19 nt, Artificial Sequence
  Description of Artificial Sequence: Synthetic oligonucleotide
  Sense strand starting at position 3473 of SEQ ID NO: 1561992
uugguuugcccuggugaac

SEQ ID NO: 1713790 - RNA, 19 nt, Artificial Sequence
  Description of Artificial Sequence: Synthetic oligonucleotide
  Antisense strand to SEQ ID NO: 1713789
guucaccagggcaaaccaa

SEQ ID NO: 1713791 - RNA, 19 nt, Artificial Sequence
  Description of Artificial Sequence: Synthetic oligonucleotide
  Sense strand starting at position 3514 of SEQ ID NO: 1561992
ggcuuaaguguuugccucu

SEQ ID NO: 1713792 - RNA, 19 nt, Artificial Sequence
  Description of Artificial Sequence: Synthetic oligonucleotide
  Antisense strand to SEQ ID NO: 1713791
agaggcaaacacuuaagcc

SEQ ID NO: 1713793 - RNA, 19 nt, Artificial Sequence
  Description of Artificial Sequence: Synthetic oligonucleotide
  Sense strand starting at position 3515 of SEQ ID NO: 1561992
gcuuaaguguuugccucuu

SEQ ID NO: 1713794 - RNA, 19 nt, Artificial Sequence
  Description of Artificial Sequence: Synthetic oligonucleotide
  Antisense strand to SEQ ID NO: 1713793
aagaggcaaacacuuaagc

SEQ ID NO: 1713795 - RNA, 19 nt, Artificial Sequence
  Description of Artificial Sequence: Synthetic oligonucleotide
  Sense strand starting at position 3638 of SEQ ID NO: 1561992
acugcaucccauugagaug

SEQ ID NO: 1713796 - RNA, 19 nt, Artificial Sequence
  Description of Artificial Sequence: Synthetic oligonucleotide
  Antisense strand to SEQ ID NO: 1713795
caucucaaugggaugcagu

SEQ ID NO: 1713797 - RNA, 19 nt, Artificial Sequence
  Description of Artificial Sequence: Synthetic oligonucleotide
  Sense strand starting at position 3641 of SEQ ID NO: 1561992
gcaucccauugagaugauu

SEQ ID NO: 1713798 - RNA, 19 nt, Artificial Sequence
  Description of Artificial Sequence: Synthetic oligonucleotide
  Antisense strand to SEQ ID NO: 1713797
aaucaucucaaugggaugc

SEQ ID NO: 1713799 - RNA, 19 nt, Artificial Sequence
  Description of Artificial Sequence: Synthetic oligonucleotide
  Sense strand starting at position 3690 of SEQ ID NO: 1561992
gcuggaauuugagaggaca

SEQ ID NO: 1713800 - RNA, 19 nt, Artificial Sequence
  Description of Artificial Sequence: Synthetic oligonucleotide
  Antisense strand to SEQ ID NO: 1713799
uguccucucaaauuccagc

SEQ ID NO: 1713801 - RNA, 19 nt, Artificial Sequence
  Description of Artificial Sequence: Synthetic oligonucleotide
  Sense strand starting at position 3709 of SEQ ID NO: 1561992
ggcauugguccuggucacu

SEQ ID NO: 1713802 - RNA, 19 nt, Artificial Sequence
  Description of Artificial Sequence: Synthetic oligonucleotide
  Antisense strand to SEQ ID NO: 1713801
agugaccaggaccaaugcc

SEQ ID NO: 1713803 - RNA, 19 nt, Artificial Sequence
  Description of Artificial Sequence: Synthetic oligonucleotide
  Sense strand starting at position 3755 of SEQ ID NO: 1561992
ucccacucugcugggaaua

SEQ ID NO: 1713804 - RNA, 19 nt, Artificial Sequence
  Description of Artificial Sequence: Synthetic oligonucleotide
  Antisense strand to SEQ ID NO: 1713803
uauucccagcagaguggga

SEQ ID NO: 1713805 - RNA, 19 nt, Artificial Sequence
  Description of Artificial Sequence: Synthetic oligonucleotide
  Sense strand starting at position 3958 of SEQ ID NO: 1561992
gagagaagcccauguuauc

SEQ ID NO: 1713806 - RNA, 19 nt, Artificial Sequence
  Description of Artificial Sequence: Synthetic oligonucleotide
  Antisense strand to SEQ ID NO: 1713805
gauaacaugggcuucucuc

SEQ ID NO: 1713807 - RNA, 19 nt, Artificial Sequence
  Description of Artificial Sequence: Synthetic oligonucleotide
  Sense strand starting at position 3974 of SEQ ID NO: 1561992
auccacuaguccugagaag

SEQ ID NO: 1713808 - RNA, 19 nt, Artificial Sequence
  Description of Artificial Sequence: Synthetic oligonucleotide
  Antisense strand to SEQ ID NO: 1713807
cuucucaggacuaguggau

SEQ ID NO: 1713809 - RNA, 19 nt, Artificial Sequence
  Description of Artificial Sequence: Synthetic oligonucleotide
  Sense strand starting at position 41 of SEQ ID NO: 1561993
agaugagauucagcugcga

SEQ ID NO: 1713810 - RNA, 19 nt, Artificial Sequence
  Description of Artificial Sequence: Synthetic oligonucleotide
  Antisense strand to SEQ ID NO: 1713809
ucgcagcugaaucucaucu

SEQ ID NO: 1713811 - RNA, 19 nt, Artificial Sequence
  Description of Artificial Sequence: Synthetic oligonucleotide
  Sense strand starting at position 54 of SEQ ID NO: 1561993
cugcgacaugucgaauuau

SEQ ID NO: 1713812 - RNA, 19 nt, Artificial Sequence
  Description of Artificial Sequence: Synthetic oligonucleotide
  Antisense strand to SEQ ID NO: 1713811
auaauucgacaugucgcag

SEQ ID NO: 1713813 - RNA, 19 nt, Artificial Sequence
  Description of Artificial Sequence: Synthetic oligonucleotide
  Sense strand starting at position 301 of SEQ ID NO: 1561993
ugcucugaagagugguauu

SEQ ID NO: 1713814 - RNA, 19 nt, Artificial Sequence
  Description of Artificial Sequence: Synthetic oligonucleotide
  Antisense strand to SEQ ID NO: 1713813
aauaccacucuucagagca

SEQ ID NO: 1713815 - RNA, 19 nt, Artificial Sequence
  Description of Artificial Sequence: Synthetic oligonucleotide
  Sense strand starting at position 343 of SEQ ID NO: 1561993
cugagcauccacgauauga

SEQ ID NO: 1713816 - RNA, 19 nt, Artificial Sequence
  Description of Artificial Sequence: Synthetic oligonucleotide
  Antisense strand to SEQ ID NO: 1713815
ucauaucguggaugcucag

SEQ ID NO: 1713817 - RNA, 19 nt, Artificial Sequence
  Description of Artificial Sequence: Synthetic oligonucleotide
  Sense strand starting at position 345 of SEQ ID NO: 1561993
gagcauccacgauaugaac

SEQ ID NO: 1713818 - RNA, 19 nt, Artificial Sequence
  Description of Artificial Sequence: Synthetic oligonucleotide
  Antisense strand to SEQ ID NO: 1713817
guucauaucguggaugcuc

SEQ ID NO: 1713819 - RNA, 19 nt, Artificial Sequence
  Description of Artificial Sequence: Synthetic oligonucleotide
  Sense strand starting at position 395 of SEQ ID NO: 1561993
auaacaacgauguguugaa

SEQ ID NO: 1713820 - RNA, 19 nt, Artificial Sequence
  Description of Artificial Sequence: Synthetic oligonucleotide
  Antisense strand to SEQ ID NO: 1713819
uucaacacaucguuguuau

SEQ ID NO: 1713821 - RNA, 19 nt, Artificial Sequence
  Description of Artificial Sequence: Synthetic oligonucleotide
  Sense strand starting at position 430 of SEQ ID NO: 1561993
gcugaagguguauaauaua

SEQ ID NO: 1713822 - RNA, 19 nt, Artificial Sequence
  Description of Artificial Sequence: Synthetic oligonucleotide
  Antisense strand to SEQ ID NO: 1713821
uauauuauacaccuucagc

SEQ ID NO: 1713823 - RNA, 19 nt, Artificial Sequence
  Description of Artificial Sequence: Synthetic oligonucleotide
  Sense strand starting at position 514 of SEQ ID NO: 1561993
uauaucuauuccguguaga

SEQ ID NO: 1713824 - RNA, 19 nt, Artificial Sequence
  Description of Artificial Sequence: Synthetic oligonucleotide
  Antisense strand to SEQ ID NO: 1713823
ucuacacggaauagauaua

SEQ ID NO: 1713825 - RNA, 19 nt, Artificial Sequence
  Description of Artificial Sequence: Synthetic oligonucleotide
  Sense strand starting at position 515 of SEQ ID NO: 1561993
auaucuauuccguguagac

SEQ ID NO: 1713826 - RNA, 19 nt, Artificial Sequence
  Description of Artificial Sequence: Synthetic oligonucleotide
  Antisense strand to SEQ ID NO: 1713825
gucuacacggaauagauau

SEQ ID NO: 1713827 - RNA, 19 nt, Artificial Sequence
  Description of Artificial Sequence: Synthetic oligonucleotide
  Sense strand starting at position 517 of SEQ ID NO: 1561993
aucuauuccguguagacag

SEQ ID NO: 1713828 - RNA, 19 nt, Artificial Sequence
  Description of Artificial Sequence: Synthetic oligonucleotide
  Antisense strand to SEQ ID NO: 1713827
cugucuacacggaauagau

SEQ ID NO: 1713829 - RNA, 19 nt, Artificial Sequence
  Description of Artificial Sequence: Synthetic oligonucleotide
  Sense strand starting at position 699 of SEQ ID NO: 1561993
cuuccuucugcugagaguu

SEQ ID NO: 1713830 - RNA, 19 nt, Artificial Sequence
  Description of Artificial Sequence: Synthetic oligonucleotide
  Antisense strand to SEQ ID NO: 1713829
aacucucagcagaaggaag

SEQ ID NO: 1713831 - RNA, 19 nt, Artificial Sequence
  Description of Artificial Sequence: Synthetic oligonucleotide
  Sense strand starting at position 711 of SEQ ID NO: 1561993
gagaguugcaccuagguga

SEQ ID NO: 1713832 - RNA, 19 nt, Artificial Sequence
  Description of Artificial Sequence: Synthetic oligonucleotide
  Antisense strand to SEQ ID NO: 1713831
ucaccuaggugcaacucuc

SEQ ID NO: 1713833 - RNA, 19 nt, Artificial Sequence
  Description of Artificial Sequence: Synthetic oligonucleotide
  Sense strand starting at position 793 of SEQ ID NO: 1561993
cuugauuauuucugaauga

SEQ ID NO: 1713834 - RNA, 19 nt, Artificial Sequence
  Description of Artificial Sequence: Synthetic oligonucleotide
  Antisense strand to SEQ ID NO: 1713833
ucauucagaaauaaucaag

SEQ ID NO: 1713835 - RNA, 19 nt, Artificial Sequence
  Description of Artificial Sequence: Synthetic oligonucleotide
  Sense strand starting at position 830 of SEQ ID NO: 1561993
cugacuuguuauucuucga

SEQ ID NO: 1713836 - RNA, 19 nt, Artificial Sequence
  Description of Artificial Sequence: Synthetic oligonucleotide
  Antisense strand to SEQ ID NO: 1713835
ucgaagaauaacaagucag

SEQ ID NO: 1713837 - RNA, 19 nt, Artificial Sequence
  Description of Artificial Sequence: Synthetic oligonucleotide
  Sense strand starting at position 833 of SEQ ID NO: 1561993
acuuguuauucuucgauug

SEQ ID NO: 1713838 - RNA, 19 nt, Artificial Sequence
  Description of Artificial Sequence: Synthetic oligonucleotide
  Antisense strand to SEQ ID NO: 1713837
caaucgaagaauaacaagu

SEQ ID NO: 1713839 - RNA, 19 nt, Artificial Sequence
  Description of Artificial Sequence: Synthetic oligonucleotide
  Sense strand starting at position 856 of SEQ ID NO: 1561993
ugugguuaccaucauuaua

SEQ ID NO: 1713840 - RNA, 19 nt, Artificial Sequence
  Description of Artificial Sequence: Synthetic oligonucleotide
  Antisense strand to SEQ ID NO: 1713839
uauaaugaugguaaccaca

SEQ ID NO: 1713841 - RNA, 19 nt, Artificial Sequence
  Description of Artificial Sequence: Synthetic oligonucleotide
  Sense strand starting at position 858 of SEQ ID NO: 1561993
ugguuaccaucauuauaca

SEQ ID NO: 1713842 - RNA, 19 nt, Artificial Sequence
  Description of Artificial Sequence: Synthetic oligonucleotide
  Antisense strand to SEQ ID NO: 1713841
uguauaaugaugguaacca

SEQ ID NO: 1713843 - RNA, 19 nt, Artificial Sequence
  Description of Artificial Sequence: Synthetic oligonucleotide
  Sense strand starting at position 889 of SEQ ID NO: 1561993
cguaauuccuccucaaaga

SEQ ID NO: 1713844 - RNA, 19 nt, Artificial Sequence
  Description of Artificial Sequence: Synthetic oligonucleotide
  Antisense strand to SEQ ID NO: 1713843
ucuuugaggaggaauuacg

SEQ ID NO: 1713845 - RNA, 19 nt, Artificial Sequence
  Description of Artificial Sequence: Synthetic oligonucleotide
  Sense strand starting at position 1018 of SEQ ID NO: 1561993
uccugaaguccuugggauc

SEQ ID NO: 1713846 - RNA, 19 nt, Artificial Sequence
  Description of Artificial Sequence: Synthetic oligonucleotide
  Antisense strand to SEQ ID NO: 1713845
gaucccaaggacuucagga

SEQ ID NO: 1713847 - RNA, 19 nt, Artificial Sequence
  Description of Artificial Sequence: Synthetic oligonucleotide
  Sense strand starting at position 1117 of SEQ ID NO: 1561993
uguugcuuccaagaacuua

SEQ ID NO: 1713848 - RNA, 19 nt, Artificial Sequence
  Description of Artificial Sequence: Synthetic oligonucleotide
  Antisense strand to SEQ ID NO: 1713847
uaaguucuuggaagcaaca

SEQ ID NO: 1713849 - RNA, 19 nt, Artificial Sequence
  Description of Artificial Sequence: Synthetic oligonucleotide
  Sense strand starting at position 1369 of SEQ ID NO: 1561993
gagcauauguuccugacac

SEQ ID NO: 1713850 - RNA, 19 nt, Artificial Sequence
  Description of Artificial Sequence: Synthetic oligonucleotide
  Antisense strand to SEQ ID NO: 1713849
gugucaggaacauaugcuc

SEQ ID NO: 1713851 - RNA, 19 nt, Artificial Sequence
  Description of Artificial Sequence: Synthetic oligonucleotide
  Sense strand starting at position 1371 of SEQ ID NO: 1561993
gcauauguuccugacacua

SEQ ID NO: 1713852 - RNA, 19 nt, Artificial Sequence
  Description of Artificial Sequence: Synthetic oligonucleotide
  Antisense strand to SEQ ID NO: 1713851
uagugucaggaacauaugc

SEQ ID NO: 1713853 - RNA, 19 nt, Artificial Sequence
  Description of Artificial Sequence: Synthetic oligonucleotide
  Sense strand starting at position 1401 of SEQ ID NO: 1561993
caaucuccacugugggaaa

SEQ ID NO: 1713854 - RNA, 19 nt, Artificial Sequence
  Description of Artificial Sequence: Synthetic oligonucleotide
  Antisense strand to SEQ ID NO: 1713853
uuucccacaguggagauug

SEQ ID NO: 1713855 - RNA, 19 nt, Artificial Sequence
  Description of Artificial Sequence: Synthetic oligonucleotide
  Sense strand starting at position 1413 of SEQ ID NO: 1561993
ugggaaaccuccucuacuu

SEQ ID NO: 1713856 - RNA, 19 nt, Artificial Sequence
  Description of Artificial Sequence: Synthetic oligonucleotide
  Antisense strand to SEQ ID NO: 1713855
aaguagaggagguuuccca

SEQ ID NO: 1713857 - RNA, 19 nt, Artificial Sequence
  Description of Artificial Sequence: Synthetic oligonucleotide
  Sense strand starting at position 1627 of SEQ ID NO: 1561993
ucuggacucugugccagaa

SEQ ID NO: 1713858 - RNA, 19 nt, Artificial Sequence
  Description of Artificial Sequence: Synthetic oligonucleotide
  Antisense strand to SEQ ID NO: 1713857
uucuggcacagaguccaga

SEQ ID NO: 1713859 - RNA, 19 nt, Artificial Sequence
  Description of Artificial Sequence: Synthetic oligonucleotide
  Sense strand starting at position 1652 of SEQ ID NO: 1561993
ggcugauccuggucugacu

SEQ ID NO: 1713860 - RNA, 19 nt, Artificial Sequence
  Description of Artificial Sequence: Synthetic oligonucleotide
  Antisense strand to SEQ ID NO: 1713859
agucagaccaggaucagcc

SEQ ID NO: 1713861 - RNA, 19 nt, Artificial Sequence
  Description of Artificial Sequence: Synthetic oligonucleotide
  Sense strand starting at position 1661 of SEQ ID NO: 1561993
uggucugacucccuugaua

SEQ ID NO: 1713862 - RNA, 19 nt, Artificial Sequence
  Description of Artificial Sequence: Synthetic oligonucleotide
  Antisense strand to SEQ ID NO: 1713861
uaucaagggagucagacca

SEQ ID NO: 1713863 - RNA, 19 nt, Artificial Sequence
  Description of Artificial Sequence: Synthetic oligonucleotide
  Sense strand starting at position 1663 of SEQ ID NO: 1561993
gucugacucccuugauaca

SEQ ID NO: 1713864 - RNA, 19 nt, Artificial Sequence
  Description of Artificial Sequence: Synthetic oligonucleotide
  Antisense strand to SEQ ID NO: 1713863
uguaucaagggagucagac

SEQ ID NO: 1713865 - RNA, 19 nt, Artificial Sequence
  Description of Artificial Sequence: Synthetic oligonucleotide
  Sense strand starting at position 1816 of SEQ ID NO: 1561993
acccuuugccuuuaagaag

SEQ ID NO: 1713866 - RNA, 19 nt, Artificial Sequence
  Description of Artificial Sequence: Synthetic oligonucleotide
  Antisense strand to SEQ ID NO: 1713865
cuucuuaaaggcaaagggu

SEQ ID NO: 1713867 - RNA, 19 nt, Artificial Sequence
  Description of Artificial Sequence: Synthetic oligonucleotide
  Sense strand starting at position 1996 of SEQ ID NO: 1561993
aaaggucaagauuggcaaa

SEQ ID NO: 1713868 - RNA, 19 nt, Artificial Sequence
  Description of Artificial Sequence: Synthetic oligonucleotide
  Antisense strand to SEQ ID NO: 1713867
uuugccaaucuugaccuuu

SEQ ID NO: 1713869 - RNA, 19 nt, Artificial Sequence
  Description of Artificial Sequence: Synthetic oligonucleotide
  Sense strand starting at position 1998 of SEQ ID NO: 1561993
aggucaagauuggcaaaga

SEQ ID NO: 1713870 - RNA, 19 nt, Artificial Sequence
  Description of Artificial Sequence: Synthetic oligonucleotide
  Antisense strand to SEQ ID NO: 1713869
ucuuugccaaucuugaccu

SEQ ID NO: 1713871 - RNA, 19 nt, Artificial Sequence
  Description of Artificial Sequence: Synthetic oligonucleotide
  Sense strand starting at position 2447 of SEQ ID NO: 1561993
aggcaaguuccaggaacua

SEQ ID NO: 1713872 - RNA, 19 nt, Artificial Sequence
  Description of Artificial Sequence: Synthetic oligonucleotide
  Antisense strand to SEQ ID NO: 1713871
uaguuccuggaacuugccu

SEQ ID NO: 1713873 - RNA, 19 nt, Artificial Sequence
  Description of Artificial Sequence: Synthetic oligonucleotide
  Sense strand starting at position 2804 of SEQ ID NO: 1561993
ggcuuaguugcaggaacau

SEQ ID NO: 1713874 - RNA, 19 nt, Artificial Sequence
  Description of Artificial Sequence: Synthetic oligonucleotide
  Antisense strand to SEQ ID NO: 1713873
auguuccugcaacuaagcc

SEQ ID NO: 1713875 - RNA, 19 nt, Artificial Sequence
  Description of Artificial Sequence: Synthetic oligonucleotide
  Sense strand starting at position 2996 of SEQ ID NO: 1561993
accagaaugucuccaggca

SEQ ID NO: 1713876 - RNA, 19 nt, Artificial Sequence
  Description of Artificial Sequence: Synthetic oligonucleotide
  Antisense strand to SEQ ID NO: 1713875
ugccuggagacauucuggu

SEQ ID NO: 1713877 - RNA, 19 nt, Artificial Sequence
  Description of Artificial Sequence: Synthetic oligonucleotide
  Sense strand starting at position 3138 of SEQ ID NO: 1561993
ccucucugauccucggaga

SEQ ID NO: 1713878 - RNA, 19 nt, Artificial Sequence
  Description of Artificial Sequence: Synthetic oligonucleotide
  Antisense strand to SEQ ID NO: 1713877
ucuccgaggaucagagagg

SEQ ID NO: 1713879 - RNA, 19 nt, Artificial Sequence
  Description of Artificial Sequence: Synthetic oligonucleotide
  Sense strand starting at position 3180 of SEQ ID NO: 1561993
gaacuuaacgaaugaagcu

SEQ ID NO: 1713880 - RNA, 19 nt, Artificial Sequence
  Description of Artificial Sequence: Synthetic oligonucleotide
  Antisense strand to SEQ ID NO: 1713879
agcuucauucguuaaguuc

SEQ ID NO: 1713881 - RNA, 19 nt, Artificial Sequence
  Description of Artificial Sequence: Synthetic oligonucleotide
  Sense strand starting at position 3193 of SEQ ID NO: 1561993
gaagcuuugcuaugaagag

SEQ ID NO: 1713882 - RNA, 19 nt, Artificial Sequence
  Description of Artificial Sequence: Synthetic oligonucleotide
  Antisense strand to SEQ ID NO: 1713881
cucuucauagcaaagcuuc

SEQ ID NO: 1713883 - RNA, 19 nt, Artificial Sequence
  Description of Artificial Sequence: Synthetic oligonucleotide
  Sense strand starting at position 3199 of SEQ ID NO: 1561993
uugcuaugaagagguaguu

SEQ ID NO: 1713884 - RNA, 19 nt, Artificial Sequence
  Description of Artificial Sequence: Synthetic oligonucleotide
  Antisense strand to SEQ ID NO: 1713883
aacuaccucuucauagcaa

SEQ ID NO: 1713885 - RNA, 19 nt, Artificial Sequence
  Description of Artificial Sequence: Synthetic oligonucleotide
  Sense strand starting at position 3271 of SEQ ID NO: 1561993
gacucagauccagguccaa

SEQ ID NO: 1713886 - RNA, 19 nt, Artificial Sequence
  Description of Artificial Sequence: Synthetic oligonucleotide
  Antisense strand to SEQ ID NO: 1713885
uuggaccuggaucugaguc

SEQ ID NO: 1713887 - RNA, 19 nt, Artificial Sequence
  Description of Artificial Sequence: Synthetic oligonucleotide
  Sense strand starting at position 3373 of SEQ ID NO: 1561993
gauggugugauaugagcua

SEQ ID NO: 1713888 - RNA, 19 nt, Artificial Sequence
  Description of Artificial Sequence: Synthetic oligonucleotide
  Antisense strand to SEQ ID NO: 1713887
uagcucauaucacaccauc

SEQ ID NO: 1713889 - RNA, 19 nt, Artificial Sequence
  Description of Artificial Sequence: Synthetic oligonucleotide
  Sense strand starting at position 77 of SEQ ID NO: 1561994
ugacgucuacuuuaaugga

SEQ ID NO: 1713890 - RNA, 19 nt, Artificial Sequence
  Description of Artificial Sequence: Synthetic oligonucleotide
  Antisense strand to SEQ ID NO: 1713889
uccauuaaaguagacguca

SEQ ID NO: 1713891 - RNA, 19 nt, Artificial Sequence
  Description of Artificial Sequence: Synthetic oligonucleotide
  Sense strand starting at position 520 of SEQ ID NO: 1561994
cagugucaugauugacacu

SEQ ID NO: 1713892 - RNA, 19 nt, Artificial Sequence
  Description of Artificial Sequence: Synthetic oligonucleotide
  Antisense strand to SEQ ID NO: 1713891
agugucaaucaugacacug

SEQ ID NO: 1713893 - RNA, 19 nt, Artificial Sequence
  Description of Artificial Sequence: Synthetic oligonucleotide
  Sense strand starting at position 529 of SEQ ID NO: 1561994
gauugacacuaaucaguug

SEQ ID NO: 1713894 - RNA, 19 nt, Artificial Sequence
  Description of Artificial Sequence: Synthetic oligonucleotide
  Antisense strand to SEQ ID NO: 1713893
caacugauuagugucaauc

SEQ ID NO: 1713895 - RNA, 19 nt, Artificial Sequence
  Description of Artificial Sequence: Synthetic oligonucleotide
  Sense strand starting at position 532 of SEQ ID NO: 1561994
ugacacuaaucaguugacu

SEQ ID NO: 1713896 - RNA, 19 nt, Artificial Sequence
  Description of Artificial Sequence: Synthetic oligonucleotide
  Antisense strand to SEQ ID NO: 1713895
agucaacugauuaguguca

SEQ ID NO: 1713897 - RNA, 19 nt, Artificial Sequence
  Description of Artificial Sequence: Synthetic oligonucleotide
  Sense strand starting at position 537 of SEQ ID NO: 1561994
cuaaucaguugacuggaaa

SEQ ID NO: 1713898 - RNA, 19 nt, Artificial Sequence
  Description of Artificial Sequence: Synthetic oligonucleotide
  Antisense strand to SEQ ID NO: 1713897
uuuccagucaacugauuag

SEQ ID NO: 1713899 - RNA, 19 nt, Artificial Sequence
  Description of Artificial Sequence: Synthetic oligonucleotide
  Sense strand starting at position 614 of SEQ ID NO: 1561994
ucaugcauucugcaggaaa

SEQ ID NO: 1713900 - RNA, 19 nt, Artificial Sequence
  Description of Artificial Sequence: Synthetic oligonucleotide
  Antisense strand to SEQ ID NO: 1713899
uuuccugcagaaugcauga

SEQ ID NO: 1713901 - RNA, 19 nt, Artificial Sequence
  Description of Artificial Sequence: Synthetic oligonucleotide
  Sense strand starting at position 757 of SEQ ID NO: 1561994
ccaucagucagugggaaga

SEQ ID NO: 1713902 - RNA, 19 nt, Artificial Sequence
  Description of Artificial Sequence: Synthetic oligonucleotide
  Antisense strand to SEQ ID NO: 1713901
ucuucccacugacugaugg

SEQ ID NO: 1713903 - RNA, 19 nt, Artificial Sequence
  Description of Artificial Sequence: Synthetic oligonucleotide
  Sense strand starting at position 836 of SEQ ID NO: 1561994
cuguauugaggacaauugu

SEQ ID NO: 1713904 - RNA, 19 nt, Artificial Sequence
  Description of Artificial Sequence: Synthetic oligonucleotide
  Antisense strand to SEQ ID NO: 1713903
acaauuguccucaauacag

SEQ ID NO: 1713905 - RNA, 19 nt, Artificial Sequence
  Description of Artificial Sequence: Synthetic oligonucleotide
  Sense strand starting at position 913 of SEQ ID NO: 1561994
guuuauuccgcuccauugu

SEQ ID NO: 1713906 - RNA, 19 nt, Artificial Sequence
  Description of Artificial Sequence: Synthetic oligonucleotide
  Antisense strand to SEQ ID NO: 1713905
acaauggagcggaauaaac

SEQ ID NO: 1713907 - RNA, 19 nt, Artificial Sequence
  Description of Artificial Sequence: Synthetic oligonucleotide
  Sense strand starting at position 1271 of SEQ ID NO: 1561994
agggccuuccugggaagaa

SEQ ID NO: 1713908 - RNA, 19 nt, Artificial Sequence
  Description of Artificial Sequence: Synthetic oligonucleotide
  Antisense strand to SEQ ID NO: 1713907
uucuucccaggaaggcccu

SEQ ID NO: 1713909 - RNA, 19 nt, Artificial Sequence
  Description of Artificial Sequence: Synthetic oligonucleotide
  Sense strand starting at position 1469 of SEQ ID NO: 1561994
ccuggcgccucauuauuua

SEQ ID NO: 1713910 - RNA, 19 nt, Artificial Sequence
  Description of Artificial Sequence: Synthetic oligonucleotide
  Antisense strand to SEQ ID NO: 1713909
uaaauaaugaggcgccagg

SEQ ID NO: 1713911 - RNA, 19 nt, Artificial Sequence
  Description of Artificial Sequence: Synthetic oligonucleotide
  Sense strand starting at position 1515 of SEQ ID NO: 1561994
aagcuauaggugugauaaa

SEQ ID NO: 1713912 - RNA, 19 nt, Artificial Sequence
  Description of Artificial Sequence: Synthetic oligonucleotide
  Antisense strand to SEQ ID NO: 1713911
uuuaucacaccuauagcuu

SEQ ID NO: 1713913 - RNA, 19 nt, Artificial Sequence
  Description of Artificial Sequence: Synthetic oligonucleotide
  Sense strand starting at position 1617 of SEQ ID NO: 1561994
uuuaguuaaccucacugua

SEQ ID NO: 1713914 - RNA, 19 nt, Artificial Sequence
  Description of Artificial Sequence: Synthetic oligonucleotide
  Antisense strand to SEQ ID NO: 1713913
uacagugagguuaacuaaa

SEQ ID NO: 1713915 - RNA, 19 nt, Artificial Sequence
  Description of Artificial Sequence: Synthetic oligonucleotide
  Sense strand starting at position 1680 of SEQ ID NO: 1561994
ggaugcugucauugaggga

SEQ ID NO: 1713916 - RNA, 19 nt, Artificial Sequence
  Description of Artificial Sequence: Synthetic oligonucleotide
  Antisense strand to SEQ ID NO: 1713915
ucccucaaugacagcaucc

SEQ ID NO: 1713917 - RNA, 19 nt, Artificial Sequence
  Description of Artificial Sequence: Synthetic oligonucleotide
  Sense strand starting at position 1681 of SEQ ID NO: 1561994
gaugcugucauugagggaa

SEQ ID NO: 1713918 - RNA, 19 nt, Artificial Sequence
  Description of Artificial Sequence: Synthetic oligonucleotide
  Antisense strand to SEQ ID NO: 1713917
uucccucaaugacagcauc

SEQ ID NO: 1713919 - RNA, 19 nt, Artificial Sequence
  Description of Artificial Sequence: Synthetic oligonucleotide
  Sense strand starting at position 2151 of SEQ ID NO: 1561994
cagugcuugcucucuguga

SEQ ID NO: 1713920 - RNA, 19 nt, Artificial Sequence
  Description of Artificial Sequence: Synthetic oligonucleotide
  Antisense strand to SEQ ID NO: 1713919
ucacagagagcaagcacug

SEQ ID NO: 1713921 - RNA, 19 nt, Artificial Sequence
  Description of Artificial Sequence: Synthetic oligonucleotide
  Sense strand starting at position 2164 of SEQ ID NO: 1561994
cugugaaaugcccgauuuc

SEQ ID NO: 1713922 - RNA, 19 nt, Artificial Sequence
  Description of Artificial Sequence: Synthetic oligonucleotide
  Antisense strand to SEQ ID NO: 1713921
gaaaucgggcauuucacag

SEQ ID NO: 1713923 - RNA, 19 nt, Artificial Sequence
  Description of Artificial Sequence: Synthetic oligonucleotide
  Sense strand starting at position 2473 of SEQ ID NO: 1561994
gccacaugaguuggaaacu

SEQ ID NO: 1713924 - RNA, 19 nt, Artificial Sequence
  Description of Artificial Sequence: Synthetic oligonucleotide
  Antisense strand to SEQ ID NO: 1713923
aguuuccaacucauguggc

SEQ ID NO: 1713925 - RNA, 19 nt, Artificial Sequence
  Description of Artificial Sequence: Synthetic oligonucleotide
  Sense strand starting at position 2484 of SEQ ID NO: 1561994
uggaaacuuccaugccgaa

SEQ ID NO: 1713926 - RNA, 19 nt, Artificial Sequence
  Description of Artificial Sequence: Synthetic oligonucleotide
  Antisense strand to SEQ ID NO: 1713925
uucggcauggaaguuucca

SEQ ID NO: 1713927 - RNA, 19 nt, Artificial Sequence
  Description of Artificial Sequence: Synthetic oligonucleotide
  Sense strand starting at position 2602 of SEQ ID NO: 1561994
aagcacugccuggauagau

SEQ ID NO: 1713928 - RNA, 19 nt, Artificial Sequence
  Description of Artificial Sequence: Synthetic oligonucleotide
  Antisense strand to SEQ ID NO: 1713927
aucuauccaggcagugcuu

SEQ ID NO: 1713929 - RNA, 19 nt, Artificial Sequence
  Description of Artificial Sequence: Synthetic oligonucleotide
  Sense strand starting at position 2669 of SEQ ID NO: 1561994
gauaaugguagaugaucga

SEQ ID NO: 1713930 - RNA, 19 nt, Artificial Sequence
  Description of Artificial Sequence: Synthetic oligonucleotide
  Antisense strand to SEQ ID NO: 1713929
ucgaucaucuaccauuauc

SEQ ID NO: 1713931 - RNA, 19 nt, Artificial Sequence
  Description of Artificial Sequence: Synthetic oligonucleotide
  Sense strand starting at position 2672 of SEQ ID NO: 1561994
aaugguagaugaucgauua

SEQ ID NO: 1713932 - RNA, 19 nt, Artificial Sequence
  Description of Artificial Sequence: Synthetic oligonucleotide
  Antisense strand to SEQ ID NO: 1713931
uaaucgaucaucuaccauu

SEQ ID NO: 1713933 - RNA, 19 nt, Artificial Sequence
  Description of Artificial Sequence: Synthetic oligonucleotide
  Sense strand starting at position 2684 of SEQ ID NO: 1561994
ucgauuagcagauggauga

SEQ ID NO: 1713934 - RNA, 19 nt, Artificial Sequence
  Description of Artificial Sequence: Synthetic oligonucleotide
  Antisense strand to SEQ ID NO: 1713933
ucauccaucugcuaaucga

SEQ ID NO: 1713935 - RNA, 19 nt, Artificial Sequence
  Description of Artificial Sequence: Synthetic oligonucleotide
  Sense strand starting at position 2955 of SEQ ID NO: 1561994
uguccagucccagauaucu

SEQ ID NO: 1713936 - RNA, 19 nt, Artificial Sequence
  Description of Artificial Sequence: Synthetic oligonucleotide
  Antisense strand to SEQ ID NO: 1713935
agauaucugggacuggaca

SEQ ID NO: 1713937 - RNA, 19 nt, Artificial Sequence
  Description of Artificial Sequence: Synthetic oligonucleotide
  Sense strand starting at position 3026 of SEQ ID NO: 1561994
ucugauaggucucucaaac

SEQ ID NO: 1713938 - RNA, 19 nt, Artificial Sequence
  Description of Artificial Sequence: Synthetic oligonucleotide
  Antisense strand to SEQ ID NO: 1713937
guuugagagaccuaucaga

SEQ ID NO: 1713939 - RNA, 19 nt, Artificial Sequence
  Description of Artificial Sequence: Synthetic oligonucleotide
  Sense strand starting at position 3058 of SEQ ID NO: 1561994
agcugaacagagcauugau

SEQ ID NO: 1713940 - RNA, 19 nt, Artificial Sequence
  Description of Artificial Sequence: Synthetic oligonucleotide
  Antisense strand to SEQ ID NO: 1713939
aucaaugcucuguucagcu

SEQ ID NO: 1713941 - RNA, 19 nt, Artificial Sequence
  Description of Artificial Sequence: Synthetic oligonucleotide
  Sense strand starting at position 3167 of SEQ ID NO: 1561994
uggagucauccaggacucu

SEQ ID NO: 1713942 - RNA, 19 nt, Artificial Sequence
  Description of Artificial Sequence: Synthetic oligonucleotide
  Antisense strand to SEQ ID NO: 1713941
agaguccuggaugacucca

SEQ ID NO: 1713943 - RNA, 19 nt, Artificial Sequence
  Description of Artificial Sequence: Synthetic oligonucleotide
  Sense strand starting at position 3374 of SEQ ID NO: 1561994
gugcauuuccagggucaca

SEQ ID NO: 1713944 - RNA, 19 nt, Artificial Sequence
  Description of Artificial Sequence: Synthetic oligonucleotide
  Antisense strand to SEQ ID NO: 1713943
ugugacccuggaaaugcac

SEQ ID NO: 1713945 - RNA, 19 nt, Artificial Sequence
  Description of Artificial Sequence: Synthetic oligonucleotide
  Sense strand starting at position 3405 of SEQ ID NO: 1561994
aagguugcauucucugaaa

SEQ ID NO: 1713946 - RNA, 19 nt, Artificial Sequence
  Description of Artificial Sequence: Synthetic oligonucleotide
  Antisense strand to SEQ ID NO: 1713945
uuucagagaaugcaaccuu

SEQ ID NO: 1713947 - RNA, 19 nt, Artificial Sequence
  Description of Artificial Sequence: Synthetic oligonucleotide
  Sense strand starting at position 3457 of SEQ ID NO: 1561994
cugggauguuuacucccau

SEQ ID NO: 1713948 - RNA, 19 nt, Artificial Sequence
  Description of Artificial Sequence: Synthetic oligonucleotide
  Antisense strand to SEQ ID NO: 1713947
augggaguaaacaucccag

SEQ ID NO: 1713949 - RNA, 19 nt, Artificial Sequence
  Description of Artificial Sequence: Synthetic oligonucleotide
  Sense strand starting at position 3458 of SEQ ID NO: 1561994
ugggauguuuacucccauu

SEQ ID NO: 1713950 - RNA, 19 nt, Artificial Sequence
  Description of Artificial Sequence: Synthetic oligonucleotide
  Antisense strand to SEQ ID NO: 1713949
aaugggaguaaacauccca

SEQ ID NO: 1713951 - RNA, 19 nt, Artificial Sequence
  Description of Artificial Sequence: Synthetic oligonucleotide
  Sense strand starting at position 3469 of SEQ ID NO: 1561994
cucccauuucgucagcuga

SEQ ID NO: 1713952 - RNA, 19 nt, Artificial Sequence
  Description of Artificial Sequence: Synthetic oligonucleotide
  Antisense strand to SEQ ID NO: 1713951
ucagcugacgaaaugggag

SEQ ID NO: 1713953 - RNA, 19 nt, Artificial Sequence
  Description of Artificial Sequence: Synthetic oligonucleotide
  Sense strand starting at position 3529 of SEQ ID NO: 1561994
cacuuugaugcuugggaga

SEQ ID NO: 1713954 - RNA, 19 nt, Artificial Sequence
  Description of Artificial Sequence: Synthetic oligonucleotide
  Antisense strand to SEQ ID NO: 1713953
ucucccaagcaucaaagug

SEQ ID NO: 1713955 - RNA, 19 nt, Artificial Sequence
  Description of Artificial Sequence: Synthetic oligonucleotide
  Sense strand starting at position 3570 of SEQ ID NO: 1561994
ggcugugcugugcuggaaa

SEQ ID NO: 1713956 - RNA, 19 nt, Artificial Sequence
  Description of Artificial Sequence: Synthetic oligonucleotide
  Antisense strand to SEQ ID NO: 1713955
uuuccagcacagcacagcc

SEQ ID NO: 1713957 - RNA, 19 nt, Artificial Sequence
  Description of Artificial Sequence: Synthetic oligonucleotide
  Sense strand starting at position 3600 of SEQ ID NO: 1561994
guauaagggagcugauaug

SEQ ID NO: 1713958 - RNA, 19 nt, Artificial Sequence
  Description of Artificial Sequence: Synthetic oligonucleotide
  Antisense strand to SEQ ID NO: 1713957
cauaucagcucccuuauac

SEQ ID NO: 1713959 - RNA, 19 nt, Artificial Sequence
  Description of Artificial Sequence: Synthetic oligonucleotide
  Sense strand starting at position 3606 of SEQ ID NO: 1561994
gggagcugauauguacauu

SEQ ID NO: 1713960 - RNA, 19 nt, Artificial Sequence
  Description of Artificial Sequence: Synthetic oligonucleotide
  Antisense strand to SEQ ID NO: 1713959
aauguacauaucagcuccc

SEQ ID NO: 1713961 - RNA, 19 nt, Artificial Sequence
  Description of Artificial Sequence: Synthetic oligonucleotide
  Sense strand starting at position 3667 of SEQ ID NO: 1561994
ugcagcauuccugaaagug

SEQ ID NO: 1713962 - RNA, 19 nt, Artificial Sequence
  Description of Artificial Sequence: Synthetic oligonucleotide
  Antisense strand to SEQ ID NO: 1713961
cacuuucaggaaugcugca

SEQ ID NO: 1713963 - RNA, 19 nt, Artificial Sequence
  Description of Artificial Sequence: Synthetic oligonucleotide
  Sense strand starting at position 3765 of SEQ ID NO: 1561994
gguccaaggaauugugaug

SEQ ID NO: 1713964 - RNA, 19 nt, Artificial Sequence
  Description of Artificial Sequence: Synthetic oligonucleotide
  Antisense strand to SEQ ID NO: 1713963
caucacaauuccuuggacc

SEQ ID NO: 1713965 - RNA, 19 nt, Artificial Sequence
  Description of Artificial Sequence: Synthetic oligonucleotide
  Sense strand starting at position 3849 of SEQ ID NO: 1561994
cuucgaauccuccagcaca

SEQ ID NO: 1713966 - RNA, 19 nt, Artificial Sequence
  Description of Artificial Sequence: Synthetic oligonucleotide
  Antisense strand to SEQ ID NO: 1713965
ugugcuggaggauucgaag

SEQ ID NO: 1713967 - RNA, 19 nt, Artificial Sequence
  Description of Artificial Sequence: Synthetic oligonucleotide
  Sense strand starting at position 3980 of SEQ ID NO: 1561994
uggcauugugggcaucaaa

SEQ ID NO: 1713968 - RNA, 19 nt, Artificial Sequence
  Description of Artificial Sequence: Synthetic oligonucleotide
  Antisense strand to SEQ ID NO: 1713967
uuugaugcccacaaugcca

SEQ ID NO: 1713969 - RNA, 19 nt, Artificial Sequence
  Description of Artificial Sequence: Synthetic oligonucleotide
  Sense strand starting at position 143 of SEQ ID NO: 1561995
gguaccuuaguuugaccaa

SEQ ID NO: 1713970 - RNA, 19 nt, Artificial Sequence
  Description of Artificial Sequence: Synthetic oligonucleotide
  Antisense strand to SEQ ID NO: 1713969
uuggucaaacuaagguacc

SEQ ID NO: 1713971 - RNA, 19 nt, Artificial Sequence
  Description of Artificial Sequence: Synthetic oligonucleotide
  Sense strand starting at position 199 of SEQ ID NO: 1561995
caauacuugcccggguuua

SEQ ID NO: 1713972 - RNA, 19 nt, Artificial Sequence
  Description of Artificial Sequence: Synthetic oligonucleotide
  Antisense strand to SEQ ID NO: 1713971
uaaacccgggcaaguauug

SEQ ID NO: 1713973 - RNA, 19 nt, Artificial Sequence
  Description of Artificial Sequence: Synthetic oligonucleotide
  Sense strand starting at position 200 of SEQ ID NO: 1561995
aauacuugcccggguuuau

SEQ ID NO: 1713974 - RNA, 19 nt, Artificial Sequence
  Description of Artificial Sequence: Synthetic oligonucleotide
  Antisense strand to SEQ ID NO: 1713973
auaaacccgggcaaguauu

SEQ ID NO: 1713975 - RNA, 19 nt, Artificial Sequence
  Description of Artificial Sequence: Synthetic oligonucleotide
  Sense strand starting at position 209 of SEQ ID NO: 1561995
ccggguuuauuguuuaaau

SEQ ID NO: 1713976 - RNA, 19 nt, Artificial Sequence
  Description of Artificial Sequence: Synthetic oligonucleotide
  Antisense strand to SEQ ID NO: 1713975
auuuaaacaauaaacccgg

SEQ ID NO: 1713977 - RNA, 19 nt, Artificial Sequence
  Description of Artificial Sequence: Synthetic oligonucleotide
  Sense strand starting at position 210 of SEQ ID NO: 1561995
cggguuuauuguuuaaauu

SEQ ID NO: 1713978 - RNA, 19 nt, Artificial Sequence
  Description of Artificial Sequence: Synthetic oligonucleotide
  Antisense strand to SEQ ID NO: 1713977
aauuuaaacaauaaacccg

SEQ ID NO: 1713979 - RNA, 19 nt, Artificial Sequence
  Description of Artificial Sequence: Synthetic oligonucleotide
  Sense strand starting at position 273 of SEQ ID NO: 1561995
uaaugaguccucuaggcag

SEQ ID NO: 1713980 - RNA, 19 nt, Artificial Sequence
  Description of Artificial Sequence: Synthetic oligonucleotide
  Antisense strand to SEQ ID NO: 1713979
cugccuagaggacucauua

SEQ ID NO: 1713981 - RNA, 19 nt, Artificial Sequence
  Description of Artificial Sequence: Synthetic oligonucleotide
  Sense strand starting at position 275 of SEQ ID NO: 1561995
augaguccucuaggcaguu

SEQ ID NO: 1713982 - RNA, 19 nt, Artificial Sequence
  Description of Artificial Sequence: Synthetic oligonucleotide
  Antisense strand to SEQ ID NO: 1713981
aacugccuagaggacucau

SEQ ID NO: 1713983 - RNA, 19 nt, Artificial Sequence
  Description of Artificial Sequence: Synthetic oligonucleotide
  Sense strand starting at position 276 of SEQ ID NO: 1561995
ugaguccucuaggcaguuu

SEQ ID NO: 1713984 - RNA, 19 nt, Artificial Sequence
  Description of Artificial Sequence: Synthetic oligonucleotide
  Antisense strand to SEQ ID NO: 1713983
aaacugccuagaggacuca

SEQ ID NO: 1713985 - RNA, 19 nt, Artificial Sequence
  Description of Artificial Sequence: Synthetic oligonucleotide
  Sense strand starting at position 288 of SEQ ID NO: 1561995
gcaguuuaucgggaagcuc

SEQ ID NO: 1713986 - RNA, 19 nt, Artificial Sequence
  Description of Artificial Sequence: Synthetic oligonucleotide
  Antisense strand to SEQ ID NO: 1713985
gagcuucccgauaaacugc

SEQ ID NO: 1713987 - RNA, 19 nt, Artificial Sequence
  Description of Artificial Sequence: Synthetic oligonucleotide
  Sense strand starting at position 310 of SEQ ID NO: 1561995
uguguuccagugcaggaau

SEQ ID NO: 1713988 - RNA, 19 nt, Artificial Sequence
  Description of Artificial Sequence: Synthetic oligonucleotide
  Antisense strand to SEQ ID NO: 1713987
auuccugcacuggaacaca

SEQ ID NO: 1713989 - RNA, 19 nt, Artificial Sequence
  Description of Artificial Sequence: Synthetic oligonucleotide
  Sense strand starting at position 446 of SEQ ID NO: 1561995
ggcgaagcaacuuguuauc

SEQ ID NO: 1713990 - RNA, 19 nt, Artificial Sequence
  Description of Artificial Sequence: Synthetic oligonucleotide
  Antisense strand to SEQ ID NO: 1713989
gauaacaaguugcuucgcc

SEQ ID NO: 1713991 - RNA, 19 nt, Artificial Sequence
  Description of Artificial Sequence: Synthetic oligonucleotide
  Sense strand starting at position 448 of SEQ ID NO: 1561995
cgaagcaacuuguuaucaa

SEQ ID NO: 1713992 - RNA, 19 nt, Artificial Sequence
  Description of Artificial Sequence: Synthetic oligonucleotide
  Antisense strand to SEQ ID NO: 1713991
uugauaacaaguugcuucg

SEQ ID NO: 1713993 - RNA, 19 nt, Artificial Sequence
  Description of Artificial Sequence: Synthetic oligonucleotide
  Sense strand starting at position 467 of SEQ ID NO: 1561995
aacagaaucuacgaaggaa

SEQ ID NO: 1713994 - RNA, 19 nt, Artificial Sequence
  Description of Artificial Sequence: Synthetic oligonucleotide
  Antisense strand to SEQ ID NO: 1713993
uuccuucguagauucuguu

SEQ ID NO: 1713995 - RNA, 19 nt, Artificial Sequence
  Description of Artificial Sequence: Synthetic oligonucleotide
  Sense strand starting at position 475 of SEQ ID NO: 1561995
cuacgaaggaauugugcuu

SEQ ID NO: 1713996 - RNA, 19 nt, Artificial Sequence
  Description of Artificial Sequence: Synthetic oligonucleotide
  Antisense strand to SEQ ID NO: 1713995
aagcacaauuccuucguag

SEQ ID NO: 1713997 - RNA, 19 nt, Artificial Sequence
  Description of Artificial Sequence: Synthetic oligonucleotide
  Sense strand starting at position 480 of SEQ ID NO: 1561995
aaggaauugugcuucucua

SEQ ID NO: 1713998 - RNA, 19 nt, Artificial Sequence
  Description of Artificial Sequence: Synthetic oligonucleotide
  Antisense strand to SEQ ID NO: 1713997
uagagaagcacaauuccuu

SEQ ID NO: 1713999 - RNA, 19 nt, Artificial Sequence
  Description of Artificial Sequence: Synthetic oligonucleotide
  Sense strand starting at position 510 of SEQ ID NO: 1561995
ugaguccuguggcuugaua

SEQ ID NO: 1714000 - RNA, 19 nt, Artificial Sequence
  Description of Artificial Sequence: Synthetic oligonucleotide
  Antisense strand to SEQ ID NO: 1713999
uaucaagccacaggacuca

SEQ ID NO: 1714001 - RNA, 19 nt, Artificial Sequence
  Description of Artificial Sequence: Synthetic oligonucleotide
  Sense strand starting at position 577 of SEQ ID NO: 1561995
ccagacuucucccugugaa

SEQ ID NO: 1714002 - RNA, 19 nt, Artificial Sequence
  Description of Artificial Sequence: Synthetic oligonucleotide
  Antisense strand to SEQ ID NO: 1714001
uucacagggagaagucugg

SEQ ID NO: 1714003 - RNA, 19 nt, Artificial Sequence
  Description of Artificial Sequence: Synthetic oligonucleotide
  Sense strand starting at position 578 of SEQ ID NO: 1561995
cagacuucucccugugaag

SEQ ID NO: 1714004 - RNA, 19 nt, Artificial Sequence
  Description of Artificial Sequence: Synthetic oligonucleotide
  Antisense strand to SEQ ID NO: 1714003
cuucacagggagaagucug

SEQ ID NO: 1714005 - RNA, 19 nt, Artificial Sequence
  Description of Artificial Sequence: Synthetic oligonucleotide
  Sense strand starting at position 580 of SEQ ID NO: 1561995
gacuucucccugugaagug

SEQ ID NO: 1714006 - RNA, 19 nt, Artificial Sequence
  Description of Artificial Sequence: Synthetic oligonucleotide
  Antisense strand to SEQ ID NO: 1714005
cacuucacagggagaaguc

SEQ ID NO: 1714007 - RNA, 19 nt, Artificial Sequence
  Description of Artificial Sequence: Synthetic oligonucleotide
  Sense strand starting at position 603 of SEQ ID NO: 1561995
uugccuucugguggagaga

SEQ ID NO: 1714008 - RNA, 19 nt, Artificial Sequence
  Description of Artificial Sequence: Synthetic oligonucleotide
  Antisense strand to SEQ ID NO: 1714007
ucucuccaccagaaggcaa

SEQ ID NO: 1714009 - RNA, 19 nt, Artificial Sequence
  Description of Artificial Sequence: Synthetic oligonucleotide
  Sense strand starting at position 717 of SEQ ID NO: 1561995
ucuuccucucuggaaagua

SEQ ID NO: 1714010 - RNA, 19 nt, Artificial Sequence
  Description of Artificial Sequence: Synthetic oligonucleotide
  Antisense strand to SEQ ID NO: 1714009
uacuuuccagagaggaaga

SEQ ID NO: 1714011 - RNA, 19 nt, Artificial Sequence
  Description of Artificial Sequence: Synthetic oligonucleotide
  Sense strand starting at position 765 of SEQ ID NO: 1561995
accgguuuaucaccuaaac

SEQ ID NO: 1714012 - RNA, 19 nt, Artificial Sequence
  Description of Artificial Sequence: Synthetic oligonucleotide
  Antisense strand to SEQ ID NO: 1714011
guuuaggugauaaaccggu

SEQ ID NO: 1714013 - RNA, 19 nt, Artificial Sequence
  Description of Artificial Sequence: Synthetic oligonucleotide
  Sense strand starting at position 2006 of SEQ ID NO: 1561995
ucugaaagcuguucuugga

SEQ ID NO: 1714014 - RNA, 19 nt, Artificial Sequence
  Description of Artificial Sequence: Synthetic oligonucleotide
  Antisense strand to SEQ ID NO: 1714013
uccaagaacagcuuucaga

SEQ ID NO: 1714015 - RNA, 19 nt, Artificial Sequence
  Description of Artificial Sequence: Synthetic oligonucleotide
  Sense strand starting at position 2010 of SEQ ID NO: 1561995
aaagcuguucuuggagcau

SEQ ID NO: 1714016 - RNA, 19 nt, Artificial Sequence
  Description of Artificial Sequence: Synthetic oligonucleotide
  Antisense strand to SEQ ID NO: 1714015
augcuccaagaacagcuuu

SEQ ID NO: 1714017 - RNA, 19 nt, Artificial Sequence
  Description of Artificial Sequence: Synthetic oligonucleotide
  Sense strand starting at position 2019 of SEQ ID NO: 1561995
cuuggagcaucuguuggaa

SEQ ID NO: 1714018 - RNA, 19 nt, Artificial Sequence
  Description of Artificial Sequence: Synthetic oligonucleotide
  Antisense strand to SEQ ID NO: 1714017
uuccaacagaugcuccaag

SEQ ID NO: 1714019 - RNA, 19 nt, Artificial Sequence
  Description of Artificial Sequence: Synthetic oligonucleotide
  Sense strand starting at position 2514 of SEQ ID NO: 1561995
gcgcuuuccaaugaggcuu

SEQ ID NO: 1714020 - RNA, 19 nt, Artificial Sequence
  Description of Artificial Sequence: Synthetic oligonucleotide
  Antisense strand to SEQ ID NO: 1714019
aagccucauuggaaagcgc

SEQ ID NO: 1714021 - RNA, 19 nt, Artificial Sequence
  Description of Artificial Sequence: Synthetic oligonucleotide
  Sense strand starting at position 3043 of SEQ ID NO: 1561995
ggacgaaaucccgguuaag

SEQ ID NO: 1714022 - RNA, 19 nt, Artificial Sequence
  Description of Artificial Sequence: Synthetic oligonucleotide
  Antisense strand to SEQ ID NO: 1714021
cuuaaccgggauuucgucc

SEQ ID NO: 1714023 - RNA, 19 nt, Artificial Sequence
  Description of Artificial Sequence: Synthetic oligonucleotide
  Sense strand starting at position 3137 of SEQ ID NO: 1561995
ggcucuuagcagcaguuau

SEQ ID NO: 1714024 - RNA, 19 nt, Artificial Sequence
  Description of Artificial Sequence: Synthetic oligonucleotide
  Antisense strand to SEQ ID NO: 1714023
auaacugcugcuaagagcc

SEQ ID NO: 1714025 - RNA, 19 nt, Artificial Sequence
  Description of Artificial Sequence: Synthetic oligonucleotide
  Sense strand starting at position 3245 of SEQ ID NO: 1561995
gcauuagggaccuagcagu

SEQ ID NO: 1714026 - RNA, 19 nt, Artificial Sequence
  Description of Artificial Sequence: Synthetic oligonucleotide
  Antisense strand to SEQ ID NO: 1714025
acugcuaggucccuaaugc

SEQ ID NO: 1714027 - RNA, 19 nt, Artificial Sequence
  Description of Artificial Sequence: Synthetic oligonucleotide
  Sense strand starting at position 3291 of SEQ ID NO: 1561995
uugagucuuccgggaaagg

SEQ ID NO: 1714028 - RNA, 19 nt, Artificial Sequence
  Description of Artificial Sequence: Synthetic oligonucleotide
  Antisense strand to SEQ ID NO: 1714027
ccuuucccggaagacucaa

SEQ ID NO: 1714029 - RNA, 19 nt, Artificial Sequence
  Description of Artificial Sequence: Synthetic oligonucleotide
  Sense strand starting at position 3314 of SEQ ID NO: 1561995
gggugaagccgagaauggu

SEQ ID NO: 1714030 - RNA, 19 nt, Artificial Sequence
  Description of Artificial Sequence: Synthetic oligonucleotide
  Antisense strand to SEQ ID NO: 1714029
accauucucggcuucaccc

SEQ ID NO: 1714031 - RNA, 19 nt, Artificial Sequence
  Description of Artificial Sequence: Synthetic oligonucleotide
  Sense strand starting at position 3320 of SEQ ID NO: 1561995
agccgagaauggucaccaa

SEQ ID NO: 1714032 - RNA, 19 nt, Artificial Sequence
  Description of Artificial Sequence: Synthetic oligonucleotide
  Antisense strand to SEQ ID NO: 1714031
uuggugaccauucucggcu

SEQ ID NO: 1714033 - RNA, 19 nt, Artificial Sequence
  Description of Artificial Sequence: Synthetic oligonucleotide
  Sense strand starting at position 3323 of SEQ ID NO: 1561995
cgagaauggucaccaacac

SEQ ID NO: 1714034 - RNA, 19 nt, Artificial Sequence
  Description of Artificial Sequence: Synthetic oligonucleotide
  Antisense strand to SEQ ID NO: 1714033
guguuggugaccauucucg

SEQ ID NO: 1714035 - RNA, 19 nt, Artificial Sequence
  Description of Artificial Sequence: Synthetic oligonucleotide
  Sense strand starting at position 3401 of SEQ ID NO: 1561995
agaggaaacuggugggaaa

SEQ ID NO: 1714036 - RNA, 19 nt, Artificial Sequence
  Description of Artificial Sequence: Synthetic oligonucleotide
  Antisense strand to SEQ ID NO: 1714035
uuucccaccaguuuccucu

SEQ ID NO: 1714037 - RNA, 19 nt, Artificial Sequence
  Description of Artificial Sequence: Synthetic oligonucleotide
  Sense strand starting at position 3415 of SEQ ID NO: 1561995
ggaaacugcuaggaauaga

SEQ ID NO: 1714038 - RNA, 19 nt, Artificial Sequence
  Description of Artificial Sequence: Synthetic oligonucleotide
  Antisense strand to SEQ ID NO: 1714037
ucuauuccuagcaguuucc

SEQ ID NO: 1714039 - RNA, 19 nt, Artificial Sequence
  Description of Artificial Sequence: Synthetic oligonucleotide
  Sense strand starting at position 3596 of SEQ ID NO: 1561995
agcacucuugcccagguua

SEQ ID NO: 1714040 - RNA, 19 nt, Artificial Sequence
  Description of Artificial Sequence: Synthetic oligonucleotide
  Antisense strand to SEQ ID NO: 1714039
uaaccugggcaagagugcu

SEQ ID NO: 1714041 - RNA, 19 nt, Artificial Sequence
  Description of Artificial Sequence: Synthetic oligonucleotide
  Sense strand starting at position 3741 of SEQ ID NO: 1561995
augggaagguuucugaauc

SEQ ID NO: 1714042 - RNA, 19 nt, Artificial Sequence
  Description of Artificial Sequence: Synthetic oligonucleotide
  Antisense strand to SEQ ID NO: 1714041
gauucagaaaccuucccau

SEQ ID NO: 1714043 - RNA, 19 nt, Artificial Sequence
  Description of Artificial Sequence: Synthetic oligonucleotide
  Sense strand starting at position 3789 of SEQ ID NO: 1561995
ccgagucugggugagugaa

SEQ ID NO: 1714044 - RNA, 19 nt, Artificial Sequence
  Description of Artificial Sequence: Synthetic oligonucleotide
  Antisense strand to SEQ ID NO: 1714043
uucacucacccagacucgg

SEQ ID NO: 1714045 - RNA, 19 nt, Artificial Sequence
  Description of Artificial Sequence: Synthetic oligonucleotide
  Sense strand starting at position 3931 of SEQ ID NO: 1561995
ggagaaagaucacaccaga

SEQ ID NO: 1714046 - RNA, 19 nt, Artificial Sequence
  Description of Artificial Sequence: Synthetic oligonucleotide
  Antisense strand to SEQ ID NO: 1714045
ucuggugugaucuuucucc

SEQ ID NO: 1714047 - RNA, 19 nt, Artificial Sequence
  Description of Artificial Sequence: Synthetic oligonucleotide
  Sense strand starting at position 3961 of SEQ ID NO: 1561995
gucugucauuugccaacca

SEQ ID NO: 1714048 - RNA, 19 nt, Artificial Sequence
  Description of Artificial Sequence: Synthetic oligonucleotide
  Antisense strand to SEQ ID NO: 1714047
ugguuggcaaaugacagac

SEQ ID NO: 1714049 - RNA, 19 nt, Artificial Sequence
  Description of Artificial Sequence: Synthetic oligonucleotide
  Sense strand starting at position 34 of SEQ ID NO: 1561996
cugugaacuguauaagggu

SEQ ID NO: 1714050 - RNA, 19 nt, Artificial Sequence
  Description of Artificial Sequence: Synthetic oligonucleotide
  Antisense strand to SEQ ID NO: 1714049
acccuuauacaguucacag

SEQ ID NO: 1714051 - RNA, 19 nt, Artificial Sequence
  Description of Artificial Sequence: Synthetic oligonucleotide
  Sense strand starting at position 40 of SEQ ID NO: 1561996
acuguauaagggugaauug

SEQ ID NO: 1714052 - RNA, 19 nt, Artificial Sequence
  Description of Artificial Sequence: Synthetic oligonucleotide
  Antisense strand to SEQ ID NO: 1714051
caauucacccuuauacagu

SEQ ID NO: 1714053 - RNA, 19 nt, Artificial Sequence
  Description of Artificial Sequence: Synthetic oligonucleotide
  Sense strand starting at position 41 of SEQ ID NO: 1561996
cuguauaagggugaauugu

SEQ ID NO: 1714054 - RNA, 19 nt, Artificial Sequence
  Description of Artificial Sequence: Synthetic oligonucleotide
  Antisense strand to SEQ ID NO: 1714053
acaauucacccuuauacag

SEQ ID NO: 1714055 - RNA, 19 nt, Artificial Sequence
  Description of Artificial Sequence: Synthetic oligonucleotide
  Sense strand starting at position 295 of SEQ ID NO: 1561996
aggaguccaucugauagca

SEQ ID NO: 1714056 - RNA, 19 nt, Artificial Sequence
  Description of Artificial Sequence: Synthetic oligonucleotide
  Antisense strand to SEQ ID NO: 1714055
ugcuaucagauggacuccu

SEQ ID NO: 1714057 - RNA, 19 nt, Artificial Sequence
  Description of Artificial Sequence: Synthetic oligonucleotide
  Sense strand starting at position 415 of SEQ ID NO: 1561996
augaguauuugcuaaccuc

SEQ ID NO: 1714058 - RNA, 19 nt, Artificial Sequence
  Description of Artificial Sequence: Synthetic oligonucleotide
  Antisense strand to SEQ ID NO: 1714057
gagguuagcaaauacucau

SEQ ID NO: 1714059 - RNA, 19 nt, Artificial Sequence
  Description of Artificial Sequence: Synthetic oligonucleotide
  Sense strand starting at position 491 of SEQ ID NO: 1561996
ucauguguggcaugcauga

SEQ ID NO: 1714060 - RNA, 19 nt, Artificial Sequence
  Description of Artificial Sequence: Synthetic oligonucleotide
  Antisense strand to SEQ ID NO: 1714059
ucaugcaugccacacauga

SEQ ID NO: 1714061 - RNA, 19 nt, Artificial Sequence
  Description of Artificial Sequence: Synthetic oligonucleotide
  Sense strand starting at position 501 of SEQ ID NO: 1561996
caugcaugauggcaagagu

SEQ ID NO: 1714062 - RNA, 19 nt, Artificial Sequence
  Description of Artificial Sequence: Synthetic oligonucleotide
  Antisense strand to SEQ ID NO: 1714061
acucuugccaucaugcaug

SEQ ID NO: 1714063 - RNA, 19 nt, Artificial Sequence
  Description of Artificial Sequence: Synthetic oligonucleotide
  Sense strand starting at position 759 of SEQ ID NO: 1561996
cagggaagucccugaucgu

SEQ ID NO: 1714064 - RNA, 19 nt, Artificial Sequence
  Description of Artificial Sequence: Synthetic oligonucleotide
  Antisense strand to SEQ ID NO: 1714063
acgaucagggacuucccug

SEQ ID NO: 1714065 - RNA, 19 nt, Artificial Sequence
  Description of Artificial Sequence: Synthetic oligonucleotide
  Sense strand starting at position 1299 of SEQ ID NO: 1561996
ugacgucgucuuguguauu

SEQ ID NO: 1714066 - RNA, 19 nt, Artificial Sequence
  Description of Artificial Sequence: Synthetic oligonucleotide
  Antisense strand to SEQ ID NO: 1714065
aauacacaagacgacguca

SEQ ID NO: 1714067 - RNA, 19 nt, Artificial Sequence
  Description of Artificial Sequence: Synthetic oligonucleotide
  Sense strand starting at position 1335 of SEQ ID NO: 1561996
gaauacaaguuccuugaga

SEQ ID NO: 1714068 - RNA, 19 nt, Artificial Sequence
  Description of Artificial Sequence: Synthetic oligonucleotide
  Antisense strand to SEQ ID NO: 1714067
ucucaaggaacuuguauuc

SEQ ID NO: 1714069 - RNA, 19 nt, Artificial Sequence
  Description of Artificial Sequence: Synthetic oligonucleotide
  Sense strand starting at position 1359 of SEQ ID NO: 1561996
gacuuugucuguuugucca

SEQ ID NO: 1714070 - RNA, 19 nt, Artificial Sequence
  Description of Artificial Sequence: Synthetic oligonucleotide
  Antisense strand to SEQ ID NO: 1714069
uggacaaacagacaaaguc

SEQ ID NO: 1714071 - RNA, 19 nt, Artificial Sequence
  Description of Artificial Sequence: Synthetic oligonucleotide
  Sense strand starting at position 1378 of SEQ ID NO: 1561996
accauuguaugcccacaga

SEQ ID NO: 1714072 - RNA, 19 nt, Artificial Sequence
  Description of Artificial Sequence: Synthetic oligonucleotide
  Antisense strand to SEQ ID NO: 1714071
ucugugggcauacaauggu

SEQ ID NO: 1714073 - RNA, 19 nt, Artificial Sequence
  Description of Artificial Sequence: Synthetic oligonucleotide
  Sense strand starting at position 1696 of SEQ ID NO: 1561996
aggcguucccgacaucagu

SEQ ID NO: 1714074 - RNA, 19 nt, Artificial Sequence
  Description of Artificial Sequence: Synthetic oligonucleotide
  Antisense strand to SEQ ID NO: 1714073
acugaugucgggaacgccu

SEQ ID NO: 1714075 - RNA, 19 nt, Artificial Sequence
  Description of Artificial Sequence: Synthetic oligonucleotide
  Sense strand starting at position 1702 of SEQ ID NO: 1561996
ucccgacaucaguggacaa

SEQ ID NO: 1714076 - RNA, 19 nt, Artificial Sequence
  Description of Artificial Sequence: Synthetic oligonucleotide
  Antisense strand to SEQ ID NO: 1714075
uuguccacugaugucggga

SEQ ID NO: 1714077 - RNA, 19 nt, Artificial Sequence
  Description of Artificial Sequence: Synthetic oligonucleotide
  Sense strand starting at position 1703 of SEQ ID NO: 1561996
cccgacaucaguggacaaa

SEQ ID NO: 1714078 - RNA, 19 nt, Artificial Sequence
  Description of Artificial Sequence: Synthetic oligonucleotide
  Antisense strand to SEQ ID NO: 1714077
uuuguccacugaugucggg

SEQ ID NO: 1714079 - RNA, 19 nt, Artificial Sequence
  Description of Artificial Sequence: Synthetic oligonucleotide
  Sense strand starting at position 2099 of SEQ ID NO: 1561996
acaaauaguggcuguaaga

SEQ ID NO: 1714080 - RNA, 19 nt, Artificial Sequence
  Description of Artificial Sequence: Synthetic oligonucleotide
  Antisense strand to SEQ ID NO: 1714079
ucuuacagccacuauuugu

SEQ ID NO: 1714081 - RNA, 19 nt, Artificial Sequence
  Description of Artificial Sequence: Synthetic oligonucleotide
  Sense strand starting at position 2147 of SEQ ID NO: 1561996
ugacauggugccuggcaau

SEQ ID NO: 1714082 - RNA, 19 nt, Artificial Sequence
  Description of Artificial Sequence: Synthetic oligonucleotide
  Antisense strand to SEQ ID NO: 1714081
auugccaggcaccauguca

SEQ ID NO: 1714083 - RNA, 19 nt, Artificial Sequence
  Description of Artificial Sequence: Synthetic oligonucleotide
  Sense strand starting at position 2153 of SEQ ID NO: 1561996
ggugccuggcaauaacaau

SEQ ID NO: 1714084 - RNA, 19 nt, Artificial Sequence
  Description of Artificial Sequence: Synthetic oligonucleotide
  Antisense strand to SEQ ID NO: 1714083
auuguuauugccaggcacc

SEQ ID NO: 1714085 - RNA, 19 nt, Artificial Sequence
  Description of Artificial Sequence: Synthetic oligonucleotide
  Sense strand starting at position 2159 of SEQ ID NO: 1561996
uggcaauaacaauguuaau

SEQ ID NO: 1714086 - RNA, 19 nt, Artificial Sequence
  Description of Artificial Sequence: Synthetic oligonucleotide
  Antisense strand to SEQ ID NO: 1714085
auuaacauuguuauugcca

SEQ ID NO: 1714087 - RNA, 19 nt, Artificial Sequence
  Description of Artificial Sequence: Synthetic oligonucleotide
  Sense strand starting at position 2432 of SEQ ID NO: 1561996
ucuggaaucugcgaggacu

SEQ ID NO: 1714088 - RNA, 19 nt, Artificial Sequence
  Description of Artificial Sequence: Synthetic oligonucleotide
  Antisense strand to SEQ ID NO: 1714087
aguccucgcagauuccaga

SEQ ID NO: 1714089 - RNA, 19 nt, Artificial Sequence
  Description of Artificial Sequence: Synthetic oligonucleotide
  Sense strand starting at position 2443 of SEQ ID NO: 1561996
cgaggacuggguuagaugu

SEQ ID NO: 1714090 - RNA, 19 nt, Artificial Sequence
  Description of Artificial Sequence: Synthetic oligonucleotide
  Antisense strand to SEQ ID NO: 1714089
acaucuaacccaguccucg

SEQ ID NO: 1714091 - RNA, 19 nt, Artificial Sequence
  Description of Artificial Sequence: Synthetic oligonucleotide
  Sense strand starting at position 2474 of SEQ ID NO: 1561996
uggccacuuuggcaagauu

SEQ ID NO: 1714092 - RNA, 19 nt, Artificial Sequence
  Description of Artificial Sequence: Synthetic oligonucleotide
  Antisense strand to SEQ ID NO: 1714091
aaucuugccaaaguggcca

SEQ ID NO: 1714093 - RNA, 19 nt, Artificial Sequence
  Description of Artificial Sequence: Synthetic oligonucleotide
  Sense strand starting at position 2482 of SEQ ID NO: 1561996
uuggcaagauucuuaaauc

SEQ ID NO: 1714094 - RNA, 19 nt, Artificial Sequence
  Description of Artificial Sequence: Synthetic oligonucleotide
  Antisense strand to SEQ ID NO: 1714093
gauuuaagaaucuugccaa

SEQ ID NO: 1714095 - RNA, 19 nt, Artificial Sequence
  Description of Artificial Sequence: Synthetic oligonucleotide
  Sense strand starting at position 2483 of SEQ ID NO: 1561996
uggcaagauucuuaaaucc

SEQ ID NO: 1714096 - RNA, 19 nt, Artificial Sequence
  Description of Artificial Sequence: Synthetic oligonucleotide
  Antisense strand to SEQ ID NO: 1714095
ggauuuaagaaucuugcca

SEQ ID NO: 1714097 - RNA, 19 nt, Artificial Sequence
  Description of Artificial Sequence: Synthetic oligonucleotide
  Sense strand starting at position 2552 of SEQ ID NO: 1561996
agcugauguacuuggauca

SEQ ID NO: 1714098 - RNA, 19 nt, Artificial Sequence
  Description of Artificial Sequence: Synthetic oligonucleotide
  Antisense strand to SEQ ID NO: 1714097
ugauccaaguacaucagcu

SEQ ID NO: 1714099 - RNA, 19 nt, Artificial Sequence
  Description of Artificial Sequence: Synthetic oligonucleotide
  Sense strand starting at position 2553 of SEQ ID NO: 1561996
gcugauguacuuggaucaa

SEQ ID NO: 1714100 - RNA, 19 nt, Artificial Sequence
  Description of Artificial Sequence: Synthetic oligonucleotide
  Antisense strand to SEQ ID NO: 1714099
uugauccaaguacaucagc

SEQ ID NO: 1714101 - RNA, 19 nt, Artificial Sequence
  Description of Artificial Sequence: Synthetic oligonucleotide
  Sense strand starting at position 2735 of SEQ ID NO: 1561996
gguggagcaccaugagaua

SEQ ID NO: 1714102 - RNA, 19 nt, Artificial Sequence
  Description of Artificial Sequence: Synthetic oligonucleotide
  Antisense strand to SEQ ID NO: 1714101
uaucucauggugcuccacc

SEQ ID NO: 1714103 - RNA, 19 nt, Artificial Sequence
  Description of Artificial Sequence: Synthetic oligonucleotide
  Sense strand starting at position 2843 of SEQ ID NO: 1561996
cugaguuucccacgcccau

SEQ ID NO: 1714104 - RNA, 19 nt, Artificial Sequence
  Description of Artificial Sequence: Synthetic oligonucleotide
  Antisense strand to SEQ ID NO: 1714103
augggcgugggaaacucag

SEQ ID NO: 1714105 - RNA, 19 nt, Artificial Sequence
  Description of Artificial Sequence: Synthetic oligonucleotide
  Sense strand starting at position 3023 of SEQ ID NO: 1561996
gcuagccugcucgagagau

SEQ ID NO: 1714106 - RNA, 19 nt, Artificial Sequence
  Description of Artificial Sequence: Synthetic oligonucleotide
  Antisense strand to SEQ ID NO: 1714105
aucucucgagcaggcuagc

SEQ ID NO: 1714107 - RNA, 19 nt, Artificial Sequence
  Description of Artificial Sequence: Synthetic oligonucleotide
  Sense strand starting at position 3025 of SEQ ID NO: 1561996
uagccugcucgagagaugu

SEQ ID NO: 1714108 - RNA, 19 nt, Artificial Sequence
  Description of Artificial Sequence: Synthetic oligonucleotide
  Antisense strand to SEQ ID NO: 1714107
acaucucucgagcaggcua

SEQ ID NO: 1714109 - RNA, 19 nt, Artificial Sequence
  Description of Artificial Sequence: Synthetic oligonucleotide
  Sense strand starting at position 3027 of SEQ ID NO: 1561996
gccugcucgagagauguua

SEQ ID NO: 1714110 - RNA, 19 nt, Artificial Sequence
  Description of Artificial Sequence: Synthetic oligonucleotide
  Antisense strand to SEQ ID NO: 1714109
uaacaucucucgagcaggc

SEQ ID NO: 1714111 - RNA, 19 nt, Artificial Sequence
  Description of Artificial Sequence: Synthetic oligonucleotide
  Sense strand starting at position 3035 of SEQ ID NO: 1561996
gagagauguuauggucuuc

SEQ ID NO: 1714112 - RNA, 19 nt, Artificial Sequence
  Description of Artificial Sequence: Synthetic oligonucleotide
  Antisense strand to SEQ ID NO: 1714111
gaagaccauaacaucucuc

SEQ ID NO: 1714113 - RNA, 19 nt, Artificial Sequence
  Description of Artificial Sequence: Synthetic oligonucleotide
  Sense strand starting at position 3130 of SEQ ID NO: 1561996
gccuguucccugugcucau

SEQ ID NO: 1714114 - RNA, 19 nt, Artificial Sequence
  Description of Artificial Sequence: Synthetic oligonucleotide
  Antisense strand to SEQ ID NO: 1714113
augagcacagggaacaggc

SEQ ID NO: 1714115 - RNA, 19 nt, Artificial Sequence
  Description of Artificial Sequence: Synthetic oligonucleotide
  Sense strand starting at position 3134 of SEQ ID NO: 1561996
guucccugugcucaucaua

SEQ ID NO: 1714116 - RNA, 19 nt, Artificial Sequence
  Description of Artificial Sequence: Synthetic oligonucleotide
  Antisense strand to SEQ ID NO: 1714115
uaugaugagcacagggaac

SEQ ID NO: 1714117 - RNA, 19 nt, Artificial Sequence
  Description of Artificial Sequence: Synthetic oligonucleotide
  Sense strand starting at position 3148 of SEQ ID NO: 1561996
ucauaugccuccuaugaga

SEQ ID NO: 1714118 - RNA, 19 nt, Artificial Sequence
  Description of Artificial Sequence: Synthetic oligonucleotide
  Antisense strand to SEQ ID NO: 1714117
ucucauaggaggcauauga

SEQ ID NO: 1714119 - RNA, 19 nt, Artificial Sequence
  Description of Artificial Sequence: Synthetic oligonucleotide
  Sense strand starting at position 3150 of SEQ ID NO: 1561996
auaugccuccuaugagaga

SEQ ID NO: 1714120 - RNA, 19 nt, Artificial Sequence
  Description of Artificial Sequence: Synthetic oligonucleotide
  Antisense strand to SEQ ID NO: 1714119
ucucucauaggaggcauau

SEQ ID NO: 1714121 - RNA, 19 nt, Artificial Sequence
  Description of Artificial Sequence: Synthetic oligonucleotide
  Sense strand starting at position 3276 of SEQ ID NO: 1561996
ggagaaagccugggcuuca

SEQ ID NO: 1714122 - RNA, 19 nt, Artificial Sequence
  Description of Artificial Sequence: Synthetic oligonucleotide
  Antisense strand to SEQ ID NO: 1714121
ugaagcccaggcuuucucc

SEQ ID NO: 1714123 - RNA, 19 nt, Artificial Sequence
  Description of Artificial Sequence: Synthetic oligonucleotide
  Sense strand starting at position 3432 of SEQ ID NO: 1561996
cagugaugcaacgggaaga

SEQ ID NO: 1714124 - RNA, 19 nt, Artificial Sequence
  Description of Artificial Sequence: Synthetic oligonucleotide
  Antisense strand to SEQ ID NO: 1714123
ucuucccguugcaucacug

SEQ ID NO: 1714125 - RNA, 19 nt, Artificial Sequence
  Description of Artificial Sequence: Synthetic oligonucleotide
  Sense strand starting at position 3625 of SEQ ID NO: 1561996
gcuaaaggcuacugagaca

SEQ ID NO: 1714126 - RNA, 19 nt, Artificial Sequence
  Description of Artificial Sequence: Synthetic oligonucleotide
  Antisense strand to SEQ ID NO: 1714125
ugucucaguagccuuuagc

SEQ ID NO: 1714127 - RNA, 19 nt, Artificial Sequence
  Description of Artificial Sequence: Synthetic oligonucleotide
  Sense strand starting at position 3688 of SEQ ID NO: 1561996
uugaaacucucucaagaag

SEQ ID NO: 1714128 - RNA, 19 nt, Artificial Sequence
  Description of Artificial Sequence: Synthetic oligonucleotide
  Antisense strand to SEQ ID NO: 1714127
cuucuugagagaguuucaa

SEQ ID NO: 1714129 - RNA, 19 nt, Artificial Sequence
  Description of Artificial Sequence: Synthetic oligonucleotide
  Sense strand starting at position 57 of SEQ ID NO: 1561997
ggaagaaguuuaugggcua

SEQ ID NO: 1714130 - RNA, 19 nt, Artificial Sequence
  Description of Artificial Sequence: Synthetic oligonucleotide
  Antisense strand to SEQ ID NO: 1714129
uagcccauaaacuucuucc

SEQ ID NO: 1714131 - RNA, 19 nt, Artificial Sequence
  Description of Artificial Sequence: Synthetic oligonucleotide
  Sense strand starting at position 60 of SEQ ID NO: 1561997
agaaguuuaugggcuagaa

SEQ ID NO: 1714132 - RNA, 19 nt, Artificial Sequence
  Description of Artificial Sequence: Synthetic oligonucleotide
  Antisense strand to SEQ ID NO: 1714131
uucuagcccauaaacuucu

SEQ ID NO: 1714133 - RNA, 19 nt, Artificial Sequence
  Description of Artificial Sequence: Synthetic oligonucleotide
  Sense strand starting at position 174 of SEQ ID NO: 1561997
uuaggucuucuagaaguaa

SEQ ID NO: 1714134 - RNA, 19 nt, Artificial Sequence
  Description of Artificial Sequence: Synthetic oligonucleotide
  Antisense strand to SEQ ID NO: 1714133
uuacuucuagaagaccuaa

SEQ ID NO: 1714135 - RNA, 19 nt, Artificial Sequence
  Description of Artificial Sequence: Synthetic oligonucleotide
  Sense strand starting at position 209 of SEQ ID NO: 1561997
agaguccugugauuaacca

SEQ ID NO: 1714136 - RNA, 19 nt, Artificial Sequence
  Description of Artificial Sequence: Synthetic oligonucleotide
  Antisense strand to SEQ ID NO: 1714135
ugguuaaucacaggacucu

SEQ ID NO: 1714137 - RNA, 19 nt, Artificial Sequence
  Description of Artificial Sequence: Synthetic oligonucleotide
  Sense strand starting at position 210 of SEQ ID NO: 1561997
gaguccugugauuaaccaa

SEQ ID NO: 1714138 - RNA, 19 nt, Artificial Sequence
  Description of Artificial Sequence: Synthetic oligonucleotide
  Antisense strand to SEQ ID NO: 1714137
uugguuaaucacaggacuc

SEQ ID NO: 1714139 - RNA, 19 nt, Artificial Sequence
  Description of Artificial Sequence: Synthetic oligonucleotide
  Sense strand starting at position 213 of SEQ ID NO: 1561997
uccugugauuaaccaaaga

SEQ ID NO: 1714140 - RNA, 19 nt, Artificial Sequence
  Description of Artificial Sequence: Synthetic oligonucleotide
  Antisense strand to SEQ ID NO: 1714139
ucuuugguuaaucacagga

SEQ ID NO: 1714141 - RNA, 19 nt, Artificial Sequence
  Description of Artificial Sequence: Synthetic oligonucleotide
  Sense strand starting at position 309 of SEQ ID NO: 1561997
cuuuauagccacuagguaa

SEQ ID NO: 1714142 - RNA, 19 nt, Artificial Sequence
  Description of Artificial Sequence: Synthetic oligonucleotide
  Antisense strand to SEQ ID NO: 1714141
uuaccuaguggcuauaaag

SEQ ID NO: 1714143 - RNA, 19 nt, Artificial Sequence
  Description of Artificial Sequence: Synthetic oligonucleotide
  Sense strand starting at position 445 of SEQ ID NO: 1561997
cugguagcccuuuaggaga

SEQ ID NO: 1714144 - RNA, 19 nt, Artificial Sequence
  Description of Artificial Sequence: Synthetic oligonucleotide
  Antisense strand to SEQ ID NO: 1714143
ucuccuaaagggcuaccag

SEQ ID NO: 1714145 - RNA, 19 nt, Artificial Sequence
  Description of Artificial Sequence: Synthetic oligonucleotide
  Sense strand starting at position 487 of SEQ ID NO: 1561997
gagaauucaggagguguga

SEQ ID NO: 1714146 - RNA, 19 nt, Artificial Sequence
  Description of Artificial Sequence: Synthetic oligonucleotide
  Antisense strand to SEQ ID NO: 1714145
ucacaccuccugaauucuc

SEQ ID NO: 1714147 - RNA, 19 nt, Artificial Sequence
  Description of Artificial Sequence: Synthetic oligonucleotide
  Sense strand starting at position 509 of SEQ ID NO: 1561997
ugggaagugugcucagaag

SEQ ID NO: 1714148 - RNA, 19 nt, Artificial Sequence
  Description of Artificial Sequence: Synthetic oligonucleotide
  Antisense strand to SEQ ID NO: 1714147
cuucugagcacacuuccca

SEQ ID NO: 1714149 - RNA, 19 nt, Artificial Sequence
  Description of Artificial Sequence: Synthetic oligonucleotide
  Sense strand starting at position 555 of SEQ ID NO: 1561997
ugccgugcugaacaaagau

SEQ ID NO: 1714150 - RNA, 19 nt, Artificial Sequence
  Description of Artificial Sequence: Synthetic oligonucleotide
  Antisense strand to SEQ ID NO: 1714149
aucuuuguucagcacggca

SEQ ID NO: 1714151 - RNA, 19 nt, Artificial Sequence
  Description of Artificial Sequence: Synthetic oligonucleotide
  Sense strand starting at position 656 of SEQ ID NO: 1561997
gaaggaaacugaggaauga

SEQ ID NO: 1714152 - RNA, 19 nt, Artificial Sequence
  Description of Artificial Sequence: Synthetic oligonucleotide
  Antisense strand to SEQ ID NO: 1714151
ucauuccucaguuuccuuc

SEQ ID NO: 1714153 - RNA, 19 nt, Artificial Sequence
  Description of Artificial Sequence: Synthetic oligonucleotide
  Sense strand starting at position 787 of SEQ ID NO: 1561997
uaagaagcaucuggaaagu

SEQ ID NO: 1714154 - RNA, 19 nt, Artificial Sequence
  Description of Artificial Sequence: Synthetic oligonucleotide
  Antisense strand to SEQ ID NO: 1714153
acuuuccagaugcuucuua

SEQ ID NO: 1714155 - RNA, 19 nt, Artificial Sequence
  Description of Artificial Sequence: Synthetic oligonucleotide
  Sense strand starting at position 804 of SEQ ID NO: 1561997
guggcugcacucugagagu

SEQ ID NO: 1714156 - RNA, 19 nt, Artificial Sequence
  Description of Artificial Sequence: Synthetic oligonucleotide
  Antisense strand to SEQ ID NO: 1714155
acucucagagugcagccac

SEQ ID NO: 1714157 - RNA, 19 nt, Artificial Sequence
  Description of Artificial Sequence: Synthetic oligonucleotide
  Sense strand starting at position 813 of SEQ ID NO: 1561997
cucugagaguuguauaacu

SEQ ID NO: 1714158 - RNA, 19 nt, Artificial Sequence
  Description of Artificial Sequence: Synthetic oligonucleotide
  Antisense strand to SEQ ID NO: 1714157
aguuauacaacucucagag

SEQ ID NO: 1714159 - RNA, 19 nt, Artificial Sequence
  Description of Artificial Sequence: Synthetic oligonucleotide
  Sense strand starting at position 959 of SEQ ID NO: 1561997
uaauacagucucgggagaa

SEQ ID NO: 1714160 - RNA, 19 nt, Artificial Sequence
  Description of Artificial Sequence: Synthetic oligonucleotide
  Antisense strand to SEQ ID NO: 1714159
uucucccgagacuguauua

SEQ ID NO: 1714161 - RNA, 19 nt, Artificial Sequence
  Description of Artificial Sequence: Synthetic oligonucleotide
  Sense strand starting at position 960 of SEQ ID NO: 1561997
aauacagucucgggagaag

SEQ ID NO: 1714162 - RNA, 19 nt, Artificial Sequence
  Description of Artificial Sequence: Synthetic oligonucleotide
  Antisense strand to SEQ ID NO: 1714161
cuucucccgagacuguauu

SEQ ID NO: 1714163 - RNA, 19 nt, Artificial Sequence
  Description of Artificial Sequence: Synthetic oligonucleotide
  Sense strand starting at position 978 of SEQ ID NO: 1561997
ggcagugaauucccuuauu

SEQ ID NO: 1714164 - RNA, 19 nt, Artificial Sequence
  Description of Artificial Sequence: Synthetic oligonucleotide
  Antisense strand to SEQ ID NO: 1714163
aauaagggaauucacugcc

SEQ ID NO: 1714165 - RNA, 19 nt, Artificial Sequence
  Description of Artificial Sequence: Synthetic oligonucleotide
  Sense strand starting at position 988 of SEQ ID NO: 1561997
ucccuuauuugugaaacug

SEQ ID NO: 1714166 - RNA, 19 nt, Artificial Sequence
  Description of Artificial Sequence: Synthetic oligonucleotide
  Antisense strand to SEQ ID NO: 1714165
caguuucacaaauaaggga

SEQ ID NO: 1714167 - RNA, 19 nt, Artificial Sequence
  Description of Artificial Sequence: Synthetic oligonucleotide
  Sense strand starting at position 1112 of SEQ ID NO: 1561997
aaggcaugcugucagauuu

SEQ ID NO: 1714168 - RNA, 19 nt, Artificial Sequence
  Description of Artificial Sequence: Synthetic oligonucleotide
  Antisense strand to SEQ ID NO: 1714167
aaaucugacagcaugccuu

SEQ ID NO: 1714169 - RNA, 19 nt, Artificial Sequence
  Description of Artificial Sequence: Synthetic oligonucleotide
  Sense strand starting at position 1145 of SEQ ID NO: 1561997
gggaauucuuccuuggagu

SEQ ID NO: 1714170 - RNA, 19 nt, Artificial Sequence
  Description of Artificial Sequence: Synthetic oligonucleotide
  Antisense strand to SEQ ID NO: 1714169
acuccaaggaagaauuccc

SEQ ID NO: 1714171 - RNA, 19 nt, Artificial Sequence
  Description of Artificial Sequence: Synthetic oligonucleotide
  Sense strand starting at position 1146 of SEQ ID NO: 1561997
ggaauucuuccuuggagua

SEQ ID NO: 1714172 - RNA, 19 nt, Artificial Sequence
  Description of Artificial Sequence: Synthetic oligonucleotide
  Antisense strand to SEQ ID NO: 1714171
uacuccaaggaagaauucc

SEQ ID NO: 1714173 - RNA, 19 nt, Artificial Sequence
  Description of Artificial Sequence: Synthetic oligonucleotide
  Sense strand starting at position 1147 of SEQ ID NO: 1561997
gaauucuuccuuggaguag

SEQ ID NO: 1714174 - RNA, 19 nt, Artificial Sequence
  Description of Artificial Sequence: Synthetic oligonucleotide
  Antisense strand to SEQ ID NO: 1714173
cuacuccaaggaagaauuc

SEQ ID NO: 1714175 - RNA, 19 nt, Artificial Sequence
  Description of Artificial Sequence: Synthetic oligonucleotide
  Sense strand starting at position 1148 of SEQ ID NO: 1561997
aauucuuccuuggaguaga

SEQ ID NO: 1714176 - RNA, 19 nt, Artificial Sequence
  Description of Artificial Sequence: Synthetic oligonucleotide
  Antisense strand to SEQ ID NO: 1714175
ucuacuccaaggaagaauu

SEQ ID NO: 1714177 - RNA, 19 nt, Artificial Sequence
  Description of Artificial Sequence: Synthetic oligonucleotide
  Sense strand starting at position 1284 of SEQ ID NO: 1561997
aaaggaaugugcucccacu

SEQ ID NO: 1714178 - RNA, 19 nt, Artificial Sequence
  Description of Artificial Sequence: Synthetic oligonucleotide
  Antisense strand to SEQ ID NO: 1714177
agugggagcacauuccuuu

SEQ ID NO: 1714179 - RNA, 19 nt, Artificial Sequence
  Description of Artificial Sequence: Synthetic oligonucleotide
  Sense strand starting at position 1452 of SEQ ID NO: 1561997
ggucuugagaaaggaaugu

SEQ ID NO: 1714180 - RNA, 19 nt, Artificial Sequence
  Description of Artificial Sequence: Synthetic oligonucleotide
  Antisense strand to SEQ ID NO: 1714179
acauuccuuucucaagacc

SEQ ID NO: 1714181 - RNA, 19 nt, Artificial Sequence
  Description of Artificial Sequence: Synthetic oligonucleotide
  Sense strand starting at position 2197 of SEQ ID NO: 1561997
acucguaaucacugagauc

SEQ ID NO: 1714182 - RNA, 19 nt, Artificial Sequence
  Description of Artificial Sequence: Synthetic oligonucleotide
  Antisense strand to SEQ ID NO: 1714181
gaucucagugauuacgagu

SEQ ID NO: 1714183 - RNA, 19 nt, Artificial Sequence
  Description of Artificial Sequence: Synthetic oligonucleotide
  Sense strand starting at position 2226 of SEQ ID NO: 1561997
gggaauggacgcuauccau

SEQ ID NO: 1714184 - RNA, 19 nt, Artificial Sequence
  Description of Artificial Sequence: Synthetic oligonucleotide
  Antisense strand to SEQ ID NO: 1714183
auggauagcguccauuccc

SEQ ID NO: 1714185 - RNA, 19 nt, Artificial Sequence
  Description of Artificial Sequence: Synthetic oligonucleotide
  Sense strand starting at position 2325 of SEQ ID NO: 1561997
gaagaugguuuccacccua

SEQ ID NO: 1714186 - RNA, 19 nt, Artificial Sequence
  Description of Artificial Sequence: Synthetic oligonucleotide
  Antisense strand to SEQ ID NO: 1714185
uaggguggaaaccaucuuc

SEQ ID NO: 1714187 - RNA, 19 nt, Artificial Sequence
  Description of Artificial Sequence: Synthetic oligonucleotide
  Sense strand starting at position 2330 of SEQ ID NO: 1561997
ugguuuccacccuauuacu

SEQ ID NO: 1714188 - RNA, 19 nt, Artificial Sequence
  Description of Artificial Sequence: Synthetic oligonucleotide
  Antisense strand to SEQ ID NO: 1714187
aguaauaggguggaaacca

SEQ ID NO: 1714189 - RNA, 19 nt, Artificial Sequence
  Description of Artificial Sequence: Synthetic oligonucleotide
  Sense strand starting at position 2344 of SEQ ID NO: 1561997
uuacucuucgccguucuaa

SEQ ID NO: 1714190 - RNA, 19 nt, Artificial Sequence
  Description of Artificial Sequence: Synthetic oligonucleotide
  Antisense strand to SEQ ID NO: 1714189
uuagaacggcgaagaguaa

SEQ ID NO: 1714191 - RNA, 19 nt, Artificial Sequence
  Description of Artificial Sequence: Synthetic oligonucleotide
  Sense strand starting at position 2345 of SEQ ID NO: 1561997
uacucuucgccguucuaau

SEQ ID NO: 1714192 - RNA, 19 nt, Artificial Sequence
  Description of Artificial Sequence: Synthetic oligonucleotide
  Antisense strand to SEQ ID NO: 1714191
auuagaacggcgaagagua

SEQ ID NO: 1714193 - RNA, 19 nt, Artificial Sequence
  Description of Artificial Sequence: Synthetic oligonucleotide
  Sense strand starting at position 2506 of SEQ ID NO: 1561997
gcuuucuuauccucacgaa

SEQ ID NO: 1714194 - RNA, 19 nt, Artificial Sequence
  Description of Artificial Sequence: Synthetic oligonucleotide
  Antisense strand to SEQ ID NO: 1714193
uucgugaggauaagaaagc

SEQ ID NO: 1714195 - RNA, 19 nt, Artificial Sequence
  Description of Artificial Sequence: Synthetic oligonucleotide
  Sense strand starting at position 2561 of SEQ ID NO: 1561997
gcuaacaauccagguucuu

SEQ ID NO: 1714196 - RNA, 19 nt, Artificial Sequence
  Description of Artificial Sequence: Synthetic oligonucleotide
  Antisense strand to SEQ ID NO: 1714195
aagaaccuggauuguuagc

SEQ ID NO: 1714197 - RNA, 19 nt, Artificial Sequence
  Description of Artificial Sequence: Synthetic oligonucleotide
  Sense strand starting at position 2572 of SEQ ID NO: 1561997
agguucuucucaucucaga

SEQ ID NO: 1714198 - RNA, 19 nt, Artificial Sequence
  Description of Artificial Sequence: Synthetic oligonucleotide
  Antisense strand to SEQ ID NO: 1714197
ucugagaugagaagaaccu

SEQ ID NO: 1714199 - RNA, 19 nt, Artificial Sequence
  Description of Artificial Sequence: Synthetic oligonucleotide
  Sense strand starting at position 2630 of SEQ ID NO: 1561997
cuagaaagguuuccaauug

SEQ ID NO: 1714200 - RNA, 19 nt, Artificial Sequence
  Description of Artificial Sequence: Synthetic oligonucleotide
  Antisense strand to SEQ ID NO: 1714199
caauuggaaaccuuucuag

SEQ ID NO: 1714201 - RNA, 19 nt, Artificial Sequence
  Description of Artificial Sequence: Synthetic oligonucleotide
  Sense strand starting at position 3002 of SEQ ID NO: 1561997
gcagucucggcuccucaua

SEQ ID NO: 1714202 - RNA, 19 nt, Artificial Sequence
  Description of Artificial Sequence: Synthetic oligonucleotide
  Antisense strand to SEQ ID NO: 1714201
uaugaggagccgagacugc

SEQ ID NO: 1714203 - RNA, 19 nt, Artificial Sequence
  Description of Artificial Sequence: Synthetic oligonucleotide
  Sense strand starting at position 3201 of SEQ ID NO: 1561997
uggaauuaacaccguacuu

SEQ ID NO: 1714204 - RNA, 19 nt, Artificial Sequence
  Description of Artificial Sequence: Synthetic oligonucleotide
  Antisense strand to SEQ ID NO: 1714203
aaguacgguguuaauucca

SEQ ID NO: 1714205 - RNA, 19 nt, Artificial Sequence
  Description of Artificial Sequence: Synthetic oligonucleotide
  Sense strand starting at position 3621 of SEQ ID NO: 1561997
uccagaaaugcuggaauua

SEQ ID NO: 1714206 - RNA, 19 nt, Artificial Sequence
  Description of Artificial Sequence: Synthetic oligonucleotide
  Antisense strand to SEQ ID NO: 1714205
uaauuccagcauuucugga

SEQ ID NO: 1714207 - RNA, 19 nt, Artificial Sequence
  Description of Artificial Sequence: Synthetic oligonucleotide
  Sense strand starting at position 3702 of SEQ ID NO: 1561997
aggguauugccucaguuga

SEQ ID NO: 1714208 - RNA, 19 nt, Artificial Sequence
  Description of Artificial Sequence: Synthetic oligonucleotide
  Antisense strand to SEQ ID NO: 1714207
ucaacugaggcaauacccu

SEQ ID NO: 1714209 - RNA, 19 nt, Artificial Sequence
  Description of Artificial Sequence: Synthetic oligonucleotide
  Sense strand starting at position 138 of SEQ ID NO: 1561998
auuuccauuuccuggugaa

SEQ ID NO: 1714210 - RNA, 19 nt, Artificial Sequence
  Description of Artificial Sequence: Synthetic oligonucleotide
  Antisense strand to SEQ ID NO: 1714209
uucaccaggaaauggaaau

SEQ ID NO: 1714211 - RNA, 19 nt, Artificial Sequence
  Description of Artificial Sequence: Synthetic oligonucleotide
  Sense strand starting at position 185 of SEQ ID NO: 1561998
uuggauuuguaauaugaag

SEQ ID NO: 1714212 - RNA, 19 nt, Artificial Sequence
  Description of Artificial Sequence: Synthetic oligonucleotide
  Antisense strand to SEQ ID NO: 1714211
cuucauauuacaaauccaa

SEQ ID NO: 1714213 - RNA, 19 nt, Artificial Sequence
  Description of Artificial Sequence: Synthetic oligonucleotide
  Sense strand starting at position 207 of SEQ ID NO: 1561998
uagcaaugugccuccuguu

SEQ ID NO: 1714214 - RNA, 19 nt, Artificial Sequence
  Description of Artificial Sequence: Synthetic oligonucleotide
  Antisense strand to SEQ ID NO: 1714213
aacaggaggcacauugcua

SEQ ID NO: 1714215 - RNA, 19 nt, Artificial Sequence
  Description of Artificial Sequence: Synthetic oligonucleotide
  Sense strand starting at position 208 of SEQ ID NO: 1561998
agcaaugugccuccuguuu

SEQ ID NO: 1714216 - RNA, 19 nt, Artificial Sequence
  Description of Artificial Sequence: Synthetic oligonucleotide
  Antisense strand to SEQ ID NO: 1714215
aaacaggaggcacauugcu

SEQ ID NO: 1714217 - RNA, 19 nt, Artificial Sequence
  Description of Artificial Sequence: Synthetic oligonucleotide
  Sense strand starting at position 544 of SEQ ID NO: 1561998
gaguaucagaggugagagu

SEQ ID NO: 1714218 - RNA, 19 nt, Artificial Sequence
  Description of Artificial Sequence: Synthetic oligonucleotide
  Antisense strand to SEQ ID NO: 1714217
acucucaccucugauacuc

SEQ ID NO: 1714219 - RNA, 19 nt, Artificial Sequence
  Description of Artificial Sequence: Synthetic oligonucleotide
  Sense strand starting at position 1220 of SEQ ID NO: 1561998
ggucuacuggaccagaguu

SEQ ID NO: 1714220 - RNA, 19 nt, Artificial Sequence
  Description of Artificial Sequence: Synthetic oligonucleotide
  Antisense strand to SEQ ID NO: 1714219
aacucugguccaguagacc

SEQ ID NO: 1714221 - RNA, 19 nt, Artificial Sequence
  Description of Artificial Sequence: Synthetic oligonucleotide
  Sense strand starting at position 1232 of SEQ ID NO: 1561998
cagaguucccuugaguauu

SEQ ID NO: 1714222 - RNA, 19 nt, Artificial Sequence
  Description of Artificial Sequence: Synthetic oligonucleotide
  Antisense strand to SEQ ID NO: 1714221
aauacucaagggaacucug

SEQ ID NO: 1714223 - RNA, 19 nt, Artificial Sequence
  Description of Artificial Sequence: Synthetic oligonucleotide
  Sense strand starting at position 1240 of SEQ ID NO: 1561998
ccuugaguauuuguuucuu

SEQ ID NO: 1714224 - RNA, 19 nt, Artificial Sequence
  Description of Artificial Sequence: Synthetic oligonucleotide
  Antisense strand to SEQ ID NO: 1714223
aagaaacaaauacucaagg

SEQ ID NO: 1714225 - RNA, 19 nt, Artificial Sequence
  Description of Artificial Sequence: Synthetic oligonucleotide
  Sense strand starting at position 1344 of SEQ ID NO: 1561998
uaggaagugcauuggagua

SEQ ID NO: 1714226 - RNA, 19 nt, Artificial Sequence
  Description of Artificial Sequence: Synthetic oligonucleotide
  Antisense strand to SEQ ID NO: 1714225
uacuccaaugcacuuccua

SEQ ID NO: 1714227 - RNA, 19 nt, Artificial Sequence
  Description of Artificial Sequence: Synthetic oligonucleotide
  Sense strand starting at position 1349 of SEQ ID NO: 1561998
agugcauuggaguaggaaa

SEQ ID NO: 1714228 - RNA, 19 nt, Artificial Sequence
  Description of Artificial Sequence: Synthetic oligonucleotide
  Antisense strand to SEQ ID NO: 1714227
uuuccuacuccaaugcacu

SEQ ID NO: 1714229 - RNA, 19 nt, Artificial Sequence
  Description of Artificial Sequence: Synthetic oligonucleotide
  Sense strand starting at position 1413 of SEQ ID NO: 1561998
ugggaauuaccuuggcaau

SEQ ID NO: 1714230 - RNA, 19 nt, Artificial Sequence
  Description of Artificial Sequence: Synthetic oligonucleotide
  Antisense strand to SEQ ID NO: 1714229
auugccaagguaauuccca

SEQ ID NO: 1714231 - RNA, 19 nt, Artificial Sequence
  Description of Artificial Sequence: Synthetic oligonucleotide
  Sense strand starting at position 1414 of SEQ ID NO: 1561998
gggaauuaccuuggcaauu

SEQ ID NO: 1714232 - RNA, 19 nt, Artificial Sequence
  Description of Artificial Sequence: Synthetic oligonucleotide
  Antisense strand to SEQ ID NO: 1714231
aauugccaagguaauuccc

SEQ ID NO: 1714233 - RNA, 19 nt, Artificial Sequence
  Description of Artificial Sequence: Synthetic oligonucleotide
  Sense strand starting at position 1415 of SEQ ID NO: 1561998
ggaauuaccuuggcaauug

SEQ ID NO: 1714234 - RNA, 19 nt, Artificial Sequence
  Description of Artificial Sequence: Synthetic oligonucleotide
  Antisense strand to SEQ ID NO: 1714233
caauugccaagguaauucc

SEQ ID NO: 1714235 - RNA, 19 nt, Artificial Sequence
  Description of Artificial Sequence: Synthetic oligonucleotide
  Sense strand starting at position 1426 of SEQ ID NO: 1561998
ggcaauugcucacucauuu

SEQ ID NO: 1714236 - RNA, 19 nt, Artificial Sequence
  Description of Artificial Sequence: Synthetic oligonucleotide
  Antisense strand to SEQ ID NO: 1714235
aaaugagugagcaauugcc

SEQ ID NO: 1714237 - RNA, 19 nt, Artificial Sequence
  Description of Artificial Sequence: Synthetic oligonucleotide
  Sense strand starting at position 1690 of SEQ ID NO: 1561998
ccugauaucucagucacug

SEQ ID NO: 1714238 - RNA, 19 nt, Artificial Sequence
  Description of Artificial Sequence: Synthetic oligonucleotide
  Antisense strand to SEQ ID NO: 1714237
cagugacugagauaucagg

SEQ ID NO: 1714239 - RNA, 19 nt, Artificial Sequence
  Description of Artificial Sequence: Synthetic oligonucleotide
  Sense strand starting at position 1986 of SEQ ID NO: 1561998
gaagguguuuggcuaagag

SEQ ID NO: 1714240 - RNA, 19 nt, Artificial Sequence
  Description of Artificial Sequence: Synthetic oligonucleotide
  Antisense strand to SEQ ID NO: 1714239
cucuuagccaaacaccuuc

SEQ ID NO: 1714241 - RNA, 19 nt, Artificial Sequence
  Description of Artificial Sequence: Synthetic oligonucleotide
  Sense strand starting at position 2074 of SEQ ID NO: 1561998
agggauaauuccuuagcug

SEQ ID NO: 1714242 - RNA, 19 nt, Artificial Sequence
  Description of Artificial Sequence: Synthetic oligonucleotide
  Antisense strand to SEQ ID NO: 1714241
cagcuaaggaauuaucccu

SEQ ID NO: 1714243 - RNA, 19 nt, Artificial Sequence
  Description of Artificial Sequence: Synthetic oligonucleotide
  Sense strand starting at position 2075 of SEQ ID NO: 1561998
gggauaauuccuuagcugu

SEQ ID NO: 1714244 - RNA, 19 nt, Artificial Sequence
  Description of Artificial Sequence: Synthetic oligonucleotide
  Antisense strand to SEQ ID NO: 1714243
acagcuaaggaauuauccc

SEQ ID NO: 1714245 - RNA, 19 nt, Artificial Sequence
  Description of Artificial Sequence: Synthetic oligonucleotide
  Sense strand starting at position 2085 of SEQ ID NO: 1561998
cuuagcuguauugggaaau

SEQ ID NO: 1714246 - RNA, 19 nt, Artificial Sequence
  Description of Artificial Sequence: Synthetic oligonucleotide
  Antisense strand to SEQ ID NO: 1714245
auuucccaauacagcuaag

SEQ ID NO: 1714247 - RNA, 19 nt, Artificial Sequence
  Description of Artificial Sequence: Synthetic oligonucleotide
  Sense strand starting at position 2133 of SEQ ID NO: 1561998
gcuuucccucaggauuauu

SEQ ID NO: 1714248 - RNA, 19 nt, Artificial Sequence
  Description of Artificial Sequence: Synthetic oligonucleotide
  Antisense strand to SEQ ID NO: 1714247
aauaauccugagggaaagc

SEQ ID NO: 1714249 - RNA, 19 nt, Artificial Sequence
  Description of Artificial Sequence: Synthetic oligonucleotide
  Sense strand starting at position 2185 of SEQ ID NO: 1561998
aucucugauugucccaaga

SEQ ID NO: 1714250 - RNA, 19 nt, Artificial Sequence
  Description of Artificial Sequence: Synthetic oligonucleotide
  Antisense strand to SEQ ID NO: 1714249
ucuugggacaaucagagau

SEQ ID NO: 1714251 - RNA, 19 nt, Artificial Sequence
  Description of Artificial Sequence: Synthetic oligonucleotide
  Sense strand starting at position 2308 of SEQ ID NO: 1561998
ggaaucaccgaagguuauu

SEQ ID NO: 1714252 - RNA, 19 nt, Artificial Sequence
  Description of Artificial Sequence: Synthetic oligonucleotide
  Antisense strand to SEQ ID NO: 1714251
aauaaccuucggugauucc

SEQ ID NO: 1714253 - RNA, 19 nt, Artificial Sequence
  Description of Artificial Sequence: Synthetic oligonucleotide
  Sense strand starting at position 2572 of SEQ ID NO: 1561998
guaauuggaagguggaauu

SEQ ID NO: 1714254 - RNA, 19 nt, Artificial Sequence
  Description of Artificial Sequence: Synthetic oligonucleotide
  Antisense strand to SEQ ID NO: 1714253
aauuccaccuuccaauuac

SEQ ID NO: 1714255 - RNA, 19 nt, Artificial Sequence
  Description of Artificial Sequence: Synthetic oligonucleotide
  Sense strand starting at position 2582 of SEQ ID NO: 1561998
gguggaauucuaggucuga

SEQ ID NO: 1714256 - RNA, 19 nt, Artificial Sequence
  Description of Artificial Sequence: Synthetic oligonucleotide
  Antisense strand to SEQ ID NO: 1714255
ucagaccuagaauuccacc

SEQ ID NO: 1714257 - RNA, 19 nt, Artificial Sequence
  Description of Artificial Sequence: Synthetic oligonucleotide
  Sense strand starting at position 2583 of SEQ ID NO: 1561998
guggaauucuaggucugaa

SEQ ID NO: 1714258 - RNA, 19 nt, Artificial Sequence
  Description of Artificial Sequence: Synthetic oligonucleotide
  Antisense strand to SEQ ID NO: 1714257
uucagaccuagaauuccac

SEQ ID NO: 1714259 - RNA, 19 nt, Artificial Sequence
  Description of Artificial Sequence: Synthetic oligonucleotide
  Sense strand starting at position 2602 of SEQ ID NO: 1561998
gagggaugaugcccuugaa

SEQ ID NO: 1714260 - RNA, 19 nt, Artificial Sequence
  Description of Artificial Sequence: Synthetic oligonucleotide
  Antisense strand to SEQ ID NO: 1714259
uucaagggcaucaucccuc

SEQ ID NO: 1714261 - RNA, 19 nt, Artificial Sequence
  Description of Artificial Sequence: Synthetic oligonucleotide
  Sense strand starting at position 2605 of SEQ ID NO: 1561998
ggaugaugcccuugaaauc

SEQ ID NO: 1714262 - RNA, 19 nt, Artificial Sequence
  Description of Artificial Sequence: Synthetic oligonucleotide
  Antisense strand to SEQ ID NO: 1714261
gauuucaagggcaucaucc

SEQ ID NO: 1714263 - RNA, 19 nt, Artificial Sequence
  Description of Artificial Sequence: Synthetic oligonucleotide
  Sense strand starting at position 2669 of SEQ ID NO: 1561998
ucauguauacauuggacau

SEQ ID NO: 1714264 - RNA, 19 nt, Artificial Sequence
  Description of Artificial Sequence: Synthetic oligonucleotide
  Antisense strand to SEQ ID NO: 1714263
auguccaauguauacauga

SEQ ID NO: 1714265 - RNA, 19 nt, Artificial Sequence
  Description of Artificial Sequence: Synthetic oligonucleotide
  Sense strand starting at position 2738 of SEQ ID NO: 1561998
guuucuugugaagaauugu

SEQ ID NO: 1714266 - RNA, 19 nt, Artificial Sequence
  Description of Artificial Sequence: Synthetic oligonucleotide
  Antisense strand to SEQ ID NO: 1714265
acaauucuucacaagaaac

SEQ ID NO: 1714267 - RNA, 19 nt, Artificial Sequence
  Description of Artificial Sequence: Synthetic oligonucleotide
  Sense strand starting at position 2771 of SEQ ID NO: 1561998
aucaacuugugagucuaau

SEQ ID NO: 1714268 - RNA, 19 nt, Artificial Sequence
  Description of Artificial Sequence: Synthetic oligonucleotide
  Antisense strand to SEQ ID NO: 1714267
auuagacucacaaguugau

SEQ ID NO: 1714269 - RNA, 19 nt, Artificial Sequence
  Description of Artificial Sequence: Synthetic oligonucleotide
  Sense strand starting at position 2888 of SEQ ID NO: 1561998
cuuggucuggucuauuaac

SEQ ID NO: 1714270 - RNA, 19 nt, Artificial Sequence
  Description of Artificial Sequence: Synthetic oligonucleotide
  Antisense strand to SEQ ID NO: 1714269
guuaauagaccagaccaag

SEQ ID NO: 1714271 - RNA, 19 nt, Artificial Sequence
  Description of Artificial Sequence: Synthetic oligonucleotide
  Sense strand starting at position 2988 of SEQ ID NO: 1561998
uccagaagugguuaucuaa

SEQ ID NO: 1714272 - RNA, 19 nt, Artificial Sequence
  Description of Artificial Sequence: Synthetic oligonucleotide
  Antisense strand to SEQ ID NO: 1714271
uuagauaaccacuucugga

SEQ ID NO: 1714273 - RNA, 19 nt, Artificial Sequence
  Description of Artificial Sequence: Synthetic oligonucleotide
  Sense strand starting at position 2991 of SEQ ID NO: 1561998
agaagugguuaucuaaguc

SEQ ID NO: 1714274 - RNA, 19 nt, Artificial Sequence
  Description of Artificial Sequence: Synthetic oligonucleotide
  Antisense strand to SEQ ID NO: 1714273
gacuuagauaaccacuucu

SEQ ID NO: 1714275 - RNA, 19 nt, Artificial Sequence
  Description of Artificial Sequence: Synthetic oligonucleotide
  Sense strand starting at position 3111 of SEQ ID NO: 1561998
cuccuuuaccuugagagca

SEQ ID NO: 1714276 - RNA, 19 nt, Artificial Sequence
  Description of Artificial Sequence: Synthetic oligonucleotide
  Antisense strand to SEQ ID NO: 1714275
ugcucucaagguaaaggag

SEQ ID NO: 1714277 - RNA, 19 nt, Artificial Sequence
  Description of Artificial Sequence: Synthetic oligonucleotide
  Sense strand starting at position 3260 of SEQ ID NO: 1561998
ggguauugucagggacaga

SEQ ID NO: 1714278 - RNA, 19 nt, Artificial Sequence
  Description of Artificial Sequence: Synthetic oligonucleotide
  Antisense strand to SEQ ID NO: 1714277
ucugucccugacaauaccc

SEQ ID NO: 1714279 - RNA, 19 nt, Artificial Sequence
  Description of Artificial Sequence: Synthetic oligonucleotide
  Sense strand starting at position 3286 of SEQ ID NO: 1561998
uuaagaaagucacugaguu

SEQ ID NO: 1714280 - RNA, 19 nt, Artificial Sequence
  Description of Artificial Sequence: Synthetic oligonucleotide
  Antisense strand to SEQ ID NO: 1714279
aacucagugacuuucuuaa

SEQ ID NO: 1714281 - RNA, 19 nt, Artificial Sequence
  Description of Artificial Sequence: Synthetic oligonucleotide
  Sense strand starting at position 3299 of SEQ ID NO: 1561998
ugaguugagguggaguuaa

SEQ ID NO: 1714282 - RNA, 19 nt, Artificial Sequence
  Description of Artificial Sequence: Synthetic oligonucleotide
  Antisense strand to SEQ ID NO: 1714281
uuaacuccaccucaacuca

SEQ ID NO: 1714283 - RNA, 19 nt, Artificial Sequence
  Description of Artificial Sequence: Synthetic oligonucleotide
  Sense strand starting at position 3428 of SEQ ID NO: 1561998
gacauaaacgaaugucaga

SEQ ID NO: 1714284 - RNA, 19 nt, Artificial Sequence
  Description of Artificial Sequence: Synthetic oligonucleotide
  Antisense strand to SEQ ID NO: 1714283
ucugacauucguuuauguc

SEQ ID NO: 1714285 - RNA, 19 nt, Artificial Sequence
  Description of Artificial Sequence: Synthetic oligonucleotide
  Sense strand starting at position 3640 of SEQ ID NO: 1561998
agagauaacugcuuccuaa

SEQ ID NO: 1714286 - RNA, 19 nt, Artificial Sequence
  Description of Artificial Sequence: Synthetic oligonucleotide
  Antisense strand to SEQ ID NO: 1714285
uuaggaagcaguuaucucu

SEQ ID NO: 1714287 - RNA, 19 nt, Artificial Sequence
  Description of Artificial Sequence: Synthetic oligonucleotide
  Sense strand starting at position 3922 of SEQ ID NO: 1561998
gucaauauacauuggauau

SEQ ID NO: 1714288 - RNA, 19 nt, Artificial Sequence
  Description of Artificial Sequence: Synthetic oligonucleotide
  Antisense strand to SEQ ID NO: 1714287
auauccaauguauauugac

SEQ ID NO: 1714289 - RNA, 19 nt, Artificial Sequence
  Description of Artificial Sequence: Synthetic oligonucleotide
  Sense strand starting at position 148 of SEQ ID NO: 1561999
gagaaagucuuggcaagcu

SEQ ID NO: 1714290 - RNA, 19 nt, Artificial Sequence
  Description of Artificial Sequence: Synthetic oligonucleotide
  Antisense strand to SEQ ID NO: 1714289
agcuugccaagacuuucuc

SEQ ID NO: 1714291 - RNA, 19 nt, Artificial Sequence
  Description of Artificial Sequence: Synthetic oligonucleotide
  Sense strand starting at position 169 of SEQ ID NO: 1561999
ggaguuacugcuuauuccu

SEQ ID NO: 1714292 - RNA, 19 nt, Artificial Sequence
  Description of Artificial Sequence: Synthetic oligonucleotide
  Antisense strand to SEQ ID NO: 1714291
aggaauaagcaguaacucc

SEQ ID NO: 1714293 - RNA, 19 nt, Artificial Sequence
  Description of Artificial Sequence: Synthetic oligonucleotide
  Sense strand starting at position 183 of SEQ ID NO: 1561999
uuccuuauuccuuaguguu

SEQ ID NO: 1714294 - RNA, 19 nt, Artificial Sequence
  Description of Artificial Sequence: Synthetic oligonucleotide
  Antisense strand to SEQ ID NO: 1714293
aacacuaaggaauaaggaa

SEQ ID NO: 1714295 - RNA, 19 nt, Artificial Sequence
  Description of Artificial Sequence: Synthetic oligonucleotide
  Sense strand starting at position 286 of SEQ ID NO: 1561999
gccggaaagcucuacucaa

SEQ ID NO: 1714296 - RNA, 19 nt, Artificial Sequence
  Description of Artificial Sequence: Synthetic oligonucleotide
  Antisense strand to SEQ ID NO: 1714295
uugaguagagcuuuccggc

SEQ ID NO: 1714297 - RNA, 19 nt, Artificial Sequence
  Description of Artificial Sequence: Synthetic oligonucleotide
  Sense strand starting at position 638 of SEQ ID NO: 1561999
ggcagagcuguccucguua

SEQ ID NO: 1714298 - RNA, 19 nt, Artificial Sequence
  Description of Artificial Sequence: Synthetic oligonucleotide
  Antisense strand to SEQ ID NO: 1714297
uaacgaggacagcucugcc

SEQ ID NO: 1714299 - RNA, 19 nt, Artificial Sequence
  Description of Artificial Sequence: Synthetic oligonucleotide
  Sense strand starting at position 746 of SEQ ID NO: 1561999
uuucuuauagugggauuaa

SEQ ID NO: 1714300 - RNA, 19 nt, Artificial Sequence
  Description of Artificial Sequence: Synthetic oligonucleotide
  Antisense strand to SEQ ID NO: 1714299
uuaaucccacuauaagaaa

SEQ ID NO: 1714301 - RNA, 19 nt, Artificial Sequence
  Description of Artificial Sequence: Synthetic oligonucleotide
  Sense strand starting at position 976 of SEQ ID NO: 1561999
ccucuaacacugugaugua

SEQ ID NO: 1714302 - RNA, 19 nt, Artificial Sequence
  Description of Artificial Sequence: Synthetic oligonucleotide
  Antisense strand to SEQ ID NO: 1714301
uacaucacaguguuagagg

SEQ ID NO: 1714303 - RNA, 19 nt, Artificial Sequence
  Description of Artificial Sequence: Synthetic oligonucleotide
  Sense strand starting at position 1009 of SEQ ID NO: 1561999
aguuguaacccacagauau

SEQ ID NO: 1714304 - RNA, 19 nt, Artificial Sequence
  Description of Artificial Sequence: Synthetic oligonucleotide
  Antisense strand to SEQ ID NO: 1714303
auaucuguggguuacaacu

SEQ ID NO: 1714305 - RNA, 19 nt, Artificial Sequence
  Description of Artificial Sequence: Synthetic oligonucleotide
  Sense strand starting at position 1151 of SEQ ID NO: 1561999
uuugccucuccagggauau

SEQ ID NO: 1714306 - RNA, 19 nt, Artificial Sequence
  Description of Artificial Sequence: Synthetic oligonucleotide
  Antisense strand to SEQ ID NO: 1714305
auaucccuggagaggcaaa

SEQ ID NO: 1714307 - RNA, 19 nt, Artificial Sequence
  Description of Artificial Sequence: Synthetic oligonucleotide
  Sense strand starting at position 1177 of SEQ ID NO: 1561999
cuaccucaggucugaaagu

SEQ ID NO: 1714308 - RNA, 19 nt, Artificial Sequence
  Description of Artificial Sequence: Synthetic oligonucleotide
  Antisense strand to SEQ ID NO: 1714307
acuuucagaccugagguag

SEQ ID NO: 1714309 - RNA, 19 nt, Artificial Sequence
  Description of Artificial Sequence: Synthetic oligonucleotide
  Sense strand starting at position 1690 of SEQ ID NO: 1561999
ggaaaucuuucccugguca

SEQ ID NO: 1714310 - RNA, 19 nt, Artificial Sequence
  Description of Artificial Sequence: Synthetic oligonucleotide
  Antisense strand to SEQ ID NO: 1714309
ugaccagggaaagauuucc

SEQ ID NO: 1714311 - RNA, 19 nt, Artificial Sequence
  Description of Artificial Sequence: Synthetic oligonucleotide
  Sense strand starting at position 1691 of SEQ ID NO: 1561999
gaaaucuuucccuggucag

SEQ ID NO: 1714312 - RNA, 19 nt, Artificial Sequence
  Description of Artificial Sequence: Synthetic oligonucleotide
  Antisense strand to SEQ ID NO: 1714311
cugaccagggaaagauuuc

SEQ ID NO: 1714313 - RNA, 19 nt, Artificial Sequence
  Description of Artificial Sequence: Synthetic oligonucleotide
  Sense strand starting at position 1694 of SEQ ID NO: 1561999
aucuuucccuggucagauc

SEQ ID NO: 1714314 - RNA, 19 nt, Artificial Sequence
  Description of Artificial Sequence: Synthetic oligonucleotide
  Antisense strand to SEQ ID NO: 1714313
gaucugaccagggaaagau

SEQ ID NO: 1714315 - RNA, 19 nt, Artificial Sequence
  Description of Artificial Sequence: Synthetic oligonucleotide
  Sense strand starting at position 1705 of SEQ ID NO: 1561999
gucagaucucgcgcccuca

SEQ ID NO: 1714316 - RNA, 19 nt, Artificial Sequence
  Description of Artificial Sequence: Synthetic oligonucleotide
  Antisense strand to SEQ ID NO: 1714315
ugagggcgcgagaucugac

SEQ ID NO: 1714317 - RNA, 19 nt, Artificial Sequence
  Description of Artificial Sequence: Synthetic oligonucleotide
  Sense strand starting at position 1996 of SEQ ID NO: 1561999
uccgcugucgucccggaaa

SEQ ID NO: 1714318 - RNA, 19 nt, Artificial Sequence
  Description of Artificial Sequence: Synthetic oligonucleotide
  Antisense strand to SEQ ID NO: 1714317
uuuccgggacgacagcgga

SEQ ID NO: 1714319 - RNA, 19 nt, Artificial Sequence
  Description of Artificial Sequence: Synthetic oligonucleotide
  Sense strand starting at position 2015 of SEQ ID NO: 1561999
ccgggaugcgguuaucaga

SEQ ID NO: 1714320 - RNA, 19 nt, Artificial Sequence
  Description of Artificial Sequence: Synthetic oligonucleotide
  Antisense strand to SEQ ID NO: 1714319
ucugauaaccgcaucccgg

SEQ ID NO: 1714321 - RNA, 19 nt, Artificial Sequence
  Description of Artificial Sequence: Synthetic oligonucleotide
  Sense strand starting at position 2054 of SEQ ID NO: 1561999
cgaagauucccucagagcu

SEQ ID NO: 1714322 - RNA, 19 nt, Artificial Sequence
  Description of Artificial Sequence: Synthetic oligonucleotide
  Antisense strand to SEQ ID NO: 1714321
agcucugagggaaucuucg

SEQ ID NO: 1714323 - RNA, 19 nt, Artificial Sequence
  Description of Artificial Sequence: Synthetic oligonucleotide
  Sense strand starting at position 2210 of SEQ ID NO: 1561999
uuacccauuugauaguuga

SEQ ID NO: 1714324 - RNA, 19 nt, Artificial Sequence
  Description of Artificial Sequence: Synthetic oligonucleotide
  Antisense strand to SEQ ID NO: 1714323
ucaacuaucaaauggguaa

SEQ ID NO: 1714325 - RNA, 19 nt, Artificial Sequence
  Description of Artificial Sequence: Synthetic oligonucleotide
  Sense strand starting at position 2553 of SEQ ID NO: 1561999
aguacacuuuccuuuaagu

SEQ ID NO: 1714326 - RNA, 19 nt, Artificial Sequence
  Description of Artificial Sequence: Synthetic oligonucleotide
  Antisense strand to SEQ ID NO: 1714325
acuuaaaggaaaguguacu

SEQ ID NO: 1714327 - RNA, 19 nt, Artificial Sequence
  Description of Artificial Sequence: Synthetic oligonucleotide
  Sense strand starting at position 2558 of SEQ ID NO: 1561999
acuuuccuuuaaguaguua

SEQ ID NO: 1714328 - RNA, 19 nt, Artificial Sequence
  Description of Artificial Sequence: Synthetic oligonucleotide
  Antisense strand to SEQ ID NO: 1714327
uaacuacuuaaaggaaagu

SEQ ID NO: 1714329 - RNA, 19 nt, Artificial Sequence
  Description of Artificial Sequence: Synthetic oligonucleotide
  Sense strand starting at position 2601 of SEQ ID NO: 1561999
ucaguauucgauugcauuu

SEQ ID NO: 1714330 - RNA, 19 nt, Artificial Sequence
  Description of Artificial Sequence: Synthetic oligonucleotide
  Antisense strand to SEQ ID NO: 1714329
aaaugcaaucgaauacuga

SEQ ID NO: 1714331 - RNA, 19 nt, Artificial Sequence
  Description of Artificial Sequence: Synthetic oligonucleotide
  Sense strand starting at position 2830 of SEQ ID NO: 1561999
agauuaaucuguuccagaa

SEQ ID NO: 1714332 - RNA, 19 nt, Artificial Sequence
  Description of Artificial Sequence: Synthetic oligonucleotide
  Antisense strand to SEQ ID NO: 1714331
uucuggaacagauuaaucu

SEQ ID NO: 1714333 - RNA, 19 nt, Artificial Sequence
  Description of Artificial Sequence: Synthetic oligonucleotide
  Sense strand starting at position 3048 of SEQ ID NO: 1561999
cugugcaagcuccuuugua

SEQ ID NO: 1714334 - RNA, 19 nt, Artificial Sequence
  Description of Artificial Sequence: Synthetic oligonucleotide
  Antisense strand to SEQ ID NO: 1714333
uacaaaggagcuugcacag

SEQ ID NO: 1714335 - RNA, 19 nt, Artificial Sequence
  Description of Artificial Sequence: Synthetic oligonucleotide
  Sense strand starting at position 3081 of SEQ ID NO: 1561999
auauccuuuggccagguau

SEQ ID NO: 1714336 - RNA, 19 nt, Artificial Sequence
  Description of Artificial Sequence: Synthetic oligonucleotide
  Antisense strand to SEQ ID NO: 1714335
auaccuggccaaaggauau

SEQ ID NO: 1714337 - RNA, 19 nt, Artificial Sequence
  Description of Artificial Sequence: Synthetic oligonucleotide
  Sense strand starting at position 3083 of SEQ ID NO: 1561999
auccuuuggccagguauuu

SEQ ID NO: 1714338 - RNA, 19 nt, Artificial Sequence
  Description of Artificial Sequence: Synthetic oligonucleotide
  Antisense strand to SEQ ID NO: 1714337
aaauaccuggccaaaggau

SEQ ID NO: 1714339 - RNA, 19 nt, Artificial Sequence
  Description of Artificial Sequence: Synthetic oligonucleotide
  Sense strand starting at position 3092 of SEQ ID NO: 1561999
ccagguauuuaagagugga

SEQ ID NO: 1714340 - RNA, 19 nt, Artificial Sequence
  Description of Artificial Sequence: Synthetic oligonucleotide
  Antisense strand to SEQ ID NO: 1714339
uccacucuuaaauaccugg

SEQ ID NO: 1714341 - RNA, 19 nt, Artificial Sequence
  Description of Artificial Sequence: Synthetic oligonucleotide
  Sense strand starting at position 3202 of SEQ ID NO: 1561999
augagucuccauuguacca

SEQ ID NO: 1714342 - RNA, 19 nt, Artificial Sequence
  Description of Artificial Sequence: Synthetic oligonucleotide
  Antisense strand to SEQ ID NO: 1714341
ugguacaauggagacucau

SEQ ID NO: 1714343 - RNA, 19 nt, Artificial Sequence
  Description of Artificial Sequence: Synthetic oligonucleotide
  Sense strand starting at position 3225 of SEQ ID NO: 1561999
cuggucagcauuugaaguu

SEQ ID NO: 1714344 - RNA, 19 nt, Artificial Sequence
  Description of Artificial Sequence: Synthetic oligonucleotide
  Antisense strand to SEQ ID NO: 1714343
aacuucaaaugcugaccag

SEQ ID NO: 1714345 - RNA, 19 nt, Artificial Sequence
  Description of Artificial Sequence: Synthetic oligonucleotide
  Sense strand starting at position 3269 of SEQ ID NO: 1561999
ugaccacuuggguauguau

SEQ ID NO: 1714346 - RNA, 19 nt, Artificial Sequence
  Description of Artificial Sequence: Synthetic oligonucleotide
  Antisense strand to SEQ ID NO: 1714345
auacauacccaagugguca

SEQ ID NO: 1714347 - RNA, 19 nt, Artificial Sequence
  Description of Artificial Sequence: Synthetic oligonucleotide
  Sense strand starting at position 3399 of SEQ ID NO: 1561999
uugugaaaggucuguuaaa

SEQ ID NO: 1714348 - RNA, 19 nt, Artificial Sequence
  Description of Artificial Sequence: Synthetic oligonucleotide
  Antisense strand to SEQ ID NO: 1714347
uuuaacagaccuuucacaa

SEQ ID NO: 1714349 - RNA, 19 nt, Artificial Sequence
  Description of Artificial Sequence: Synthetic oligonucleotide
  Sense strand starting at position 3400 of SEQ ID NO: 1561999
ugugaaaggucuguuaaag

SEQ ID NO: 1714350 - RNA, 19 nt, Artificial Sequence
  Description of Artificial Sequence: Synthetic oligonucleotide
  Antisense strand to SEQ ID NO: 1714349
cuuuaacagaccuuucaca

SEQ ID NO: 1714351 - RNA, 19 nt, Artificial Sequence
  Description of Artificial Sequence: Synthetic oligonucleotide
  Sense strand starting at position 3507 of SEQ ID NO: 1561999
ccaccugcccuaugggaaa

SEQ ID NO: 1714352 - RNA, 19 nt, Artificial Sequence
  Description of Artificial Sequence: Synthetic oligonucleotide
  Antisense strand to SEQ ID NO: 1714351
uuucccauagggcaggugg

SEQ ID NO: 1714353 - RNA, 19 nt, Artificial Sequence
  Description of Artificial Sequence: Synthetic oligonucleotide
  Sense strand starting at position 3634 of SEQ ID NO: 1561999
accagacauuuccagaaag

SEQ ID NO: 1714354 - RNA, 19 nt, Artificial Sequence
  Description of Artificial Sequence: Synthetic oligonucleotide
  Antisense strand to SEQ ID NO: 1714353
cuuucuggaaaugucuggu

SEQ ID NO: 1714355 - RNA, 19 nt, Artificial Sequence
  Description of Artificial Sequence: Synthetic oligonucleotide
  Sense strand starting at position 3650 of SEQ ID NO: 1561999
aaggaaaugucagaaagau

SEQ ID NO: 1714356 - RNA, 19 nt, Artificial Sequence
  Description of Artificial Sequence: Synthetic oligonucleotide
  Antisense strand to SEQ ID NO: 1714355
aucuuucugacauuuccuu

SEQ ID NO: 1714357 - RNA, 19 nt, Artificial Sequence
  Description of Artificial Sequence: Synthetic oligonucleotide
  Sense strand starting at position 3659 of SEQ ID NO: 1561999
ucagaaagaugucuuuauc

SEQ ID NO: 1714358 - RNA, 19 nt, Artificial Sequence
  Description of Artificial Sequence: Synthetic oligonucleotide
  Antisense strand to SEQ ID NO: 1714357
gauaaagacaucuuucuga

SEQ ID NO: 1714359 - RNA, 19 nt, Artificial Sequence
  Description of Artificial Sequence: Synthetic oligonucleotide
  Sense strand starting at position 3665 of SEQ ID NO: 1561999
agaugucuuuaucucauua

SEQ ID NO: 1714360 - RNA, 19 nt, Artificial Sequence
  Description of Artificial Sequence: Synthetic oligonucleotide
  Antisense strand to SEQ ID NO: 1714359
uaaugagauaaagacaucu

SEQ ID NO: 1714361 - RNA, 19 nt, Artificial Sequence
  Description of Artificial Sequence: Synthetic oligonucleotide
  Sense strand starting at position 3791 of SEQ ID NO: 1561999
gccuuuaauccauaugagc

SEQ ID NO: 1714362 - RNA, 19 nt, Artificial Sequence
  Description of Artificial Sequence: Synthetic oligonucleotide
  Antisense strand to SEQ ID NO: 1714361
gcucauauggauuaaaggc

SEQ ID NO: 1714363 - RNA, 19 nt, Artificial Sequence
  Description of Artificial Sequence: Synthetic oligonucleotide
  Sense strand starting at position 3799 of SEQ ID NO: 1561999
uccauaugagcaugaucaa

SEQ ID NO: 1714364 - RNA, 19 nt, Artificial Sequence
  Description of Artificial Sequence: Synthetic oligonucleotide
  Antisense strand to SEQ ID NO: 1714363
uugaucaugcucauaugga

SEQ ID NO: 1714365 - RNA, 19 nt, Artificial Sequence
  Description of Artificial Sequence: Synthetic oligonucleotide
  Sense strand starting at position 3971 of SEQ ID NO: 1561999
agauaauagugccuaagug

SEQ ID NO: 1714366 - RNA, 19 nt, Artificial Sequence
  Description of Artificial Sequence: Synthetic oligonucleotide
  Antisense strand to SEQ ID NO: 1714365
cacuuaggcacuauuaucu

SEQ ID NO: 1714367 - RNA, 19 nt, Artificial Sequence
  Description of Artificial Sequence: Synthetic oligonucleotide
  Sense strand starting at position 3972 of SEQ ID NO: 1561999
gauaauagugccuaaguga

SEQ ID NO: 1714368 - RNA, 19 nt, Artificial Sequence
  Description of Artificial Sequence: Synthetic oligonucleotide
  Antisense strand to SEQ ID NO: 1714367
ucacuuaggcacuauuauc

SEQ ID NO: 1714369 - RNA, 19 nt, Artificial Sequence
  Description of Artificial Sequence: Synthetic oligonucleotide
  Sense strand starting at position 11 of SEQ ID NO: 1562000
cggauauaaacagguaauu

SEQ ID NO: 1714370 - RNA, 19 nt, Artificial Sequence
  Description of Artificial Sequence: Synthetic oligonucleotide
  Antisense strand to SEQ ID NO: 1714369
aauuaccuguuuauauccg

SEQ ID NO: 1714371 - RNA, 19 nt, Artificial Sequence
  Description of Artificial Sequence: Synthetic oligonucleotide
  Sense strand starting at position 20 of SEQ ID NO: 1562000
acagguaauuaugagauaa

SEQ ID NO: 1714372 - RNA, 19 nt, Artificial Sequence
  Description of Artificial Sequence: Synthetic oligonucleotide
  Antisense strand to SEQ ID NO: 1714371
uuaucucauaauuaccugu

SEQ ID NO: 1714373 - RNA, 19 nt, Artificial Sequence
  Description of Artificial Sequence: Synthetic oligonucleotide
  Sense strand starting at position 22 of SEQ ID NO: 1562000
agguaauuaugagauaaga

SEQ ID NO: 1714374 - RNA, 19 nt, Artificial Sequence
  Description of Artificial Sequence: Synthetic oligonucleotide
  Antisense strand to SEQ ID NO: 1714373
ucuuaucucauaauuaccu

SEQ ID NO: 1714375 - RNA, 19 nt, Artificial Sequence
  Description of Artificial Sequence: Synthetic oligonucleotide
  Sense strand starting at position 74 of SEQ ID NO: 1562000
cuaauacugccucagguuu

SEQ ID NO: 1714376 - RNA, 19 nt, Artificial Sequence
  Description of Artificial Sequence: Synthetic oligonucleotide
  Antisense strand to SEQ ID NO: 1714375
aaaccugaggcaguauuag

SEQ ID NO: 1714377 - RNA, 19 nt, Artificial Sequence
  Description of Artificial Sequence: Synthetic oligonucleotide
  Sense strand starting at position 227 of SEQ ID NO: 1562000
cuaggaaaccugggcaaau

SEQ ID NO: 1714378 - RNA, 19 nt, Artificial Sequence
  Description of Artificial Sequence: Synthetic oligonucleotide
  Antisense strand to SEQ ID NO: 1714377
auuugcccagguuuccuag

SEQ ID NO: 1714379 - RNA, 19 nt, Artificial Sequence
  Description of Artificial Sequence: Synthetic oligonucleotide
  Sense strand starting at position 228 of SEQ ID NO: 1562000
uaggaaaccugggcaaauu

SEQ ID NO: 1714380 - RNA, 19 nt, Artificial Sequence
  Description of Artificial Sequence: Synthetic oligonucleotide
  Antisense strand to SEQ ID NO: 1714379
aauuugcccagguuuccua

SEQ ID NO: 1714381 - RNA, 19 nt, Artificial Sequence
  Description of Artificial Sequence: Synthetic oligonucleotide
  Sense strand starting at position 309 of SEQ ID NO: 1562000
agaaauaaaugugaggacu

SEQ ID NO: 1714382 - RNA, 19 nt, Artificial Sequence
  Description of Artificial Sequence: Synthetic oligonucleotide
  Antisense strand to SEQ ID NO: 1714381
aguccucacauuuauuucu

SEQ ID NO: 1714383 - RNA, 19 nt, Artificial Sequence
  Description of Artificial Sequence: Synthetic oligonucleotide
  Sense strand starting at position 627 of SEQ ID NO: 1562000
ugcugauacuguuucuuga

SEQ ID NO: 1714384 - RNA, 19 nt, Artificial Sequence
  Description of Artificial Sequence: Synthetic oligonucleotide
  Antisense strand to SEQ ID NO: 1714383
ucaagaaacaguaucagca

SEQ ID NO: 1714385 - RNA, 19 nt, Artificial Sequence
  Description of Artificial Sequence: Synthetic oligonucleotide
  Sense strand starting at position 629 of SEQ ID NO: 1562000
cugauacuguuucuugaac

SEQ ID NO: 1714386 - RNA, 19 nt, Artificial Sequence
  Description of Artificial Sequence: Synthetic oligonucleotide
  Antisense strand to SEQ ID NO: 1714385
guucaagaaacaguaucag

SEQ ID NO: 1714387 - RNA, 19 nt, Artificial Sequence
  Description of Artificial Sequence: Synthetic oligonucleotide
  Sense strand starting at position 654 of SEQ ID NO: 1562000
cuggcuacaugagugaaua

SEQ ID NO: 1714388 - RNA, 19 nt, Artificial Sequence
  Description of Artificial Sequence: Synthetic oligonucleotide
  Antisense strand to SEQ ID NO: 1714387
uauucacucauguagccag

SEQ ID NO: 1714389 - RNA, 19 nt, Artificial Sequence
  Description of Artificial Sequence: Synthetic oligonucleotide
  Sense strand starting at position 655 of SEQ ID NO: 1562000
uggcuacaugagugaauac

SEQ ID NO: 1714390 - RNA, 19 nt, Artificial Sequence
  Description of Artificial Sequence: Synthetic oligonucleotide
  Antisense strand to SEQ ID NO: 1714389
guauucacucauguagcca

SEQ ID NO: 1714391 - RNA, 19 nt, Artificial Sequence
  Description of Artificial Sequence: Synthetic oligonucleotide
  Sense strand starting at position 971 of SEQ ID NO: 1562000
gggauaguuuauucagggu

SEQ ID NO: 1714392 - RNA, 19 nt, Artificial Sequence
  Description of Artificial Sequence: Synthetic oligonucleotide
  Antisense strand to SEQ ID NO: 1714391
acccugaauaaacuauccc

SEQ ID NO: 1714393 - RNA, 19 nt, Artificial Sequence
  Description of Artificial Sequence: Synthetic oligonucleotide
  Sense strand starting at position 986 of SEQ ID NO: 1562000
gggucagaauacuaaggaa

SEQ ID NO: 1714394 - RNA, 19 nt, Artificial Sequence
  Description of Artificial Sequence: Synthetic oligonucleotide
  Antisense strand to SEQ ID NO: 1714393
uuccuuaguauucugaccc

SEQ ID NO: 1714395 - RNA, 19 nt, Artificial Sequence
  Description of Artificial Sequence: Synthetic oligonucleotide
  Sense strand starting at position 1051 of SEQ ID NO: 1562000
cgauuugucucccucacua

SEQ ID NO: 1714396 - RNA, 19 nt, Artificial Sequence
  Description of Artificial Sequence: Synthetic oligonucleotide
  Antisense strand to SEQ ID NO: 1714395
uagugagggagacaaaucg

SEQ ID NO: 1714397 - RNA, 19 nt, Artificial Sequence
  Description of Artificial Sequence: Synthetic oligonucleotide
  Sense strand starting at position 1124 of SEQ ID NO: 1562000
aaacaauguucggugaaga

SEQ ID NO: 1714398 - RNA, 19 nt, Artificial Sequence
  Description of Artificial Sequence: Synthetic oligonucleotide
  Antisense strand to SEQ ID NO: 1714397
ucuucaccgaacauuguuu

SEQ ID NO: 1714399 - RNA, 19 nt, Artificial Sequence
  Description of Artificial Sequence: Synthetic oligonucleotide
  Sense strand starting at position 1125 of SEQ ID NO: 1562000
aacaauguucggugaagaa

SEQ ID NO: 1714400 - RNA, 19 nt, Artificial Sequence
  Description of Artificial Sequence: Synthetic oligonucleotide
  Antisense strand to SEQ ID NO: 1714399
uucuucaccgaacauuguu

SEQ ID NO: 1714401 - RNA, 19 nt, Artificial Sequence
  Description of Artificial Sequence: Synthetic oligonucleotide
  Sense strand starting at position 1134 of SEQ ID NO: 1562000
cggugaagaacuuaguaag

SEQ ID NO: 1714402 - RNA, 19 nt, Artificial Sequence
  Description of Artificial Sequence: Synthetic oligonucleotide
  Antisense strand to SEQ ID NO: 1714401
cuuacuaaguucuucaccg

SEQ ID NO: 1714403 - RNA, 19 nt, Artificial Sequence
  Description of Artificial Sequence: Synthetic oligonucleotide
  Sense strand starting at position 1137 of SEQ ID NO: 1562000
ugaagaacuuaguaaggaa

SEQ ID NO: 1714404 - RNA, 19 nt, Artificial Sequence
  Description of Artificial Sequence: Synthetic oligonucleotide
  Antisense strand to SEQ ID NO: 1714403
uuccuuacuaaguucuuca

SEQ ID NO: 1714405 - RNA, 19 nt, Artificial Sequence
  Description of Artificial Sequence: Synthetic oligonucleotide
  Sense strand starting at position 1549 of SEQ ID NO: 1562000
acgagacagucaguuaguu

SEQ ID NO: 1714406 - RNA, 19 nt, Artificial Sequence
  Description of Artificial Sequence: Synthetic oligonucleotide
  Antisense strand to SEQ ID NO: 1714405
aacuaacugacugucucgu

SEQ ID NO: 1714407 - RNA, 19 nt, Artificial Sequence
  Description of Artificial Sequence: Synthetic oligonucleotide
  Sense strand starting at position 1554 of SEQ ID NO: 1562000
acagucaguuaguucucua

SEQ ID NO: 1714408 - RNA, 19 nt, Artificial Sequence
  Description of Artificial Sequence: Synthetic oligonucleotide
  Antisense strand to SEQ ID NO: 1714407
uagagaacuaacugacugu

SEQ ID NO: 1714409 - RNA, 19 nt, Artificial Sequence
  Description of Artificial Sequence: Synthetic oligonucleotide
  Sense strand starting at position 1557 of SEQ ID NO: 1562000
gucaguuaguucucuagga

SEQ ID NO: 1714410 - RNA, 19 nt, Artificial Sequence
  Description of Artificial Sequence: Synthetic oligonucleotide
  Antisense strand to SEQ ID NO: 1714409
uccuagagaacuaacugac

SEQ ID NO: 1714411 - RNA, 19 nt, Artificial Sequence
  Description of Artificial Sequence: Synthetic oligonucleotide
  Sense strand starting at position 1558 of SEQ ID NO: 1562000
ucaguuaguucucuaggaa

SEQ ID NO: 1714412 - RNA, 19 nt, Artificial Sequence
  Description of Artificial Sequence: Synthetic oligonucleotide
  Antisense strand to SEQ ID NO: 1714411
uuccuagagaacuaacuga

SEQ ID NO: 1714413 - RNA, 19 nt, Artificial Sequence
  Description of Artificial Sequence: Synthetic oligonucleotide
  Sense strand starting at position 1559 of SEQ ID NO: 1562000
caguuaguucucuaggaac

SEQ ID NO: 1714414 - RNA, 19 nt, Artificial Sequence
  Description of Artificial Sequence: Synthetic oligonucleotide
  Antisense strand to SEQ ID NO: 1714413
guuccuagagaacuaacug

SEQ ID NO: 1714415 - RNA, 19 nt, Artificial Sequence
  Description of Artificial Sequence: Synthetic oligonucleotide
  Sense strand starting at position 1714 of SEQ ID NO: 1562000
ggaaaugaacucggccaga

SEQ ID NO: 1714416 - RNA, 19 nt, Artificial Sequence
  Description of Artificial Sequence: Synthetic oligonucleotide
  Antisense strand to SEQ ID NO: 1714415
ucuggccgaguucauuucc

SEQ ID NO: 1714417 - RNA, 19 nt, Artificial Sequence
  Description of Artificial Sequence: Synthetic oligonucleotide
  Sense strand starting at position 2105 of SEQ ID NO: 1562000
ccuuccugggauugugaga

SEQ ID NO: 1714418 - RNA, 19 nt, Artificial Sequence
  Description of Artificial Sequence: Synthetic oligonucleotide
  Antisense strand to SEQ ID NO: 1714417
ucucacaaucccaggaagg

SEQ ID NO: 1714419 - RNA, 19 nt, Artificial Sequence
  Description of Artificial Sequence: Synthetic oligonucleotide
  Sense strand starting at position 2146 of SEQ ID NO: 1562000
ucacucuugcguguauguu

SEQ ID NO: 1714420 - RNA, 19 nt, Artificial Sequence
  Description of Artificial Sequence: Synthetic oligonucleotide
  Antisense strand to SEQ ID NO: 1714419
aacauacacgcaagaguga

SEQ ID NO: 1714421 - RNA, 19 nt, Artificial Sequence
  Description of Artificial Sequence: Synthetic oligonucleotide
  Sense strand starting at position 2739 of SEQ ID NO: 1562000
uuuguuaaacgccaacuau

SEQ ID NO: 1714422 - RNA, 19 nt, Artificial Sequence
  Description of Artificial Sequence: Synthetic oligonucleotide
  Antisense strand to SEQ ID NO: 1714421
auaguuggcguuuaacaaa

SEQ ID NO: 1714423 - RNA, 19 nt, Artificial Sequence
  Description of Artificial Sequence: Synthetic oligonucleotide
  Sense strand starting at position 2836 of SEQ ID NO: 1562000
uaacccuugugugcugaaa

SEQ ID NO: 1714424 - RNA, 19 nt, Artificial Sequence
  Description of Artificial Sequence: Synthetic oligonucleotide
  Antisense strand to SEQ ID NO: 1714423
uuucagcacacaaggguua

SEQ ID NO: 1714425 - RNA, 19 nt, Artificial Sequence
  Description of Artificial Sequence: Synthetic oligonucleotide
  Sense strand starting at position 2859 of SEQ ID NO: 1562000
ugcugauuauaggcuaacu

SEQ ID NO: 1714426 - RNA, 19 nt, Artificial Sequence
  Description of Artificial Sequence: Synthetic oligonucleotide
  Antisense strand to SEQ ID NO: 1714425
aguuagccuauaaucagca

SEQ ID NO: 1714427 - RNA, 19 nt, Artificial Sequence
  Description of Artificial Sequence: Synthetic oligonucleotide
  Sense strand starting at position 2888 of SEQ ID NO: 1562000
gaggaaggcuuagaaauuu

SEQ ID NO: 1714428 - RNA, 19 nt, Artificial Sequence
  Description of Artificial Sequence: Synthetic oligonucleotide
  Antisense strand to SEQ ID NO: 1714427
aaauuucuaagccuuccuc

SEQ ID NO: 1714429 - RNA, 19 nt, Artificial Sequence
  Description of Artificial Sequence: Synthetic oligonucleotide
  Sense strand starting at position 3206 of SEQ ID NO: 1562000
ccggaaggcuuagaaauuu

SEQ ID NO: 1714430 - RNA, 19 nt, Artificial Sequence
  Description of Artificial Sequence: Synthetic oligonucleotide
  Antisense strand to SEQ ID NO: 1714429
aaauuucuaagccuuccgg

SEQ ID NO: 1714431 - RNA, 19 nt, Artificial Sequence
  Description of Artificial Sequence: Synthetic oligonucleotide
  Sense strand starting at position 3386 of SEQ ID NO: 1562000
gcuguaucaguacagcaaa

SEQ ID NO: 1714432 - RNA, 19 nt, Artificial Sequence
  Description of Artificial Sequence: Synthetic oligonucleotide
  Antisense strand to SEQ ID NO: 1714431
uuugcuguacugauacagc

SEQ ID NO: 1714433 - RNA, 19 nt, Artificial Sequence
  Description of Artificial Sequence: Synthetic oligonucleotide
  Sense strand starting at position 3440 of SEQ ID NO: 1562000
guuuccucagguugauaga

SEQ ID NO: 1714434 - RNA, 19 nt, Artificial Sequence
  Description of Artificial Sequence: Synthetic oligonucleotide
  Antisense strand to SEQ ID NO: 1714433
ucuaucaaccugaggaaac

SEQ ID NO: 1714435 - RNA, 19 nt, Artificial Sequence
  Description of Artificial Sequence: Synthetic oligonucleotide
  Sense strand starting at position 3441 of SEQ ID NO: 1562000
uuuccucagguugauagau

SEQ ID NO: 1714436 - RNA, 19 nt, Artificial Sequence
  Description of Artificial Sequence: Synthetic oligonucleotide
  Antisense strand to SEQ ID NO: 1714435
aucuaucaaccugaggaaa

SEQ ID NO: 1714437 - RNA, 19 nt, Artificial Sequence
  Description of Artificial Sequence: Synthetic oligonucleotide
  Sense strand starting at position 3532 of SEQ ID NO: 1562000
uggagagcccauugauaag

SEQ ID NO: 1714438 - RNA, 19 nt, Artificial Sequence
  Description of Artificial Sequence: Synthetic oligonucleotide
  Antisense strand to SEQ ID NO: 1714437
cuuaucaaugggcucucca

SEQ ID NO: 1714439 - RNA, 19 nt, Artificial Sequence
  Description of Artificial Sequence: Synthetic oligonucleotide
  Sense strand starting at position 3538 of SEQ ID NO: 1562000
gcccauugauaagcauuaa

SEQ ID NO: 1714440 - RNA, 19 nt, Artificial Sequence
  Description of Artificial Sequence: Synthetic oligonucleotide
  Antisense strand to SEQ ID NO: 1714439
uuaaugcuuaucaaugggc

SEQ ID NO: 1714441 - RNA, 19 nt, Artificial Sequence
  Description of Artificial Sequence: Synthetic oligonucleotide
  Sense strand starting at position 3576 of SEQ ID NO: 1562000
aauguauaguaagugcuua

SEQ ID NO: 1714442 - RNA, 19 nt, Artificial Sequence
  Description of Artificial Sequence: Synthetic oligonucleotide
  Antisense strand to SEQ ID NO: 1714441
uaagcacuuacuauacauu

SEQ ID NO: 1714443 - RNA, 19 nt, Artificial Sequence
  Description of Artificial Sequence: Synthetic oligonucleotide
  Sense strand starting at position 3614 of SEQ ID NO: 1562000
uuaaaugugcaaggaaauu

SEQ ID NO: 1714444 - RNA, 19 nt, Artificial Sequence
  Description of Artificial Sequence: Synthetic oligonucleotide
  Antisense strand to SEQ ID NO: 1714443
aauuuccuugcacauuuaa

SEQ ID NO: 1714445 - RNA, 19 nt, Artificial Sequence
  Description of Artificial Sequence: Synthetic oligonucleotide
  Sense strand starting at position 3967 of SEQ ID NO: 1562000
aacgaaacaguguaugacu

SEQ ID NO: 1714446 - RNA, 19 nt, Artificial Sequence
  Description of Artificial Sequence: Synthetic oligonucleotide
  Antisense strand to SEQ ID NO: 1714445
agucauacacuguuucguu

SEQ ID NO: 1714447 - RNA, 19 nt, Artificial Sequence
  Description of Artificial Sequence: Synthetic oligonucleotide
  Sense strand starting at position 3972 of SEQ ID NO: 1562000
aacaguguaugacugagaa

SEQ ID NO: 1714448 - RNA, 19 nt, Artificial Sequence
  Description of Artificial Sequence: Synthetic oligonucleotide
  Antisense strand to SEQ ID NO: 1714447
uucucagucauacacuguu

SEQ ID NO: 1714449 - RNA, 19 nt, Artificial Sequence
  Description of Artificial Sequence: Synthetic oligonucleotide
  Sense strand starting at position 41 of SEQ ID NO: 1562001
ucauucuuccaagaguaug

SEQ ID NO: 1714450 - RNA, 19 nt, Artificial Sequence
  Description of Artificial Sequence: Synthetic oligonucleotide
  Antisense strand to SEQ ID NO: 1714449
cauacucuuggaagaauga

SEQ ID NO: 1714451 - RNA, 19 nt, Artificial Sequence
  Description of Artificial Sequence: Synthetic oligonucleotide
  Sense strand starting at position 51 of SEQ ID NO: 1562001
aagaguaugcaaugcagua

SEQ ID NO: 1714452 - RNA, 19 nt, Artificial Sequence
  Description of Artificial Sequence: Synthetic oligonucleotide
  Antisense strand to SEQ ID NO: 1714451
uacugcauugcauacucuu

SEQ ID NO: 1714453 - RNA, 19 nt, Artificial Sequence
  Description of Artificial Sequence: Synthetic oligonucleotide
  Sense strand starting at position 63 of SEQ ID NO: 1562001
ugcaguagcccugaauaau

SEQ ID NO: 1714454 - RNA, 19 nt, Artificial Sequence
  Description of Artificial Sequence: Synthetic oligonucleotide
  Antisense strand to SEQ ID NO: 1714453
auuauucagggcuacugca

SEQ ID NO: 1714455 - RNA, 19 nt, Artificial Sequence
  Description of Artificial Sequence: Synthetic oligonucleotide
  Sense strand starting at position 273 of SEQ ID NO: 1562001
augcuagauugaucuuaac

SEQ ID NO: 1714456 - RNA, 19 nt, Artificial Sequence
  Description of Artificial Sequence: Synthetic oligonucleotide
  Antisense strand to SEQ ID NO: 1714455
guuaagaucaaucuagcau

SEQ ID NO: 1714457 - RNA, 19 nt, Artificial Sequence
  Description of Artificial Sequence: Synthetic oligonucleotide
  Sense strand starting at position 324 of SEQ ID NO: 1562001
auaaucacuuguuugauga

SEQ ID NO: 1714458 - RNA, 19 nt, Artificial Sequence
  Description of Artificial Sequence: Synthetic oligonucleotide
  Antisense strand to SEQ ID NO: 1714457
ucaucaaacaagugauuau

SEQ ID NO: 1714459 - RNA, 19 nt, Artificial Sequence
  Description of Artificial Sequence: Synthetic oligonucleotide
  Sense strand starting at position 380 of SEQ ID NO: 1562001
gggaccugcuuccuuacua

SEQ ID NO: 1714460 - RNA, 19 nt, Artificial Sequence
  Description of Artificial Sequence: Synthetic oligonucleotide
  Antisense strand to SEQ ID NO: 1714459
uaguaaggaagcagguccc

SEQ ID NO: 1714461 - RNA, 19 nt, Artificial Sequence
  Description of Artificial Sequence: Synthetic oligonucleotide
  Sense strand starting at position 625 of SEQ ID NO: 1562001
acaaaugaaugccugcaaa

SEQ ID NO: 1714462 - RNA, 19 nt, Artificial Sequence
  Description of Artificial Sequence: Synthetic oligonucleotide
  Antisense strand to SEQ ID NO: 1714461
uuugcaggcauucauuugu

SEQ ID NO: 1714463 - RNA, 19 nt, Artificial Sequence
  Description of Artificial Sequence: Synthetic oligonucleotide
  Sense strand starting at position 888 of SEQ ID NO: 1562001
gccugaaauccuugcagau

SEQ ID NO: 1714464 - RNA, 19 nt, Artificial Sequence
  Description of Artificial Sequence: Synthetic oligonucleotide
  Antisense strand to SEQ ID NO: 1714463
aucugcaaggauuucaggc

SEQ ID NO: 1714465 - RNA, 19 nt, Artificial Sequence
  Description of Artificial Sequence: Synthetic oligonucleotide
  Sense strand starting at position 901 of SEQ ID NO: 1562001
gcagauucccaagaagucu

SEQ ID NO: 1714466 - RNA, 19 nt, Artificial Sequence
  Description of Artificial Sequence: Synthetic oligonucleotide
  Antisense strand to SEQ ID NO: 1714465
agacuucuugggaaucugc

SEQ ID NO: 1714467 - RNA, 19 nt, Artificial Sequence
  Description of Artificial Sequence: Synthetic oligonucleotide
  Sense strand starting at position 1059 of SEQ ID NO: 1562001
uggcaucucucccugauca

SEQ ID NO: 1714468 - RNA, 19 nt, Artificial Sequence
  Description of Artificial Sequence: Synthetic oligonucleotide
  Antisense strand to SEQ ID NO: 1714467
ugaucagggagagaugcca

SEQ ID NO: 1714469 - RNA, 19 nt, Artificial Sequence
  Description of Artificial Sequence: Synthetic oligonucleotide
  Sense strand starting at position 1060 of SEQ ID NO: 1562001
ggcaucucucccugaucau

SEQ ID NO: 1714470 - RNA, 19 nt, Artificial Sequence
  Description of Artificial Sequence: Synthetic oligonucleotide
  Antisense strand to SEQ ID NO: 1714469
augaucagggagagaugcc

SEQ ID NO: 1714471 - RNA, 19 nt, Artificial Sequence
  Description of Artificial Sequence: Synthetic oligonucleotide
  Sense strand starting at position 1095 of SEQ ID NO: 1562001
uccagaaauccagguuaac

SEQ ID NO: 1714472 - RNA, 19 nt, Artificial Sequence
  Description of Artificial Sequence: Synthetic oligonucleotide
  Antisense strand to SEQ ID NO: 1714471
guuaaccuggauuucugga

SEQ ID NO: 1714473 - RNA, 19 nt, Artificial Sequence
  Description of Artificial Sequence: Synthetic oligonucleotide
  Sense strand starting at position 1161 of SEQ ID NO: 1562001
ccggaaucacugugaauuc

SEQ ID NO: 1714474 - RNA, 19 nt, Artificial Sequence
  Description of Artificial Sequence: Synthetic oligonucleotide
  Antisense strand to SEQ ID NO: 1714473
gaauucacagugauuccgg

SEQ ID NO: 1714475 - RNA, 19 nt, Artificial Sequence
  Description of Artificial Sequence: Synthetic oligonucleotide
  Sense strand starting at position 1171 of SEQ ID NO: 1562001
ugugaauucuuguuuacga

SEQ ID NO: 1714476 - RNA, 19 nt, Artificial Sequence
  Description of Artificial Sequence: Synthetic oligonucleotide
  Antisense strand to SEQ ID NO: 1714475
ucguaaacaagaauucaca

SEQ ID NO: 1714477 - RNA, 19 nt, Artificial Sequence
  Description of Artificial Sequence: Synthetic oligonucleotide
  Sense strand starting at position 1172 of SEQ ID NO: 1562001
gugaauucuuguuuacgag

SEQ ID NO: 1714478 - RNA, 19 nt, Artificial Sequence
  Description of Artificial Sequence: Synthetic oligonucleotide
  Antisense strand to SEQ ID NO: 1714477
cucguaaacaagaauucac

SEQ ID NO: 1714479 - RNA, 19 nt, Artificial Sequence
  Description of Artificial Sequence: Synthetic oligonucleotide
  Sense strand starting at position 1173 of SEQ ID NO: 1562001
ugaauucuuguuuacgagu

SEQ ID NO: 1714480 - RNA, 19 nt, Artificial Sequence
  Description of Artificial Sequence: Synthetic oligonucleotide
  Antisense strand to SEQ ID NO: 1714479
acucguaaacaagaauuca

SEQ ID NO: 1714481 - RNA, 19 nt, Artificial Sequence
  Description of Artificial Sequence: Synthetic oligonucleotide
  Sense strand starting at position 1188 of SEQ ID NO: 1562001
gagucugucuccuccggaa

SEQ ID NO: 1714482 - RNA, 19 nt, Artificial Sequence
  Description of Artificial Sequence: Synthetic oligonucleotide
  Antisense strand to SEQ ID NO: 1714481
uuccggaggagacagacuc

SEQ ID NO: 1714483 - RNA, 19 nt, Artificial Sequence
  Description of Artificial Sequence: Synthetic oligonucleotide
  Sense strand starting at position 1282 of SEQ ID NO: 1562001
acaauaaaugcucagugau

SEQ ID NO: 1714484 - RNA, 19 nt, Artificial Sequence
  Description of Artificial Sequence: Synthetic oligonucleotide
  Antisense strand to SEQ ID NO: 1714483
aucacugagcauuuauugu

SEQ ID NO: 1714485 - RNA, 19 nt, Artificial Sequence
  Description of Artificial Sequence: Synthetic oligonucleotide
  Sense strand starting at position 1285 of SEQ ID NO: 1562001
auaaaugcucagugauggu

SEQ ID NO: 1714486 - RNA, 19 nt, Artificial Sequence
  Description of Artificial Sequence: Synthetic oligonucleotide
  Antisense strand to SEQ ID NO: 1714485
accaucacugagcauuuau

SEQ ID NO: 1714487 - RNA, 19 nt, Artificial Sequence
  Description of Artificial Sequence: Synthetic oligonucleotide
  Sense strand starting at position 1346 of SEQ ID NO: 1562001
agggcuuaccuccacgaau

SEQ ID NO: 1714488 - RNA, 19 nt, Artificial Sequence
  Description of Artificial Sequence: Synthetic oligonucleotide
  Antisense strand to SEQ ID NO: 1714487
auucguggagguaagcccu

SEQ ID NO: 1714489 - RNA, 19 nt, Artificial Sequence
  Description of Artificial Sequence: Synthetic oligonucleotide
  Sense strand starting at position 1348 of SEQ ID NO: 1562001
ggcuuaccuccacgaauuu

SEQ ID NO: 1714490 - RNA, 19 nt, Artificial Sequence
  Description of Artificial Sequence: Synthetic oligonucleotide
  Antisense strand to SEQ ID NO: 1714489
aaauucguggagguaagcc

SEQ ID NO: 1714491 - RNA, 19 nt, Artificial Sequence
  Description of Artificial Sequence: Synthetic oligonucleotide
  Sense strand starting at position 1383 of SEQ ID NO: 1562001
uuguaauaacgucaucaga

SEQ ID NO: 1714492 - RNA, 19 nt, Artificial Sequence
  Description of Artificial Sequence: Synthetic oligonucleotide
  Antisense strand to SEQ ID NO: 1714491
ucugaugacguuauuacaa

SEQ ID NO: 1714493 - RNA, 19 nt, Artificial Sequence
  Description of Artificial Sequence: Synthetic oligonucleotide
  Sense strand starting at position 1385 of SEQ ID NO: 1562001
guaauaacgucaucagaca

SEQ ID NO: 1714494 - RNA, 19 nt, Artificial Sequence
  Description of Artificial Sequence: Synthetic oligonucleotide
  Antisense strand to SEQ ID NO: 1714493
ugucugaugacguuauuac

SEQ ID NO: 1714495 - RNA, 19 nt, Artificial Sequence
  Description of Artificial Sequence: Synthetic oligonucleotide
  Sense strand starting at position 1558 of SEQ ID NO: 1562001
gaaacuuucgaaugagguc

SEQ ID NO: 1714496 - RNA, 19 nt, Artificial Sequence
  Description of Artificial Sequence: Synthetic oligonucleotide
  Antisense strand to SEQ ID NO: 1714495
gaccucauucgaaaguuuc

SEQ ID NO: 1714497 - RNA, 19 nt, Artificial Sequence
  Description of Artificial Sequence: Synthetic oligonucleotide
  Sense strand starting at position 1565 of SEQ ID NO: 1562001
ucgaaugaggucgaccaau

SEQ ID NO: 1714498 - RNA, 19 nt, Artificial Sequence
  Description of Artificial Sequence: Synthetic oligonucleotide
  Antisense strand to SEQ ID NO: 1714497
auuggucgaccucauucga

SEQ ID NO: 1714499 - RNA, 19 nt, Artificial Sequence
  Description of Artificial Sequence: Synthetic oligonucleotide
  Sense strand starting at position 2128 of SEQ ID NO: 1562001
gcugcuugugccucaguuu

SEQ ID NO: 1714500 - RNA, 19 nt, Artificial Sequence
  Description of Artificial Sequence: Synthetic oligonucleotide
  Antisense strand to SEQ ID NO: 1714499
aaacugaggcacaagcagc

SEQ ID NO: 1714501 - RNA, 19 nt, Artificial Sequence
  Description of Artificial Sequence: Synthetic oligonucleotide
  Sense strand starting at position 2142 of SEQ ID NO: 1562001
aguuuaucucucuguaacc

SEQ ID NO: 1714502 - RNA, 19 nt, Artificial Sequence
  Description of Artificial Sequence: Synthetic oligonucleotide
  Antisense strand to SEQ ID NO: 1714501
gguuacagagagauaaacu

SEQ ID NO: 1714503 - RNA, 19 nt, Artificial Sequence
  Description of Artificial Sequence: Synthetic oligonucleotide
  Sense strand starting at position 2526 of SEQ ID NO: 1562001
cugccaagacugggaauau

SEQ ID NO: 1714504 - RNA, 19 nt, Artificial Sequence
  Description of Artificial Sequence: Synthetic oligonucleotide
  Antisense strand to SEQ ID NO: 1714503
auauucccagucuuggcag

SEQ ID NO: 1714505 - RNA, 19 nt, Artificial Sequence
  Description of Artificial Sequence: Synthetic oligonucleotide
  Sense strand starting at position 2613 of SEQ ID NO: 1562001
uguggcaaagagugaauaa

SEQ ID NO: 1714506 - RNA, 19 nt, Artificial Sequence
  Description of Artificial Sequence: Synthetic oligonucleotide
  Antisense strand to SEQ ID NO: 1714505
uuauucacucuuugccaca

SEQ ID NO: 1714507 - RNA, 19 nt, Artificial Sequence
  Description of Artificial Sequence: Synthetic oligonucleotide
  Sense strand starting at position 2624 of SEQ ID NO: 1562001
gugaauaaauugguuucuu

SEQ ID NO: 1714508 - RNA, 19 nt, Artificial Sequence
  Description of Artificial Sequence: Synthetic oligonucleotide
  Antisense strand to SEQ ID NO: 1714507
aagaaaccaauuuauucac

SEQ ID NO: 1714509 - RNA, 19 nt, Artificial Sequence
  Description of Artificial Sequence: Synthetic oligonucleotide
  Sense strand starting at position 2629 of SEQ ID NO: 1562001
uaaauugguuucuuugaug

SEQ ID NO: 1714510 - RNA, 19 nt, Artificial Sequence
  Description of Artificial Sequence: Synthetic oligonucleotide
  Antisense strand to SEQ ID NO: 1714509
caucaaagaaaccaauuua

SEQ ID NO: 1714511 - RNA, 19 nt, Artificial Sequence
  Description of Artificial Sequence: Synthetic oligonucleotide
  Sense strand starting at position 2635 of SEQ ID NO: 1562001
gguuucuuugauggagaau

SEQ ID NO: 1714512 - RNA, 19 nt, Artificial Sequence
  Description of Artificial Sequence: Synthetic oligonucleotide
  Antisense strand to SEQ ID NO: 1714511
auucuccaucaaagaaacc

SEQ ID NO: 1714513 - RNA, 19 nt, Artificial Sequence
  Description of Artificial Sequence: Synthetic oligonucleotide
  Sense strand starting at position 2722 of SEQ ID NO: 1562001
uuggaauaacucugcagau

SEQ ID NO: 1714514 - RNA, 19 nt, Artificial Sequence
  Description of Artificial Sequence: Synthetic oligonucleotide
  Antisense strand to SEQ ID NO: 1714513
aucugcagaguuauuccaa

SEQ ID NO: 1714515 - RNA, 19 nt, Artificial Sequence
  Description of Artificial Sequence: Synthetic oligonucleotide
  Sense strand starting at position 2723 of SEQ ID NO: 1562001
uggaauaacucugcagaua

SEQ ID NO: 1714516 - RNA, 19 nt, Artificial Sequence
  Description of Artificial Sequence: Synthetic oligonucleotide
  Antisense strand to SEQ ID NO: 1714515
uaucugcagaguuauucca

SEQ ID NO: 1714517 - RNA, 19 nt, Artificial Sequence
  Description of Artificial Sequence: Synthetic oligonucleotide
  Sense strand starting at position 2734 of SEQ ID NO: 1562001
ugcagauaugcugaaaccu

SEQ ID NO: 1714518 - RNA, 19 nt, Artificial Sequence
  Description of Artificial Sequence: Synthetic oligonucleotide
  Antisense strand to SEQ ID NO: 1714517
agguuucagcauaucugca

SEQ ID NO: 1714519 - RNA, 19 nt, Artificial Sequence
  Description of Artificial Sequence: Synthetic oligonucleotide
  Sense strand starting at position 2743 of SEQ ID NO: 1562001
gcugaaaccugagcacaaa

SEQ ID NO: 1714520 - RNA, 19 nt, Artificial Sequence
  Description of Artificial Sequence: Synthetic oligonucleotide
  Antisense strand to SEQ ID NO: 1714519
uuugugcucagguuucagc

SEQ ID NO: 1714521 - RNA, 19 nt, Artificial Sequence
  Description of Artificial Sequence: Synthetic oligonucleotide
  Sense strand starting at position 2801 of SEQ ID NO: 1562001
uugcgaccagucuaaauau

SEQ ID NO: 1714522 - RNA, 19 nt, Artificial Sequence
  Description of Artificial Sequence: Synthetic oligonucleotide
  Antisense strand to SEQ ID NO: 1714521
auauuuagacuggucgcaa

SEQ ID NO: 1714523 - RNA, 19 nt, Artificial Sequence
  Description of Artificial Sequence: Synthetic oligonucleotide
  Sense strand starting at position 2917 of SEQ ID NO: 1562001
gcuucuaaccucuaaagug

SEQ ID NO: 1714524 - RNA, 19 nt, Artificial Sequence
  Description of Artificial Sequence: Synthetic oligonucleotide
  Antisense strand to SEQ ID NO: 1714523
cacuuuagagguuagaagc

SEQ ID NO: 1714525 - RNA, 19 nt, Artificial Sequence
  Description of Artificial Sequence: Synthetic oligonucleotide
  Sense strand starting at position 3280 of SEQ ID NO: 1562001
gaaggaauuuaguguauca

SEQ ID NO: 1714526 - RNA, 19 nt, Artificial Sequence
  Description of Artificial Sequence: Synthetic oligonucleotide
  Antisense strand to SEQ ID NO: 1714525
ugauacacuaaauuccuuc

SEQ ID NO: 1714527 - RNA, 19 nt, Artificial Sequence
  Description of Artificial Sequence: Synthetic oligonucleotide
  Sense strand starting at position 3419 of SEQ ID NO: 1562001
auucuuauucuagagguca

SEQ ID NO: 1714528 - RNA, 19 nt, Artificial Sequence
  Description of Artificial Sequence: Synthetic oligonucleotide
  Antisense strand to SEQ ID NO: 1714527
ugaccucuagaauaagaau

SEQ ID NO: 1714529 - RNA, 19 nt, Artificial Sequence
  Description of Artificial Sequence: Synthetic oligonucleotide
  Sense strand starting at position 195 of SEQ ID NO: 1562002
gggcuuuaaguuuaaauua

SEQ ID NO: 1714530 - RNA, 19 nt, Artificial Sequence
  Description of Artificial Sequence: Synthetic oligonucleotide
  Antisense strand to SEQ ID NO: 1714529
uaauuuaaacuuaaagccc

SEQ ID NO: 1714531 - RNA, 19 nt, Artificial Sequence
  Description of Artificial Sequence: Synthetic oligonucleotide
  Sense strand starting at position 326 of SEQ ID NO: 1562002
aauugaaguuaugccagua

SEQ ID NO: 1714532 - RNA, 19 nt, Artificial Sequence
  Description of Artificial Sequence: Synthetic oligonucleotide
  Antisense strand to SEQ ID NO: 1714531
uacuggcauaacuucaauu

SEQ ID NO: 1714533 - RNA, 19 nt, Artificial Sequence
  Description of Artificial Sequence: Synthetic oligonucleotide
  Sense strand starting at position 338 of SEQ ID NO: 1562002
gccaguaauuauguaaaua

SEQ ID NO: 1714534 - RNA, 19 nt, Artificial Sequence
  Description of Artificial Sequence: Synthetic oligonucleotide
  Antisense strand to SEQ ID NO: 1714533
uauuuacauaauuacuggc

SEQ ID NO: 1714535 - RNA, 19 nt, Artificial Sequence
  Description of Artificial Sequence: Synthetic oligonucleotide
  Sense strand starting at position 393 of SEQ ID NO: 1562002
gaugguuguccucagucaa

SEQ ID NO: 1714536 - RNA, 19 nt, Artificial Sequence
  Description of Artificial Sequence: Synthetic oligonucleotide
  Antisense strand to SEQ ID NO: 1714535
uugacugaggacaaccauc

SEQ ID NO: 1714537 - RNA, 19 nt, Artificial Sequence
  Description of Artificial Sequence: Synthetic oligonucleotide
  Sense strand starting at position 446 of SEQ ID NO: 1562002
cuguaaaggguugagcaua

SEQ ID NO: 1714538 - RNA, 19 nt, Artificial Sequence
  Description of Artificial Sequence: Synthetic oligonucleotide
  Antisense strand to SEQ ID NO: 1714537
uaugcucaacccuuuacag

SEQ ID NO: 1714539 - RNA, 19 nt, Artificial Sequence
  Description of Artificial Sequence: Synthetic oligonucleotide
  Sense strand starting at position 470 of SEQ ID NO: 1562002
gggccuagugcuuaagaga

SEQ ID NO: 1714540 - RNA, 19 nt, Artificial Sequence
  Description of Artificial Sequence: Synthetic oligonucleotide
  Antisense strand to SEQ ID NO: 1714539
ucucuuaagcacuaggccc

SEQ ID NO: 1714541 - RNA, 19 nt, Artificial Sequence
  Description of Artificial Sequence: Synthetic oligonucleotide
  Sense strand starting at position 538 of SEQ ID NO: 1562002
uaguguaugcgugugcaca

SEQ ID NO: 1714542 - RNA, 19 nt, Artificial Sequence
  Description of Artificial Sequence: Synthetic oligonucleotide
  Antisense strand to SEQ ID NO: 1714541
ugugcacacgcauacacua

SEQ ID NO: 1714543 - RNA, 19 nt, Artificial Sequence
  Description of Artificial Sequence: Synthetic oligonucleotide
  Sense strand starting at position 691 of SEQ ID NO: 1562002
uuagcuacucugggaaacu

SEQ ID NO: 1714544 - RNA, 19 nt, Artificial Sequence
  Description of Artificial Sequence: Synthetic oligonucleotide
  Antisense strand to SEQ ID NO: 1714543
aguuucccagaguagcuaa

SEQ ID NO: 1714545 - RNA, 19 nt, Artificial Sequence
  Description of Artificial Sequence: Synthetic oligonucleotide
  Sense strand starting at position 1235 of SEQ ID NO: 1562002
ucgcaaacccaagguuaaa

SEQ ID NO: 1714546 - RNA, 19 nt, Artificial Sequence
  Description of Artificial Sequence: Synthetic oligonucleotide
  Antisense strand to SEQ ID NO: 1714545
uuuaaccuuggguuugcga

SEQ ID NO: 1714547 - RNA, 19 nt, Artificial Sequence
  Description of Artificial Sequence: Synthetic oligonucleotide
  Sense strand starting at position 1326 of SEQ ID NO: 1562002
cauggagucugaccauauc

SEQ ID NO: 1714548 - RNA, 19 nt, Artificial Sequence
  Description of Artificial Sequence: Synthetic oligonucleotide
  Antisense strand to SEQ ID NO: 1714547
gauauggucagacuccaug

SEQ ID NO: 1714549 - RNA, 19 nt, Artificial Sequence
  Description of Artificial Sequence: Synthetic oligonucleotide
  Sense strand starting at position 1329 of SEQ ID NO: 1562002
ggagucugaccauaucugu

SEQ ID NO: 1714550 - RNA, 19 nt, Artificial Sequence
  Description of Artificial Sequence: Synthetic oligonucleotide
  Antisense strand to SEQ ID NO: 1714549
acagauauggucagacucc

SEQ ID NO: 1714551 - RNA, 19 nt, Artificial Sequence
  Description of Artificial Sequence: Synthetic oligonucleotide
  Sense strand starting at position 1384 of SEQ ID NO: 1562002
ggaagauaauagggaauuu

SEQ ID NO: 1714552 - RNA, 19 nt, Artificial Sequence
  Description of Artificial Sequence: Synthetic oligonucleotide
  Antisense strand to SEQ ID NO: 1714551
aaauucccuauuaucuucc

SEQ ID NO: 1714553 - RNA, 19 nt, Artificial Sequence
  Description of Artificial Sequence: Synthetic oligonucleotide
  Sense strand starting at position 1490 of SEQ ID NO: 1562002
acacgaauuucuuagggaa

SEQ ID NO: 1714554 - RNA, 19 nt, Artificial Sequence
  Description of Artificial Sequence: Synthetic oligonucleotide
  Antisense strand to SEQ ID NO: 1714553
uucccuaagaaauucgugu

SEQ ID NO: 1714555 - RNA, 19 nt, Artificial Sequence
  Description of Artificial Sequence: Synthetic oligonucleotide
  Sense strand starting at position 1492 of SEQ ID NO: 1562002
acgaauuucuuagggaaga

SEQ ID NO: 1714556 - RNA, 19 nt, Artificial Sequence
  Description of Artificial Sequence: Synthetic oligonucleotide
  Antisense strand to SEQ ID NO: 1714555
ucuucccuaagaaauucgu

SEQ ID NO: 1714557 - RNA, 19 nt, Artificial Sequence
  Description of Artificial Sequence: Synthetic oligonucleotide
  Sense strand starting at position 2246 of SEQ ID NO: 1562002
caggguuccuggguaaauu

SEQ ID NO: 1714558 - RNA, 19 nt, Artificial Sequence
  Description of Artificial Sequence: Synthetic oligonucleotide
  Antisense strand to SEQ ID NO: 1714557
aauuuacccaggaacccug

SEQ ID NO: 1714559 - RNA, 19 nt, Artificial Sequence
  Description of Artificial Sequence: Synthetic oligonucleotide
  Sense strand starting at position 2285 of SEQ ID NO: 1562002
gucugcuuuccuguguguu

SEQ ID NO: 1714560 - RNA, 19 nt, Artificial Sequence
  Description of Artificial Sequence: Synthetic oligonucleotide
  Antisense strand to SEQ ID NO: 1714559
aacacacaggaaagcagac

SEQ ID NO: 1714561 - RNA, 19 nt, Artificial Sequence
  Description of Artificial Sequence: Synthetic oligonucleotide
  Sense strand starting at position 2323 of SEQ ID NO: 1562002
auaauauacuaguuagggu

SEQ ID NO: 1714562 - RNA, 19 nt, Artificial Sequence
  Description of Artificial Sequence: Synthetic oligonucleotide
  Antisense strand to SEQ ID NO: 1714561
acccuaacuaguauauuau

SEQ ID NO: 1714563 - RNA, 19 nt, Artificial Sequence
  Description of Artificial Sequence: Synthetic oligonucleotide
  Sense strand starting at position 2826 of SEQ ID NO: 1562002
acagauucucugggaguaa

SEQ ID NO: 1714564 - RNA, 19 nt, Artificial Sequence
  Description of Artificial Sequence: Synthetic oligonucleotide
  Antisense strand to SEQ ID NO: 1714563
uuacucccagagaaucugu

SEQ ID NO: 1714565 - RNA, 19 nt, Artificial Sequence
  Description of Artificial Sequence: Synthetic oligonucleotide
  Sense strand starting at position 2860 of SEQ ID NO: 1562002
cugaacaaguccuuaggga

SEQ ID NO: 1714566 - RNA, 19 nt, Artificial Sequence
  Description of Artificial Sequence: Synthetic oligonucleotide
  Antisense strand to SEQ ID NO: 1714565
ucccuaaggacuuguucag

SEQ ID NO: 1714567 - RNA, 19 nt, Artificial Sequence
  Description of Artificial Sequence: Synthetic oligonucleotide
  Sense strand starting at position 2917 of SEQ ID NO: 1562002
caaguaacaggcuauaagu

SEQ ID NO: 1714568 - RNA, 19 nt, Artificial Sequence
  Description of Artificial Sequence: Synthetic oligonucleotide
  Antisense strand to SEQ ID NO: 1714567
acuuauagccuguuacuug

SEQ ID NO: 1714569 - RNA, 19 nt, Artificial Sequence
  Description of Artificial Sequence: Synthetic oligonucleotide
  Sense strand starting at position 2928 of SEQ ID NO: 1562002
cuauaaguguccuuaggga

SEQ ID NO: 1714570 - RNA, 19 nt, Artificial Sequence
  Description of Artificial Sequence: Synthetic oligonucleotide
  Antisense strand to SEQ ID NO: 1714569
ucccuaaggacacuuauag

SEQ ID NO: 1714571 - RNA, 19 nt, Artificial Sequence
  Description of Artificial Sequence: Synthetic oligonucleotide
  Sense strand starting at position 2963 of SEQ ID NO: 1562002
gugguuacgagagaucauu

SEQ ID NO: 1714572 - RNA, 19 nt, Artificial Sequence
  Description of Artificial Sequence: Synthetic oligonucleotide
  Antisense strand to SEQ ID NO: 1714571
aaugaucucucguaaccac

SEQ ID NO: 1714573 - RNA, 19 nt, Artificial Sequence
  Description of Artificial Sequence: Synthetic oligonucleotide
  Sense strand starting at position 2986 of SEQ ID NO: 1562002
gcauuuggagagugcuuga

SEQ ID NO: 1714574 - RNA, 19 nt, Artificial Sequence
  Description of Artificial Sequence: Synthetic oligonucleotide
  Antisense strand to SEQ ID NO: 1714573
ucaagcacucuccaaaugc

SEQ ID NO: 1714575 - RNA, 19 nt, Artificial Sequence
  Description of Artificial Sequence: Synthetic oligonucleotide
  Sense strand starting at position 2991 of SEQ ID NO: 1562002
uggagagugcuugauggua

SEQ ID NO: 1714576 - RNA, 19 nt, Artificial Sequence
  Description of Artificial Sequence: Synthetic oligonucleotide
  Antisense strand to SEQ ID NO: 1714575
uaccaucaagcacucucca

SEQ ID NO: 1714577 - RNA, 19 nt, Artificial Sequence
  Description of Artificial Sequence: Synthetic oligonucleotide
  Sense strand starting at position 3058 of SEQ ID NO: 1562002
caugcauagugguuaggaa

SEQ ID NO: 1714578 - RNA, 19 nt, Artificial Sequence
  Description of Artificial Sequence: Synthetic oligonucleotide
  Antisense strand to SEQ ID NO: 1714577
uuccuaaccacuaugcaug

SEQ ID NO: 1714579 - RNA, 19 nt, Artificial Sequence
  Description of Artificial Sequence: Synthetic oligonucleotide
  Sense strand starting at position 3145 of SEQ ID NO: 1562002
uuaacugucaagugggaua

SEQ ID NO: 1714580 - RNA, 19 nt, Artificial Sequence
  Description of Artificial Sequence: Synthetic oligonucleotide
  Antisense strand to SEQ ID NO: 1714579
uaucccacuugacaguuaa

SEQ ID NO: 1714581 - RNA, 19 nt, Artificial Sequence
  Description of Artificial Sequence: Synthetic oligonucleotide
  Sense strand starting at position 3150 of SEQ ID NO: 1562002
ugucaagugggauacuagu

SEQ ID NO: 1714582 - RNA, 19 nt, Artificial Sequence
  Description of Artificial Sequence: Synthetic oligonucleotide
  Antisense strand to SEQ ID NO: 1714581
acuaguaucccacuugaca

SEQ ID NO: 1714583 - RNA, 19 nt, Artificial Sequence
  Description of Artificial Sequence: Synthetic oligonucleotide
  Sense strand starting at position 3217 of SEQ ID NO: 1562002
gaaaguauuugguacauac

SEQ ID NO: 1714584 - RNA, 19 nt, Artificial Sequence
  Description of Artificial Sequence: Synthetic oligonucleotide
  Antisense strand to SEQ ID NO: 1714583
guauguaccaaauacuuuc

SEQ ID NO: 1714585 - RNA, 19 nt, Artificial Sequence
  Description of Artificial Sequence: Synthetic oligonucleotide
  Sense strand starting at position 3227 of SEQ ID NO: 1562002
gguacauacuaaguauuga

SEQ ID NO: 1714586 - RNA, 19 nt, Artificial Sequence
  Description of Artificial Sequence: Synthetic oligonucleotide
  Antisense strand to SEQ ID NO: 1714585
ucaauacuuaguauguacc

SEQ ID NO: 1714587 - RNA, 19 nt, Artificial Sequence
  Description of Artificial Sequence: Synthetic oligonucleotide
  Sense strand starting at position 3248 of SEQ ID NO: 1562002
aaauguuugcucucguugu

SEQ ID NO: 1714588 - RNA, 19 nt, Artificial Sequence
  Description of Artificial Sequence: Synthetic oligonucleotide
  Antisense strand to SEQ ID NO: 1714587
acaacgagagcaaacauuu

SEQ ID NO: 1714589 - RNA, 19 nt, Artificial Sequence
  Description of Artificial Sequence: Synthetic oligonucleotide
  Sense strand starting at position 3314 of SEQ ID NO: 1562002
gugcuaugaggcuacauua

SEQ ID NO: 1714590 - RNA, 19 nt, Artificial Sequence
  Description of Artificial Sequence: Synthetic oligonucleotide
  Antisense strand to SEQ ID NO: 1714589
uaauguagccucauagcac

SEQ ID NO: 1714591 - RNA, 19 nt, Artificial Sequence
  Description of Artificial Sequence: Synthetic oligonucleotide
  Sense strand starting at position 3366 of SEQ ID NO: 1562002
cagagaaguuaggugacau

SEQ ID NO: 1714592 - RNA, 19 nt, Artificial Sequence
  Description of Artificial Sequence: Synthetic oligonucleotide
  Antisense strand to SEQ ID NO: 1714591
augucaccuaacuucucug

SEQ ID NO: 1714593 - RNA, 19 nt, Artificial Sequence
  Description of Artificial Sequence: Synthetic oligonucleotide
  Sense strand starting at position 3367 of SEQ ID NO: 1562002
agagaaguuaggugacaug

SEQ ID NO: 1714594 - RNA, 19 nt, Artificial Sequence
  Description of Artificial Sequence: Synthetic oligonucleotide
  Antisense strand to SEQ ID NO: 1714593
caugucaccuaacuucucu

SEQ ID NO: 1714595 - RNA, 19 nt, Artificial Sequence
  Description of Artificial Sequence: Synthetic oligonucleotide
  Sense strand starting at position 3413 of SEQ ID NO: 1562002
gggacagaauuagaaauga

SEQ ID NO: 1714596 - RNA, 19 nt, Artificial Sequence
  Description of Artificial Sequence: Synthetic oligonucleotide
  Antisense strand to SEQ ID NO: 1714595
ucauuucuaauucuguccc

SEQ ID NO: 1714597 - RNA, 19 nt, Artificial Sequence
  Description of Artificial Sequence: Synthetic oligonucleotide
  Sense strand starting at position 3683 of SEQ ID NO: 1562002
cggagcuuuacugggaaag

SEQ ID NO: 1714598 - RNA, 19 nt, Artificial Sequence
  Description of Artificial Sequence: Synthetic oligonucleotide
  Antisense strand to SEQ ID NO: 1714597
cuuucccaguaaagcuccg

SEQ ID NO: 1714599 - RNA, 19 nt, Artificial Sequence
  Description of Artificial Sequence: Synthetic oligonucleotide
  Sense strand starting at position 3703 of SEQ ID NO: 1562002
ggcucucuauagguaagga

SEQ ID NO: 1714600 - RNA, 19 nt, Artificial Sequence
  Description of Artificial Sequence: Synthetic oligonucleotide
  Antisense strand to SEQ ID NO: 1714599
uccuuaccuauagagagcc

SEQ ID NO: 1714601 - RNA, 19 nt, Artificial Sequence
  Description of Artificial Sequence: Synthetic oligonucleotide
  Sense strand starting at position 3704 of SEQ ID NO: 1562002
gcucucuauagguaaggaa

SEQ ID NO: 1714602 - RNA, 19 nt, Artificial Sequence
  Description of Artificial Sequence: Synthetic oligonucleotide
  Antisense strand to SEQ ID NO: 1714601
uuccuuaccuauagagagc

SEQ ID NO: 1714603 - RNA, 19 nt, Artificial Sequence
  Description of Artificial Sequence: Synthetic oligonucleotide
  Sense strand starting at position 3810 of SEQ ID NO: 1562002
gcuauauuaggagggaguu

SEQ ID NO: 1714604 - RNA, 19 nt, Artificial Sequence
  Description of Artificial Sequence: Synthetic oligonucleotide
  Antisense strand to SEQ ID NO: 1714603
aacucccuccuaauauagc

SEQ ID NO: 1714605 - RNA, 19 nt, Artificial Sequence
  Description of Artificial Sequence: Synthetic oligonucleotide
  Sense strand starting at position 3811 of SEQ ID NO: 1562002
cuauauuaggagggaguuu

SEQ ID NO: 1714606 - RNA, 19 nt, Artificial Sequence
  Description of Artificial Sequence: Synthetic oligonucleotide
  Antisense strand to SEQ ID NO: 1714605
aaacucccuccuaauauag

SEQ ID NO: 1714607 - RNA, 19 nt, Artificial Sequence
  Description of Artificial Sequence: Synthetic oligonucleotide
  Sense strand starting at position 3857 of SEQ ID NO: 1562002
gacaaugugacguaggacu

SEQ ID NO: 1714608 - RNA, 19 nt, Artificial Sequence
  Description of Artificial Sequence: Synthetic oligonucleotide
  Antisense strand to SEQ ID NO: 1714607
aguccuacgucacauuguc

SEQ ID NO: 1714609 - RNA, 19 nt, Artificial Sequence
  Description of Artificial Sequence: Synthetic oligonucleotide
  Sense strand starting at position 43 of SEQ ID NO: 1562003
aucuuugucuuuguauuga

SEQ ID NO: 1714610 - RNA, 19 nt, Artificial Sequence
  Description of Artificial Sequence: Synthetic oligonucleotide
  Antisense strand to SEQ ID NO: 1714609
ucaauacaaagacaaagau

SEQ ID NO: 1714611 - RNA, 19 nt, Artificial Sequence
  Description of Artificial Sequence: Synthetic oligonucleotide
  Sense strand starting at position 142 of SEQ ID NO: 1562003
gcacaaggaaaggguuaau

SEQ ID NO: 1714612 - RNA, 19 nt, Artificial Sequence
  Description of Artificial Sequence: Synthetic oligonucleotide
  Antisense strand to SEQ ID NO: 1714611
auuaacccuuuccuugugc

SEQ ID NO: 1714613 - RNA, 19 nt, Artificial Sequence
  Description of Artificial Sequence: Synthetic oligonucleotide
  Sense strand starting at position 151 of SEQ ID NO: 1562003
aaggguuaaucuuugagug

SEQ ID NO: 1714614 - RNA, 19 nt, Artificial Sequence
  Description of Artificial Sequence: Synthetic oligonucleotide
  Antisense strand to SEQ ID NO: 1714613
cacucaaagauuaacccuu

SEQ ID NO: 1714615 - RNA, 19 nt, Artificial Sequence
  Description of Artificial Sequence: Synthetic oligonucleotide
  Sense strand starting at position 152 of SEQ ID NO: 1562003
aggguuaaucuuugagugu

SEQ ID NO: 1714616 - RNA, 19 nt, Artificial Sequence
  Description of Artificial Sequence: Synthetic oligonucleotide
  Antisense strand to SEQ ID NO: 1714615
acacucaaagauuaacccu

SEQ ID NO: 1714617 - RNA, 19 nt, Artificial Sequence
  Description of Artificial Sequence: Synthetic oligonucleotide
  Sense strand starting at position 159 of SEQ ID NO: 1562003
aucuuugaguguucuuaac

SEQ ID NO: 1714618 - RNA, 19 nt, Artificial Sequence
  Description of Artificial Sequence: Synthetic oligonucleotide
  Antisense strand to SEQ ID NO: 1714617
guuaagaacacucaaagau

SEQ ID NO: 1714619 - RNA, 19 nt, Artificial Sequence
  Description of Artificial Sequence: Synthetic oligonucleotide
  Sense strand starting at position 161 of SEQ ID NO: 1562003
cuuugaguguucuuaacua

SEQ ID NO: 1714620 - RNA, 19 nt, Artificial Sequence
  Description of Artificial Sequence: Synthetic oligonucleotide
  Antisense strand to SEQ ID NO: 1714619
uaguuaagaacacucaaag

SEQ ID NO: 1714621 - RNA, 19 nt, Artificial Sequence
  Description of Artificial Sequence: Synthetic oligonucleotide
  Sense strand starting at position 165 of SEQ ID NO: 1562003
gaguguucuuaacuaaaga

SEQ ID NO: 1714622 - RNA, 19 nt, Artificial Sequence
  Description of Artificial Sequence: Synthetic oligonucleotide
  Antisense strand to SEQ ID NO: 1714621
ucuuuaguuaagaacacuc

SEQ ID NO: 1714623 - RNA, 19 nt, Artificial Sequence
  Description of Artificial Sequence: Synthetic oligonucleotide
  Sense strand starting at position 283 of SEQ ID NO: 1562003
acaccugccggaggaaaua

SEQ ID NO: 1714624 - RNA, 19 nt, Artificial Sequence
  Description of Artificial Sequence: Synthetic oligonucleotide
  Antisense strand to SEQ ID NO: 1714623
uauuuccuccggcaggugu

SEQ ID NO: 1714625 - RNA, 19 nt, Artificial Sequence
  Description of Artificial Sequence: Synthetic oligonucleotide
  Sense strand starting at position 305 of SEQ ID NO: 1562003
ccagaacguuccuugggau

SEQ ID NO: 1714626 - RNA, 19 nt, Artificial Sequence
  Description of Artificial Sequence: Synthetic oligonucleotide
  Antisense strand to SEQ ID NO: 1714625
aucccaaggaacguucugg

SEQ ID NO: 1714627 - RNA, 19 nt, Artificial Sequence
  Description of Artificial Sequence: Synthetic oligonucleotide
  Sense strand starting at position 306 of SEQ ID NO: 1562003
cagaacguuccuugggaua

SEQ ID NO: 1714628 - RNA, 19 nt, Artificial Sequence
  Description of Artificial Sequence: Synthetic oligonucleotide
  Antisense strand to SEQ ID NO: 1714627
uaucccaaggaacguucug

SEQ ID NO: 1714629 - RNA, 19 nt, Artificial Sequence
  Description of Artificial Sequence: Synthetic oligonucleotide
  Sense strand starting at position 319 of SEQ ID NO: 1562003
gggauagaaucuucccuua

SEQ ID NO: 1714630 - RNA, 19 nt, Artificial Sequence
  Description of Artificial Sequence: Synthetic oligonucleotide
  Antisense strand to SEQ ID NO: 1714629
uaagggaagauucuauccc

SEQ ID NO: 1714631 - RNA, 19 nt, Artificial Sequence
  Description of Artificial Sequence: Synthetic oligonucleotide
  Sense strand starting at position 324 of SEQ ID NO: 1562003
agaaucuucccuuaagcag

SEQ ID NO: 1714632 - RNA, 19 nt, Artificial Sequence
  Description of Artificial Sequence: Synthetic oligonucleotide
  Antisense strand to SEQ ID NO: 1714631
cugcuuaagggaagauucu

SEQ ID NO: 1714633 - RNA, 19 nt, Artificial Sequence
  Description of Artificial Sequence: Synthetic oligonucleotide
  Sense strand starting at position 526 of SEQ ID NO: 1562003
uccagaguggugggagaau

SEQ ID NO: 1714634 - RNA, 19 nt, Artificial Sequence
  Description of Artificial Sequence: Synthetic oligonucleotide
  Antisense strand to SEQ ID NO: 1714633
auucucccaccacucugga

SEQ ID NO: 1714635 - RNA, 19 nt, Artificial Sequence
  Description of Artificial Sequence: Synthetic oligonucleotide
  Sense strand starting at position 669 of SEQ ID NO: 1562003
uuuggagucucuuugauuc

SEQ ID NO: 1714636 - RNA, 19 nt, Artificial Sequence
  Description of Artificial Sequence: Synthetic oligonucleotide
  Antisense strand to SEQ ID NO: 1714635
gaaucaaagagacuccaaa

SEQ ID NO: 1714637 - RNA, 19 nt, Artificial Sequence
  Description of Artificial Sequence: Synthetic oligonucleotide
  Sense strand starting at position 1034 of SEQ ID NO: 1562003
cccacuguggugugggaaa

SEQ ID NO: 1714638 - RNA, 19 nt, Artificial Sequence
  Description of Artificial Sequence: Synthetic oligonucleotide
  Antisense strand to SEQ ID NO: 1714637
uuucccacaccacaguggg

SEQ ID NO: 1714639 - RNA, 19 nt, Artificial Sequence
  Description of Artificial Sequence: Synthetic oligonucleotide
  Sense strand starting at position 1119 of SEQ ID NO: 1562003
ggagaagucuggagggagu

SEQ ID NO: 1714640 - RNA, 19 nt, Artificial Sequence
  Description of Artificial Sequence: Synthetic oligonucleotide
  Antisense strand to SEQ ID NO: 1714639
acucccuccagacuucucc

SEQ ID NO: 1714641 - RNA, 19 nt, Artificial Sequence
  Description of Artificial Sequence: Synthetic oligonucleotide
  Sense strand starting at position 1265 of SEQ ID NO: 1562003
ucagaaguguauccucuga

SEQ ID NO: 1714642 - RNA, 19 nt, Artificial Sequence
  Description of Artificial Sequence: Synthetic oligonucleotide
  Antisense strand to SEQ ID NO: 1714641
ucagaggauacacuucuga

SEQ ID NO: 1714643 - RNA, 19 nt, Artificial Sequence
  Description of Artificial Sequence: Synthetic oligonucleotide
  Sense strand starting at position 1267 of SEQ ID NO: 1562003
agaaguguauccucugaau

SEQ ID NO: 1714644 - RNA, 19 nt, Artificial Sequence
  Description of Artificial Sequence: Synthetic oligonucleotide
  Antisense strand to SEQ ID NO: 1714643
auucagaggauacacuucu

SEQ ID NO: 1714645 - RNA, 19 nt, Artificial Sequence
  Description of Artificial Sequence: Synthetic oligonucleotide
  Sense strand starting at position 1311 of SEQ ID NO: 1562003
cgggauggaagaugucgaa

SEQ ID NO: 1714646 - RNA, 19 nt, Artificial Sequence
  Description of Artificial Sequence: Synthetic oligonucleotide
  Antisense strand to SEQ ID NO: 1714645
uucgacaucuuccaucccg

SEQ ID NO: 1714647 - RNA, 19 nt, Artificial Sequence
  Description of Artificial Sequence: Synthetic oligonucleotide
  Sense strand starting at position 1415 of SEQ ID NO: 1562003
aagggaguuauguaagucu

SEQ ID NO: 1714648 - RNA, 19 nt, Artificial Sequence
  Description of Artificial Sequence: Synthetic oligonucleotide
  Antisense strand to SEQ ID NO: 1714647
agacuuacauaacucccuu

SEQ ID NO: 1714649 - RNA, 19 nt, Artificial Sequence
  Description of Artificial Sequence: Synthetic oligonucleotide
  Sense strand starting at position 1418 of SEQ ID NO: 1562003
ggaguuauguaagucugga

SEQ ID NO: 1714650 - RNA, 19 nt, Artificial Sequence
  Description of Artificial Sequence: Synthetic oligonucleotide
  Antisense strand to SEQ ID NO: 1714649
uccagacuuacauaacucc

SEQ ID NO: 1714651 - RNA, 19 nt, Artificial Sequence
  Description of Artificial Sequence: Synthetic oligonucleotide
  Sense strand starting at position 1459 of SEQ ID NO: 1562003
ggcuaucuggagcaggaaa

SEQ ID NO: 1714652 - RNA, 19 nt, Artificial Sequence
  Description of Artificial Sequence: Synthetic oligonucleotide
  Antisense strand to SEQ ID NO: 1714651
uuuccugcuccagauagcc

SEQ ID NO: 1714653 - RNA, 19 nt, Artificial Sequence
  Description of Artificial Sequence: Synthetic oligonucleotide
  Sense strand starting at position 1980 of SEQ ID NO: 1562003
ggccauugugcggugcauu

SEQ ID NO: 1714654 - RNA, 19 nt, Artificial Sequence
  Description of Artificial Sequence: Synthetic oligonucleotide
  Antisense strand to SEQ ID NO: 1714653
aaugcaccgcacaauggcc

SEQ ID NO: 1714655 - RNA, 19 nt, Artificial Sequence
  Description of Artificial Sequence: Synthetic oligonucleotide
  Sense strand starting at position 2340 of SEQ ID NO: 1562003
cucugcucagauggagaaa

SEQ ID NO: 1714656 - RNA, 19 nt, Artificial Sequence
  Description of Artificial Sequence: Synthetic oligonucleotide
  Antisense strand to SEQ ID NO: 1714655
uuucuccaucugagcagag

SEQ ID NO: 1714657 - RNA, 19 nt, Artificial Sequence
  Description of Artificial Sequence: Synthetic oligonucleotide
  Sense strand starting at position 2535 of SEQ ID NO: 1562003
gggagagguuacgugacuu

SEQ ID NO: 1714658 - RNA, 19 nt, Artificial Sequence
  Description of Artificial Sequence: Synthetic oligonucleotide
  Antisense strand to SEQ ID NO: 1714657
aagucacguaaccucuccc

SEQ ID NO: 1714659 - RNA, 19 nt, Artificial Sequence
  Description of Artificial Sequence: Synthetic oligonucleotide
  Sense strand starting at position 2577 of SEQ ID NO: 1562003
gguccaguaaauggaguua

SEQ ID NO: 1714660 - RNA, 19 nt, Artificial Sequence
  Description of Artificial Sequence: Synthetic oligonucleotide
  Antisense strand to SEQ ID NO: 1714659
uaacuccauuuacuggacc

SEQ ID NO: 1714661 - RNA, 19 nt, Artificial Sequence
  Description of Artificial Sequence: Synthetic oligonucleotide
  Sense strand starting at position 2694 of SEQ ID NO: 1562003
guucucuguacugggaaua

SEQ ID NO: 1714662 - RNA, 19 nt, Artificial Sequence
  Description of Artificial Sequence: Synthetic oligonucleotide
  Antisense strand to SEQ ID NO: 1714661
uauucccaguacagagaac

SEQ ID NO: 1714663 - RNA, 19 nt, Artificial Sequence
  Description of Artificial Sequence: Synthetic oligonucleotide
  Sense strand starting at position 2704 of SEQ ID NO: 1562003
cugggaauaccgcagugaa

SEQ ID NO: 1714664 - RNA, 19 nt, Artificial Sequence
  Description of Artificial Sequence: Synthetic oligonucleotide
  Antisense strand to SEQ ID NO: 1714663
uucacugcgguauucccag

SEQ ID NO: 1714665 - RNA, 19 nt, Artificial Sequence
  Description of Artificial Sequence: Synthetic oligonucleotide
  Sense strand starting at position 2707 of SEQ ID NO: 1562003
ggaauaccgcagugaauaa

SEQ ID NO: 1714666 - RNA, 19 nt, Artificial Sequence
  Description of Artificial Sequence: Synthetic oligonucleotide
  Antisense strand to SEQ ID NO: 1714665
uuauucacugcgguauucc

SEQ ID NO: 1714667 - RNA, 19 nt, Artificial Sequence
  Description of Artificial Sequence: Synthetic oligonucleotide
  Sense strand starting at position 2711 of SEQ ID NO: 1562003
uaccgcagugaauaagaua

SEQ ID NO: 1714668 - RNA, 19 nt, Artificial Sequence
  Description of Artificial Sequence: Synthetic oligonucleotide
  Antisense strand to SEQ ID NO: 1714667
uaucuuauucacugcggua

SEQ ID NO: 1714669 - RNA, 19 nt, Artificial Sequence
  Description of Artificial Sequence: Synthetic oligonucleotide
  Sense strand starting at position 3004 of SEQ ID NO: 1562003
aucucuugagccgaggaau

SEQ ID NO: 1714670 - RNA, 19 nt, Artificial Sequence
  Description of Artificial Sequence: Synthetic oligonucleotide
  Antisense strand to SEQ ID NO: 1714669
auuccucggcucaagagau

SEQ ID NO: 1714671 - RNA, 19 nt, Artificial Sequence
  Description of Artificial Sequence: Synthetic oligonucleotide
  Sense strand starting at position 3152 of SEQ ID NO: 1562003
gaugaugaauacuaaggga

SEQ ID NO: 1714672 - RNA, 19 nt, Artificial Sequence
  Description of Artificial Sequence: Synthetic oligonucleotide
  Antisense strand to SEQ ID NO: 1714671
ucccuuaguauucaucauc

SEQ ID NO: 1714673 - RNA, 19 nt, Artificial Sequence
  Description of Artificial Sequence: Synthetic oligonucleotide
  Sense strand starting at position 3236 of SEQ ID NO: 1562003
gguggaucaucauugugga

SEQ ID NO: 1714674 - RNA, 19 nt, Artificial Sequence
  Description of Artificial Sequence: Synthetic oligonucleotide
  Antisense strand to SEQ ID NO: 1714673
uccacaaugaugauccacc

SEQ ID NO: 1714675 - RNA, 19 nt, Artificial Sequence
  Description of Artificial Sequence: Synthetic oligonucleotide
  Sense strand starting at position 3237 of SEQ ID NO: 1562003
guggaucaucauuguggaa

SEQ ID NO: 1714676 - RNA, 19 nt, Artificial Sequence
  Description of Artificial Sequence: Synthetic oligonucleotide
  Antisense strand to SEQ ID NO: 1714675
uuccacaaugaugauccac

SEQ ID NO: 1714677 - RNA, 19 nt, Artificial Sequence
  Description of Artificial Sequence: Synthetic oligonucleotide
  Sense strand starting at position 3249 of SEQ ID NO: 1562003
uguggaaguggaugaucuu

SEQ ID NO: 1714678 - RNA, 19 nt, Artificial Sequence
  Description of Artificial Sequence: Synthetic oligonucleotide
  Antisense strand to SEQ ID NO: 1714677
aagaucauccacuuccaca

SEQ ID NO: 1714679 - RNA, 19 nt, Artificial Sequence
  Description of Artificial Sequence: Synthetic oligonucleotide
  Sense strand starting at position 3491 of SEQ ID NO: 1562003
uguuucccauccuuuagau

SEQ ID NO: 1714680 - RNA, 19 nt, Artificial Sequence
  Description of Artificial Sequence: Synthetic oligonucleotide
  Antisense strand to SEQ ID NO: 1714679
aucuaaaggaugggaaaca

SEQ ID NO: 1714681 - RNA, 19 nt, Artificial Sequence
  Description of Artificial Sequence: Synthetic oligonucleotide
  Sense strand starting at position 3514 of SEQ ID NO: 1562003
gccuaaaugucaccagaaa

SEQ ID NO: 1714682 - RNA, 19 nt, Artificial Sequence
  Description of Artificial Sequence: Synthetic oligonucleotide
  Antisense strand to SEQ ID NO: 1714681
uuucuggugacauuuaggc

SEQ ID NO: 1714683 - RNA, 19 nt, Artificial Sequence
  Description of Artificial Sequence: Synthetic oligonucleotide
  Sense strand starting at position 3776 of SEQ ID NO: 1562003
ggugccaugcugggauuaa

SEQ ID NO: 1714684 - RNA, 19 nt, Artificial Sequence
  Description of Artificial Sequence: Synthetic oligonucleotide
  Antisense strand to SEQ ID NO: 1714683
uuaaucccagcauggcacc

SEQ ID NO: 1714685 - RNA, 19 nt, Artificial Sequence
  Description of Artificial Sequence: Synthetic oligonucleotide
  Sense strand starting at position 3976 of SEQ ID NO: 1562003
cagugaaugaggcauucga

SEQ ID NO: 1714686 - RNA, 19 nt, Artificial Sequence
  Description of Artificial Sequence: Synthetic oligonucleotide
  Antisense strand to SEQ ID NO: 1714685
ucgaaugccucauucacug

SEQ ID NO: 1714687 - RNA, 19 nt, Artificial Sequence
  Description of Artificial Sequence: Synthetic oligonucleotide
  Sense strand starting at position 3980 of SEQ ID NO: 1562003
gaaugaggcauucgaguug

SEQ ID NO: 1714688 - RNA, 19 nt, Artificial Sequence
  Description of Artificial Sequence: Synthetic oligonucleotide
  Antisense strand to SEQ ID NO: 1714687
caacucgaaugccucauuc

SEQ ID NO: 1714689 - RNA, 19 nt, Artificial Sequence
  Description of Artificial Sequence: Synthetic oligonucleotide
  Sense strand starting at position 61 of SEQ ID NO: 1562004
gcauuuaaucugcgucuga

SEQ ID NO: 1714690 - RNA, 19 nt, Artificial Sequence
  Description of Artificial Sequence: Synthetic oligonucleotide
  Antisense strand to SEQ ID NO: 1714689
ucagacgcagauuaaaugc

SEQ ID NO: 1714691 - RNA, 19 nt, Artificial Sequence
  Description of Artificial Sequence: Synthetic oligonucleotide
  Sense strand starting at position 62 of SEQ ID NO: 1562004
cauuuaaucugcgucugaa

SEQ ID NO: 1714692 - RNA, 19 nt, Artificial Sequence
  Description of Artificial Sequence: Synthetic oligonucleotide
  Antisense strand to SEQ ID NO: 1714691
uucagacgcagauuaaaug

SEQ ID NO: 1714693 - RNA, 19 nt, Artificial Sequence
  Description of Artificial Sequence: Synthetic oligonucleotide
  Sense strand starting at position 65 of SEQ ID NO: 1562004
uuaaucugcgucugaauuu

SEQ ID NO: 1714694 - RNA, 19 nt, Artificial Sequence
  Description of Artificial Sequence: Synthetic oligonucleotide
  Antisense strand to SEQ ID NO: 1714693
aaauucagacgcagauuaa

SEQ ID NO: 1714695 - RNA, 19 nt, Artificial Sequence
  Description of Artificial Sequence: Synthetic oligonucleotide
  Sense strand starting at position 149 of SEQ ID NO: 1562004
aagugugaagcccauggua

SEQ ID NO: 1714696 - RNA, 19 nt, Artificial Sequence
  Description of Artificial Sequence: Synthetic oligonucleotide
  Antisense strand to SEQ ID NO: 1714695
uaccaugggcuucacacuu

SEQ ID NO: 1714697 - RNA, 19 nt, Artificial Sequence
  Description of Artificial Sequence: Synthetic oligonucleotide
  Sense strand starting at position 151 of SEQ ID NO: 1562004
gugugaagcccaugguaaa

SEQ ID NO: 1714698 - RNA, 19 nt, Artificial Sequence
  Description of Artificial Sequence: Synthetic oligonucleotide
  Antisense strand to SEQ ID NO: 1714697
uuuaccaugggcuucacac

SEQ ID NO: 1714699 - RNA, 19 nt, Artificial Sequence
  Description of Artificial Sequence: Synthetic oligonucleotide
  Sense strand starting at position 295 of SEQ ID NO: 1562004
ucagcuaaguaauuggauu

SEQ ID NO: 1714700 - RNA, 19 nt, Artificial Sequence
  Description of Artificial Sequence: Synthetic oligonucleotide
  Antisense strand to SEQ ID NO: 1714699
aauccaauuacuuagcuga

SEQ ID NO: 1714701 - RNA, 19 nt, Artificial Sequence
  Description of Artificial Sequence: Synthetic oligonucleotide
  Sense strand starting at position 477 of SEQ ID NO: 1562004
auuagucauuuggacuuaa

SEQ ID NO: 1714702 - RNA, 19 nt, Artificial Sequence
  Description of Artificial Sequence: Synthetic oligonucleotide
  Antisense strand to SEQ ID NO: 1714701
uuaaguccaaaugacuaau

SEQ ID NO: 1714703 - RNA, 19 nt, Artificial Sequence
  Description of Artificial Sequence: Synthetic oligonucleotide
  Sense strand starting at position 519 of SEQ ID NO: 1562004
ggguuuauuucaguagguu

SEQ ID NO: 1714704 - RNA, 19 nt, Artificial Sequence
  Description of Artificial Sequence: Synthetic oligonucleotide
  Antisense strand to SEQ ID NO: 1714703
aaccuacugaaauaaaccc

SEQ ID NO: 1714705 - RNA, 19 nt, Artificial Sequence
  Description of Artificial Sequence: Synthetic oligonucleotide
  Sense strand starting at position 704 of SEQ ID NO: 1562004
cucguaaagcauuagagac

SEQ ID NO: 1714706 - RNA, 19 nt, Artificial Sequence
  Description of Artificial Sequence: Synthetic oligonucleotide
  Antisense strand to SEQ ID NO: 1714705
gucucuaaugcuuuacgag

SEQ ID NO: 1714707 - RNA, 19 nt, Artificial Sequence
  Description of Artificial Sequence: Synthetic oligonucleotide
  Sense strand starting at position 1041 of SEQ ID NO: 1562004
ccaagaggguucgcaauca

SEQ ID NO: 1714708 - RNA, 19 nt, Artificial Sequence
  Description of Artificial Sequence: Synthetic oligonucleotide
  Antisense strand to SEQ ID NO: 1714707
ugauugcgaacccucuugg

SEQ ID NO: 1714709 - RNA, 19 nt, Artificial Sequence
  Description of Artificial Sequence: Synthetic oligonucleotide
  Sense strand starting at position 1046 of SEQ ID NO: 1562004
aggguucgcaaucacuaaa

SEQ ID NO: 1714710 - RNA, 19 nt, Artificial Sequence
  Description of Artificial Sequence: Synthetic oligonucleotide
  Antisense strand to SEQ ID NO: 1714709
uuuagugauugcgaacccu

SEQ ID NO: 1714711 - RNA, 19 nt, Artificial Sequence
  Description of Artificial Sequence: Synthetic oligonucleotide
  Sense strand starting at position 1080 of SEQ ID NO: 1562004
gguccuuccuucuugaaau

SEQ ID NO: 1714712 - RNA, 19 nt, Artificial Sequence
  Description of Artificial Sequence: Synthetic oligonucleotide
  Antisense strand to SEQ ID NO: 1714711
auuucaagaaggaaggacc

SEQ ID NO: 1714713 - RNA, 19 nt, Artificial Sequence
  Description of Artificial Sequence: Synthetic oligonucleotide
  Sense strand starting at position 1312 of SEQ ID NO: 1562004
acugaagcccgaugaaaca

SEQ ID NO: 1714714 - RNA, 19 nt, Artificial Sequence
  Description of Artificial Sequence: Synthetic oligonucleotide
  Antisense strand to SEQ ID NO: 1714713
uguuucaucgggcuucagu

SEQ ID NO: 1714715 - RNA, 19 nt, Artificial Sequence
  Description of Artificial Sequence: Synthetic oligonucleotide
  Sense strand starting at position 2472 of SEQ ID NO: 1562004
uugagaggcucuuugagga

SEQ ID NO: 1714716 - RNA, 19 nt, Artificial Sequence
  Description of Artificial Sequence: Synthetic oligonucleotide
  Antisense strand to SEQ ID NO: 1714715
uccucaaagagccucucaa

SEQ ID NO: 1714717 - RNA, 19 nt, Artificial Sequence
  Description of Artificial Sequence: Synthetic oligonucleotide
  Sense strand starting at position 2515 of SEQ ID NO: 1562004
cagcgcgcugaucuugaaa

SEQ ID NO: 1714718 - RNA, 19 nt, Artificial Sequence
  Description of Artificial Sequence: Synthetic oligonucleotide
  Antisense strand to SEQ ID NO: 1714717
uuucaagaucagcgcgcug

SEQ ID NO: 1714719 - RNA, 19 nt, Artificial Sequence
  Description of Artificial Sequence: Synthetic oligonucleotide
  Sense strand starting at position 2547 of SEQ ID NO: 1562004
uuacguugugcuuucgaga

SEQ ID NO: 1714720 - RNA, 19 nt, Artificial Sequence
  Description of Artificial Sequence: Synthetic oligonucleotide
  Antisense strand to SEQ ID NO: 1714719
ucucgaaagcacaacguaa

SEQ ID NO: 1714721 - RNA, 19 nt, Artificial Sequence
  Description of Artificial Sequence: Synthetic oligonucleotide
  Sense strand starting at position 2552 of SEQ ID NO: 1562004
uugugcuuucgagacagaa

SEQ ID NO: 1714722 - RNA, 19 nt, Artificial Sequence
  Description of Artificial Sequence: Synthetic oligonucleotide
  Antisense strand to SEQ ID NO: 1714721
uucugucucgaaagcacaa

SEQ ID NO: 1714723 - RNA, 19 nt, Artificial Sequence
  Description of Artificial Sequence: Synthetic oligonucleotide
  Sense strand starting at position 2554 of SEQ ID NO: 1562004
gugcuuucgagacagaaag

SEQ ID NO: 1714724 - RNA, 19 nt, Artificial Sequence
  Description of Artificial Sequence: Synthetic oligonucleotide
  Antisense strand to SEQ ID NO: 1714723
cuuucugucucgaaagcac

SEQ ID NO: 1714725 - RNA, 19 nt, Artificial Sequence
  Description of Artificial Sequence: Synthetic oligonucleotide
  Sense strand starting at position 2693 of SEQ ID NO: 1562004
uugcucauuuaggaacaua

SEQ ID NO: 1714726 - RNA, 19 nt, Artificial Sequence
  Description of Artificial Sequence: Synthetic oligonucleotide
  Antisense strand to SEQ ID NO: 1714725
uauguuccuaaaugagcaa

SEQ ID NO: 1714727 - RNA, 19 nt, Artificial Sequence
  Description of Artificial Sequence: Synthetic oligonucleotide
  Sense strand starting at position 2706 of SEQ ID NO: 1562004
aacauagguccaggaaugu

SEQ ID NO: 1714728 - RNA, 19 nt, Artificial Sequence
  Description of Artificial Sequence: Synthetic oligonucleotide
  Antisense strand to SEQ ID NO: 1714727
acauuccuggaccuauguu

SEQ ID NO: 1714729 - RNA, 19 nt, Artificial Sequence
  Description of Artificial Sequence: Synthetic oligonucleotide
  Sense strand starting at position 2984 of SEQ ID NO: 1562004
gagaaauagcuuggaacuc

SEQ ID NO: 1714730 - RNA, 19 nt, Artificial Sequence
  Description of Artificial Sequence: Synthetic oligonucleotide
  Antisense strand to SEQ ID NO: 1714729
gaguuccaagcuauuucuc

SEQ ID NO: 1714731 - RNA, 19 nt, Artificial Sequence
  Description of Artificial Sequence: Synthetic oligonucleotide
  Sense strand starting at position 3003 of SEQ ID NO: 1562004
uuguucauugcuggaggga

SEQ ID NO: 1714732 - RNA, 19 nt, Artificial Sequence
  Description of Artificial Sequence: Synthetic oligonucleotide
  Antisense strand to SEQ ID NO: 1714731
ucccuccagcaaugaacaa

SEQ ID NO: 1714733 - RNA, 19 nt, Artificial Sequence
  Description of Artificial Sequence: Synthetic oligonucleotide
  Sense strand starting at position 3004 of SEQ ID NO: 1562004
uguucauugcuggagggaa

SEQ ID NO: 1714734 - RNA, 19 nt, Artificial Sequence
  Description of Artificial Sequence: Synthetic oligonucleotide
  Antisense strand to SEQ ID NO: 1714733
uucccuccagcaaugaaca

SEQ ID NO: 1714735 - RNA, 19 nt, Artificial Sequence
  Description of Artificial Sequence: Synthetic oligonucleotide
  Sense strand starting at position 3042 of SEQ ID NO: 1562004
uuuggagaauaguuucuua

SEQ ID NO: 1714736 - RNA, 19 nt, Artificial Sequence
  Description of Artificial Sequence: Synthetic oligonucleotide
  Antisense strand to SEQ ID NO: 1714735
uaagaaacuauucuccaaa

SEQ ID NO: 1714737 - RNA, 19 nt, Artificial Sequence
  Description of Artificial Sequence: Synthetic oligonucleotide
  Sense strand starting at position 3045 of SEQ ID NO: 1562004
ggagaauaguuucuuauaa

SEQ ID NO: 1714738 - RNA, 19 nt, Artificial Sequence
  Description of Artificial Sequence: Synthetic oligonucleotide
  Antisense strand to SEQ ID NO: 1714737
uuauaagaaacuauucucc

SEQ ID NO: 1714739 - RNA, 19 nt, Artificial Sequence
  Description of Artificial Sequence: Synthetic oligonucleotide
  Sense strand starting at position 3141 of SEQ ID NO: 1562004
ucugcagggacuuguaaag

SEQ ID NO: 1714740 - RNA, 19 nt, Artificial Sequence
  Description of Artificial Sequence: Synthetic oligonucleotide
  Antisense strand to SEQ ID NO: 1714739
cuuuacaagucccugcaga

SEQ ID NO: 1714741 - RNA, 19 nt, Artificial Sequence
  Description of Artificial Sequence: Synthetic oligonucleotide
  Sense strand starting at position 3148 of SEQ ID NO: 1562004
ggacuuguaaagugaugug

SEQ ID NO: 1714742 - RNA, 19 nt, Artificial Sequence
  Description of Artificial Sequence: Synthetic oligonucleotide
  Antisense strand to SEQ ID NO: 1714741
cacaucacuuuacaagucc

SEQ ID NO: 1714743 - RNA, 19 nt, Artificial Sequence
  Description of Artificial Sequence: Synthetic oligonucleotide
  Sense strand starting at position 3153 of SEQ ID NO: 1562004
uguaaagugaugugaagaa

SEQ ID NO: 1714744 - RNA, 19 nt, Artificial Sequence
  Description of Artificial Sequence: Synthetic oligonucleotide
  Antisense strand to SEQ ID NO: 1714743
uucuucacaucacuuuaca

SEQ ID NO: 1714745 - RNA, 19 nt, Artificial Sequence
  Description of Artificial Sequence: Synthetic oligonucleotide
  Sense strand starting at position 3165 of SEQ ID NO: 1562004
ugaagaacuuucuucuuag

SEQ ID NO: 1714746 - RNA, 19 nt, Artificial Sequence
  Description of Artificial Sequence: Synthetic oligonucleotide
  Antisense strand to SEQ ID NO: 1714745
cuaagaagaaaguucuuca

SEQ ID NO: 1714747 - RNA, 19 nt, Artificial Sequence
  Description of Artificial Sequence: Synthetic oligonucleotide
  Sense strand starting at position 3168 of SEQ ID NO: 1562004
agaacuuucuucuuaguag

SEQ ID NO: 1714748 - RNA, 19 nt, Artificial Sequence
  Description of Artificial Sequence: Synthetic oligonucleotide
  Antisense strand to SEQ ID NO: 1714747
cuacuaagaagaaaguucu

SEQ ID NO: 1714749 - RNA, 19 nt, Artificial Sequence
  Description of Artificial Sequence: Synthetic oligonucleotide
  Sense strand starting at position 3297 of SEQ ID NO: 1562004
cgcgacuuuaagcuuugua

SEQ ID NO: 1714750 - RNA, 19 nt, Artificial Sequence
  Description of Artificial Sequence: Synthetic oligonucleotide
  Antisense strand to SEQ ID NO: 1714749
uacaaagcuuaaagucgcg

SEQ ID NO: 1714751 - RNA, 19 nt, Artificial Sequence
  Description of Artificial Sequence: Synthetic oligonucleotide
  Sense strand starting at position 3349 of SEQ ID NO: 1562004
ugauuccauguguaggaau

SEQ ID NO: 1714752 - RNA, 19 nt, Artificial Sequence
  Description of Artificial Sequence: Synthetic oligonucleotide
  Antisense strand to SEQ ID NO: 1714751
auuccuacacauggaauca

SEQ ID NO: 1714753 - RNA, 19 nt, Artificial Sequence
  Description of Artificial Sequence: Synthetic oligonucleotide
  Sense strand starting at position 3356 of SEQ ID NO: 1562004
auguguaggaauugcagaa

SEQ ID NO: 1714754 - RNA, 19 nt, Artificial Sequence
  Description of Artificial Sequence: Synthetic oligonucleotide
  Antisense strand to SEQ ID NO: 1714753
uucugcaauuccuacacau

SEQ ID NO: 1714755 - RNA, 19 nt, Artificial Sequence
  Description of Artificial Sequence: Synthetic oligonucleotide
  Sense strand starting at position 3375 of SEQ ID NO: 1562004
uaggcaagauauucuaugu

SEQ ID NO: 1714756 - RNA, 19 nt, Artificial Sequence
  Description of Artificial Sequence: Synthetic oligonucleotide
  Antisense strand to SEQ ID NO: 1714755
acauagaauaucuugccua

SEQ ID NO: 1714757 - RNA, 19 nt, Artificial Sequence
  Description of Artificial Sequence: Synthetic oligonucleotide
  Sense strand starting at position 3470 of SEQ ID NO: 1562004
ggaaauguucuauaucgug

SEQ ID NO: 1714758 - RNA, 19 nt, Artificial Sequence
  Description of Artificial Sequence: Synthetic oligonucleotide
  Antisense strand to SEQ ID NO: 1714757
cacgauauagaacauuucc

SEQ ID NO: 1714759 - RNA, 19 nt, Artificial Sequence
  Description of Artificial Sequence: Synthetic oligonucleotide
  Sense strand starting at position 3506 of SEQ ID NO: 1562004
uuguaaguucuguaaguac

SEQ ID NO: 1714760 - RNA, 19 nt, Artificial Sequence
  Description of Artificial Sequence: Synthetic oligonucleotide
  Antisense strand to SEQ ID NO: 1714759
guacuuacagaacuuacaa

SEQ ID NO: 1714761 - RNA, 19 nt, Artificial Sequence
  Description of Artificial Sequence: Synthetic oligonucleotide
  Sense strand starting at position 3770 of SEQ ID NO: 1562004
gguagccagcuguauacua

SEQ ID NO: 1714762 - RNA, 19 nt, Artificial Sequence
  Description of Artificial Sequence: Synthetic oligonucleotide
  Antisense strand to SEQ ID NO: 1714761
uaguauacagcuggcuacc

SEQ ID NO: 1714763 - RNA, 19 nt, Artificial Sequence
  Description of Artificial Sequence: Synthetic oligonucleotide
  Sense strand starting at position 3796 of SEQ ID NO: 1562004
uuguaaucaccauggauaa

SEQ ID NO: 1714764 - RNA, 19 nt, Artificial Sequence
  Description of Artificial Sequence: Synthetic oligonucleotide
  Antisense strand to SEQ ID NO: 1714763
uuauccauggugauuacaa

SEQ ID NO: 1714765 - RNA, 19 nt, Artificial Sequence
  Description of Artificial Sequence: Synthetic oligonucleotide
  Sense strand starting at position 3797 of SEQ ID NO: 1562004
uguaaucaccauggauaac

SEQ ID NO: 1714766 - RNA, 19 nt, Artificial Sequence
  Description of Artificial Sequence: Synthetic oligonucleotide
  Antisense strand to SEQ ID NO: 1714765
guuauccauggugauuaca

SEQ ID NO: 1714767 - RNA, 19 nt, Artificial Sequence
  Description of Artificial Sequence: Synthetic oligonucleotide
  Sense strand starting at position 3806 of SEQ ID NO: 1562004
cauggauaaccuggugaac

SEQ ID NO: 1714768 - RNA, 19 nt, Artificial Sequence
  Description of Artificial Sequence: Synthetic oligonucleotide
  Antisense strand to SEQ ID NO: 1714767
guucaccagguuauccaug

SEQ ID NO: 1714769 - RNA, 19 nt, Artificial Sequence
  Description of Artificial Sequence: Synthetic oligonucleotide
  Sense strand starting at position 142 of SEQ ID NO: 1562005
ucugaauuauuagucugaa

SEQ ID NO: 1714770 - RNA, 19 nt, Artificial Sequence
  Description of Artificial Sequence: Synthetic oligonucleotide
  Antisense strand to SEQ ID NO: 1714769
uucagacuaauaauucaga

SEQ ID NO: 1714771 - RNA, 19 nt, Artificial Sequence
  Description of Artificial Sequence: Synthetic oligonucleotide
  Sense strand starting at position 143 of SEQ ID NO: 1562005
cugaauuauuagucugaau

SEQ ID NO: 1714772 - RNA, 19 nt, Artificial Sequence
  Description of Artificial Sequence: Synthetic oligonucleotide
  Antisense strand to SEQ ID NO: 1714771
auucagacuaauaauucag

SEQ ID NO: 1714773 - RNA, 19 nt, Artificial Sequence
  Description of Artificial Sequence: Synthetic oligonucleotide
  Sense strand starting at position 145 of SEQ ID NO: 1562005
gaauuauuagucugaauug

SEQ ID NO: 1714774 - RNA, 19 nt, Artificial Sequence
  Description of Artificial Sequence: Synthetic oligonucleotide
  Antisense strand to SEQ ID NO: 1714773
caauucagacuaauaauuc

SEQ ID NO: 1714775 - RNA, 19 nt, Artificial Sequence
  Description of Artificial Sequence: Synthetic oligonucleotide
  Sense strand starting at position 514 of SEQ ID NO: 1562005
auaaacaaaccauguagua

SEQ ID NO: 1714776 - RNA, 19 nt, Artificial Sequence
  Description of Artificial Sequence: Synthetic oligonucleotide
  Antisense strand to SEQ ID NO: 1714775
uacuacaugguuuguuuau

SEQ ID NO: 1714777 - RNA, 19 nt, Artificial Sequence
  Description of Artificial Sequence: Synthetic oligonucleotide
  Sense strand starting at position 524 of SEQ ID NO: 1562005
cauguaguagaauaguuua

SEQ ID NO: 1714778 - RNA, 19 nt, Artificial Sequence
  Description of Artificial Sequence: Synthetic oligonucleotide
  Antisense strand to SEQ ID NO: 1714777
uaaacuauucuacuacaug

SEQ ID NO: 1714779 - RNA, 19 nt, Artificial Sequence
  Description of Artificial Sequence: Synthetic oligonucleotide
  Sense strand starting at position 546 of SEQ ID NO: 1562005
gggaaacuguaagugguuu

SEQ ID NO: 1714780 - RNA, 19 nt, Artificial Sequence
  Description of Artificial Sequence: Synthetic oligonucleotide
  Antisense strand to SEQ ID NO: 1714779
aaaccacuuacaguuuccc

SEQ ID NO: 1714781 - RNA, 19 nt, Artificial Sequence
  Description of Artificial Sequence: Synthetic oligonucleotide
  Sense strand starting at position 562 of SEQ ID NO: 1562005
uuugcuauaguugaacaua

SEQ ID NO: 1714782 - RNA, 19 nt, Artificial Sequence
  Description of Artificial Sequence: Synthetic oligonucleotide
  Antisense strand to SEQ ID NO: 1714781
uauguucaacuauagcaaa

SEQ ID NO: 1714783 - RNA, 19 nt, Artificial Sequence
  Description of Artificial Sequence: Synthetic oligonucleotide
  Sense strand starting at position 618 of SEQ ID NO: 1562005
guaauuaagcaggagccaa

SEQ ID NO: 1714784 - RNA, 19 nt, Artificial Sequence
  Description of Artificial Sequence: Synthetic oligonucleotide
  Antisense strand to SEQ ID NO: 1714783
uuggcuccugcuuaauuac

SEQ ID NO: 1714785 - RNA, 19 nt, Artificial Sequence
  Description of Artificial Sequence: Synthetic oligonucleotide
  Sense strand starting at position 718 of SEQ ID NO: 1562005
agaaaugggaucugcuuua

SEQ ID NO: 1714786 - RNA, 19 nt, Artificial Sequence
  Description of Artificial Sequence: Synthetic oligonucleotide
  Antisense strand to SEQ ID NO: 1714785
uaaagcagaucccauuucu

SEQ ID NO: 1714787 - RNA, 19 nt, Artificial Sequence
  Description of Artificial Sequence: Synthetic oligonucleotide
  Sense strand starting at position 955 of SEQ ID NO: 1562005
aaggaauaguaaccauguu

SEQ ID NO: 1714788 - RNA, 19 nt, Artificial Sequence
  Description of Artificial Sequence: Synthetic oligonucleotide
  Antisense strand to SEQ ID NO: 1714787
aacaugguuacuauuccuu

SEQ ID NO: 1714789 - RNA, 19 nt, Artificial Sequence
  Description of Artificial Sequence: Synthetic oligonucleotide
  Sense strand starting at position 1015 of SEQ ID NO: 1562005
gugacuauccuguaaaucu

SEQ ID NO: 1714790 - RNA, 19 nt, Artificial Sequence
  Description of Artificial Sequence: Synthetic oligonucleotide
  Antisense strand to SEQ ID NO: 1714789
agauuuacaggauagucac

SEQ ID NO: 1714791 - RNA, 19 nt, Artificial Sequence
  Description of Artificial Sequence: Synthetic oligonucleotide
  Sense strand starting at position 1036 of SEQ ID NO: 1562005
agaugcacccugcagaaau

SEQ ID NO: 1714792 - RNA, 19 nt, Artificial Sequence
  Description of Artificial Sequence: Synthetic oligonucleotide
  Antisense strand to SEQ ID NO: 1714791
auuucugcagggugcaucu

SEQ ID NO: 1714793 - RNA, 19 nt, Artificial Sequence
  Description of Artificial Sequence: Synthetic oligonucleotide
  Sense strand starting at position 1126 of SEQ ID NO: 1562005
cugggaagaucagcgaauu

SEQ ID NO: 1714794 - RNA, 19 nt, Artificial Sequence
  Description of Artificial Sequence: Synthetic oligonucleotide
  Antisense strand to SEQ ID NO: 1714793
aauucgcugaucuucccag

SEQ ID NO: 1714795 - RNA, 19 nt, Artificial Sequence
  Description of Artificial Sequence: Synthetic oligonucleotide
  Sense strand starting at position 1127 of SEQ ID NO: 1562005
ugggaagaucagcgaauua

SEQ ID NO: 1714796 - RNA, 19 nt, Artificial Sequence
  Description of Artificial Sequence: Synthetic oligonucleotide
  Antisense strand to SEQ ID NO: 1714795
uaauucgcugaucuuccca

SEQ ID NO: 1714797 - RNA, 19 nt, Artificial Sequence
  Description of Artificial Sequence: Synthetic oligonucleotide
  Sense strand starting at position 1438 of SEQ ID NO: 1562005
gaaucagaggcaugcaaag

SEQ ID NO: 1714798 - RNA, 19 nt, Artificial Sequence
  Description of Artificial Sequence: Synthetic oligonucleotide
  Antisense strand to SEQ ID NO: 1714797
cuuugcaugccucugauuc

SEQ ID NO: 1714799 - RNA, 19 nt, Artificial Sequence
  Description of Artificial Sequence: Synthetic oligonucleotide
  Sense strand starting at position 1470 of SEQ ID NO: 1562005
gguuuauaucaaugaaaug

SEQ ID NO: 1714800 - RNA, 19 nt, Artificial Sequence
  Description of Artificial Sequence: Synthetic oligonucleotide
  Antisense strand to SEQ ID NO: 1714799
cauuucauugauauaaacc

SEQ ID NO: 1714801 - RNA, 19 nt, Artificial Sequence
  Description of Artificial Sequence: Synthetic oligonucleotide
  Sense strand starting at position 1496 of SEQ ID NO: 1562005
caaugacuggcacaaaguu

SEQ ID NO: 1714802 - RNA, 19 nt, Artificial Sequence
  Description of Artificial Sequence: Synthetic oligonucleotide
  Antisense strand to SEQ ID NO: 1714801
aacuuugugccagucauug

SEQ ID NO: 1714803 - RNA, 19 nt, Artificial Sequence
  Description of Artificial Sequence: Synthetic oligonucleotide
  Sense strand starting at position 1688 of SEQ ID NO: 1562005
uuuagaaggucaucuggca

SEQ ID NO: 1714804 - RNA, 19 nt, Artificial Sequence
  Description of Artificial Sequence: Synthetic oligonucleotide
  Antisense strand to SEQ ID NO: 1714803
ugccagaugaccuucuaaa

SEQ ID NO: 1714805 - RNA, 19 nt, Artificial Sequence
  Description of Artificial Sequence: Synthetic oligonucleotide
  Sense strand starting at position 2015 of SEQ ID NO: 1562005
agaauagcucguuaguaua

SEQ ID NO: 1714806 - RNA, 19 nt, Artificial Sequence
  Description of Artificial Sequence: Synthetic oligonucleotide
  Antisense strand to SEQ ID NO: 1714805
uauacuaacgagcuauucu

SEQ ID NO: 1714807 - RNA, 19 nt, Artificial Sequence
  Description of Artificial Sequence: Synthetic oligonucleotide
  Sense strand starting at position 2058 of SEQ ID NO: 1562005
gguuaaucacuucgcauuu

SEQ ID NO: 1714808 - RNA, 19 nt, Artificial Sequence
  Description of Artificial Sequence: Synthetic oligonucleotide
  Antisense strand to SEQ ID NO: 1714807
aaaugcgaagugauuaacc

SEQ ID NO: 1714809 - RNA, 19 nt, Artificial Sequence
  Description of Artificial Sequence: Synthetic oligonucleotide
  Sense strand starting at position 2071 of SEQ ID NO: 1562005
gcauuucuguguuugcaga

SEQ ID NO: 1714810 - RNA, 19 nt, Artificial Sequence
  Description of Artificial Sequence: Synthetic oligonucleotide
  Antisense strand to SEQ ID NO: 1714809
ucugcaaacacagaaaugc

SEQ ID NO: 1714811 - RNA, 19 nt, Artificial Sequence
  Description of Artificial Sequence: Synthetic oligonucleotide
  Sense strand starting at position 2072 of SEQ ID NO: 1562005
cauuucuguguuugcagaa

SEQ ID NO: 1714812 - RNA, 19 nt, Artificial Sequence
  Description of Artificial Sequence: Synthetic oligonucleotide
  Antisense strand to SEQ ID NO: 1714811
uucugcaaacacagaaaug

SEQ ID NO: 1714813 - RNA, 19 nt, Artificial Sequence
  Description of Artificial Sequence: Synthetic oligonucleotide
  Sense strand starting at position 2073 of SEQ ID NO: 1562005
auuucuguguuugcagaag

SEQ ID NO: 1714814 - RNA, 19 nt, Artificial Sequence
  Description of Artificial Sequence: Synthetic oligonucleotide
  Antisense strand to SEQ ID NO: 1714813
cuucugcaaacacagaaau

SEQ ID NO: 1714815 - RNA, 19 nt, Artificial Sequence
  Description of Artificial Sequence: Synthetic oligonucleotide
  Sense strand starting at position 2160 of SEQ ID NO: 1562005
uucucuaaaccuggagaua

SEQ ID NO: 1714816 - RNA, 19 nt, Artificial Sequence
  Description of Artificial Sequence: Synthetic oligonucleotide
  Antisense strand to SEQ ID NO: 1714815
uaucuccagguuuagagaa

SEQ ID NO: 1714817 - RNA, 19 nt, Artificial Sequence
  Description of Artificial Sequence: Synthetic oligonucleotide
  Sense strand starting at position 2447 of SEQ ID NO: 1562005
guauaaguugcagaaucac

SEQ ID NO: 1714818 - RNA, 19 nt, Artificial Sequence
  Description of Artificial Sequence: Synthetic oligonucleotide
  Antisense strand to SEQ ID NO: 1714817
gugauucugcaacuuauac

SEQ ID NO: 1714819 - RNA, 19 nt, Artificial Sequence
  Description of Artificial Sequence: Synthetic oligonucleotide
  Sense strand starting at position 2455 of SEQ ID NO: 1562005
ugcagaaucacguaggaau

SEQ ID NO: 1714820 - RNA, 19 nt, Artificial Sequence
  Description of Artificial Sequence: Synthetic oligonucleotide
  Antisense strand to SEQ ID NO: 1714819
auuccuacgugauucugca

SEQ ID NO: 1714821 - RNA, 19 nt, Artificial Sequence
  Description of Artificial Sequence: Synthetic oligonucleotide
  Sense strand starting at position 2726 of SEQ ID NO: 1562005
uccaguggccuagaaugaa

SEQ ID NO: 1714822 - RNA, 19 nt, Artificial Sequence
  Description of Artificial Sequence: Synthetic oligonucleotide
  Antisense strand to SEQ ID NO: 1714821
uucauucuaggccacugga

SEQ ID NO: 1714823 - RNA, 19 nt, Artificial Sequence
  Description of Artificial Sequence: Synthetic oligonucleotide
  Sense strand starting at position 2818 of SEQ ID NO: 1562005
cugucuuacucgccauuua

SEQ ID NO: 1714824 - RNA, 19 nt, Artificial Sequence
  Description of Artificial Sequence: Synthetic oligonucleotide
  Antisense strand to SEQ ID NO: 1714823
uaaauggcgaguaagacag

SEQ ID NO: 1714825 - RNA, 19 nt, Artificial Sequence
  Description of Artificial Sequence: Synthetic oligonucleotide
  Sense strand starting at position 2819 of SEQ ID NO: 1562005
ugucuuacucgccauuuaa

SEQ ID NO: 1714826 - RNA, 19 nt, Artificial Sequence
  Description of Artificial Sequence: Synthetic oligonucleotide
  Antisense strand to SEQ ID NO: 1714825
uuaaauggcgaguaagaca

SEQ ID NO: 1714827 - RNA, 19 nt, Artificial Sequence
  Description of Artificial Sequence: Synthetic oligonucleotide
  Sense strand starting at position 2929 of SEQ ID NO: 1562005
gacagugaguaggacauuu

SEQ ID NO: 1714828 - RNA, 19 nt, Artificial Sequence
  Description of Artificial Sequence: Synthetic oligonucleotide
  Antisense strand to SEQ ID NO: 1714827
aaauguccuacucacuguc

SEQ ID NO: 1714829 - RNA, 19 nt, Artificial Sequence
  Description of Artificial Sequence: Synthetic oligonucleotide
  Sense strand starting at position 3041 of SEQ ID NO: 1562005
guauguaugcaauaacuac

SEQ ID NO: 1714830 - RNA, 19 nt, Artificial Sequence
  Description of Artificial Sequence: Synthetic oligonucleotide
  Antisense strand to SEQ ID NO: 1714829
guaguuauugcauacauac

SEQ ID NO: 1714831 - RNA, 19 nt, Artificial Sequence
  Description of Artificial Sequence: Synthetic oligonucleotide
  Sense strand starting at position 3109 of SEQ ID NO: 1562005
auaguuaagcaaugcaaag

SEQ ID NO: 1714832 - RNA, 19 nt, Artificial Sequence
  Description of Artificial Sequence: Synthetic oligonucleotide
  Antisense strand to SEQ ID NO: 1714831
cuuugcauugcuuaacuau

SEQ ID NO: 1714833 - RNA, 19 nt, Artificial Sequence
  Description of Artificial Sequence: Synthetic oligonucleotide
  Sense strand starting at position 3234 of SEQ ID NO: 1562005
gagagaguauauucuguuc

SEQ ID NO: 1714834 - RNA, 19 nt, Artificial Sequence
  Description of Artificial Sequence: Synthetic oligonucleotide
  Antisense strand to SEQ ID NO: 1714833
gaacagaauauacucucuc

SEQ ID NO: 1714835 - RNA, 19 nt, Artificial Sequence
  Description of Artificial Sequence: Synthetic oligonucleotide
  Sense strand starting at position 3310 of SEQ ID NO: 1562005
cuuaauagaugagcugaau

SEQ ID NO: 1714836 - RNA, 19 nt, Artificial Sequence
  Description of Artificial Sequence: Synthetic oligonucleotide
  Antisense strand to SEQ ID NO: 1714835
auucagcucaucuauuaag

SEQ ID NO: 1714837 - RNA, 19 nt, Artificial Sequence
  Description of Artificial Sequence: Synthetic oligonucleotide
  Sense strand starting at position 3343 of SEQ ID NO: 1562005
agaugaaguguugagccaa

SEQ ID NO: 1714838 - RNA, 19 nt, Artificial Sequence
  Description of Artificial Sequence: Synthetic oligonucleotide
  Antisense strand to SEQ ID NO: 1714837
uuggcucaacacuucaucu

SEQ ID NO: 1714839 - RNA, 19 nt, Artificial Sequence
  Description of Artificial Sequence: Synthetic oligonucleotide
  Sense strand starting at position 3744 of SEQ ID NO: 1562005
agaagaacguuucugaaac

SEQ ID NO: 1714840 - RNA, 19 nt, Artificial Sequence
  Description of Artificial Sequence: Synthetic oligonucleotide
  Antisense strand to SEQ ID NO: 1714839
guuucagaaacguucuucu

SEQ ID NO: 1714841 - RNA, 19 nt, Artificial Sequence
  Description of Artificial Sequence: Synthetic oligonucleotide
  Sense strand starting at position 3918 of SEQ ID NO: 1562005
agauaagcuagagguaaau

SEQ ID NO: 1714842 - RNA, 19 nt, Artificial Sequence
  Description of Artificial Sequence: Synthetic oligonucleotide
  Antisense strand to SEQ ID NO: 1714841
auuuaccucuagcuuaucu

SEQ ID NO: 1714843 - RNA, 19 nt, Artificial Sequence
  Description of Artificial Sequence: Synthetic oligonucleotide
  Sense strand starting at position 3924 of SEQ ID NO: 1562005
gcuagagguaaaugacgau

SEQ ID NO: 1714844 - RNA, 19 nt, Artificial Sequence
  Description of Artificial Sequence: Synthetic oligonucleotide
  Antisense strand to SEQ ID NO: 1714843
aucgucauuuaccucuagc

SEQ ID NO: 1714845 - RNA, 19 nt, Artificial Sequence
  Description of Artificial Sequence: Synthetic oligonucleotide
  Sense strand starting at position 3930 of SEQ ID NO: 1562005
gguaaaugacgaugagacu

SEQ ID NO: 1714846 - RNA, 19 nt, Artificial Sequence
  Description of Artificial Sequence: Synthetic oligonucleotide
  Antisense strand to SEQ ID NO: 1714845
agucucaucgucauuuacc

SEQ ID NO: 1714847 - RNA, 19 nt, Artificial Sequence
  Description of Artificial Sequence: Synthetic oligonucleotide
  Sense strand starting at position 3936 of SEQ ID NO: 1562005
ugacgaugagacugauauc

SEQ ID NO: 1714848 - RNA, 19 nt, Artificial Sequence
  Description of Artificial Sequence: Synthetic oligonucleotide
  Antisense strand to SEQ ID NO: 1714847
gauaucagucucaucguca

SEQ ID NO: 1714849 - RNA, 19 nt, Artificial Sequence
  Description of Artificial Sequence: Synthetic oligonucleotide
  Sense strand starting at position 120 of SEQ ID NO: 1562006
augugcacccagugaucaa

SEQ ID NO: 1714850 - RNA, 19 nt, Artificial Sequence
  Description of Artificial Sequence: Synthetic oligonucleotide
  Antisense strand to SEQ ID NO: 1714849
uugaucacugggugcacau

SEQ ID NO: 1714851 - RNA, 19 nt, Artificial Sequence
  Description of Artificial Sequence: Synthetic oligonucleotide
  Sense strand starting at position 158 of SEQ ID NO: 1562006
uuugacaguuacuuguaga

SEQ ID NO: 1714852 - RNA, 19 nt, Artificial Sequence
  Description of Artificial Sequence: Synthetic oligonucleotide
  Antisense strand to SEQ ID NO: 1714851
ucuacaaguaacugucaaa

SEQ ID NO: 1714853 - RNA, 19 nt, Artificial Sequence
  Description of Artificial Sequence: Synthetic oligonucleotide
  Sense strand starting at position 200 of SEQ ID NO: 1562006
uucagagcuggguaguaau

SEQ ID NO: 1714854 - RNA, 19 nt, Artificial Sequence
  Description of Artificial Sequence: Synthetic oligonucleotide
  Antisense strand to SEQ ID NO: 1714853
auuacuacccagcucugaa

SEQ ID NO: 1714855 - RNA, 19 nt, Artificial Sequence
  Description of Artificial Sequence: Synthetic oligonucleotide
  Sense strand starting at position 233 of SEQ ID NO: 1562006
guuccaacuguugaguaau

SEQ ID NO: 1714856 - RNA, 19 nt, Artificial Sequence
  Description of Artificial Sequence: Synthetic oligonucleotide
  Antisense strand to SEQ ID NO: 1714855
auuacucaacaguuggaac

SEQ ID NO: 1714857 - RNA, 19 nt, Artificial Sequence
  Description of Artificial Sequence: Synthetic oligonucleotide
  Sense strand starting at position 235 of SEQ ID NO: 1562006
uccaacuguugaguaauaa

SEQ ID NO: 1714858 - RNA, 19 nt, Artificial Sequence
  Description of Artificial Sequence: Synthetic oligonucleotide
  Antisense strand to SEQ ID NO: 1714857
uuauuacucaacaguugga

SEQ ID NO: 1714859 - RNA, 19 nt, Artificial Sequence
  Description of Artificial Sequence: Synthetic oligonucleotide
  Sense strand starting at position 236 of SEQ ID NO: 1562006
ccaacuguugaguaauaau

SEQ ID NO: 1714860 - RNA, 19 nt, Artificial Sequence
  Description of Artificial Sequence: Synthetic oligonucleotide
  Antisense strand to SEQ ID NO: 1714859
auuauuacucaacaguugg

SEQ ID NO: 1714861 - RNA, 19 nt, Artificial Sequence
  Description of Artificial Sequence: Synthetic oligonucleotide
  Sense strand starting at position 247 of SEQ ID NO: 1562006
guaauaauauaguuggaag

SEQ ID NO: 1714862 - RNA, 19 nt, Artificial Sequence
  Description of Artificial Sequence: Synthetic oligonucleotide
  Antisense strand to SEQ ID NO: 1714861
cuuccaacuauauuauuac

SEQ ID NO: 1714863 - RNA, 19 nt, Artificial Sequence
  Description of Artificial Sequence: Synthetic oligonucleotide
  Sense strand starting at position 250 of SEQ ID NO: 1562006
auaauauaguuggaaggaa

SEQ ID NO: 1714864 - RNA, 19 nt, Artificial Sequence
  Description of Artificial Sequence: Synthetic oligonucleotide
  Antisense strand to SEQ ID NO: 1714863
uuccuuccaacuauauuau

SEQ ID NO: 1714865 - RNA, 19 nt, Artificial Sequence
  Description of Artificial Sequence: Synthetic oligonucleotide
  Sense strand starting at position 263 of SEQ ID NO: 1562006
aaggaaguguaguccauaa

SEQ ID NO: 1714866 - RNA, 19 nt, Artificial Sequence
  Description of Artificial Sequence: Synthetic oligonucleotide
  Antisense strand to SEQ ID NO: 1714865
uuauggacuacacuuccuu

SEQ ID NO: 1714867 - RNA, 19 nt, Artificial Sequence
  Description of Artificial Sequence: Synthetic oligonucleotide
  Sense strand starting at position 267 of SEQ ID NO: 1562006
aaguguaguccauaagcua

SEQ ID NO: 1714868 - RNA, 19 nt, Artificial Sequence
  Description of Artificial Sequence: Synthetic oligonucleotide
  Antisense strand to SEQ ID NO: 1714867
uagcuuauggacuacacuu

SEQ ID NO: 1714869 - RNA, 19 nt, Artificial Sequence
  Description of Artificial Sequence: Synthetic oligonucleotide
  Sense strand starting at position 270 of SEQ ID NO: 1562006
uguaguccauaagcuaaua

SEQ ID NO: 1714870 - RNA, 19 nt, Artificial Sequence
  Description of Artificial Sequence: Synthetic oligonucleotide
  Antisense strand to SEQ ID NO: 1714869
uauuagcuuauggacuaca

SEQ ID NO: 1714871 - RNA, 19 nt, Artificial Sequence
  Description of Artificial Sequence: Synthetic oligonucleotide
  Sense strand starting at position 305 of SEQ ID NO: 1562006
auguuauaauacgucacau

SEQ ID NO: 1714872 - RNA, 19 nt, Artificial Sequence
  Description of Artificial Sequence: Synthetic oligonucleotide
  Antisense strand to SEQ ID NO: 1714871
augugacguauuauaacau

SEQ ID NO: 1714873 - RNA, 19 nt, Artificial Sequence
  Description of Artificial Sequence: Synthetic oligonucleotide
  Sense strand starting at position 307 of SEQ ID NO: 1562006
guuauaauacgucacauuc

SEQ ID NO: 1714874 - RNA, 19 nt, Artificial Sequence
  Description of Artificial Sequence: Synthetic oligonucleotide
  Antisense strand to SEQ ID NO: 1714873
gaaugugacguauuauaac

SEQ ID NO: 1714875 - RNA, 19 nt, Artificial Sequence
  Description of Artificial Sequence: Synthetic oligonucleotide
  Sense strand starting at position 331 of SEQ ID NO: 1562006
guuacucgucuggcagcaa

SEQ ID NO: 1714876 - RNA, 19 nt, Artificial Sequence
  Description of Artificial Sequence: Synthetic oligonucleotide
  Antisense strand to SEQ ID NO: 1714875
uugcugccagacgaguaac

SEQ ID NO: 1714877 - RNA, 19 nt, Artificial Sequence
  Description of Artificial Sequence: Synthetic oligonucleotide
  Sense strand starting at position 415 of SEQ ID NO: 1562006
acaggugcucuccaaagau

SEQ ID NO: 1714878 - RNA, 19 nt, Artificial Sequence
  Description of Artificial Sequence: Synthetic oligonucleotide
  Antisense strand to SEQ ID NO: 1714877
aucuuuggagagcaccugu

SEQ ID NO: 1714879 - RNA, 19 nt, Artificial Sequence
  Description of Artificial Sequence: Synthetic oligonucleotide
  Sense strand starting at position 595 of SEQ ID NO: 1562006
uuugaucuucuguaugauu

SEQ ID NO: 1714880 - RNA, 19 nt, Artificial Sequence
  Description of Artificial Sequence: Synthetic oligonucleotide
  Antisense strand to SEQ ID NO: 1714879
aaucauacagaagaucaaa

SEQ ID NO: 1714881 - RNA, 19 nt, Artificial Sequence
  Description of Artificial Sequence: Synthetic oligonucleotide
  Sense strand starting at position 597 of SEQ ID NO: 1562006
ugaucuucuguaugauucu

SEQ ID NO: 1714882 - RNA, 19 nt, Artificial Sequence
  Description of Artificial Sequence: Synthetic oligonucleotide
  Antisense strand to SEQ ID NO: 1714881
agaaucauacagaagauca

SEQ ID NO: 1714883 - RNA, 19 nt, Artificial Sequence
  Description of Artificial Sequence: Synthetic oligonucleotide
  Sense strand starting at position 626 of SEQ ID NO: 1562006
ccacucaaauuugaagagu

SEQ ID NO: 1714884 - RNA, 19 nt, Artificial Sequence
  Description of Artificial Sequence: Synthetic oligonucleotide
  Antisense strand to SEQ ID NO: 1714883
acucuucaaauuugagugg

SEQ ID NO: 1714885 - RNA, 19 nt, Artificial Sequence
  Description of Artificial Sequence: Synthetic oligonucleotide
  Sense strand starting at position 837 of SEQ ID NO: 1562006
ccuggucauguuuacauua

SEQ ID NO: 1714886 - RNA, 19 nt, Artificial Sequence
  Description of Artificial Sequence: Synthetic oligonucleotide
  Antisense strand to SEQ ID NO: 1714885
uaauguaaacaugaccagg

SEQ ID NO: 1714887 - RNA, 19 nt, Artificial Sequence
  Description of Artificial Sequence: Synthetic oligonucleotide
  Sense strand starting at position 1001 of SEQ ID NO: 1562006
aaguauuacguauauggaa

SEQ ID NO: 1714888 - RNA, 19 nt, Artificial Sequence
  Description of Artificial Sequence: Synthetic oligonucleotide
  Antisense strand to SEQ ID NO: 1714887
uuccauauacguaauacuu

SEQ ID NO: 1714889 - RNA, 19 nt, Artificial Sequence
  Description of Artificial Sequence: Synthetic oligonucleotide
  Sense strand starting at position 1096 of SEQ ID NO: 1562006
uacagaaguuaagaggaaa

SEQ ID NO: 1714890 - RNA, 19 nt, Artificial Sequence
  Description of Artificial Sequence: Synthetic oligonucleotide
  Antisense strand to SEQ ID NO: 1714889
uuuccucuuaacuucugua

SEQ ID NO: 1714891 - RNA, 19 nt, Artificial Sequence
  Description of Artificial Sequence: Synthetic oligonucleotide
  Sense strand starting at position 1175 of SEQ ID NO: 1562006
gcaguuguauuucucucua

SEQ ID NO: 1714892 - RNA, 19 nt, Artificial Sequence
  Description of Artificial Sequence: Synthetic oligonucleotide
  Antisense strand to SEQ ID NO: 1714891
uagagagaaauacaacugc

SEQ ID NO: 1714893 - RNA, 19 nt, Artificial Sequence
  Description of Artificial Sequence: Synthetic oligonucleotide
  Sense strand starting at position 1321 of SEQ ID NO: 1562006
uacagagucuaauugguua

SEQ ID NO: 1714894 - RNA, 19 nt, Artificial Sequence
  Description of Artificial Sequence: Synthetic oligonucleotide
  Antisense strand to SEQ ID NO: 1714893
uaaccaauuagacucugua

SEQ ID NO: 1714895 - RNA, 19 nt, Artificial Sequence
  Description of Artificial Sequence: Synthetic oligonucleotide
  Sense strand starting at position 1324 of SEQ ID NO: 1562006
agagucuaauugguuaaag

SEQ ID NO: 1714896 - RNA, 19 nt, Artificial Sequence
  Description of Artificial Sequence: Synthetic oligonucleotide
  Antisense strand to SEQ ID NO: 1714895
cuuuaaccaauuagacucu

SEQ ID NO: 1714897 - RNA, 19 nt, Artificial Sequence
  Description of Artificial Sequence: Synthetic oligonucleotide
  Sense strand starting at position 1325 of SEQ ID NO: 1562006
gagucuaauugguuaaagc

SEQ ID NO: 1714898 - RNA, 19 nt, Artificial Sequence
  Description of Artificial Sequence: Synthetic oligonucleotide
  Antisense strand to SEQ ID NO: 1714897
gcuuuaaccaauuagacuc

SEQ ID NO: 1714899 - RNA, 19 nt, Artificial Sequence
  Description of Artificial Sequence: Synthetic oligonucleotide
  Sense strand starting at position 1326 of SEQ ID NO: 1562006
agucuaauugguuaaagca

SEQ ID NO: 1714900 - RNA, 19 nt, Artificial Sequence
  Description of Artificial Sequence: Synthetic oligonucleotide
  Antisense strand to SEQ ID NO: 1714899
ugcuuuaaccaauuagacu

SEQ ID NO: 1714901 - RNA, 19 nt, Artificial Sequence
  Description of Artificial Sequence: Synthetic oligonucleotide
  Sense strand starting at position 1424 of SEQ ID NO: 1562006
gugcuaagccugucagugu

SEQ ID NO: 1714902 - RNA, 19 nt, Artificial Sequence
  Description of Artificial Sequence: Synthetic oligonucleotide
  Antisense strand to SEQ ID NO: 1714901
acacugacaggcuuagcac

SEQ ID NO: 1714903 - RNA, 19 nt, Artificial Sequence
  Description of Artificial Sequence: Synthetic oligonucleotide
  Sense strand starting at position 1450 of SEQ ID NO: 1562006
aguggaaacggucaaucau

SEQ ID NO: 1714904 - RNA, 19 nt, Artificial Sequence
  Description of Artificial Sequence: Synthetic oligonucleotide
  Antisense strand to SEQ ID NO: 1714903
augauugaccguuuccacu

SEQ ID NO: 1714905 - RNA, 19 nt, Artificial Sequence
  Description of Artificial Sequence: Synthetic oligonucleotide
  Sense strand starting at position 2801 of SEQ ID NO: 1562006
ggacgugcuuauuuguuua

SEQ ID NO: 1714906 - RNA, 19 nt, Artificial Sequence
  Description of Artificial Sequence: Synthetic oligonucleotide
  Antisense strand to SEQ ID NO: 1714905
uaaacaaauaagcacgucc

SEQ ID NO: 1714907 - RNA, 19 nt, Artificial Sequence
  Description of Artificial Sequence: Synthetic oligonucleotide
  Sense strand starting at position 2803 of SEQ ID NO: 1562006
acgugcuuauuuguuuaua

SEQ ID NO: 1714908 - RNA, 19 nt, Artificial Sequence
  Description of Artificial Sequence: Synthetic oligonucleotide
  Antisense strand to SEQ ID NO: 1714907
uauaaacaaauaagcacgu

SEQ ID NO: 1714909 - RNA, 19 nt, Artificial Sequence
  Description of Artificial Sequence: Synthetic oligonucleotide
  Sense strand starting at position 2804 of SEQ ID NO: 1562006
cgugcuuauuuguuuauau

SEQ ID NO: 1714910 - RNA, 19 nt, Artificial Sequence
  Description of Artificial Sequence: Synthetic oligonucleotide
  Antisense strand to SEQ ID NO: 1714909
auauaaacaaauaagcacg

SEQ ID NO: 1714911 - RNA, 19 nt, Artificial Sequence
  Description of Artificial Sequence: Synthetic oligonucleotide
  Sense strand starting at position 2855 of SEQ ID NO: 1562006
gcguccugcaguguucuaa

SEQ ID NO: 1714912 - RNA, 19 nt, Artificial Sequence
  Description of Artificial Sequence: Synthetic oligonucleotide
  Antisense strand to SEQ ID NO: 1714911
uuagaacacugcaggacgc

SEQ ID NO: 1714913 - RNA, 19 nt, Artificial Sequence
  Description of Artificial Sequence: Synthetic oligonucleotide
  Sense strand starting at position 2856 of SEQ ID NO: 1562006
cguccugcaguguucuaaa

SEQ ID NO: 1714914 - RNA, 19 nt, Artificial Sequence
  Description of Artificial Sequence: Synthetic oligonucleotide
  Antisense strand to SEQ ID NO: 1714913
uuuagaacacugcaggacg

SEQ ID NO: 1714915 - RNA, 19 nt, Artificial Sequence
  Description of Artificial Sequence: Synthetic oligonucleotide
  Sense strand starting at position 2961 of SEQ ID NO: 1562006
gagauuaagugguuccaaa

SEQ ID NO: 1714916 - RNA, 19 nt, Artificial Sequence
  Description of Artificial Sequence: Synthetic oligonucleotide
  Antisense strand to SEQ ID NO: 1714915
uuuggaaccacuuaaucuc

SEQ ID NO: 1714917 - RNA, 19 nt, Artificial Sequence
  Description of Artificial Sequence: Synthetic oligonucleotide
  Sense strand starting at position 3021 of SEQ ID NO: 1562006
agacuuuggucccugggau

SEQ ID NO: 1714918 - RNA, 19 nt, Artificial Sequence
  Description of Artificial Sequence: Synthetic oligonucleotide
  Antisense strand to SEQ ID NO: 1714917
aucccagggaccaaagucu

SEQ ID NO: 1714919 - RNA, 19 nt, Artificial Sequence
  Description of Artificial Sequence: Synthetic oligonucleotide
  Sense strand starting at position 3022 of SEQ ID NO: 1562006
gacuuuggucccugggaug

SEQ ID NO: 1714920 - RNA, 19 nt, Artificial Sequence
  Description of Artificial Sequence: Synthetic oligonucleotide
  Antisense strand to SEQ ID NO: 1714919
caucccagggaccaaaguc

SEQ ID NO: 1714921 - RNA, 19 nt, Artificial Sequence
  Description of Artificial Sequence: Synthetic oligonucleotide
  Sense strand starting at position 3363 of SEQ ID NO: 1562006
gggcgugaaguguaagaaa

SEQ ID NO: 1714922 - RNA, 19 nt, Artificial Sequence
  Description of Artificial Sequence: Synthetic oligonucleotide
  Antisense strand to SEQ ID NO: 1714921
uuucuuacacuucacgccc

SEQ ID NO: 1714923 - RNA, 19 nt, Artificial Sequence
  Description of Artificial Sequence: Synthetic oligonucleotide
  Sense strand starting at position 3706 of SEQ ID NO: 1562006
aaagauagaucccagggaa

SEQ ID NO: 1714924 - RNA, 19 nt, Artificial Sequence
  Description of Artificial Sequence: Synthetic oligonucleotide
  Antisense strand to SEQ ID NO: 1714923
uucccugggaucuaucuuu

SEQ ID NO: 1714925 - RNA, 19 nt, Artificial Sequence
  Description of Artificial Sequence: Synthetic oligonucleotide
  Sense strand starting at position 3749 of SEQ ID NO: 1562006
ggauauuaaagauguggug

SEQ ID NO: 1714926 - RNA, 19 nt, Artificial Sequence
  Description of Artificial Sequence: Synthetic oligonucleotide
  Antisense strand to SEQ ID NO: 1714925
caccacaucuuuaauaucc

SEQ ID NO: 1714927 - RNA, 19 nt, Artificial Sequence
  Description of Artificial Sequence: Synthetic oligonucleotide
  Sense strand starting at position 3751 of SEQ ID NO: 1562006
auauuaaagauguggugau

SEQ ID NO: 1714928 - RNA, 19 nt, Artificial Sequence
  Description of Artificial Sequence: Synthetic oligonucleotide
  Antisense strand to SEQ ID NO: 1714927
aucaccacaucuuuaauau

SEQ ID NO: 1714929 - RNA, 19 nt, Artificial Sequence
  Description of Artificial Sequence: Synthetic oligonucleotide
  Sense strand starting at position 317 of SEQ ID NO: 1562007
ggacucuugaaucaagugu

SEQ ID NO: 1714930 - RNA, 19 nt, Artificial Sequence
  Description of Artificial Sequence: Synthetic oligonucleotide
  Antisense strand to SEQ ID NO: 1714929
acacuugauucaagagucc

SEQ ID NO: 1714931 - RNA, 19 nt, Artificial Sequence
  Description of Artificial Sequence: Synthetic oligonucleotide
  Sense strand starting at position 350 of SEQ ID NO: 1562007
cacauaacucgucauagga

SEQ ID NO: 1714932 - RNA, 19 nt, Artificial Sequence
  Description of Artificial Sequence: Synthetic oligonucleotide
  Antisense strand to SEQ ID NO: 1714931
uccuaugacgaguuaugug

SEQ ID NO: 1714933 - RNA, 19 nt, Artificial Sequence
  Description of Artificial Sequence: Synthetic oligonucleotide
  Sense strand starting at position 397 of SEQ ID NO: 1562007
ugaccuauuuaaggauaau

SEQ ID NO: 1714934 - RNA, 19 nt, Artificial Sequence
  Description of Artificial Sequence: Synthetic oligonucleotide
  Antisense strand to SEQ ID NO: 1714933
auuauccuuaaauagguca

SEQ ID NO: 1714935 - RNA, 19 nt, Artificial Sequence
  Description of Artificial Sequence: Synthetic oligonucleotide
  Sense strand starting at position 432 of SEQ ID NO: 1562007
gaaaguggauaguccagau

SEQ ID NO: 1714936 - RNA, 19 nt, Artificial Sequence
  Description of Artificial Sequence: Synthetic oligonucleotide
  Antisense strand to SEQ ID NO: 1714935
aucuggacuauccacuuuc

SEQ ID NO: 1714937 - RNA, 19 nt, Artificial Sequence
  Description of Artificial Sequence: Synthetic oligonucleotide
  Sense strand starting at position 451 of SEQ ID NO: 1562007
uaaugugaugaaggaguga

SEQ ID NO: 1714938 - RNA, 19 nt, Artificial Sequence
  Description of Artificial Sequence: Synthetic oligonucleotide
  Antisense strand to SEQ ID NO: 1714937
ucacuccuucaucacauua

SEQ ID NO: 1714939 - RNA, 19 nt, Artificial Sequence
  Description of Artificial Sequence: Synthetic oligonucleotide
  Sense strand starting at position 549 of SEQ ID NO: 1562007
cuacuaagacaugguuuau

SEQ ID NO: 1714940 - RNA, 19 nt, Artificial Sequence
  Description of Artificial Sequence: Synthetic oligonucleotide
  Antisense strand to SEQ ID NO: 1714939
auaaaccaugucuuaguag

SEQ ID NO: 1714941 - RNA, 19 nt, Artificial Sequence
  Description of Artificial Sequence: Synthetic oligonucleotide
  Sense strand starting at position 648 of SEQ ID NO: 1562007
ggauaucucuugucaucau

SEQ ID NO: 1714942 - RNA, 19 nt, Artificial Sequence
  Description of Artificial Sequence: Synthetic oligonucleotide
  Antisense strand to SEQ ID NO: 1714941
augaugacaagagauaucc

SEQ ID NO: 1714943 - RNA, 19 nt, Artificial Sequence
  Description of Artificial Sequence: Synthetic oligonucleotide
  Sense strand starting at position 695 of SEQ ID NO: 1562007
gguugugcgauucuuccuu

SEQ ID NO: 1714944 - RNA, 19 nt, Artificial Sequence
  Description of Artificial Sequence: Synthetic oligonucleotide
  Antisense strand to SEQ ID NO: 1714943
aaggaagaaucgcacaacc

SEQ ID NO: 1714945 - RNA, 19 nt, Artificial Sequence
  Description of Artificial Sequence: Synthetic oligonucleotide
  Sense strand starting at position 747 of SEQ ID NO: 1562007
cgggcacugccagaagaua

SEQ ID NO: 1714946 - RNA, 19 nt, Artificial Sequence
  Description of Artificial Sequence: Synthetic oligonucleotide
  Antisense strand to SEQ ID NO: 1714945
uaucuucuggcagugcccg

SEQ ID NO: 1714947 - RNA, 19 nt, Artificial Sequence
  Description of Artificial Sequence: Synthetic oligonucleotide
  Sense strand starting at position 909 of SEQ ID NO: 1562007
ccucuuguuccugaaggua

SEQ ID NO: 1714948 - RNA, 19 nt, Artificial Sequence
  Description of Artificial Sequence: Synthetic oligonucleotide
  Antisense strand to SEQ ID NO: 1714947
uaccuucaggaacaagagg

SEQ ID NO: 1714949 - RNA, 19 nt, Artificial Sequence
  Description of Artificial Sequence: Synthetic oligonucleotide
  Sense strand starting at position 912 of SEQ ID NO: 1562007
cuuguuccugaagguaaga

SEQ ID NO: 1714950 - RNA, 19 nt, Artificial Sequence
  Description of Artificial Sequence: Synthetic oligonucleotide
  Antisense strand to SEQ ID NO: 1714949
ucuuaccuucaggaacaag

SEQ ID NO: 1714951 - RNA, 19 nt, Artificial Sequence
  Description of Artificial Sequence: Synthetic oligonucleotide
  Sense strand starting at position 1142 of SEQ ID NO: 1562007
cuguaaugcuacucaggaa

SEQ ID NO: 1714952 - RNA, 19 nt, Artificial Sequence
  Description of Artificial Sequence: Synthetic oligonucleotide
  Antisense strand to SEQ ID NO: 1714951
uuccugaguagcauuacag

SEQ ID NO: 1714953 - RNA, 19 nt, Artificial Sequence
  Description of Artificial Sequence: Synthetic oligonucleotide
  Sense strand starting at position 1330 of SEQ ID NO: 1562007
cuaggauucuggcucugga

SEQ ID NO: 1714954 - RNA, 19 nt, Artificial Sequence
  Description of Artificial Sequence: Synthetic oligonucleotide
  Antisense strand to SEQ ID NO: 1714953
uccagagccagaauccuag

SEQ ID NO: 1714955 - RNA, 19 nt, Artificial Sequence
  Description of Artificial Sequence: Synthetic oligonucleotide
  Sense strand starting at position 1333 of SEQ ID NO: 1562007
ggauucuggcucuggaaua

SEQ ID NO: 1714956 - RNA, 19 nt, Artificial Sequence
  Description of Artificial Sequence: Synthetic oligonucleotide
  Antisense strand to SEQ ID NO: 1714955
uauuccagagccagaaucc

SEQ ID NO: 1714957 - RNA, 19 nt, Artificial Sequence
  Description of Artificial Sequence: Synthetic oligonucleotide
  Sense strand starting at position 1349 of SEQ ID NO: 1562007
auacaaguauuggcaaguu

SEQ ID NO: 1714958 - RNA, 19 nt, Artificial Sequence
  Description of Artificial Sequence: Synthetic oligonucleotide
  Antisense strand to SEQ ID NO: 1714957
aacuugccaauacuuguau

SEQ ID NO: 1714959 - RNA, 19 nt, Artificial Sequence
  Description of Artificial Sequence: Synthetic oligonucleotide
  Sense strand starting at position 1557 of SEQ ID NO: 1562007
gugggaaucuucuuaagca

SEQ ID NO: 1714960 - RNA, 19 nt, Artificial Sequence
  Description of Artificial Sequence: Synthetic oligonucleotide
  Antisense strand to SEQ ID NO: 1714959
ugcuuaagaagauucccac

SEQ ID NO: 1714961 - RNA, 19 nt, Artificial Sequence
  Description of Artificial Sequence: Synthetic oligonucleotide
  Sense strand starting at position 1653 of SEQ ID NO: 1562007
acaugugaugcuuacuaaa

SEQ ID NO: 1714962 - RNA, 19 nt, Artificial Sequence
  Description of Artificial Sequence: Synthetic oligonucleotide
  Antisense strand to SEQ ID NO: 1714961
uuuaguaagcaucacaugu

SEQ ID NO: 1714963 - RNA, 19 nt, Artificial Sequence
  Description of Artificial Sequence: Synthetic oligonucleotide
  Sense strand starting at position 1655 of SEQ ID NO: 1562007
augugaugcuuacuaaaug

SEQ ID NO: 1714964 - RNA, 19 nt, Artificial Sequence
  Description of Artificial Sequence: Synthetic oligonucleotide
  Antisense strand to SEQ ID NO: 1714963
cauuuaguaagcaucacau

SEQ ID NO: 1714965 - RNA, 19 nt, Artificial Sequence
  Description of Artificial Sequence: Synthetic oligonucleotide
  Sense strand starting at position 1716 of SEQ ID NO: 1562007
ggguaaagugcccaagguu

SEQ ID NO: 1714966 - RNA, 19 nt, Artificial Sequence
  Description of Artificial Sequence: Synthetic oligonucleotide
  Antisense strand to SEQ ID NO: 1714965
aaccuugggcacuuuaccc

SEQ ID NO: 1714967 - RNA, 19 nt, Artificial Sequence
  Description of Artificial Sequence: Synthetic oligonucleotide
  Sense strand starting at position 1760 of SEQ ID NO: 1562007
cuagaaagugcugggagau

SEQ ID NO: 1714968 - RNA, 19 nt, Artificial Sequence
  Description of Artificial Sequence: Synthetic oligonucleotide
  Antisense strand to SEQ ID NO: 1714967
aucucccagcacuuucuag

SEQ ID NO: 1714969 - RNA, 19 nt, Artificial Sequence
  Description of Artificial Sequence: Synthetic oligonucleotide
  Sense strand starting at position 1773 of SEQ ID NO: 1562007
ggagauccugcuuaaugcu

SEQ ID NO: 1714970 - RNA, 19 nt, Artificial Sequence
  Description of Artificial Sequence: Synthetic oligonucleotide
  Antisense strand to SEQ ID NO: 1714969
agcauuaagcaggaucucc

SEQ ID NO: 1714971 - RNA, 19 nt, Artificial Sequence
  Description of Artificial Sequence: Synthetic oligonucleotide
  Sense strand starting at position 1804 of SEQ ID NO: 1562007
ggaagaugucugugaauca

SEQ ID NO: 1714972 - RNA, 19 nt, Artificial Sequence
  Description of Artificial Sequence: Synthetic oligonucleotide
  Antisense strand to SEQ ID NO: 1714971
ugauucacagacaucuucc

SEQ ID NO: 1714973 - RNA, 19 nt, Artificial Sequence
  Description of Artificial Sequence: Synthetic oligonucleotide
  Sense strand starting at position 2338 of SEQ ID NO: 1562007
ccugauuagcaguauaaug

SEQ ID NO: 1714974 - RNA, 19 nt, Artificial Sequence
  Description of Artificial Sequence: Synthetic oligonucleotide
  Antisense strand to SEQ ID NO: 1714973
cauuauacugcuaaucagg

SEQ ID NO: 1714975 - RNA, 19 nt, Artificial Sequence
  Description of Artificial Sequence: Synthetic oligonucleotide
  Sense strand starting at position 2348 of SEQ ID NO: 1562007
aguauaauguccuuagaug

SEQ ID NO: 1714976 - RNA, 19 nt, Artificial Sequence
  Description of Artificial Sequence: Synthetic oligonucleotide
  Antisense strand to SEQ ID NO: 1714975
caucuaaggacauuauacu

SEQ ID NO: 1714977 - RNA, 19 nt, Artificial Sequence
  Description of Artificial Sequence: Synthetic oligonucleotide
  Sense strand starting at position 2349 of SEQ ID NO: 1562007
guauaauguccuuagauga

SEQ ID NO: 1714978 - RNA, 19 nt, Artificial Sequence
  Description of Artificial Sequence: Synthetic oligonucleotide
  Antisense strand to SEQ ID NO: 1714977
ucaucuaaggacauuauac

SEQ ID NO: 1714979 - RNA, 19 nt, Artificial Sequence
  Description of Artificial Sequence: Synthetic oligonucleotide
  Sense strand starting at position 2436 of SEQ ID NO: 1562007
gcuguuuccguauugucuu

SEQ ID NO: 1714980 - RNA, 19 nt, Artificial Sequence
  Description of Artificial Sequence: Synthetic oligonucleotide
  Antisense strand to SEQ ID NO: 1714979
aagacaauacggaaacagc

SEQ ID NO: 1714981 - RNA, 19 nt, Artificial Sequence
  Description of Artificial Sequence: Synthetic oligonucleotide
  Sense strand starting at position 2441 of SEQ ID NO: 1562007
uuccguauugucuuuguua

SEQ ID NO: 1714982 - RNA, 19 nt, Artificial Sequence
  Description of Artificial Sequence: Synthetic oligonucleotide
  Antisense strand to SEQ ID NO: 1714981
uaacaaagacaauacggaa

SEQ ID NO: 1714983 - RNA, 19 nt, Artificial Sequence
  Description of Artificial Sequence: Synthetic oligonucleotide
  Sense strand starting at position 2495 of SEQ ID NO: 1562007
gauuucugauuuggcugaa

SEQ ID NO: 1714984 - RNA, 19 nt, Artificial Sequence
  Description of Artificial Sequence: Synthetic oligonucleotide
  Antisense strand to SEQ ID NO: 1714983
uucagccaaaucagaaauc

SEQ ID NO: 1714985 - RNA, 19 nt, Artificial Sequence
  Description of Artificial Sequence: Synthetic oligonucleotide
  Sense strand starting at position 2564 of SEQ ID NO: 1562007
uggugucagaaguacacaa

SEQ ID NO: 1714986 - RNA, 19 nt, Artificial Sequence
  Description of Artificial Sequence: Synthetic oligonucleotide
  Antisense strand to SEQ ID NO: 1714985
uuguguacuucugacacca

SEQ ID NO: 1714987 - RNA, 19 nt, Artificial Sequence
  Description of Artificial Sequence: Synthetic oligonucleotide
  Sense strand starting at position 3284 of SEQ ID NO: 1562007
gucuauaaaguuugaauug

SEQ ID NO: 1714988 - RNA, 19 nt, Artificial Sequence
  Description of Artificial Sequence: Synthetic oligonucleotide
  Antisense strand to SEQ ID NO: 1714987
caauucaaacuuuauagac

SEQ ID NO: 1714989 - RNA, 19 nt, Artificial Sequence
  Description of Artificial Sequence: Synthetic oligonucleotide
  Sense strand starting at position 3308 of SEQ ID NO: 1562007
ugugaaggucacgaucuau

SEQ ID NO: 1714990 - RNA, 19 nt, Artificial Sequence
  Description of Artificial Sequence: Synthetic oligonucleotide
  Antisense strand to SEQ ID NO: 1714989
auagaucgugaccuucaca

SEQ ID NO: 1714991 - RNA, 19 nt, Artificial Sequence
  Description of Artificial Sequence: Synthetic oligonucleotide
  Sense strand starting at position 3316 of SEQ ID NO: 1562007
ucacgaucuauguauagag

SEQ ID NO: 1714992 - RNA, 19 nt, Artificial Sequence
  Description of Artificial Sequence: Synthetic oligonucleotide
  Antisense strand to SEQ ID NO: 1714991
cucuauacauagaucguga

SEQ ID NO: 1714993 - RNA, 19 nt, Artificial Sequence
  Description of Artificial Sequence: Synthetic oligonucleotide
  Sense strand starting at position 3343 of SEQ ID NO: 1562007
agcacaguccuuuaauaag

SEQ ID NO: 1714994 - RNA, 19 nt, Artificial Sequence
  Description of Artificial Sequence: Synthetic oligonucleotide
  Antisense strand to SEQ ID NO: 1714993
cuuauuaaaggacugugcu

SEQ ID NO: 1714995 - RNA, 19 nt, Artificial Sequence
  Description of Artificial Sequence: Synthetic oligonucleotide
  Sense strand starting at position 3420 of SEQ ID NO: 1562007
ggaaaucuguaccuauaug

SEQ ID NO: 1714996 - RNA, 19 nt, Artificial Sequence
  Description of Artificial Sequence: Synthetic oligonucleotide
  Antisense strand to SEQ ID NO: 1714995
cauauagguacagauuucc

SEQ ID NO: 1714997 - RNA, 19 nt, Artificial Sequence
  Description of Artificial Sequence: Synthetic oligonucleotide
  Sense strand starting at position 3486 of SEQ ID NO: 1562007
ucugaaguaguguaguaau

SEQ ID NO: 1714998 - RNA, 19 nt, Artificial Sequence
  Description of Artificial Sequence: Synthetic oligonucleotide
  Antisense strand to SEQ ID NO: 1714997
auuacuacacuacuucaga

SEQ ID NO: 1714999 - RNA, 19 nt, Artificial Sequence
  Description of Artificial Sequence: Synthetic oligonucleotide
  Sense strand starting at position 3494 of SEQ ID NO: 1562007
aguguaguaauauggauac

SEQ ID NO: 1715000 - RNA, 19 nt, Artificial Sequence
  Description of Artificial Sequence: Synthetic oligonucleotide
  Antisense strand to SEQ ID NO: 1714999
guauccauauuacuacacu

SEQ ID NO: 1715001 - RNA, 19 nt, Artificial Sequence
  Description of Artificial Sequence: Synthetic oligonucleotide
  Sense strand starting at position 3506 of SEQ ID NO: 1562007
uggauacuauggcuccauu

SEQ ID NO: 1715002 - RNA, 19 nt, Artificial Sequence
  Description of Artificial Sequence: Synthetic oligonucleotide
  Antisense strand to SEQ ID NO: 1715001
aauggagccauaguaucca

SEQ ID NO: 1715003 - RNA, 19 nt, Artificial Sequence
  Description of Artificial Sequence: Synthetic oligonucleotide
  Sense strand starting at position 3867 of SEQ ID NO: 1562007
gugacuauuuacuaugaug

SEQ ID NO: 1715004 - RNA, 19 nt, Artificial Sequence
  Description of Artificial Sequence: Synthetic oligonucleotide
  Antisense strand to SEQ ID NO: 1715003
caucauaguaaauagucac

SEQ ID NO: 1715005 - RNA, 19 nt, Artificial Sequence
  Description of Artificial Sequence: Synthetic oligonucleotide
  Sense strand starting at position 3892 of SEQ ID NO: 1562007
ggcucuaagcauggauuga

SEQ ID NO: 1715006 - RNA, 19 nt, Artificial Sequence
  Description of Artificial Sequence: Synthetic oligonucleotide
  Antisense strand to SEQ ID NO: 1715005
ucaauccaugcuuagagcc

SEQ ID NO: 1715007 - RNA, 19 nt, Artificial Sequence
  Description of Artificial Sequence: Synthetic oligonucleotide
  Sense strand starting at position 3896 of SEQ ID NO: 1562007
cuaagcauggauugaauca

SEQ ID NO: 1715008 - RNA, 19 nt, Artificial Sequence
  Description of Artificial Sequence: Synthetic oligonucleotide
  Antisense strand to SEQ ID NO: 1715007
ugauucaauccaugcuuag

SEQ ID NO: 1715009 - RNA, 19 nt, Artificial Sequence
  Description of Artificial Sequence: Synthetic oligonucleotide
  Sense strand starting at position 56 of SEQ ID NO: 1562008
ugcuaauaugcgugguuua

SEQ ID NO: 1715010 - RNA, 19 nt, Artificial Sequence
  Description of Artificial Sequence: Synthetic oligonucleotide
  Antisense strand to SEQ ID NO: 1715009
uaaaccacgcauauuagca

SEQ ID NO: 1715011 - RNA, 19 nt, Artificial Sequence
  Description of Artificial Sequence: Synthetic oligonucleotide
  Sense strand starting at position 57 of SEQ ID NO: 1562008
gcuaauaugcgugguuuaa

SEQ ID NO: 1715012 - RNA, 19 nt, Artificial Sequence
  Description of Artificial Sequence: Synthetic oligonucleotide
  Antisense strand to SEQ ID NO: 1715011
uuaaaccacgcauauuagc

SEQ ID NO: 1715013 - RNA, 19 nt, Artificial Sequence
  Description of Artificial Sequence: Synthetic oligonucleotide
  Sense strand starting at position 82 of SEQ ID NO: 1562008
gucuguuacccaggagauc

SEQ ID NO: 1715014 - RNA, 19 nt, Artificial Sequence
  Description of Artificial Sequence: Synthetic oligonucleotide
  Antisense strand to SEQ ID NO: 1715013
gaucuccuggguaacagac

SEQ ID NO: 1715015 - RNA, 19 nt, Artificial Sequence
  Description of Artificial Sequence: Synthetic oligonucleotide
  Sense strand starting at position 83 of SEQ ID NO: 1562008
ucuguuacccaggagaucu

SEQ ID NO: 1715016 - RNA, 19 nt, Artificial Sequence
  Description of Artificial Sequence: Synthetic oligonucleotide
  Antisense strand to SEQ ID NO: 1715015
agaucuccuggguaacaga

SEQ ID NO: 1715017 - RNA, 19 nt, Artificial Sequence
  Description of Artificial Sequence: Synthetic oligonucleotide
  Sense strand starting at position 94 of SEQ ID NO: 1562008
ggagaucucugagaacuuc

SEQ ID NO: 1715018 - RNA, 19 nt, Artificial Sequence
  Description of Artificial Sequence: Synthetic oligonucleotide
  Antisense strand to SEQ ID NO: 1715017
gaaguucucagagaucucc

SEQ ID NO: 1715019 - RNA, 19 nt, Artificial Sequence
  Description of Artificial Sequence: Synthetic oligonucleotide
  Sense strand starting at position 169 of SEQ ID NO: 1562008
gagccugaugccugaguga

SEQ ID NO: 1715020 - RNA, 19 nt, Artificial Sequence
  Description of Artificial Sequence: Synthetic oligonucleotide
  Antisense strand to SEQ ID NO: 1715019
ucacucaggcaucaggcuc

SEQ ID NO: 1715021 - RNA, 19 nt, Artificial Sequence
  Description of Artificial Sequence: Synthetic oligonucleotide
  Sense strand starting at position 172 of SEQ ID NO: 1562008
ccugaugccugagugaugu

SEQ ID NO: 1715022 - RNA, 19 nt, Artificial Sequence
  Description of Artificial Sequence: Synthetic oligonucleotide
  Antisense strand to SEQ ID NO: 1715021
acaucacucaggcaucagg

SEQ ID NO: 1715023 - RNA, 19 nt, Artificial Sequence
  Description of Artificial Sequence: Synthetic oligonucleotide
  Sense strand starting at position 185 of SEQ ID NO: 1562008
ugauguucccaggguuauc

SEQ ID NO: 1715024 - RNA, 19 nt, Artificial Sequence
  Description of Artificial Sequence: Synthetic oligonucleotide
  Antisense strand to SEQ ID NO: 1715023
gauaacccugggaacauca

SEQ ID NO: 1715025 - RNA, 19 nt, Artificial Sequence
  Description of Artificial Sequence: Synthetic oligonucleotide
  Sense strand starting at position 195 of SEQ ID NO: 1562008
aggguuaucucagcucuuu

SEQ ID NO: 1715026 - RNA, 19 nt, Artificial Sequence
  Description of Artificial Sequence: Synthetic oligonucleotide
  Antisense strand to SEQ ID NO: 1715025
aaagagcugagauaacccu

SEQ ID NO: 1715027 - RNA, 19 nt, Artificial Sequence
  Description of Artificial Sequence: Synthetic oligonucleotide
  Sense strand starting at position 206 of SEQ ID NO: 1562008
agcucuuugcagugucgau

SEQ ID NO: 1715028 - RNA, 19 nt, Artificial Sequence
  Description of Artificial Sequence: Synthetic oligonucleotide
  Antisense strand to SEQ ID NO: 1715027
aucgacacugcaaagagcu

SEQ ID NO: 1715029 - RNA, 19 nt, Artificial Sequence
  Description of Artificial Sequence: Synthetic oligonucleotide
  Sense strand starting at position 207 of SEQ ID NO: 1562008
gcucuuugcagugucgauu

SEQ ID NO: 1715030 - RNA, 19 nt, Artificial Sequence
  Description of Artificial Sequence: Synthetic oligonucleotide
  Antisense strand to SEQ ID NO: 1715029
aaucgacacugcaaagagc

SEQ ID NO: 1715031 - RNA, 19 nt, Artificial Sequence
  Description of Artificial Sequence: Synthetic oligonucleotide
  Sense strand starting at position 216 of SEQ ID NO: 1562008
agugucgauucuuccuuua

SEQ ID NO: 1715032 - RNA, 19 nt, Artificial Sequence
  Description of Artificial Sequence: Synthetic oligonucleotide
  Antisense strand to SEQ ID NO: 1715031
uaaaggaagaaucgacacu

SEQ ID NO: 1715033 - RNA, 19 nt, Artificial Sequence
  Description of Artificial Sequence: Synthetic oligonucleotide
  Sense strand starting at position 218 of SEQ ID NO: 1562008
ugucgauucuuccuuuacu

SEQ ID NO: 1715034 - RNA, 19 nt, Artificial Sequence
  Description of Artificial Sequence: Synthetic oligonucleotide
  Antisense strand to SEQ ID NO: 1715033
aguaaaggaagaaucgaca

SEQ ID NO: 1715035 - RNA, 19 nt, Artificial Sequence
  Description of Artificial Sequence: Synthetic oligonucleotide
  Sense strand starting at position 219 of SEQ ID NO: 1562008
gucgauucuuccuuuacuu

SEQ ID NO: 1715036 - RNA, 19 nt, Artificial Sequence
  Description of Artificial Sequence: Synthetic oligonucleotide
  Antisense strand to SEQ ID NO: 1715035
aaguaaaggaagaaucgac

SEQ ID NO: 1715037 - RNA, 19 nt, Artificial Sequence
  Description of Artificial Sequence: Synthetic oligonucleotide
  Sense strand starting at position 340 of SEQ ID NO: 1562008
gcauuagaucugugucaga

SEQ ID NO: 1715038 - RNA, 19 nt, Artificial Sequence
  Description of Artificial Sequence: Synthetic oligonucleotide
  Antisense strand to SEQ ID NO: 1715037
ucugacacagaucuaaugc

SEQ ID NO: 1715039 - RNA, 19 nt, Artificial Sequence
  Description of Artificial Sequence: Synthetic oligonucleotide
  Sense strand starting at position 349 of SEQ ID NO: 1562008
cugugucagaucuggaguu

SEQ ID NO: 1715040 - RNA, 19 nt, Artificial Sequence
  Description of Artificial Sequence: Synthetic oligonucleotide
  Antisense strand to SEQ ID NO: 1715039
aacuccagaucugacacag

SEQ ID NO: 1715041 - RNA, 19 nt, Artificial Sequence
  Description of Artificial Sequence: Synthetic oligonucleotide
  Sense strand starting at position 351 of SEQ ID NO: 1562008
gugucagaucuggaguuug

SEQ ID NO: 1715042 - RNA, 19 nt, Artificial Sequence
  Description of Artificial Sequence: Synthetic oligonucleotide
  Antisense strand to SEQ ID NO: 1715041
caaacuccagaucugacac

SEQ ID NO: 1715043 - RNA, 19 nt, Artificial Sequence
  Description of Artificial Sequence: Synthetic oligonucleotide
  Sense strand starting at position 361 of SEQ ID NO: 1562008
uggaguuuguagcugagga

SEQ ID NO: 1715044 - RNA, 19 nt, Artificial Sequence
  Description of Artificial Sequence: Synthetic oligonucleotide
  Antisense strand to SEQ ID NO: 1715043
uccucagcuacaaacucca

SEQ ID NO: 1715045 - RNA, 19 nt, Artificial Sequence
  Description of Artificial Sequence: Synthetic oligonucleotide
  Sense strand starting at position 362 of SEQ ID NO: 1562008
ggaguuuguagcugaggau

SEQ ID NO: 1715046 - RNA, 19 nt, Artificial Sequence
  Description of Artificial Sequence: Synthetic oligonucleotide
  Antisense strand to SEQ ID NO: 1715045
auccucagcuacaaacucc

SEQ ID NO: 1715047 - RNA, 19 nt, Artificial Sequence
  Description of Artificial Sequence: Synthetic oligonucleotide
  Sense strand starting at position 678 of SEQ ID NO: 1562008
uggaacaacucucaaagau

SEQ ID NO: 1715048 - RNA, 19 nt, Artificial Sequence
  Description of Artificial Sequence: Synthetic oligonucleotide
  Antisense strand to SEQ ID NO: 1715047
aucuuugagaguuguucca

SEQ ID NO: 1715049 - RNA, 19 nt, Artificial Sequence
  Description of Artificial Sequence: Synthetic oligonucleotide
  Sense strand starting at position 840 of SEQ ID NO: 1562008
gggcuagacucacaaacua

SEQ ID NO: 1715050 - RNA, 19 nt, Artificial Sequence
  Description of Artificial Sequence: Synthetic oligonucleotide
  Antisense strand to SEQ ID NO: 1715049
uaguuugugagucuagccc

SEQ ID NO: 1715051 - RNA, 19 nt, Artificial Sequence
  Description of Artificial Sequence: Synthetic oligonucleotide
  Sense strand starting at position 858 of SEQ ID NO: 1562008
agcugcacuccugagaaga

SEQ ID NO: 1715052 - RNA, 19 nt, Artificial Sequence
  Description of Artificial Sequence: Synthetic oligonucleotide
  Antisense strand to SEQ ID NO: 1715051
ucuucucaggagugcagcu

SEQ ID NO: 1715053 - RNA, 19 nt, Artificial Sequence
  Description of Artificial Sequence: Synthetic oligonucleotide
  Sense strand starting at position 860 of SEQ ID NO: 1562008
cugcacuccugagaagaau

SEQ ID NO: 1715054 - RNA, 19 nt, Artificial Sequence
  Description of Artificial Sequence: Synthetic oligonucleotide
  Antisense strand to SEQ ID NO: 1715053
auucuucucaggagugcag

SEQ ID NO: 1715055 - RNA, 19 nt, Artificial Sequence
  Description of Artificial Sequence: Synthetic oligonucleotide
  Sense strand starting at position 1225 of SEQ ID NO: 1562008
cggagaguuucacagacug

SEQ ID NO: 1715056 - RNA, 19 nt, Artificial Sequence
  Description of Artificial Sequence: Synthetic oligonucleotide
  Antisense strand to SEQ ID NO: 1715055
cagucugugaaacucuccg

SEQ ID NO: 1715057 - RNA, 19 nt, Artificial Sequence
  Description of Artificial Sequence: Synthetic oligonucleotide
  Sense strand starting at position 1241 of SEQ ID NO: 1562008
cugcucuuucuggauaaag

SEQ ID NO: 1715058 - RNA, 19 nt, Artificial Sequence
  Description of Artificial Sequence: Synthetic oligonucleotide
  Antisense strand to SEQ ID NO: 1715057
cuuuauccagaaagagcag

SEQ ID NO: 1715059 - RNA, 19 nt, Artificial Sequence
  Description of Artificial Sequence: Synthetic oligonucleotide
  Sense strand starting at position 1553 of SEQ ID NO: 1562008
cccgaaaguuugcccaagu

SEQ ID NO: 1715060 - RNA, 19 nt, Artificial Sequence
  Description of Artificial Sequence: Synthetic oligonucleotide
  Antisense strand to SEQ ID NO: 1715059
acuugggcaaacuuucggg

SEQ ID NO: 1715061 - RNA, 19 nt, Artificial Sequence
  Description of Artificial Sequence: Synthetic oligonucleotide
  Sense strand starting at position 2939 of SEQ ID NO: 1562008
ugcaaaugcucuccugaac

SEQ ID NO: 1715062 - RNA, 19 nt, Artificial Sequence
  Description of Artificial Sequence: Synthetic oligonucleotide
  Antisense strand to SEQ ID NO: 1715061
guucaggagagcauuugca

SEQ ID NO: 1715063 - RNA, 19 nt, Artificial Sequence
  Description of Artificial Sequence: Synthetic oligonucleotide
  Sense strand starting at position 3240 of SEQ ID NO: 1562008
gcgcuaaacuucucuaagu

SEQ ID NO: 1715064 - RNA, 19 nt, Artificial Sequence
  Description of Artificial Sequence: Synthetic oligonucleotide
  Antisense strand to SEQ ID NO: 1715063
acuuagagaaguuuagcgc

SEQ ID NO: 1715065 - RNA, 19 nt, Artificial Sequence
  Description of Artificial Sequence: Synthetic oligonucleotide
  Sense strand starting at position 3241 of SEQ ID NO: 1562008
cgcuaaacuucucuaaguu

SEQ ID NO: 1715066 - RNA, 19 nt, Artificial Sequence
  Description of Artificial Sequence: Synthetic oligonucleotide
  Antisense strand to SEQ ID NO: 1715065
aacuuagagaaguuuagcg

SEQ ID NO: 1715067 - RNA, 19 nt, Artificial Sequence
  Description of Artificial Sequence: Synthetic oligonucleotide
  Sense strand starting at position 3421 of SEQ ID NO: 1562008
cuggauuuaucaugcuuua

SEQ ID NO: 1715068 - RNA, 19 nt, Artificial Sequence
  Description of Artificial Sequence: Synthetic oligonucleotide
  Antisense strand to SEQ ID NO: 1715067
uaaagcaugauaaauccag

SEQ ID NO: 1715069 - RNA, 19 nt, Artificial Sequence
  Description of Artificial Sequence: Synthetic oligonucleotide
  Sense strand starting at position 3494 of SEQ ID NO: 1562008
gugaauucccauugcaccu

SEQ ID NO: 1715070 - RNA, 19 nt, Artificial Sequence
  Description of Artificial Sequence: Synthetic oligonucleotide
  Antisense strand to SEQ ID NO: 1715069
aggugcaaugggaauucac

SEQ ID NO: 1715071 - RNA, 19 nt, Artificial Sequence
  Description of Artificial Sequence: Synthetic oligonucleotide
  Sense strand starting at position 3742 of SEQ ID NO: 1562008
gguggagccugucugacau

SEQ ID NO: 1715072 - RNA, 19 nt, Artificial Sequence
  Description of Artificial Sequence: Synthetic oligonucleotide
  Antisense strand to SEQ ID NO: 1715071
augucagacaggcuccacc

SEQ ID NO: 1715073 - RNA, 19 nt, Artificial Sequence
  Description of Artificial Sequence: Synthetic oligonucleotide
  Sense strand starting at position 3748 of SEQ ID NO: 1562008
gccugucugacauguugag

SEQ ID NO: 1715074 - RNA, 19 nt, Artificial Sequence
  Description of Artificial Sequence: Synthetic oligonucleotide
  Antisense strand to SEQ ID NO: 1715073
cucaacaugucagacaggc

SEQ ID NO: 1715075 - RNA, 19 nt, Artificial Sequence
  Description of Artificial Sequence: Synthetic oligonucleotide
  Sense strand starting at position 3797 of SEQ ID NO: 1562008
aggacaacuuacugcauuu

SEQ ID NO: 1715076 - RNA, 19 nt, Artificial Sequence
  Description of Artificial Sequence: Synthetic oligonucleotide
  Antisense strand to SEQ ID NO: 1715075
aaaugcaguaaguuguccu

SEQ ID NO: 1715077 - RNA, 19 nt, Artificial Sequence
  Description of Artificial Sequence: Synthetic oligonucleotide
  Sense strand starting at position 3869 of SEQ ID NO: 1562008
cuuccugggaauugugaga

SEQ ID NO: 1715078 - RNA, 19 nt, Artificial Sequence
  Description of Artificial Sequence: Synthetic oligonucleotide
  Antisense strand to SEQ ID NO: 1715077
ucucacaauucccaggaag

SEQ ID NO: 1715079 - RNA, 19 nt, Artificial Sequence
  Description of Artificial Sequence: Synthetic oligonucleotide
  Sense strand starting at position 3874 of SEQ ID NO: 1562008
ugggaauugugagauagua

SEQ ID NO: 1715080 - RNA, 19 nt, Artificial Sequence
  Description of Artificial Sequence: Synthetic oligonucleotide
  Antisense strand to SEQ ID NO: 1715079
uacuaucucacaauuccca

SEQ ID NO: 1715081 - RNA, 19 nt, Artificial Sequence
  Description of Artificial Sequence: Synthetic oligonucleotide
  Sense strand starting at position 3882 of SEQ ID NO: 1562008
gugagauaguaggacuaga

SEQ ID NO: 1715082 - RNA, 19 nt, Artificial Sequence
  Description of Artificial Sequence: Synthetic oligonucleotide
  Antisense strand to SEQ ID NO: 1715081
ucuaguccuacuaucucac

SEQ ID NO: 1715083 - RNA, 19 nt, Artificial Sequence
  Description of Artificial Sequence: Synthetic oligonucleotide
  Sense strand starting at position 3897 of SEQ ID NO: 1562008
uagacuagaguuuguaaga

SEQ ID NO: 1715084 - RNA, 19 nt, Artificial Sequence
  Description of Artificial Sequence: Synthetic oligonucleotide
  Antisense strand to SEQ ID NO: 1715083
ucuuacaaacucuagucua

SEQ ID NO: 1715085 - RNA, 19 nt, Artificial Sequence
  Description of Artificial Sequence: Synthetic oligonucleotide
  Sense strand starting at position 3898 of SEQ ID NO: 1562008
agacuagaguuuguaagag

SEQ ID NO: 1715086 - RNA, 19 nt, Artificial Sequence
  Description of Artificial Sequence: Synthetic oligonucleotide
  Antisense strand to SEQ ID NO: 1715085
cucuuacaaacucuagucu

SEQ ID NO: 1715087 - RNA, 19 nt, Artificial Sequence
  Description of Artificial Sequence: Synthetic oligonucleotide
  Sense strand starting at position 3970 of SEQ ID NO: 1562008
gacuuugucuugcuguagu

SEQ ID NO: 1715088 - RNA, 19 nt, Artificial Sequence
  Description of Artificial Sequence: Synthetic oligonucleotide
  Antisense strand to SEQ ID NO: 1715087
acuacagcaagacaaaguc

SEQ ID NO: 1715089 - RNA, 19 nt, Artificial Sequence
  Description of Artificial Sequence: Synthetic oligonucleotide
  Sense strand starting at position 474 of SEQ ID NO: 1562009
acucucaucuauugggaag

SEQ ID NO: 1715090 - RNA, 19 nt, Artificial Sequence
  Description of Artificial Sequence: Synthetic oligonucleotide
  Antisense strand to SEQ ID NO: 1715089
cuucccaauagaugagagu

SEQ ID NO: 1715091 - RNA, 19 nt, Artificial Sequence
  Description of Artificial Sequence: Synthetic oligonucleotide
  Sense strand starting at position 476 of SEQ ID NO: 1562009
ucucaucuauugggaaguu

SEQ ID NO: 1715092 - RNA, 19 nt, Artificial Sequence
  Description of Artificial Sequence: Synthetic oligonucleotide
  Antisense strand to SEQ ID NO: 1715091
aacuucccaauagaugaga

SEQ ID NO: 1715093 - RNA, 19 nt, Artificial Sequence
  Description of Artificial Sequence: Synthetic oligonucleotide
  Sense strand starting at position 654 of SEQ ID NO: 1562009
uaagucuugccucaucgau

SEQ ID NO: 1715094 - RNA, 19 nt, Artificial Sequence
  Description of Artificial Sequence: Synthetic oligonucleotide
  Antisense strand to SEQ ID NO: 1715093
aucgaugaggcaagacuua

SEQ ID NO: 1715095 - RNA, 19 nt, Artificial Sequence
  Description of Artificial Sequence: Synthetic oligonucleotide
  Sense strand starting at position 656 of SEQ ID NO: 1562009
agucuugccucaucgauuu

SEQ ID NO: 1715096 - RNA, 19 nt, Artificial Sequence
  Description of Artificial Sequence: Synthetic oligonucleotide
  Antisense strand to SEQ ID NO: 1715095
aaaucgaugaggcaagacu

SEQ ID NO: 1715097 - RNA, 19 nt, Artificial Sequence
  Description of Artificial Sequence: Synthetic oligonucleotide
  Sense strand starting at position 779 of SEQ ID NO: 1562009
cccacuuacucagagaugu

SEQ ID NO: 1715098 - RNA, 19 nt, Artificial Sequence
  Description of Artificial Sequence: Synthetic oligonucleotide
  Antisense strand to SEQ ID NO: 1715097
acaucucugaguaaguggg

SEQ ID NO: 1715099 - RNA, 19 nt, Artificial Sequence
  Description of Artificial Sequence: Synthetic oligonucleotide
  Sense strand starting at position 828 of SEQ ID NO: 1562009
gguccggaauggugauagu

SEQ ID NO: 1715100 - RNA, 19 nt, Artificial Sequence
  Description of Artificial Sequence: Synthetic oligonucleotide
  Antisense strand to SEQ ID NO: 1715099
acuaucaccauuccggacc

SEQ ID NO: 1715101 - RNA, 19 nt, Artificial Sequence
  Description of Artificial Sequence: Synthetic oligonucleotide
  Sense strand starting at position 838 of SEQ ID NO: 1562009
ggugauagucuccagcucu

SEQ ID NO: 1715102 - RNA, 19 nt, Artificial Sequence
  Description of Artificial Sequence: Synthetic oligonucleotide
  Antisense strand to SEQ ID NO: 1715101
agagcuggagacuaucacc

SEQ ID NO: 1715103 - RNA, 19 nt, Artificial Sequence
  Description of Artificial Sequence: Synthetic oligonucleotide
  Sense strand starting at position 848 of SEQ ID NO: 1562009
uccagcucuugcuccagaa

SEQ ID NO: 1715104 - RNA, 19 nt, Artificial Sequence
  Description of Artificial Sequence: Synthetic oligonucleotide
  Antisense strand to SEQ ID NO: 1715103
uucuggagcaagagcugga

SEQ ID NO: 1715105 - RNA, 19 nt, Artificial Sequence
  Description of Artificial Sequence: Synthetic oligonucleotide
  Sense strand starting at position 1115 of SEQ ID NO: 1562009
ggucgcaggaguuaucuga

SEQ ID NO: 1715106 - RNA, 19 nt, Artificial Sequence
  Description of Artificial Sequence: Synthetic oligonucleotide
  Antisense strand to SEQ ID NO: 1715105
ucagauaacuccugcgacc

SEQ ID NO: 1715107 - RNA, 19 nt, Artificial Sequence
  Description of Artificial Sequence: Synthetic oligonucleotide
  Sense strand starting at position 1122 of SEQ ID NO: 1562009
ggaguuaucugagccgcuu

SEQ ID NO: 1715108 - RNA, 19 nt, Artificial Sequence
  Description of Artificial Sequence: Synthetic oligonucleotide
  Antisense strand to SEQ ID NO: 1715107
aagcggcucagauaacucc

SEQ ID NO: 1715109 - RNA, 19 nt, Artificial Sequence
  Description of Artificial Sequence: Synthetic oligonucleotide
  Sense strand starting at position 1124 of SEQ ID NO: 1562009
aguuaucugagccgcuuaa

SEQ ID NO: 1715110 - RNA, 19 nt, Artificial Sequence
  Description of Artificial Sequence: Synthetic oligonucleotide
  Antisense strand to SEQ ID NO: 1715109
uuaagcggcucagauaacu

SEQ ID NO: 1715111 - RNA, 19 nt, Artificial Sequence
  Description of Artificial Sequence: Synthetic oligonucleotide
  Sense strand starting at position 1186 of SEQ ID NO: 1562009
aucguuacccuccagauaa

SEQ ID NO: 1715112 - RNA, 19 nt, Artificial Sequence
  Description of Artificial Sequence: Synthetic oligonucleotide
  Antisense strand to SEQ ID NO: 1715111
uuaucuggaggguaacgau

SEQ ID NO: 1715113 - RNA, 19 nt, Artificial Sequence
  Description of Artificial Sequence: Synthetic oligonucleotide
  Sense strand starting at position 1188 of SEQ ID NO: 1562009
cguuacccuccagauaacu

SEQ ID NO: 1715114 - RNA, 19 nt, Artificial Sequence
  Description of Artificial Sequence: Synthetic oligonucleotide
  Antisense strand to SEQ ID NO: 1715113
aguuaucuggaggguaacg

SEQ ID NO: 1715115 - RNA, 19 nt, Artificial Sequence
  Description of Artificial Sequence: Synthetic oligonucleotide
  Sense strand starting at position 1239 of SEQ ID NO: 1562009
ccauauggcagauguggaa

SEQ ID NO: 1715116 - RNA, 19 nt, Artificial Sequence
  Description of Artificial Sequence: Synthetic oligonucleotide
  Antisense strand to SEQ ID NO: 1715115
uuccacaucugccauaugg

SEQ ID NO: 1715117 - RNA, 19 nt, Artificial Sequence
  Description of Artificial Sequence: Synthetic oligonucleotide
  Sense strand starting at position 1284 of SEQ ID NO: 1562009
uugcguucuggcucccaga

SEQ ID NO: 1715118 - RNA, 19 nt, Artificial Sequence
  Description of Artificial Sequence: Synthetic oligonucleotide
  Antisense strand to SEQ ID NO: 1715117
ucugggagccagaacgcaa

SEQ ID NO: 1715119 - RNA, 19 nt, Artificial Sequence
  Description of Artificial Sequence: Synthetic oligonucleotide
  Sense strand starting at position 1354 of SEQ ID NO: 1562009
gcgugaugaguuuggaccu

SEQ ID NO: 1715120 - RNA, 19 nt, Artificial Sequence
  Description of Artificial Sequence: Synthetic oligonucleotide
  Antisense strand to SEQ ID NO: 1715119
agguccaaacucaucacgc

SEQ ID NO: 1715121 - RNA, 19 nt, Artificial Sequence
  Description of Artificial Sequence: Synthetic oligonucleotide
  Sense strand starting at position 1586 of SEQ ID NO: 1562009
auuagagauucugccugga

SEQ ID NO: 1715122 - RNA, 19 nt, Artificial Sequence
  Description of Artificial Sequence: Synthetic oligonucleotide
  Antisense strand to SEQ ID NO: 1715121
uccaggcagaaucucuaau

SEQ ID NO: 1715123 - RNA, 19 nt, Artificial Sequence
  Description of Artificial Sequence: Synthetic oligonucleotide
  Sense strand starting at position 1609 of SEQ ID NO: 1562009
ccauguuagcguucuccuu

SEQ ID NO: 1715124 - RNA, 19 nt, Artificial Sequence
  Description of Artificial Sequence: Synthetic oligonucleotide
  Antisense strand to SEQ ID NO: 1715123
aaggagaacgcuaacaugg

SEQ ID NO: 1715125 - RNA, 19 nt, Artificial Sequence
  Description of Artificial Sequence: Synthetic oligonucleotide
  Sense strand starting at position 2072 of SEQ ID NO: 1562009
ugucuuccugcaugaucuu

SEQ ID NO: 1715126 - RNA, 19 nt, Artificial Sequence
  Description of Artificial Sequence: Synthetic oligonucleotide
  Antisense strand to SEQ ID NO: 1715125
aagaucaugcaggaagaca

SEQ ID NO: 1715127 - RNA, 19 nt, Artificial Sequence
  Description of Artificial Sequence: Synthetic oligonucleotide
  Sense strand starting at position 2078 of SEQ ID NO: 1562009
ccugcaugaucuugggcaa

SEQ ID NO: 1715128 - RNA, 19 nt, Artificial Sequence
  Description of Artificial Sequence: Synthetic oligonucleotide
  Antisense strand to SEQ ID NO: 1715127
uugcccaagaucaugcagg

SEQ ID NO: 1715129 - RNA, 19 nt, Artificial Sequence
  Description of Artificial Sequence: Synthetic oligonucleotide
  Sense strand starting at position 2137 of SEQ ID NO: 1562009
agcgaaaugugcacgauga

SEQ ID NO: 1715130 - RNA, 19 nt, Artificial Sequence
  Description of Artificial Sequence: Synthetic oligonucleotide
  Antisense strand to SEQ ID NO: 1715129
ucaucgugcacauuucgcu

SEQ ID NO: 1715131 - RNA, 19 nt, Artificial Sequence
  Description of Artificial Sequence: Synthetic oligonucleotide
  Sense strand starting at position 2138 of SEQ ID NO: 1562009
gcgaaaugugcacgaugau

SEQ ID NO: 1715132 - RNA, 19 nt, Artificial Sequence
  Description of Artificial Sequence: Synthetic oligonucleotide
  Antisense strand to SEQ ID NO: 1715131
aucaucgugcacauuucgc

SEQ ID NO: 1715133 - RNA, 19 nt, Artificial Sequence
  Description of Artificial Sequence: Synthetic oligonucleotide
  Sense strand starting at position 2139 of SEQ ID NO: 1562009
cgaaaugugcacgaugaua

SEQ ID NO: 1715134 - RNA, 19 nt, Artificial Sequence
  Description of Artificial Sequence: Synthetic oligonucleotide
  Antisense strand to SEQ ID NO: 1715133
uaucaucgugcacauuucg

SEQ ID NO: 1715135 - RNA, 19 nt, Artificial Sequence
  Description of Artificial Sequence: Synthetic oligonucleotide
  Sense strand starting at position 2196 of SEQ ID NO: 1562009
gcacaaagucaaggaauau

SEQ ID NO: 1715136 - RNA, 19 nt, Artificial Sequence
  Description of Artificial Sequence: Synthetic oligonucleotide
  Antisense strand to SEQ ID NO: 1715135
auauuccuugacuuugugc

SEQ ID NO: 1715137 - RNA, 19 nt, Artificial Sequence
  Description of Artificial Sequence: Synthetic oligonucleotide
  Sense strand starting at position 2361 of SEQ ID NO: 1562009
cugucagcccaggaacaua

SEQ ID NO: 1715138 - RNA, 19 nt, Artificial Sequence
  Description of Artificial Sequence: Synthetic oligonucleotide
  Antisense strand to SEQ ID NO: 1715137
uauguuccugggcugacag

SEQ ID NO: 1715139 - RNA, 19 nt, Artificial Sequence
  Description of Artificial Sequence: Synthetic oligonucleotide
  Sense strand starting at position 2930 of SEQ ID NO: 1562009
gucugcugagcauguauuu

SEQ ID NO: 1715140 - RNA, 19 nt, Artificial Sequence
  Description of Artificial Sequence: Synthetic oligonucleotide
  Antisense strand to SEQ ID NO: 1715139
aaauacaugcucagcagac

SEQ ID NO: 1715141 - RNA, 19 nt, Artificial Sequence
  Description of Artificial Sequence: Synthetic oligonucleotide
  Sense strand starting at position 2939 of SEQ ID NO: 1562009
gcauguauuuagcaccaaa

SEQ ID NO: 1715142 - RNA, 19 nt, Artificial Sequence
  Description of Artificial Sequence: Synthetic oligonucleotide
  Antisense strand to SEQ ID NO: 1715141
uuuggugcuaaauacaugc

SEQ ID NO: 1715143 - RNA, 19 nt, Artificial Sequence
  Description of Artificial Sequence: Synthetic oligonucleotide
  Sense strand starting at position 2957 of SEQ ID NO: 1562009
acacucaucuaggaaggau

SEQ ID NO: 1715144 - RNA, 19 nt, Artificial Sequence
  Description of Artificial Sequence: Synthetic oligonucleotide
  Antisense strand to SEQ ID NO: 1715143
auccuuccuagaugagugu

SEQ ID NO: 1715145 - RNA, 19 nt, Artificial Sequence
  Description of Artificial Sequence: Synthetic oligonucleotide
  Sense strand starting at position 3842 of SEQ ID NO: 1562009
ccaugucauguccagcuaa

SEQ ID NO: 1715146 - RNA, 19 nt, Artificial Sequence
  Description of Artificial Sequence: Synthetic oligonucleotide
  Antisense strand to SEQ ID NO: 1715145
uuagcuggacaugacaugg

SEQ ID NO: 1715147 - RNA, 19 nt, Artificial Sequence
  Description of Artificial Sequence: Synthetic oligonucleotide
  Sense strand starting at position 418 of SEQ ID NO: 1562010
ggacccaguuggucugauu

SEQ ID NO: 1715148 - RNA, 19 nt, Artificial Sequence
  Description of Artificial Sequence: Synthetic oligonucleotide
  Antisense strand to SEQ ID NO: 1715147
aaucagaccaacugggucc

SEQ ID NO: 1715149 - RNA, 19 nt, Artificial Sequence
  Description of Artificial Sequence: Synthetic oligonucleotide
  Sense strand starting at position 429 of SEQ ID NO: 1562010
gucugauucccaggccuau

SEQ ID NO: 1715150 - RNA, 19 nt, Artificial Sequence
  Description of Artificial Sequence: Synthetic oligonucleotide
  Antisense strand to SEQ ID NO: 1715149
auaggccugggaaucagac

SEQ ID NO: 1715151 - RNA, 19 nt, Artificial Sequence
  Description of Artificial Sequence: Synthetic oligonucleotide
  Sense strand starting at position 569 of SEQ ID NO: 1562010
gcaggagacauuggacacu

SEQ ID NO: 1715152 - RNA, 19 nt, Artificial Sequence
  Description of Artificial Sequence: Synthetic oligonucleotide
  Antisense strand to SEQ ID NO: 1715151
aguguccaaugucuccugc

SEQ ID NO: 1715153 - RNA, 19 nt, Artificial Sequence
  Description of Artificial Sequence: Synthetic oligonucleotide
  Sense strand starting at position 610 of SEQ ID NO: 1562010
gggagagcuccagaccagu

SEQ ID NO: 1715154 - RNA, 19 nt, Artificial Sequence
  Description of Artificial Sequence: Synthetic oligonucleotide
  Antisense strand to SEQ ID NO: 1715153
acuggucuggagcucuccc

SEQ ID NO: 1715155 - RNA, 19 nt, Artificial Sequence
  Description of Artificial Sequence: Synthetic oligonucleotide
  Sense strand starting at position 796 of SEQ ID NO: 1562010
ccuaucaacucguaugaaa

SEQ ID NO: 1715156 - RNA, 19 nt, Artificial Sequence
  Description of Artificial Sequence: Synthetic oligonucleotide
  Antisense strand to SEQ ID NO: 1715155
uuucauacgaguugauagg

SEQ ID NO: 1715157 - RNA, 19 nt, Artificial Sequence
  Description of Artificial Sequence: Synthetic oligonucleotide
  Sense strand starting at position 798 of SEQ ID NO: 1562010
uaucaacucguaugaaaug

SEQ ID NO: 1715158 - RNA, 19 nt, Artificial Sequence
  Description of Artificial Sequence: Synthetic oligonucleotide
  Antisense strand to SEQ ID NO: 1715157
cauuucauacgaguugaua

SEQ ID NO: 1715159 - RNA, 19 nt, Artificial Sequence
  Description of Artificial Sequence: Synthetic oligonucleotide
  Sense strand starting at position 815 of SEQ ID NO: 1562010
ugcauaugccuguuucugu

SEQ ID NO: 1715160 - RNA, 19 nt, Artificial Sequence
  Description of Artificial Sequence: Synthetic oligonucleotide
  Antisense strand to SEQ ID NO: 1715159
acagaaacaggcauaugca

SEQ ID NO: 1715161 - RNA, 19 nt, Artificial Sequence
  Description of Artificial Sequence: Synthetic oligonucleotide
  Sense strand starting at position 816 of SEQ ID NO: 1562010
gcauaugccuguuucuguu

SEQ ID NO: 1715162 - RNA, 19 nt, Artificial Sequence
  Description of Artificial Sequence: Synthetic oligonucleotide
  Antisense strand to SEQ ID NO: 1715161
aacagaaacaggcauaugc

SEQ ID NO: 1715163 - RNA, 19 nt, Artificial Sequence
  Description of Artificial Sequence: Synthetic oligonucleotide
  Sense strand starting at position 824 of SEQ ID NO: 1562010
cuguuucuguuacacagau

SEQ ID NO: 1715164 - RNA, 19 nt, Artificial Sequence
  Description of Artificial Sequence: Synthetic oligonucleotide
  Antisense strand to SEQ ID NO: 1715163
aucuguguaacagaaacag

SEQ ID NO: 1715165 - RNA, 19 nt, Artificial Sequence
  Description of Artificial Sequence: Synthetic oligonucleotide
  Sense strand starting at position 986 of SEQ ID NO: 1562010
caaggaggcauuggugauu

SEQ ID NO: 1715166 - RNA, 19 nt, Artificial Sequence
  Description of Artificial Sequence: Synthetic oligonucleotide
  Antisense strand to SEQ ID NO: 1715165
aaucaccaaugccuccuug

SEQ ID NO: 1715167 - RNA, 19 nt, Artificial Sequence
  Description of Artificial Sequence: Synthetic oligonucleotide
  Sense strand starting at position 1017 of SEQ ID NO: 1562010
uccugcuguggcuggaaau

SEQ ID NO: 1715168 - RNA, 19 nt, Artificial Sequence
  Description of Artificial Sequence: Synthetic oligonucleotide
  Antisense strand to SEQ ID NO: 1715167
auuuccagccacagcagga

SEQ ID NO: 1715169 - RNA, 19 nt, Artificial Sequence
  Description of Artificial Sequence: Synthetic oligonucleotide
  Sense strand starting at position 1044 of SEQ ID NO: 1562010
gaagaugucaguugcagcu

SEQ ID NO: 1715170 - RNA, 19 nt, Artificial Sequence
  Description of Artificial Sequence: Synthetic oligonucleotide
  Antisense strand to SEQ ID NO: 1715169
agcugcaacugacaucuuc

SEQ ID NO: 1715171 - RNA, 19 nt, Artificial Sequence
  Description of Artificial Sequence: Synthetic oligonucleotide
  Sense strand starting at position 1050 of SEQ ID NO: 1562010
gucaguugcagcucuguga

SEQ ID NO: 1715172 - RNA, 19 nt, Artificial Sequence
  Description of Artificial Sequence: Synthetic oligonucleotide
  Antisense strand to SEQ ID NO: 1715171
ucacagagcugcaacugac

SEQ ID NO: 1715173 - RNA, 19 nt, Artificial Sequence
  Description of Artificial Sequence: Synthetic oligonucleotide
  Sense strand starting at position 1054 of SEQ ID NO: 1562010
guugcagcucugugaccuu

SEQ ID NO: 1715174 - RNA, 19 nt, Artificial Sequence
  Description of Artificial Sequence: Synthetic oligonucleotide
  Antisense strand to SEQ ID NO: 1715173
aaggucacagagcugcaac

SEQ ID NO: 1715175 - RNA, 19 nt, Artificial Sequence
  Description of Artificial Sequence: Synthetic oligonucleotide
  Sense strand starting at position 1179 of SEQ ID NO: 1562010
gggaguggguggaaugaau

SEQ ID NO: 1715176 - RNA, 19 nt, Artificial Sequence
  Description of Artificial Sequence: Synthetic oligonucleotide
  Antisense strand to SEQ ID NO: 1715175
auucauuccacccacuccc

SEQ ID NO: 1715177 - RNA, 19 nt, Artificial Sequence
  Description of Artificial Sequence: Synthetic oligonucleotide
  Sense strand starting at position 1188 of SEQ ID NO: 1562010
uggaaugaauucuuccauu

SEQ ID NO: 1715178 - RNA, 19 nt, Artificial Sequence
  Description of Artificial Sequence: Synthetic oligonucleotide
  Antisense strand to SEQ ID NO: 1715177
aauggaagaauucauucca

SEQ ID NO: 1715179 - RNA, 19 nt, Artificial Sequence
  Description of Artificial Sequence: Synthetic oligonucleotide
  Sense strand starting at position 1199 of SEQ ID NO: 1562010
cuuccauugucccucaagu

SEQ ID NO: 1715180 - RNA, 19 nt, Artificial Sequence
  Description of Artificial Sequence: Synthetic oligonucleotide
  Antisense strand to SEQ ID NO: 1715179
acuugagggacaauggaag

SEQ ID NO: 1715181 - RNA, 19 nt, Artificial Sequence
  Description of Artificial Sequence: Synthetic oligonucleotide
  Sense strand starting at position 1274 of SEQ ID NO: 1562010
cuuccugauccagguguua

SEQ ID NO: 1715182 - RNA, 19 nt, Artificial Sequence
  Description of Artificial Sequence: Synthetic oligonucleotide
  Antisense strand to SEQ ID NO: 1715181
uaacaccuggaucaggaag

SEQ ID NO: 1715183 - RNA, 19 nt, Artificial Sequence
  Description of Artificial Sequence: Synthetic oligonucleotide
  Sense strand starting at position 1844 of SEQ ID NO: 1562010
acucucaucuauugggaag

SEQ ID NO: 1715184 - RNA, 19 nt, Artificial Sequence
  Description of Artificial Sequence: Synthetic oligonucleotide
  Antisense strand to SEQ ID NO: 1715183
cuucccaauagaugagagu

SEQ ID NO: 1715185 - RNA, 19 nt, Artificial Sequence
  Description of Artificial Sequence: Synthetic oligonucleotide
  Sense strand starting at position 2024 of SEQ ID NO: 1562010
uaagucuugccucaucgau

SEQ ID NO: 1715186 - RNA, 19 nt, Artificial Sequence
  Description of Artificial Sequence: Synthetic oligonucleotide
  Antisense strand to SEQ ID NO: 1715185
aucgaugaggcaagacuua

SEQ ID NO: 1715187 - RNA, 19 nt, Artificial Sequence
  Description of Artificial Sequence: Synthetic oligonucleotide
  Sense strand starting at position 2026 of SEQ ID NO: 1562010
agucuugccucaucgauuu

SEQ ID NO: 1715188 - RNA, 19 nt, Artificial Sequence
  Description of Artificial Sequence: Synthetic oligonucleotide
  Antisense strand to SEQ ID NO: 1715187
aaaucgaugaggcaagacu

SEQ ID NO: 1715189 - RNA, 19 nt, Artificial Sequence
  Description of Artificial Sequence: Synthetic oligonucleotide
  Sense strand starting at position 2149 of SEQ ID NO: 1562010
cccacuuacucagagaugu

SEQ ID NO: 1715190 - RNA, 19 nt, Artificial Sequence
  Description of Artificial Sequence: Synthetic oligonucleotide
  Antisense strand to SEQ ID NO: 1715189
acaucucugaguaaguggg

SEQ ID NO: 1715191 - RNA, 19 nt, Artificial Sequence
  Description of Artificial Sequence: Synthetic oligonucleotide
  Sense strand starting at position 2208 of SEQ ID NO: 1562010
ggugauagucuccagcucu

SEQ ID NO: 1715192 - RNA, 19 nt, Artificial Sequence
  Description of Artificial Sequence: Synthetic oligonucleotide
  Antisense strand to SEQ ID NO: 1715191
agagcuggagacuaucacc

SEQ ID NO: 1715193 - RNA, 19 nt, Artificial Sequence
  Description of Artificial Sequence: Synthetic oligonucleotide
  Sense strand starting at position 2218 of SEQ ID NO: 1562010
uccagcucuugcuccagaa

SEQ ID NO: 1715194 - RNA, 19 nt, Artificial Sequence
  Description of Artificial Sequence: Synthetic oligonucleotide
  Antisense strand to SEQ ID NO: 1715193
uucuggagcaagagcugga

SEQ ID NO: 1715195 - RNA, 19 nt, Artificial Sequence
  Description of Artificial Sequence: Synthetic oligonucleotide
  Sense strand starting at position 2485 of SEQ ID NO: 1562010
ggucgcaggaguuaucuga

SEQ ID NO: 1715196 - RNA, 19 nt, Artificial Sequence
  Description of Artificial Sequence: Synthetic oligonucleotide
  Antisense strand to SEQ ID NO: 1715195
ucagauaacuccugcgacc

SEQ ID NO: 1715197 - RNA, 19 nt, Artificial Sequence
  Description of Artificial Sequence: Synthetic oligonucleotide
  Sense strand starting at position 2492 of SEQ ID NO: 1562010
ggaguuaucugagccgcuu

SEQ ID NO: 1715198 - RNA, 19 nt, Artificial Sequence
  Description of Artificial Sequence: Synthetic oligonucleotide
  Antisense strand to SEQ ID NO: 1715197
aagcggcucagauaacucc

SEQ ID NO: 1715199 - RNA, 19 nt, Artificial Sequence
  Description of Artificial Sequence: Synthetic oligonucleotide
  Sense strand starting at position 2494 of SEQ ID NO: 1562010
aguuaucugagccgcuuaa

SEQ ID NO: 1715200 - RNA, 19 nt, Artificial Sequence
  Description of Artificial Sequence: Synthetic oligonucleotide
  Antisense strand to SEQ ID NO: 1715199
uuaagcggcucagauaacu

SEQ ID NO: 1715201 - RNA, 19 nt, Artificial Sequence
  Description of Artificial Sequence: Synthetic oligonucleotide
  Sense strand starting at position 2556 of SEQ ID NO: 1562010
aucguuacccuccagauaa

SEQ ID NO: 1715202 - RNA, 19 nt, Artificial Sequence
  Description of Artificial Sequence: Synthetic oligonucleotide
  Antisense strand to SEQ ID NO: 1715201
uuaucuggaggguaacgau

SEQ ID NO: 1715203 - RNA, 19 nt, Artificial Sequence
  Description of Artificial Sequence: Synthetic oligonucleotide
  Sense strand starting at position 2558 of SEQ ID NO: 1562010
cguuacccuccagauaacu

SEQ ID NO: 1715204 - RNA, 19 nt, Artificial Sequence
  Description of Artificial Sequence: Synthetic oligonucleotide
  Antisense strand to SEQ ID NO: 1715203
aguuaucuggaggguaacg

SEQ ID NO: 1715205 - RNA, 19 nt, Artificial Sequence
  Description of Artificial Sequence: Synthetic oligonucleotide
  Sense strand starting at position 2609 of SEQ ID NO: 1562010
ccauauggcagauguggaa

SEQ ID NO: 1715206 - RNA, 19 nt, Artificial Sequence
  Description of Artificial Sequence: Synthetic oligonucleotide
  Antisense strand to SEQ ID NO: 1715205
uuccacaucugccauaugg

SEQ ID NO: 1715207 - RNA, 19 nt, Artificial Sequence
  Description of Artificial Sequence: Synthetic oligonucleotide
  Sense strand starting at position 2654 of SEQ ID NO: 1562010
uugcguucuggcucccaga

SEQ ID NO: 1715208 - RNA, 19 nt, Artificial Sequence
  Description of Artificial Sequence: Synthetic oligonucleotide
  Antisense strand to SEQ ID NO: 1715207
ucugggagccagaacgcaa

SEQ ID NO: 1715209 - RNA, 19 nt, Artificial Sequence
  Description of Artificial Sequence: Synthetic oligonucleotide
  Sense strand starting at position 2724 of SEQ ID NO: 1562010
gcgugaugaguuuggaccu

SEQ ID NO: 1715210 - RNA, 19 nt, Artificial Sequence
  Description of Artificial Sequence: Synthetic oligonucleotide
  Antisense strand to SEQ ID NO: 1715209
agguccaaacucaucacgc

SEQ ID NO: 1715211 - RNA, 19 nt, Artificial Sequence
  Description of Artificial Sequence: Synthetic oligonucleotide
  Sense strand starting at position 2956 of SEQ ID NO: 1562010
auuagagauucugccugga

SEQ ID NO: 1715212 - RNA, 19 nt, Artificial Sequence
  Description of Artificial Sequence: Synthetic oligonucleotide
  Antisense strand to SEQ ID NO: 1715211
uccaggcagaaucucuaau

SEQ ID NO: 1715213 - RNA, 19 nt, Artificial Sequence
  Description of Artificial Sequence: Synthetic oligonucleotide
  Sense strand starting at position 2979 of SEQ ID NO: 1562010
ccauguuagcguucuccuu

SEQ ID NO: 1715214 - RNA, 19 nt, Artificial Sequence
  Description of Artificial Sequence: Synthetic oligonucleotide
  Antisense strand to SEQ ID NO: 1715213
aaggagaacgcuaacaugg

SEQ ID NO: 1715215 - RNA, 19 nt, Artificial Sequence
  Description of Artificial Sequence: Synthetic oligonucleotide
  Sense strand starting at position 3442 of SEQ ID NO: 1562010
ugucuuccugcaugaucuu

SEQ ID NO: 1715216 - RNA, 19 nt, Artificial Sequence
  Description of Artificial Sequence: Synthetic oligonucleotide
  Antisense strand to SEQ ID NO: 1715215
aagaucaugcaggaagaca

SEQ ID NO: 1715217 - RNA, 19 nt, Artificial Sequence
  Description of Artificial Sequence: Synthetic oligonucleotide
  Sense strand starting at position 3507 of SEQ ID NO: 1562010
agcgaaaugugcacgauga

SEQ ID NO: 1715218 - RNA, 19 nt, Artificial Sequence
  Description of Artificial Sequence: Synthetic oligonucleotide
  Antisense strand to SEQ ID NO: 1715217
ucaucgugcacauuucgcu

SEQ ID NO: 1715219 - RNA, 19 nt, Artificial Sequence
  Description of Artificial Sequence: Synthetic oligonucleotide
  Sense strand starting at position 3508 of SEQ ID NO: 1562010
gcgaaaugugcacgaugau

SEQ ID NO: 1715220 - RNA, 19 nt, Artificial Sequence
  Description of Artificial Sequence: Synthetic oligonucleotide
  Antisense strand to SEQ ID NO: 1715219
aucaucgugcacauuucgc

SEQ ID NO: 1715221 - RNA, 19 nt, Artificial Sequence
  Description of Artificial Sequence: Synthetic oligonucleotide
  Sense strand starting at position 3509 of SEQ ID NO: 1562010
cgaaaugugcacgaugaua

SEQ ID NO: 1715222 - RNA, 19 nt, Artificial Sequence
  Description of Artificial Sequence: Synthetic oligonucleotide
  Antisense strand to SEQ ID NO: 1715221
uaucaucgugcacauuucg

SEQ ID NO: 1715223 - RNA, 19 nt, Artificial Sequence
  Description of Artificial Sequence: Synthetic oligonucleotide
  Sense strand starting at position 3566 of SEQ ID NO: 1562010
gcacaaagucaaggaauau

SEQ ID NO: 1715224 - RNA, 19 nt, Artificial Sequence
  Description of Artificial Sequence: Synthetic oligonucleotide
  Antisense strand to SEQ ID NO: 1715223
auauuccuugacuuugugc

SEQ ID NO: 1715225 - RNA, 19 nt, Artificial Sequence
  Description of Artificial Sequence: Synthetic oligonucleotide
  Sense strand starting at position 3731 of SEQ ID NO: 1562010
cugucagcccaggaacaua

SEQ ID NO: 1715226 - RNA, 19 nt, Artificial Sequence
  Description of Artificial Sequence: Synthetic oligonucleotide
  Antisense strand to SEQ ID NO: 1715225
uauguuccugggcugacag

SEQ ID NO: 1715227 - RNA, 19 nt, Artificial Sequence
  Description of Artificial Sequence: Synthetic oligonucleotide
  Sense strand starting at position 165 of SEQ ID NO: 1562011
gggucaguacuuggagcuu

SEQ ID NO: 1715228 - RNA, 19 nt, Artificial Sequence
  Description of Artificial Sequence: Synthetic oligonucleotide
  Antisense strand to SEQ ID NO: 1715227
aagcuccaaguacugaccc

SEQ ID NO: 1715229 - RNA, 19 nt, Artificial Sequence
  Description of Artificial Sequence: Synthetic oligonucleotide
  Sense strand starting at position 176 of SEQ ID NO: 1562011
uggagcuucuugucacuaa

SEQ ID NO: 1715230 - RNA, 19 nt, Artificial Sequence
  Description of Artificial Sequence: Synthetic oligonucleotide
  Antisense strand to SEQ ID NO: 1715229
uuagugacaagaagcucca

SEQ ID NO: 1715231 - RNA, 19 nt, Artificial Sequence
  Description of Artificial Sequence: Synthetic oligonucleotide
  Sense strand starting at position 290 of SEQ ID NO: 1562011
gugggaauucugcaucuuu

SEQ ID NO: 1715232 - RNA, 19 nt, Artificial Sequence
  Description of Artificial Sequence: Synthetic oligonucleotide
  Antisense strand to SEQ ID NO: 1715231
aaagaugcagaauucccac

SEQ ID NO: 1715233 - RNA, 19 nt, Artificial Sequence
  Description of Artificial Sequence: Synthetic oligonucleotide
  Sense strand starting at position 499 of SEQ ID NO: 1562011
gggagcugccucuaucauu

SEQ ID NO: 1715234 - RNA, 19 nt, Artificial Sequence
  Description of Artificial Sequence: Synthetic oligonucleotide
  Antisense strand to SEQ ID NO: 1715233
aaugauagaggcagcuccc

SEQ ID NO: 1715235 - RNA, 19 nt, Artificial Sequence
  Description of Artificial Sequence: Synthetic oligonucleotide
  Sense strand starting at position 517 of SEQ ID NO: 1562011
uagaaauuggugcacguuu

SEQ ID NO: 1715236 - RNA, 19 nt, Artificial Sequence
  Description of Artificial Sequence: Synthetic oligonucleotide
  Antisense strand to SEQ ID NO: 1715235
aaacgugcaccaauuucua

SEQ ID NO: 1715237 - RNA, 19 nt, Artificial Sequence
  Description of Artificial Sequence: Synthetic oligonucleotide
  Sense strand starting at position 629 of SEQ ID NO: 1562011
ucuucuaucucggcccaaa

SEQ ID NO: 1715238 - RNA, 19 nt, Artificial Sequence
  Description of Artificial Sequence: Synthetic oligonucleotide
  Antisense strand to SEQ ID NO: 1715237
uuugggccgagauagaaga

SEQ ID NO: 1715239 - RNA, 19 nt, Artificial Sequence
  Description of Artificial Sequence: Synthetic oligonucleotide
  Sense strand starting at position 982 of SEQ ID NO: 1562011
caaggagaguccucacaac

SEQ ID NO: 1715240 - RNA, 19 nt, Artificial Sequence
  Description of Artificial Sequence: Synthetic oligonucleotide
  Antisense strand to SEQ ID NO: 1715239
guugugaggacucuccuug

SEQ ID NO: 1715241 - RNA, 19 nt, Artificial Sequence
  Description of Artificial Sequence: Synthetic oligonucleotide
  Sense strand starting at position 1025 of SEQ ID NO: 1562011
ucaugaugaucagcuuaga

SEQ ID NO: 1715242 - RNA, 19 nt, Artificial Sequence
  Description of Artificial Sequence: Synthetic oligonucleotide
  Antisense strand to SEQ ID NO: 1715241
ucuaagcugaucaucauga

SEQ ID NO: 1715243 - RNA, 19 nt, Artificial Sequence
  Description of Artificial Sequence: Synthetic oligonucleotide
  Sense strand starting at position 1153 of SEQ ID NO: 1562011
gucucagggaccugucgua

SEQ ID NO: 1715244 - RNA, 19 nt, Artificial Sequence
  Description of Artificial Sequence: Synthetic oligonucleotide
  Antisense strand to SEQ ID NO: 1715243
uacgacaggucccugagac

SEQ ID NO: 1715245 - RNA, 19 nt, Artificial Sequence
  Description of Artificial Sequence: Synthetic oligonucleotide
  Sense strand starting at position 1194 of SEQ ID NO: 1562011
agacguguuugaccacaga

SEQ ID NO: 1715246 - RNA, 19 nt, Artificial Sequence
  Description of Artificial Sequence: Synthetic oligonucleotide
  Antisense strand to SEQ ID NO: 1715245
ucuguggucaaacacgucu

SEQ ID NO: 1715247 - RNA, 19 nt, Artificial Sequence
  Description of Artificial Sequence: Synthetic oligonucleotide
  Sense strand starting at position 1207 of SEQ ID NO: 1562011
cacagaagccuuugauugu

SEQ ID NO: 1715248 - RNA, 19 nt, Artificial Sequence
  Description of Artificial Sequence: Synthetic oligonucleotide
  Antisense strand to SEQ ID NO: 1715247
acaaucaaaggcuucugug

SEQ ID NO: 1715249 - RNA, 19 nt, Artificial Sequence
  Description of Artificial Sequence: Synthetic oligonucleotide
  Sense strand starting at position 1210 of SEQ ID NO: 1562011
agaagccuuugauugugaa

SEQ ID NO: 1715250 - RNA, 19 nt, Artificial Sequence
  Description of Artificial Sequence: Synthetic oligonucleotide
  Antisense strand to SEQ ID NO: 1715249
uucacaaucaaaggcuucu

SEQ ID NO: 1715251 - RNA, 19 nt, Artificial Sequence
  Description of Artificial Sequence: Synthetic oligonucleotide
  Sense strand starting at position 1211 of SEQ ID NO: 1562011
gaagccuuugauugugaau

SEQ ID NO: 1715252 - RNA, 19 nt, Artificial Sequence
  Description of Artificial Sequence: Synthetic oligonucleotide
  Antisense strand to SEQ ID NO: 1715251
auucacaaucaaaggcuuc

SEQ ID NO: 1715253 - RNA, 19 nt, Artificial Sequence
  Description of Artificial Sequence: Synthetic oligonucleotide
  Sense strand starting at position 1247 of SEQ ID NO: 1562011
gcucuauauaucggaggga

SEQ ID NO: 1715254 - RNA, 19 nt, Artificial Sequence
  Description of Artificial Sequence: Synthetic oligonucleotide
  Antisense strand to SEQ ID NO: 1715253
ucccuccgauauauagagc

SEQ ID NO: 1715255 - RNA, 19 nt, Artificial Sequence
  Description of Artificial Sequence: Synthetic oligonucleotide
  Sense strand starting at position 1352 of SEQ ID NO: 1562011
uacugugugcgaggcauuu

SEQ ID NO: 1715256 - RNA, 19 nt, Artificial Sequence
  Description of Artificial Sequence: Synthetic oligonucleotide
  Antisense strand to SEQ ID NO: 1715255
aaaugccucgcacacagua

SEQ ID NO: 1715257 - RNA, 19 nt, Artificial Sequence
  Description of Artificial Sequence: Synthetic oligonucleotide
  Sense strand starting at position 1611 of SEQ ID NO: 1562011
ucaccucuuagcgaagaga

SEQ ID NO: 1715258 - RNA, 19 nt, Artificial Sequence
  Description of Artificial Sequence: Synthetic oligonucleotide
  Antisense strand to SEQ ID NO: 1715257
ucucuucgcuaagagguga

SEQ ID NO: 1715259 - RNA, 19 nt, Artificial Sequence
  Description of Artificial Sequence: Synthetic oligonucleotide
  Sense strand starting at position 1731 of SEQ ID NO: 1562011
gcaaaugcuccugagaaua

SEQ ID NO: 1715260 - RNA, 19 nt, Artificial Sequence
  Description of Artificial Sequence: Synthetic oligonucleotide
  Antisense strand to SEQ ID NO: 1715259
uauucucaggagcauuugc

SEQ ID NO: 1715261 - RNA, 19 nt, Artificial Sequence
  Description of Artificial Sequence: Synthetic oligonucleotide
  Sense strand starting at position 1802 of SEQ ID NO: 1562011
uuucgccugucauuuauca

SEQ ID NO: 1715262 - RNA, 19 nt, Artificial Sequence
  Description of Artificial Sequence: Synthetic oligonucleotide
  Antisense strand to SEQ ID NO: 1715261
ugauaaaugacaggcgaaa

SEQ ID NO: 1715263 - RNA, 19 nt, Artificial Sequence
  Description of Artificial Sequence: Synthetic oligonucleotide
  Sense strand starting at position 1836 of SEQ ID NO: 1562011
ucguuaaauaaggagugua

SEQ ID NO: 1715264 - RNA, 19 nt, Artificial Sequence
  Description of Artificial Sequence: Synthetic oligonucleotide
  Antisense strand to SEQ ID NO: 1715263
uacacuccuuauuuaacga

SEQ ID NO: 1715265 - RNA, 19 nt, Artificial Sequence
  Description of Artificial Sequence: Synthetic oligonucleotide
  Sense strand starting at position 1870 of SEQ ID NO: 1562011
ucagaagagccaugcuauu

SEQ ID NO: 1715266 - RNA, 19 nt, Artificial Sequence
  Description of Artificial Sequence: Synthetic oligonucleotide
  Antisense strand to SEQ ID NO: 1715265
aauagcauggcucuucuga

SEQ ID NO: 1715267 - RNA, 19 nt, Artificial Sequence
  Description of Artificial Sequence: Synthetic oligonucleotide
  Sense strand starting at position 2035 of SEQ ID NO: 1562011
gggcucuguccugggaaac

SEQ ID NO: 1715268 - RNA, 19 nt, Artificial Sequence
  Description of Artificial Sequence: Synthetic oligonucleotide
  Antisense strand to SEQ ID NO: 1715267
guuucccaggacagagccc

SEQ ID NO: 1715269 - RNA, 19 nt, Artificial Sequence
  Description of Artificial Sequence: Synthetic oligonucleotide
  Sense strand starting at position 2036 of SEQ ID NO: 1562011
ggcucuguccugggaaaca

SEQ ID NO: 1715270 - RNA, 19 nt, Artificial Sequence
  Description of Artificial Sequence: Synthetic oligonucleotide
  Antisense strand to SEQ ID NO: 1715269
uguuucccaggacagagcc

SEQ ID NO: 1715271 - RNA, 19 nt, Artificial Sequence
  Description of Artificial Sequence: Synthetic oligonucleotide
  Sense strand starting at position 2048 of SEQ ID NO: 1562011
ggaaacacucggugcagau

SEQ ID NO: 1715272 - RNA, 19 nt, Artificial Sequence
  Description of Artificial Sequence: Synthetic oligonucleotide
  Antisense strand to SEQ ID NO: 1715271
aucugcaccgaguguuucc

SEQ ID NO: 1715273 - RNA, 19 nt, Artificial Sequence
  Description of Artificial Sequence: Synthetic oligonucleotide
  Sense strand starting at position 2261 of SEQ ID NO: 1562011
gcucacauccgaggaaaga

SEQ ID NO: 1715274 - RNA, 19 nt, Artificial Sequence
  Description of Artificial Sequence: Synthetic oligonucleotide
  Antisense strand to SEQ ID NO: 1715273
ucuuuccucggaugugagc

SEQ ID NO: 1715275 - RNA, 19 nt, Artificial Sequence
  Description of Artificial Sequence: Synthetic oligonucleotide
  Sense strand starting at position 2280 of SEQ ID NO: 1562011
acuacugcgccugauaaac

SEQ ID NO: 1715276 - RNA, 19 nt, Artificial Sequence
  Description of Artificial Sequence: Synthetic oligonucleotide
  Antisense strand to SEQ ID NO: 1715275
guuuaucaggcgcaguagu

SEQ ID NO: 1715277 - RNA, 19 nt, Artificial Sequence
  Description of Artificial Sequence: Synthetic oligonucleotide
  Sense strand starting at position 2440 of SEQ ID NO: 1562011
guucuacagucauugguuu

SEQ ID NO: 1715278 - RNA, 19 nt, Artificial Sequence
  Description of Artificial Sequence: Synthetic oligonucleotide
  Antisense strand to SEQ ID NO: 1715277
aaaccaaugacuguagaac

SEQ ID NO: 1715279 - RNA, 19 nt, Artificial Sequence
  Description of Artificial Sequence: Synthetic oligonucleotide
  Sense strand starting at position 2549 of SEQ ID NO: 1562011
gugcucaaugaauguguca

SEQ ID NO: 1715280 - RNA, 19 nt, Artificial Sequence
  Description of Artificial Sequence: Synthetic oligonucleotide
  Antisense strand to SEQ ID NO: 1715279
ugacacauucauugagcac

SEQ ID NO: 1715281 - RNA, 19 nt, Artificial Sequence
  Description of Artificial Sequence: Synthetic oligonucleotide
  Sense strand starting at position 2551 of SEQ ID NO: 1562011
gcucaaugaaugugucaga

SEQ ID NO: 1715282 - RNA, 19 nt, Artificial Sequence
  Description of Artificial Sequence: Synthetic oligonucleotide
  Antisense strand to SEQ ID NO: 1715281
ucugacacauucauugagc

SEQ ID NO: 1715283 - RNA, 19 nt, Artificial Sequence
  Description of Artificial Sequence: Synthetic oligonucleotide
  Sense strand starting at position 2552 of SEQ ID NO: 1562011
cucaaugaaugugucagau

SEQ ID NO: 1715284 - RNA, 19 nt, Artificial Sequence
  Description of Artificial Sequence: Synthetic oligonucleotide
  Antisense strand to SEQ ID NO: 1715283
aucugacacauucauugag

SEQ ID NO: 1715285 - RNA, 19 nt, Artificial Sequence
  Description of Artificial Sequence: Synthetic oligonucleotide
  Sense strand starting at position 2554 of SEQ ID NO: 1562011
caaugaaugugucagauga

SEQ ID NO: 1715286 - RNA, 19 nt, Artificial Sequence
  Description of Artificial Sequence: Synthetic oligonucleotide
  Antisense strand to SEQ ID NO: 1715285
ucaucugacacauucauug

SEQ ID NO: 1715287 - RNA, 19 nt, Artificial Sequence
  Description of Artificial Sequence: Synthetic oligonucleotide
  Sense strand starting at position 2558 of SEQ ID NO: 1562011
gaaugugucagaugaguuc

SEQ ID NO: 1715288 - RNA, 19 nt, Artificial Sequence
  Description of Artificial Sequence: Synthetic oligonucleotide
  Antisense strand to SEQ ID NO: 1715287
gaacucaucugacacauuc

SEQ ID NO: 1715289 - RNA, 19 nt, Artificial Sequence
  Description of Artificial Sequence: Synthetic oligonucleotide
  Sense strand starting at position 2575 of SEQ ID NO: 1562011
ucaugaauggcgugaaaua

SEQ ID NO: 1715290 - RNA, 19 nt, Artificial Sequence
  Description of Artificial Sequence: Synthetic oligonucleotide
  Antisense strand to SEQ ID NO: 1715289
uauuucacgccauucauga

SEQ ID NO: 1715291 - RNA, 19 nt, Artificial Sequence
  Description of Artificial Sequence: Synthetic oligonucleotide
  Sense strand starting at position 2576 of SEQ ID NO: 1562011
caugaauggcgugaaauau

SEQ ID NO: 1715292 - RNA, 19 nt, Artificial Sequence
  Description of Artificial Sequence: Synthetic oligonucleotide
  Antisense strand to SEQ ID NO: 1715291
auauuucacgccauucaug

SEQ ID NO: 1715293 - RNA, 19 nt, Artificial Sequence
  Description of Artificial Sequence: Synthetic oligonucleotide
  Sense strand starting at position 2584 of SEQ ID NO: 1562011
gcgugaaauauugaguaaa

SEQ ID NO: 1715294 - RNA, 19 nt, Artificial Sequence
  Description of Artificial Sequence: Synthetic oligonucleotide
  Antisense strand to SEQ ID NO: 1715293
uuuacucaauauuucacgc

SEQ ID NO: 1715295 - RNA, 19 nt, Artificial Sequence
  Description of Artificial Sequence: Synthetic oligonucleotide
  Sense strand starting at position 2615 of SEQ ID NO: 1562011
cgagguuccuaauugugca

SEQ ID NO: 1715296 - RNA, 19 nt, Artificial Sequence
  Description of Artificial Sequence: Synthetic oligonucleotide
  Antisense strand to SEQ ID NO: 1715295
ugcacaauuaggaaccucg

SEQ ID NO: 1715297 - RNA, 19 nt, Artificial Sequence
  Description of Artificial Sequence: Synthetic oligonucleotide
  Sense strand starting at position 2753 of SEQ ID NO: 1562011
uugugcaggcucugaaaga

SEQ ID NO: 1715298 - RNA, 19 nt, Artificial Sequence
  Description of Artificial Sequence: Synthetic oligonucleotide
  Antisense strand to SEQ ID NO: 1715297
ucuuucagagccugcacaa

SEQ ID NO: 1715299 - RNA, 19 nt, Artificial Sequence
  Description of Artificial Sequence: Synthetic oligonucleotide
  Sense strand starting at position 3218 of SEQ ID NO: 1562011
cuguguggucuugaacaac

SEQ ID NO: 1715300 - RNA, 19 nt, Artificial Sequence
  Description of Artificial Sequence: Synthetic oligonucleotide
  Antisense strand to SEQ ID NO: 1715299
guuguucaagaccacacag

SEQ ID NO: 1715301 - RNA, 19 nt, Artificial Sequence
  Description of Artificial Sequence: Synthetic oligonucleotide
  Sense strand starting at position 3482 of SEQ ID NO: 1562011
uuguuucucgagcauuuac

SEQ ID NO: 1715302 - RNA, 19 nt, Artificial Sequence
  Description of Artificial Sequence: Synthetic oligonucleotide
  Antisense strand to SEQ ID NO: 1715301
guaaaugcucgagaaacaa

SEQ ID NO: 1715303 - RNA, 19 nt, Artificial Sequence
  Description of Artificial Sequence: Synthetic oligonucleotide
  Sense strand starting at position 3542 of SEQ ID NO: 1562011
ucauuuaauucuuacgaug

SEQ ID NO: 1715304 - RNA, 19 nt, Artificial Sequence
  Description of Artificial Sequence: Synthetic oligonucleotide
  Antisense strand to SEQ ID NO: 1715303
caucguaagaauuaaauga

SEQ ID NO: 1715305 - RNA, 19 nt, Artificial Sequence
  Description of Artificial Sequence: Synthetic oligonucleotide
  Sense strand starting at position 3979 of SEQ ID NO: 1562011
ucaauuccucgagggcuga

SEQ ID NO: 1715306 - RNA, 19 nt, Artificial Sequence
  Description of Artificial Sequence: Synthetic oligonucleotide
  Antisense strand to SEQ ID NO: 1715305
ucagcccucgaggaauuga

SEQ ID NO: 1715307 - RNA, 19 nt, Artificial Sequence
  Description of Artificial Sequence: Synthetic oligonucleotide
  Sense strand starting at position 36 of SEQ ID NO: 1562012
gggagagcuuuccauucca

SEQ ID NO: 1715308 - RNA, 19 nt, Artificial Sequence
  Description of Artificial Sequence: Synthetic oligonucleotide
  Antisense strand to SEQ ID NO: 1715307
uggaauggaaagcucuccc

SEQ ID NO: 1715309 - RNA, 19 nt, Artificial Sequence
  Description of Artificial Sequence: Synthetic oligonucleotide
  Sense strand starting at position 132 of SEQ ID NO: 1562012
acuugaagcucacuguaua

SEQ ID NO: 1715310 - RNA, 19 nt, Artificial Sequence
  Description of Artificial Sequence: Synthetic oligonucleotide
  Antisense strand to SEQ ID NO: 1715309
uauacagugagcuucaagu

SEQ ID NO: 1715311 - RNA, 19 nt, Artificial Sequence
  Description of Artificial Sequence: Synthetic oligonucleotide
  Sense strand starting at position 481 of SEQ ID NO: 1562012
gguagagacuuacuuaucu

SEQ ID NO: 1715312 - RNA, 19 nt, Artificial Sequence
  Description of Artificial Sequence: Synthetic oligonucleotide
  Antisense strand to SEQ ID NO: 1715311
agauaaguaagucucuacc

SEQ ID NO: 1715313 - RNA, 19 nt, Artificial Sequence
  Description of Artificial Sequence: Synthetic oligonucleotide
  Sense strand starting at position 522 of SEQ ID NO: 1562012
cugcguuagcgacaagguu

SEQ ID NO: 1715314 - RNA, 19 nt, Artificial Sequence
  Description of Artificial Sequence: Synthetic oligonucleotide
  Antisense strand to SEQ ID NO: 1715313
aaccuugucgcuaacgcag

SEQ ID NO: 1715315 - RNA, 19 nt, Artificial Sequence
  Description of Artificial Sequence: Synthetic oligonucleotide
  Sense strand starting at position 627 of SEQ ID NO: 1562012
cuuuguaaccauggucuca

SEQ ID NO: 1715316 - RNA, 19 nt, Artificial Sequence
  Description of Artificial Sequence: Synthetic oligonucleotide
  Antisense strand to SEQ ID NO: 1715315
ugagaccaugguuacaaag

SEQ ID NO: 1715317 - RNA, 19 nt, Artificial Sequence
  Description of Artificial Sequence: Synthetic oligonucleotide
  Sense strand starting at position 894 of SEQ ID NO: 1562012
gcaggaagacucggugaca

SEQ ID NO: 1715318 - RNA, 19 nt, Artificial Sequence
  Description of Artificial Sequence: Synthetic oligonucleotide
  Antisense strand to SEQ ID NO: 1715317
ugucaccgagucuuccugc

SEQ ID NO: 1715319 - RNA, 19 nt, Artificial Sequence
  Description of Artificial Sequence: Synthetic oligonucleotide
  Sense strand starting at position 1122 of SEQ ID NO: 1562012
gcccaaaguugauaaagag

SEQ ID NO: 1715320 - RNA, 19 nt, Artificial Sequence
  Description of Artificial Sequence: Synthetic oligonucleotide
  Antisense strand to SEQ ID NO: 1715319
cucuuuaucaacuuugggc

SEQ ID NO: 1715321 - RNA, 19 nt, Artificial Sequence
  Description of Artificial Sequence: Synthetic oligonucleotide
  Sense strand starting at position 1162 of SEQ ID NO: 1562012
gacugcccucagggaaaua

SEQ ID NO: 1715322 - RNA, 19 nt, Artificial Sequence
  Description of Artificial Sequence: Synthetic oligonucleotide
  Antisense strand to SEQ ID NO: 1715321
uauuucccugagggcaguc

SEQ ID NO: 1715323 - RNA, 19 nt, Artificial Sequence
  Description of Artificial Sequence: Synthetic oligonucleotide
  Sense strand starting at position 1502 of SEQ ID NO: 1562012
ucuccaugcucuggaacaa

SEQ ID NO: 1715324 - RNA, 19 nt, Artificial Sequence
  Description of Artificial Sequence: Synthetic oligonucleotide
  Antisense strand to SEQ ID NO: 1715323
uuguuccagagcauggaga

SEQ ID NO: 1715325 - RNA, 19 nt, Artificial Sequence
  Description of Artificial Sequence: Synthetic oligonucleotide
  Sense strand starting at position 1503 of SEQ ID NO: 1562012
cuccaugcucuggaacaaa

SEQ ID NO: 1715326 - RNA, 19 nt, Artificial Sequence
  Description of Artificial Sequence: Synthetic oligonucleotide
  Antisense strand to SEQ ID NO: 1715325
uuuguuccagagcauggag

SEQ ID NO: 1715327 - RNA, 19 nt, Artificial Sequence
  Description of Artificial Sequence: Synthetic oligonucleotide
  Sense strand starting at position 2401 of SEQ ID NO: 1562012
cuaucuucugaggagcaca

SEQ ID NO: 1715328 - RNA, 19 nt, Artificial Sequence
  Description of Artificial Sequence: Synthetic oligonucleotide
  Antisense strand to SEQ ID NO: 1715327
ugugcuccucagaagauag

SEQ ID NO: 1715329 - RNA, 19 nt, Artificial Sequence
  Description of Artificial Sequence: Synthetic oligonucleotide
  Sense strand starting at position 2491 of SEQ ID NO: 1562012
ccugguuucgcaggagacu

SEQ ID NO: 1715330 - RNA, 19 nt, Artificial Sequence
  Description of Artificial Sequence: Synthetic oligonucleotide
  Antisense strand to SEQ ID NO: 1715329
agucuccugcgaaaccagg

SEQ ID NO: 1715331 - RNA, 19 nt, Artificial Sequence
  Description of Artificial Sequence: Synthetic oligonucleotide
  Sense strand starting at position 2622 of SEQ ID NO: 1562012
cccggaagcccuugucaug

SEQ ID NO: 1715332 - RNA, 19 nt, Artificial Sequence
  Description of Artificial Sequence: Synthetic oligonucleotide
  Antisense strand to SEQ ID NO: 1715331
caugacaagggcuuccggg

SEQ ID NO: 1715333 - RNA, 19 nt, Artificial Sequence
  Description of Artificial Sequence: Synthetic oligonucleotide
  Sense strand starting at position 2625 of SEQ ID NO: 1562012
ggaagcccuugucauguaa

SEQ ID NO: 1715334 - RNA, 19 nt, Artificial Sequence
  Description of Artificial Sequence: Synthetic oligonucleotide
  Antisense strand to SEQ ID NO: 1715333
uuacaugacaagggcuucc

SEQ ID NO: 1715335 - RNA, 19 nt, Artificial Sequence
  Description of Artificial Sequence: Synthetic oligonucleotide
  Sense strand starting at position 3022 of SEQ ID NO: 1562012
gacucaguguggccgaaua

SEQ ID NO: 1715336 - RNA, 19 nt, Artificial Sequence
  Description of Artificial Sequence: Synthetic oligonucleotide
  Antisense strand to SEQ ID NO: 1715335
uauucggccacacugaguc

SEQ ID NO: 1715337 - RNA, 19 nt, Artificial Sequence
  Description of Artificial Sequence: Synthetic oligonucleotide
  Sense strand starting at position 3024 of SEQ ID NO: 1562012
cucaguguggccgaauauu

SEQ ID NO: 1715338 - RNA, 19 nt, Artificial Sequence
  Description of Artificial Sequence: Synthetic oligonucleotide
  Antisense strand to SEQ ID NO: 1715337
aauauucggccacacugag

SEQ ID NO: 1715339 - RNA, 19 nt, Artificial Sequence
  Description of Artificial Sequence: Synthetic oligonucleotide
  Sense strand starting at position 3076 of SEQ ID NO: 1562012
aaggaagucgcuuguugaa

SEQ ID NO: 1715340 - RNA, 19 nt, Artificial Sequence
  Description of Artificial Sequence: Synthetic oligonucleotide
  Antisense strand to SEQ ID NO: 1715339
uucaacaagcgacuuccuu

SEQ ID NO: 1715341 - RNA, 19 nt, Artificial Sequence
  Description of Artificial Sequence: Synthetic oligonucleotide
  Sense strand starting at position 3078 of SEQ ID NO: 1562012
ggaagucgcuuguugaaag

SEQ ID NO: 1715342 - RNA, 19 nt, Artificial Sequence
  Description of Artificial Sequence: Synthetic oligonucleotide
  Antisense strand to SEQ ID NO: 1715341
cuuucaacaagcgacuucc

SEQ ID NO: 1715343 - RNA, 19 nt, Artificial Sequence
  Description of Artificial Sequence: Synthetic oligonucleotide
  Sense strand starting at position 3157 of SEQ ID NO: 1562012
ccacguaguccugauucuu

SEQ ID NO: 1715344 - RNA, 19 nt, Artificial Sequence
  Description of Artificial Sequence: Synthetic oligonucleotide
  Antisense strand to SEQ ID NO: 1715343
aagaaucaggacuacgugg

SEQ ID NO: 1715345 - RNA, 19 nt, Artificial Sequence
  Description of Artificial Sequence: Synthetic oligonucleotide
  Sense strand starting at position 3163 of SEQ ID NO: 1562012
aguccugauucuuuaagug

SEQ ID NO: 1715346 - RNA, 19 nt, Artificial Sequence
  Description of Artificial Sequence: Synthetic oligonucleotide
  Antisense strand to SEQ ID NO: 1715345
cacuuaaagaaucaggacu

SEQ ID NO: 1715347 - RNA, 19 nt, Artificial Sequence
  Description of Artificial Sequence: Synthetic oligonucleotide
  Sense strand starting at position 3171 of SEQ ID NO: 1562012
uucuuuaaguguccacaua

SEQ ID NO: 1715348 - RNA, 19 nt, Artificial Sequence
  Description of Artificial Sequence: Synthetic oligonucleotide
  Antisense strand to SEQ ID NO: 1715347
uauguggacacuuaaagaa

SEQ ID NO: 1715349 - RNA, 19 nt, Artificial Sequence
  Description of Artificial Sequence: Synthetic oligonucleotide
  Sense strand starting at position 3172 of SEQ ID NO: 1562012
ucuuuaaguguccacauau

SEQ ID NO: 1715350 - RNA, 19 nt, Artificial Sequence
  Description of Artificial Sequence: Synthetic oligonucleotide
  Antisense strand to SEQ ID NO: 1715349
auauguggacacuuaaaga

SEQ ID NO: 1715351 - RNA, 19 nt, Artificial Sequence
  Description of Artificial Sequence: Synthetic oligonucleotide
  Sense strand starting at position 3181 of SEQ ID NO: 1562012
guccacauauuccuguaau

SEQ ID NO: 1715352 - RNA, 19 nt, Artificial Sequence
  Description of Artificial Sequence: Synthetic oligonucleotide
  Antisense strand to SEQ ID NO: 1715351
auuacaggaauauguggac

SEQ ID NO: 1715353 - RNA, 19 nt, Artificial Sequence
  Description of Artificial Sequence: Synthetic oligonucleotide
  Sense strand starting at position 3193 of SEQ ID NO: 1562012
cuguaaugccuggaguuuc

SEQ ID NO: 1715354 - RNA, 19 nt, Artificial Sequence
  Description of Artificial Sequence: Synthetic oligonucleotide
  Antisense strand to SEQ ID NO: 1715353
gaaacuccaggcauuacag

SEQ ID NO: 1715355 - RNA, 19 nt, Artificial Sequence
  Description of Artificial Sequence: Synthetic oligonucleotide
  Sense strand starting at position 3211 of SEQ ID NO: 1562012
caguaauuagcagggacuu

SEQ ID NO: 1715356 - RNA, 19 nt, Artificial Sequence
  Description of Artificial Sequence: Synthetic oligonucleotide
  Antisense strand to SEQ ID NO: 1715355
aagucccugcuaauuacug

SEQ ID NO: 1715357 - RNA, 19 nt, Artificial Sequence
  Description of Artificial Sequence: Synthetic oligonucleotide
  Sense strand starting at position 3212 of SEQ ID NO: 1562012
aguaauuagcagggacuua

SEQ ID NO: 1715358 - RNA, 19 nt, Artificial Sequence
  Description of Artificial Sequence: Synthetic oligonucleotide
  Antisense strand to SEQ ID NO: 1715357
uaagucccugcuaauuacu

SEQ ID NO: 1715359 - RNA, 19 nt, Artificial Sequence
  Description of Artificial Sequence: Synthetic oligonucleotide
  Sense strand starting at position 3223 of SEQ ID NO: 1562012
gggacuuaguguguucaga

SEQ ID NO: 1715360 - RNA, 19 nt, Artificial Sequence
  Description of Artificial Sequence: Synthetic oligonucleotide
  Antisense strand to SEQ ID NO: 1715359
ucugaacacacuaaguccc

SEQ ID NO: 1715361 - RNA, 19 nt, Artificial Sequence
  Description of Artificial Sequence: Synthetic oligonucleotide
  Sense strand starting at position 3264 of SEQ ID NO: 1562012
uauuguuacuguguuugua

SEQ ID NO: 1715362 - RNA, 19 nt, Artificial Sequence
  Description of Artificial Sequence: Synthetic oligonucleotide
  Antisense strand to SEQ ID NO: 1715361
uacaaacacaguaacaaua

SEQ ID NO: 1715363 - RNA, 19 nt, Artificial Sequence
  Description of Artificial Sequence: Synthetic oligonucleotide
  Sense strand starting at position 3266 of SEQ ID NO: 1562012
uuguuacuguguuuguaac

SEQ ID NO: 1715364 - RNA, 19 nt, Artificial Sequence
  Description of Artificial Sequence: Synthetic oligonucleotide
  Antisense strand to SEQ ID NO: 1715363
guuacaaacacaguaacaa

SEQ ID NO: 1715365 - RNA, 19 nt, Artificial Sequence
  Description of Artificial Sequence: Synthetic oligonucleotide
  Sense strand starting at position 3267 of SEQ ID NO: 1562012
uguuacuguguuuguaaca

SEQ ID NO: 1715366 - RNA, 19 nt, Artificial Sequence
  Description of Artificial Sequence: Synthetic oligonucleotide
  Antisense strand to SEQ ID NO: 1715365
uguuacaaacacaguaaca

SEQ ID NO: 1715367 - RNA, 19 nt, Artificial Sequence
  Description of Artificial Sequence: Synthetic oligonucleotide
  Sense strand starting at position 3278 of SEQ ID NO: 1562012
uuguaacaguuuggauaga

SEQ ID NO: 1715368 - RNA, 19 nt, Artificial Sequence
  Description of Artificial Sequence: Synthetic oligonucleotide
  Antisense strand to SEQ ID NO: 1715367
ucuauccaaacuguuacaa

SEQ ID NO: 1715369 - RNA, 19 nt, Artificial Sequence
  Description of Artificial Sequence: Synthetic oligonucleotide
  Sense strand starting at position 3306 of SEQ ID NO: 1562012
gcuggaauuugggaaguga

SEQ ID NO: 1715370 - RNA, 19 nt, Artificial Sequence
  Description of Artificial Sequence: Synthetic oligonucleotide
  Antisense strand to SEQ ID NO: 1715369
ucacuucccaaauuccagc

SEQ ID NO: 1715371 - RNA, 19 nt, Artificial Sequence
  Description of Artificial Sequence: Synthetic oligonucleotide
  Sense strand starting at position 3463 of SEQ ID NO: 1562012
ggaggcuuguucuggagaa

SEQ ID NO: 1715372 - RNA, 19 nt, Artificial Sequence
  Description of Artificial Sequence: Synthetic oligonucleotide
  Antisense strand to SEQ ID NO: 1715371
uucuccagaacaagccucc

SEQ ID NO: 1715373 - RNA, 19 nt, Artificial Sequence
  Description of Artificial Sequence: Synthetic oligonucleotide
  Sense strand starting at position 3464 of SEQ ID NO: 1562012
gaggcuuguucuggagaag

SEQ ID NO: 1715374 - RNA, 19 nt, Artificial Sequence
  Description of Artificial Sequence: Synthetic oligonucleotide
  Antisense strand to SEQ ID NO: 1715373
cuucuccagaacaagccuc

SEQ ID NO: 1715375 - RNA, 19 nt, Artificial Sequence
  Description of Artificial Sequence: Synthetic oligonucleotide
  Sense strand starting at position 3465 of SEQ ID NO: 1562012
aggcuuguucuggagaagu

SEQ ID NO: 1715376 - RNA, 19 nt, Artificial Sequence
  Description of Artificial Sequence: Synthetic oligonucleotide
  Antisense strand to SEQ ID NO: 1715375
acuucuccagaacaagccu

SEQ ID NO: 1715377 - RNA, 19 nt, Artificial Sequence
  Description of Artificial Sequence: Synthetic oligonucleotide
  Sense strand starting at position 3467 of SEQ ID NO: 1562012
gcuuguucuggagaaguca

SEQ ID NO: 1715378 - RNA, 19 nt, Artificial Sequence
  Description of Artificial Sequence: Synthetic oligonucleotide
  Antisense strand to SEQ ID NO: 1715377
ugacuucuccagaacaagc

SEQ ID NO: 1715379 - RNA, 19 nt, Artificial Sequence
  Description of Artificial Sequence: Synthetic oligonucleotide
  Sense strand starting at position 3510 of SEQ ID NO: 1562012
guccaagcucuuuggagga

SEQ ID NO: 1715380 - RNA, 19 nt, Artificial Sequence
  Description of Artificial Sequence: Synthetic oligonucleotide
  Antisense strand to SEQ ID NO: 1715379
uccuccaaagagcuuggac

SEQ ID NO: 1715381 - RNA, 19 nt, Artificial Sequence
  Description of Artificial Sequence: Synthetic oligonucleotide
  Sense strand starting at position 3572 of SEQ ID NO: 1562012
cgucuucuguuugggagga

SEQ ID NO: 1715382 - RNA, 19 nt, Artificial Sequence
  Description of Artificial Sequence: Synthetic oligonucleotide
  Antisense strand to SEQ ID NO: 1715381
uccucccaaacagaagacg

SEQ ID NO: 1715383 - RNA, 19 nt, Artificial Sequence
  Description of Artificial Sequence: Synthetic oligonucleotide
  Sense strand starting at position 3574 of SEQ ID NO: 1562012
ucuucuguuugggaggaga

SEQ ID NO: 1715384 - RNA, 19 nt, Artificial Sequence
  Description of Artificial Sequence: Synthetic oligonucleotide
  Antisense strand to SEQ ID NO: 1715383
ucuccucccaaacagaaga

SEQ ID NO: 1715385 - RNA, 19 nt, Artificial Sequence
  Description of Artificial Sequence: Synthetic oligonucleotide
  Sense strand starting at position 3757 of SEQ ID NO: 1562012
ggaagauauugcugcaguu

SEQ ID NO: 1715386 - RNA, 19 nt, Artificial Sequence
  Description of Artificial Sequence: Synthetic oligonucleotide
  Antisense strand to SEQ ID NO: 1715385
aacugcagcaauaucuucc

SEQ ID NO: 1715387 - RNA, 19 nt, Artificial Sequence
  Description of Artificial Sequence: Synthetic oligonucleotide
  Sense strand starting at position 255 of SEQ ID NO: 1562013
gcaggaagacucggugaca

SEQ ID NO: 1715388 - RNA, 19 nt, Artificial Sequence
  Description of Artificial Sequence: Synthetic oligonucleotide
  Antisense strand to SEQ ID NO: 1715387
ugucaccgagucuuccugc

SEQ ID NO: 1715389 - RNA, 19 nt, Artificial Sequence
  Description of Artificial Sequence: Synthetic oligonucleotide
  Sense strand starting at position 523 of SEQ ID NO: 1562013
gacugcccucagggaaaua

SEQ ID NO: 1715390 - RNA, 19 nt, Artificial Sequence
  Description of Artificial Sequence: Synthetic oligonucleotide
  Antisense strand to SEQ ID NO: 1715389
uauuucccugagggcaguc

SEQ ID NO: 1715391 - RNA, 19 nt, Artificial Sequence
  Description of Artificial Sequence: Synthetic oligonucleotide
  Sense strand starting at position 864 of SEQ ID NO: 1562013
cuccaugcucuggaacaaa

SEQ ID NO: 1715392 - RNA, 19 nt, Artificial Sequence
  Description of Artificial Sequence: Synthetic oligonucleotide
  Antisense strand to SEQ ID NO: 1715391
uuuguuccagagcauggag

SEQ ID NO: 1715393 - RNA, 19 nt, Artificial Sequence
  Description of Artificial Sequence: Synthetic oligonucleotide
  Sense strand starting at position 1762 of SEQ ID NO: 1562013
cuaucuucugaggagcaca

SEQ ID NO: 1715394 - RNA, 19 nt, Artificial Sequence
  Description of Artificial Sequence: Synthetic oligonucleotide
  Antisense strand to SEQ ID NO: 1715393
ugugcuccucagaagauag

SEQ ID NO: 1715395 - RNA, 19 nt, Artificial Sequence
  Description of Artificial Sequence: Synthetic oligonucleotide
  Sense strand starting at position 2385 of SEQ ID NO: 1562013
cucaguguggccgaauauu

SEQ ID NO: 1715396 - RNA, 19 nt, Artificial Sequence
  Description of Artificial Sequence: Synthetic oligonucleotide
  Antisense strand to SEQ ID NO: 1715395
aauauucggccacacugag

SEQ ID NO: 1715397 - RNA, 19 nt, Artificial Sequence
  Description of Artificial Sequence: Synthetic oligonucleotide
  Sense strand starting at position 2437 of SEQ ID NO: 1562013
aaggaagucgcuuguugaa

SEQ ID NO: 1715398 - RNA, 19 nt, Artificial Sequence
  Description of Artificial Sequence: Synthetic oligonucleotide
  Antisense strand to SEQ ID NO: 1715397
uucaacaagcgacuuccuu

SEQ ID NO: 1715399 - RNA, 19 nt, Artificial Sequence
  Description of Artificial Sequence: Synthetic oligonucleotide
  Sense strand starting at position 2439 of SEQ ID NO: 1562013
ggaagucgcuuguugaaag

SEQ ID NO: 1715400 - RNA, 19 nt, Artificial Sequence
  Description of Artificial Sequence: Synthetic oligonucleotide
  Antisense strand to SEQ ID NO: 1715399
cuuucaacaagcgacuucc

SEQ ID NO: 1715401 - RNA, 19 nt, Artificial Sequence
  Description of Artificial Sequence: Synthetic oligonucleotide
  Sense strand starting at position 2518 of SEQ ID NO: 1562013
ccacguaguccugauucuu

SEQ ID NO: 1715402 - RNA, 19 nt, Artificial Sequence
  Description of Artificial Sequence: Synthetic oligonucleotide
  Antisense strand to SEQ ID NO: 1715401
aagaaucaggacuacgugg

SEQ ID NO: 1715403 - RNA, 19 nt, Artificial Sequence
  Description of Artificial Sequence: Synthetic oligonucleotide
  Sense strand starting at position 2524 of SEQ ID NO: 1562013
aguccugauucuuuaagug

SEQ ID NO: 1715404 - RNA, 19 nt, Artificial Sequence
  Description of Artificial Sequence: Synthetic oligonucleotide
  Antisense strand to SEQ ID NO: 1715403
cacuuaaagaaucaggacu

SEQ ID NO: 1715405 - RNA, 19 nt, Artificial Sequence
  Description of Artificial Sequence: Synthetic oligonucleotide
  Sense strand starting at position 2532 of SEQ ID NO: 1562013
uucuuuaaguguccacaua

SEQ ID NO: 1715406 - RNA, 19 nt, Artificial Sequence
  Description of Artificial Sequence: Synthetic oligonucleotide
  Antisense strand to SEQ ID NO: 1715405
uauguggacacuuaaagaa

SEQ ID NO: 1715407 - RNA, 19 nt, Artificial Sequence
  Description of Artificial Sequence: Synthetic oligonucleotide
  Sense strand starting at position 2533 of SEQ ID NO: 1562013
ucuuuaaguguccacauau

SEQ ID NO: 1715408 - RNA, 19 nt, Artificial Sequence
  Description of Artificial Sequence: Synthetic oligonucleotide
  Antisense strand to SEQ ID NO: 1715407
auauguggacacuuaaaga

SEQ ID NO: 1715409 - RNA, 19 nt, Artificial Sequence
  Description of Artificial Sequence: Synthetic oligonucleotide
  Sense strand starting at position 2542 of SEQ ID NO: 1562013
guccacauauuccuguaau

SEQ ID NO: 1715410 - RNA, 19 nt, Artificial Sequence
  Description of Artificial Sequence: Synthetic oligonucleotide
  Antisense strand to SEQ ID NO: 1715409
auuacaggaauauguggac

SEQ ID NO: 1715411 - RNA, 19 nt, Artificial Sequence
  Description of Artificial Sequence: Synthetic oligonucleotide
  Sense strand starting at position 2554 of SEQ ID NO: 1562013
cuguaaugccuggaguuuc

SEQ ID NO: 1715412 - RNA, 19 nt, Artificial Sequence
  Description of Artificial Sequence: Synthetic oligonucleotide
  Antisense strand to SEQ ID NO: 1715411
gaaacuccaggcauuacag

SEQ ID NO: 1715413 - RNA, 19 nt, Artificial Sequence
  Description of Artificial Sequence: Synthetic oligonucleotide
  Sense strand starting at position 2572 of SEQ ID NO: 1562013
caguaauuagcagggacuu

SEQ ID NO: 1715414 - RNA, 19 nt, Artificial Sequence
  Description of Artificial Sequence: Synthetic oligonucleotide
  Antisense strand to SEQ ID NO: 1715413
aagucccugcuaauuacug

SEQ ID NO: 1715415 - RNA, 19 nt, Artificial Sequence
  Description of Artificial Sequence: Synthetic oligonucleotide
  Sense strand starting at position 2573 of SEQ ID NO: 1562013
aguaauuagcagggacuua

SEQ ID NO: 1715416 - RNA, 19 nt, Artificial Sequence
  Description of Artificial Sequence: Synthetic oligonucleotide
  Antisense strand to SEQ ID NO: 1715415
uaagucccugcuaauuacu

SEQ ID NO: 1715417 - RNA, 19 nt, Artificial Sequence
  Description of Artificial Sequence: Synthetic oligonucleotide
  Sense strand starting at position 2584 of SEQ ID NO: 1562013
gggacuuaguguguucaga

SEQ ID NO: 1715418 - RNA, 19 nt, Artificial Sequence
  Description of Artificial Sequence: Synthetic oligonucleotide
  Antisense strand to SEQ ID NO: 1715417
ucugaacacacuaaguccc

SEQ ID NO: 1715419 - RNA, 19 nt, Artificial Sequence
  Description of Artificial Sequence: Synthetic oligonucleotide
  Sense strand starting at position 2667 of SEQ ID NO: 1562013
gcuggaauuugggaaguga

SEQ ID NO: 1715420 - RNA, 19 nt, Artificial Sequence
  Description of Artificial Sequence: Synthetic oligonucleotide
  Antisense strand to SEQ ID NO: 1715419
ucacuucccaaauuccagc

SEQ ID NO: 1715421 - RNA, 19 nt, Artificial Sequence
  Description of Artificial Sequence: Synthetic oligonucleotide
  Sense strand starting at position 2826 of SEQ ID NO: 1562013
aggcuuguucuggagaagu

SEQ ID NO: 1715422 - RNA, 19 nt, Artificial Sequence
  Description of Artificial Sequence: Synthetic oligonucleotide
  Antisense strand to SEQ ID NO: 1715421
acuucuccagaacaagccu

SEQ ID NO: 1715423 - RNA, 19 nt, Artificial Sequence
  Description of Artificial Sequence: Synthetic oligonucleotide
  Sense strand starting at position 2828 of SEQ ID NO: 1562013
gcuuguucuggagaaguca

SEQ ID NO: 1715424 - RNA, 19 nt, Artificial Sequence
  Description of Artificial Sequence: Synthetic oligonucleotide
  Antisense strand to SEQ ID NO: 1715423
ugacuucuccagaacaagc

SEQ ID NO: 1715425 - RNA, 19 nt, Artificial Sequence
  Description of Artificial Sequence: Synthetic oligonucleotide
  Sense strand starting at position 2871 of SEQ ID NO: 1562013
guccaagcucuuuggagga

SEQ ID NO: 1715426 - RNA, 19 nt, Artificial Sequence
  Description of Artificial Sequence: Synthetic oligonucleotide
  Antisense strand to SEQ ID NO: 1715425
uccuccaaagagcuuggac

SEQ ID NO: 1715427 - RNA, 19 nt, Artificial Sequence
  Description of Artificial Sequence: Synthetic oligonucleotide
  Sense strand starting at position 3393 of SEQ ID NO: 1562013
gcuagucuggcugggagaa

SEQ ID NO: 1715428 - RNA, 19 nt, Artificial Sequence
  Description of Artificial Sequence: Synthetic oligonucleotide
  Antisense strand to SEQ ID NO: 1715427
uucucccagccagacuagc

SEQ ID NO: 1715429 - RNA, 19 nt, Artificial Sequence
  Description of Artificial Sequence: Synthetic oligonucleotide
  Sense strand starting at position 3406 of SEQ ID NO: 1562013
ggagaagucacacguugau

SEQ ID NO: 1715430 - RNA, 19 nt, Artificial Sequence
  Description of Artificial Sequence: Synthetic oligonucleotide
  Antisense strand to SEQ ID NO: 1715429
aucaacgugugacuucucc

SEQ ID NO: 1715431 - RNA, 19 nt, Artificial Sequence
  Description of Artificial Sequence: Synthetic oligonucleotide
  Sense strand starting at position 3416 of SEQ ID NO: 1562013
cacguugauugucuuggaa

SEQ ID NO: 1715432 - RNA, 19 nt, Artificial Sequence
  Description of Artificial Sequence: Synthetic oligonucleotide
  Antisense strand to SEQ ID NO: 1715431
uuccaagacaaucaacgug

SEQ ID NO: 1715433 - RNA, 19 nt, Artificial Sequence
  Description of Artificial Sequence: Synthetic oligonucleotide
  Sense strand starting at position 3419 of SEQ ID NO: 1562013
guugauugucuuggaagug

SEQ ID NO: 1715434 - RNA, 19 nt, Artificial Sequence
  Description of Artificial Sequence: Synthetic oligonucleotide
  Antisense strand to SEQ ID NO: 1715433
cacuuccaagacaaucaac

SEQ ID NO: 1715435 - RNA, 19 nt, Artificial Sequence
  Description of Artificial Sequence: Synthetic oligonucleotide
  Sense strand starting at position 3424 of SEQ ID NO: 1562013
uugucuuggaagugagaug

SEQ ID NO: 1715436 - RNA, 19 nt, Artificial Sequence
  Description of Artificial Sequence: Synthetic oligonucleotide
  Antisense strand to SEQ ID NO: 1715435
caucucacuuccaagacaa

SEQ ID NO: 1715437 - RNA, 19 nt, Artificial Sequence
  Description of Artificial Sequence: Synthetic oligonucleotide
  Sense strand starting at position 3429 of SEQ ID NO: 1562013
uuggaagugagauggcauu

SEQ ID NO: 1715438 - RNA, 19 nt, Artificial Sequence
  Description of Artificial Sequence: Synthetic oligonucleotide
  Antisense strand to SEQ ID NO: 1715437
aaugccaucucacuuccaa

SEQ ID NO: 1715439 - RNA, 19 nt, Artificial Sequence
  Description of Artificial Sequence: Synthetic oligonucleotide
  Sense strand starting at position 3588 of SEQ ID NO: 1562013
gauggugucaccugggauu

SEQ ID NO: 1715440 - RNA, 19 nt, Artificial Sequence
  Description of Artificial Sequence: Synthetic oligonucleotide
  Antisense strand to SEQ ID NO: 1715439
aaucccaggugacaccauc

SEQ ID NO: 1715441 - RNA, 19 nt, Artificial Sequence
  Description of Artificial Sequence: Synthetic oligonucleotide
  Sense strand starting at position 3590 of SEQ ID NO: 1562013
uggugucaccugggauuga

SEQ ID NO: 1715442 - RNA, 19 nt, Artificial Sequence
  Description of Artificial Sequence: Synthetic oligonucleotide
  Antisense strand to SEQ ID NO: 1715441
ucaaucccaggugacacca

SEQ ID NO: 1715443 - RNA, 19 nt, Artificial Sequence
  Description of Artificial Sequence: Synthetic oligonucleotide
  Sense strand starting at position 3594 of SEQ ID NO: 1562013
gucaccugggauugacuua

SEQ ID NO: 1715444 - RNA, 19 nt, Artificial Sequence
  Description of Artificial Sequence: Synthetic oligonucleotide
  Antisense strand to SEQ ID NO: 1715443
uaagucaaucccaggugac

SEQ ID NO: 1715445 - RNA, 19 nt, Artificial Sequence
  Description of Artificial Sequence: Synthetic oligonucleotide
  Sense strand starting at position 3599 of SEQ ID NO: 1562013
cugggauugacuuaguggu

SEQ ID NO: 1715446 - RNA, 19 nt, Artificial Sequence
  Description of Artificial Sequence: Synthetic oligonucleotide
  Antisense strand to SEQ ID NO: 1715445
accacuaagucaaucccag

SEQ ID NO: 1715447 - RNA, 19 nt, Artificial Sequence
  Description of Artificial Sequence: Synthetic oligonucleotide
  Sense strand starting at position 3601 of SEQ ID NO: 1562013
gggauugacuuaguggucu

SEQ ID NO: 1715448 - RNA, 19 nt, Artificial Sequence
  Description of Artificial Sequence: Synthetic oligonucleotide
  Antisense strand to SEQ ID NO: 1715447
agaccacuaagucaauccc

SEQ ID NO: 1715449 - RNA, 19 nt, Artificial Sequence
  Description of Artificial Sequence: Synthetic oligonucleotide
  Sense strand starting at position 3623 of SEQ ID NO: 1562013
gcgcuaguuccgaaguuga

SEQ ID NO: 1715450 - RNA, 19 nt, Artificial Sequence
  Description of Artificial Sequence: Synthetic oligonucleotide
  Antisense strand to SEQ ID NO: 1715449
ucaacuucggaacuagcgc

SEQ ID NO: 1715451 - RNA, 19 nt, Artificial Sequence
  Description of Artificial Sequence: Synthetic oligonucleotide
  Sense strand starting at position 3634 of SEQ ID NO: 1562013
gaaguugauucugucugga

SEQ ID NO: 1715452 - RNA, 19 nt, Artificial Sequence
  Description of Artificial Sequence: Synthetic oligonucleotide
  Antisense strand to SEQ ID NO: 1715451
uccagacagaaucaacuuc

SEQ ID NO: 1715453 - RNA, 19 nt, Artificial Sequence
  Description of Artificial Sequence: Synthetic oligonucleotide
  Sense strand starting at position 3636 of SEQ ID NO: 1562013
aguugauucugucuggaga

SEQ ID NO: 1715454 - RNA, 19 nt, Artificial Sequence
  Description of Artificial Sequence: Synthetic oligonucleotide
  Antisense strand to SEQ ID NO: 1715453
ucuccagacagaaucaacu

SEQ ID NO: 1715455 - RNA, 19 nt, Artificial Sequence
  Description of Artificial Sequence: Synthetic oligonucleotide
  Sense strand starting at position 3637 of SEQ ID NO: 1562013
guugauucugucuggagag

SEQ ID NO: 1715456 - RNA, 19 nt, Artificial Sequence
  Description of Artificial Sequence: Synthetic oligonucleotide
  Antisense strand to SEQ ID NO: 1715455
cucuccagacagaaucaac

SEQ ID NO: 1715457 - RNA, 19 nt, Artificial Sequence
  Description of Artificial Sequence: Synthetic oligonucleotide
  Sense strand starting at position 3639 of SEQ ID NO: 1562013
ugauucugucuggagagcu

SEQ ID NO: 1715458 - RNA, 19 nt, Artificial Sequence
  Description of Artificial Sequence: Synthetic oligonucleotide
  Antisense strand to SEQ ID NO: 1715457
agcucuccagacagaauca

SEQ ID NO: 1715459 - RNA, 19 nt, Artificial Sequence
  Description of Artificial Sequence: Synthetic oligonucleotide
  Sense strand starting at position 3710 of SEQ ID NO: 1562013
gugggacauagcuguguga

SEQ ID NO: 1715460 - RNA, 19 nt, Artificial Sequence
  Description of Artificial Sequence: Synthetic oligonucleotide
  Antisense strand to SEQ ID NO: 1715459
ucacacagcuaugucccac

SEQ ID NO: 1715461 - RNA, 19 nt, Artificial Sequence
  Description of Artificial Sequence: Synthetic oligonucleotide
  Sense strand starting at position 3808 of SEQ ID NO: 1562013
gugugauugcgaggaauga

SEQ ID NO: 1715462 - RNA, 19 nt, Artificial Sequence
  Description of Artificial Sequence: Synthetic oligonucleotide
  Antisense strand to SEQ ID NO: 1715461
ucauuccucgcaaucacac

SEQ ID NO: 1715463 - RNA, 19 nt, Artificial Sequence
  Description of Artificial Sequence: Synthetic oligonucleotide
  Sense strand starting at position 3809 of SEQ ID NO: 1562013
ugugauugcgaggaaugaa

SEQ ID NO: 1715464 - RNA, 19 nt, Artificial Sequence
  Description of Artificial Sequence: Synthetic oligonucleotide
  Antisense strand to SEQ ID NO: 1715463
uucauuccucgcaaucaca

SEQ ID NO: 1715465 - RNA, 19 nt, Artificial Sequence
  Description of Artificial Sequence: Synthetic oligonucleotide
  Sense strand starting at position 3863 of SEQ ID NO: 1562013
ggauacaucuuaguuguua

SEQ ID NO: 1715466 - RNA, 19 nt, Artificial Sequence
  Description of Artificial Sequence: Synthetic oligonucleotide
  Antisense strand to SEQ ID NO: 1715465
uaacaacuaagauguaucc

SEQ ID NO: 1715467 - RNA, 19 nt, Artificial Sequence
  Description of Artificial Sequence: Synthetic oligonucleotide
  Sense strand starting at position 840 of SEQ ID NO: 1562014
cuaucuucugaggagcaca

SEQ ID NO: 1715468 - RNA, 19 nt, Artificial Sequence
  Description of Artificial Sequence: Synthetic oligonucleotide
  Antisense strand to SEQ ID NO: 1715467
ugugcuccucagaagauag

SEQ ID NO: 1715469 - RNA, 19 nt, Artificial Sequence
  Description of Artificial Sequence: Synthetic oligonucleotide
  Sense strand starting at position 1596 of SEQ ID NO: 1562014
ccacguaguccugauucuu

SEQ ID NO: 1715470 - RNA, 19 nt, Artificial Sequence
  Description of Artificial Sequence: Synthetic oligonucleotide
  Antisense strand to SEQ ID NO: 1715469
aagaaucaggacuacgugg

SEQ ID NO: 1715471 - RNA, 19 nt, Artificial Sequence
  Description of Artificial Sequence: Synthetic oligonucleotide
  Sense strand starting at position 1602 of SEQ ID NO: 1562014
aguccugauucuuuaagug

SEQ ID NO: 1715472 - RNA, 19 nt, Artificial Sequence
  Description of Artificial Sequence: Synthetic oligonucleotide
  Antisense strand to SEQ ID NO: 1715471
cacuuaaagaaucaggacu

SEQ ID NO: 1715473 - RNA, 19 nt, Artificial Sequence
  Description of Artificial Sequence: Synthetic oligonucleotide
  Sense strand starting at position 1610 of SEQ ID NO: 1562014
uucuuuaaguguccacaua

SEQ ID NO: 1715474 - RNA, 19 nt, Artificial Sequence
  Description of Artificial Sequence: Synthetic oligonucleotide
  Antisense strand to SEQ ID NO: 1715473
uauguggacacuuaaagaa

SEQ ID NO: 1715475 - RNA, 19 nt, Artificial Sequence
  Description of Artificial Sequence: Synthetic oligonucleotide
  Sense strand starting at position 1611 of SEQ ID NO: 1562014
ucuuuaaguguccacauau

SEQ ID NO: 1715476 - RNA, 19 nt, Artificial Sequence
  Description of Artificial Sequence: Synthetic oligonucleotide
  Antisense strand to SEQ ID NO: 1715475
auauguggacacuuaaaga

SEQ ID NO: 1715477 - RNA, 19 nt, Artificial Sequence
  Description of Artificial Sequence: Synthetic oligonucleotide
  Sense strand starting at position 1620 of SEQ ID NO: 1562014
guccacauauuccuguaau

SEQ ID NO: 1715478 - RNA, 19 nt, Artificial Sequence
  Description of Artificial Sequence: Synthetic oligonucleotide
  Antisense strand to SEQ ID NO: 1715477
auuacaggaauauguggac

SEQ ID NO: 1715479 - RNA, 19 nt, Artificial Sequence
  Description of Artificial Sequence: Synthetic oligonucleotide
  Sense strand starting at position 1632 of SEQ ID NO: 1562014
cuguaaugccuggaguuuc

SEQ ID NO: 1715480 - RNA, 19 nt, Artificial Sequence
  Description of Artificial Sequence: Synthetic oligonucleotide
  Antisense strand to SEQ ID NO: 1715479
gaaacuccaggcauuacag

SEQ ID NO: 1715481 - RNA, 19 nt, Artificial Sequence
  Description of Artificial Sequence: Synthetic oligonucleotide
  Sense strand starting at position 1650 of SEQ ID NO: 1562014
caguaauuagcagggacuu

SEQ ID NO: 1715482 - RNA, 19 nt, Artificial Sequence
  Description of Artificial Sequence: Synthetic oligonucleotide
  Antisense strand to SEQ ID NO: 1715481
aagucccugcuaauuacug

SEQ ID NO: 1715483 - RNA, 19 nt, Artificial Sequence
  Description of Artificial Sequence: Synthetic oligonucleotide
  Sense strand starting at position 1651 of SEQ ID NO: 1562014
aguaauuagcagggacuua

SEQ ID NO: 1715484 - RNA, 19 nt, Artificial Sequence
  Description of Artificial Sequence: Synthetic oligonucleotide
  Antisense strand to SEQ ID NO: 1715483
uaagucccugcuaauuacu

SEQ ID NO: 1715485 - RNA, 19 nt, Artificial Sequence
  Description of Artificial Sequence: Synthetic oligonucleotide
  Sense strand starting at position 1662 of SEQ ID NO: 1562014
gggacuuaguguguucaga

SEQ ID NO: 1715486 - RNA, 19 nt, Artificial Sequence
  Description of Artificial Sequence: Synthetic oligonucleotide
  Antisense strand to SEQ ID NO: 1715485
ucugaacacacuaaguccc

SEQ ID NO: 1715487 - RNA, 19 nt, Artificial Sequence
  Description of Artificial Sequence: Synthetic oligonucleotide
  Sense strand starting at position 1745 of SEQ ID NO: 1562014
gcuggaauuugggaaguga

SEQ ID NO: 1715488 - RNA, 19 nt, Artificial Sequence
  Description of Artificial Sequence: Synthetic oligonucleotide
  Antisense strand to SEQ ID NO: 1715487
ucacuucccaaauuccagc

SEQ ID NO: 1715489 - RNA, 19 nt, Artificial Sequence
  Description of Artificial Sequence: Synthetic oligonucleotide
  Sense strand starting at position 1904 of SEQ ID NO: 1562014
aggcuuguucuggagaagu

SEQ ID NO: 1715490 - RNA, 19 nt, Artificial Sequence
  Description of Artificial Sequence: Synthetic oligonucleotide
  Antisense strand to SEQ ID NO: 1715489
acuucuccagaacaagccu

SEQ ID NO: 1715491 - RNA, 19 nt, Artificial Sequence
  Description of Artificial Sequence: Synthetic oligonucleotide
  Sense strand starting at position 1906 of SEQ ID NO: 1562014
gcuuguucuggagaaguca

SEQ ID NO: 1715492 - RNA, 19 nt, Artificial Sequence
  Description of Artificial Sequence: Synthetic oligonucleotide
  Antisense strand to SEQ ID NO: 1715491
ugacuucuccagaacaagc

SEQ ID NO: 1715493 - RNA, 19 nt, Artificial Sequence
  Description of Artificial Sequence: Synthetic oligonucleotide
  Sense strand starting at position 1949 of SEQ ID NO: 1562014
guccaagcucuuuggagga

SEQ ID NO: 1715494 - RNA, 19 nt, Artificial Sequence
  Description of Artificial Sequence: Synthetic oligonucleotide
  Antisense strand to SEQ ID NO: 1715493
uccuccaaagagcuuggac

SEQ ID NO: 1715495 - RNA, 19 nt, Artificial Sequence
  Description of Artificial Sequence: Synthetic oligonucleotide
  Sense strand starting at position 2471 of SEQ ID NO: 1562014
gcuagucuggcugggagaa

SEQ ID NO: 1715496 - RNA, 19 nt, Artificial Sequence
  Description of Artificial Sequence: Synthetic oligonucleotide
  Antisense strand to SEQ ID NO: 1715495
uucucccagccagacuagc

SEQ ID NO: 1715497 - RNA, 19 nt, Artificial Sequence
  Description of Artificial Sequence: Synthetic oligonucleotide
  Sense strand starting at position 2484 of SEQ ID NO: 1562014
ggagaagucacacguugau

SEQ ID NO: 1715498 - RNA, 19 nt, Artificial Sequence
  Description of Artificial Sequence: Synthetic oligonucleotide
  Antisense strand to SEQ ID NO: 1715497
aucaacgugugacuucucc

SEQ ID NO: 1715499 - RNA, 19 nt, Artificial Sequence
  Description of Artificial Sequence: Synthetic oligonucleotide
  Sense strand starting at position 2494 of SEQ ID NO: 1562014
cacguugauugucuuggaa

SEQ ID NO: 1715500 - RNA, 19 nt, Artificial Sequence
  Description of Artificial Sequence: Synthetic oligonucleotide
  Antisense strand to SEQ ID NO: 1715499
uuccaagacaaucaacgug

SEQ ID NO: 1715501 - RNA, 19 nt, Artificial Sequence
  Description of Artificial Sequence: Synthetic oligonucleotide
  Sense strand starting at position 2497 of SEQ ID NO: 1562014
guugauugucuuggaagug

SEQ ID NO: 1715502 - RNA, 19 nt, Artificial Sequence
  Description of Artificial Sequence: Synthetic oligonucleotide
  Antisense strand to SEQ ID NO: 1715501
cacuuccaagacaaucaac

SEQ ID NO: 1715503 - RNA, 19 nt, Artificial Sequence
  Description of Artificial Sequence: Synthetic oligonucleotide
  Sense strand starting at position 2502 of SEQ ID NO: 1562014
uugucuuggaagugagaug

SEQ ID NO: 1715504 - RNA, 19 nt, Artificial Sequence
  Description of Artificial Sequence: Synthetic oligonucleotide
  Antisense strand to SEQ ID NO: 1715503
caucucacuuccaagacaa

SEQ ID NO: 1715505 - RNA, 19 nt, Artificial Sequence
  Description of Artificial Sequence: Synthetic oligonucleotide
  Sense strand starting at position 2507 of SEQ ID NO: 1562014
uuggaagugagauggcauu

SEQ ID NO: 1715506 - RNA, 19 nt, Artificial Sequence
  Description of Artificial Sequence: Synthetic oligonucleotide
  Antisense strand to SEQ ID NO: 1715505
aaugccaucucacuuccaa

SEQ ID NO: 1715507 - RNA, 19 nt, Artificial Sequence
  Description of Artificial Sequence: Synthetic oligonucleotide
  Sense strand starting at position 2666 of SEQ ID NO: 1562014
gauggugucaccugggauu

SEQ ID NO: 1715508 - RNA, 19 nt, Artificial Sequence
  Description of Artificial Sequence: Synthetic oligonucleotide
  Antisense strand to SEQ ID NO: 1715507
aaucccaggugacaccauc

SEQ ID NO: 1715509 - RNA, 19 nt, Artificial Sequence
  Description of Artificial Sequence: Synthetic oligonucleotide
  Sense strand starting at position 2668 of SEQ ID NO: 1562014
uggugucaccugggauuga

SEQ ID NO: 1715510 - RNA, 19 nt, Artificial Sequence
  Description of Artificial Sequence: Synthetic oligonucleotide
  Antisense strand to SEQ ID NO: 1715509
ucaaucccaggugacacca

SEQ ID NO: 1715511 - RNA, 19 nt, Artificial Sequence
  Description of Artificial Sequence: Synthetic oligonucleotide
  Sense strand starting at position 2672 of SEQ ID NO: 1562014
gucaccugggauugacuua

SEQ ID NO: 1715512 - RNA, 19 nt, Artificial Sequence
  Description of Artificial Sequence: Synthetic oligonucleotide
  Antisense strand to SEQ ID NO: 1715511
uaagucaaucccaggugac

SEQ ID NO: 1715513 - RNA, 19 nt, Artificial Sequence
  Description of Artificial Sequence: Synthetic oligonucleotide
  Sense strand starting at position 2677 of SEQ ID NO: 1562014
cugggauugacuuaguggu

SEQ ID NO: 1715514 - RNA, 19 nt, Artificial Sequence
  Description of Artificial Sequence: Synthetic oligonucleotide
  Antisense strand to SEQ ID NO: 1715513
accacuaagucaaucccag

SEQ ID NO: 1715515 - RNA, 19 nt, Artificial Sequence
  Description of Artificial Sequence: Synthetic oligonucleotide
  Sense strand starting at position 2679 of SEQ ID NO: 1562014
gggauugacuuaguggucu

SEQ ID NO: 1715516 - RNA, 19 nt, Artificial Sequence
  Description of Artificial Sequence: Synthetic oligonucleotide
  Antisense strand to SEQ ID NO: 1715515
agaccacuaagucaauccc

SEQ ID NO: 1715517 - RNA, 19 nt, Artificial Sequence
  Description of Artificial Sequence: Synthetic oligonucleotide
  Sense strand starting at position 2701 of SEQ ID NO: 1562014
gcgcuaguuccgaaguuga

SEQ ID NO: 1715518 - RNA, 19 nt, Artificial Sequence
  Description of Artificial Sequence: Synthetic oligonucleotide
  Antisense strand to SEQ ID NO: 1715517
ucaacuucggaacuagcgc

SEQ ID NO: 1715519 - RNA, 19 nt, Artificial Sequence
  Description of Artificial Sequence: Synthetic oligonucleotide
  Sense strand starting at position 2712 of SEQ ID NO: 1562014
gaaguugauucugucugga

SEQ ID NO: 1715520 - RNA, 19 nt, Artificial Sequence
  Description of Artificial Sequence: Synthetic oligonucleotide
  Antisense strand to SEQ ID NO: 1715519
uccagacagaaucaacuuc

SEQ ID NO: 1715521 - RNA, 19 nt, Artificial Sequence
  Description of Artificial Sequence: Synthetic oligonucleotide
  Sense strand starting at position 2714 of SEQ ID NO: 1562014
aguugauucugucuggaga

SEQ ID NO: 1715522 - RNA, 19 nt, Artificial Sequence
  Description of Artificial Sequence: Synthetic oligonucleotide
  Antisense strand to SEQ ID NO: 1715521
ucuccagacagaaucaacu

SEQ ID NO: 1715523 - RNA, 19 nt, Artificial Sequence
  Description of Artificial Sequence: Synthetic oligonucleotide
  Sense strand starting at position 2715 of SEQ ID NO: 1562014
guugauucugucuggagag

SEQ ID NO: 1715524 - RNA, 19 nt, Artificial Sequence
  Description of Artificial Sequence: Synthetic oligonucleotide
  Antisense strand to SEQ ID NO: 1715523
cucuccagacagaaucaac

SEQ ID NO: 1715525 - RNA, 19 nt, Artificial Sequence
  Description of Artificial Sequence: Synthetic oligonucleotide
  Sense strand starting at position 2717 of SEQ ID NO: 1562014
ugauucugucuggagagcu

SEQ ID NO: 1715526 - RNA, 19 nt, Artificial Sequence
  Description of Artificial Sequence: Synthetic oligonucleotide
  Antisense strand to SEQ ID NO: 1715525
agcucuccagacagaauca

SEQ ID NO: 1715527 - RNA, 19 nt, Artificial Sequence
  Description of Artificial Sequence: Synthetic oligonucleotide
  Sense strand starting at position 2886 of SEQ ID NO: 1562014
gugugauugcgaggaauga

SEQ ID NO: 1715528 - RNA, 19 nt, Artificial Sequence
  Description of Artificial Sequence: Synthetic oligonucleotide
  Antisense strand to SEQ ID NO: 1715527
ucauuccucgcaaucacac

SEQ ID NO: 1715529 - RNA, 19 nt, Artificial Sequence
  Description of Artificial Sequence: Synthetic oligonucleotide
  Sense strand starting at position 2887 of SEQ ID NO: 1562014
ugugauugcgaggaaugaa

SEQ ID NO: 1715530 - RNA, 19 nt, Artificial Sequence
  Description of Artificial Sequence: Synthetic oligonucleotide
  Antisense strand to SEQ ID NO: 1715529
uucauuccucgcaaucaca

SEQ ID NO: 1715531 - RNA, 19 nt, Artificial Sequence
  Description of Artificial Sequence: Synthetic oligonucleotide
  Sense strand starting at position 2941 of SEQ ID NO: 1562014
ggauacaucuuaguuguua

SEQ ID NO: 1715532 - RNA, 19 nt, Artificial Sequence
  Description of Artificial Sequence: Synthetic oligonucleotide
  Antisense strand to SEQ ID NO: 1715531
uaacaacuaagauguaucc

SEQ ID NO: 1715533 - RNA, 19 nt, Artificial Sequence
  Description of Artificial Sequence: Synthetic oligonucleotide
  Sense strand starting at position 3082 of SEQ ID NO: 1562014
ggagaauugcuuuggaagg

SEQ ID NO: 1715534 - RNA, 19 nt, Artificial Sequence
  Description of Artificial Sequence: Synthetic oligonucleotide
  Antisense strand to SEQ ID NO: 1715533
ccuuccaaagcaauucucc

SEQ ID NO: 1715535 - RNA, 19 nt, Artificial Sequence
  Description of Artificial Sequence: Synthetic oligonucleotide
  Sense strand starting at position 3206 of SEQ ID NO: 1562014
gaauaaugauuaguguaag

SEQ ID NO: 1715536 - RNA, 19 nt, Artificial Sequence
  Description of Artificial Sequence: Synthetic oligonucleotide
  Antisense strand to SEQ ID NO: 1715535
cuuacacuaaucauuauuc

SEQ ID NO: 1715537 - RNA, 19 nt, Artificial Sequence
  Description of Artificial Sequence: Synthetic oligonucleotide
  Sense strand starting at position 3212 of SEQ ID NO: 1562014
ugauuaguguaaguauauc

SEQ ID NO: 1715538 - RNA, 19 nt, Artificial Sequence
  Description of Artificial Sequence: Synthetic oligonucleotide
  Antisense strand to SEQ ID NO: 1715537
gauauacuuacacuaauca

SEQ ID NO: 1715539 - RNA, 19 nt, Artificial Sequence
  Description of Artificial Sequence: Synthetic oligonucleotide
  Sense strand starting at position 3218 of SEQ ID NO: 1562014
guguaaguauaucucaauu

SEQ ID NO: 1715540 - RNA, 19 nt, Artificial Sequence
  Description of Artificial Sequence: Synthetic oligonucleotide
  Antisense strand to SEQ ID NO: 1715539
aauugagauauacuuacac

SEQ ID NO: 1715541 - RNA, 19 nt, Artificial Sequence
  Description of Artificial Sequence: Synthetic oligonucleotide
  Sense strand starting at position 3293 of SEQ ID NO: 1562014
gacugugaugcuggcauuu

SEQ ID NO: 1715542 - RNA, 19 nt, Artificial Sequence
  Description of Artificial Sequence: Synthetic oligonucleotide
  Antisense strand to SEQ ID NO: 1715541
aaaugccagcaucacaguc

SEQ ID NO: 1715543 - RNA, 19 nt, Artificial Sequence
  Description of Artificial Sequence: Synthetic oligonucleotide
  Sense strand starting at position 3401 of SEQ ID NO: 1562014
guguuaaugggcugaggag

SEQ ID NO: 1715544 - RNA, 19 nt, Artificial Sequence
  Description of Artificial Sequence: Synthetic oligonucleotide
  Antisense strand to SEQ ID NO: 1715543
cuccucagcccauuaacac

SEQ ID NO: 1715545 - RNA, 19 nt, Artificial Sequence
  Description of Artificial Sequence: Synthetic oligonucleotide
  Sense strand starting at position 3473 of SEQ ID NO: 1562014
gccugagucccugggaaga

SEQ ID NO: 1715546 - RNA, 19 nt, Artificial Sequence
  Description of Artificial Sequence: Synthetic oligonucleotide
  Antisense strand to SEQ ID NO: 1715545
ucuucccagggacucaggc

SEQ ID NO: 1715547 - RNA, 19 nt, Artificial Sequence
  Description of Artificial Sequence: Synthetic oligonucleotide
  Sense strand starting at position 225 of SEQ ID NO: 1562015
ccaccuuggcucugagcua

SEQ ID NO: 1715548 - RNA, 19 nt, Artificial Sequence
  Description of Artificial Sequence: Synthetic oligonucleotide
  Antisense strand to SEQ ID NO: 1715547
uagcucagagccaaggugg

SEQ ID NO: 1715549 - RNA, 19 nt, Artificial Sequence
  Description of Artificial Sequence: Synthetic oligonucleotide
  Sense strand starting at position 303 of SEQ ID NO: 1562015
gauuccucagccugugaau

SEQ ID NO: 1715550 - RNA, 19 nt, Artificial Sequence
  Description of Artificial Sequence: Synthetic oligonucleotide
  Antisense strand to SEQ ID NO: 1715549
auucacaggcugaggaauc

SEQ ID NO: 1715551 - RNA, 19 nt, Artificial Sequence
  Description of Artificial Sequence: Synthetic oligonucleotide
  Sense strand starting at position 312 of SEQ ID NO: 1562015
gccugugaaugccucagaa

SEQ ID NO: 1715552 - RNA, 19 nt, Artificial Sequence
  Description of Artificial Sequence: Synthetic oligonucleotide
  Antisense strand to SEQ ID NO: 1715551
uucugaggcauucacaggc

SEQ ID NO: 1715553 - RNA, 19 nt, Artificial Sequence
  Description of Artificial Sequence: Synthetic oligonucleotide
  Sense strand starting at position 336 of SEQ ID NO: 1562015
gacccugugugauuccuuu

SEQ ID NO: 1715554 - RNA, 19 nt, Artificial Sequence
  Description of Artificial Sequence: Synthetic oligonucleotide
  Antisense strand to SEQ ID NO: 1715553
aaaggaaucacacaggguc

SEQ ID NO: 1715555 - RNA, 19 nt, Artificial Sequence
  Description of Artificial Sequence: Synthetic oligonucleotide
  Sense strand starting at position 394 of SEQ ID NO: 1562015
auaugauugagaggccaca

SEQ ID NO: 1715556 - RNA, 19 nt, Artificial Sequence
  Description of Artificial Sequence: Synthetic oligonucleotide
  Antisense strand to SEQ ID NO: 1715555
uguggccucucaaucauau

SEQ ID NO: 1715557 - RNA, 19 nt, Artificial Sequence
  Description of Artificial Sequence: Synthetic oligonucleotide
  Sense strand starting at position 536 of SEQ ID NO: 1562015
uguugauaauugccagaaa

SEQ ID NO: 1715558 - RNA, 19 nt, Artificial Sequence
  Description of Artificial Sequence: Synthetic oligonucleotide
  Antisense strand to SEQ ID NO: 1715557
uuucuggcaauuaucaaca

SEQ ID NO: 1715559 - RNA, 19 nt, Artificial Sequence
  Description of Artificial Sequence: Synthetic oligonucleotide
  Sense strand starting at position 596 of SEQ ID NO: 1562015
uuggguagaggucagugaa

SEQ ID NO: 1715560 - RNA, 19 nt, Artificial Sequence
  Description of Artificial Sequence: Synthetic oligonucleotide
  Antisense strand to SEQ ID NO: 1715559
uucacugaccucuacccaa

SEQ ID NO: 1715561 - RNA, 19 nt, Artificial Sequence
  Description of Artificial Sequence: Synthetic oligonucleotide
  Sense strand starting at position 599 of SEQ ID NO: 1562015
gguagaggucagugaaauc

SEQ ID NO: 1715562 - RNA, 19 nt, Artificial Sequence
  Description of Artificial Sequence: Synthetic oligonucleotide
  Antisense strand to SEQ ID NO: 1715561
gauuucacugaccucuacc

SEQ ID NO: 1715563 - RNA, 19 nt, Artificial Sequence
  Description of Artificial Sequence: Synthetic oligonucleotide
  Sense strand starting at position 610 of SEQ ID NO: 1562015
gugaaauccuuucugguga

SEQ ID NO: 1715564 - RNA, 19 nt, Artificial Sequence
  Description of Artificial Sequence: Synthetic oligonucleotide
  Antisense strand to SEQ ID NO: 1715563
ucaccagaaaggauuucac

SEQ ID NO: 1715565 - RNA, 19 nt, Artificial Sequence
  Description of Artificial Sequence: Synthetic oligonucleotide
  Sense strand starting at position 844 of SEQ ID NO: 1562015
gaaagucauggucaggagu

SEQ ID NO: 1715566 - RNA, 19 nt, Artificial Sequence
  Description of Artificial Sequence: Synthetic oligonucleotide
  Antisense strand to SEQ ID NO: 1715565
acuccugaccaugacuuuc

SEQ ID NO: 1715567 - RNA, 19 nt, Artificial Sequence
  Description of Artificial Sequence: Synthetic oligonucleotide
  Sense strand starting at position 937 of SEQ ID NO: 1562015
cuggcauggucuuuagauu

SEQ ID NO: 1715568 - RNA, 19 nt, Artificial Sequence
  Description of Artificial Sequence: Synthetic oligonucleotide
  Antisense strand to SEQ ID NO: 1715567
aaucuaaagaccaugccag

SEQ ID NO: 1715569 - RNA, 19 nt, Artificial Sequence
  Description of Artificial Sequence: Synthetic oligonucleotide
  Sense strand starting at position 938 of SEQ ID NO: 1562015
uggcauggucuuuagauuc

SEQ ID NO: 1715570 - RNA, 19 nt, Artificial Sequence
  Description of Artificial Sequence: Synthetic oligonucleotide
  Antisense strand to SEQ ID NO: 1715569
gaaucuaaagaccaugcca

SEQ ID NO: 1715571 - RNA, 19 nt, Artificial Sequence
  Description of Artificial Sequence: Synthetic oligonucleotide
  Sense strand starting at position 1044 of SEQ ID NO: 1562015
ggguuugcuuguuucgaga

SEQ ID NO: 1715572 - RNA, 19 nt, Artificial Sequence
  Description of Artificial Sequence: Synthetic oligonucleotide
  Antisense strand to SEQ ID NO: 1715571
ucucgaaacaagcaaaccc

SEQ ID NO: 1715573 - RNA, 19 nt, Artificial Sequence
  Description of Artificial Sequence: Synthetic oligonucleotide
  Sense strand starting at position 1128 of SEQ ID NO: 1562015
aauuccucggcucaagaga

SEQ ID NO: 1715574 - RNA, 19 nt, Artificial Sequence
  Description of Artificial Sequence: Synthetic oligonucleotide
  Antisense strand to SEQ ID NO: 1715573
ucucuugagccgaggaauu

SEQ ID NO: 1715575 - RNA, 19 nt, Artificial Sequence
  Description of Artificial Sequence: Synthetic oligonucleotide
  Sense strand starting at position 1177 of SEQ ID NO: 1562015
ccagauaacucccaaggga

SEQ ID NO: 1715576 - RNA, 19 nt, Artificial Sequence
  Description of Artificial Sequence: Synthetic oligonucleotide
  Antisense strand to SEQ ID NO: 1715575
ucccuugggaguuaucugg

SEQ ID NO: 1715577 - RNA, 19 nt, Artificial Sequence
  Description of Artificial Sequence: Synthetic oligonucleotide
  Sense strand starting at position 1410 of SEQ ID NO: 1562015
ggacacggaguuuaucuua

SEQ ID NO: 1715578 - RNA, 19 nt, Artificial Sequence
  Description of Artificial Sequence: Synthetic oligonucleotide
  Antisense strand to SEQ ID NO: 1715577
uaagauaaacuccgugucc

SEQ ID NO: 1715579 - RNA, 19 nt, Artificial Sequence
  Description of Artificial Sequence: Synthetic oligonucleotide
  Sense strand starting at position 1413 of SEQ ID NO: 1562015
cacggaguuuaucuuauuc

SEQ ID NO: 1715580 - RNA, 19 nt, Artificial Sequence
  Description of Artificial Sequence: Synthetic oligonucleotide
  Antisense strand to SEQ ID NO: 1715579
gaauaagauaaacuccgug

SEQ ID NO: 1715581 - RNA, 19 nt, Artificial Sequence
  Description of Artificial Sequence: Synthetic oligonucleotide
  Sense strand starting at position 1436 of SEQ ID NO: 1562015
cgguauucccaguacagag

SEQ ID NO: 1715582 - RNA, 19 nt, Artificial Sequence
  Description of Artificial Sequence: Synthetic oligonucleotide
  Antisense strand to SEQ ID NO: 1715581
cucuguacugggaauaccg

SEQ ID NO: 1715583 - RNA, 19 nt, Artificial Sequence
  Description of Artificial Sequence: Synthetic oligonucleotide
  Sense strand starting at position 1581 of SEQ ID NO: 1562015
uggcuuagaccucaagcaa

SEQ ID NO: 1715584 - RNA, 19 nt, Artificial Sequence
  Description of Artificial Sequence: Synthetic oligonucleotide
  Antisense strand to SEQ ID NO: 1715583
uugcuugaggucuaagcca

SEQ ID NO: 1715585 - RNA, 19 nt, Artificial Sequence
  Description of Artificial Sequence: Synthetic oligonucleotide
  Sense strand starting at position 2734 of SEQ ID NO: 1562015
cuuugaggcuucccucaaa

SEQ ID NO: 1715586 - RNA, 19 nt, Artificial Sequence
  Description of Artificial Sequence: Synthetic oligonucleotide
  Antisense strand to SEQ ID NO: 1715585
uuugagggaagccucaaag

SEQ ID NO: 1715587 - RNA, 19 nt, Artificial Sequence
  Description of Artificial Sequence: Synthetic oligonucleotide
  Sense strand starting at position 2737 of SEQ ID NO: 1562015
ugaggcuucccucaaauau

SEQ ID NO: 1715588 - RNA, 19 nt, Artificial Sequence
  Description of Artificial Sequence: Synthetic oligonucleotide
  Antisense strand to SEQ ID NO: 1715587
auauuugagggaagccuca

SEQ ID NO: 1715589 - RNA, 19 nt, Artificial Sequence
  Description of Artificial Sequence: Synthetic oligonucleotide
  Sense strand starting at position 2748 of SEQ ID NO: 1562015
ucaaauaucugggucugga

SEQ ID NO: 1715590 - RNA, 19 nt, Artificial Sequence
  Description of Artificial Sequence: Synthetic oligonucleotide
  Antisense strand to SEQ ID NO: 1715589
uccagacccagauauuuga

SEQ ID NO: 1715591 - RNA, 19 nt, Artificial Sequence
  Description of Artificial Sequence: Synthetic oligonucleotide
  Sense strand starting at position 2958 of SEQ ID NO: 1562015
ccaggaaaguugcucauga

SEQ ID NO: 1715592 - RNA, 19 nt, Artificial Sequence
  Description of Artificial Sequence: Synthetic oligonucleotide
  Antisense strand to SEQ ID NO: 1715591
ucaugagcaacuuuccugg

SEQ ID NO: 1715593 - RNA, 19 nt, Artificial Sequence
  Description of Artificial Sequence: Synthetic oligonucleotide
  Sense strand starting at position 2959 of SEQ ID NO: 1562015
caggaaaguugcucaugau

SEQ ID NO: 1715594 - RNA, 19 nt, Artificial Sequence
  Description of Artificial Sequence: Synthetic oligonucleotide
  Antisense strand to SEQ ID NO: 1715593
aucaugagcaacuuuccug

SEQ ID NO: 1715595 - RNA, 19 nt, Artificial Sequence
  Description of Artificial Sequence: Synthetic oligonucleotide
  Sense strand starting at position 2960 of SEQ ID NO: 1562015
aggaaaguugcucaugauu

SEQ ID NO: 1715596 - RNA, 19 nt, Artificial Sequence
  Description of Artificial Sequence: Synthetic oligonucleotide
  Antisense strand to SEQ ID NO: 1715595
aaucaugagcaacuuuccu

SEQ ID NO: 1715597 - RNA, 19 nt, Artificial Sequence
  Description of Artificial Sequence: Synthetic oligonucleotide
  Sense strand starting at position 3021 of SEQ ID NO: 1562015
ccagacuucucccuggauu

SEQ ID NO: 1715598 - RNA, 19 nt, Artificial Sequence
  Description of Artificial Sequence: Synthetic oligonucleotide
  Antisense strand to SEQ ID NO: 1715597
aauccagggagaagucugg

SEQ ID NO: 1715599 - RNA, 19 nt, Artificial Sequence
  Description of Artificial Sequence: Synthetic oligonucleotide
  Sense strand starting at position 3175 of SEQ ID NO: 1562015
gccuguuagguggaggaua

SEQ ID NO: 1715600 - RNA, 19 nt, Artificial Sequence
  Description of Artificial Sequence: Synthetic oligonucleotide
  Antisense strand to SEQ ID NO: 1715599
uauccuccaccuaacaggc

SEQ ID NO: 1715601 - RNA, 19 nt, Artificial Sequence
  Description of Artificial Sequence: Synthetic oligonucleotide
  Sense strand starting at position 3440 of SEQ ID NO: 1562015
gcagcaggaaucugaggaa

SEQ ID NO: 1715602 - RNA, 19 nt, Artificial Sequence
  Description of Artificial Sequence: Synthetic oligonucleotide
  Antisense strand to SEQ ID NO: 1715601
uuccucagauuccugcugc

SEQ ID NO: 1715603 - RNA, 19 nt, Artificial Sequence
  Description of Artificial Sequence: Synthetic oligonucleotide
  Sense strand starting at position 3487 of SEQ ID NO: 1562015
gcccaucuacacugacaga

SEQ ID NO: 1715604 - RNA, 19 nt, Artificial Sequence
  Description of Artificial Sequence: Synthetic oligonucleotide
  Antisense strand to SEQ ID NO: 1715603
ucugucaguguagaugggc

SEQ ID NO: 1715605 - RNA, 19 nt, Artificial Sequence
  Description of Artificial Sequence: Synthetic oligonucleotide
  Sense strand starting at position 3507 of SEQ ID NO: 1562015
gaauuagcagccugagagu

SEQ ID NO: 1715606 - RNA, 19 nt, Artificial Sequence
  Description of Artificial Sequence: Synthetic oligonucleotide
  Antisense strand to SEQ ID NO: 1715605
acucucaggcugcuaauuc

SEQ ID NO: 1715607 - RNA, 19 nt, Artificial Sequence
  Description of Artificial Sequence: Synthetic oligonucleotide
  Sense strand starting at position 3538 of SEQ ID NO: 1562015
uguuaauccuguuugaugu

SEQ ID NO: 1715608 - RNA, 19 nt, Artificial Sequence
  Description of Artificial Sequence: Synthetic oligonucleotide
  Antisense strand to SEQ ID NO: 1715607
acaucaaacaggauuaaca

SEQ ID NO: 1715609 - RNA, 19 nt, Artificial Sequence
  Description of Artificial Sequence: Synthetic oligonucleotide
  Sense strand starting at position 3539 of SEQ ID NO: 1562015
guuaauccuguuugauguu

SEQ ID NO: 1715610 - RNA, 19 nt, Artificial Sequence
  Description of Artificial Sequence: Synthetic oligonucleotide
  Antisense strand to SEQ ID NO: 1715609
aacaucaaacaggauuaac

SEQ ID NO: 1715611 - RNA, 19 nt, Artificial Sequence
  Description of Artificial Sequence: Synthetic oligonucleotide
  Sense strand starting at position 3548 of SEQ ID NO: 1562015
guuugauguuucuuggaau

SEQ ID NO: 1715612 - RNA, 19 nt, Artificial Sequence
  Description of Artificial Sequence: Synthetic oligonucleotide
  Antisense strand to SEQ ID NO: 1715611
auuccaagaaacaucaaac

SEQ ID NO: 1715613 - RNA, 19 nt, Artificial Sequence
  Description of Artificial Sequence: Synthetic oligonucleotide
  Sense strand starting at position 3567 of SEQ ID NO: 1562015
ggugcaagucauugagacu

SEQ ID NO: 1715614 - RNA, 19 nt, Artificial Sequence
  Description of Artificial Sequence: Synthetic oligonucleotide
  Antisense strand to SEQ ID NO: 1715613
agucucaaugacuugcacc

SEQ ID NO: 1715615 - RNA, 19 nt, Artificial Sequence
  Description of Artificial Sequence: Synthetic oligonucleotide
  Sense strand starting at position 3568 of SEQ ID NO: 1562015
gugcaagucauugagacuc

SEQ ID NO: 1715616 - RNA, 19 nt, Artificial Sequence
  Description of Artificial Sequence: Synthetic oligonucleotide
  Antisense strand to SEQ ID NO: 1715615
gagucucaaugacuugcac

SEQ ID NO: 1715617 - RNA, 19 nt, Artificial Sequence
  Description of Artificial Sequence: Synthetic oligonucleotide
  Sense strand starting at position 3802 of SEQ ID NO: 1562015
uuggguucugcuuaaggga

SEQ ID NO: 1715618 - RNA, 19 nt, Artificial Sequence
  Description of Artificial Sequence: Synthetic oligonucleotide
  Antisense strand to SEQ ID NO: 1715617
ucccuuaagcagaacccaa

SEQ ID NO: 1715619 - RNA, 19 nt, Artificial Sequence
  Description of Artificial Sequence: Synthetic oligonucleotide
  Sense strand starting at position 3845 of SEQ ID NO: 1562015
gggucuauuuccuccggca

SEQ ID NO: 1715620 - RNA, 19 nt, Artificial Sequence
  Description of Artificial Sequence: Synthetic oligonucleotide
  Antisense strand to SEQ ID NO: 1715619
ugccggaggaaauagaccc

SEQ ID NO: 1715621 - RNA, 19 nt, Artificial Sequence
  Description of Artificial Sequence: Synthetic oligonucleotide
  Sense strand starting at position 3948 of SEQ ID NO: 1562015
cuguuaauccucugugggu

SEQ ID NO: 1715622 - RNA, 19 nt, Artificial Sequence
  Description of Artificial Sequence: Synthetic oligonucleotide
  Antisense strand to SEQ ID NO: 1715621
acccacagaggauuaacag

SEQ ID NO: 1715623 - RNA, 19 nt, Artificial Sequence
  Description of Artificial Sequence: Synthetic oligonucleotide
  Sense strand starting at position 3962 of SEQ ID NO: 1562015
ugggucucuuuaguuaaga

SEQ ID NO: 1715624 - RNA, 19 nt, Artificial Sequence
  Description of Artificial Sequence: Synthetic oligonucleotide
  Antisense strand to SEQ ID NO: 1715623
ucuuaacuaaagagaccca

SEQ ID NO: 1715625 - RNA, 19 nt, Artificial Sequence
  Description of Artificial Sequence: Synthetic oligonucleotide
  Sense strand starting at position 3963 of SEQ ID NO: 1562015
gggucucuuuaguuaagaa

SEQ ID NO: 1715626 - RNA, 19 nt, Artificial Sequence
  Description of Artificial Sequence: Synthetic oligonucleotide
  Antisense strand to SEQ ID NO: 1715625
uucuuaacuaaagagaccc

SEQ ID NO: 1715627 - RNA, 19 nt, Artificial Sequence
  Description of Artificial Sequence: Synthetic oligonucleotide
  Sense strand starting at position 18 of SEQ ID NO: 1562016
agcccagcucaagauugaa

SEQ ID NO: 1715628 - RNA, 19 nt, Artificial Sequence
  Description of Artificial Sequence: Synthetic oligonucleotide
  Antisense strand to SEQ ID NO: 1715627
uucaaucuugagcugggcu

SEQ ID NO: 1715629 - RNA, 19 nt, Artificial Sequence
  Description of Artificial Sequence: Synthetic oligonucleotide
  Sense strand starting at position 62 of SEQ ID NO: 1562016
cugccacuuuguucuauuu

SEQ ID NO: 1715630 - RNA, 19 nt, Artificial Sequence
  Description of Artificial Sequence: Synthetic oligonucleotide
  Antisense strand to SEQ ID NO: 1715629
aaauagaacaaaguggcag

SEQ ID NO: 1715631 - RNA, 19 nt, Artificial Sequence
  Description of Artificial Sequence: Synthetic oligonucleotide
  Sense strand starting at position 97 of SEQ ID NO: 1562016
ggaugaugcucacccaacu

SEQ ID NO: 1715632 - RNA, 19 nt, Artificial Sequence
  Description of Artificial Sequence: Synthetic oligonucleotide
  Antisense strand to SEQ ID NO: 1715631
aguugggugagcaucaucc

SEQ ID NO: 1715633 - RNA, 19 nt, Artificial Sequence
  Description of Artificial Sequence: Synthetic oligonucleotide
  Sense strand starting at position 213 of SEQ ID NO: 1562016
guaggaauccuguaucuua

SEQ ID NO: 1715634 - RNA, 19 nt, Artificial Sequence
  Description of Artificial Sequence: Synthetic oligonucleotide
  Antisense strand to SEQ ID NO: 1715633
uaagauacaggauuccuac

SEQ ID NO: 1715635 - RNA, 19 nt, Artificial Sequence
  Description of Artificial Sequence: Synthetic oligonucleotide
  Sense strand starting at position 278 of SEQ ID NO: 1562016
agugauaaucagcauauca

SEQ ID NO: 1715636 - RNA, 19 nt, Artificial Sequence
  Description of Artificial Sequence: Synthetic oligonucleotide
  Antisense strand to SEQ ID NO: 1715635
ugauaugcugauuaucacu

SEQ ID NO: 1715637 - RNA, 19 nt, Artificial Sequence
  Description of Artificial Sequence: Synthetic oligonucleotide
  Sense strand starting at position 280 of SEQ ID NO: 1562016
ugauaaucagcauaucagu

SEQ ID NO: 1715638 - RNA, 19 nt, Artificial Sequence
  Description of Artificial Sequence: Synthetic oligonucleotide
  Antisense strand to SEQ ID NO: 1715637
acugauaugcugauuauca

SEQ ID NO: 1715639 - RNA, 19 nt, Artificial Sequence
  Description of Artificial Sequence: Synthetic oligonucleotide
  Sense strand starting at position 517 of SEQ ID NO: 1562016
aguagaauaguuugaaacu

SEQ ID NO: 1715640 - RNA, 19 nt, Artificial Sequence
  Description of Artificial Sequence: Synthetic oligonucleotide
  Antisense strand to SEQ ID NO: 1715639
aguuucaaacuauucuacu

SEQ ID NO: 1715641 - RNA, 19 nt, Artificial Sequence
  Description of Artificial Sequence: Synthetic oligonucleotide
  Sense strand starting at position 559 of SEQ ID NO: 1562016
caaucuggguuucugugau

SEQ ID NO: 1715642 - RNA, 19 nt, Artificial Sequence
  Description of Artificial Sequence: Synthetic oligonucleotide
  Antisense strand to SEQ ID NO: 1715641
aucacagaaacccagauug

SEQ ID NO: 1715643 - RNA, 19 nt, Artificial Sequence
  Description of Artificial Sequence: Synthetic oligonucleotide
  Sense strand starting at position 583 of SEQ ID NO: 1562016
uggaucaaagcauguuaga

SEQ ID NO: 1715644 - RNA, 19 nt, Artificial Sequence
  Description of Artificial Sequence: Synthetic oligonucleotide
  Antisense strand to SEQ ID NO: 1715643
ucuaacaugcuuugaucca

SEQ ID NO: 1715645 - RNA, 19 nt, Artificial Sequence
  Description of Artificial Sequence: Synthetic oligonucleotide
  Sense strand starting at position 620 of SEQ ID NO: 1562016
cuaaauacauguuuacagu

SEQ ID NO: 1715646 - RNA, 19 nt, Artificial Sequence
  Description of Artificial Sequence: Synthetic oligonucleotide
  Antisense strand to SEQ ID NO: 1715645
acuguaaacauguauuuag

SEQ ID NO: 1715647 - RNA, 19 nt, Artificial Sequence
  Description of Artificial Sequence: Synthetic oligonucleotide
  Sense strand starting at position 750 of SEQ ID NO: 1562016
ggguguaauaagcaugaca

SEQ ID NO: 1715648 - RNA, 19 nt, Artificial Sequence
  Description of Artificial Sequence: Synthetic oligonucleotide
  Antisense strand to SEQ ID NO: 1715647
ugucaugcuuauuacaccc

SEQ ID NO: 1715649 - RNA, 19 nt, Artificial Sequence
  Description of Artificial Sequence: Synthetic oligonucleotide
  Sense strand starting at position 752 of SEQ ID NO: 1562016
guguaauaagcaugacaaa

SEQ ID NO: 1715650 - RNA, 19 nt, Artificial Sequence
  Description of Artificial Sequence: Synthetic oligonucleotide
  Antisense strand to SEQ ID NO: 1715649
uuugucaugcuuauuacac

SEQ ID NO: 1715651 - RNA, 19 nt, Artificial Sequence
  Description of Artificial Sequence: Synthetic oligonucleotide
  Sense strand starting at position 764 of SEQ ID NO: 1562016
ugacaaaguuaagccauaa

SEQ ID NO: 1715652 - RNA, 19 nt, Artificial Sequence
  Description of Artificial Sequence: Synthetic oligonucleotide
  Antisense strand to SEQ ID NO: 1715651
uuauggcuuaacuuuguca

SEQ ID NO: 1715653 - RNA, 19 nt, Artificial Sequence
  Description of Artificial Sequence: Synthetic oligonucleotide
  Sense strand starting at position 795 of SEQ ID NO: 1562016
gaggcaaaugcagauguuu

SEQ ID NO: 1715654 - RNA, 19 nt, Artificial Sequence
  Description of Artificial Sequence: Synthetic oligonucleotide
  Antisense strand to SEQ ID NO: 1715653
aaacaucugcauuugccuc

SEQ ID NO: 1715655 - RNA, 19 nt, Artificial Sequence
  Description of Artificial Sequence: Synthetic oligonucleotide
  Sense strand starting at position 933 of SEQ ID NO: 1562016
uuccuaacagucugagaaa

SEQ ID NO: 1715656 - RNA, 19 nt, Artificial Sequence
  Description of Artificial Sequence: Synthetic oligonucleotide
  Antisense strand to SEQ ID NO: 1715655
uuucucagacuguuaggaa

SEQ ID NO: 1715657 - RNA, 19 nt, Artificial Sequence
  Description of Artificial Sequence: Synthetic oligonucleotide
  Sense strand starting at position 942 of SEQ ID NO: 1562016
gucugagaaaguugagucu

SEQ ID NO: 1715658 - RNA, 19 nt, Artificial Sequence
  Description of Artificial Sequence: Synthetic oligonucleotide
  Antisense strand to SEQ ID NO: 1715657
agacucaacuuucucagac

SEQ ID NO: 1715659 - RNA, 19 nt, Artificial Sequence
  Description of Artificial Sequence: Synthetic oligonucleotide
  Sense strand starting at position 1489 of SEQ ID NO: 1562016
aguguucuacagggaaaga

SEQ ID NO: 1715660 - RNA, 19 nt, Artificial Sequence
  Description of Artificial Sequence: Synthetic oligonucleotide
  Antisense strand to SEQ ID NO: 1715659
ucuuucccuguagaacacu

SEQ ID NO: 1715661 - RNA, 19 nt, Artificial Sequence
  Description of Artificial Sequence: Synthetic oligonucleotide
  Sense strand starting at position 2078 of SEQ ID NO: 1562016
gccgcuacagcuucuuauu

SEQ ID NO: 1715662 - RNA, 19 nt, Artificial Sequence
  Description of Artificial Sequence: Synthetic oligonucleotide
  Antisense strand to SEQ ID NO: 1715661
aauaagaagcuguagcggc

SEQ ID NO: 1715663 - RNA, 19 nt, Artificial Sequence
  Description of Artificial Sequence: Synthetic oligonucleotide
  Sense strand starting at position 2105 of SEQ ID NO: 1562016
ccagaaugucaaugcccau

SEQ ID NO: 1715664 - RNA, 19 nt, Artificial Sequence
  Description of Artificial Sequence: Synthetic oligonucleotide
  Antisense strand to SEQ ID NO: 1715663
augggcauugacauucugg

SEQ ID NO: 1715665 - RNA, 19 nt, Artificial Sequence
  Description of Artificial Sequence: Synthetic oligonucleotide
  Sense strand starting at position 2178 of SEQ ID NO: 1562016
uuggcaacucugugaagga

SEQ ID NO: 1715666 - RNA, 19 nt, Artificial Sequence
  Description of Artificial Sequence: Synthetic oligonucleotide
  Antisense strand to SEQ ID NO: 1715665
uccuucacagaguugccaa

SEQ ID NO: 1715667 - RNA, 19 nt, Artificial Sequence
  Description of Artificial Sequence: Synthetic oligonucleotide
  Sense strand starting at position 2200 of SEQ ID NO: 1562016
uucuuagaugccuauggga

SEQ ID NO: 1715668 - RNA, 19 nt, Artificial Sequence
  Description of Artificial Sequence: Synthetic oligonucleotide
  Antisense strand to SEQ ID NO: 1715667
ucccauaggcaucuaagaa

SEQ ID NO: 1715669 - RNA, 19 nt, Artificial Sequence
  Description of Artificial Sequence: Synthetic oligonucleotide
  Sense strand starting at position 2202 of SEQ ID NO: 1562016
cuuagaugccuaugggaaa

SEQ ID NO: 1715670 - RNA, 19 nt, Artificial Sequence
  Description of Artificial Sequence: Synthetic oligonucleotide
  Antisense strand to SEQ ID NO: 1715669
uuucccauaggcaucuaag

SEQ ID NO: 1715671 - RNA, 19 nt, Artificial Sequence
  Description of Artificial Sequence: Synthetic oligonucleotide
  Sense strand starting at position 2493 of SEQ ID NO: 1562016
ggaagagcuucccuuacuc

SEQ ID NO: 1715672 - RNA, 19 nt, Artificial Sequence
  Description of Artificial Sequence: Synthetic oligonucleotide
  Antisense strand to SEQ ID NO: 1715671
gaguaagggaagcucuucc

SEQ ID NO: 1715673 - RNA, 19 nt, Artificial Sequence
  Description of Artificial Sequence: Synthetic oligonucleotide
  Sense strand starting at position 2733 of SEQ ID NO: 1562016
gcuaguugacgcucgcgaa

SEQ ID NO: 1715674 - RNA, 19 nt, Artificial Sequence
  Description of Artificial Sequence: Synthetic oligonucleotide
  Antisense strand to SEQ ID NO: 1715673
uucgcgagcgucaacuagc

SEQ ID NO: 1715675 - RNA, 19 nt, Artificial Sequence
  Description of Artificial Sequence: Synthetic oligonucleotide
  Sense strand starting at position 2876 of SEQ ID NO: 1562016
uauuguugugcugucagua

SEQ ID NO: 1715676 - RNA, 19 nt, Artificial Sequence
  Description of Artificial Sequence: Synthetic oligonucleotide
  Antisense strand to SEQ ID NO: 1715675
uacugacagcacaacaaua

SEQ ID NO: 1715677 - RNA, 19 nt, Artificial Sequence
  Description of Artificial Sequence: Synthetic oligonucleotide
  Sense strand starting at position 2877 of SEQ ID NO: 1562016
auuguugugcugucaguau

SEQ ID NO: 1715678 - RNA, 19 nt, Artificial Sequence
  Description of Artificial Sequence: Synthetic oligonucleotide
  Antisense strand to SEQ ID NO: 1715677
auacugacagcacaacaau

SEQ ID NO: 1715679 - RNA, 19 nt, Artificial Sequence
  Description of Artificial Sequence: Synthetic oligonucleotide
  Sense strand starting at position 2903 of SEQ ID NO: 1562016
uuauauucuuggcccuaga

SEQ ID NO: 1715680 - RNA, 19 nt, Artificial Sequence
  Description of Artificial Sequence: Synthetic oligonucleotide
  Antisense strand to SEQ ID NO: 1715679
ucuagggccaagaauauaa

SEQ ID NO: 1715681 - RNA, 19 nt, Artificial Sequence
  Description of Artificial Sequence: Synthetic oligonucleotide
  Sense strand starting at position 2914 of SEQ ID NO: 1562016
gcccuagauccggaacuau

SEQ ID NO: 1715682 - RNA, 19 nt, Artificial Sequence
  Description of Artificial Sequence: Synthetic oligonucleotide
  Antisense strand to SEQ ID NO: 1715681
auaguuccggaucuagggc

SEQ ID NO: 1715683 - RNA, 19 nt, Artificial Sequence
  Description of Artificial Sequence: Synthetic oligonucleotide
  Sense strand starting at position 2980 of SEQ ID NO: 1562016
gagaauacagucugugaca

SEQ ID NO: 1715684 - RNA, 19 nt, Artificial Sequence
  Description of Artificial Sequence: Synthetic oligonucleotide
  Antisense strand to SEQ ID NO: 1715683
ugucacagacuguauucuc

SEQ ID NO: 1715685 - RNA, 19 nt, Artificial Sequence
  Description of Artificial Sequence: Synthetic oligonucleotide
  Sense strand starting at position 2981 of SEQ ID NO: 1562016
agaauacagucugugacaa

SEQ ID NO: 1715686 - RNA, 19 nt, Artificial Sequence
  Description of Artificial Sequence: Synthetic oligonucleotide
  Antisense strand to SEQ ID NO: 1715685
uugucacagacuguauucu

SEQ ID NO: 1715687 - RNA, 19 nt, Artificial Sequence
  Description of Artificial Sequence: Synthetic oligonucleotide
  Sense strand starting at position 2982 of SEQ ID NO: 1562016
gaauacagucugugacaaa

SEQ ID NO: 1715688 - RNA, 19 nt, Artificial Sequence
  Description of Artificial Sequence: Synthetic oligonucleotide
  Antisense strand to SEQ ID NO: 1715687
uuugucacagacuguauuc

SEQ ID NO: 1715689 - RNA, 19 nt, Artificial Sequence
  Description of Artificial Sequence: Synthetic oligonucleotide
  Sense strand starting at position 3022 of SEQ ID NO: 1562016
agaucagcauuauuagaac

SEQ ID NO: 1715690 - RNA, 19 nt, Artificial Sequence
  Description of Artificial Sequence: Synthetic oligonucleotide
  Antisense strand to SEQ ID NO: 1715689
guucuaauaaugcugaucu

SEQ ID NO: 1715691 - RNA, 19 nt, Artificial Sequence
  Description of Artificial Sequence: Synthetic oligonucleotide
  Sense strand starting at position 3171 of SEQ ID NO: 1562016
uguagauuauaauugggca

SEQ ID NO: 1715692 - RNA, 19 nt, Artificial Sequence
  Description of Artificial Sequence: Synthetic oligonucleotide
  Antisense strand to SEQ ID NO: 1715691
ugcccaauuauaaucuaca

SEQ ID NO: 1715693 - RNA, 19 nt, Artificial Sequence
  Description of Artificial Sequence: Synthetic oligonucleotide
  Sense strand starting at position 3172 of SEQ ID NO: 1562016
guagauuauaauugggcaa

SEQ ID NO: 1715694 - RNA, 19 nt, Artificial Sequence
  Description of Artificial Sequence: Synthetic oligonucleotide
  Antisense strand to SEQ ID NO: 1715693
uugcccaauuauaaucuac

SEQ ID NO: 1715695 - RNA, 19 nt, Artificial Sequence
  Description of Artificial Sequence: Synthetic oligonucleotide
  Sense strand starting at position 3228 of SEQ ID NO: 1562016
cagagauguaaaugguugu

SEQ ID NO: 1715696 - RNA, 19 nt, Artificial Sequence
  Description of Artificial Sequence: Synthetic oligonucleotide
  Antisense strand to SEQ ID NO: 1715695
acaaccauuuacaucucug

SEQ ID NO: 1715697 - RNA, 19 nt, Artificial Sequence
  Description of Artificial Sequence: Synthetic oligonucleotide
  Sense strand starting at position 3229 of SEQ ID NO: 1562016
agagauguaaaugguuguu

SEQ ID NO: 1715698 - RNA, 19 nt, Artificial Sequence
  Description of Artificial Sequence: Synthetic oligonucleotide
  Antisense strand to SEQ ID NO: 1715697
aacaaccauuuacaucucu

SEQ ID NO: 1715699 - RNA, 19 nt, Artificial Sequence
  Description of Artificial Sequence: Synthetic oligonucleotide
  Sense strand starting at position 3247 of SEQ ID NO: 1562016
uguguuaaggugagcguuu

SEQ ID NO: 1715700 - RNA, 19 nt, Artificial Sequence
  Description of Artificial Sequence: Synthetic oligonucleotide
  Antisense strand to SEQ ID NO: 1715699
aaacgcucaccuuaacaca

SEQ ID NO: 1715701 - RNA, 19 nt, Artificial Sequence
  Description of Artificial Sequence: Synthetic oligonucleotide
  Sense strand starting at position 3345 of SEQ ID NO: 1562016
ucauacugguaguuaauua

SEQ ID NO: 1715702 - RNA, 19 nt, Artificial Sequence
  Description of Artificial Sequence: Synthetic oligonucleotide
  Antisense strand to SEQ ID NO: 1715701
uaauuaacuaccaguauga

SEQ ID NO: 1715703 - RNA, 19 nt, Artificial Sequence
  Description of Artificial Sequence: Synthetic oligonucleotide
  Sense strand starting at position 3441 of SEQ ID NO: 1562016
cuuccuuuccacugagaag

SEQ ID NO: 1715704 - RNA, 19 nt, Artificial Sequence
  Description of Artificial Sequence: Synthetic oligonucleotide
  Antisense strand to SEQ ID NO: 1715703
cuucucaguggaaaggaag

SEQ ID NO: 1715705 - RNA, 19 nt, Artificial Sequence
  Description of Artificial Sequence: Synthetic oligonucleotide
  Sense strand starting at position 3505 of SEQ ID NO: 1562016
cuagaacugcucuggugau

SEQ ID NO: 1715706 - RNA, 19 nt, Artificial Sequence
  Description of Artificial Sequence: Synthetic oligonucleotide
  Antisense strand to SEQ ID NO: 1715705
aucaccagagcaguucuag

SEQ ID NO: 1715707 - RNA, 19 nt, Artificial Sequence
  Description of Artificial Sequence: Synthetic oligonucleotide
  Sense strand starting at position 1530 of SEQ ID NO: 1562017
agcggccuuccgucaugaa

SEQ ID NO: 1715708 - RNA, 19 nt, Artificial Sequence
  Description of Artificial Sequence: Synthetic oligonucleotide
  Antisense strand to SEQ ID NO: 1715707
uucaugacggaaggccgcu

SEQ ID NO: 1715709 - RNA, 19 nt, Artificial Sequence
  Description of Artificial Sequence: Synthetic oligonucleotide
  Sense strand starting at position 2990 of SEQ ID NO: 1562017
guggauuuguuucguggcu

SEQ ID NO: 1715710 - RNA, 19 nt, Artificial Sequence
  Description of Artificial Sequence: Synthetic oligonucleotide
  Antisense strand to SEQ ID NO: 1715709
agccacgaaacaaauccac

SEQ ID NO: 1715711 - RNA, 19 nt, Artificial Sequence
  Description of Artificial Sequence: Synthetic oligonucleotide
  Sense strand starting at position 2992 of SEQ ID NO: 1562017
ggauuuguuucguggcucu

SEQ ID NO: 1715712 - RNA, 19 nt, Artificial Sequence
  Description of Artificial Sequence: Synthetic oligonucleotide
  Antisense strand to SEQ ID NO: 1715711
agagccacgaaacaaaucc

SEQ ID NO: 1715713 - RNA, 19 nt, Artificial Sequence
  Description of Artificial Sequence: Synthetic oligonucleotide
  Sense strand starting at position 3035 of SEQ ID NO: 1562017
gcccguguuguuccggaga

SEQ ID NO: 1715714 - RNA, 19 nt, Artificial Sequence
  Description of Artificial Sequence: Synthetic oligonucleotide
  Antisense strand to SEQ ID NO: 1715713
ucuccggaacaacacgggc

SEQ ID NO: 1715715 - RNA, 19 nt, Artificial Sequence
  Description of Artificial Sequence: Synthetic oligonucleotide
  Sense strand starting at position 3037 of SEQ ID NO: 1562017
ccguguuguuccggagauc

SEQ ID NO: 1715716 - RNA, 19 nt, Artificial Sequence
  Description of Artificial Sequence: Synthetic oligonucleotide
  Antisense strand to SEQ ID NO: 1715715
gaucuccggaacaacacgg

SEQ ID NO: 1715717 - RNA, 19 nt, Artificial Sequence
  Description of Artificial Sequence: Synthetic oligonucleotide
  Sense strand starting at position 3213 of SEQ ID NO: 1562017
guguguucauugcacgagu

SEQ ID NO: 1715718 - RNA, 19 nt, Artificial Sequence
  Description of Artificial Sequence: Synthetic oligonucleotide
  Antisense strand to SEQ ID NO: 1715717
acucgugcaaugaacacac

SEQ ID NO: 1715719 - RNA, 19 nt, Artificial Sequence
  Description of Artificial Sequence: Synthetic oligonucleotide
  Sense strand starting at position 3215 of SEQ ID NO: 1562017
guguucauugcacgagugu

SEQ ID NO: 1715720 - RNA, 19 nt, Artificial Sequence
  Description of Artificial Sequence: Synthetic oligonucleotide
  Antisense strand to SEQ ID NO: 1715719
acacucgugcaaugaacac

SEQ ID NO: 1715721 - RNA, 19 nt, Artificial Sequence
  Description of Artificial Sequence: Synthetic oligonucleotide
  Sense strand starting at position 3356 of SEQ ID NO: 1562017
gguuucagcugaggucuaa

SEQ ID NO: 1715722 - RNA, 19 nt, Artificial Sequence
  Description of Artificial Sequence: Synthetic oligonucleotide
  Antisense strand to SEQ ID NO: 1715721
uuagaccucagcugaaacc

SEQ ID NO: 1715723 - RNA, 19 nt, Artificial Sequence
  Description of Artificial Sequence: Synthetic oligonucleotide
  Sense strand starting at position 3566 of SEQ ID NO: 1562017
cagagugaguacuggugau

SEQ ID NO: 1715724 - RNA, 19 nt, Artificial Sequence
  Description of Artificial Sequence: Synthetic oligonucleotide
  Antisense strand to SEQ ID NO: 1715723
aucaccaguacucacucug

SEQ ID NO: 1715725 - RNA, 19 nt, Artificial Sequence
  Description of Artificial Sequence: Synthetic oligonucleotide
  Sense strand starting at position 3719 of SEQ ID NO: 1562017
gugaggugucuguggucca

SEQ ID NO: 1715726 - RNA, 19 nt, Artificial Sequence
  Description of Artificial Sequence: Synthetic oligonucleotide
  Antisense strand to SEQ ID NO: 1715725
uggaccacagacaccucac

SEQ ID NO: 1715727 - RNA, 19 nt, Artificial Sequence
  Description of Artificial Sequence: Synthetic oligonucleotide
  Sense strand starting at position 31 of SEQ ID NO: 1562018
gggacucagccaggaagau

SEQ ID NO: 1715728 - RNA, 19 nt, Artificial Sequence
  Description of Artificial Sequence: Synthetic oligonucleotide
  Antisense strand to SEQ ID NO: 1715727
aucuuccuggcugaguccc

SEQ ID NO: 1715729 - RNA, 19 nt, Artificial Sequence
  Description of Artificial Sequence: Synthetic oligonucleotide
  Sense strand starting at position 81 of SEQ ID NO: 1562018
augggagauuuguguggga

SEQ ID NO: 1715730 - RNA, 19 nt, Artificial Sequence
  Description of Artificial Sequence: Synthetic oligonucleotide
  Antisense strand to SEQ ID NO: 1715729
ucccacacaaaucucccau

SEQ ID NO: 1715731 - RNA, 19 nt, Artificial Sequence
  Description of Artificial Sequence: Synthetic oligonucleotide
  Sense strand starting at position 243 of SEQ ID NO: 1562018
ucugcaccugucuaagaga

SEQ ID NO: 1715732 - RNA, 19 nt, Artificial Sequence
  Description of Artificial Sequence: Synthetic oligonucleotide
  Antisense strand to SEQ ID NO: 1715731
ucucuuagacaggugcaga

SEQ ID NO: 1715733 - RNA, 19 nt, Artificial Sequence
  Description of Artificial Sequence: Synthetic oligonucleotide
  Sense strand starting at position 382 of SEQ ID NO: 1562018
ccguaucuuagaggcaguu

SEQ ID NO: 1715734 - RNA, 19 nt, Artificial Sequence
  Description of Artificial Sequence: Synthetic oligonucleotide
  Antisense strand to SEQ ID NO: 1715733
aacugccucuaagauacgg

SEQ ID NO: 1715735 - RNA, 19 nt, Artificial Sequence
  Description of Artificial Sequence: Synthetic oligonucleotide
  Sense strand starting at position 384 of SEQ ID NO: 1562018
guaucuuagaggcaguuga

SEQ ID NO: 1715736 - RNA, 19 nt, Artificial Sequence
  Description of Artificial Sequence: Synthetic oligonucleotide
  Antisense strand to SEQ ID NO: 1715735
ucaacugccucuaagauac

SEQ ID NO: 1715737 - RNA, 19 nt, Artificial Sequence
  Description of Artificial Sequence: Synthetic oligonucleotide
  Sense strand starting at position 702 of SEQ ID NO: 1562018
gggcucuucugacagugaa

SEQ ID NO: 1715738 - RNA, 19 nt, Artificial Sequence
  Description of Artificial Sequence: Synthetic oligonucleotide
  Antisense strand to SEQ ID NO: 1715737
uucacugucagaagagccc

SEQ ID NO: 1715739 - RNA, 19 nt, Artificial Sequence
  Description of Artificial Sequence: Synthetic oligonucleotide
  Sense strand starting at position 726 of SEQ ID NO: 1562018
gggcccuuuaugugaaaug

SEQ ID NO: 1715740 - RNA, 19 nt, Artificial Sequence
  Description of Artificial Sequence: Synthetic oligonucleotide
  Antisense strand to SEQ ID NO: 1715739
cauuucacauaaagggccc

SEQ ID NO: 1715741 - RNA, 19 nt, Artificial Sequence
  Description of Artificial Sequence: Synthetic oligonucleotide
  Sense strand starting at position 2339 of SEQ ID NO: 1562018
gugguaaccugcucaaggu

SEQ ID NO: 1715742 - RNA, 19 nt, Artificial Sequence
  Description of Artificial Sequence: Synthetic oligonucleotide
  Antisense strand to SEQ ID NO: 1715741
accuugagcagguuaccac

SEQ ID NO: 1715743 - RNA, 19 nt, Artificial Sequence
  Description of Artificial Sequence: Synthetic oligonucleotide
  Sense strand starting at position 2630 of SEQ ID NO: 1562018
uugagaugugcaggaugaa

SEQ ID NO: 1715744 - RNA, 19 nt, Artificial Sequence
  Description of Artificial Sequence: Synthetic oligonucleotide
  Antisense strand to SEQ ID NO: 1715743
uucauccugcacaucucaa

SEQ ID NO: 1715745 - RNA, 19 nt, Artificial Sequence
  Description of Artificial Sequence: Synthetic oligonucleotide
  Sense strand starting at position 2657 of SEQ ID NO: 1562018
cugcuucccugagauuuaa

SEQ ID NO: 1715746 - RNA, 19 nt, Artificial Sequence
  Description of Artificial Sequence: Synthetic oligonucleotide
  Antisense strand to SEQ ID NO: 1715745
uuaaaucucagggaagcag

SEQ ID NO: 1715747 - RNA, 19 nt, Artificial Sequence
  Description of Artificial Sequence: Synthetic oligonucleotide
  Sense strand starting at position 2798 of SEQ ID NO: 1562018
uauuuaaguugcugagagu

SEQ ID NO: 1715748 - RNA, 19 nt, Artificial Sequence
  Description of Artificial Sequence: Synthetic oligonucleotide
  Antisense strand to SEQ ID NO: 1715747
acucucagcaacuuaaaua

SEQ ID NO: 1715749 - RNA, 19 nt, Artificial Sequence
  Description of Artificial Sequence: Synthetic oligonucleotide
  Sense strand starting at position 2920 of SEQ ID NO: 1562018
gccuuagaacaauagguuu

SEQ ID NO: 1715750 - RNA, 19 nt, Artificial Sequence
  Description of Artificial Sequence: Synthetic oligonucleotide
  Antisense strand to SEQ ID NO: 1715749
aaaccuauuguucuaaggc

SEQ ID NO: 1715751 - RNA, 19 nt, Artificial Sequence
  Description of Artificial Sequence: Synthetic oligonucleotide
  Sense strand starting at position 3069 of SEQ ID NO: 1562018
auuugauucucagcuguca

SEQ ID NO: 1715752 - RNA, 19 nt, Artificial Sequence
  Description of Artificial Sequence: Synthetic oligonucleotide
  Antisense strand to SEQ ID NO: 1715751
ugacagcugagaaucaaau

SEQ ID NO: 1715753 - RNA, 19 nt, Artificial Sequence
  Description of Artificial Sequence: Synthetic oligonucleotide
  Sense strand starting at position 3080 of SEQ ID NO: 1562018
agcugucauguuugaggaa

SEQ ID NO: 1715754 - RNA, 19 nt, Artificial Sequence
  Description of Artificial Sequence: Synthetic oligonucleotide
  Antisense strand to SEQ ID NO: 1715753
uuccucaaacaugacagcu

SEQ ID NO: 1715755 - RNA, 19 nt, Artificial Sequence
  Description of Artificial Sequence: Synthetic oligonucleotide
  Sense strand starting at position 3146 of SEQ ID NO: 1562018
ccagcaucaccugaguuua

SEQ ID NO: 1715756 - RNA, 19 nt, Artificial Sequence
  Description of Artificial Sequence: Synthetic oligonucleotide
  Antisense strand to SEQ ID NO: 1715755
uaaacucaggugaugcugg

SEQ ID NO: 1715757 - RNA, 19 nt, Artificial Sequence
  Description of Artificial Sequence: Synthetic oligonucleotide
  Sense strand starting at position 3148 of SEQ ID NO: 1562018
agcaucaccugaguuuagu

SEQ ID NO: 1715758 - RNA, 19 nt, Artificial Sequence
  Description of Artificial Sequence: Synthetic oligonucleotide
  Antisense strand to SEQ ID NO: 1715757
acuaaacucaggugaugcu

SEQ ID NO: 1715759 - RNA, 19 nt, Artificial Sequence
  Description of Artificial Sequence: Synthetic oligonucleotide
  Sense strand starting at position 3206 of SEQ ID NO: 1562018
aaaucuguggguugaacuu

SEQ ID NO: 1715760 - RNA, 19 nt, Artificial Sequence
  Description of Artificial Sequence: Synthetic oligonucleotide
  Antisense strand to SEQ ID NO: 1715759
aaguucaacccacagauuu

SEQ ID NO: 1715761 - RNA, 19 nt, Artificial Sequence
  Description of Artificial Sequence: Synthetic oligonucleotide
  Sense strand starting at position 3212 of SEQ ID NO: 1562018
guggguugaacuuguucca

SEQ ID NO: 1715762 - RNA, 19 nt, Artificial Sequence
  Description of Artificial Sequence: Synthetic oligonucleotide
  Antisense strand to SEQ ID NO: 1715761
uggaacaaguucaacccac

SEQ ID NO: 1715763 - RNA, 19 nt, Artificial Sequence
  Description of Artificial Sequence: Synthetic oligonucleotide
  Sense strand starting at position 3302 of SEQ ID NO: 1562018
auaauccaguugugaauga

SEQ ID NO: 1715764 - RNA, 19 nt, Artificial Sequence
  Description of Artificial Sequence: Synthetic oligonucleotide
  Antisense strand to SEQ ID NO: 1715763
ucauucacaacuggauuau

SEQ ID NO: 1715765 - RNA, 19 nt, Artificial Sequence
  Description of Artificial Sequence: Synthetic oligonucleotide
  Sense strand starting at position 3306 of SEQ ID NO: 1562018
uccaguugugaaugacacu

SEQ ID NO: 1715766 - RNA, 19 nt, Artificial Sequence
  Description of Artificial Sequence: Synthetic oligonucleotide
  Antisense strand to SEQ ID NO: 1715765
agugucauucacaacugga

SEQ ID NO: 1715767 - RNA, 19 nt, Artificial Sequence
  Description of Artificial Sequence: Synthetic oligonucleotide
  Sense strand starting at position 3337 of SEQ ID NO: 1562018
gcaauuagacaguagagca

SEQ ID NO: 1715768 - RNA, 19 nt, Artificial Sequence
  Description of Artificial Sequence: Synthetic oligonucleotide
  Antisense strand to SEQ ID NO: 1715767
ugcucuacugucuaauugc

SEQ ID NO: 1715769 - RNA, 19 nt, Artificial Sequence
  Description of Artificial Sequence: Synthetic oligonucleotide
  Sense strand starting at position 3394 of SEQ ID NO: 1562018
gggaaucauuguucuccga

SEQ ID NO: 1715770 - RNA, 19 nt, Artificial Sequence
  Description of Artificial Sequence: Synthetic oligonucleotide
  Antisense strand to SEQ ID NO: 1715769
ucggagaacaaugauuccc

SEQ ID NO: 1715771 - RNA, 19 nt, Artificial Sequence
  Description of Artificial Sequence: Synthetic oligonucleotide
  Sense strand starting at position 3396 of SEQ ID NO: 1562018
gaaucauuguucuccgaag

SEQ ID NO: 1715772 - RNA, 19 nt, Artificial Sequence
  Description of Artificial Sequence: Synthetic oligonucleotide
  Antisense strand to SEQ ID NO: 1715771
cuucggagaacaaugauuc

SEQ ID NO: 1715773 - RNA, 19 nt, Artificial Sequence
  Description of Artificial Sequence: Synthetic oligonucleotide
  Sense strand starting at position 3397 of SEQ ID NO: 1562018
aaucauuguucuccgaaga

SEQ ID NO: 1715774 - RNA, 19 nt, Artificial Sequence
  Description of Artificial Sequence: Synthetic oligonucleotide
  Antisense strand to SEQ ID NO: 1715773
ucuucggagaacaaugauu

SEQ ID NO: 1715775 - RNA, 19 nt, Artificial Sequence
  Description of Artificial Sequence: Synthetic oligonucleotide
  Sense strand starting at position 3398 of SEQ ID NO: 1562018
aucauuguucuccgaagaa

SEQ ID NO: 1715776 - RNA, 19 nt, Artificial Sequence
  Description of Artificial Sequence: Synthetic oligonucleotide
  Antisense strand to SEQ ID NO: 1715775
uucuucggagaacaaugau

SEQ ID NO: 1715777 - RNA, 19 nt, Artificial Sequence
  Description of Artificial Sequence: Synthetic oligonucleotide
  Sense strand starting at position 3402 of SEQ ID NO: 1562018
uuguucuccgaagaauguu

SEQ ID NO: 1715778 - RNA, 19 nt, Artificial Sequence
  Description of Artificial Sequence: Synthetic oligonucleotide
  Antisense strand to SEQ ID NO: 1715777
aacauucuucggagaacaa

SEQ ID NO: 1715779 - RNA, 19 nt, Artificial Sequence
  Description of Artificial Sequence: Synthetic oligonucleotide
  Sense strand starting at position 3408 of SEQ ID NO: 1562018
uccgaagaauguuuccauu

SEQ ID NO: 1715780 - RNA, 19 nt, Artificial Sequence
  Description of Artificial Sequence: Synthetic oligonucleotide
  Antisense strand to SEQ ID NO: 1715779
aauggaaacauucuucgga

SEQ ID NO: 1715781 - RNA, 19 nt, Artificial Sequence
  Description of Artificial Sequence: Synthetic oligonucleotide
  Sense strand starting at position 3410 of SEQ ID NO: 1562018
cgaagaauguuuccauuga

SEQ ID NO: 1715782 - RNA, 19 nt, Artificial Sequence
  Description of Artificial Sequence: Synthetic oligonucleotide
  Antisense strand to SEQ ID NO: 1715781
ucaauggaaacauucuucg

SEQ ID NO: 1715783 - RNA, 19 nt, Artificial Sequence
  Description of Artificial Sequence: Synthetic oligonucleotide
  Sense strand starting at position 3411 of SEQ ID NO: 1562018
gaagaauguuuccauugau

SEQ ID NO: 1715784 - RNA, 19 nt, Artificial Sequence
  Description of Artificial Sequence: Synthetic oligonucleotide
  Antisense strand to SEQ ID NO: 1715783
aucaauggaaacauucuuc

SEQ ID NO: 1715785 - RNA, 19 nt, Artificial Sequence
  Description of Artificial Sequence: Synthetic oligonucleotide
  Sense strand starting at position 3414 of SEQ ID NO: 1562018
gaauguuuccauugauuga

SEQ ID NO: 1715786 - RNA, 19 nt, Artificial Sequence
  Description of Artificial Sequence: Synthetic oligonucleotide
  Antisense strand to SEQ ID NO: 1715785
ucaaucaauggaaacauuc

SEQ ID NO: 1715787 - RNA, 19 nt, Artificial Sequence
  Description of Artificial Sequence: Synthetic oligonucleotide
  Sense strand starting at position 3417 of SEQ ID NO: 1562018
uguuuccauugauugauaa

SEQ ID NO: 1715788 - RNA, 19 nt, Artificial Sequence
  Description of Artificial Sequence: Synthetic oligonucleotide
  Antisense strand to SEQ ID NO: 1715787
uuaucaaucaauggaaaca

SEQ ID NO: 1715789 - RNA, 19 nt, Artificial Sequence
  Description of Artificial Sequence: Synthetic oligonucleotide
  Sense strand starting at position 3418 of SEQ ID NO: 1562018
guuuccauugauugauaau

SEQ ID NO: 1715790 - RNA, 19 nt, Artificial Sequence
  Description of Artificial Sequence: Synthetic oligonucleotide
  Antisense strand to SEQ ID NO: 1715789
auuaucaaucaauggaaac

SEQ ID NO: 1715791 - RNA, 19 nt, Artificial Sequence
  Description of Artificial Sequence: Synthetic oligonucleotide
  Sense strand starting at position 3421 of SEQ ID NO: 1562018
uccauugauugauaaugaa

SEQ ID NO: 1715792 - RNA, 19 nt, Artificial Sequence
  Description of Artificial Sequence: Synthetic oligonucleotide
  Antisense strand to SEQ ID NO: 1715791
uucauuaucaaucaaugga

SEQ ID NO: 1715793 - RNA, 19 nt, Artificial Sequence
  Description of Artificial Sequence: Synthetic oligonucleotide
  Sense strand starting at position 3424 of SEQ ID NO: 1562018
auugauugauaaugaagag

SEQ ID NO: 1715794 - RNA, 19 nt, Artificial Sequence
  Description of Artificial Sequence: Synthetic oligonucleotide
  Antisense strand to SEQ ID NO: 1715793
cucuucauuaucaaucaau

SEQ ID NO: 1715795 - RNA, 19 nt, Artificial Sequence
  Description of Artificial Sequence: Synthetic oligonucleotide
  Sense strand starting at position 3573 of SEQ ID NO: 1562018
cacuguguucgguaucaaa

SEQ ID NO: 1715796 - RNA, 19 nt, Artificial Sequence
  Description of Artificial Sequence: Synthetic oligonucleotide
  Antisense strand to SEQ ID NO: 1715795
uuugauaccgaacacagug

SEQ ID NO: 1715797 - RNA, 19 nt, Artificial Sequence
  Description of Artificial Sequence: Synthetic oligonucleotide
  Sense strand starting at position 3672 of SEQ ID NO: 1562018
cagggugguacggguauaa

SEQ ID NO: 1715798 - RNA, 19 nt, Artificial Sequence
  Description of Artificial Sequence: Synthetic oligonucleotide
  Antisense strand to SEQ ID NO: 1715797
uuauacccguaccacccug

SEQ ID NO: 1715799 - RNA, 19 nt, Artificial Sequence
  Description of Artificial Sequence: Synthetic oligonucleotide
  Sense strand starting at position 3683 of SEQ ID NO: 1562018
ggguauaaggaugggcaua

SEQ ID NO: 1715800 - RNA, 19 nt, Artificial Sequence
  Description of Artificial Sequence: Synthetic oligonucleotide
  Antisense strand to SEQ ID NO: 1715799
uaugcccauccuuauaccc

SEQ ID NO: 1715801 - RNA, 19 nt, Artificial Sequence
  Description of Artificial Sequence: Synthetic oligonucleotide
  Sense strand starting at position 3969 of SEQ ID NO: 1562018
aacaguaguugcuuagaua

SEQ ID NO: 1715802 - RNA, 19 nt, Artificial Sequence
  Description of Artificial Sequence: Synthetic oligonucleotide
  Antisense strand to SEQ ID NO: 1715801
uaucuaagcaacuacuguu

SEQ ID NO: 1715803 - RNA, 19 nt, Artificial Sequence
  Description of Artificial Sequence: Synthetic oligonucleotide
  Sense strand starting at position 3970 of SEQ ID NO: 1562018
acaguaguugcuuagauau

SEQ ID NO: 1715804 - RNA, 19 nt, Artificial Sequence
  Description of Artificial Sequence: Synthetic oligonucleotide
  Antisense strand to SEQ ID NO: 1715803
auaucuaagcaacuacugu

SEQ ID NO: 1715805 - RNA, 19 nt, Artificial Sequence
  Description of Artificial Sequence: Synthetic oligonucleotide
  Sense strand starting at position 3977 of SEQ ID NO: 1562018
uugcuuagauauuagcaca

SEQ ID NO: 1715806 - RNA, 19 nt, Artificial Sequence
  Description of Artificial Sequence: Synthetic oligonucleotide
  Antisense strand to SEQ ID NO: 1715805
ugugcuaauaucuaagcaa

SEQ ID NO: 1715807 - RNA, 19 nt, Artificial Sequence
  Description of Artificial Sequence: Synthetic oligonucleotide
  Sense strand starting at position 31 of SEQ ID NO: 1562019
gcuguuaauguaggagaca

SEQ ID NO: 1715808 - RNA, 19 nt, Artificial Sequence
  Description of Artificial Sequence: Synthetic oligonucleotide
  Antisense strand to SEQ ID NO: 1715807
ugucuccuacauuaacagc

SEQ ID NO: 1715809 - RNA, 19 nt, Artificial Sequence
  Description of Artificial Sequence: Synthetic oligonucleotide
  Sense strand starting at position 67 of SEQ ID NO: 1562019
agucucaaugcccaggaau

SEQ ID NO: 1715810 - RNA, 19 nt, Artificial Sequence
  Description of Artificial Sequence: Synthetic oligonucleotide
  Antisense strand to SEQ ID NO: 1715809
auuccugggcauugagacu

SEQ ID NO: 1715811 - RNA, 19 nt, Artificial Sequence
  Description of Artificial Sequence: Synthetic oligonucleotide
  Sense strand starting at position 80 of SEQ ID NO: 1562019
aggaaugguugugugauga

SEQ ID NO: 1715812 - RNA, 19 nt, Artificial Sequence
  Description of Artificial Sequence: Synthetic oligonucleotide
  Antisense strand to SEQ ID NO: 1715811
ucaucacacaaccauuccu

SEQ ID NO: 1715813 - RNA, 19 nt, Artificial Sequence
  Description of Artificial Sequence: Synthetic oligonucleotide
  Sense strand starting at position 88 of SEQ ID NO: 1562019
uugugugaugacugauaaa

SEQ ID NO: 1715814 - RNA, 19 nt, Artificial Sequence
  Description of Artificial Sequence: Synthetic oligonucleotide
  Antisense strand to SEQ ID NO: 1715813
uuuaucagucaucacacaa

SEQ ID NO: 1715815 - RNA, 19 nt, Artificial Sequence
  Description of Artificial Sequence: Synthetic oligonucleotide
  Sense strand starting at position 128 of SEQ ID NO: 1562019
auaguuucccacuguuaga

SEQ ID NO: 1715816 - RNA, 19 nt, Artificial Sequence
  Description of Artificial Sequence: Synthetic oligonucleotide
  Antisense strand to SEQ ID NO: 1715815
ucuaacagugggaaacuau

SEQ ID NO: 1715817 - RNA, 19 nt, Artificial Sequence
  Description of Artificial Sequence: Synthetic oligonucleotide
  Sense strand starting at position 245 of SEQ ID NO: 1562019
uguuuacugugggcacaaa

SEQ ID NO: 1715818 - RNA, 19 nt, Artificial Sequence
  Description of Artificial Sequence: Synthetic oligonucleotide
  Antisense strand to SEQ ID NO: 1715817
uuugugcccacaguaaaca

SEQ ID NO: 1715819 - RNA, 19 nt, Artificial Sequence
  Description of Artificial Sequence: Synthetic oligonucleotide
  Sense strand starting at position 294 of SEQ ID NO: 1562019
ucgagaauauuccugagga

SEQ ID NO: 1715820 - RNA, 19 nt, Artificial Sequence
  Description of Artificial Sequence: Synthetic oligonucleotide
  Antisense strand to SEQ ID NO: 1715819
uccucaggaauauucucga

SEQ ID NO: 1715821 - RNA, 19 nt, Artificial Sequence
  Description of Artificial Sequence: Synthetic oligonucleotide
  Sense strand starting at position 1821 of SEQ ID NO: 1562019
cgcuucuugcgguuaaaga

SEQ ID NO: 1715822 - RNA, 19 nt, Artificial Sequence
  Description of Artificial Sequence: Synthetic oligonucleotide
  Antisense strand to SEQ ID NO: 1715821
ucuuuaaccgcaagaagcg

SEQ ID NO: 1715823 - RNA, 19 nt, Artificial Sequence
  Description of Artificial Sequence: Synthetic oligonucleotide
  Sense strand starting at position 1822 of SEQ ID NO: 1562019
gcuucuugcgguuaaagaa

SEQ ID NO: 1715824 - RNA, 19 nt, Artificial Sequence
  Description of Artificial Sequence: Synthetic oligonucleotide
  Antisense strand to SEQ ID NO: 1715823
uucuuuaaccgcaagaagc

SEQ ID NO: 1715825 - RNA, 19 nt, Artificial Sequence
  Description of Artificial Sequence: Synthetic oligonucleotide
  Sense strand starting at position 2230 of SEQ ID NO: 1562019
gcgaaacaggucugaucaa

SEQ ID NO: 1715826 - RNA, 19 nt, Artificial Sequence
  Description of Artificial Sequence: Synthetic oligonucleotide
  Antisense strand to SEQ ID NO: 1715825
uugaucagaccuguuucgc

SEQ ID NO: 1715827 - RNA, 19 nt, Artificial Sequence
  Description of Artificial Sequence: Synthetic oligonucleotide
  Sense strand starting at position 2274 of SEQ ID NO: 1562019
cgcgccuaucgaucauaga

SEQ ID NO: 1715828 - RNA, 19 nt, Artificial Sequence
  Description of Artificial Sequence: Synthetic oligonucleotide
  Antisense strand to SEQ ID NO: 1715827
ucuaugaucgauaggcgcg

SEQ ID NO: 1715829 - RNA, 19 nt, Artificial Sequence
  Description of Artificial Sequence: Synthetic oligonucleotide
  Sense strand starting at position 2288 of SEQ ID NO: 1562019
auagacuuugucugcacaa

SEQ ID NO: 1715830 - RNA, 19 nt, Artificial Sequence
  Description of Artificial Sequence: Synthetic oligonucleotide
  Antisense strand to SEQ ID NO: 1715829
uugugcagacaaagucuau

SEQ ID NO: 1715831 - RNA, 19 nt, Artificial Sequence
  Description of Artificial Sequence: Synthetic oligonucleotide
  Sense strand starting at position 2290 of SEQ ID NO: 1562019
agacuuugucugcacaaac

SEQ ID NO: 1715832 - RNA, 19 nt, Artificial Sequence
  Description of Artificial Sequence: Synthetic oligonucleotide
  Antisense strand to SEQ ID NO: 1715831
guuugugcagacaaagucu

SEQ ID NO: 1715833 - RNA, 19 nt, Artificial Sequence
  Description of Artificial Sequence: Synthetic oligonucleotide
  Sense strand starting at position 2528 of SEQ ID NO: 1562019
gaaugcuuugccgcaccga

SEQ ID NO: 1715834 - RNA, 19 nt, Artificial Sequence
  Description of Artificial Sequence: Synthetic oligonucleotide
  Antisense strand to SEQ ID NO: 1715833
ucggugcggcaaagcauuc

SEQ ID NO: 1715835 - RNA, 19 nt, Artificial Sequence
  Description of Artificial Sequence: Synthetic oligonucleotide
  Sense strand starting at position 2553 of SEQ ID NO: 1562019
agcagauucccuugagggu

SEQ ID NO: 1715836 - RNA, 19 nt, Artificial Sequence
  Description of Artificial Sequence: Synthetic oligonucleotide
  Antisense strand to SEQ ID NO: 1715835
acccucaagggaaucugcu

SEQ ID NO: 1715837 - RNA, 19 nt, Artificial Sequence
  Description of Artificial Sequence: Synthetic oligonucleotide
  Sense strand starting at position 2634 of SEQ ID NO: 1562019
aagaguuauuacccgcuga

SEQ ID NO: 1715838 - RNA, 19 nt, Artificial Sequence
  Description of Artificial Sequence: Synthetic oligonucleotide
  Antisense strand to SEQ ID NO: 1715837
ucagcggguaauaacucuu

SEQ ID NO: 1715839 - RNA, 19 nt, Artificial Sequence
  Description of Artificial Sequence: Synthetic oligonucleotide
  Sense strand starting at position 2696 of SEQ ID NO: 1562019
gcauauuuguagccagaau

SEQ ID NO: 1715840 - RNA, 19 nt, Artificial Sequence
  Description of Artificial Sequence: Synthetic oligonucleotide
  Antisense strand to SEQ ID NO: 1715839
auucuggcuacaaauaugc

SEQ ID NO: 1715841 - RNA, 19 nt, Artificial Sequence
  Description of Artificial Sequence: Synthetic oligonucleotide
  Sense strand starting at position 2843 of SEQ ID NO: 1562019
cagccuuugguguaaagca

SEQ ID NO: 1715842 - RNA, 19 nt, Artificial Sequence
  Description of Artificial Sequence: Synthetic oligonucleotide
  Antisense strand to SEQ ID NO: 1715841
ugcuuuacaccaaaggcug

SEQ ID NO: 1715843 - RNA, 19 nt, Artificial Sequence
  Description of Artificial Sequence: Synthetic oligonucleotide
  Sense strand starting at position 2855 of SEQ ID NO: 1562019
uaaagcauaccaggugaaa

SEQ ID NO: 1715844 - RNA, 19 nt, Artificial Sequence
  Description of Artificial Sequence: Synthetic oligonucleotide
  Antisense strand to SEQ ID NO: 1715843
uuucaccugguaugcuuua

SEQ ID NO: 1715845 - RNA, 19 nt, Artificial Sequence
  Description of Artificial Sequence: Synthetic oligonucleotide
  Sense strand starting at position 2893 of SEQ ID NO: 1562019
gugcacuuuccagagagca

SEQ ID NO: 1715846 - RNA, 19 nt, Artificial Sequence
  Description of Artificial Sequence: Synthetic oligonucleotide
  Antisense strand to SEQ ID NO: 1715845
ugcucucuggaaagugcac

SEQ ID NO: 1715847 - RNA, 19 nt, Artificial Sequence
  Description of Artificial Sequence: Synthetic oligonucleotide
  Sense strand starting at position 2895 of SEQ ID NO: 1562019
gcacuuuccagagagcagu

SEQ ID NO: 1715848 - RNA, 19 nt, Artificial Sequence
  Description of Artificial Sequence: Synthetic oligonucleotide
  Antisense strand to SEQ ID NO: 1715847
acugcucucuggaaagugc

SEQ ID NO: 1715849 - RNA, 19 nt, Artificial Sequence
  Description of Artificial Sequence: Synthetic oligonucleotide
  Sense strand starting at position 3004 of SEQ ID NO: 1562019
ucaagaacauucguugcau

SEQ ID NO: 1715850 - RNA, 19 nt, Artificial Sequence
  Description of Artificial Sequence: Synthetic oligonucleotide
  Antisense strand to SEQ ID NO: 1715849
augcaacgaauguucuuga

SEQ ID NO: 1715851 - RNA, 19 nt, Artificial Sequence
  Description of Artificial Sequence: Synthetic oligonucleotide
  Sense strand starting at position 3028 of SEQ ID NO: 1562019
augagucaaggcuguugau

SEQ ID NO: 1715852 - RNA, 19 nt, Artificial Sequence
  Description of Artificial Sequence: Synthetic oligonucleotide
  Antisense strand to SEQ ID NO: 1715851
aucaacagccuugacucau

SEQ ID NO: 1715853 - RNA, 19 nt, Artificial Sequence
  Description of Artificial Sequence: Synthetic oligonucleotide
  Sense strand starting at position 3112 of SEQ ID NO: 1562019
aggcuuacaugauuaaugu

SEQ ID NO: 1715854 - RNA, 19 nt, Artificial Sequence
  Description of Artificial Sequence: Synthetic oligonucleotide
  Antisense strand to SEQ ID NO: 1715853
acauuaaucauguaagccu

SEQ ID NO: 1715855 - RNA, 19 nt, Artificial Sequence
  Description of Artificial Sequence: Synthetic oligonucleotide
  Sense strand starting at position 3113 of SEQ ID NO: 1562019
ggcuuacaugauuaaugug

SEQ ID NO: 1715856 - RNA, 19 nt, Artificial Sequence
  Description of Artificial Sequence: Synthetic oligonucleotide
  Antisense strand to SEQ ID NO: 1715855
cacauuaaucauguaagcc

SEQ ID NO: 1715857 - RNA, 19 nt, Artificial Sequence
  Description of Artificial Sequence: Synthetic oligonucleotide
  Sense strand starting at position 3284 of SEQ ID NO: 1562019
caauaugugguauagguca

SEQ ID NO: 1715858 - RNA, 19 nt, Artificial Sequence
  Description of Artificial Sequence: Synthetic oligonucleotide
  Antisense strand to SEQ ID NO: 1715857
ugaccuauaccacauauug

SEQ ID NO: 1715859 - RNA, 19 nt, Artificial Sequence
  Description of Artificial Sequence: Synthetic oligonucleotide
  Sense strand starting at position 3289 of SEQ ID NO: 1562019
ugugguauaggucaacaau

SEQ ID NO: 1715860 - RNA, 19 nt, Artificial Sequence
  Description of Artificial Sequence: Synthetic oligonucleotide
  Antisense strand to SEQ ID NO: 1715859
auuguugaccuauaccaca

SEQ ID NO: 1715861 - RNA, 19 nt, Artificial Sequence
  Description of Artificial Sequence: Synthetic oligonucleotide
  Sense strand starting at position 3292 of SEQ ID NO: 1562019
gguauaggucaacaaugcu

SEQ ID NO: 1715862 - RNA, 19 nt, Artificial Sequence
  Description of Artificial Sequence: Synthetic oligonucleotide
  Antisense strand to SEQ ID NO: 1715861
agcauuguugaccuauacc

SEQ ID NO: 1715863 - RNA, 19 nt, Artificial Sequence
  Description of Artificial Sequence: Synthetic oligonucleotide
  Sense strand starting at position 3403 of SEQ ID NO: 1562019
ugggaacguuccuccuaga

SEQ ID NO: 1715864 - RNA, 19 nt, Artificial Sequence
  Description of Artificial Sequence: Synthetic oligonucleotide
  Antisense strand to SEQ ID NO: 1715863
ucuaggaggaacguuccca

SEQ ID NO: 1715865 - RNA, 19 nt, Artificial Sequence
  Description of Artificial Sequence: Synthetic oligonucleotide
  Sense strand starting at position 3408 of SEQ ID NO: 1562019
acguuccuccuagaguuua

SEQ ID NO: 1715866 - RNA, 19 nt, Artificial Sequence
  Description of Artificial Sequence: Synthetic oligonucleotide
  Antisense strand to SEQ ID NO: 1715865
uaaacucuaggaggaacgu

SEQ ID NO: 1715867 - RNA, 19 nt, Artificial Sequence
  Description of Artificial Sequence: Synthetic oligonucleotide
  Sense strand starting at position 3421 of SEQ ID NO: 1562019
aguuuaagcuccuucugaa

SEQ ID NO: 1715868 - RNA, 19 nt, Artificial Sequence
  Description of Artificial Sequence: Synthetic oligonucleotide
  Antisense strand to SEQ ID NO: 1715867
uucagaaggagcuuaaacu

SEQ ID NO: 1715869 - RNA, 19 nt, Artificial Sequence
  Description of Artificial Sequence: Synthetic oligonucleotide
  Sense strand starting at position 3440 of SEQ ID NO: 1562019
cagggacgugcauaaucau

SEQ ID NO: 1715870 - RNA, 19 nt, Artificial Sequence
  Description of Artificial Sequence: Synthetic oligonucleotide
  Antisense strand to SEQ ID NO: 1715869
augauuaugcacgucccug

SEQ ID NO: 1715871 - RNA, 19 nt, Artificial Sequence
  Description of Artificial Sequence: Synthetic oligonucleotide
  Sense strand starting at position 3470 of SEQ ID NO: 1562019
uggguacuccuguaauuau

SEQ ID NO: 1715872 - RNA, 19 nt, Artificial Sequence
  Description of Artificial Sequence: Synthetic oligonucleotide
  Antisense strand to SEQ ID NO: 1715871
auaauuacaggaguaccca

SEQ ID NO: 1715873 - RNA, 19 nt, Artificial Sequence
  Description of Artificial Sequence: Synthetic oligonucleotide
  Sense strand starting at position 3479 of SEQ ID NO: 1562019
cuguaauuauuuguugcau

SEQ ID NO: 1715874 - RNA, 19 nt, Artificial Sequence
  Description of Artificial Sequence: Synthetic oligonucleotide
  Antisense strand to SEQ ID NO: 1715873
augcaacaaauaauuacag

SEQ ID NO: 1715875 - RNA, 19 nt, Artificial Sequence
  Description of Artificial Sequence: Synthetic oligonucleotide
  Sense strand starting at position 3509 of SEQ ID NO: 1562019
ugggcaaugcaaugauuga

SEQ ID NO: 1715876 - RNA, 19 nt, Artificial Sequence
  Description of Artificial Sequence: Synthetic oligonucleotide
  Antisense strand to SEQ ID NO: 1715875
ucaaucauugcauugccca

SEQ ID NO: 1715877 - RNA, 19 nt, Artificial Sequence
  Description of Artificial Sequence: Synthetic oligonucleotide
  Sense strand starting at position 3520 of SEQ ID NO: 1562019
augauugaacgcuguaaua

SEQ ID NO: 1715878 - RNA, 19 nt, Artificial Sequence
  Description of Artificial Sequence: Synthetic oligonucleotide
  Antisense strand to SEQ ID NO: 1715877
uauuacagcguucaaucau

SEQ ID NO: 1715879 - RNA, 19 nt, Artificial Sequence
  Description of Artificial Sequence: Synthetic oligonucleotide
  Sense strand starting at position 3522 of SEQ ID NO: 1562019
gauugaacgcuguaauaag

SEQ ID NO: 1715880 - RNA, 19 nt, Artificial Sequence
  Description of Artificial Sequence: Synthetic oligonucleotide
  Antisense strand to SEQ ID NO: 1715879
cuuauuacagcguucaauc

SEQ ID NO: 1715881 - RNA, 19 nt, Artificial Sequence
  Description of Artificial Sequence: Synthetic oligonucleotide
  Sense strand starting at position 3589 of SEQ ID NO: 1562019
ggaagauuauaccugugug

SEQ ID NO: 1715882 - RNA, 19 nt, Artificial Sequence
  Description of Artificial Sequence: Synthetic oligonucleotide
  Antisense strand to SEQ ID NO: 1715881
cacacagguauaaucuucc

SEQ ID NO: 1715883 - RNA, 19 nt, Artificial Sequence
  Description of Artificial Sequence: Synthetic oligonucleotide
  Sense strand starting at position 3669 of SEQ ID NO: 1562019
gugauccugucucuaauau

SEQ ID NO: 1715884 - RNA, 19 nt, Artificial Sequence
  Description of Artificial Sequence: Synthetic oligonucleotide
  Antisense strand to SEQ ID NO: 1715883
auauuagagacaggaucac

SEQ ID NO: 1715885 - RNA, 19 nt, Artificial Sequence
  Description of Artificial Sequence: Synthetic oligonucleotide
  Sense strand starting at position 3763 of SEQ ID NO: 1562019
agugcaaaccacuauauga

SEQ ID NO: 1715886 - RNA, 19 nt, Artificial Sequence
  Description of Artificial Sequence: Synthetic oligonucleotide
  Antisense strand to SEQ ID NO: 1715885
ucauauagugguuugcacu

SEQ ID NO: 1715887 - RNA, 19 nt, Artificial Sequence
  Description of Artificial Sequence: Synthetic oligonucleotide
  Sense strand starting at position 57 of SEQ ID NO: 1562020
aaggguccuuuagccaaau

SEQ ID NO: 1715888 - RNA, 19 nt, Artificial Sequence
  Description of Artificial Sequence: Synthetic oligonucleotide
  Antisense strand to SEQ ID NO: 1715887
auuuggcuaaaggacccuu

SEQ ID NO: 1715889 - RNA, 19 nt, Artificial Sequence
  Description of Artificial Sequence: Synthetic oligonucleotide
  Sense strand starting at position 144 of SEQ ID NO: 1562020
gcagaagggcucuagucua

SEQ ID NO: 1715890 - RNA, 19 nt, Artificial Sequence
  Description of Artificial Sequence: Synthetic oligonucleotide
  Antisense strand to SEQ ID NO: 1715889
uagacuagagcccuucugc

SEQ ID NO: 1715891 - RNA, 19 nt, Artificial Sequence
  Description of Artificial Sequence: Synthetic oligonucleotide
  Sense strand starting at position 182 of SEQ ID NO: 1562020
cuggaacucugaucucaca

SEQ ID NO: 1715892 - RNA, 19 nt, Artificial Sequence
  Description of Artificial Sequence: Synthetic oligonucleotide
  Antisense strand to SEQ ID NO: 1715891
ugugagaucagaguuccag

SEQ ID NO: 1715893 - RNA, 19 nt, Artificial Sequence
  Description of Artificial Sequence: Synthetic oligonucleotide
  Sense strand starting at position 291 of SEQ ID NO: 1562020
gcucuagggucuuugaaag

SEQ ID NO: 1715894 - RNA, 19 nt, Artificial Sequence
  Description of Artificial Sequence: Synthetic oligonucleotide
  Antisense strand to SEQ ID NO: 1715893
cuuucaaagacccuagagc

SEQ ID NO: 1715895 - RNA, 19 nt, Artificial Sequence
  Description of Artificial Sequence: Synthetic oligonucleotide
  Sense strand starting at position 329 of SEQ ID NO: 1562020
cuuccugaaccaggauuaa

SEQ ID NO: 1715896 - RNA, 19 nt, Artificial Sequence
  Description of Artificial Sequence: Synthetic oligonucleotide
  Antisense strand to SEQ ID NO: 1715895
uuaauccugguucaggaag

SEQ ID NO: 1715897 - RNA, 19 nt, Artificial Sequence
  Description of Artificial Sequence: Synthetic oligonucleotide
  Sense strand starting at position 480 of SEQ ID NO: 1562020
ucucacuuccuaggagagu

SEQ ID NO: 1715898 - RNA, 19 nt, Artificial Sequence
  Description of Artificial Sequence: Synthetic oligonucleotide
  Antisense strand to SEQ ID NO: 1715897
acucuccuaggaagugaga

SEQ ID NO: 1715899 - RNA, 19 nt, Artificial Sequence
  Description of Artificial Sequence: Synthetic oligonucleotide
  Sense strand starting at position 580 of SEQ ID NO: 1562020
ugggauagucccgguucaa

SEQ ID NO: 1715900 - RNA, 19 nt, Artificial Sequence
  Description of Artificial Sequence: Synthetic oligonucleotide
  Antisense strand to SEQ ID NO: 1715899
uugaaccgggacuauccca

SEQ ID NO: 1715901 - RNA, 19 nt, Artificial Sequence
  Description of Artificial Sequence: Synthetic oligonucleotide
  Sense strand starting at position 1004 of SEQ ID NO: 1562020
gggaaauacucgucccuac

SEQ ID NO: 1715902 - RNA, 19 nt, Artificial Sequence
  Description of Artificial Sequence: Synthetic oligonucleotide
  Antisense strand to SEQ ID NO: 1715901
guagggacgaguauuuccc

SEQ ID NO: 1715903 - RNA, 19 nt, Artificial Sequence
  Description of Artificial Sequence: Synthetic oligonucleotide
  Sense strand starting at position 1088 of SEQ ID NO: 1562020
guaaguggucgguuguuau

SEQ ID NO: 1715904 - RNA, 19 nt, Artificial Sequence
  Description of Artificial Sequence: Synthetic oligonucleotide
  Antisense strand to SEQ ID NO: 1715903
auaacaaccgaccacuuac

SEQ ID NO: 1715905 - RNA, 19 nt, Artificial Sequence
  Description of Artificial Sequence: Synthetic oligonucleotide
  Sense strand starting at position 1346 of SEQ ID NO: 1562020
cgguauguccuagaugagu

SEQ ID NO: 1715906 - RNA, 19 nt, Artificial Sequence
  Description of Artificial Sequence: Synthetic oligonucleotide
  Antisense strand to SEQ ID NO: 1715905
acucaucuaggacauaccg

SEQ ID NO: 1715907 - RNA, 19 nt, Artificial Sequence
  Description of Artificial Sequence: Synthetic oligonucleotide
  Sense strand starting at position 1803 of SEQ ID NO: 1562020
ccaagaucucguugaggac

SEQ ID NO: 1715908 - RNA, 19 nt, Artificial Sequence
  Description of Artificial Sequence: Synthetic oligonucleotide
  Antisense strand to SEQ ID NO: 1715907
guccucaacgagaucuugg

SEQ ID NO: 1715909 - RNA, 19 nt, Artificial Sequence
  Description of Artificial Sequence: Synthetic oligonucleotide
  Sense strand starting at position 2878 of SEQ ID NO: 1562020
uuaccugcucuugaguuau

SEQ ID NO: 1715910 - RNA, 19 nt, Artificial Sequence
  Description of Artificial Sequence: Synthetic oligonucleotide
  Antisense strand to SEQ ID NO: 1715909
auaacucaagagcagguaa

SEQ ID NO: 1715911 - RNA, 19 nt, Artificial Sequence
  Description of Artificial Sequence: Synthetic oligonucleotide
  Sense strand starting at position 2884 of SEQ ID NO: 1562020
gcucuugaguuauugauca

SEQ ID NO: 1715912 - RNA, 19 nt, Artificial Sequence
  Description of Artificial Sequence: Synthetic oligonucleotide
  Antisense strand to SEQ ID NO: 1715911
ugaucaauaacucaagagc

SEQ ID NO: 1715913 - RNA, 19 nt, Artificial Sequence
  Description of Artificial Sequence: Synthetic oligonucleotide
  Sense strand starting at position 2888 of SEQ ID NO: 1562020
uugaguuauugaucaagug

SEQ ID NO: 1715914 - RNA, 19 nt, Artificial Sequence
  Description of Artificial Sequence: Synthetic oligonucleotide
  Antisense strand to SEQ ID NO: 1715913
cacuugaucaauaacucaa

SEQ ID NO: 1715915 - RNA, 19 nt, Artificial Sequence
  Description of Artificial Sequence: Synthetic oligonucleotide
  Sense strand starting at position 2950 of SEQ ID NO: 1562020
ggauaaggccuugggaaac

SEQ ID NO: 1715916 - RNA, 19 nt, Artificial Sequence
  Description of Artificial Sequence: Synthetic oligonucleotide
  Antisense strand to SEQ ID NO: 1715915
guuucccaaggccuuaucc

SEQ ID NO: 1715917 - RNA, 19 nt, Artificial Sequence
  Description of Artificial Sequence: Synthetic oligonucleotide
  Sense strand starting at position 2983 of SEQ ID NO: 1562020
gguugcucugggcaauguu

SEQ ID NO: 1715918 - RNA, 19 nt, Artificial Sequence
  Description of Artificial Sequence: Synthetic oligonucleotide
  Antisense strand to SEQ ID NO: 1715917
aacauugcccagagcaacc

SEQ ID NO: 1715919 - RNA, 19 nt, Artificial Sequence
  Description of Artificial Sequence: Synthetic oligonucleotide
  Sense strand starting at position 2992 of SEQ ID NO: 1562020
gggcaauguugaucaucac

SEQ ID NO: 1715920 - RNA, 19 nt, Artificial Sequence
  Description of Artificial Sequence: Synthetic oligonucleotide
  Antisense strand to SEQ ID NO: 1715919
gugaugaucaacauugccc

SEQ ID NO: 1715921 - RNA, 19 nt, Artificial Sequence
  Description of Artificial Sequence: Synthetic oligonucleotide
  Sense strand starting at position 3012 of SEQ ID NO: 1562020
cgccuuaucggaagguaug

SEQ ID NO: 1715922 - RNA, 19 nt, Artificial Sequence
  Description of Artificial Sequence: Synthetic oligonucleotide
  Antisense strand to SEQ ID NO: 1715921
cauaccuuccgauaaggcg

SEQ ID NO: 1715923 - RNA, 19 nt, Artificial Sequence
  Description of Artificial Sequence: Synthetic oligonucleotide
  Sense strand starting at position 3150 of SEQ ID NO: 1562020
ucaguauaacgggaacgau

SEQ ID NO: 1715924 - RNA, 19 nt, Artificial Sequence
  Description of Artificial Sequence: Synthetic oligonucleotide
  Antisense strand to SEQ ID NO: 1715923
aucguucccguuauacuga

SEQ ID NO: 1715925 - RNA, 19 nt, Artificial Sequence
  Description of Artificial Sequence: Synthetic oligonucleotide
  Sense strand starting at position 3226 of SEQ ID NO: 1562020
gaaaguucucuguaaaugu

SEQ ID NO: 1715926 - RNA, 19 nt, Artificial Sequence
  Description of Artificial Sequence: Synthetic oligonucleotide
  Antisense strand to SEQ ID NO: 1715925
acauuuacagagaacuuuc

SEQ ID NO: 1715927 - RNA, 19 nt, Artificial Sequence
  Description of Artificial Sequence: Synthetic oligonucleotide
  Sense strand starting at position 3235 of SEQ ID NO: 1562020
cuguaaauguuuguucuua

SEQ ID NO: 1715928 - RNA, 19 nt, Artificial Sequence
  Description of Artificial Sequence: Synthetic oligonucleotide
  Antisense strand to SEQ ID NO: 1715927
uaagaacaaacauuuacag

SEQ ID NO: 1715929 - RNA, 19 nt, Artificial Sequence
  Description of Artificial Sequence: Synthetic oligonucleotide
  Sense strand starting at position 3236 of SEQ ID NO: 1562020
uguaaauguuuguucuuac

SEQ ID NO: 1715930 - RNA, 19 nt, Artificial Sequence
  Description of Artificial Sequence: Synthetic oligonucleotide
  Antisense strand to SEQ ID NO: 1715929
guaagaacaaacauuuaca

SEQ ID NO: 1715931 - RNA, 19 nt, Artificial Sequence
  Description of Artificial Sequence: Synthetic oligonucleotide
  Sense strand starting at position 3237 of SEQ ID NO: 1562020
guaaauguuuguucuuacu

SEQ ID NO: 1715932 - RNA, 19 nt, Artificial Sequence
  Description of Artificial Sequence: Synthetic oligonucleotide
  Antisense strand to SEQ ID NO: 1715931
aguaagaacaaacauuuac

SEQ ID NO: 1715933 - RNA, 19 nt, Artificial Sequence
  Description of Artificial Sequence: Synthetic oligonucleotide
  Sense strand starting at position 3253 of SEQ ID NO: 1562020
acuauuauugcauguguga

SEQ ID NO: 1715934 - RNA, 19 nt, Artificial Sequence
  Description of Artificial Sequence: Synthetic oligonucleotide
  Antisense strand to SEQ ID NO: 1715933
ucacacaugcaauaauagu

SEQ ID NO: 1715935 - RNA, 19 nt, Artificial Sequence
  Description of Artificial Sequence: Synthetic oligonucleotide
  Sense strand starting at position 3273 of SEQ ID NO: 1562020
gcccaacaccuagaaaguu

SEQ ID NO: 1715936 - RNA, 19 nt, Artificial Sequence
  Description of Artificial Sequence: Synthetic oligonucleotide
  Antisense strand to SEQ ID NO: 1715935
aacuuucuagguguugggc

SEQ ID NO: 1715937 - RNA, 19 nt, Artificial Sequence
  Description of Artificial Sequence: Synthetic oligonucleotide
  Sense strand starting at position 3387 of SEQ ID NO: 1562020
guguuuccggaccagagau

SEQ ID NO: 1715938 - RNA, 19 nt, Artificial Sequence
  Description of Artificial Sequence: Synthetic oligonucleotide
  Antisense strand to SEQ ID NO: 1715937
aucucugguccggaaacac

SEQ ID NO: 1715939 - RNA, 19 nt, Artificial Sequence
  Description of Artificial Sequence: Synthetic oligonucleotide
  Sense strand starting at position 3448 of SEQ ID NO: 1562020
gccucuagacuguagucau

SEQ ID NO: 1715940 - RNA, 19 nt, Artificial Sequence
  Description of Artificial Sequence: Synthetic oligonucleotide
  Antisense strand to SEQ ID NO: 1715939
augacuacagucuagaggc

SEQ ID NO: 1715941 - RNA, 19 nt, Artificial Sequence
  Description of Artificial Sequence: Synthetic oligonucleotide
  Sense strand starting at position 3591 of SEQ ID NO: 1562020
cugacuucuuucuuuggga

SEQ ID NO: 1715942 - RNA, 19 nt, Artificial Sequence
  Description of Artificial Sequence: Synthetic oligonucleotide
  Antisense strand to SEQ ID NO: 1715941
ucccaaagaaagaagucag

SEQ ID NO: 1715943 - RNA, 19 nt, Artificial Sequence
  Description of Artificial Sequence: Synthetic oligonucleotide
  Sense strand starting at position 3592 of SEQ ID NO: 1562020
ugacuucuuucuuugggau

SEQ ID NO: 1715944 - RNA, 19 nt, Artificial Sequence
  Description of Artificial Sequence: Synthetic oligonucleotide
  Antisense strand to SEQ ID NO: 1715943
aucccaaagaaagaaguca

SEQ ID NO: 1715945 - RNA, 19 nt, Artificial Sequence
  Description of Artificial Sequence: Synthetic oligonucleotide
  Sense strand starting at position 3593 of SEQ ID NO: 1562020
gacuucuuucuuugggauc

SEQ ID NO: 1715946 - RNA, 19 nt, Artificial Sequence
  Description of Artificial Sequence: Synthetic oligonucleotide
  Antisense strand to SEQ ID NO: 1715945
gaucccaaagaaagaaguc

SEQ ID NO: 1715947 - RNA, 19 nt, Artificial Sequence
  Description of Artificial Sequence: Synthetic oligonucleotide
  Sense strand starting at position 3635 of SEQ ID NO: 1562020
gggccuugggcugagugaa

SEQ ID NO: 1715948 - RNA, 19 nt, Artificial Sequence
  Description of Artificial Sequence: Synthetic oligonucleotide
  Antisense strand to SEQ ID NO: 1715947
uucacucagcccaaggccc

SEQ ID NO: 1715949 - RNA, 19 nt, Artificial Sequence
  Description of Artificial Sequence: Synthetic oligonucleotide
  Sense strand starting at position 3713 of SEQ ID NO: 1562020
ggagucaauuguguccaaa

SEQ ID NO: 1715950 - RNA, 19 nt, Artificial Sequence
  Description of Artificial Sequence: Synthetic oligonucleotide
  Antisense strand to SEQ ID NO: 1715949
uuuggacacaauugacucc

SEQ ID NO: 1715951 - RNA, 19 nt, Artificial Sequence
  Description of Artificial Sequence: Synthetic oligonucleotide
  Sense strand starting at position 3716 of SEQ ID NO: 1562020
gucaauuguguccaaaggu

SEQ ID NO: 1715952 - RNA, 19 nt, Artificial Sequence
  Description of Artificial Sequence: Synthetic oligonucleotide
  Antisense strand to SEQ ID NO: 1715951
accuuuggacacaauugac

SEQ ID NO: 1715953 - RNA, 19 nt, Artificial Sequence
  Description of Artificial Sequence: Synthetic oligonucleotide
  Sense strand starting at position 3765 of SEQ ID NO: 1562020
aauaaaggccucuggagua

SEQ ID NO: 1715954 - RNA, 19 nt, Artificial Sequence
  Description of Artificial Sequence: Synthetic oligonucleotide
  Antisense strand to SEQ ID NO: 1715953
uacuccagaggccuuuauu

SEQ ID NO: 1715955 - RNA, 19 nt, Artificial Sequence
  Description of Artificial Sequence: Synthetic oligonucleotide
  Sense strand starting at position 3775 of SEQ ID NO: 1562020
ucuggaguaucucugcuuu

SEQ ID NO: 1715956 - RNA, 19 nt, Artificial Sequence
  Description of Artificial Sequence: Synthetic oligonucleotide
  Antisense strand to SEQ ID NO: 1715955
aaagcagagauacuccaga

SEQ ID NO: 1715957 - RNA, 19 nt, Artificial Sequence
  Description of Artificial Sequence: Synthetic oligonucleotide
  Sense strand starting at position 3779 of SEQ ID NO: 1562020
gaguaucucugcuuuguga

SEQ ID NO: 1715958 - RNA, 19 nt, Artificial Sequence
  Description of Artificial Sequence: Synthetic oligonucleotide
  Antisense strand to SEQ ID NO: 1715957
ucacaaagcagagauacuc

SEQ ID NO: 1715959 - RNA, 19 nt, Artificial Sequence
  Description of Artificial Sequence: Synthetic oligonucleotide
  Sense strand starting at position 3786 of SEQ ID NO: 1562020
ucugcuuugugacuuuaaa

SEQ ID NO: 1715960 - RNA, 19 nt, Artificial Sequence
  Description of Artificial Sequence: Synthetic oligonucleotide
  Antisense strand to SEQ ID NO: 1715959
uuuaaagucacaaagcaga

SEQ ID NO: 1715961 - RNA, 19 nt, Artificial Sequence
  Description of Artificial Sequence: Synthetic oligonucleotide
  Sense strand starting at position 3967 of SEQ ID NO: 1562020
acguuauuucucugggccu

SEQ ID NO: 1715962 - RNA, 19 nt, Artificial Sequence
  Description of Artificial Sequence: Synthetic oligonucleotide
  Antisense strand to SEQ ID NO: 1715961
aggcccagagaaauaacgu

SEQ ID NO: 1715963 - RNA, 19 nt, Artificial Sequence
  Description of Artificial Sequence: Synthetic oligonucleotide
  Sense strand starting at position 3969 of SEQ ID NO: 1562020
guuauuucucugggccuca

SEQ ID NO: 1715964 - RNA, 19 nt, Artificial Sequence
  Description of Artificial Sequence: Synthetic oligonucleotide
  Antisense strand to SEQ ID NO: 1715963
ugaggcccagagaaauaac

SEQ ID NO: 1715965 - RNA, 19 nt, Artificial Sequence
  Description of Artificial Sequence: Synthetic oligonucleotide
  Sense strand starting at position 3982 of SEQ ID NO: 1562020
gccucagucgucuaaucug

SEQ ID NO: 1715966 - RNA, 19 nt, Artificial Sequence
  Description of Artificial Sequence: Synthetic oligonucleotide
  Antisense strand to SEQ ID NO: 1715965
cagauuagacgacugaggc

SEQ ID NO: 1715967 - RNA, 19 nt, Artificial Sequence
  Description of Artificial Sequence: Synthetic oligonucleotide
  Sense strand starting at position 298 of SEQ ID NO: 1562021
agggcuuugcaguaaugag

SEQ ID NO: 1715968 - RNA, 19 nt, Artificial Sequence
  Description of Artificial Sequence: Synthetic oligonucleotide
  Antisense strand to SEQ ID NO: 1715967
cucauuacugcaaagcccu

SEQ ID NO: 1715969 - RNA, 19 nt, Artificial Sequence
  Description of Artificial Sequence: Synthetic oligonucleotide
  Sense strand starting at position 566 of SEQ ID NO: 1562021
uauaaauguuguccuggga

SEQ ID NO: 1715970 - RNA, 19 nt, Artificial Sequence
  Description of Artificial Sequence: Synthetic oligonucleotide
  Antisense strand to SEQ ID NO: 1715969
ucccaggacaacauuuaua

SEQ ID NO: 1715971 - RNA, 19 nt, Artificial Sequence
  Description of Artificial Sequence: Synthetic oligonucleotide
  Sense strand starting at position 712 of SEQ ID NO: 1562021
agaagacagugcucacaca

SEQ ID NO: 1715972 - RNA, 19 nt, Artificial Sequence
  Description of Artificial Sequence: Synthetic oligonucleotide
  Antisense strand to SEQ ID NO: 1715971
ugugugagcacugucuucu

SEQ ID NO: 1715973 - RNA, 19 nt, Artificial Sequence
  Description of Artificial Sequence: Synthetic oligonucleotide
  Sense strand starting at position 1036 of SEQ ID NO: 1562021
gccuguguggauuagggaa

SEQ ID NO: 1715974 - RNA, 19 nt, Artificial Sequence
  Description of Artificial Sequence: Synthetic oligonucleotide
  Antisense strand to SEQ ID NO: 1715973
uucccuaauccacacaggc

SEQ ID NO: 1715975 - RNA, 19 nt, Artificial Sequence
  Description of Artificial Sequence: Synthetic oligonucleotide
  Sense strand starting at position 1289 of SEQ ID NO: 1562021
ugaagugaucucuagaagc

SEQ ID NO: 1715976 - RNA, 19 nt, Artificial Sequence
  Description of Artificial Sequence: Synthetic oligonucleotide
  Antisense strand to SEQ ID NO: 1715975
gcuucuagagaucacuuca

SEQ ID NO: 1715977 - RNA, 19 nt, Artificial Sequence
  Description of Artificial Sequence: Synthetic oligonucleotide
  Sense strand starting at position 1291 of SEQ ID NO: 1562021
aagugaucucuagaagcac

SEQ ID NO: 1715978 - RNA, 19 nt, Artificial Sequence
  Description of Artificial Sequence: Synthetic oligonucleotide
  Antisense strand to SEQ ID NO: 1715977
gugcuucuagagaucacuu

SEQ ID NO: 1715979 - RNA, 19 nt, Artificial Sequence
  Description of Artificial Sequence: Synthetic oligonucleotide
  Sense strand starting at position 1363 of SEQ ID NO: 1562021
guagacaucgccucgucuu

SEQ ID NO: 1715980 - RNA, 19 nt, Artificial Sequence
  Description of Artificial Sequence: Synthetic oligonucleotide
  Antisense strand to SEQ ID NO: 1715979
aagacgaggcgaugucuac

SEQ ID NO: 1715981 - RNA, 19 nt, Artificial Sequence
  Description of Artificial Sequence: Synthetic oligonucleotide
  Sense strand starting at position 1445 of SEQ ID NO: 1562021
gugaacucagacugacuuu

SEQ ID NO: 1715982 - RNA, 19 nt, Artificial Sequence
  Description of Artificial Sequence: Synthetic oligonucleotide
  Antisense strand to SEQ ID NO: 1715981
aaagucagucugaguucac

SEQ ID NO: 1715983 - RNA, 19 nt, Artificial Sequence
  Description of Artificial Sequence: Synthetic oligonucleotide
  Sense strand starting at position 1610 of SEQ ID NO: 1562021
agcacagcauucuugagaa

SEQ ID NO: 1715984 - RNA, 19 nt, Artificial Sequence
  Description of Artificial Sequence: Synthetic oligonucleotide
  Antisense strand to SEQ ID NO: 1715983
uucucaagaaugcugugcu

SEQ ID NO: 1715985 - RNA, 19 nt, Artificial Sequence
  Description of Artificial Sequence: Synthetic oligonucleotide
  Sense strand starting at position 1827 of SEQ ID NO: 1562021
gggaucgagccuugauaag

SEQ ID NO: 1715986 - RNA, 19 nt, Artificial Sequence
  Description of Artificial Sequence: Synthetic oligonucleotide
  Antisense strand to SEQ ID NO: 1715985
cuuaucaaggcucgauccc

SEQ ID NO: 1715987 - RNA, 19 nt, Artificial Sequence
  Description of Artificial Sequence: Synthetic oligonucleotide
  Sense strand starting at position 2000 of SEQ ID NO: 1562021
ccugcaggucuccaaauaa

SEQ ID NO: 1715988 - RNA, 19 nt, Artificial Sequence
  Description of Artificial Sequence: Synthetic oligonucleotide
  Antisense strand to SEQ ID NO: 1715987
uuauuuggagaccugcagg

SEQ ID NO: 1715989 - RNA, 19 nt, Artificial Sequence
  Description of Artificial Sequence: Synthetic oligonucleotide
  Sense strand starting at position 2168 of SEQ ID NO: 1562021
auuggaaugagauguguua

SEQ ID NO: 1715990 - RNA, 19 nt, Artificial Sequence
  Description of Artificial Sequence: Synthetic oligonucleotide
  Antisense strand to SEQ ID NO: 1715989
uaacacaucucauuccaau

SEQ ID NO: 1715991 - RNA, 19 nt, Artificial Sequence
  Description of Artificial Sequence: Synthetic oligonucleotide
  Sense strand starting at position 2170 of SEQ ID NO: 1562021
uggaaugagauguguuaga

SEQ ID NO: 1715992 - RNA, 19 nt, Artificial Sequence
  Description of Artificial Sequence: Synthetic oligonucleotide
  Antisense strand to SEQ ID NO: 1715991
ucuaacacaucucauucca

SEQ ID NO: 1715993 - RNA, 19 nt, Artificial Sequence
  Description of Artificial Sequence: Synthetic oligonucleotide
  Sense strand starting at position 2475 of SEQ ID NO: 1562021
guggaagacacgugagaag

SEQ ID NO: 1715994 - RNA, 19 nt, Artificial Sequence
  Description of Artificial Sequence: Synthetic oligonucleotide
  Antisense strand to SEQ ID NO: 1715993
cuucucacgugucuuccac

SEQ ID NO: 1715995 - RNA, 19 nt, Artificial Sequence
  Description of Artificial Sequence: Synthetic oligonucleotide
  Sense strand starting at position 2487 of SEQ ID NO: 1562021
ugagaagacuuccuggcau

SEQ ID NO: 1715996 - RNA, 19 nt, Artificial Sequence
  Description of Artificial Sequence: Synthetic oligonucleotide
  Antisense strand to SEQ ID NO: 1715995
augccaggaagucuucuca

SEQ ID NO: 1715997 - RNA, 19 nt, Artificial Sequence
  Description of Artificial Sequence: Synthetic oligonucleotide
  Sense strand starting at position 2539 of SEQ ID NO: 1562021
cccaaaggccaauaaguua

SEQ ID NO: 1715998 - RNA, 19 nt, Artificial Sequence
  Description of Artificial Sequence: Synthetic oligonucleotide
  Antisense strand to SEQ ID NO: 1715997
uaacuuauuggccuuuggg

SEQ ID NO: 1715999 - RNA, 19 nt, Artificial Sequence
  Description of Artificial Sequence: Synthetic oligonucleotide
  Sense strand starting at position 2552 of SEQ ID NO: 1562021
aaguuaaagaucugcggga

SEQ ID NO: 1716000 - RNA, 19 nt, Artificial Sequence
  Description of Artificial Sequence: Synthetic oligonucleotide
  Antisense strand to SEQ ID NO: 1715999
ucccgcagaucuuuaacuu

SEQ ID NO: 1716001 - RNA, 19 nt, Artificial Sequence
  Description of Artificial Sequence: Synthetic oligonucleotide
  Sense strand starting at position 2553 of SEQ ID NO: 1562021
aguuaaagaucugcgggaa

SEQ ID NO: 1716002 - RNA, 19 nt, Artificial Sequence
  Description of Artificial Sequence: Synthetic oligonucleotide
  Antisense strand to SEQ ID NO: 1716001
uucccgcagaucuuuaacu

SEQ ID NO: 1716003 - RNA, 19 nt, Artificial Sequence
  Description of Artificial Sequence: Synthetic oligonucleotide
  Sense strand starting at position 2720 of SEQ ID NO: 1562021
gcaagagacucauugguau

SEQ ID NO: 1716004 - RNA, 19 nt, Artificial Sequence
  Description of Artificial Sequence: Synthetic oligonucleotide
  Antisense strand to SEQ ID NO: 1716003
auaccaaugagucucuugc

SEQ ID NO: 1716005 - RNA, 19 nt, Artificial Sequence
  Description of Artificial Sequence: Synthetic oligonucleotide
  Sense strand starting at position 2732 of SEQ ID NO: 1562021
uugguauugggugaccauu

SEQ ID NO: 1716006 - RNA, 19 nt, Artificial Sequence
  Description of Artificial Sequence: Synthetic oligonucleotide
  Antisense strand to SEQ ID NO: 1716005
aauggucacccaauaccaa

SEQ ID NO: 1716007 - RNA, 19 nt, Artificial Sequence
  Description of Artificial Sequence: Synthetic oligonucleotide
  Sense strand starting at position 2896 of SEQ ID NO: 1562021
caguguucacgguggauuu

SEQ ID NO: 1716008 - RNA, 19 nt, Artificial Sequence
  Description of Artificial Sequence: Synthetic oligonucleotide
  Antisense strand to SEQ ID NO: 1716007
aaauccaccgugaacacug

SEQ ID NO: 1716009 - RNA, 19 nt, Artificial Sequence
  Description of Artificial Sequence: Synthetic oligonucleotide
  Sense strand starting at position 2907 of SEQ ID NO: 1562021
guggauuugcgucagagca

SEQ ID NO: 1716010 - RNA, 19 nt, Artificial Sequence
  Description of Artificial Sequence: Synthetic oligonucleotide
  Antisense strand to SEQ ID NO: 1716009
ugcucugacgcaaauccac

SEQ ID NO: 1716011 - RNA, 19 nt, Artificial Sequence
  Description of Artificial Sequence: Synthetic oligonucleotide
  Sense strand starting at position 2947 of SEQ ID NO: 1562021
gguuguuaucgagaaggac

SEQ ID NO: 1716012 - RNA, 19 nt, Artificial Sequence
  Description of Artificial Sequence: Synthetic oligonucleotide
  Antisense strand to SEQ ID NO: 1716011
guccuucucgauaacaacc

SEQ ID NO: 1716013 - RNA, 19 nt, Artificial Sequence
  Description of Artificial Sequence: Synthetic oligonucleotide
  Sense strand starting at position 3313 of SEQ ID NO: 1562021
aguguuuagagcuagaaag

SEQ ID NO: 1716014 - RNA, 19 nt, Artificial Sequence
  Description of Artificial Sequence: Synthetic oligonucleotide
  Antisense strand to SEQ ID NO: 1716013
cuuucuagcucuaaacacu

SEQ ID NO: 1716015 - RNA, 19 nt, Artificial Sequence
  Description of Artificial Sequence: Synthetic oligonucleotide
  Sense strand starting at position 3536 of SEQ ID NO: 1562021
gcaggacuuuacccagaga

SEQ ID NO: 1716016 - RNA, 19 nt, Artificial Sequence
  Description of Artificial Sequence: Synthetic oligonucleotide
  Antisense strand to SEQ ID NO: 1716015
ucucuggguaaaguccugc

SEQ ID NO: 1716017 - RNA, 19 nt, Artificial Sequence
  Description of Artificial Sequence: Synthetic oligonucleotide
  Sense strand starting at position 3549 of SEQ ID NO: 1562021
cagagaauggugggagguu

SEQ ID NO: 1716018 - RNA, 19 nt, Artificial Sequence
  Description of Artificial Sequence: Synthetic oligonucleotide
  Antisense strand to SEQ ID NO: 1716017
aaccucccaccauucucug

SEQ ID NO: 1716019 - RNA, 19 nt, Artificial Sequence
  Description of Artificial Sequence: Synthetic oligonucleotide
  Sense strand starting at position 3557 of SEQ ID NO: 1562021
ggugggagguugguuuaga

SEQ ID NO: 1716020 - RNA, 19 nt, Artificial Sequence
  Description of Artificial Sequence: Synthetic oligonucleotide
  Antisense strand to SEQ ID NO: 1716019
ucuaaaccaaccucccacc

SEQ ID NO: 1716021 - RNA, 19 nt, Artificial Sequence
  Description of Artificial Sequence: Synthetic oligonucleotide
  Sense strand starting at position 3846 of SEQ ID NO: 1562021
agugaauuacacuauguua

SEQ ID NO: 1716022 - RNA, 19 nt, Artificial Sequence
  Description of Artificial Sequence: Synthetic oligonucleotide
  Antisense strand to SEQ ID NO: 1716021
uaacauaguguaauucacu

SEQ ID NO: 1716023 - RNA, 19 nt, Artificial Sequence
  Description of Artificial Sequence: Synthetic oligonucleotide
  Sense strand starting at position 3877 of SEQ ID NO: 1562021
uauauuauauagucuggga

SEQ ID NO: 1716024 - RNA, 19 nt, Artificial Sequence
  Description of Artificial Sequence: Synthetic oligonucleotide
  Antisense strand to SEQ ID NO: 1716023
ucccagacuauauaauaua

SEQ ID NO: 1716025 - RNA, 19 nt, Artificial Sequence
  Description of Artificial Sequence: Synthetic oligonucleotide
  Sense strand starting at position 3879 of SEQ ID NO: 1562021
uauuauauagucugggaaa

SEQ ID NO: 1716026 - RNA, 19 nt, Artificial Sequence
  Description of Artificial Sequence: Synthetic oligonucleotide
  Antisense strand to SEQ ID NO: 1716025
uuucccagacuauauaaua

SEQ ID NO: 1716027 - RNA, 19 nt, Artificial Sequence
  Description of Artificial Sequence: Synthetic oligonucleotide
  Sense strand starting at position 3881 of SEQ ID NO: 1562021
uuauauagucugggaaaua

SEQ ID NO: 1716028 - RNA, 19 nt, Artificial Sequence
  Description of Artificial Sequence: Synthetic oligonucleotide
  Antisense strand to SEQ ID NO: 1716027
uauuucccagacuauauaa

SEQ ID NO: 1716029 - RNA, 19 nt, Artificial Sequence
  Description of Artificial Sequence: Synthetic oligonucleotide
  Sense strand starting at position 3892 of SEQ ID NO: 1562021
gggaaauagaacugugugu

SEQ ID NO: 1716030 - RNA, 19 nt, Artificial Sequence
  Description of Artificial Sequence: Synthetic oligonucleotide
  Antisense strand to SEQ ID NO: 1716029
acacacaguucuauuuccc

SEQ ID NO: 1716031 - RNA, 19 nt, Artificial Sequence
  Description of Artificial Sequence: Synthetic oligonucleotide
  Sense strand starting at position 3894 of SEQ ID NO: 1562021
gaaauagaacuguguguag

SEQ ID NO: 1716032 - RNA, 19 nt, Artificial Sequence
  Description of Artificial Sequence: Synthetic oligonucleotide
  Antisense strand to SEQ ID NO: 1716031
cuacacacaguucuauuuc

SEQ ID NO: 1716033 - RNA, 19 nt, Artificial Sequence
  Description of Artificial Sequence: Synthetic oligonucleotide
  Sense strand starting at position 3896 of SEQ ID NO: 1562021
aauagaacuguguguagau

SEQ ID NO: 1716034 - RNA, 19 nt, Artificial Sequence
  Description of Artificial Sequence: Synthetic oligonucleotide
  Antisense strand to SEQ ID NO: 1716033
aucuacacacaguucuauu

SEQ ID NO: 1716035 - RNA, 19 nt, Artificial Sequence
  Description of Artificial Sequence: Synthetic oligonucleotide
  Sense strand starting at position 3898 of SEQ ID NO: 1562021
uagaacuguguguagauca

SEQ ID NO: 1716036 - RNA, 19 nt, Artificial Sequence
  Description of Artificial Sequence: Synthetic oligonucleotide
  Antisense strand to SEQ ID NO: 1716035
ugaucuacacacaguucua

SEQ ID NO: 1716037 - RNA, 19 nt, Artificial Sequence
  Description of Artificial Sequence: Synthetic oligonucleotide
  Sense strand starting at position 3908 of SEQ ID NO: 1562021
uguagaucaucuuugagaa

SEQ ID NO: 1716038 - RNA, 19 nt, Artificial Sequence
  Description of Artificial Sequence: Synthetic oligonucleotide
  Antisense strand to SEQ ID NO: 1716037
uucucaaagaugaucuaca

SEQ ID NO: 1716039 - RNA, 19 nt, Artificial Sequence
  Description of Artificial Sequence: Synthetic oligonucleotide
  Sense strand starting at position 3909 of SEQ ID NO: 1562021
guagaucaucuuugagaaa

SEQ ID NO: 1716040 - RNA, 19 nt, Artificial Sequence
  Description of Artificial Sequence: Synthetic oligonucleotide
  Antisense strand to SEQ ID NO: 1716039
uuucucaaagaugaucuac

SEQ ID NO: 1716041 - RNA, 19 nt, Artificial Sequence
  Description of Artificial Sequence: Synthetic oligonucleotide
  Sense strand starting at position 3953 of SEQ ID NO: 1562021
agaucuggguguucuauga

SEQ ID NO: 1716042 - RNA, 19 nt, Artificial Sequence
  Description of Artificial Sequence: Synthetic oligonucleotide
  Antisense strand to SEQ ID NO: 1716041
ucauagaacacccagaucu

SEQ ID NO: 1716043 - RNA, 19 nt, Artificial Sequence
  Description of Artificial Sequence: Synthetic oligonucleotide
  Sense strand starting at position 3977 of SEQ ID NO: 1562021
gggucuaugacauaguucu

SEQ ID NO: 1716044 - RNA, 19 nt, Artificial Sequence
  Description of Artificial Sequence: Synthetic oligonucleotide
  Antisense strand to SEQ ID NO: 1716043
agaacuaugucauagaccc

SEQ ID NO: 1716045 - RNA, 19 nt, Artificial Sequence
  Description of Artificial Sequence: Synthetic oligonucleotide
  Sense strand starting at position 3983 of SEQ ID NO: 1562021
augacauaguucucuagau

SEQ ID NO: 1716046 - RNA, 19 nt, Artificial Sequence
  Description of Artificial Sequence: Synthetic oligonucleotide
  Antisense strand to SEQ ID NO: 1716045
aucuagagaacuaugucau

SEQ ID NO: 1716047 - RNA, 19 nt, Artificial Sequence
  Description of Artificial Sequence: Synthetic oligonucleotide
  Sense strand starting at position 45 of SEQ ID NO: 1562022
uuccuuucgguguggaaga

SEQ ID NO: 1716048 - RNA, 19 nt, Artificial Sequence
  Description of Artificial Sequence: Synthetic oligonucleotide
  Antisense strand to SEQ ID NO: 1716047
ucuuccacaccgaaaggaa

SEQ ID NO: 1716049 - RNA, 19 nt, Artificial Sequence
  Description of Artificial Sequence: Synthetic oligonucleotide
  Sense strand starting at position 220 of SEQ ID NO: 1562022
cuaagagcguuguugauuu

SEQ ID NO: 1716050 - RNA, 19 nt, Artificial Sequence
  Description of Artificial Sequence: Synthetic oligonucleotide
  Antisense strand to SEQ ID NO: 1716049
aaaucaacaacgcucuuag

SEQ ID NO: 1716051 - RNA, 19 nt, Artificial Sequence
  Description of Artificial Sequence: Synthetic oligonucleotide
  Sense strand starting at position 314 of SEQ ID NO: 1562022
ccuauucuaccaggaguuu

SEQ ID NO: 1716052 - RNA, 19 nt, Artificial Sequence
  Description of Artificial Sequence: Synthetic oligonucleotide
  Antisense strand to SEQ ID NO: 1716051
aaacuccugguagaauagg

SEQ ID NO: 1716053 - RNA, 19 nt, Artificial Sequence
  Description of Artificial Sequence: Synthetic oligonucleotide
  Sense strand starting at position 374 of SEQ ID NO: 1562022
ugcuaauuaaaccgugaug

SEQ ID NO: 1716054 - RNA, 19 nt, Artificial Sequence
  Description of Artificial Sequence: Synthetic oligonucleotide
  Antisense strand to SEQ ID NO: 1716053
caucacgguuuaauuagca

SEQ ID NO: 1716055 - RNA, 19 nt, Artificial Sequence
  Description of Artificial Sequence: Synthetic oligonucleotide
  Sense strand starting at position 376 of SEQ ID NO: 1562022
cuaauuaaaccgugaugcu

SEQ ID NO: 1716056 - RNA, 19 nt, Artificial Sequence
  Description of Artificial Sequence: Synthetic oligonucleotide
  Antisense strand to SEQ ID NO: 1716055
agcaucacgguuuaauuag

SEQ ID NO: 1716057 - RNA, 19 nt, Artificial Sequence
  Description of Artificial Sequence: Synthetic oligonucleotide
  Sense strand starting at position 377 of SEQ ID NO: 1562022
uaauuaaaccgugaugcuc

SEQ ID NO: 1716058 - RNA, 19 nt, Artificial Sequence
  Description of Artificial Sequence: Synthetic oligonucleotide
  Antisense strand to SEQ ID NO: 1716057
gagcaucacgguuuaauua

SEQ ID NO: 1716059 - RNA, 19 nt, Artificial Sequence
  Description of Artificial Sequence: Synthetic oligonucleotide
  Sense strand starting at position 430 of SEQ ID NO: 1562022
ucaucauuacagcagugaa

SEQ ID NO: 1716060 - RNA, 19 nt, Artificial Sequence
  Description of Artificial Sequence: Synthetic oligonucleotide
  Antisense strand to SEQ ID NO: 1716059
uucacugcuguaaugauga

SEQ ID NO: 1716061 - RNA, 19 nt, Artificial Sequence
  Description of Artificial Sequence: Synthetic oligonucleotide
  Sense strand starting at position 433 of SEQ ID NO: 1562022
ucauuacagcagugaaacu

SEQ ID NO: 1716062 - RNA, 19 nt, Artificial Sequence
  Description of Artificial Sequence: Synthetic oligonucleotide
  Antisense strand to SEQ ID NO: 1716061
aguuucacugcuguaauga

SEQ ID NO: 1716063 - RNA, 19 nt, Artificial Sequence
  Description of Artificial Sequence: Synthetic oligonucleotide
  Sense strand starting at position 453 of SEQ ID NO: 1562022
cacuguguugugugagaau

SEQ ID NO: 1716064 - RNA, 19 nt, Artificial Sequence
  Description of Artificial Sequence: Synthetic oligonucleotide
  Antisense strand to SEQ ID NO: 1716063
auucucacacaacacagug

SEQ ID NO: 1716065 - RNA, 19 nt, Artificial Sequence
  Description of Artificial Sequence: Synthetic oligonucleotide
  Sense strand starting at position 524 of SEQ ID NO: 1562022
ggaugugaccgugguggaa

SEQ ID NO: 1716066 - RNA, 19 nt, Artificial Sequence
  Description of Artificial Sequence: Synthetic oligonucleotide
  Antisense strand to SEQ ID NO: 1716065
uuccaccacggucacaucc

SEQ ID NO: 1716067 - RNA, 19 nt, Artificial Sequence
  Description of Artificial Sequence: Synthetic oligonucleotide
  Sense strand starting at position 537 of SEQ ID NO: 1562022
guggaauugcgagguuaaa

SEQ ID NO: 1716068 - RNA, 19 nt, Artificial Sequence
  Description of Artificial Sequence: Synthetic oligonucleotide
  Antisense strand to SEQ ID NO: 1716067
uuuaaccucgcaauuccac

SEQ ID NO: 1716069 - RNA, 19 nt, Artificial Sequence
  Description of Artificial Sequence: Synthetic oligonucleotide
  Sense strand starting at position 768 of SEQ ID NO: 1562022
gaggaaugugacuggccaa

SEQ ID NO: 1716070 - RNA, 19 nt, Artificial Sequence
  Description of Artificial Sequence: Synthetic oligonucleotide
  Antisense strand to SEQ ID NO: 1716069
uuggccagucacauuccuc

SEQ ID NO: 1716071 - RNA, 19 nt, Artificial Sequence
  Description of Artificial Sequence: Synthetic oligonucleotide
  Sense strand starting at position 2000 of SEQ ID NO: 1562022
auuggaaauucggcccaaa

SEQ ID NO: 1716072 - RNA, 19 nt, Artificial Sequence
  Description of Artificial Sequence: Synthetic oligonucleotide
  Antisense strand to SEQ ID NO: 1716071
uuugggccgaauuuccaau

SEQ ID NO: 1716073 - RNA, 19 nt, Artificial Sequence
  Description of Artificial Sequence: Synthetic oligonucleotide
  Sense strand starting at position 2003 of SEQ ID NO: 1562022
ggaaauucggcccaaagcu

SEQ ID NO: 1716074 - RNA, 19 nt, Artificial Sequence
  Description of Artificial Sequence: Synthetic oligonucleotide
  Antisense strand to SEQ ID NO: 1716073
agcuuugggccgaauuucc

SEQ ID NO: 1716075 - RNA, 19 nt, Artificial Sequence
  Description of Artificial Sequence: Synthetic oligonucleotide
  Sense strand starting at position 2030 of SEQ ID NO: 1562022
ccguuacauaauggagaaa

SEQ ID NO: 1716076 - RNA, 19 nt, Artificial Sequence
  Description of Artificial Sequence: Synthetic oligonucleotide
  Antisense strand to SEQ ID NO: 1716075
uuucuccauuauguaacgg

SEQ ID NO: 1716077 - RNA, 19 nt, Artificial Sequence
  Description of Artificial Sequence: Synthetic oligonucleotide
  Sense strand starting at position 2076 of SEQ ID NO: 1562022
ggaagcaauuucuggaacu

SEQ ID NO: 1716078 - RNA, 19 nt, Artificial Sequence
  Description of Artificial Sequence: Synthetic oligonucleotide
  Antisense strand to SEQ ID NO: 1716077
aguuccagaaauugcuucc

SEQ ID NO: 1716079 - RNA, 19 nt, Artificial Sequence
  Description of Artificial Sequence: Synthetic oligonucleotide
  Sense strand starting at position 2133 of SEQ ID NO: 1562022
uuugcuuaaccuggauuga

SEQ ID NO: 1716080 - RNA, 19 nt, Artificial Sequence
  Description of Artificial Sequence: Synthetic oligonucleotide
  Antisense strand to SEQ ID NO: 1716079
ucaauccagguuaagcaaa

SEQ ID NO: 1716081 - RNA, 19 nt, Artificial Sequence
  Description of Artificial Sequence: Synthetic oligonucleotide
  Sense strand starting at position 2137 of SEQ ID NO: 1562022
cuuaaccuggauugagauu

SEQ ID NO: 1716082 - RNA, 19 nt, Artificial Sequence
  Description of Artificial Sequence: Synthetic oligonucleotide
  Antisense strand to SEQ ID NO: 1716081
aaucucaauccagguuaag

SEQ ID NO: 1716083 - RNA, 19 nt, Artificial Sequence
  Description of Artificial Sequence: Synthetic oligonucleotide
  Sense strand starting at position 2326 of SEQ ID NO: 1562022
ugcacauuaccugagauau

SEQ ID NO: 1716084 - RNA, 19 nt, Artificial Sequence
  Description of Artificial Sequence: Synthetic oligonucleotide
  Antisense strand to SEQ ID NO: 1716083
auaucucagguaaugugca

SEQ ID NO: 1716085 - RNA, 19 nt, Artificial Sequence
  Description of Artificial Sequence: Synthetic oligonucleotide
  Sense strand starting at position 2337 of SEQ ID NO: 1562022
ugagauaucuucuaugaaa

SEQ ID NO: 1716086 - RNA, 19 nt, Artificial Sequence
  Description of Artificial Sequence: Synthetic oligonucleotide
  Antisense strand to SEQ ID NO: 1716085
uuucauagaagauaucuca

SEQ ID NO: 1716087 - RNA, 19 nt, Artificial Sequence
  Description of Artificial Sequence: Synthetic oligonucleotide
  Sense strand starting at position 2377 of SEQ ID NO: 1562022
aggauuccugcugacaacu

SEQ ID NO: 1716088 - RNA, 19 nt, Artificial Sequence
  Description of Artificial Sequence: Synthetic oligonucleotide
  Antisense strand to SEQ ID NO: 1716087
aguugucagcaggaauccu

SEQ ID NO: 1716089 - RNA, 19 nt, Artificial Sequence
  Description of Artificial Sequence: Synthetic oligonucleotide
  Sense strand starting at position 2386 of SEQ ID NO: 1562022
gcugacaacugucucauuu

SEQ ID NO: 1716090 - RNA, 19 nt, Artificial Sequence
  Description of Artificial Sequence: Synthetic oligonucleotide
  Antisense strand to SEQ ID NO: 1716089
aaaugagacaguugucagc

SEQ ID NO: 1716091 - RNA, 19 nt, Artificial Sequence
  Description of Artificial Sequence: Synthetic oligonucleotide
  Sense strand starting at position 2495 of SEQ ID NO: 1562022
gugaaaugggcguaaacca

SEQ ID NO: 1716092 - RNA, 19 nt, Artificial Sequence
  Description of Artificial Sequence: Synthetic oligonucleotide
  Antisense strand to SEQ ID NO: 1716091
ugguuuacgcccauuucac

SEQ ID NO: 1716093 - RNA, 19 nt, Artificial Sequence
  Description of Artificial Sequence: Synthetic oligonucleotide
  Sense strand starting at position 2563 of SEQ ID NO: 1562022
agguuuaggaagcauguaa

SEQ ID NO: 1716094 - RNA, 19 nt, Artificial Sequence
  Description of Artificial Sequence: Synthetic oligonucleotide
  Antisense strand to SEQ ID NO: 1716093
uuacaugcuuccuaaaccu

SEQ ID NO: 1716095 - RNA, 19 nt, Artificial Sequence
  Description of Artificial Sequence: Synthetic oligonucleotide
  Sense strand starting at position 2943 of SEQ ID NO: 1562022
guaaacauaugugcaucaa

SEQ ID NO: 1716096 - RNA, 19 nt, Artificial Sequence
  Description of Artificial Sequence: Synthetic oligonucleotide
  Antisense strand to SEQ ID NO: 1716095
uugaugcacauauguuuac

SEQ ID NO: 1716097 - RNA, 19 nt, Artificial Sequence
  Description of Artificial Sequence: Synthetic oligonucleotide
  Sense strand starting at position 2965 of SEQ ID NO: 1562022
uuugcaucucaggaccaau

SEQ ID NO: 1716098 - RNA, 19 nt, Artificial Sequence
  Description of Artificial Sequence: Synthetic oligonucleotide
  Antisense strand to SEQ ID NO: 1716097
auugguccugagaugcaaa

SEQ ID NO: 1716099 - RNA, 19 nt, Artificial Sequence
  Description of Artificial Sequence: Synthetic oligonucleotide
  Sense strand starting at position 3099 of SEQ ID NO: 1562022
gggugagcacuugaaaggu

SEQ ID NO: 1716100 - RNA, 19 nt, Artificial Sequence
  Description of Artificial Sequence: Synthetic oligonucleotide
  Antisense strand to SEQ ID NO: 1716099
accuuucaagugcucaccc

SEQ ID NO: 1716101 - RNA, 19 nt, Artificial Sequence
  Description of Artificial Sequence: Synthetic oligonucleotide
  Sense strand starting at position 3108 of SEQ ID NO: 1562022
cuugaaaggucugcuggga

SEQ ID NO: 1716102 - RNA, 19 nt, Artificial Sequence
  Description of Artificial Sequence: Synthetic oligonucleotide
  Antisense strand to SEQ ID NO: 1716101
ucccagcagaccuuucaag

SEQ ID NO: 1716103 - RNA, 19 nt, Artificial Sequence
  Description of Artificial Sequence: Synthetic oligonucleotide
  Sense strand starting at position 3192 of SEQ ID NO: 1562022
acuggauuguggccaguua

SEQ ID NO: 1716104 - RNA, 19 nt, Artificial Sequence
  Description of Artificial Sequence: Synthetic oligonucleotide
  Antisense strand to SEQ ID NO: 1716103
uaacuggccacaauccagu

SEQ ID NO: 1716105 - RNA, 19 nt, Artificial Sequence
  Description of Artificial Sequence: Synthetic oligonucleotide
  Sense strand starting at position 3240 of SEQ ID NO: 1562022
acaaccuaucaguguuaug

SEQ ID NO: 1716106 - RNA, 19 nt, Artificial Sequence
  Description of Artificial Sequence: Synthetic oligonucleotide
  Antisense strand to SEQ ID NO: 1716105
cauaacacugauagguugu

SEQ ID NO: 1716107 - RNA, 19 nt, Artificial Sequence
  Description of Artificial Sequence: Synthetic oligonucleotide
  Sense strand starting at position 3247 of SEQ ID NO: 1562022
aucaguguuauguaaugcu

SEQ ID NO: 1716108 - RNA, 19 nt, Artificial Sequence
  Description of Artificial Sequence: Synthetic oligonucleotide
  Antisense strand to SEQ ID NO: 1716107
agcauuacauaacacugau

SEQ ID NO: 1716109 - RNA, 19 nt, Artificial Sequence
  Description of Artificial Sequence: Synthetic oligonucleotide
  Sense strand starting at position 3257 of SEQ ID NO: 1562022
uguaaugcuuagguugaca

SEQ ID NO: 1716110 - RNA, 19 nt, Artificial Sequence
  Description of Artificial Sequence: Synthetic oligonucleotide
  Antisense strand to SEQ ID NO: 1716109
ugucaaccuaagcauuaca

SEQ ID NO: 1716111 - RNA, 19 nt, Artificial Sequence
  Description of Artificial Sequence: Synthetic oligonucleotide
  Sense strand starting at position 3485 of SEQ ID NO: 1562022
cugugaagcuugguuccaa

SEQ ID NO: 1716112 - RNA, 19 nt, Artificial Sequence
  Description of Artificial Sequence: Synthetic oligonucleotide
  Antisense strand to SEQ ID NO: 1716111
uuggaaccaagcuucacag

SEQ ID NO: 1716113 - RNA, 19 nt, Artificial Sequence
  Description of Artificial Sequence: Synthetic oligonucleotide
  Sense strand starting at position 3576 of SEQ ID NO: 1562022
gcucaaauggccugggauu

SEQ ID NO: 1716114 - RNA, 19 nt, Artificial Sequence
  Description of Artificial Sequence: Synthetic oligonucleotide
  Antisense strand to SEQ ID NO: 1716113
aaucccaggccauuugagc

SEQ ID NO: 1716115 - RNA, 19 nt, Artificial Sequence
  Description of Artificial Sequence: Synthetic oligonucleotide
  Sense strand starting at position 3588 of SEQ ID NO: 1562022
ugggauuucuuggagggaa

SEQ ID NO: 1716116 - RNA, 19 nt, Artificial Sequence
  Description of Artificial Sequence: Synthetic oligonucleotide
  Antisense strand to SEQ ID NO: 1716115
uucccuccaagaaauccca

SEQ ID NO: 1716117 - RNA, 19 nt, Artificial Sequence
  Description of Artificial Sequence: Synthetic oligonucleotide
  Sense strand starting at position 3639 of SEQ ID NO: 1562022
accuauucugguuauuacu

SEQ ID NO: 1716118 - RNA, 19 nt, Artificial Sequence
  Description of Artificial Sequence: Synthetic oligonucleotide
  Antisense strand to SEQ ID NO: 1716117
aguaauaaccagaauaggu

SEQ ID NO: 1716119 - RNA, 19 nt, Artificial Sequence
  Description of Artificial Sequence: Synthetic oligonucleotide
  Sense strand starting at position 3641 of SEQ ID NO: 1562022
cuauucugguuauuacuga

SEQ ID NO: 1716120 - RNA, 19 nt, Artificial Sequence
  Description of Artificial Sequence: Synthetic oligonucleotide
  Antisense strand to SEQ ID NO: 1716119
ucaguaauaaccagaauag

SEQ ID NO: 1716121 - RNA, 19 nt, Artificial Sequence
  Description of Artificial Sequence: Synthetic oligonucleotide
  Sense strand starting at position 3708 of SEQ ID NO: 1562022
uuauuaugccaauggauug

SEQ ID NO: 1716122 - RNA, 19 nt, Artificial Sequence
  Description of Artificial Sequence: Synthetic oligonucleotide
  Antisense strand to SEQ ID NO: 1716121
caauccauuggcauaauaa

SEQ ID NO: 1716123 - RNA, 19 nt, Artificial Sequence
  Description of Artificial Sequence: Synthetic oligonucleotide
  Sense strand starting at position 3713 of SEQ ID NO: 1562022
augccaauggauuguuuaa

SEQ ID NO: 1716124 - RNA, 19 nt, Artificial Sequence
  Description of Artificial Sequence: Synthetic oligonucleotide
  Antisense strand to SEQ ID NO: 1716123
uuaaacaauccauuggcau

SEQ ID NO: 1716125 - RNA, 19 nt, Artificial Sequence
  Description of Artificial Sequence: Synthetic oligonucleotide
  Sense strand starting at position 3894 of SEQ ID NO: 1562022
aagaucagaugugcugauu

SEQ ID NO: 1716126 - RNA, 19 nt, Artificial Sequence
  Description of Artificial Sequence: Synthetic oligonucleotide
  Antisense strand to SEQ ID NO: 1716125
aaucagcacaucugaucuu

SEQ ID NO: 1716127 - RNA, 19 nt, Artificial Sequence
  Description of Artificial Sequence: Synthetic oligonucleotide
  Sense strand starting at position 29 of SEQ ID NO: 1562023
gcaucaccagauugcuuaa

SEQ ID NO: 1716128 - RNA, 19 nt, Artificial Sequence
  Description of Artificial Sequence: Synthetic oligonucleotide
  Antisense strand to SEQ ID NO: 1716127
uuaagcaaucuggugaugc

SEQ ID NO: 1716129 - RNA, 19 nt, Artificial Sequence
  Description of Artificial Sequence: Synthetic oligonucleotide
  Sense strand starting at position 56 of SEQ ID NO: 1562023
uugucacugguucgaaaug

SEQ ID NO: 1716130 - RNA, 19 nt, Artificial Sequence
  Description of Artificial Sequence: Synthetic oligonucleotide
  Antisense strand to SEQ ID NO: 1716129
cauuucgaaccagugacaa

SEQ ID NO: 1716131 - RNA, 19 nt, Artificial Sequence
  Description of Artificial Sequence: Synthetic oligonucleotide
  Sense strand starting at position 141 of SEQ ID NO: 1562023
aaaggaggaucaggaaauu

SEQ ID NO: 1716132 - RNA, 19 nt, Artificial Sequence
  Description of Artificial Sequence: Synthetic oligonucleotide
  Antisense strand to SEQ ID NO: 1716131
aauuuccugauccuccuuu

SEQ ID NO: 1716133 - RNA, 19 nt, Artificial Sequence
  Description of Artificial Sequence: Synthetic oligonucleotide
  Sense strand starting at position 191 of SEQ ID NO: 1562023
gcagaaccaucuuugugac

SEQ ID NO: 1716134 - RNA, 19 nt, Artificial Sequence
  Description of Artificial Sequence: Synthetic oligonucleotide
  Antisense strand to SEQ ID NO: 1716133
gucacaaagaugguucugc

SEQ ID NO: 1716135 - RNA, 19 nt, Artificial Sequence
  Description of Artificial Sequence: Synthetic oligonucleotide
  Sense strand starting at position 354 of SEQ ID NO: 1562023
uuguguaaaugacucauca

SEQ ID NO: 1716136 - RNA, 19 nt, Artificial Sequence
  Description of Artificial Sequence: Synthetic oligonucleotide
  Antisense strand to SEQ ID NO: 1716135
ugaugagucauuuacacaa

SEQ ID NO: 1716137 - RNA, 19 nt, Artificial Sequence
  Description of Artificial Sequence: Synthetic oligonucleotide
  Sense strand starting at position 405 of SEQ ID NO: 1562023
uuccuuucgguguggaaga

SEQ ID NO: 1716138 - RNA, 19 nt, Artificial Sequence
  Description of Artificial Sequence: Synthetic oligonucleotide
  Antisense strand to SEQ ID NO: 1716137
ucuuccacaccgaaaggaa

SEQ ID NO: 1716139 - RNA, 19 nt, Artificial Sequence
  Description of Artificial Sequence: Synthetic oligonucleotide
  Sense strand starting at position 580 of SEQ ID NO: 1562023
cuaagagcguuguugauuu

SEQ ID NO: 1716140 - RNA, 19 nt, Artificial Sequence
  Description of Artificial Sequence: Synthetic oligonucleotide
  Antisense strand to SEQ ID NO: 1716139
aaaucaacaacgcucuuag

SEQ ID NO: 1716141 - RNA, 19 nt, Artificial Sequence
  Description of Artificial Sequence: Synthetic oligonucleotide
  Sense strand starting at position 674 of SEQ ID NO: 1562023
ccuauucuaccaggaguuu

SEQ ID NO: 1716142 - RNA, 19 nt, Artificial Sequence
  Description of Artificial Sequence: Synthetic oligonucleotide
  Antisense strand to SEQ ID NO: 1716141
aaacuccugguagaauagg

SEQ ID NO: 1716143 - RNA, 19 nt, Artificial Sequence
  Description of Artificial Sequence: Synthetic oligonucleotide
  Sense strand starting at position 734 of SEQ ID NO: 1562023
ugcuaauuaaaccgugaug

SEQ ID NO: 1716144 - RNA, 19 nt, Artificial Sequence
  Description of Artificial Sequence: Synthetic oligonucleotide
  Antisense strand to SEQ ID NO: 1716143
caucacgguuuaauuagca

SEQ ID NO: 1716145 - RNA, 19 nt, Artificial Sequence
  Description of Artificial Sequence: Synthetic oligonucleotide
  Sense strand starting at position 736 of SEQ ID NO: 1562023
cuaauuaaaccgugaugcu

SEQ ID NO: 1716146 - RNA, 19 nt, Artificial Sequence
  Description of Artificial Sequence: Synthetic oligonucleotide
  Antisense strand to SEQ ID NO: 1716145
agcaucacgguuuaauuag

SEQ ID NO: 1716147 - RNA, 19 nt, Artificial Sequence
  Description of Artificial Sequence: Synthetic oligonucleotide
  Sense strand starting at position 737 of SEQ ID NO: 1562023
uaauuaaaccgugaugcuc

SEQ ID NO: 1716148 - RNA, 19 nt, Artificial Sequence
  Description of Artificial Sequence: Synthetic oligonucleotide
  Antisense strand to SEQ ID NO: 1716147
gagcaucacgguuuaauua

SEQ ID NO: 1716149 - RNA, 19 nt, Artificial Sequence
  Description of Artificial Sequence: Synthetic oligonucleotide
  Sense strand starting at position 790 of SEQ ID NO: 1562023
ucaucauuacagcagugaa

SEQ ID NO: 1716150 - RNA, 19 nt, Artificial Sequence
  Description of Artificial Sequence: Synthetic oligonucleotide
  Antisense strand to SEQ ID NO: 1716149
uucacugcuguaaugauga

SEQ ID NO: 1716151 - RNA, 19 nt, Artificial Sequence
  Description of Artificial Sequence: Synthetic oligonucleotide
  Sense strand starting at position 793 of SEQ ID NO: 1562023
ucauuacagcagugaaacu

SEQ ID NO: 1716152 - RNA, 19 nt, Artificial Sequence
  Description of Artificial Sequence: Synthetic oligonucleotide
  Antisense strand to SEQ ID NO: 1716151
aguuucacugcuguaauga

SEQ ID NO: 1716153 - RNA, 19 nt, Artificial Sequence
  Description of Artificial Sequence: Synthetic oligonucleotide
  Sense strand starting at position 813 of SEQ ID NO: 1562023
cacuguguugugugagaau

SEQ ID NO: 1716154 - RNA, 19 nt, Artificial Sequence
  Description of Artificial Sequence: Synthetic oligonucleotide
  Antisense strand to SEQ ID NO: 1716153
auucucacacaacacagug

SEQ ID NO: 1716155 - RNA, 19 nt, Artificial Sequence
  Description of Artificial Sequence: Synthetic oligonucleotide
  Sense strand starting at position 884 of SEQ ID NO: 1562023
ggaugugaccgugguggaa

SEQ ID NO: 1716156 - RNA, 19 nt, Artificial Sequence
  Description of Artificial Sequence: Synthetic oligonucleotide
  Antisense strand to SEQ ID NO: 1716155
uuccaccacggucacaucc

SEQ ID NO: 1716157 - RNA, 19 nt, Artificial Sequence
  Description of Artificial Sequence: Synthetic oligonucleotide
  Sense strand starting at position 897 of SEQ ID NO: 1562023
guggaauugcgagguuaaa

SEQ ID NO: 1716158 - RNA, 19 nt, Artificial Sequence
  Description of Artificial Sequence: Synthetic oligonucleotide
  Antisense strand to SEQ ID NO: 1716157
uuuaaccucgcaauuccac

SEQ ID NO: 1716159 - RNA, 19 nt, Artificial Sequence
  Description of Artificial Sequence: Synthetic oligonucleotide
  Sense strand starting at position 1128 of SEQ ID NO: 1562023
gaggaaugugacuggccaa

SEQ ID NO: 1716160 - RNA, 19 nt, Artificial Sequence
  Description of Artificial Sequence: Synthetic oligonucleotide
  Antisense strand to SEQ ID NO: 1716159
uuggccagucacauuccuc

SEQ ID NO: 1716161 - RNA, 19 nt, Artificial Sequence
  Description of Artificial Sequence: Synthetic oligonucleotide
  Sense strand starting at position 2360 of SEQ ID NO: 1562023
auuggaaauucggcccaaa

SEQ ID NO: 1716162 - RNA, 19 nt, Artificial Sequence
  Description of Artificial Sequence: Synthetic oligonucleotide
  Antisense strand to SEQ ID NO: 1716161
uuugggccgaauuuccaau

SEQ ID NO: 1716163 - RNA, 19 nt, Artificial Sequence
  Description of Artificial Sequence: Synthetic oligonucleotide
  Sense strand starting at position 2363 of SEQ ID NO: 1562023
ggaaauucggcccaaagcu

SEQ ID NO: 1716164 - RNA, 19 nt, Artificial Sequence
  Description of Artificial Sequence: Synthetic oligonucleotide
  Antisense strand to SEQ ID NO: 1716163
agcuuugggccgaauuucc

SEQ ID NO: 1716165 - RNA, 19 nt, Artificial Sequence
  Description of Artificial Sequence: Synthetic oligonucleotide
  Sense strand starting at position 2390 of SEQ ID NO: 1562023
ccguuacauaauggagaaa

SEQ ID NO: 1716166 - RNA, 19 nt, Artificial Sequence
  Description of Artificial Sequence: Synthetic oligonucleotide
  Antisense strand to SEQ ID NO: 1716165
uuucuccauuauguaacgg

SEQ ID NO: 1716167 - RNA, 19 nt, Artificial Sequence
  Description of Artificial Sequence: Synthetic oligonucleotide
  Sense strand starting at position 2436 of SEQ ID NO: 1562023
ggaagcaauuucuggaacu

SEQ ID NO: 1716168 - RNA, 19 nt, Artificial Sequence
  Description of Artificial Sequence: Synthetic oligonucleotide
  Antisense strand to SEQ ID NO: 1716167
aguuccagaaauugcuucc

SEQ ID NO: 1716169 - RNA, 19 nt, Artificial Sequence
  Description of Artificial Sequence: Synthetic oligonucleotide
  Sense strand starting at position 2493 of SEQ ID NO: 1562023
uuugcuuaaccuggauuga

SEQ ID NO: 1716170 - RNA, 19 nt, Artificial Sequence
  Description of Artificial Sequence: Synthetic oligonucleotide
  Antisense strand to SEQ ID NO: 1716169
ucaauccagguuaagcaaa

SEQ ID NO: 1716171 - RNA, 19 nt, Artificial Sequence
  Description of Artificial Sequence: Synthetic oligonucleotide
  Sense strand starting at position 2497 of SEQ ID NO: 1562023
cuuaaccuggauugagauu

SEQ ID NO: 1716172 - RNA, 19 nt, Artificial Sequence
  Description of Artificial Sequence: Synthetic oligonucleotide
  Antisense strand to SEQ ID NO: 1716171
aaucucaauccagguuaag

SEQ ID NO: 1716173 - RNA, 19 nt, Artificial Sequence
  Description of Artificial Sequence: Synthetic oligonucleotide
  Sense strand starting at position 2686 of SEQ ID NO: 1562023
ugcacauuaccugagauau

SEQ ID NO: 1716174 - RNA, 19 nt, Artificial Sequence
  Description of Artificial Sequence: Synthetic oligonucleotide
  Antisense strand to SEQ ID NO: 1716173
auaucucagguaaugugca

SEQ ID NO: 1716175 - RNA, 19 nt, Artificial Sequence
  Description of Artificial Sequence: Synthetic oligonucleotide
  Sense strand starting at position 2697 of SEQ ID NO: 1562023
ugagauaucuucuaugaaa

SEQ ID NO: 1716176 - RNA, 19 nt, Artificial Sequence
  Description of Artificial Sequence: Synthetic oligonucleotide
  Antisense strand to SEQ ID NO: 1716175
uuucauagaagauaucuca

SEQ ID NO: 1716177 - RNA, 19 nt, Artificial Sequence
  Description of Artificial Sequence: Synthetic oligonucleotide
  Sense strand starting at position 2737 of SEQ ID NO: 1562023
aggauuccugcugacaacu

SEQ ID NO: 1716178 - RNA, 19 nt, Artificial Sequence
  Description of Artificial Sequence: Synthetic oligonucleotide
  Antisense strand to SEQ ID NO: 1716177
aguugucagcaggaauccu

SEQ ID NO: 1716179 - RNA, 19 nt, Artificial Sequence
  Description of Artificial Sequence: Synthetic oligonucleotide
  Sense strand starting at position 2746 of SEQ ID NO: 1562023
gcugacaacugucucauuu

SEQ ID NO: 1716180 - RNA, 19 nt, Artificial Sequence
  Description of Artificial Sequence: Synthetic oligonucleotide
  Antisense strand to SEQ ID NO: 1716179
aaaugagacaguugucagc

SEQ ID NO: 1716181 - RNA, 19 nt, Artificial Sequence
  Description of Artificial Sequence: Synthetic oligonucleotide
  Sense strand starting at position 2855 of SEQ ID NO: 1562023
gugaaaugggcguaaacca

SEQ ID NO: 1716182 - RNA, 19 nt, Artificial Sequence
  Description of Artificial Sequence: Synthetic oligonucleotide
  Antisense strand to SEQ ID NO: 1716181
ugguuuacgcccauuucac

SEQ ID NO: 1716183 - RNA, 19 nt, Artificial Sequence
  Description of Artificial Sequence: Synthetic oligonucleotide
  Sense strand starting at position 2923 of SEQ ID NO: 1562023
agguuuaggaagcauguaa

SEQ ID NO: 1716184 - RNA, 19 nt, Artificial Sequence
  Description of Artificial Sequence: Synthetic oligonucleotide
  Antisense strand to SEQ ID NO: 1716183
uuacaugcuuccuaaaccu

SEQ ID NO: 1716185 - RNA, 19 nt, Artificial Sequence
  Description of Artificial Sequence: Synthetic oligonucleotide
  Sense strand starting at position 3303 of SEQ ID NO: 1562023
guaaacauaugugcaucaa

SEQ ID NO: 1716186 - RNA, 19 nt, Artificial Sequence
  Description of Artificial Sequence: Synthetic oligonucleotide
  Antisense strand to SEQ ID NO: 1716185
uugaugcacauauguuuac

SEQ ID NO: 1716187 - RNA, 19 nt, Artificial Sequence
  Description of Artificial Sequence: Synthetic oligonucleotide
  Sense strand starting at position 3325 of SEQ ID NO: 1562023
uuugcaucucaggaccaau

SEQ ID NO: 1716188 - RNA, 19 nt, Artificial Sequence
  Description of Artificial Sequence: Synthetic oligonucleotide
  Antisense strand to SEQ ID NO: 1716187
auugguccugagaugcaaa

SEQ ID NO: 1716189 - RNA, 19 nt, Artificial Sequence
  Description of Artificial Sequence: Synthetic oligonucleotide
  Sense strand starting at position 3459 of SEQ ID NO: 1562023
gggugagcacuugaaaggu

SEQ ID NO: 1716190 - RNA, 19 nt, Artificial Sequence
  Description of Artificial Sequence: Synthetic oligonucleotide
  Antisense strand to SEQ ID NO: 1716189
accuuucaagugcucaccc

SEQ ID NO: 1716191 - RNA, 19 nt, Artificial Sequence
  Description of Artificial Sequence: Synthetic oligonucleotide
  Sense strand starting at position 3468 of SEQ ID NO: 1562023
cuugaaaggucugcuggga

SEQ ID NO: 1716192 - RNA, 19 nt, Artificial Sequence
  Description of Artificial Sequence: Synthetic oligonucleotide
  Antisense strand to SEQ ID NO: 1716191
ucccagcagaccuuucaag

SEQ ID NO: 1716193 - RNA, 19 nt, Artificial Sequence
  Description of Artificial Sequence: Synthetic oligonucleotide
  Sense strand starting at position 3552 of SEQ ID NO: 1562023
acuggauuguggccaguua

SEQ ID NO: 1716194 - RNA, 19 nt, Artificial Sequence
  Description of Artificial Sequence: Synthetic oligonucleotide
  Antisense strand to SEQ ID NO: 1716193
uaacuggccacaauccagu

SEQ ID NO: 1716195 - RNA, 19 nt, Artificial Sequence
  Description of Artificial Sequence: Synthetic oligonucleotide
  Sense strand starting at position 3600 of SEQ ID NO: 1562023
acaaccuaucaguguuaug

SEQ ID NO: 1716196 - RNA, 19 nt, Artificial Sequence
  Description of Artificial Sequence: Synthetic oligonucleotide
  Antisense strand to SEQ ID NO: 1716195
cauaacacugauagguugu

SEQ ID NO: 1716197 - RNA, 19 nt, Artificial Sequence
  Description of Artificial Sequence: Synthetic oligonucleotide
  Sense strand starting at position 3607 of SEQ ID NO: 1562023
aucaguguuauguaaugcu

SEQ ID NO: 1716198 - RNA, 19 nt, Artificial Sequence
  Description of Artificial Sequence: Synthetic oligonucleotide
  Antisense strand to SEQ ID NO: 1716197
agcauuacauaacacugau

SEQ ID NO: 1716199 - RNA, 19 nt, Artificial Sequence
  Description of Artificial Sequence: Synthetic oligonucleotide
  Sense strand starting at position 3617 of SEQ ID NO: 1562023
uguaaugcuuagguugaca

SEQ ID NO: 1716200 - RNA, 19 nt, Artificial Sequence
  Description of Artificial Sequence: Synthetic oligonucleotide
  Antisense strand to SEQ ID NO: 1716199
ugucaaccuaagcauuaca

SEQ ID NO: 1716201 - RNA, 19 nt, Artificial Sequence
  Description of Artificial Sequence: Synthetic oligonucleotide
  Sense strand starting at position 3845 of SEQ ID NO: 1562023
cugugaagcuugguuccaa

SEQ ID NO: 1716202 - RNA, 19 nt, Artificial Sequence
  Description of Artificial Sequence: Synthetic oligonucleotide
  Antisense strand to SEQ ID NO: 1716201
uuggaaccaagcuucacag

SEQ ID NO: 1716203 - RNA, 19 nt, Artificial Sequence
  Description of Artificial Sequence: Synthetic oligonucleotide
  Sense strand starting at position 3936 of SEQ ID NO: 1562023
gcucaaauggccugggauu

SEQ ID NO: 1716204 - RNA, 19 nt, Artificial Sequence
  Description of Artificial Sequence: Synthetic oligonucleotide
  Antisense strand to SEQ ID NO: 1716203
aaucccaggccauuugagc

SEQ ID NO: 1716205 - RNA, 19 nt, Artificial Sequence
  Description of Artificial Sequence: Synthetic oligonucleotide
  Sense strand starting at position 3948 of SEQ ID NO: 1562023
ugggauuucuuggagggaa

SEQ ID NO: 1716206 - RNA, 19 nt, Artificial Sequence
  Description of Artificial Sequence: Synthetic oligonucleotide
  Antisense strand to SEQ ID NO: 1716205
uucccuccaagaaauccca

SEQ ID NO: 1716207 - RNA, 19 nt, Artificial Sequence
  Description of Artificial Sequence: Synthetic oligonucleotide
  Sense strand starting at position 86 of SEQ ID NO: 1562024
auaucaaacuaguugggau

SEQ ID NO: 1716208 - RNA, 19 nt, Artificial Sequence
  Description of Artificial Sequence: Synthetic oligonucleotide
  Antisense strand to SEQ ID NO: 1716207
aucccaacuaguuugauau

SEQ ID NO: 1716209 - RNA, 19 nt, Artificial Sequence
  Description of Artificial Sequence: Synthetic oligonucleotide
  Sense strand starting at position 113 of SEQ ID NO: 1562024
cugccuuuggcugacacau

SEQ ID NO: 1716210 - RNA, 19 nt, Artificial Sequence
  Description of Artificial Sequence: Synthetic oligonucleotide
  Antisense strand to SEQ ID NO: 1716209
augugucagccaaaggcag

SEQ ID NO: 1716211 - RNA, 19 nt, Artificial Sequence
  Description of Artificial Sequence: Synthetic oligonucleotide
  Sense strand starting at position 173 of SEQ ID NO: 1562024
ggcgaaguuuauucaugau

SEQ ID NO: 1716212 - RNA, 19 nt, Artificial Sequence
  Description of Artificial Sequence: Synthetic oligonucleotide
  Antisense strand to SEQ ID NO: 1716211
aucaugaauaaacuucgcc

SEQ ID NO: 1716213 - RNA, 19 nt, Artificial Sequence
  Description of Artificial Sequence: Synthetic oligonucleotide
  Sense strand starting at position 425 of SEQ ID NO: 1562024
agguuacaguuagcugaaa

SEQ ID NO: 1716214 - RNA, 19 nt, Artificial Sequence
  Description of Artificial Sequence: Synthetic oligonucleotide
  Antisense strand to SEQ ID NO: 1716213
uuucagcuaacuguaaccu

SEQ ID NO: 1716215 - RNA, 19 nt, Artificial Sequence
  Description of Artificial Sequence: Synthetic oligonucleotide
  Sense strand starting at position 426 of SEQ ID NO: 1562024
gguuacaguuagcugaaau

SEQ ID NO: 1716216 - RNA, 19 nt, Artificial Sequence
  Description of Artificial Sequence: Synthetic oligonucleotide
  Antisense strand to SEQ ID NO: 1716215
auuucagcuaacuguaacc

SEQ ID NO: 1716217 - RNA, 19 nt, Artificial Sequence
  Description of Artificial Sequence: Synthetic oligonucleotide
  Sense strand starting at position 627 of SEQ ID NO: 1562024
caccauauauuagugugua

SEQ ID NO: 1716218 - RNA, 19 nt, Artificial Sequence
  Description of Artificial Sequence: Synthetic oligonucleotide
  Antisense strand to SEQ ID NO: 1716217
uacacacuaauauauggug

SEQ ID NO: 1716219 - RNA, 19 nt, Artificial Sequence
  Description of Artificial Sequence: Synthetic oligonucleotide
  Sense strand starting at position 632 of SEQ ID NO: 1562024
uauauuaguguguaucuca

SEQ ID NO: 1716220 - RNA, 19 nt, Artificial Sequence
  Description of Artificial Sequence: Synthetic oligonucleotide
  Antisense strand to SEQ ID NO: 1716219
ugagauacacacuaauaua

SEQ ID NO: 1716221 - RNA, 19 nt, Artificial Sequence
  Description of Artificial Sequence: Synthetic oligonucleotide
  Sense strand starting at position 642 of SEQ ID NO: 1562024
uguaucucacgggauacua

SEQ ID NO: 1716222 - RNA, 19 nt, Artificial Sequence
  Description of Artificial Sequence: Synthetic oligonucleotide
  Antisense strand to SEQ ID NO: 1716221
uaguaucccgugagauaca

SEQ ID NO: 1716223 - RNA, 19 nt, Artificial Sequence
  Description of Artificial Sequence: Synthetic oligonucleotide
  Sense strand starting at position 691 of SEQ ID NO: 1562024
acuggacuccucuaggcua

SEQ ID NO: 1716224 - RNA, 19 nt, Artificial Sequence
  Description of Artificial Sequence: Synthetic oligonucleotide
  Antisense strand to SEQ ID NO: 1716223
uagccuagaggaguccagu

SEQ ID NO: 1716225 - RNA, 19 nt, Artificial Sequence
  Description of Artificial Sequence: Synthetic oligonucleotide
  Sense strand starting at position 710 of SEQ ID NO: 1562024
uggaaccaugcuugguaau

SEQ ID NO: 1716226 - RNA, 19 nt, Artificial Sequence
  Description of Artificial Sequence: Synthetic oligonucleotide
  Antisense strand to SEQ ID NO: 1716225
auuaccaagcaugguucca

SEQ ID NO: 1716227 - RNA, 19 nt, Artificial Sequence
  Description of Artificial Sequence: Synthetic oligonucleotide
  Sense strand starting at position 711 of SEQ ID NO: 1562024
ggaaccaugcuugguaauc

SEQ ID NO: 1716228 - RNA, 19 nt, Artificial Sequence
  Description of Artificial Sequence: Synthetic oligonucleotide
  Antisense strand to SEQ ID NO: 1716227
gauuaccaagcaugguucc

SEQ ID NO: 1716229 - RNA, 19 nt, Artificial Sequence
  Description of Artificial Sequence: Synthetic oligonucleotide
  Sense strand starting at position 712 of SEQ ID NO: 1562024
gaaccaugcuugguaaucu

SEQ ID NO: 1716230 - RNA, 19 nt, Artificial Sequence
  Description of Artificial Sequence: Synthetic oligonucleotide
  Antisense strand to SEQ ID NO: 1716229
agauuaccaagcaugguuc

SEQ ID NO: 1716231 - RNA, 19 nt, Artificial Sequence
  Description of Artificial Sequence: Synthetic oligonucleotide
  Sense strand starting at position 763 of SEQ ID NO: 1562024
agaguugaugcccagagca

SEQ ID NO: 1716232 - RNA, 19 nt, Artificial Sequence
  Description of Artificial Sequence: Synthetic oligonucleotide
  Antisense strand to SEQ ID NO: 1716231
ugcucugggcaucaacucu

SEQ ID NO: 1716233 - RNA, 19 nt, Artificial Sequence
  Description of Artificial Sequence: Synthetic oligonucleotide
  Sense strand starting at position 765 of SEQ ID NO: 1562024
aguugaugcccagagcaca

SEQ ID NO: 1716234 - RNA, 19 nt, Artificial Sequence
  Description of Artificial Sequence: Synthetic oligonucleotide
  Antisense strand to SEQ ID NO: 1716233
ugugcucugggcaucaacu

SEQ ID NO: 1716235 - RNA, 19 nt, Artificial Sequence
  Description of Artificial Sequence: Synthetic oligonucleotide
  Sense strand starting at position 833 of SEQ ID NO: 1562024
uguguuugcauuugagaag

SEQ ID NO: 1716236 - RNA, 19 nt, Artificial Sequence
  Description of Artificial Sequence: Synthetic oligonucleotide
  Antisense strand to SEQ ID NO: 1716235
cuucucaaaugcaaacaca

SEQ ID NO: 1716237 - RNA, 19 nt, Artificial Sequence
  Description of Artificial Sequence: Synthetic oligonucleotide
  Sense strand starting at position 858 of SEQ ID NO: 1562024
uuuguaucugcagauguga

SEQ ID NO: 1716238 - RNA, 19 nt, Artificial Sequence
  Description of Artificial Sequence: Synthetic oligonucleotide
  Antisense strand to SEQ ID NO: 1716237
ucacaucugcagauacaaa

SEQ ID NO: 1716239 - RNA, 19 nt, Artificial Sequence
  Description of Artificial Sequence: Synthetic oligonucleotide
  Sense strand starting at position 908 of SEQ ID NO: 1562024
guccuuaacuacucuguga

SEQ ID NO: 1716240 - RNA, 19 nt, Artificial Sequence
  Description of Artificial Sequence: Synthetic oligonucleotide
  Antisense strand to SEQ ID NO: 1716239
ucacagaguaguuaaggac

SEQ ID NO: 1716241 - RNA, 19 nt, Artificial Sequence
  Description of Artificial Sequence: Synthetic oligonucleotide
  Sense strand starting at position 987 of SEQ ID NO: 1562024
gcaaguuaaaugggucaau

SEQ ID NO: 1716242 - RNA, 19 nt, Artificial Sequence
  Description of Artificial Sequence: Synthetic oligonucleotide
  Antisense strand to SEQ ID NO: 1716241
auugacccauuuaacuugc

SEQ ID NO: 1716243 - RNA, 19 nt, Artificial Sequence
  Description of Artificial Sequence: Synthetic oligonucleotide
  Sense strand starting at position 988 of SEQ ID NO: 1562024
caaguuaaaugggucaaua

SEQ ID NO: 1716244 - RNA, 19 nt, Artificial Sequence
  Description of Artificial Sequence: Synthetic oligonucleotide
  Antisense strand to SEQ ID NO: 1716243
uauugacccauuuaacuug

SEQ ID NO: 1716245 - RNA, 19 nt, Artificial Sequence
  Description of Artificial Sequence: Synthetic oligonucleotide
  Sense strand starting at position 1022 of SEQ ID NO: 1562024
gugagcacucauugaauac

SEQ ID NO: 1716246 - RNA, 19 nt, Artificial Sequence
  Description of Artificial Sequence: Synthetic oligonucleotide
  Antisense strand to SEQ ID NO: 1716245
guauucaaugagugcucac

SEQ ID NO: 1716247 - RNA, 19 nt, Artificial Sequence
  Description of Artificial Sequence: Synthetic oligonucleotide
  Sense strand starting at position 2235 of SEQ ID NO: 1562024
cagggacuugcccaaaguu

SEQ ID NO: 1716248 - RNA, 19 nt, Artificial Sequence
  Description of Artificial Sequence: Synthetic oligonucleotide
  Antisense strand to SEQ ID NO: 1716247
aacuuugggcaagucccug

SEQ ID NO: 1716249 - RNA, 19 nt, Artificial Sequence
  Description of Artificial Sequence: Synthetic oligonucleotide
  Sense strand starting at position 2255 of SEQ ID NO: 1562024
auauaucaugguggugaca

SEQ ID NO: 1716250 - RNA, 19 nt, Artificial Sequence
  Description of Artificial Sequence: Synthetic oligonucleotide
  Antisense strand to SEQ ID NO: 1716249
ugucaccaccaugauauau

SEQ ID NO: 1716251 - RNA, 19 nt, Artificial Sequence
  Description of Artificial Sequence: Synthetic oligonucleotide
  Sense strand starting at position 2258 of SEQ ID NO: 1562024
uaucaugguggugacagau

SEQ ID NO: 1716252 - RNA, 19 nt, Artificial Sequence
  Description of Artificial Sequence: Synthetic oligonucleotide
  Antisense strand to SEQ ID NO: 1716251
aucugucaccaccaugaua

SEQ ID NO: 1716253 - RNA, 19 nt, Artificial Sequence
  Description of Artificial Sequence: Synthetic oligonucleotide
  Sense strand starting at position 2298 of SEQ ID NO: 1562024
ccaguauaauggcuacauu

SEQ ID NO: 1716254 - RNA, 19 nt, Artificial Sequence
  Description of Artificial Sequence: Synthetic oligonucleotide
  Antisense strand to SEQ ID NO: 1716253
aauguagccauuauacugg

SEQ ID NO: 1716255 - RNA, 19 nt, Artificial Sequence
  Description of Artificial Sequence: Synthetic oligonucleotide
  Sense strand starting at position 2343 of SEQ ID NO: 1562024
uuacauaauccgggaucuu

SEQ ID NO: 1716256 - RNA, 19 nt, Artificial Sequence
  Description of Artificial Sequence: Synthetic oligonucleotide
  Antisense strand to SEQ ID NO: 1716255
aagaucccggauuauguaa

SEQ ID NO: 1716257 - RNA, 19 nt, Artificial Sequence
  Description of Artificial Sequence: Synthetic oligonucleotide
  Sense strand starting at position 2352 of SEQ ID NO: 1562024
ccgggaucuuggucucaga

SEQ ID NO: 1716258 - RNA, 19 nt, Artificial Sequence
  Description of Artificial Sequence: Synthetic oligonucleotide
  Antisense strand to SEQ ID NO: 1716257
ucugagaccaagaucccgg

SEQ ID NO: 1716259 - RNA, 19 nt, Artificial Sequence
  Description of Artificial Sequence: Synthetic oligonucleotide
  Sense strand starting at position 2435 of SEQ ID NO: 1562024
augagcaaucuguauaaau

SEQ ID NO: 1716260 - RNA, 19 nt, Artificial Sequence
  Description of Artificial Sequence: Synthetic oligonucleotide
  Antisense strand to SEQ ID NO: 1716259
auuuauacagauugcucau

SEQ ID NO: 1716261 - RNA, 19 nt, Artificial Sequence
  Description of Artificial Sequence: Synthetic oligonucleotide
  Sense strand starting at position 2454 of SEQ ID NO: 1562024
cucagaagaugauugguua

SEQ ID NO: 1716262 - RNA, 19 nt, Artificial Sequence
  Description of Artificial Sequence: Synthetic oligonucleotide
  Antisense strand to SEQ ID NO: 1716261
uaaccaaucaucuucugag

SEQ ID NO: 1716263 - RNA, 19 nt, Artificial Sequence
  Description of Artificial Sequence: Synthetic oligonucleotide
  Sense strand starting at position 2458 of SEQ ID NO: 1562024
gaagaugauugguuaccua

SEQ ID NO: 1716264 - RNA, 19 nt, Artificial Sequence
  Description of Artificial Sequence: Synthetic oligonucleotide
  Antisense strand to SEQ ID NO: 1716263
uagguaaccaaucaucuuc

SEQ ID NO: 1716265 - RNA, 19 nt, Artificial Sequence
  Description of Artificial Sequence: Synthetic oligonucleotide
  Sense strand starting at position 2461 of SEQ ID NO: 1562024
gaugauugguuaccuaaag

SEQ ID NO: 1716266 - RNA, 19 nt, Artificial Sequence
  Description of Artificial Sequence: Synthetic oligonucleotide
  Antisense strand to SEQ ID NO: 1716265
cuuuagguaaccaaucauc

SEQ ID NO: 1716267 - RNA, 19 nt, Artificial Sequence
  Description of Artificial Sequence: Synthetic oligonucleotide
  Sense strand starting at position 2499 of SEQ ID NO: 1562024
gucauaauuuauuagugga

SEQ ID NO: 1716268 - RNA, 19 nt, Artificial Sequence
  Description of Artificial Sequence: Synthetic oligonucleotide
  Antisense strand to SEQ ID NO: 1716267
uccacuaauaaauuaugac

SEQ ID NO: 1716269 - RNA, 19 nt, Artificial Sequence
  Description of Artificial Sequence: Synthetic oligonucleotide
  Sense strand starting at position 2534 of SEQ ID NO: 1562024
gcaggucaugguuaccauu

SEQ ID NO: 1716270 - RNA, 19 nt, Artificial Sequence
  Description of Artificial Sequence: Synthetic oligonucleotide
  Antisense strand to SEQ ID NO: 1716269
aaugguaaccaugaccugc

SEQ ID NO: 1716271 - RNA, 19 nt, Artificial Sequence
  Description of Artificial Sequence: Synthetic oligonucleotide
  Sense strand starting at position 2613 of SEQ ID NO: 1562024
guguuaugucaugaaauau

SEQ ID NO: 1716272 - RNA, 19 nt, Artificial Sequence
  Description of Artificial Sequence: Synthetic oligonucleotide
  Antisense strand to SEQ ID NO: 1716271
auauuucaugacauaacac

SEQ ID NO: 1716273 - RNA, 19 nt, Artificial Sequence
  Description of Artificial Sequence: Synthetic oligonucleotide
  Sense strand starting at position 2990 of SEQ ID NO: 1562024
ugggucaugcggcaagauu

SEQ ID NO: 1716274 - RNA, 19 nt, Artificial Sequence
  Description of Artificial Sequence: Synthetic oligonucleotide
  Antisense strand to SEQ ID NO: 1716273
aaucuugccgcaugaccca

SEQ ID NO: 1716275 - RNA, 19 nt, Artificial Sequence
  Description of Artificial Sequence: Synthetic oligonucleotide
  Sense strand starting at position 2999 of SEQ ID NO: 1562024
cggcaagauucugucugaa

SEQ ID NO: 1716276 - RNA, 19 nt, Artificial Sequence
  Description of Artificial Sequence: Synthetic oligonucleotide
  Antisense strand to SEQ ID NO: 1716275
uucagacagaaucuugccg

SEQ ID NO: 1716277 - RNA, 19 nt, Artificial Sequence
  Description of Artificial Sequence: Synthetic oligonucleotide
  Sense strand starting at position 3392 of SEQ ID NO: 1562024
guaucuguguauuuguaua

SEQ ID NO: 1716278 - RNA, 19 nt, Artificial Sequence
  Description of Artificial Sequence: Synthetic oligonucleotide
  Antisense strand to SEQ ID NO: 1716277
uauacaaauacacagauac

SEQ ID NO: 1716279 - RNA, 19 nt, Artificial Sequence
  Description of Artificial Sequence: Synthetic oligonucleotide
  Sense strand starting at position 3530 of SEQ ID NO: 1562024
ugacgucauagugaaaucu

SEQ ID NO: 1716280 - RNA, 19 nt, Artificial Sequence
  Description of Artificial Sequence: Synthetic oligonucleotide
  Antisense strand to SEQ ID NO: 1716279
agauuucacuaugacguca

SEQ ID NO: 1716281 - RNA, 19 nt, Artificial Sequence
  Description of Artificial Sequence: Synthetic oligonucleotide
  Sense strand starting at position 3629 of SEQ ID NO: 1562024
guugcaaacuggcuaagaa

SEQ ID NO: 1716282 - RNA, 19 nt, Artificial Sequence
  Description of Artificial Sequence: Synthetic oligonucleotide
  Antisense strand to SEQ ID NO: 1716281
uucuuagccaguuugcaac

SEQ ID NO: 1716283 - RNA, 19 nt, Artificial Sequence
  Description of Artificial Sequence: Synthetic oligonucleotide
  Sense strand starting at position 3630 of SEQ ID NO: 1562024
uugcaaacuggcuaagaaa

SEQ ID NO: 1716284 - RNA, 19 nt, Artificial Sequence
  Description of Artificial Sequence: Synthetic oligonucleotide
  Antisense strand to SEQ ID NO: 1716283
uuucuuagccaguuugcaa

SEQ ID NO: 1716285 - RNA, 19 nt, Artificial Sequence
  Description of Artificial Sequence: Synthetic oligonucleotide
  Sense strand starting at position 3684 of SEQ ID NO: 1562024
aauggucuaguuggaacaa

SEQ ID NO: 1716286 - RNA, 19 nt, Artificial Sequence
  Description of Artificial Sequence: Synthetic oligonucleotide
  Antisense strand to SEQ ID NO: 1716285
uuguuccaacuagaccauu

SEQ ID NO: 1716287 - RNA, 19 nt, Artificial Sequence
  Description of Artificial Sequence: Synthetic oligonucleotide
  Sense strand starting at position 84 of SEQ ID NO: 1562025
ggagaauugugugcaguug

SEQ ID NO: 1716288 - RNA, 19 nt, Artificial Sequence
  Description of Artificial Sequence: Synthetic oligonucleotide
  Antisense strand to SEQ ID NO: 1716287
caacugcacacaauucucc

SEQ ID NO: 1716289 - RNA, 19 nt, Artificial Sequence
  Description of Artificial Sequence: Synthetic oligonucleotide
  Sense strand starting at position 99 of SEQ ID NO: 1562025
guugguugauagguacaca

SEQ ID NO: 1716290 - RNA, 19 nt, Artificial Sequence
  Description of Artificial Sequence: Synthetic oligonucleotide
  Antisense strand to SEQ ID NO: 1716289
uguguaccuaucaaccaac

SEQ ID NO: 1716291 - RNA, 19 nt, Artificial Sequence
  Description of Artificial Sequence: Synthetic oligonucleotide
  Sense strand starting at position 176 of SEQ ID NO: 1562025
ugcagaaauuauguuauac

SEQ ID NO: 1716292 - RNA, 19 nt, Artificial Sequence
  Description of Artificial Sequence: Synthetic oligonucleotide
  Antisense strand to SEQ ID NO: 1716291
guauaacauaauuucugca

SEQ ID NO: 1716293 - RNA, 19 nt, Artificial Sequence
  Description of Artificial Sequence: Synthetic oligonucleotide
  Sense strand starting at position 251 of SEQ ID NO: 1562025
auauuaaacuggcugaaua

SEQ ID NO: 1716294 - RNA, 19 nt, Artificial Sequence
  Description of Artificial Sequence: Synthetic oligonucleotide
  Antisense strand to SEQ ID NO: 1716293
uauucagccaguuuaauau

SEQ ID NO: 1716295 - RNA, 19 nt, Artificial Sequence
  Description of Artificial Sequence: Synthetic oligonucleotide
  Sense strand starting at position 474 of SEQ ID NO: 1562025
guguguaagauuugucaua

SEQ ID NO: 1716296 - RNA, 19 nt, Artificial Sequence
  Description of Artificial Sequence: Synthetic oligonucleotide
  Antisense strand to SEQ ID NO: 1716295
uaugacaaaucuuacacac

SEQ ID NO: 1716297 - RNA, 19 nt, Artificial Sequence
  Description of Artificial Sequence: Synthetic oligonucleotide
  Sense strand starting at position 572 of SEQ ID NO: 1562025
aggucuauagggugaauau

SEQ ID NO: 1716298 - RNA, 19 nt, Artificial Sequence
  Description of Artificial Sequence: Synthetic oligonucleotide
  Antisense strand to SEQ ID NO: 1716297
auauucacccuauagaccu

SEQ ID NO: 1716299 - RNA, 19 nt, Artificial Sequence
  Description of Artificial Sequence: Synthetic oligonucleotide
  Sense strand starting at position 689 of SEQ ID NO: 1562025
ugcuaauuaccuugguuga

SEQ ID NO: 1716300 - RNA, 19 nt, Artificial Sequence
  Description of Artificial Sequence: Synthetic oligonucleotide
  Antisense strand to SEQ ID NO: 1716299
ucaaccaagguaauuagca

SEQ ID NO: 1716301 - RNA, 19 nt, Artificial Sequence
  Description of Artificial Sequence: Synthetic oligonucleotide
  Sense strand starting at position 690 of SEQ ID NO: 1562025
gcuaauuaccuugguugau

SEQ ID NO: 1716302 - RNA, 19 nt, Artificial Sequence
  Description of Artificial Sequence: Synthetic oligonucleotide
  Antisense strand to SEQ ID NO: 1716301
aucaaccaagguaauuagc

SEQ ID NO: 1716303 - RNA, 19 nt, Artificial Sequence
  Description of Artificial Sequence: Synthetic oligonucleotide
  Sense strand starting at position 699 of SEQ ID NO: 1562025
cuugguugaucauuacaca

SEQ ID NO: 1716304 - RNA, 19 nt, Artificial Sequence
  Description of Artificial Sequence: Synthetic oligonucleotide
  Antisense strand to SEQ ID NO: 1716303
uguguaaugaucaaccaag

SEQ ID NO: 1716305 - RNA, 19 nt, Artificial Sequence
  Description of Artificial Sequence: Synthetic oligonucleotide
  Sense strand starting at position 700 of SEQ ID NO: 1562025
uugguugaucauuacacau

SEQ ID NO: 1716306 - RNA, 19 nt, Artificial Sequence
  Description of Artificial Sequence: Synthetic oligonucleotide
  Antisense strand to SEQ ID NO: 1716305
auguguaaugaucaaccaa

SEQ ID NO: 1716307 - RNA, 19 nt, Artificial Sequence
  Description of Artificial Sequence: Synthetic oligonucleotide
  Sense strand starting at position 747 of SEQ ID NO: 1562025
ucuguaugccauuaaguau

SEQ ID NO: 1716308 - RNA, 19 nt, Artificial Sequence
  Description of Artificial Sequence: Synthetic oligonucleotide
  Antisense strand to SEQ ID NO: 1716307
auacuuaauggcauacaga

SEQ ID NO: 1716309 - RNA, 19 nt, Artificial Sequence
  Description of Artificial Sequence: Synthetic oligonucleotide
  Sense strand starting at position 984 of SEQ ID NO: 1562025
ugcaacaaagucuaucaga

SEQ ID NO: 1716310 - RNA, 19 nt, Artificial Sequence
  Description of Artificial Sequence: Synthetic oligonucleotide
  Antisense strand to SEQ ID NO: 1716309
ucugauagacuuuguugca

SEQ ID NO: 1716311 - RNA, 19 nt, Artificial Sequence
  Description of Artificial Sequence: Synthetic oligonucleotide
  Sense strand starting at position 1048 of SEQ ID NO: 1562025
gugaaacugaacuguaaug

SEQ ID NO: 1716312 - RNA, 19 nt, Artificial Sequence
  Description of Artificial Sequence: Synthetic oligonucleotide
  Antisense strand to SEQ ID NO: 1716311
cauuacaguucaguuucac

SEQ ID NO: 1716313 - RNA, 19 nt, Artificial Sequence
  Description of Artificial Sequence: Synthetic oligonucleotide
  Sense strand starting at position 1068 of SEQ ID NO: 1562025
uagaaaucagauugguggu

SEQ ID NO: 1716314 - RNA, 19 nt, Artificial Sequence
  Description of Artificial Sequence: Synthetic oligonucleotide
  Antisense strand to SEQ ID NO: 1716313
accaccaaucugauuucua

SEQ ID NO: 1716315 - RNA, 19 nt, Artificial Sequence
  Description of Artificial Sequence: Synthetic oligonucleotide
  Sense strand starting at position 1119 of SEQ ID NO: 1562025
cacagaagguucucuagcu

SEQ ID NO: 1716316 - RNA, 19 nt, Artificial Sequence
  Description of Artificial Sequence: Synthetic oligonucleotide
  Antisense strand to SEQ ID NO: 1716315
agcuagagaaccuucugug

SEQ ID NO: 1716317 - RNA, 19 nt, Artificial Sequence
  Description of Artificial Sequence: Synthetic oligonucleotide
  Sense strand starting at position 1125 of SEQ ID NO: 1562025
agguucucuagcugaugga

SEQ ID NO: 1716318 - RNA, 19 nt, Artificial Sequence
  Description of Artificial Sequence: Synthetic oligonucleotide
  Antisense strand to SEQ ID NO: 1716317
uccaucagcuagagaaccu

SEQ ID NO: 1716319 - RNA, 19 nt, Artificial Sequence
  Description of Artificial Sequence: Synthetic oligonucleotide
  Sense strand starting at position 1126 of SEQ ID NO: 1562025
gguucucuagcugauggaa

SEQ ID NO: 1716320 - RNA, 19 nt, Artificial Sequence
  Description of Artificial Sequence: Synthetic oligonucleotide
  Antisense strand to SEQ ID NO: 1716319
uuccaucagcuagagaacc

SEQ ID NO: 1716321 - RNA, 19 nt, Artificial Sequence
  Description of Artificial Sequence: Synthetic oligonucleotide
  Sense strand starting at position 1312 of SEQ ID NO: 1562025
aucugaagcacauguggua

SEQ ID NO: 1716322 - RNA, 19 nt, Artificial Sequence
  Description of Artificial Sequence: Synthetic oligonucleotide
  Antisense strand to SEQ ID NO: 1716321
uaccacaugugcuucagau

SEQ ID NO: 1716323 - RNA, 19 nt, Artificial Sequence
  Description of Artificial Sequence: Synthetic oligonucleotide
  Sense strand starting at position 1471 of SEQ ID NO: 1562025
ccugucagagccuaaauga

SEQ ID NO: 1716324 - RNA, 19 nt, Artificial Sequence
  Description of Artificial Sequence: Synthetic oligonucleotide
  Antisense strand to SEQ ID NO: 1716323
ucauuuaggcucugacagg

SEQ ID NO: 1716325 - RNA, 19 nt, Artificial Sequence
  Description of Artificial Sequence: Synthetic oligonucleotide
  Sense strand starting at position 1763 of SEQ ID NO: 1562025
gggugagggcagcgauaaa

SEQ ID NO: 1716326 - RNA, 19 nt, Artificial Sequence
  Description of Artificial Sequence: Synthetic oligonucleotide
  Antisense strand to SEQ ID NO: 1716325
uuuaucgcugcccucaccc

SEQ ID NO: 1716327 - RNA, 19 nt, Artificial Sequence
  Description of Artificial Sequence: Synthetic oligonucleotide
  Sense strand starting at position 1886 of SEQ ID NO: 1562025
cauccauagggaggucaua

SEQ ID NO: 1716328 - RNA, 19 nt, Artificial Sequence
  Description of Artificial Sequence: Synthetic oligonucleotide
  Antisense strand to SEQ ID NO: 1716327
uaugaccucccuauggaug

SEQ ID NO: 1716329 - RNA, 19 nt, Artificial Sequence
  Description of Artificial Sequence: Synthetic oligonucleotide
  Sense strand starting at position 1955 of SEQ ID NO: 1562025
gauuaaaguugggugugaa

SEQ ID NO: 1716330 - RNA, 19 nt, Artificial Sequence
  Description of Artificial Sequence: Synthetic oligonucleotide
  Antisense strand to SEQ ID NO: 1716329
uucacacccaacuuuaauc

SEQ ID NO: 1716331 - RNA, 19 nt, Artificial Sequence
  Description of Artificial Sequence: Synthetic oligonucleotide
  Sense strand starting at position 1956 of SEQ ID NO: 1562025
auuaaaguugggugugaaa

SEQ ID NO: 1716332 - RNA, 19 nt, Artificial Sequence
  Description of Artificial Sequence: Synthetic oligonucleotide
  Antisense strand to SEQ ID NO: 1716331
uuucacacccaacuuuaau

SEQ ID NO: 1716333 - RNA, 19 nt, Artificial Sequence
  Description of Artificial Sequence: Synthetic oligonucleotide
  Sense strand starting at position 1958 of SEQ ID NO: 1562025
uaaaguugggugugaaacu

SEQ ID NO: 1716334 - RNA, 19 nt, Artificial Sequence
  Description of Artificial Sequence: Synthetic oligonucleotide
  Antisense strand to SEQ ID NO: 1716333
aguuucacacccaacuuua

SEQ ID NO: 1716335 - RNA, 19 nt, Artificial Sequence
  Description of Artificial Sequence: Synthetic oligonucleotide
  Sense strand starting at position 1970 of SEQ ID NO: 1562025
ugaaacugguguuuccauu

SEQ ID NO: 1716336 - RNA, 19 nt, Artificial Sequence
  Description of Artificial Sequence: Synthetic oligonucleotide
  Antisense strand to SEQ ID NO: 1716335
aauggaaacaccaguuuca

SEQ ID NO: 1716337 - RNA, 19 nt, Artificial Sequence
  Description of Artificial Sequence: Synthetic oligonucleotide
  Sense strand starting at position 1998 of SEQ ID NO: 1562025
cauggugaugucugcaaga

SEQ ID NO: 1716338 - RNA, 19 nt, Artificial Sequence
  Description of Artificial Sequence: Synthetic oligonucleotide
  Antisense strand to SEQ ID NO: 1716337
ucuugcagacaucaccaug

SEQ ID NO: 1716339 - RNA, 19 nt, Artificial Sequence
  Description of Artificial Sequence: Synthetic oligonucleotide
  Sense strand starting at position 2000 of SEQ ID NO: 1562025
uggugaugucugcaagaaa

SEQ ID NO: 1716340 - RNA, 19 nt, Artificial Sequence
  Description of Artificial Sequence: Synthetic oligonucleotide
  Antisense strand to SEQ ID NO: 1716339
uuucuugcagacaucacca

SEQ ID NO: 1716341 - RNA, 19 nt, Artificial Sequence
  Description of Artificial Sequence: Synthetic oligonucleotide
  Sense strand starting at position 2041 of SEQ ID NO: 1562025
gggugaggguccagaccuu

SEQ ID NO: 1716342 - RNA, 19 nt, Artificial Sequence
  Description of Artificial Sequence: Synthetic oligonucleotide
  Antisense strand to SEQ ID NO: 1716341
aaggucuggacccucaccc

SEQ ID NO: 1716343 - RNA, 19 nt, Artificial Sequence
  Description of Artificial Sequence: Synthetic oligonucleotide
  Sense strand starting at position 2167 of SEQ ID NO: 1562025
gagaacaucuggucacauu

SEQ ID NO: 1716344 - RNA, 19 nt, Artificial Sequence
  Description of Artificial Sequence: Synthetic oligonucleotide
  Antisense strand to SEQ ID NO: 1716343
aaugugaccagauguucuc

SEQ ID NO: 1716345 - RNA, 19 nt, Artificial Sequence
  Description of Artificial Sequence: Synthetic oligonucleotide
  Sense strand starting at position 2177 of SEQ ID NO: 1562025
ggucacauucccugaguuc

SEQ ID NO: 1716346 - RNA, 19 nt, Artificial Sequence
  Description of Artificial Sequence: Synthetic oligonucleotide
  Antisense strand to SEQ ID NO: 1716345
gaacucagggaaugugacc

SEQ ID NO: 1716347 - RNA, 19 nt, Artificial Sequence
  Description of Artificial Sequence: Synthetic oligonucleotide
  Sense strand starting at position 2261 of SEQ ID NO: 1562025
agaccugagaucuguaagu

SEQ ID NO: 1716348 - RNA, 19 nt, Artificial Sequence
  Description of Artificial Sequence: Synthetic oligonucleotide
  Antisense strand to SEQ ID NO: 1716347
acuuacagaucucaggucu

SEQ ID NO: 1716349 - RNA, 19 nt, Artificial Sequence
  Description of Artificial Sequence: Synthetic oligonucleotide
  Sense strand starting at position 2263 of SEQ ID NO: 1562025
accugagaucuguaaguug

SEQ ID NO: 1716350 - RNA, 19 nt, Artificial Sequence
  Description of Artificial Sequence: Synthetic oligonucleotide
  Antisense strand to SEQ ID NO: 1716349
caacuuacagaucucaggu

SEQ ID NO: 1716351 - RNA, 19 nt, Artificial Sequence
  Description of Artificial Sequence: Synthetic oligonucleotide
  Sense strand starting at position 2453 of SEQ ID NO: 1562025
cuggaacauuuccaaggau

SEQ ID NO: 1716352 - RNA, 19 nt, Artificial Sequence
  Description of Artificial Sequence: Synthetic oligonucleotide
  Antisense strand to SEQ ID NO: 1716351
auccuuggaaauguuccag

SEQ ID NO: 1716353 - RNA, 19 nt, Artificial Sequence
  Description of Artificial Sequence: Synthetic oligonucleotide
  Sense strand starting at position 2519 of SEQ ID NO: 1562025
accuguuggccagggacaa

SEQ ID NO: 1716354 - RNA, 19 nt, Artificial Sequence
  Description of Artificial Sequence: Synthetic oligonucleotide
  Antisense strand to SEQ ID NO: 1716353
uugucccuggccaacaggu

SEQ ID NO: 1716355 - RNA, 19 nt, Artificial Sequence
  Description of Artificial Sequence: Synthetic oligonucleotide
  Sense strand starting at position 2520 of SEQ ID NO: 1562025
ccuguuggccagggacaau

SEQ ID NO: 1716356 - RNA, 19 nt, Artificial Sequence
  Description of Artificial Sequence: Synthetic oligonucleotide
  Antisense strand to SEQ ID NO: 1716355
auugucccuggccaacagg

SEQ ID NO: 1716357 - RNA, 19 nt, Artificial Sequence
  Description of Artificial Sequence: Synthetic oligonucleotide
  Sense strand starting at position 2564 of SEQ ID NO: 1562025
gggucuucucuccaaagca

SEQ ID NO: 1716358 - RNA, 19 nt, Artificial Sequence
  Description of Artificial Sequence: Synthetic oligonucleotide
  Antisense strand to SEQ ID NO: 1716357
ugcuuuggagagaagaccc

SEQ ID NO: 1716359 - RNA, 19 nt, Artificial Sequence
  Description of Artificial Sequence: Synthetic oligonucleotide
  Sense strand starting at position 2609 of SEQ ID NO: 1562025
agccauagacuuggaaauc

SEQ ID NO: 1716360 - RNA, 19 nt, Artificial Sequence
  Description of Artificial Sequence: Synthetic oligonucleotide
  Antisense strand to SEQ ID NO: 1716359
gauuuccaagucuauggcu

SEQ ID NO: 1716361 - RNA, 19 nt, Artificial Sequence
  Description of Artificial Sequence: Synthetic oligonucleotide
  Sense strand starting at position 2674 of SEQ ID NO: 1562025
gauuuaugcucucugaguc

SEQ ID NO: 1716362 - RNA, 19 nt, Artificial Sequence
  Description of Artificial Sequence: Synthetic oligonucleotide
  Antisense strand to SEQ ID NO: 1716361
gacucagagagcauaaauc

SEQ ID NO: 1716363 - RNA, 19 nt, Artificial Sequence
  Description of Artificial Sequence: Synthetic oligonucleotide
  Sense strand starting at position 2690 of SEQ ID NO: 1562025
guccuaaucuuccuguaaa

SEQ ID NO: 1716364 - RNA, 19 nt, Artificial Sequence
  Description of Artificial Sequence: Synthetic oligonucleotide
  Antisense strand to SEQ ID NO: 1716363
uuuacaggaagauuaggac

SEQ ID NO: 1716365 - RNA, 19 nt, Artificial Sequence
  Description of Artificial Sequence: Synthetic oligonucleotide
  Sense strand starting at position 3715 of SEQ ID NO: 1562025
gccuccuggcuggaagaaa

SEQ ID NO: 1716366 - RNA, 19 nt, Artificial Sequence
  Description of Artificial Sequence: Synthetic oligonucleotide
  Antisense strand to SEQ ID NO: 1716365
uuucuuccagccaggaggc

SEQ ID NO: 1716367 - RNA, 19 nt, Artificial Sequence
  Description of Artificial Sequence: Synthetic oligonucleotide
  Sense strand starting at position 64 of SEQ ID NO: 1562026
gaauaacucuguuccugug

SEQ ID NO: 1716368 - RNA, 19 nt, Artificial Sequence
  Description of Artificial Sequence: Synthetic oligonucleotide
  Antisense strand to SEQ ID NO: 1716367
cacaggaacagaguuauuc

SEQ ID NO: 1716369 - RNA, 19 nt, Artificial Sequence
  Description of Artificial Sequence: Synthetic oligonucleotide
  Sense strand starting at position 123 of SEQ ID NO: 1562026
uucuaacaccuuugggaaa

SEQ ID NO: 1716370 - RNA, 19 nt, Artificial Sequence
  Description of Artificial Sequence: Synthetic oligonucleotide
  Antisense strand to SEQ ID NO: 1716369
uuucccaaagguguuagaa

SEQ ID NO: 1716371 - RNA, 19 nt, Artificial Sequence
  Description of Artificial Sequence: Synthetic oligonucleotide
  Sense strand starting at position 144 of SEQ ID NO: 1562026
uccaaagauccuggugaca

SEQ ID NO: 1716372 - RNA, 19 nt, Artificial Sequence
  Description of Artificial Sequence: Synthetic oligonucleotide
  Antisense strand to SEQ ID NO: 1716371
ugucaccaggaucuuugga

SEQ ID NO: 1716373 - RNA, 19 nt, Artificial Sequence
  Description of Artificial Sequence: Synthetic oligonucleotide
  Sense strand starting at position 194 of SEQ ID NO: 1562026
cucugcuuaccugaaaguu

SEQ ID NO: 1716374 - RNA, 19 nt, Artificial Sequence
  Description of Artificial Sequence: Synthetic oligonucleotide
  Antisense strand to SEQ ID NO: 1716373
aacuuucagguaagcagag

SEQ ID NO: 1716375 - RNA, 19 nt, Artificial Sequence
  Description of Artificial Sequence: Synthetic oligonucleotide
  Sense strand starting at position 227 of SEQ ID NO: 1562026
ugauguuaccaaggcaauc

SEQ ID NO: 1716376 - RNA, 19 nt, Artificial Sequence
  Description of Artificial Sequence: Synthetic oligonucleotide
  Antisense strand to SEQ ID NO: 1716375
gauugccuugguaacauca

SEQ ID NO: 1716377 - RNA, 19 nt, Artificial Sequence
  Description of Artificial Sequence: Synthetic oligonucleotide
  Sense strand starting at position 253 of SEQ ID NO: 1562026
acccuaaggcuucgaucau

SEQ ID NO: 1716378 - RNA, 19 nt, Artificial Sequence
  Description of Artificial Sequence: Synthetic oligonucleotide
  Antisense strand to SEQ ID NO: 1716377
augaucgaagccuuagggu

SEQ ID NO: 1716379 - RNA, 19 nt, Artificial Sequence
  Description of Artificial Sequence: Synthetic oligonucleotide
  Sense strand starting at position 367 of SEQ ID NO: 1562026
gauaacagcugucccagau

SEQ ID NO: 1716380 - RNA, 19 nt, Artificial Sequence
  Description of Artificial Sequence: Synthetic oligonucleotide
  Antisense strand to SEQ ID NO: 1716379
aucugggacagcuguuauc

SEQ ID NO: 1716381 - RNA, 19 nt, Artificial Sequence
  Description of Artificial Sequence: Synthetic oligonucleotide
  Sense strand starting at position 557 of SEQ ID NO: 1562026
caugcucugccagaugauu

SEQ ID NO: 1716382 - RNA, 19 nt, Artificial Sequence
  Description of Artificial Sequence: Synthetic oligonucleotide
  Antisense strand to SEQ ID NO: 1716381
aaucaucuggcagagcaug

SEQ ID NO: 1716383 - RNA, 19 nt, Artificial Sequence
  Description of Artificial Sequence: Synthetic oligonucleotide
  Sense strand starting at position 920 of SEQ ID NO: 1562026
gggucaugaucuuucuaac

SEQ ID NO: 1716384 - RNA, 19 nt, Artificial Sequence
  Description of Artificial Sequence: Synthetic oligonucleotide
  Antisense strand to SEQ ID NO: 1716383
guuagaaagaucaugaccc

SEQ ID NO: 1716385 - RNA, 19 nt, Artificial Sequence
  Description of Artificial Sequence: Synthetic oligonucleotide
  Sense strand starting at position 1085 of SEQ ID NO: 1562026
augucaguuucucuucuau

SEQ ID NO: 1716386 - RNA, 19 nt, Artificial Sequence
  Description of Artificial Sequence: Synthetic oligonucleotide
  Antisense strand to SEQ ID NO: 1716385
auagaagagaaacugacau

SEQ ID NO: 1716387 - RNA, 19 nt, Artificial Sequence
  Description of Artificial Sequence: Synthetic oligonucleotide
  Sense strand starting at position 1191 of SEQ ID NO: 1562026
gguccucuuuacguacuua

SEQ ID NO: 1716388 - RNA, 19 nt, Artificial Sequence
  Description of Artificial Sequence: Synthetic oligonucleotide
  Antisense strand to SEQ ID NO: 1716387
uaaguacguaaagaggacc

SEQ ID NO: 1716389 - RNA, 19 nt, Artificial Sequence
  Description of Artificial Sequence: Synthetic oligonucleotide
  Sense strand starting at position 1195 of SEQ ID NO: 1562026
cucuuuacguacuuauuua

SEQ ID NO: 1716390 - RNA, 19 nt, Artificial Sequence
  Description of Artificial Sequence: Synthetic oligonucleotide
  Antisense strand to SEQ ID NO: 1716389
uaaauaaguacguaaagag

SEQ ID NO: 1716391 - RNA, 19 nt, Artificial Sequence
  Description of Artificial Sequence: Synthetic oligonucleotide
  Sense strand starting at position 1290 of SEQ ID NO: 1562026
ccaguaguguuccucauca

SEQ ID NO: 1716392 - RNA, 19 nt, Artificial Sequence
  Description of Artificial Sequence: Synthetic oligonucleotide
  Antisense strand to SEQ ID NO: 1716391
ugaugaggaacacuacugg

SEQ ID NO: 1716393 - RNA, 19 nt, Artificial Sequence
  Description of Artificial Sequence: Synthetic oligonucleotide
  Sense strand starting at position 1292 of SEQ ID NO: 1562026
aguaguguuccucaucaaa

SEQ ID NO: 1716394 - RNA, 19 nt, Artificial Sequence
  Description of Artificial Sequence: Synthetic oligonucleotide
  Antisense strand to SEQ ID NO: 1716393
uuugaugaggaacacuacu

SEQ ID NO: 1716395 - RNA, 19 nt, Artificial Sequence
  Description of Artificial Sequence: Synthetic oligonucleotide
  Sense strand starting at position 1295 of SEQ ID NO: 1562026
aguguuccucaucaaauga

SEQ ID NO: 1716396 - RNA, 19 nt, Artificial Sequence
  Description of Artificial Sequence: Synthetic oligonucleotide
  Antisense strand to SEQ ID NO: 1716395
ucauuugaugaggaacacu

SEQ ID NO: 1716397 - RNA, 19 nt, Artificial Sequence
  Description of Artificial Sequence: Synthetic oligonucleotide
  Sense strand starting at position 1341 of SEQ ID NO: 1562026
ucacuuauccagcaacgca

SEQ ID NO: 1716398 - RNA, 19 nt, Artificial Sequence
  Description of Artificial Sequence: Synthetic oligonucleotide
  Antisense strand to SEQ ID NO: 1716397
ugcguugcuggauaaguga

SEQ ID NO: 1716399 - RNA, 19 nt, Artificial Sequence
  Description of Artificial Sequence: Synthetic oligonucleotide
  Sense strand starting at position 1480 of SEQ ID NO: 1562026
acgucagauuccucuacuc

SEQ ID NO: 1716400 - RNA, 19 nt, Artificial Sequence
  Description of Artificial Sequence: Synthetic oligonucleotide
  Antisense strand to SEQ ID NO: 1716399
gaguagaggaaucugacgu

SEQ ID NO: 1716401 - RNA, 19 nt, Artificial Sequence
  Description of Artificial Sequence: Synthetic oligonucleotide
  Sense strand starting at position 1482 of SEQ ID NO: 1562026
gucagauuccucuacuccu

SEQ ID NO: 1716402 - RNA, 19 nt, Artificial Sequence
  Description of Artificial Sequence: Synthetic oligonucleotide
  Antisense strand to SEQ ID NO: 1716401
aggaguagaggaaucugac

SEQ ID NO: 1716403 - RNA, 19 nt, Artificial Sequence
  Description of Artificial Sequence: Synthetic oligonucleotide
  Sense strand starting at position 1553 of SEQ ID NO: 1562026
gagagucaaugugucacau

SEQ ID NO: 1716404 - RNA, 19 nt, Artificial Sequence
  Description of Artificial Sequence: Synthetic oligonucleotide
  Antisense strand to SEQ ID NO: 1716403
augugacacauugacucuc

SEQ ID NO: 1716405 - RNA, 19 nt, Artificial Sequence
  Description of Artificial Sequence: Synthetic oligonucleotide
  Sense strand starting at position 1621 of SEQ ID NO: 1562026
cguugcuuccugcagggau

SEQ ID NO: 1716406 - RNA, 19 nt, Artificial Sequence
  Description of Artificial Sequence: Synthetic oligonucleotide
  Antisense strand to SEQ ID NO: 1716405
aucccugcaggaagcaacg

SEQ ID NO: 1716407 - RNA, 19 nt, Artificial Sequence
  Description of Artificial Sequence: Synthetic oligonucleotide
  Sense strand starting at position 1623 of SEQ ID NO: 1562026
uugcuuccugcagggauua

SEQ ID NO: 1716408 - RNA, 19 nt, Artificial Sequence
  Description of Artificial Sequence: Synthetic oligonucleotide
  Antisense strand to SEQ ID NO: 1716407
uaaucccugcaggaagcaa

SEQ ID NO: 1716409 - RNA, 19 nt, Artificial Sequence
  Description of Artificial Sequence: Synthetic oligonucleotide
  Sense strand starting at position 1624 of SEQ ID NO: 1562026
ugcuuccugcagggauuaa

SEQ ID NO: 1716410 - RNA, 19 nt, Artificial Sequence
  Description of Artificial Sequence: Synthetic oligonucleotide
  Antisense strand to SEQ ID NO: 1716409
uuaaucccugcaggaagca

SEQ ID NO: 1716411 - RNA, 19 nt, Artificial Sequence
  Description of Artificial Sequence: Synthetic oligonucleotide
  Sense strand starting at position 2005 of SEQ ID NO: 1562026
uuugauucccugggcggaa

SEQ ID NO: 1716412 - RNA, 19 nt, Artificial Sequence
  Description of Artificial Sequence: Synthetic oligonucleotide
  Antisense strand to SEQ ID NO: 1716411
uuccgcccagggaaucaaa

SEQ ID NO: 1716413 - RNA, 19 nt, Artificial Sequence
  Description of Artificial Sequence: Synthetic oligonucleotide
  Sense strand starting at position 2215 of SEQ ID NO: 1562026
cggagaccugucugugaga

SEQ ID NO: 1716414 - RNA, 19 nt, Artificial Sequence
  Description of Artificial Sequence: Synthetic oligonucleotide
  Antisense strand to SEQ ID NO: 1716413
ucucacagacaggucuccg

SEQ ID NO: 1716415 - RNA, 19 nt, Artificial Sequence
  Description of Artificial Sequence: Synthetic oligonucleotide
  Sense strand starting at position 2217 of SEQ ID NO: 1562026
gagaccugucugugagagu

SEQ ID NO: 1716416 - RNA, 19 nt, Artificial Sequence
  Description of Artificial Sequence: Synthetic oligonucleotide
  Antisense strand to SEQ ID NO: 1716415
acucucacagacaggucuc

SEQ ID NO: 1716417 - RNA, 19 nt, Artificial Sequence
  Description of Artificial Sequence: Synthetic oligonucleotide
  Sense strand starting at position 2349 of SEQ ID NO: 1562026
uguguagagcuugugugua

SEQ ID NO: 1716418 - RNA, 19 nt, Artificial Sequence
  Description of Artificial Sequence: Synthetic oligonucleotide
  Antisense strand to SEQ ID NO: 1716417
uacacacaagcucuacaca

SEQ ID NO: 1716419 - RNA, 19 nt, Artificial Sequence
  Description of Artificial Sequence: Synthetic oligonucleotide
  Sense strand starting at position 2499 of SEQ ID NO: 1562026
gccaacaugccuuggacau

SEQ ID NO: 1716420 - RNA, 19 nt, Artificial Sequence
  Description of Artificial Sequence: Synthetic oligonucleotide
  Antisense strand to SEQ ID NO: 1716419
auguccaaggcauguuggc

SEQ ID NO: 1716421 - RNA, 19 nt, Artificial Sequence
  Description of Artificial Sequence: Synthetic oligonucleotide
  Sense strand starting at position 2500 of SEQ ID NO: 1562026
ccaacaugccuuggacauu

SEQ ID NO: 1716422 - RNA, 19 nt, Artificial Sequence
  Description of Artificial Sequence: Synthetic oligonucleotide
  Antisense strand to SEQ ID NO: 1716421
aauguccaaggcauguugg

SEQ ID NO: 1716423 - RNA, 19 nt, Artificial Sequence
  Description of Artificial Sequence: Synthetic oligonucleotide
  Sense strand starting at position 2545 of SEQ ID NO: 1562026
uggagagcuaauugacgaa

SEQ ID NO: 1716424 - RNA, 19 nt, Artificial Sequence
  Description of Artificial Sequence: Synthetic oligonucleotide
  Antisense strand to SEQ ID NO: 1716423
uucgucaauuagcucucca

SEQ ID NO: 1716425 - RNA, 19 nt, Artificial Sequence
  Description of Artificial Sequence: Synthetic oligonucleotide
  Sense strand starting at position 2576 of SEQ ID NO: 1562026
agcugagcugucgggaaca

SEQ ID NO: 1716426 - RNA, 19 nt, Artificial Sequence
  Description of Artificial Sequence: Synthetic oligonucleotide
  Antisense strand to SEQ ID NO: 1716425
uguucccgacagcucagcu

SEQ ID NO: 1716427 - RNA, 19 nt, Artificial Sequence
  Description of Artificial Sequence: Synthetic oligonucleotide
  Sense strand starting at position 2589 of SEQ ID NO: 1562026
ggaacacgucaguacauga

SEQ ID NO: 1716428 - RNA, 19 nt, Artificial Sequence
  Description of Artificial Sequence: Synthetic oligonucleotide
  Antisense strand to SEQ ID NO: 1716427
ucauguacugacguguucc

SEQ ID NO: 1716429 - RNA, 19 nt, Artificial Sequence
  Description of Artificial Sequence: Synthetic oligonucleotide
  Sense strand starting at position 2617 of SEQ ID NO: 1562026
ucaagcaugugggugaauu

SEQ ID NO: 1716430 - RNA, 19 nt, Artificial Sequence
  Description of Artificial Sequence: Synthetic oligonucleotide
  Antisense strand to SEQ ID NO: 1716429
aauucacccacaugcuuga

SEQ ID NO: 1716431 - RNA, 19 nt, Artificial Sequence
  Description of Artificial Sequence: Synthetic oligonucleotide
  Sense strand starting at position 2618 of SEQ ID NO: 1562026
caagcaugugggugaauuc

SEQ ID NO: 1716432 - RNA, 19 nt, Artificial Sequence
  Description of Artificial Sequence: Synthetic oligonucleotide
  Antisense strand to SEQ ID NO: 1716431
gaauucacccacaugcuug

SEQ ID NO: 1716433 - RNA, 19 nt, Artificial Sequence
  Description of Artificial Sequence: Synthetic oligonucleotide
  Sense strand starting at position 2702 of SEQ ID NO: 1562026
augacuguacucugugcau

SEQ ID NO: 1716434 - RNA, 19 nt, Artificial Sequence
  Description of Artificial Sequence: Synthetic oligonucleotide
  Antisense strand to SEQ ID NO: 1716433
augcacagaguacagucau

SEQ ID NO: 1716435 - RNA, 19 nt, Artificial Sequence
  Description of Artificial Sequence: Synthetic oligonucleotide
  Sense strand starting at position 2708 of SEQ ID NO: 1562026
guacucugugcaugcauuu

SEQ ID NO: 1716436 - RNA, 19 nt, Artificial Sequence
  Description of Artificial Sequence: Synthetic oligonucleotide
  Antisense strand to SEQ ID NO: 1716435
aaaugcaugcacagaguac

SEQ ID NO: 1716437 - RNA, 19 nt, Artificial Sequence
  Description of Artificial Sequence: Synthetic oligonucleotide
  Sense strand starting at position 2750 of SEQ ID NO: 1562026
guccuccugcuguaagaca

SEQ ID NO: 1716438 - RNA, 19 nt, Artificial Sequence
  Description of Artificial Sequence: Synthetic oligonucleotide
  Antisense strand to SEQ ID NO: 1716437
ugucuuacagcaggaggac

SEQ ID NO: 1716439 - RNA, 19 nt, Artificial Sequence
  Description of Artificial Sequence: Synthetic oligonucleotide
  Sense strand starting at position 3071 of SEQ ID NO: 1562026
ggagaaccacccugauguu

SEQ ID NO: 1716440 - RNA, 19 nt, Artificial Sequence
  Description of Artificial Sequence: Synthetic oligonucleotide
  Antisense strand to SEQ ID NO: 1716439
aacaucagggugguucucc

SEQ ID NO: 1716441 - RNA, 19 nt, Artificial Sequence
  Description of Artificial Sequence: Synthetic oligonucleotide
  Sense strand starting at position 3102 of SEQ ID NO: 1562026
ggcgguaagcaagagucaa

SEQ ID NO: 1716442 - RNA, 19 nt, Artificial Sequence
  Description of Artificial Sequence: Synthetic oligonucleotide
  Antisense strand to SEQ ID NO: 1716441
uugacucuugcuuaccgcc

SEQ ID NO: 1716443 - RNA, 19 nt, Artificial Sequence
  Description of Artificial Sequence: Synthetic oligonucleotide
  Sense strand starting at position 3144 of SEQ ID NO: 1562026
ugccuauuugaaggcgagu

SEQ ID NO: 1716444 - RNA, 19 nt, Artificial Sequence
  Description of Artificial Sequence: Synthetic oligonucleotide
  Antisense strand to SEQ ID NO: 1716443
acucgccuucaaauaggca

SEQ ID NO: 1716445 - RNA, 19 nt, Artificial Sequence
  Description of Artificial Sequence: Synthetic oligonucleotide
  Sense strand starting at position 3158 of SEQ ID NO: 1562026
cgaguaaagacguaggaga

SEQ ID NO: 1716446 - RNA, 19 nt, Artificial Sequence
  Description of Artificial Sequence: Synthetic oligonucleotide
  Antisense strand to SEQ ID NO: 1716445
ucuccuacgucuuuacucg

SEQ ID NO: 1716447 - RNA, 19 nt, Artificial Sequence
  Description of Artificial Sequence: Synthetic oligonucleotide
  Sense strand starting at position 93 of SEQ ID NO: 1562027
gcuaguaaguaaccauuau

SEQ ID NO: 1716448 - RNA, 19 nt, Artificial Sequence
  Description of Artificial Sequence: Synthetic oligonucleotide
  Antisense strand to SEQ ID NO: 1716447
auaaugguuacuuacuagc

SEQ ID NO: 1716449 - RNA, 19 nt, Artificial Sequence
  Description of Artificial Sequence: Synthetic oligonucleotide
  Sense strand starting at position 108 of SEQ ID NO: 1562027
uuauauaaucggcaugugu

SEQ ID NO: 1716450 - RNA, 19 nt, Artificial Sequence
  Description of Artificial Sequence: Synthetic oligonucleotide
  Antisense strand to SEQ ID NO: 1716449
acacaugccgauuauauaa

SEQ ID NO: 1716451 - RNA, 19 nt, Artificial Sequence
  Description of Artificial Sequence: Synthetic oligonucleotide
  Sense strand starting at position 143 of SEQ ID NO: 1562027
gaaucagucccaugcaaag

SEQ ID NO: 1716452 - RNA, 19 nt, Artificial Sequence
  Description of Artificial Sequence: Synthetic oligonucleotide
  Antisense strand to SEQ ID NO: 1716451
cuuugcaugggacugauuc

SEQ ID NO: 1716453 - RNA, 19 nt, Artificial Sequence
  Description of Artificial Sequence: Synthetic oligonucleotide
  Sense strand starting at position 250 of SEQ ID NO: 1562027
uuuccugcacugugacaua

SEQ ID NO: 1716454 - RNA, 19 nt, Artificial Sequence
  Description of Artificial Sequence: Synthetic oligonucleotide
  Antisense strand to SEQ ID NO: 1716453
uaugucacagugcaggaaa

SEQ ID NO: 1716455 - RNA, 19 nt, Artificial Sequence
  Description of Artificial Sequence: Synthetic oligonucleotide
  Sense strand starting at position 270 of SEQ ID NO: 1562027
ucaugugacagccaugaga

SEQ ID NO: 1716456 - RNA, 19 nt, Artificial Sequence
  Description of Artificial Sequence: Synthetic oligonucleotide
  Antisense strand to SEQ ID NO: 1716455
ucucauggcugucacauga

SEQ ID NO: 1716457 - RNA, 19 nt, Artificial Sequence
  Description of Artificial Sequence: Synthetic oligonucleotide
  Sense strand starting at position 272 of SEQ ID NO: 1562027
augugacagccaugagaag

SEQ ID NO: 1716458 - RNA, 19 nt, Artificial Sequence
  Description of Artificial Sequence: Synthetic oligonucleotide
  Antisense strand to SEQ ID NO: 1716457
cuucucauggcugucacau

SEQ ID NO: 1716459 - RNA, 19 nt, Artificial Sequence
  Description of Artificial Sequence: Synthetic oligonucleotide
  Sense strand starting at position 295 of SEQ ID NO: 1562027
cugauuugccgucagugga

SEQ ID NO: 1716460 - RNA, 19 nt, Artificial Sequence
  Description of Artificial Sequence: Synthetic oligonucleotide
  Antisense strand to SEQ ID NO: 1716459
uccacugacggcaaaucag

SEQ ID NO: 1716461 - RNA, 19 nt, Artificial Sequence
  Description of Artificial Sequence: Synthetic oligonucleotide
  Sense strand starting at position 359 of SEQ ID NO: 1562027
gaaggauauggcuguuauu

SEQ ID NO: 1716462 - RNA, 19 nt, Artificial Sequence
  Description of Artificial Sequence: Synthetic oligonucleotide
  Antisense strand to SEQ ID NO: 1716461
aauaacagccauauccuuc

SEQ ID NO: 1716463 - RNA, 19 nt, Artificial Sequence
  Description of Artificial Sequence: Synthetic oligonucleotide
  Sense strand starting at position 408 of SEQ ID NO: 1562027
cgagucaagccagaaacaa

SEQ ID NO: 1716464 - RNA, 19 nt, Artificial Sequence
  Description of Artificial Sequence: Synthetic oligonucleotide
  Antisense strand to SEQ ID NO: 1716463
uuguuucuggcuugacucg

SEQ ID NO: 1716465 - RNA, 19 nt, Artificial Sequence
  Description of Artificial Sequence: Synthetic oligonucleotide
  Sense strand starting at position 665 of SEQ ID NO: 1562027
cuggcugagaaguauugau

SEQ ID NO: 1716466 - RNA, 19 nt, Artificial Sequence
  Description of Artificial Sequence: Synthetic oligonucleotide
  Antisense strand to SEQ ID NO: 1716465
aucaauacuucucagccag

SEQ ID NO: 1716467 - RNA, 19 nt, Artificial Sequence
  Description of Artificial Sequence: Synthetic oligonucleotide
  Sense strand starting at position 682 of SEQ ID NO: 1562027
aucugaaguguuuggguuu

SEQ ID NO: 1716468 - RNA, 19 nt, Artificial Sequence
  Description of Artificial Sequence: Synthetic oligonucleotide
  Antisense strand to SEQ ID NO: 1716467
aaacccaaacacuucagau

SEQ ID NO: 1716469 - RNA, 19 nt, Artificial Sequence
  Description of Artificial Sequence: Synthetic oligonucleotide
  Sense strand starting at position 702 of SEQ ID NO: 1562027
cugggagcuuucucaggua

SEQ ID NO: 1716470 - RNA, 19 nt, Artificial Sequence
  Description of Artificial Sequence: Synthetic oligonucleotide
  Antisense strand to SEQ ID NO: 1716469
uaccugagaaagcucccag

SEQ ID NO: 1716471 - RNA, 19 nt, Artificial Sequence
  Description of Artificial Sequence: Synthetic oligonucleotide
  Sense strand starting at position 726 of SEQ ID NO: 1562027
ucacuugaccuucgacuga

SEQ ID NO: 1716472 - RNA, 19 nt, Artificial Sequence
  Description of Artificial Sequence: Synthetic oligonucleotide
  Antisense strand to SEQ ID NO: 1716471
ucagucgaaggucaaguga

SEQ ID NO: 1716473 - RNA, 19 nt, Artificial Sequence
  Description of Artificial Sequence: Synthetic oligonucleotide
  Sense strand starting at position 761 of SEQ ID NO: 1562027
gcuauauggguucguuaaa

SEQ ID NO: 1716474 - RNA, 19 nt, Artificial Sequence
  Description of Artificial Sequence: Synthetic oligonucleotide
  Antisense strand to SEQ ID NO: 1716473
uuuaacgaacccauauagc

SEQ ID NO: 1716475 - RNA, 19 nt, Artificial Sequence
  Description of Artificial Sequence: Synthetic oligonucleotide
  Sense strand starting at position 762 of SEQ ID NO: 1562027
cuauauggguucguuaaag

SEQ ID NO: 1716476 - RNA, 19 nt, Artificial Sequence
  Description of Artificial Sequence: Synthetic oligonucleotide
  Antisense strand to SEQ ID NO: 1716475
cuuuaacgaacccauauag

SEQ ID NO: 1716477 - RNA, 19 nt, Artificial Sequence
  Description of Artificial Sequence: Synthetic oligonucleotide
  Sense strand starting at position 849 of SEQ ID NO: 1562027
ucuuuaagcugaguuagau

SEQ ID NO: 1716478 - RNA, 19 nt, Artificial Sequence
  Description of Artificial Sequence: Synthetic oligonucleotide
  Antisense strand to SEQ ID NO: 1716477
aucuaacucagcuuaaaga

SEQ ID NO: 1716479 - RNA, 19 nt, Artificial Sequence
  Description of Artificial Sequence: Synthetic oligonucleotide
  Sense strand starting at position 858 of SEQ ID NO: 1562027
ugaguuagaucaccugaug

SEQ ID NO: 1716480 - RNA, 19 nt, Artificial Sequence
  Description of Artificial Sequence: Synthetic oligonucleotide
  Antisense strand to SEQ ID NO: 1716479
caucaggugaucuaacuca

SEQ ID NO: 1716481 - RNA, 19 nt, Artificial Sequence
  Description of Artificial Sequence: Synthetic oligonucleotide
  Sense strand starting at position 1025 of SEQ ID NO: 1562027
cugacacgucuugauggua

SEQ ID NO: 1716482 - RNA, 19 nt, Artificial Sequence
  Description of Artificial Sequence: Synthetic oligonucleotide
  Antisense strand to SEQ ID NO: 1716481
uaccaucaagacgugucag

SEQ ID NO: 1716483 - RNA, 19 nt, Artificial Sequence
  Description of Artificial Sequence: Synthetic oligonucleotide
  Sense strand starting at position 1033 of SEQ ID NO: 1562027
ucuugaugguacgaauuua

SEQ ID NO: 1716484 - RNA, 19 nt, Artificial Sequence
  Description of Artificial Sequence: Synthetic oligonucleotide
  Antisense strand to SEQ ID NO: 1716483
uaaauucguaccaucaaga

SEQ ID NO: 1716485 - RNA, 19 nt, Artificial Sequence
  Description of Artificial Sequence: Synthetic oligonucleotide
  Sense strand starting at position 1779 of SEQ ID NO: 1562027
gcgcguacuccacuuggaa

SEQ ID NO: 1716486 - RNA, 19 nt, Artificial Sequence
  Description of Artificial Sequence: Synthetic oligonucleotide
  Antisense strand to SEQ ID NO: 1716485
uuccaaguggaguacgcgc

SEQ ID NO: 1716487 - RNA, 19 nt, Artificial Sequence
  Description of Artificial Sequence: Synthetic oligonucleotide
  Sense strand starting at position 1781 of SEQ ID NO: 1562027
gcguacuccacuuggaaga

SEQ ID NO: 1716488 - RNA, 19 nt, Artificial Sequence
  Description of Artificial Sequence: Synthetic oligonucleotide
  Antisense strand to SEQ ID NO: 1716487
ucuuccaaguggaguacgc

SEQ ID NO: 1716489 - RNA, 19 nt, Artificial Sequence
  Description of Artificial Sequence: Synthetic oligonucleotide
  Sense strand starting at position 2769 of SEQ ID NO: 1562027
gggaacuguccugggcuau

SEQ ID NO: 1716490 - RNA, 19 nt, Artificial Sequence
  Description of Artificial Sequence: Synthetic oligonucleotide
  Antisense strand to SEQ ID NO: 1716489
auagcccaggacaguuccc

SEQ ID NO: 1716491 - RNA, 19 nt, Artificial Sequence
  Description of Artificial Sequence: Synthetic oligonucleotide
  Sense strand starting at position 3229 of SEQ ID NO: 1562027
uugggacaccguuauccaa

SEQ ID NO: 1716492 - RNA, 19 nt, Artificial Sequence
  Description of Artificial Sequence: Synthetic oligonucleotide
  Antisense strand to SEQ ID NO: 1716491
uuggauaacggugucccaa

SEQ ID NO: 1716493 - RNA, 19 nt, Artificial Sequence
  Description of Artificial Sequence: Synthetic oligonucleotide
  Sense strand starting at position 3300 of SEQ ID NO: 1562027
aagacagauucggaagaaa

SEQ ID NO: 1716494 - RNA, 19 nt, Artificial Sequence
  Description of Artificial Sequence: Synthetic oligonucleotide
  Antisense strand to SEQ ID NO: 1716493
uuucuuccgaaucugucuu

SEQ ID NO: 1716495 - RNA, 19 nt, Artificial Sequence
  Description of Artificial Sequence: Synthetic oligonucleotide
  Sense strand starting at position 3347 of SEQ ID NO: 1562027
gucacaacaucuguuggaa

SEQ ID NO: 1716496 - RNA, 19 nt, Artificial Sequence
  Description of Artificial Sequence: Synthetic oligonucleotide
  Antisense strand to SEQ ID NO: 1716495
uuccaacagauguugugac

SEQ ID NO: 1716497 - RNA, 19 nt, Artificial Sequence
  Description of Artificial Sequence: Synthetic oligonucleotide
  Sense strand starting at position 3350 of SEQ ID NO: 1562027
acaacaucuguuggaauga

SEQ ID NO: 1716498 - RNA, 19 nt, Artificial Sequence
  Description of Artificial Sequence: Synthetic oligonucleotide
  Antisense strand to SEQ ID NO: 1716497
ucauuccaacagauguugu

SEQ ID NO: 1716499 - RNA, 19 nt, Artificial Sequence
  Description of Artificial Sequence: Synthetic oligonucleotide
  Sense strand starting at position 3411 of SEQ ID NO: 1562027
gugggauugcagggauaaa

SEQ ID NO: 1716500 - RNA, 19 nt, Artificial Sequence
  Description of Artificial Sequence: Synthetic oligonucleotide
  Antisense strand to SEQ ID NO: 1716499
uuuaucccugcaaucccac

SEQ ID NO: 1716501 - RNA, 19 nt, Artificial Sequence
  Description of Artificial Sequence: Synthetic oligonucleotide
  Sense strand starting at position 3421 of SEQ ID NO: 1562027
agggauaaacagugguauu

SEQ ID NO: 1716502 - RNA, 19 nt, Artificial Sequence
  Description of Artificial Sequence: Synthetic oligonucleotide
  Antisense strand to SEQ ID NO: 1716501
aauaccacuguuuaucccu

SEQ ID NO: 1716503 - RNA, 19 nt, Artificial Sequence
  Description of Artificial Sequence: Synthetic oligonucleotide
  Sense strand starting at position 3422 of SEQ ID NO: 1562027
gggauaaacagugguauuc

SEQ ID NO: 1716504 - RNA, 19 nt, Artificial Sequence
  Description of Artificial Sequence: Synthetic oligonucleotide
  Antisense strand to SEQ ID NO: 1716503
gaauaccacuguuuauccc

SEQ ID NO: 1716505 - RNA, 19 nt, Artificial Sequence
  Description of Artificial Sequence: Synthetic oligonucleotide
  Sense strand starting at position 3488 of SEQ ID NO: 1562027
cuugacugaggcuguuauu

SEQ ID NO: 1716506 - RNA, 19 nt, Artificial Sequence
  Description of Artificial Sequence: Synthetic oligonucleotide
  Antisense strand to SEQ ID NO: 1716505
aauaacagccucagucaag

SEQ ID NO: 1716507 - RNA, 19 nt, Artificial Sequence
  Description of Artificial Sequence: Synthetic oligonucleotide
  Sense strand starting at position 3497 of SEQ ID NO: 1562027
ggcuguuauuccuugauga

SEQ ID NO: 1716508 - RNA, 19 nt, Artificial Sequence
  Description of Artificial Sequence: Synthetic oligonucleotide
  Antisense strand to SEQ ID NO: 1716507
ucaucaaggaauaacagcc

SEQ ID NO: 1716509 - RNA, 19 nt, Artificial Sequence
  Description of Artificial Sequence: Synthetic oligonucleotide
  Sense strand starting at position 3498 of SEQ ID NO: 1562027
gcuguuauuccuugaugac

SEQ ID NO: 1716510 - RNA, 19 nt, Artificial Sequence
  Description of Artificial Sequence: Synthetic oligonucleotide
  Antisense strand to SEQ ID NO: 1716509
gucaucaaggaauaacagc

SEQ ID NO: 1716511 - RNA, 19 nt, Artificial Sequence
  Description of Artificial Sequence: Synthetic oligonucleotide
  Sense strand starting at position 3499 of SEQ ID NO: 1562027
cuguuauuccuugaugacg

SEQ ID NO: 1716512 - RNA, 19 nt, Artificial Sequence
  Description of Artificial Sequence: Synthetic oligonucleotide
  Antisense strand to SEQ ID NO: 1716511
cgucaucaaggaauaacag

SEQ ID NO: 1716513 - RNA, 19 nt, Artificial Sequence
  Description of Artificial Sequence: Synthetic oligonucleotide
  Sense strand starting at position 3529 of SEQ ID NO: 1562027
uguggaaguuguccuaaau

SEQ ID NO: 1716514 - RNA, 19 nt, Artificial Sequence
  Description of Artificial Sequence: Synthetic oligonucleotide
  Antisense strand to SEQ ID NO: 1716513
auuuaggacaacuuccaca

SEQ ID NO: 1716515 - RNA, 19 nt, Artificial Sequence
  Description of Artificial Sequence: Synthetic oligonucleotide
  Sense strand starting at position 3593 of SEQ ID NO: 1562027
auuugauggucuuaacaaa

SEQ ID NO: 1716516 - RNA, 19 nt, Artificial Sequence
  Description of Artificial Sequence: Synthetic oligonucleotide
  Antisense strand to SEQ ID NO: 1716515
uuuguuaagaccaucaaau

SEQ ID NO: 1716517 - RNA, 19 nt, Artificial Sequence
  Description of Artificial Sequence: Synthetic oligonucleotide
  Sense strand starting at position 3642 of SEQ ID NO: 1562027
gauugagaauagcagaaau

SEQ ID NO: 1716518 - RNA, 19 nt, Artificial Sequence
  Description of Artificial Sequence: Synthetic oligonucleotide
  Antisense strand to SEQ ID NO: 1716517
auuucugcuauucucaauc

SEQ ID NO: 1716519 - RNA, 19 nt, Artificial Sequence
  Description of Artificial Sequence: Synthetic oligonucleotide
  Sense strand starting at position 3710 of SEQ ID NO: 1562027
gcgcuuaccguaucccaga

SEQ ID NO: 1716520 - RNA, 19 nt, Artificial Sequence
  Description of Artificial Sequence: Synthetic oligonucleotide
  Antisense strand to SEQ ID NO: 1716519
ucugggauacgguaagcgc

SEQ ID NO: 1716521 - RNA, 19 nt, Artificial Sequence
  Description of Artificial Sequence: Synthetic oligonucleotide
  Sense strand starting at position 3790 of SEQ ID NO: 1562027
cccguuuaauagcuaaaga

SEQ ID NO: 1716522 - RNA, 19 nt, Artificial Sequence
  Description of Artificial Sequence: Synthetic oligonucleotide
  Antisense strand to SEQ ID NO: 1716521
ucuuuagcuauuaaacggg

SEQ ID NO: 1716523 - RNA, 19 nt, Artificial Sequence
  Description of Artificial Sequence: Synthetic oligonucleotide
  Sense strand starting at position 3791 of SEQ ID NO: 1562027
ccguuuaauagcuaaagag

SEQ ID NO: 1716524 - RNA, 19 nt, Artificial Sequence
  Description of Artificial Sequence: Synthetic oligonucleotide
  Antisense strand to SEQ ID NO: 1716523
cucuuuagcuauuaaacgg

SEQ ID NO: 1716525 - RNA, 19 nt, Artificial Sequence
  Description of Artificial Sequence: Synthetic oligonucleotide
  Sense strand starting at position 3867 of SEQ ID NO: 1562027
cuaaaugccuugcugguaa

SEQ ID NO: 1716526 - RNA, 19 nt, Artificial Sequence
  Description of Artificial Sequence: Synthetic oligonucleotide
  Antisense strand to SEQ ID NO: 1716525
uuaccagcaaggcauuuag

SEQ ID NO: 1716527 - RNA, 19 nt, Artificial Sequence
  Description of Artificial Sequence: Synthetic oligonucleotide
  Sense strand starting at position 1 of SEQ ID NO: 1562028
ugaagagcugcuuaagauu

SEQ ID NO: 1716528 - RNA, 19 nt, Artificial Sequence
  Description of Artificial Sequence: Synthetic oligonucleotide
  Antisense strand to SEQ ID NO: 1716527
aaucuuaagcagcucuuca

SEQ ID NO: 1716529 - RNA, 19 nt, Artificial Sequence
  Description of Artificial Sequence: Synthetic oligonucleotide
  Sense strand starting at position 46 of SEQ ID NO: 1562028
agacaagauuucuguuagg

SEQ ID NO: 1716530 - RNA, 19 nt, Artificial Sequence
  Description of Artificial Sequence: Synthetic oligonucleotide
  Antisense strand to SEQ ID NO: 1716529
ccuaacagaaaucuugucu

SEQ ID NO: 1716531 - RNA, 19 nt, Artificial Sequence
  Description of Artificial Sequence: Synthetic oligonucleotide
  Sense strand starting at position 130 of SEQ ID NO: 1562028
gucugaaaugcuggaagac

SEQ ID NO: 1716532 - RNA, 19 nt, Artificial Sequence
  Description of Artificial Sequence: Synthetic oligonucleotide
  Antisense strand to SEQ ID NO: 1716531
gucuuccagcauuucagac

SEQ ID NO: 1716533 - RNA, 19 nt, Artificial Sequence
  Description of Artificial Sequence: Synthetic oligonucleotide
  Sense strand starting at position 142 of SEQ ID NO: 1562028
ggaagacauuuggaaggua

SEQ ID NO: 1716534 - RNA, 19 nt, Artificial Sequence
  Description of Artificial Sequence: Synthetic oligonucleotide
  Antisense strand to SEQ ID NO: 1716533
uaccuuccaaaugucuucc

SEQ ID NO: 1716535 - RNA, 19 nt, Artificial Sequence
  Description of Artificial Sequence: Synthetic oligonucleotide
  Sense strand starting at position 197 of SEQ ID NO: 1562028
gacagauguguuugggaag

SEQ ID NO: 1716536 - RNA, 19 nt, Artificial Sequence
  Description of Artificial Sequence: Synthetic oligonucleotide
  Antisense strand to SEQ ID NO: 1716535
cuucccaaacacaucuguc

SEQ ID NO: 1716537 - RNA, 19 nt, Artificial Sequence
  Description of Artificial Sequence: Synthetic oligonucleotide
  Sense strand starting at position 203 of SEQ ID NO: 1562028
uguguuugggaaggugaaa

SEQ ID NO: 1716538 - RNA, 19 nt, Artificial Sequence
  Description of Artificial Sequence: Synthetic oligonucleotide
  Antisense strand to SEQ ID NO: 1716537
uuucaccuucccaaacaca

SEQ ID NO: 1716539 - RNA, 19 nt, Artificial Sequence
  Description of Artificial Sequence: Synthetic oligonucleotide
  Sense strand starting at position 274 of SEQ ID NO: 1562028
ccucauaucuagucuuaga

SEQ ID NO: 1716540 - RNA, 19 nt, Artificial Sequence
  Description of Artificial Sequence: Synthetic oligonucleotide
  Antisense strand to SEQ ID NO: 1716539
ucuaagacuagauaugagg

SEQ ID NO: 1716541 - RNA, 19 nt, Artificial Sequence
  Description of Artificial Sequence: Synthetic oligonucleotide
  Sense strand starting at position 291 of SEQ ID NO: 1562028
gagcccauuugagagauga

SEQ ID NO: 1716542 - RNA, 19 nt, Artificial Sequence
  Description of Artificial Sequence: Synthetic oligonucleotide
  Antisense strand to SEQ ID NO: 1716541
ucaucucucaaaugggcuc

SEQ ID NO: 1716543 - RNA, 19 nt, Artificial Sequence
  Description of Artificial Sequence: Synthetic oligonucleotide
  Sense strand starting at position 302 of SEQ ID NO: 1562028
agagaugaaguauguguga

SEQ ID NO: 1716544 - RNA, 19 nt, Artificial Sequence
  Description of Artificial Sequence: Synthetic oligonucleotide
  Antisense strand to SEQ ID NO: 1716543
ucacacauacuucaucucu

SEQ ID NO: 1716545 - RNA, 19 nt, Artificial Sequence
  Description of Artificial Sequence: Synthetic oligonucleotide
  Sense strand starting at position 304 of SEQ ID NO: 1562028
agaugaaguaugugugagu

SEQ ID NO: 1716546 - RNA, 19 nt, Artificial Sequence
  Description of Artificial Sequence: Synthetic oligonucleotide
  Antisense strand to SEQ ID NO: 1716545
acucacacauacuucaucu

SEQ ID NO: 1716547 - RNA, 19 nt, Artificial Sequence
  Description of Artificial Sequence: Synthetic oligonucleotide
  Sense strand starting at position 318 of SEQ ID NO: 1562028
ugaguuuggaggugggaau

SEQ ID NO: 1716548 - RNA, 19 nt, Artificial Sequence
  Description of Artificial Sequence: Synthetic oligonucleotide
  Antisense strand to SEQ ID NO: 1716547
auucccaccuccaaacuca

SEQ ID NO: 1716549 - RNA, 19 nt, Artificial Sequence
  Description of Artificial Sequence: Synthetic oligonucleotide
  Sense strand starting at position 399 of SEQ ID NO: 1562028
ccagaaaucccugacgguu

SEQ ID NO: 1716550 - RNA, 19 nt, Artificial Sequence
  Description of Artificial Sequence: Synthetic oligonucleotide
  Antisense strand to SEQ ID NO: 1716549
aaccgucagggauuucugg

SEQ ID NO: 1716551 - RNA, 19 nt, Artificial Sequence
  Description of Artificial Sequence: Synthetic oligonucleotide
  Sense strand starting at position 540 of SEQ ID NO: 1562028
ugucuaagugcucagaaug

SEQ ID NO: 1716552 - RNA, 19 nt, Artificial Sequence
  Description of Artificial Sequence: Synthetic oligonucleotide
  Antisense strand to SEQ ID NO: 1716551
cauucugagcacuuagaca

SEQ ID NO: 1716553 - RNA, 19 nt, Artificial Sequence
  Description of Artificial Sequence: Synthetic oligonucleotide
  Sense strand starting at position 545 of SEQ ID NO: 1562028
aagugcucagaauguacaa

SEQ ID NO: 1716554 - RNA, 19 nt, Artificial Sequence
  Description of Artificial Sequence: Synthetic oligonucleotide
  Antisense strand to SEQ ID NO: 1716553
uuguacauucugagcacuu

SEQ ID NO: 1716555 - RNA, 19 nt, Artificial Sequence
  Description of Artificial Sequence: Synthetic oligonucleotide
  Sense strand starting at position 648 of SEQ ID NO: 1562028
ggaguugagaacugaagca

SEQ ID NO: 1716556 - RNA, 19 nt, Artificial Sequence
  Description of Artificial Sequence: Synthetic oligonucleotide
  Antisense strand to SEQ ID NO: 1716555
ugcuucaguucucaacucc

SEQ ID NO: 1716557 - RNA, 19 nt, Artificial Sequence
  Description of Artificial Sequence: Synthetic oligonucleotide
  Sense strand starting at position 686 of SEQ ID NO: 1562028
gugaaaucucauggcaaga

SEQ ID NO: 1716558 - RNA, 19 nt, Artificial Sequence
  Description of Artificial Sequence: Synthetic oligonucleotide
  Antisense strand to SEQ ID NO: 1716557
ucuugccaugagauuucac

SEQ ID NO: 1716559 - RNA, 19 nt, Artificial Sequence
  Description of Artificial Sequence: Synthetic oligonucleotide
  Sense strand starting at position 754 of SEQ ID NO: 1562028
gugagagaacagugacagu

SEQ ID NO: 1716560 - RNA, 19 nt, Artificial Sequence
  Description of Artificial Sequence: Synthetic oligonucleotide
  Antisense strand to SEQ ID NO: 1716559
acugucacuguucucucac

SEQ ID NO: 1716561 - RNA, 19 nt, Artificial Sequence
  Description of Artificial Sequence: Synthetic oligonucleotide
  Sense strand starting at position 796 of SEQ ID NO: 1562028
ccacuucucccaggaagca

SEQ ID NO: 1716562 - RNA, 19 nt, Artificial Sequence
  Description of Artificial Sequence: Synthetic oligonucleotide
  Antisense strand to SEQ ID NO: 1716561
ugcuuccugggagaagugg

SEQ ID NO: 1716563 - RNA, 19 nt, Artificial Sequence
  Description of Artificial Sequence: Synthetic oligonucleotide
  Sense strand starting at position 808 of SEQ ID NO: 1562028
ggaagcagaugucuaggau

SEQ ID NO: 1716564 - RNA, 19 nt, Artificial Sequence
  Description of Artificial Sequence: Synthetic oligonucleotide
  Antisense strand to SEQ ID NO: 1716563
auccuagacaucugcuucc

SEQ ID NO: 1716565 - RNA, 19 nt, Artificial Sequence
  Description of Artificial Sequence: Synthetic oligonucleotide
  Sense strand starting at position 811 of SEQ ID NO: 1562028
agcagaugucuaggaugau

SEQ ID NO: 1716566 - RNA, 19 nt, Artificial Sequence
  Description of Artificial Sequence: Synthetic oligonucleotide
  Antisense strand to SEQ ID NO: 1716565
aucauccuagacaucugcu

SEQ ID NO: 1716567 - RNA, 19 nt, Artificial Sequence
  Description of Artificial Sequence: Synthetic oligonucleotide
  Sense strand starting at position 893 of SEQ ID NO: 1562028
gaauuagugagguggguug

SEQ ID NO: 1716568 - RNA, 19 nt, Artificial Sequence
  Description of Artificial Sequence: Synthetic oligonucleotide
  Antisense strand to SEQ ID NO: 1716567
caacccaccucacuaauuc

SEQ ID NO: 1716569 - RNA, 19 nt, Artificial Sequence
  Description of Artificial Sequence: Synthetic oligonucleotide
  Sense strand starting at position 1247 of SEQ ID NO: 1562028
gauccagauguuuggugga

SEQ ID NO: 1716570 - RNA, 19 nt, Artificial Sequence
  Description of Artificial Sequence: Synthetic oligonucleotide
  Antisense strand to SEQ ID NO: 1716569
uccaccaaacaucuggauc

SEQ ID NO: 1716571 - RNA, 19 nt, Artificial Sequence
  Description of Artificial Sequence: Synthetic oligonucleotide
  Sense strand starting at position 1459 of SEQ ID NO: 1562028
gaguguccgcccuugaguu

SEQ ID NO: 1716572 - RNA, 19 nt, Artificial Sequence
  Description of Artificial Sequence: Synthetic oligonucleotide
  Antisense strand to SEQ ID NO: 1716571
aacucaagggcggacacuc

SEQ ID NO: 1716573 - RNA, 19 nt, Artificial Sequence
  Description of Artificial Sequence: Synthetic oligonucleotide
  Sense strand starting at position 1466 of SEQ ID NO: 1562028
cgcccuugaguuuacaaau

SEQ ID NO: 1716574 - RNA, 19 nt, Artificial Sequence
  Description of Artificial Sequence: Synthetic oligonucleotide
  Antisense strand to SEQ ID NO: 1716573
auuuguaaacucaagggcg

SEQ ID NO: 1716575 - RNA, 19 nt, Artificial Sequence
  Description of Artificial Sequence: Synthetic oligonucleotide
  Sense strand starting at position 1638 of SEQ ID NO: 1562028
cucugaguuugggcagaag

SEQ ID NO: 1716576 - RNA, 19 nt, Artificial Sequence
  Description of Artificial Sequence: Synthetic oligonucleotide
  Antisense strand to SEQ ID NO: 1716575
cuucugcccaaacucagag

SEQ ID NO: 1716577 - RNA, 19 nt, Artificial Sequence
  Description of Artificial Sequence: Synthetic oligonucleotide
  Sense strand starting at position 2289 of SEQ ID NO: 1562028
gcuugcuaccguccacauu

SEQ ID NO: 1716578 - RNA, 19 nt, Artificial Sequence
  Description of Artificial Sequence: Synthetic oligonucleotide
  Antisense strand to SEQ ID NO: 1716577
aauguggacgguagcaagc

SEQ ID NO: 1716579 - RNA, 19 nt, Artificial Sequence
  Description of Artificial Sequence: Synthetic oligonucleotide
  Sense strand starting at position 2356 of SEQ ID NO: 1562028
cucuaugcaguugauauua

SEQ ID NO: 1716580 - RNA, 19 nt, Artificial Sequence
  Description of Artificial Sequence: Synthetic oligonucleotide
  Antisense strand to SEQ ID NO: 1716579
uaauaucaacugcauagag

SEQ ID NO: 1716581 - RNA, 19 nt, Artificial Sequence
  Description of Artificial Sequence: Synthetic oligonucleotide
  Sense strand starting at position 2385 of SEQ ID NO: 1562028
ugccucauugcacagauga

SEQ ID NO: 1716582 - RNA, 19 nt, Artificial Sequence
  Description of Artificial Sequence: Synthetic oligonucleotide
  Antisense strand to SEQ ID NO: 1716581
ucaucugugcaaugaggca

SEQ ID NO: 1716583 - RNA, 19 nt, Artificial Sequence
  Description of Artificial Sequence: Synthetic oligonucleotide
  Sense strand starting at position 2527 of SEQ ID NO: 1562028
gugcuacaucgugcgcuaa

SEQ ID NO: 1716584 - RNA, 19 nt, Artificial Sequence
  Description of Artificial Sequence: Synthetic oligonucleotide
  Antisense strand to SEQ ID NO: 1716583
uuagcgcacgauguagcac

SEQ ID NO: 1716585 - RNA, 19 nt, Artificial Sequence
  Description of Artificial Sequence: Synthetic oligonucleotide
  Sense strand starting at position 2576 of SEQ ID NO: 1562028
ugaaguauggaccguuauu

SEQ ID NO: 1716586 - RNA, 19 nt, Artificial Sequence
  Description of Artificial Sequence: Synthetic oligonucleotide
  Antisense strand to SEQ ID NO: 1716585
aauaacgguccauacuuca

SEQ ID NO: 1716587 - RNA, 19 nt, Artificial Sequence
  Description of Artificial Sequence: Synthetic oligonucleotide
  Sense strand starting at position 2635 of SEQ ID NO: 1562028
ccacuucuccaaggagaca

SEQ ID NO: 1716588 - RNA, 19 nt, Artificial Sequence
  Description of Artificial Sequence: Synthetic oligonucleotide
  Antisense strand to SEQ ID NO: 1716587
ugucuccuuggagaagugg

SEQ ID NO: 1716589 - RNA, 19 nt, Artificial Sequence
  Description of Artificial Sequence: Synthetic oligonucleotide
  Sense strand starting at position 3429 of SEQ ID NO: 1562028
ccuuuauacgugcaauaac

SEQ ID NO: 1716590 - RNA, 19 nt, Artificial Sequence
  Description of Artificial Sequence: Synthetic oligonucleotide
  Antisense strand to SEQ ID NO: 1716589
guuauugcacguauaaagg

SEQ ID NO: 1716591 - RNA, 19 nt, Artificial Sequence
  Description of Artificial Sequence: Synthetic oligonucleotide
  Sense strand starting at position 3749 of SEQ ID NO: 1562028
gagggcuucccagaccauu

SEQ ID NO: 1716592 - RNA, 19 nt, Artificial Sequence
  Description of Artificial Sequence: Synthetic oligonucleotide
  Antisense strand to SEQ ID NO: 1716591
aauggucugggaagcccuc

SEQ ID NO: 1716593 - RNA, 19 nt, Artificial Sequence
  Description of Artificial Sequence: Synthetic oligonucleotide
  Sense strand starting at position 3841 of SEQ ID NO: 1562028
accugaaacuauguuaggu

SEQ ID NO: 1716594 - RNA, 19 nt, Artificial Sequence
  Description of Artificial Sequence: Synthetic oligonucleotide
  Antisense strand to SEQ ID NO: 1716593
accuaacauaguuucaggu

SEQ ID NO: 1716595 - RNA, 19 nt, Artificial Sequence
  Description of Artificial Sequence: Synthetic oligonucleotide
  Sense strand starting at position 3846 of SEQ ID NO: 1562028
aaacuauguuagguguuua

SEQ ID NO: 1716596 - RNA, 19 nt, Artificial Sequence
  Description of Artificial Sequence: Synthetic oligonucleotide
  Antisense strand to SEQ ID NO: 1716595
uaaacaccuaacauaguuu

SEQ ID NO: 1716597 - RNA, 19 nt, Artificial Sequence
  Description of Artificial Sequence: Synthetic oligonucleotide
  Sense strand starting at position 3857 of SEQ ID NO: 1562028
gguguuuauuucuuugcuu

SEQ ID NO: 1716598 - RNA, 19 nt, Artificial Sequence
  Description of Artificial Sequence: Synthetic oligonucleotide
  Antisense strand to SEQ ID NO: 1716597
aagcaaagaaauaaacacc

SEQ ID NO: 1716599 - RNA, 19 nt, Artificial Sequence
  Description of Artificial Sequence: Synthetic oligonucleotide
  Sense strand starting at position 3858 of SEQ ID NO: 1562028
guguuuauuucuuugcuua

SEQ ID NO: 1716600 - RNA, 19 nt, Artificial Sequence
  Description of Artificial Sequence: Synthetic oligonucleotide
  Antisense strand to SEQ ID NO: 1716599
uaagcaaagaaauaaacac

SEQ ID NO: 1716601 - RNA, 19 nt, Artificial Sequence
  Description of Artificial Sequence: Synthetic oligonucleotide
  Sense strand starting at position 3892 of SEQ ID NO: 1562028
uccacuagacugugacaaa

SEQ ID NO: 1716602 - RNA, 19 nt, Artificial Sequence
  Description of Artificial Sequence: Synthetic oligonucleotide
  Antisense strand to SEQ ID NO: 1716601
uuugucacagucuagugga

SEQ ID NO: 1716603 - RNA, 19 nt, Artificial Sequence
  Description of Artificial Sequence: Synthetic oligonucleotide
  Sense strand starting at position 3950 of SEQ ID NO: 1562028
gagugccuucugggaucaa

SEQ ID NO: 1716604 - RNA, 19 nt, Artificial Sequence
  Description of Artificial Sequence: Synthetic oligonucleotide
  Antisense strand to SEQ ID NO: 1716603
uugaucccagaaggcacuc

SEQ ID NO: 1716605 - RNA, 19 nt, Artificial Sequence
  Description of Artificial Sequence: Synthetic oligonucleotide
  Sense strand starting at position 3954 of SEQ ID NO: 1562028
gccuucugggaucaaucua

SEQ ID NO: 1716606 - RNA, 19 nt, Artificial Sequence
  Description of Artificial Sequence: Synthetic oligonucleotide
  Antisense strand to SEQ ID NO: 1716605
uagauugaucccagaaggc

SEQ ID NO: 1716607 - RNA, 19 nt, Artificial Sequence
  Description of Artificial Sequence: Synthetic oligonucleotide
  Sense strand starting at position 527 of SEQ ID NO: 1562029
ccuugacacugguuugcau

SEQ ID NO: 1716608 - RNA, 19 nt, Artificial Sequence
  Description of Artificial Sequence: Synthetic oligonucleotide
  Antisense strand to SEQ ID NO: 1716607
augcaaaccagugucaagg

SEQ ID NO: 1716609 - RNA, 19 nt, Artificial Sequence
  Description of Artificial Sequence: Synthetic oligonucleotide
  Sense strand starting at position 790 of SEQ ID NO: 1562029
gcuggcaucuuacagaaca

SEQ ID NO: 1716610 - RNA, 19 nt, Artificial Sequence
  Description of Artificial Sequence: Synthetic oligonucleotide
  Antisense strand to SEQ ID NO: 1716609
uguucuguaagaugccagc

SEQ ID NO: 1716611 - RNA, 19 nt, Artificial Sequence
  Description of Artificial Sequence: Synthetic oligonucleotide
  Sense strand starting at position 897 of SEQ ID NO: 1562029
gggagcugauuccaggaaa

SEQ ID NO: 1716612 - RNA, 19 nt, Artificial Sequence
  Description of Artificial Sequence: Synthetic oligonucleotide
  Antisense strand to SEQ ID NO: 1716611
uuuccuggaaucagcuccc

SEQ ID NO: 1716613 - RNA, 19 nt, Artificial Sequence
  Description of Artificial Sequence: Synthetic oligonucleotide
  Sense strand starting at position 1137 of SEQ ID NO: 1562029
uugcauaauuuagagaaag

SEQ ID NO: 1716614 - RNA, 19 nt, Artificial Sequence
  Description of Artificial Sequence: Synthetic oligonucleotide
  Antisense strand to SEQ ID NO: 1716613
cuuucucuaaauuaugcaa

SEQ ID NO: 1716615 - RNA, 19 nt, Artificial Sequence
  Description of Artificial Sequence: Synthetic oligonucleotide
  Sense strand starting at position 1152 of SEQ ID NO: 1562029
aaagcagucuuugcgucua

SEQ ID NO: 1716616 - RNA, 19 nt, Artificial Sequence
  Description of Artificial Sequence: Synthetic oligonucleotide
  Antisense strand to SEQ ID NO: 1716615
uagacgcaaagacugcuuu

SEQ ID NO: 1716617 - RNA, 19 nt, Artificial Sequence
  Description of Artificial Sequence: Synthetic oligonucleotide
  Sense strand starting at position 1154 of SEQ ID NO: 1562029
agcagucuuugcgucuaga

SEQ ID NO: 1716618 - RNA, 19 nt, Artificial Sequence
  Description of Artificial Sequence: Synthetic oligonucleotide
  Antisense strand to SEQ ID NO: 1716617
ucuagacgcaaagacugcu

SEQ ID NO: 1716619 - RNA, 19 nt, Artificial Sequence
  Description of Artificial Sequence: Synthetic oligonucleotide
  Sense strand starting at position 1155 of SEQ ID NO: 1562029
gcagucuuugcgucuagag

SEQ ID NO: 1716620 - RNA, 19 nt, Artificial Sequence
  Description of Artificial Sequence: Synthetic oligonucleotide
  Antisense strand to SEQ ID NO: 1716619
cucuagacgcaaagacugc

SEQ ID NO: 1716621 - RNA, 19 nt, Artificial Sequence
  Description of Artificial Sequence: Synthetic oligonucleotide
  Sense strand starting at position 1157 of SEQ ID NO: 1562029
agucuuugcgucuagaggu

SEQ ID NO: 1716622 - RNA, 19 nt, Artificial Sequence
  Description of Artificial Sequence: Synthetic oligonucleotide
  Antisense strand to SEQ ID NO: 1716621
accucuagacgcaaagacu

SEQ ID NO: 1716623 - RNA, 19 nt, Artificial Sequence
  Description of Artificial Sequence: Synthetic oligonucleotide
  Sense strand starting at position 1186 of SEQ ID NO: 1562029
gggugaugaggguguugua

SEQ ID NO: 1716624 - RNA, 19 nt, Artificial Sequence
  Description of Artificial Sequence: Synthetic oligonucleotide
  Antisense strand to SEQ ID NO: 1716623
uacaacacccucaucaccc

SEQ ID NO: 1716625 - RNA, 19 nt, Artificial Sequence
  Description of Artificial Sequence: Synthetic oligonucleotide
  Sense strand starting at position 1255 of SEQ ID NO: 1562029
uuagaaaguccguaaccca

SEQ ID NO: 1716626 - RNA, 19 nt, Artificial Sequence
  Description of Artificial Sequence: Synthetic oligonucleotide
  Antisense strand to SEQ ID NO: 1716625
uggguuacggacuuucuaa

SEQ ID NO: 1716627 - RNA, 19 nt, Artificial Sequence
  Description of Artificial Sequence: Synthetic oligonucleotide
  Sense strand starting at position 1625 of SEQ ID NO: 1562029
cuggcaucaguguauugaa

SEQ ID NO: 1716628 - RNA, 19 nt, Artificial Sequence
  Description of Artificial Sequence: Synthetic oligonucleotide
  Antisense strand to SEQ ID NO: 1716627
uucaauacacugaugccag

SEQ ID NO: 1716629 - RNA, 19 nt, Artificial Sequence
  Description of Artificial Sequence: Synthetic oligonucleotide
  Sense strand starting at position 1648 of SEQ ID NO: 1562029
ugaggugagcucuaucucu

SEQ ID NO: 1716630 - RNA, 19 nt, Artificial Sequence
  Description of Artificial Sequence: Synthetic oligonucleotide
  Antisense strand to SEQ ID NO: 1716629
agagauagagcucaccuca

SEQ ID NO: 1716631 - RNA, 19 nt, Artificial Sequence
  Description of Artificial Sequence: Synthetic oligonucleotide
  Sense strand starting at position 1665 of SEQ ID NO: 1562029
cuugcacuaggcugugaau

SEQ ID NO: 1716632 - RNA, 19 nt, Artificial Sequence
  Description of Artificial Sequence: Synthetic oligonucleotide
  Antisense strand to SEQ ID NO: 1716631
auucacagccuagugcaag

SEQ ID NO: 1716633 - RNA, 19 nt, Artificial Sequence
  Description of Artificial Sequence: Synthetic oligonucleotide
  Sense strand starting at position 2122 of SEQ ID NO: 1562029
ggcgaaaucguucacuacu

SEQ ID NO: 1716634 - RNA, 19 nt, Artificial Sequence
  Description of Artificial Sequence: Synthetic oligonucleotide
  Antisense strand to SEQ ID NO: 1716633
aguagugaacgauuucgcc

SEQ ID NO: 1716635 - RNA, 19 nt, Artificial Sequence
  Description of Artificial Sequence: Synthetic oligonucleotide
  Sense strand starting at position 2141 of SEQ ID NO: 1562029
guaauucuucuuuggccua

SEQ ID NO: 1716636 - RNA, 19 nt, Artificial Sequence
  Description of Artificial Sequence: Synthetic oligonucleotide
  Antisense strand to SEQ ID NO: 1716635
uaggccaaagaagaauuac

SEQ ID NO: 1716637 - RNA, 19 nt, Artificial Sequence
  Description of Artificial Sequence: Synthetic oligonucleotide
  Sense strand starting at position 2189 of SEQ ID NO: 1562029
ggaagcccucuaugauuaa

SEQ ID NO: 1716638 - RNA, 19 nt, Artificial Sequence
  Description of Artificial Sequence: Synthetic oligonucleotide
  Antisense strand to SEQ ID NO: 1716637
uuaaucauagagggcuucc

SEQ ID NO: 1716639 - RNA, 19 nt, Artificial Sequence
  Description of Artificial Sequence: Synthetic oligonucleotide
  Sense strand starting at position 2211 of SEQ ID NO: 1562029
uguucuuuguuucuaccaa

SEQ ID NO: 1716640 - RNA, 19 nt, Artificial Sequence
  Description of Artificial Sequence: Synthetic oligonucleotide
  Antisense strand to SEQ ID NO: 1716639
uugguagaaacaaagaaca

SEQ ID NO: 1716641 - RNA, 19 nt, Artificial Sequence
  Description of Artificial Sequence: Synthetic oligonucleotide
  Sense strand starting at position 2226 of SEQ ID NO: 1562029
ccaaguagcugauauccaa

SEQ ID NO: 1716642 - RNA, 19 nt, Artificial Sequence
  Description of Artificial Sequence: Synthetic oligonucleotide
  Antisense strand to SEQ ID NO: 1716641
uuggauaucagcuacuugg

SEQ ID NO: 1716643 - RNA, 19 nt, Artificial Sequence
  Description of Artificial Sequence: Synthetic oligonucleotide
  Sense strand starting at position 2707 of SEQ ID NO: 1562029
ugaucaucguaaucacuuu

SEQ ID NO: 1716644 - RNA, 19 nt, Artificial Sequence
  Description of Artificial Sequence: Synthetic oligonucleotide
  Antisense strand to SEQ ID NO: 1716643
aaagugauuacgaugauca

SEQ ID NO: 1716645 - RNA, 19 nt, Artificial Sequence
  Description of Artificial Sequence: Synthetic oligonucleotide
  Sense strand starting at position 2713 of SEQ ID NO: 1562029
ucguaaucacuuuaggucu

SEQ ID NO: 1716646 - RNA, 19 nt, Artificial Sequence
  Description of Artificial Sequence: Synthetic oligonucleotide
  Antisense strand to SEQ ID NO: 1716645
agaccuaaagugauuacga

SEQ ID NO: 1716647 - RNA, 19 nt, Artificial Sequence
  Description of Artificial Sequence: Synthetic oligonucleotide
  Sense strand starting at position 2719 of SEQ ID NO: 1562029
ucacuuuaggucuacaguu

SEQ ID NO: 1716648 - RNA, 19 nt, Artificial Sequence
  Description of Artificial Sequence: Synthetic oligonucleotide
  Antisense strand to SEQ ID NO: 1716647
aacuguagaccuaaaguga

SEQ ID NO: 1716649 - RNA, 19 nt, Artificial Sequence
  Description of Artificial Sequence: Synthetic oligonucleotide
  Sense strand starting at position 2721 of SEQ ID NO: 1562029
acuuuaggucuacaguuua

SEQ ID NO: 1716650 - RNA, 19 nt, Artificial Sequence
  Description of Artificial Sequence: Synthetic oligonucleotide
  Antisense strand to SEQ ID NO: 1716649
uaaacuguagaccuaaagu

SEQ ID NO: 1716651 - RNA, 19 nt, Artificial Sequence
  Description of Artificial Sequence: Synthetic oligonucleotide
  Sense strand starting at position 2726 of SEQ ID NO: 1562029
aggucuacaguuuagugau

SEQ ID NO: 1716652 - RNA, 19 nt, Artificial Sequence
  Description of Artificial Sequence: Synthetic oligonucleotide
  Antisense strand to SEQ ID NO: 1716651
aucacuaaacuguagaccu

SEQ ID NO: 1716653 - RNA, 19 nt, Artificial Sequence
  Description of Artificial Sequence: Synthetic oligonucleotide
  Sense strand starting at position 2728 of SEQ ID NO: 1562029
gucuacaguuuagugauau

SEQ ID NO: 1716654 - RNA, 19 nt, Artificial Sequence
  Description of Artificial Sequence: Synthetic oligonucleotide
  Antisense strand to SEQ ID NO: 1716653
auaucacuaaacuguagac

SEQ ID NO: 1716655 - RNA, 19 nt, Artificial Sequence
  Description of Artificial Sequence: Synthetic oligonucleotide
  Sense strand starting at position 2732 of SEQ ID NO: 1562029
acaguuuagugauauuaac

SEQ ID NO: 1716656 - RNA, 19 nt, Artificial Sequence
  Description of Artificial Sequence: Synthetic oligonucleotide
  Antisense strand to SEQ ID NO: 1716655
guuaauaucacuaaacugu

SEQ ID NO: 1716657 - RNA, 19 nt, Artificial Sequence
  Description of Artificial Sequence: Synthetic oligonucleotide
  Sense strand starting at position 2798 of SEQ ID NO: 1562029
gugcacaagcguuccaauu

SEQ ID NO: 1716658 - RNA, 19 nt, Artificial Sequence
  Description of Artificial Sequence: Synthetic oligonucleotide
  Antisense strand to SEQ ID NO: 1716657
aauuggaacgcuugugcac

SEQ ID NO: 1716659 - RNA, 19 nt, Artificial Sequence
  Description of Artificial Sequence: Synthetic oligonucleotide
  Sense strand starting at position 2808 of SEQ ID NO: 1562029
guuccaauuuguccaccuu

SEQ ID NO: 1716660 - RNA, 19 nt, Artificial Sequence
  Description of Artificial Sequence: Synthetic oligonucleotide
  Antisense strand to SEQ ID NO: 1716659
aagguggacaaauuggaac

SEQ ID NO: 1716661 - RNA, 19 nt, Artificial Sequence
  Description of Artificial Sequence: Synthetic oligonucleotide
  Sense strand starting at position 3125 of SEQ ID NO: 1562029
uuguaugacuuaggagaau

SEQ ID NO: 1716662 - RNA, 19 nt, Artificial Sequence
  Description of Artificial Sequence: Synthetic oligonucleotide
  Antisense strand to SEQ ID NO: 1716661
auucuccuaagucauacaa

SEQ ID NO: 1716663 - RNA, 19 nt, Artificial Sequence
  Description of Artificial Sequence: Synthetic oligonucleotide
  Sense strand starting at position 3131 of SEQ ID NO: 1562029
gacuuaggagaauguuugu

SEQ ID NO: 1716664 - RNA, 19 nt, Artificial Sequence
  Description of Artificial Sequence: Synthetic oligonucleotide
  Antisense strand to SEQ ID NO: 1716663
acaaacauucuccuaaguc

SEQ ID NO: 1716665 - RNA, 19 nt, Artificial Sequence
  Description of Artificial Sequence: Synthetic oligonucleotide
  Sense strand starting at position 3136 of SEQ ID NO: 1562029
aggagaauguuuguucaag

SEQ ID NO: 1716666 - RNA, 19 nt, Artificial Sequence
  Description of Artificial Sequence: Synthetic oligonucleotide
  Antisense strand to SEQ ID NO: 1716665
cuugaacaaacauucuccu

SEQ ID NO: 1716667 - RNA, 19 nt, Artificial Sequence
  Description of Artificial Sequence: Synthetic oligonucleotide
  Sense strand starting at position 3137 of SEQ ID NO: 1562029
ggagaauguuuguucaagu

SEQ ID NO: 1716668 - RNA, 19 nt, Artificial Sequence
  Description of Artificial Sequence: Synthetic oligonucleotide
  Antisense strand to SEQ ID NO: 1716667
acuugaacaaacauucucc

SEQ ID NO: 1716669 - RNA, 19 nt, Artificial Sequence
  Description of Artificial Sequence: Synthetic oligonucleotide
  Sense strand starting at position 3295 of SEQ ID NO: 1562029
uguugauagugucuauuga

SEQ ID NO: 1716670 - RNA, 19 nt, Artificial Sequence
  Description of Artificial Sequence: Synthetic oligonucleotide
  Antisense strand to SEQ ID NO: 1716669
ucaauagacacuaucaaca

SEQ ID NO: 1716671 - RNA, 19 nt, Artificial Sequence
  Description of Artificial Sequence: Synthetic oligonucleotide
  Sense strand starting at position 3296 of SEQ ID NO: 1562029
guugauagugucuauugau

SEQ ID NO: 1716672 - RNA, 19 nt, Artificial Sequence
  Description of Artificial Sequence: Synthetic oligonucleotide
  Antisense strand to SEQ ID NO: 1716671
aucaauagacacuaucaac

SEQ ID NO: 1716673 - RNA, 19 nt, Artificial Sequence
  Description of Artificial Sequence: Synthetic oligonucleotide
  Sense strand starting at position 3505 of SEQ ID NO: 1562029
uuauguguggugugaagga

SEQ ID NO: 1716674 - RNA, 19 nt, Artificial Sequence
  Description of Artificial Sequence: Synthetic oligonucleotide
  Antisense strand to SEQ ID NO: 1716673
uccuucacaccacacauaa

SEQ ID NO: 1716675 - RNA, 19 nt, Artificial Sequence
  Description of Artificial Sequence: Synthetic oligonucleotide
  Sense strand starting at position 3586 of SEQ ID NO: 1562029
gcuguucuuucccuauuga

SEQ ID NO: 1716676 - RNA, 19 nt, Artificial Sequence
  Description of Artificial Sequence: Synthetic oligonucleotide
  Antisense strand to SEQ ID NO: 1716675
ucaauagggaaagaacagc

SEQ ID NO: 1716677 - RNA, 19 nt, Artificial Sequence
  Description of Artificial Sequence: Synthetic oligonucleotide
  Sense strand starting at position 3635 of SEQ ID NO: 1562029
uggccauacaugugaaggu

SEQ ID NO: 1716678 - RNA, 19 nt, Artificial Sequence
  Description of Artificial Sequence: Synthetic oligonucleotide
  Antisense strand to SEQ ID NO: 1716677
accuucacauguauggcca

SEQ ID NO: 1716679 - RNA, 19 nt, Artificial Sequence
  Description of Artificial Sequence: Synthetic oligonucleotide
  Sense strand starting at position 3636 of SEQ ID NO: 1562029
ggccauacaugugaagguu

SEQ ID NO: 1716680 - RNA, 19 nt, Artificial Sequence
  Description of Artificial Sequence: Synthetic oligonucleotide
  Antisense strand to SEQ ID NO: 1716679
aaccuucacauguauggcc

SEQ ID NO: 1716681 - RNA, 19 nt, Artificial Sequence
  Description of Artificial Sequence: Synthetic oligonucleotide
  Sense strand starting at position 3758 of SEQ ID NO: 1562029
gaaguaugaggaugucaau

SEQ ID NO: 1716682 - RNA, 19 nt, Artificial Sequence
  Description of Artificial Sequence: Synthetic oligonucleotide
  Antisense strand to SEQ ID NO: 1716681
auugacauccucauacuuc

SEQ ID NO: 1716683 - RNA, 19 nt, Artificial Sequence
  Description of Artificial Sequence: Synthetic oligonucleotide
  Sense strand starting at position 3761 of SEQ ID NO: 1562029
guaugaggaugucaaugaa

SEQ ID NO: 1716684 - RNA, 19 nt, Artificial Sequence
  Description of Artificial Sequence: Synthetic oligonucleotide
  Antisense strand to SEQ ID NO: 1716683
uucauugacauccucauac

SEQ ID NO: 1716685 - RNA, 19 nt, Artificial Sequence
  Description of Artificial Sequence: Synthetic oligonucleotide
  Sense strand starting at position 3764 of SEQ ID NO: 1562029
ugaggaugucaaugaagca

SEQ ID NO: 1716686 - RNA, 19 nt, Artificial Sequence
  Description of Artificial Sequence: Synthetic oligonucleotide
  Antisense strand to SEQ ID NO: 1716685
ugcuucauugacauccuca

SEQ ID NO: 1716687 - RNA, 19 nt, Artificial Sequence
  Description of Artificial Sequence: Synthetic oligonucleotide
  Sense strand starting at position 135 of SEQ ID NO: 1562030
uggauucgaucuccuugua

SEQ ID NO: 1716688 - RNA, 19 nt, Artificial Sequence
  Description of Artificial Sequence: Synthetic oligonucleotide
  Antisense strand to SEQ ID NO: 1716687
uacaaggagaucgaaucca

SEQ ID NO: 1716689 - RNA, 19 nt, Artificial Sequence
  Description of Artificial Sequence: Synthetic oligonucleotide
  Sense strand starting at position 258 of SEQ ID NO: 1562030
gagaaagccugacaggaaa

SEQ ID NO: 1716690 - RNA, 19 nt, Artificial Sequence
  Description of Artificial Sequence: Synthetic oligonucleotide
  Antisense strand to SEQ ID NO: 1716689
uuuccugucaggcuuucuc

SEQ ID NO: 1716691 - RNA, 19 nt, Artificial Sequence
  Description of Artificial Sequence: Synthetic oligonucleotide
  Sense strand starting at position 336 of SEQ ID NO: 1562030
gcaaaugauugacuacaca

SEQ ID NO: 1716692 - RNA, 19 nt, Artificial Sequence
  Description of Artificial Sequence: Synthetic oligonucleotide
  Antisense strand to SEQ ID NO: 1716691
uguguagucaaucauuugc

SEQ ID NO: 1716693 - RNA, 19 nt, Artificial Sequence
  Description of Artificial Sequence: Synthetic oligonucleotide
  Sense strand starting at position 347 of SEQ ID NO: 1562030
acuacacaguuguaaauuu

SEQ ID NO: 1716694 - RNA, 19 nt, Artificial Sequence
  Description of Artificial Sequence: Synthetic oligonucleotide
  Antisense strand to SEQ ID NO: 1716693
aaauuuacaacuguguagu

SEQ ID NO: 1716695 - RNA, 19 nt, Artificial Sequence
  Description of Artificial Sequence: Synthetic oligonucleotide
  Sense strand starting at position 377 of SEQ ID NO: 1562030
augucuggagguugaagaa

SEQ ID NO: 1716696 - RNA, 19 nt, Artificial Sequence
  Description of Artificial Sequence: Synthetic oligonucleotide
  Antisense strand to SEQ ID NO: 1716695
uucuucaaccuccagacau

SEQ ID NO: 1716697 - RNA, 19 nt, Artificial Sequence
  Description of Artificial Sequence: Synthetic oligonucleotide
  Sense strand starting at position 403 of SEQ ID NO: 1562030
gugagcuuauuguuugaaa

SEQ ID NO: 1716698 - RNA, 19 nt, Artificial Sequence
  Description of Artificial Sequence: Synthetic oligonucleotide
  Antisense strand to SEQ ID NO: 1716697
uuucaaacaauaagcucac

SEQ ID NO: 1716699 - RNA, 19 nt, Artificial Sequence
  Description of Artificial Sequence: Synthetic oligonucleotide
  Sense strand starting at position 507 of SEQ ID NO: 1562030
cguggcucuguauuagcua

SEQ ID NO: 1716700 - RNA, 19 nt, Artificial Sequence
  Description of Artificial Sequence: Synthetic oligonucleotide
  Antisense strand to SEQ ID NO: 1716699
uagcuaauacagagccacg

SEQ ID NO: 1716701 - RNA, 19 nt, Artificial Sequence
  Description of Artificial Sequence: Synthetic oligonucleotide
  Sense strand starting at position 510 of SEQ ID NO: 1562030
ggcucuguauuagcuacaa

SEQ ID NO: 1716702 - RNA, 19 nt, Artificial Sequence
  Description of Artificial Sequence: Synthetic oligonucleotide
  Antisense strand to SEQ ID NO: 1716701
uuguagcuaauacagagcc

SEQ ID NO: 1716703 - RNA, 19 nt, Artificial Sequence
  Description of Artificial Sequence: Synthetic oligonucleotide
  Sense strand starting at position 525 of SEQ ID NO: 1562030
acaagcucaugucuaugua

SEQ ID NO: 1716704 - RNA, 19 nt, Artificial Sequence
  Description of Artificial Sequence: Synthetic oligonucleotide
  Antisense strand to SEQ ID NO: 1716703
uacauagacaugagcuugu

SEQ ID NO: 1716705 - RNA, 19 nt, Artificial Sequence
  Description of Artificial Sequence: Synthetic oligonucleotide
  Sense strand starting at position 532 of SEQ ID NO: 1562030
caugucuauguauguaaga

SEQ ID NO: 1716706 - RNA, 19 nt, Artificial Sequence
  Description of Artificial Sequence: Synthetic oligonucleotide
  Antisense strand to SEQ ID NO: 1716705
ucuuacauacauagacaug

SEQ ID NO: 1716707 - RNA, 19 nt, Artificial Sequence
  Description of Artificial Sequence: Synthetic oligonucleotide
  Sense strand starting at position 534 of SEQ ID NO: 1562030
ugucuauguauguaagagu

SEQ ID NO: 1716708 - RNA, 19 nt, Artificial Sequence
  Description of Artificial Sequence: Synthetic oligonucleotide
  Antisense strand to SEQ ID NO: 1716707
acucuuacauacauagaca

SEQ ID NO: 1716709 - RNA, 19 nt, Artificial Sequence
  Description of Artificial Sequence: Synthetic oligonucleotide
  Sense strand starting at position 651 of SEQ ID NO: 1562030
agaggacaguaaugggaaa

SEQ ID NO: 1716710 - RNA, 19 nt, Artificial Sequence
  Description of Artificial Sequence: Synthetic oligonucleotide
  Antisense strand to SEQ ID NO: 1716709
uuucccauuacuguccucu

SEQ ID NO: 1716711 - RNA, 19 nt, Artificial Sequence
  Description of Artificial Sequence: Synthetic oligonucleotide
  Sense strand starting at position 689 of SEQ ID NO: 1562030
guuugaaguuuaguuaaga

SEQ ID NO: 1716712 - RNA, 19 nt, Artificial Sequence
  Description of Artificial Sequence: Synthetic oligonucleotide
  Antisense strand to SEQ ID NO: 1716711
ucuuaacuaaacuucaaac

SEQ ID NO: 1716713 - RNA, 19 nt, Artificial Sequence
  Description of Artificial Sequence: Synthetic oligonucleotide
  Sense strand starting at position 690 of SEQ ID NO: 1562030
uuugaaguuuaguuaagag

SEQ ID NO: 1716714 - RNA, 19 nt, Artificial Sequence
  Description of Artificial Sequence: Synthetic oligonucleotide
  Antisense strand to SEQ ID NO: 1716713
cucuuaacuaaacuucaaa

SEQ ID NO: 1716715 - RNA, 19 nt, Artificial Sequence
  Description of Artificial Sequence: Synthetic oligonucleotide
  Sense strand starting at position 697 of SEQ ID NO: 1562030
uuuaguuaagaguaacgga

SEQ ID NO: 1716716 - RNA, 19 nt, Artificial Sequence
  Description of Artificial Sequence: Synthetic oligonucleotide
  Antisense strand to SEQ ID NO: 1716715
uccguuacucuuaacuaaa

SEQ ID NO: 1716717 - RNA, 19 nt, Artificial Sequence
  Description of Artificial Sequence: Synthetic oligonucleotide
  Sense strand starting at position 734 of SEQ ID NO: 1562030
ggcgacaaaugucccauaa

SEQ ID NO: 1716718 - RNA, 19 nt, Artificial Sequence
  Description of Artificial Sequence: Synthetic oligonucleotide
  Antisense strand to SEQ ID NO: 1716717
uuaugggacauuugucgcc

SEQ ID NO: 1716719 - RNA, 19 nt, Artificial Sequence
  Description of Artificial Sequence: Synthetic oligonucleotide
  Sense strand starting at position 744 of SEQ ID NO: 1562030
gucccauaacaauguaaga

SEQ ID NO: 1716720 - RNA, 19 nt, Artificial Sequence
  Description of Artificial Sequence: Synthetic oligonucleotide
  Antisense strand to SEQ ID NO: 1716719
ucuuacauuguuaugggac

SEQ ID NO: 1716721 - RNA, 19 nt, Artificial Sequence
  Description of Artificial Sequence: Synthetic oligonucleotide
  Sense strand starting at position 869 of SEQ ID NO: 1562030
uuaaauauggaagguucua

SEQ ID NO: 1716722 - RNA, 19 nt, Artificial Sequence
  Description of Artificial Sequence: Synthetic oligonucleotide
  Antisense strand to SEQ ID NO: 1716721
uagaaccuuccauauuuaa

SEQ ID NO: 1716723 - RNA, 19 nt, Artificial Sequence
  Description of Artificial Sequence: Synthetic oligonucleotide
  Sense strand starting at position 993 of SEQ ID NO: 1562030
uuguguuaagucgaaugua

SEQ ID NO: 1716724 - RNA, 19 nt, Artificial Sequence
  Description of Artificial Sequence: Synthetic oligonucleotide
  Antisense strand to SEQ ID NO: 1716723
uacauucgacuuaacacaa

SEQ ID NO: 1716725 - RNA, 19 nt, Artificial Sequence
  Description of Artificial Sequence: Synthetic oligonucleotide
  Sense strand starting at position 1084 of SEQ ID NO: 1562030
uugauuugaggcugucuuu

SEQ ID NO: 1716726 - RNA, 19 nt, Artificial Sequence
  Description of Artificial Sequence: Synthetic oligonucleotide
  Antisense strand to SEQ ID NO: 1716725
aaagacagccucaaaucaa

SEQ ID NO: 1716727 - RNA, 19 nt, Artificial Sequence
  Description of Artificial Sequence: Synthetic oligonucleotide
  Sense strand starting at position 1087 of SEQ ID NO: 1562030
auuugaggcugucuuuacu

SEQ ID NO: 1716728 - RNA, 19 nt, Artificial Sequence
  Description of Artificial Sequence: Synthetic oligonucleotide
  Antisense strand to SEQ ID NO: 1716727
aguaaagacagccucaaau

SEQ ID NO: 1716729 - RNA, 19 nt, Artificial Sequence
  Description of Artificial Sequence: Synthetic oligonucleotide
  Sense strand starting at position 1234 of SEQ ID NO: 1562030
cucaguuucucccuggcaa

SEQ ID NO: 1716730 - RNA, 19 nt, Artificial Sequence
  Description of Artificial Sequence: Synthetic oligonucleotide
  Antisense strand to SEQ ID NO: 1716729
uugccagggagaaacugag

SEQ ID NO: 1716731 - RNA, 19 nt, Artificial Sequence
  Description of Artificial Sequence: Synthetic oligonucleotide
  Sense strand starting at position 1235 of SEQ ID NO: 1562030
ucaguuucucccuggcaaa

SEQ ID NO: 1716732 - RNA, 19 nt, Artificial Sequence
  Description of Artificial Sequence: Synthetic oligonucleotide
  Antisense strand to SEQ ID NO: 1716731
uuugccagggagaaacuga

SEQ ID NO: 1716733 - RNA, 19 nt, Artificial Sequence
  Description of Artificial Sequence: Synthetic oligonucleotide
  Sense strand starting at position 1364 of SEQ ID NO: 1562030
acacucccaucuguguaau

SEQ ID NO: 1716734 - RNA, 19 nt, Artificial Sequence
  Description of Artificial Sequence: Synthetic oligonucleotide
  Antisense strand to SEQ ID NO: 1716733
auuacacagaugggagugu

SEQ ID NO: 1716735 - RNA, 19 nt, Artificial Sequence
  Description of Artificial Sequence: Synthetic oligonucleotide
  Sense strand starting at position 1375 of SEQ ID NO: 1562030
uguguaauggguugaggag

SEQ ID NO: 1716736 - RNA, 19 nt, Artificial Sequence
  Description of Artificial Sequence: Synthetic oligonucleotide
  Antisense strand to SEQ ID NO: 1716735
cuccucaacccauuacaca

SEQ ID NO: 1716737 - RNA, 19 nt, Artificial Sequence
  Description of Artificial Sequence: Synthetic oligonucleotide
  Sense strand starting at position 1391 of SEQ ID NO: 1562030
gagcgaggcuaucccuaua

SEQ ID NO: 1716738 - RNA, 19 nt, Artificial Sequence
  Description of Artificial Sequence: Synthetic oligonucleotide
  Antisense strand to SEQ ID NO: 1716737
uauagggauagccucgcuc

SEQ ID NO: 1716739 - RNA, 19 nt, Artificial Sequence
  Description of Artificial Sequence: Synthetic oligonucleotide
  Sense strand starting at position 1394 of SEQ ID NO: 1562030
cgaggcuaucccuauagga

SEQ ID NO: 1716740 - RNA, 19 nt, Artificial Sequence
  Description of Artificial Sequence: Synthetic oligonucleotide
  Antisense strand to SEQ ID NO: 1716739
uccuauagggauagccucg

SEQ ID NO: 1716741 - RNA, 19 nt, Artificial Sequence
  Description of Artificial Sequence: Synthetic oligonucleotide
  Sense strand starting at position 1396 of SEQ ID NO: 1562030
aggcuaucccuauaggacu

SEQ ID NO: 1716742 - RNA, 19 nt, Artificial Sequence
  Description of Artificial Sequence: Synthetic oligonucleotide
  Antisense strand to SEQ ID NO: 1716741
aguccuauagggauagccu

SEQ ID NO: 1716743 - RNA, 19 nt, Artificial Sequence
  Description of Artificial Sequence: Synthetic oligonucleotide
  Sense strand starting at position 2768 of SEQ ID NO: 1562030
gacagauagugcccgugaa

SEQ ID NO: 1716744 - RNA, 19 nt, Artificial Sequence
  Description of Artificial Sequence: Synthetic oligonucleotide
  Antisense strand to SEQ ID NO: 1716743
uucacgggcacuaucuguc

SEQ ID NO: 1716745 - RNA, 19 nt, Artificial Sequence
  Description of Artificial Sequence: Synthetic oligonucleotide
  Sense strand starting at position 2769 of SEQ ID NO: 1562030
acagauagugcccgugaag

SEQ ID NO: 1716746 - RNA, 19 nt, Artificial Sequence
  Description of Artificial Sequence: Synthetic oligonucleotide
  Antisense strand to SEQ ID NO: 1716745
cuucacgggcacuaucugu

SEQ ID NO: 1716747 - RNA, 19 nt, Artificial Sequence
  Description of Artificial Sequence: Synthetic oligonucleotide
  Sense strand starting at position 2772 of SEQ ID NO: 1562030
gauagugcccgugaaguau

SEQ ID NO: 1716748 - RNA, 19 nt, Artificial Sequence
  Description of Artificial Sequence: Synthetic oligonucleotide
  Antisense strand to SEQ ID NO: 1716747
auacuucacgggcacuauc

SEQ ID NO: 1716749 - RNA, 19 nt, Artificial Sequence
  Description of Artificial Sequence: Synthetic oligonucleotide
  Sense strand starting at position 3043 of SEQ ID NO: 1562030
cagaguugugcuuaccucu

SEQ ID NO: 1716750 - RNA, 19 nt, Artificial Sequence
  Description of Artificial Sequence: Synthetic oligonucleotide
  Antisense strand to SEQ ID NO: 1716749
agagguaagcacaacucug

SEQ ID NO: 1716751 - RNA, 19 nt, Artificial Sequence
  Description of Artificial Sequence: Synthetic oligonucleotide
  Sense strand starting at position 3139 of SEQ ID NO: 1562030
uuaugaaaccaugggcuga

SEQ ID NO: 1716752 - RNA, 19 nt, Artificial Sequence
  Description of Artificial Sequence: Synthetic oligonucleotide
  Antisense strand to SEQ ID NO: 1716751
ucagcccaugguuucauaa

SEQ ID NO: 1716753 - RNA, 19 nt, Artificial Sequence
  Description of Artificial Sequence: Synthetic oligonucleotide
  Sense strand starting at position 3185 of SEQ ID NO: 1562030
guucuaguccuguauccac

SEQ ID NO: 1716754 - RNA, 19 nt, Artificial Sequence
  Description of Artificial Sequence: Synthetic oligonucleotide
  Antisense strand to SEQ ID NO: 1716753
guggauacaggacuagaac

SEQ ID NO: 1716755 - RNA, 19 nt, Artificial Sequence
  Description of Artificial Sequence: Synthetic oligonucleotide
  Sense strand starting at position 3248 of SEQ ID NO: 1562030
ccagcagagcucuggagaa

SEQ ID NO: 1716756 - RNA, 19 nt, Artificial Sequence
  Description of Artificial Sequence: Synthetic oligonucleotide
  Antisense strand to SEQ ID NO: 1716755
uucuccagagcucugcugg

SEQ ID NO: 1716757 - RNA, 19 nt, Artificial Sequence
  Description of Artificial Sequence: Synthetic oligonucleotide
  Sense strand starting at position 3428 of SEQ ID NO: 1562030
cccaucuuucccuagaggu

SEQ ID NO: 1716758 - RNA, 19 nt, Artificial Sequence
  Description of Artificial Sequence: Synthetic oligonucleotide
  Antisense strand to SEQ ID NO: 1716757
accucuagggaaagauggg

SEQ ID NO: 1716759 - RNA, 19 nt, Artificial Sequence
  Description of Artificial Sequence: Synthetic oligonucleotide
  Sense strand starting at position 3688 of SEQ ID NO: 1562030
ucauuugccugcuuaaugu

SEQ ID NO: 1716760 - RNA, 19 nt, Artificial Sequence
  Description of Artificial Sequence: Synthetic oligonucleotide
  Antisense strand to SEQ ID NO: 1716759
acauuaagcaggcaaauga

SEQ ID NO: 1716761 - RNA, 19 nt, Artificial Sequence
  Description of Artificial Sequence: Synthetic oligonucleotide
  Sense strand starting at position 3974 of SEQ ID NO: 1562030
agcugagguuccucauuga

SEQ ID NO: 1716762 - RNA, 19 nt, Artificial Sequence
  Description of Artificial Sequence: Synthetic oligonucleotide
  Antisense strand to SEQ ID NO: 1716761
ucaaugaggaaccucagcu

SEQ ID NO: 1716763 - RNA, 19 nt, Artificial Sequence
  Description of Artificial Sequence: Synthetic oligonucleotide
  Sense strand starting at position 3977 of SEQ ID NO: 1562030
ugagguuccucauugacag

SEQ ID NO: 1716764 - RNA, 19 nt, Artificial Sequence
  Description of Artificial Sequence: Synthetic oligonucleotide
  Antisense strand to SEQ ID NO: 1716763
cugucaaugaggaaccuca

SEQ ID NO: 1716765 - RNA, 19 nt, Artificial Sequence
  Description of Artificial Sequence: Synthetic oligonucleotide
  Sense strand starting at position 3978 of SEQ ID NO: 1562030
gagguuccucauugacaga

SEQ ID NO: 1716766 - RNA, 19 nt, Artificial Sequence
  Description of Artificial Sequence: Synthetic oligonucleotide
  Antisense strand to SEQ ID NO: 1716765
ucugucaaugaggaaccuc

SEQ ID NO: 1716767 - RNA, 19 nt, Artificial Sequence
  Description of Artificial Sequence: Synthetic oligonucleotide
  Sense strand starting at position 846 of SEQ ID NO: 1562031
gcgaguucucaggacucag

SEQ ID NO: 1716768 - RNA, 19 nt, Artificial Sequence
  Description of Artificial Sequence: Synthetic oligonucleotide
  Antisense strand to SEQ ID NO: 1716767
cugaguccugagaacucgc

SEQ ID NO: 1716769 - RNA, 19 nt, Artificial Sequence
  Description of Artificial Sequence: Synthetic oligonucleotide
  Sense strand starting at position 970 of SEQ ID NO: 1562031
ugggucugcacguaauaga

SEQ ID NO: 1716770 - RNA, 19 nt, Artificial Sequence
  Description of Artificial Sequence: Synthetic oligonucleotide
  Antisense strand to SEQ ID NO: 1716769
ucuauuacgugcagaccca

SEQ ID NO: 1716771 - RNA, 19 nt, Artificial Sequence
  Description of Artificial Sequence: Synthetic oligonucleotide
  Sense strand starting at position 1108 of SEQ ID NO: 1562031
cccaaucacugaugagaaa

SEQ ID NO: 1716772 - RNA, 19 nt, Artificial Sequence
  Description of Artificial Sequence: Synthetic oligonucleotide
  Antisense strand to SEQ ID NO: 1716771
uuucucaucagugauuggg

SEQ ID NO: 1716773 - RNA, 19 nt, Artificial Sequence
  Description of Artificial Sequence: Synthetic oligonucleotide
  Sense strand starting at position 2872 of SEQ ID NO: 1562031
ccgacucaugccugaguga

SEQ ID NO: 1716774 - RNA, 19 nt, Artificial Sequence
  Description of Artificial Sequence: Synthetic oligonucleotide
  Antisense strand to SEQ ID NO: 1716773
ucacucaggcaugagucgg

SEQ ID NO: 1716775 - RNA, 19 nt, Artificial Sequence
  Description of Artificial Sequence: Synthetic oligonucleotide
  Sense strand starting at position 3209 of SEQ ID NO: 1562031
uuaacaggcucauagauuu

SEQ ID NO: 1716776 - RNA, 19 nt, Artificial Sequence
  Description of Artificial Sequence: Synthetic oligonucleotide
  Antisense strand to SEQ ID NO: 1716775
aaaucuaugagccuguuaa

SEQ ID NO: 1716777 - RNA, 19 nt, Artificial Sequence
  Description of Artificial Sequence: Synthetic oligonucleotide
  Sense strand starting at position 3433 of SEQ ID NO: 1562031
gugagucuauguccaggaa

SEQ ID NO: 1716778 - RNA, 19 nt, Artificial Sequence
  Description of Artificial Sequence: Synthetic oligonucleotide
  Antisense strand to SEQ ID NO: 1716777
uuccuggacauagacucac

SEQ ID NO: 1716779 - RNA, 19 nt, Artificial Sequence
  Description of Artificial Sequence: Synthetic oligonucleotide
  Sense strand starting at position 3445 of SEQ ID NO: 1562031
ccaggaagccucgaguauc

SEQ ID NO: 1716780 - RNA, 19 nt, Artificial Sequence
  Description of Artificial Sequence: Synthetic oligonucleotide
  Antisense strand to SEQ ID NO: 1716779
gauacucgaggcuuccugg

SEQ ID NO: 1716781 - RNA, 19 nt, Artificial Sequence
  Description of Artificial Sequence: Synthetic oligonucleotide
  Sense strand starting at position 3453 of SEQ ID NO: 1562031
ccucgaguaucccugaguu

SEQ ID NO: 1716782 - RNA, 19 nt, Artificial Sequence
  Description of Artificial Sequence: Synthetic oligonucleotide
  Antisense strand to SEQ ID NO: 1716781
aacucagggauacucgagg

SEQ ID NO: 1716783 - RNA, 19 nt, Artificial Sequence
  Description of Artificial Sequence: Synthetic oligonucleotide
  Sense strand starting at position 3457 of SEQ ID NO: 1562031
gaguaucccugaguucgga

SEQ ID NO: 1716784 - RNA, 19 nt, Artificial Sequence
  Description of Artificial Sequence: Synthetic oligonucleotide
  Antisense strand to SEQ ID NO: 1716783
uccgaacucagggauacuc

SEQ ID NO: 1716785 - RNA, 19 nt, Artificial Sequence
  Description of Artificial Sequence: Synthetic oligonucleotide
  Sense strand starting at position 3658 of SEQ ID NO: 1562031
ggccuucugugccagagga

SEQ ID NO: 1716786 - RNA, 19 nt, Artificial Sequence
  Description of Artificial Sequence: Synthetic oligonucleotide
  Antisense strand to SEQ ID NO: 1716785
uccucuggcacagaaggcc

SEQ ID NO: 1716787 - RNA, 19 nt, Artificial Sequence
  Description of Artificial Sequence: Synthetic oligonucleotide
  Sense strand starting at position 3767 of SEQ ID NO: 1562031
uagguucucccaugcagau

SEQ ID NO: 1716788 - RNA, 19 nt, Artificial Sequence
  Description of Artificial Sequence: Synthetic oligonucleotide
  Antisense strand to SEQ ID NO: 1716787
aucugcaugggagaaccua

SEQ ID NO: 1716789 - RNA, 19 nt, Artificial Sequence
  Description of Artificial Sequence: Synthetic oligonucleotide
  Sense strand starting at position 3807 of SEQ ID NO: 1562031
gucccaaaggcucagauaa

SEQ ID NO: 1716790 - RNA, 19 nt, Artificial Sequence
  Description of Artificial Sequence: Synthetic oligonucleotide
  Antisense strand to SEQ ID NO: 1716789
uuaucugagccuuugggac

SEQ ID NO: 1716791 - RNA, 19 nt, Artificial Sequence
  Description of Artificial Sequence: Synthetic oligonucleotide
  Sense strand starting at position 9 of SEQ ID NO: 1562032
caaugcuuccacugugaug

SEQ ID NO: 1716792 - RNA, 19 nt, Artificial Sequence
  Description of Artificial Sequence: Synthetic oligonucleotide
  Antisense strand to SEQ ID NO: 1716791
caucacaguggaagcauug

SEQ ID NO: 1716793 - RNA, 19 nt, Artificial Sequence
  Description of Artificial Sequence: Synthetic oligonucleotide
  Sense strand starting at position 29 of SEQ ID NO: 1562032
gguguaucauaaucaacuc

SEQ ID NO: 1716794 - RNA, 19 nt, Artificial Sequence
  Description of Artificial Sequence: Synthetic oligonucleotide
  Antisense strand to SEQ ID NO: 1716793
gaguugauuaugauacacc

SEQ ID NO: 1716795 - RNA, 19 nt, Artificial Sequence
  Description of Artificial Sequence: Synthetic oligonucleotide
  Sense strand starting at position 222 of SEQ ID NO: 1562032
uauagauuacagugguuag

SEQ ID NO: 1716796 - RNA, 19 nt, Artificial Sequence
  Description of Artificial Sequence: Synthetic oligonucleotide
  Antisense strand to SEQ ID NO: 1716795
cuaaccacuguaaucuaua

SEQ ID NO: 1716797 - RNA, 19 nt, Artificial Sequence
  Description of Artificial Sequence: Synthetic oligonucleotide
  Sense strand starting at position 223 of SEQ ID NO: 1562032
auagauuacagugguuaga

SEQ ID NO: 1716798 - RNA, 19 nt, Artificial Sequence
  Description of Artificial Sequence: Synthetic oligonucleotide
  Antisense strand to SEQ ID NO: 1716797
ucuaaccacuguaaucuau

SEQ ID NO: 1716799 - RNA, 19 nt, Artificial Sequence
  Description of Artificial Sequence: Synthetic oligonucleotide
  Sense strand starting at position 225 of SEQ ID NO: 1562032
agauuacagugguuagaaa

SEQ ID NO: 1716800 - RNA, 19 nt, Artificial Sequence
  Description of Artificial Sequence: Synthetic oligonucleotide
  Antisense strand to SEQ ID NO: 1716799
uuucuaaccacuguaaucu

SEQ ID NO: 1716801 - RNA, 19 nt, Artificial Sequence
  Description of Artificial Sequence: Synthetic oligonucleotide
  Sense strand starting at position 232 of SEQ ID NO: 1562032
agugguuagaaauauuagu

SEQ ID NO: 1716802 - RNA, 19 nt, Artificial Sequence
  Description of Artificial Sequence: Synthetic oligonucleotide
  Antisense strand to SEQ ID NO: 1716801
acuaauauuucuaaccacu

SEQ ID NO: 1716803 - RNA, 19 nt, Artificial Sequence
  Description of Artificial Sequence: Synthetic oligonucleotide
  Sense strand starting at position 245 of SEQ ID NO: 1562032
auuagucuagcagaaacua

SEQ ID NO: 1716804 - RNA, 19 nt, Artificial Sequence
  Description of Artificial Sequence: Synthetic oligonucleotide
  Antisense strand to SEQ ID NO: 1716803
uaguuucugcuagacuaau

SEQ ID NO: 1716805 - RNA, 19 nt, Artificial Sequence
  Description of Artificial Sequence: Synthetic oligonucleotide
  Sense strand starting at position 298 of SEQ ID NO: 1562032
gucaaauaagcuugaugua

SEQ ID NO: 1716806 - RNA, 19 nt, Artificial Sequence
  Description of Artificial Sequence: Synthetic oligonucleotide
  Antisense strand to SEQ ID NO: 1716805
uacaucaagcuuauuugac

SEQ ID NO: 1716807 - RNA, 19 nt, Artificial Sequence
  Description of Artificial Sequence: Synthetic oligonucleotide
  Sense strand starting at position 299 of SEQ ID NO: 1562032
ucaaauaagcuugauguaa

SEQ ID NO: 1716808 - RNA, 19 nt, Artificial Sequence
  Description of Artificial Sequence: Synthetic oligonucleotide
  Antisense strand to SEQ ID NO: 1716807
uuacaucaagcuuauuuga

SEQ ID NO: 1716809 - RNA, 19 nt, Artificial Sequence
  Description of Artificial Sequence: Synthetic oligonucleotide
  Sense strand starting at position 358 of SEQ ID NO: 1562032
guuagucaagcauaccaaa

SEQ ID NO: 1716810 - RNA, 19 nt, Artificial Sequence
  Description of Artificial Sequence: Synthetic oligonucleotide
  Antisense strand to SEQ ID NO: 1716809
uuugguaugcuugacuaac

SEQ ID NO: 1716811 - RNA, 19 nt, Artificial Sequence
  Description of Artificial Sequence: Synthetic oligonucleotide
  Sense strand starting at position 528 of SEQ ID NO: 1562032
uucuguauaucgcuuauuu

SEQ ID NO: 1716812 - RNA, 19 nt, Artificial Sequence
  Description of Artificial Sequence: Synthetic oligonucleotide
  Antisense strand to SEQ ID NO: 1716811
aaauaagcgauauacagaa

SEQ ID NO: 1716813 - RNA, 19 nt, Artificial Sequence
  Description of Artificial Sequence: Synthetic oligonucleotide
  Sense strand starting at position 600 of SEQ ID NO: 1562032
uuuaauugggaguauguau

SEQ ID NO: 1716814 - RNA, 19 nt, Artificial Sequence
  Description of Artificial Sequence: Synthetic oligonucleotide
  Antisense strand to SEQ ID NO: 1716813
auacauacucccaauuaaa

SEQ ID NO: 1716815 - RNA, 19 nt, Artificial Sequence
  Description of Artificial Sequence: Synthetic oligonucleotide
  Sense strand starting at position 607 of SEQ ID NO: 1562032
gggaguauguaucuuauuc

SEQ ID NO: 1716816 - RNA, 19 nt, Artificial Sequence
  Description of Artificial Sequence: Synthetic oligonucleotide
  Antisense strand to SEQ ID NO: 1716815
gaauaagauacauacuccc

SEQ ID NO: 1716817 - RNA, 19 nt, Artificial Sequence
  Description of Artificial Sequence: Synthetic oligonucleotide
  Sense strand starting at position 760 of SEQ ID NO: 1562032
agacuaagcugcucauuga

SEQ ID NO: 1716818 - RNA, 19 nt, Artificial Sequence
  Description of Artificial Sequence: Synthetic oligonucleotide
  Antisense strand to SEQ ID NO: 1716817
ucaaugagcagcuuagucu

SEQ ID NO: 1716819 - RNA, 19 nt, Artificial Sequence
  Description of Artificial Sequence: Synthetic oligonucleotide
  Sense strand starting at position 764 of SEQ ID NO: 1562032
uaagcugcucauugaggaa

SEQ ID NO: 1716820 - RNA, 19 nt, Artificial Sequence
  Description of Artificial Sequence: Synthetic oligonucleotide
  Antisense strand to SEQ ID NO: 1716819
uuccucaaugagcagcuua

SEQ ID NO: 1716821 - RNA, 19 nt, Artificial Sequence
  Description of Artificial Sequence: Synthetic oligonucleotide
  Sense strand starting at position 821 of SEQ ID NO: 1562032
ugagucccugccugaaaga

SEQ ID NO: 1716822 - RNA, 19 nt, Artificial Sequence
  Description of Artificial Sequence: Synthetic oligonucleotide
  Antisense strand to SEQ ID NO: 1716821
ucuuucaggcagggacuca

SEQ ID NO: 1716823 - RNA, 19 nt, Artificial Sequence
  Description of Artificial Sequence: Synthetic oligonucleotide
  Sense strand starting at position 822 of SEQ ID NO: 1562032
gagucccugccugaaagaa

SEQ ID NO: 1716824 - RNA, 19 nt, Artificial Sequence
  Description of Artificial Sequence: Synthetic oligonucleotide
  Antisense strand to SEQ ID NO: 1716823
uucuuucaggcagggacuc

SEQ ID NO: 1716825 - RNA, 19 nt, Artificial Sequence
  Description of Artificial Sequence: Synthetic oligonucleotide
  Sense strand starting at position 832 of SEQ ID NO: 1562032
cugaaagaauaauaucaug

SEQ ID NO: 1716826 - RNA, 19 nt, Artificial Sequence
  Description of Artificial Sequence: Synthetic oligonucleotide
  Antisense strand to SEQ ID NO: 1716825
caugauauuauucuuucag

SEQ ID NO: 1716827 - RNA, 19 nt, Artificial Sequence
  Description of Artificial Sequence: Synthetic oligonucleotide
  Sense strand starting at position 1132 of SEQ ID NO: 1562032
gccuguccugauuagcaaa

SEQ ID NO: 1716828 - RNA, 19 nt, Artificial Sequence
  Description of Artificial Sequence: Synthetic oligonucleotide
  Antisense strand to SEQ ID NO: 1716827
uuugcuaaucaggacaggc

SEQ ID NO: 1716829 - RNA, 19 nt, Artificial Sequence
  Description of Artificial Sequence: Synthetic oligonucleotide
  Sense strand starting at position 1182 of SEQ ID NO: 1562032
acagaauaagcuugccaac

SEQ ID NO: 1716830 - RNA, 19 nt, Artificial Sequence
  Description of Artificial Sequence: Synthetic oligonucleotide
  Antisense strand to SEQ ID NO: 1716829
guuggcaagcuuauucugu

SEQ ID NO: 1716831 - RNA, 19 nt, Artificial Sequence
  Description of Artificial Sequence: Synthetic oligonucleotide
  Sense strand starting at position 1239 of SEQ ID NO: 1562032
gacugucaucucugggacu

SEQ ID NO: 1716832 - RNA, 19 nt, Artificial Sequence
  Description of Artificial Sequence: Synthetic oligonucleotide
  Antisense strand to SEQ ID NO: 1716831
agucccagagaugacaguc

SEQ ID NO: 1716833 - RNA, 19 nt, Artificial Sequence
  Description of Artificial Sequence: Synthetic oligonucleotide
  Sense strand starting at position 2003 of SEQ ID NO: 1562032
ccaaucagcgaucgagaau

SEQ ID NO: 1716834 - RNA, 19 nt, Artificial Sequence
  Description of Artificial Sequence: Synthetic oligonucleotide
  Antisense strand to SEQ ID NO: 1716833
auucucgaucgcugauugg

SEQ ID NO: 1716835 - RNA, 19 nt, Artificial Sequence
  Description of Artificial Sequence: Synthetic oligonucleotide
  Sense strand starting at position 2082 of SEQ ID NO: 1562032
ccgcgagauaucuaauagc

SEQ ID NO: 1716836 - RNA, 19 nt, Artificial Sequence
  Description of Artificial Sequence: Synthetic oligonucleotide
  Antisense strand to SEQ ID NO: 1716835
gcuauuagauaucucgcgg

SEQ ID NO: 1716837 - RNA, 19 nt, Artificial Sequence
  Description of Artificial Sequence: Synthetic oligonucleotide
  Sense strand starting at position 2250 of SEQ ID NO: 1562032
cagagugaguggccuuaaa

SEQ ID NO: 1716838 - RNA, 19 nt, Artificial Sequence
  Description of Artificial Sequence: Synthetic oligonucleotide
  Antisense strand to SEQ ID NO: 1716837
uuuaaggccacucacucug

SEQ ID NO: 1716839 - RNA, 19 nt, Artificial Sequence
  Description of Artificial Sequence: Synthetic oligonucleotide
  Sense strand starting at position 2313 of SEQ ID NO: 1562032
aguaauccaagcuggagua

SEQ ID NO: 1716840 - RNA, 19 nt, Artificial Sequence
  Description of Artificial Sequence: Synthetic oligonucleotide
  Antisense strand to SEQ ID NO: 1716839
uacuccagcuuggauuacu

SEQ ID NO: 1716841 - RNA, 19 nt, Artificial Sequence
  Description of Artificial Sequence: Synthetic oligonucleotide
  Sense strand starting at position 2466 of SEQ ID NO: 1562032
cugucugaaacgcagaauu

SEQ ID NO: 1716842 - RNA, 19 nt, Artificial Sequence
  Description of Artificial Sequence: Synthetic oligonucleotide
  Antisense strand to SEQ ID NO: 1716841
aauucugcguuucagacag

SEQ ID NO: 1716843 - RNA, 19 nt, Artificial Sequence
  Description of Artificial Sequence: Synthetic oligonucleotide
  Sense strand starting at position 2724 of SEQ ID NO: 1562032
agaaucagaccucgucacu

SEQ ID NO: 1716844 - RNA, 19 nt, Artificial Sequence
  Description of Artificial Sequence: Synthetic oligonucleotide
  Antisense strand to SEQ ID NO: 1716843
agugacgaggucugauucu

SEQ ID NO: 1716845 - RNA, 19 nt, Artificial Sequence
  Description of Artificial Sequence: Synthetic oligonucleotide
  Sense strand starting at position 2730 of SEQ ID NO: 1562032
agaccucgucacuacuaaa

SEQ ID NO: 1716846 - RNA, 19 nt, Artificial Sequence
  Description of Artificial Sequence: Synthetic oligonucleotide
  Antisense strand to SEQ ID NO: 1716845
uuuaguagugacgaggucu

SEQ ID NO: 1716847 - RNA, 19 nt, Artificial Sequence
  Description of Artificial Sequence: Synthetic oligonucleotide
  Sense strand starting at position 3266 of SEQ ID NO: 1562032
aguucuacaucaucagacu

SEQ ID NO: 1716848 - RNA, 19 nt, Artificial Sequence
  Description of Artificial Sequence: Synthetic oligonucleotide
  Antisense strand to SEQ ID NO: 1716847
agucugaugauguagaacu

SEQ ID NO: 1716849 - RNA, 19 nt, Artificial Sequence
  Description of Artificial Sequence: Synthetic oligonucleotide
  Sense strand starting at position 3420 of SEQ ID NO: 1562032
ucaguuauuucucucuugu

SEQ ID NO: 1716850 - RNA, 19 nt, Artificial Sequence
  Description of Artificial Sequence: Synthetic oligonucleotide
  Antisense strand to SEQ ID NO: 1716849
acaagagagaaauaacuga

SEQ ID NO: 1716851 - RNA, 19 nt, Artificial Sequence
  Description of Artificial Sequence: Synthetic oligonucleotide
  Sense strand starting at position 3422 of SEQ ID NO: 1562032
aguuauuucucucuuguuc

SEQ ID NO: 1716852 - RNA, 19 nt, Artificial Sequence
  Description of Artificial Sequence: Synthetic oligonucleotide
  Antisense strand to SEQ ID NO: 1716851
gaacaagagagaaauaacu

SEQ ID NO: 1716853 - RNA, 19 nt, Artificial Sequence
  Description of Artificial Sequence: Synthetic oligonucleotide
  Sense strand starting at position 3592 of SEQ ID NO: 1562032
gaagucuugcccgauucua

SEQ ID NO: 1716854 - RNA, 19 nt, Artificial Sequence
  Description of Artificial Sequence: Synthetic oligonucleotide
  Antisense strand to SEQ ID NO: 1716853
uagaaucgggcaagacuuc

SEQ ID NO: 1716855 - RNA, 19 nt, Artificial Sequence
  Description of Artificial Sequence: Synthetic oligonucleotide
  Sense strand starting at position 3685 of SEQ ID NO: 1562032
aaguguguugaauaaugca

SEQ ID NO: 1716856 - RNA, 19 nt, Artificial Sequence
  Description of Artificial Sequence: Synthetic oligonucleotide
  Antisense strand to SEQ ID NO: 1716855
ugcauuauucaacacacuu

SEQ ID NO: 1716857 - RNA, 19 nt, Artificial Sequence
  Description of Artificial Sequence: Synthetic oligonucleotide
  Sense strand starting at position 3736 of SEQ ID NO: 1562032
aucuuuggucuagggauga

SEQ ID NO: 1716858 - RNA, 19 nt, Artificial Sequence
  Description of Artificial Sequence: Synthetic oligonucleotide
  Antisense strand to SEQ ID NO: 1716857
ucaucccuagaccaaagau

SEQ ID NO: 1716859 - RNA, 19 nt, Artificial Sequence
  Description of Artificial Sequence: Synthetic oligonucleotide
  Sense strand starting at position 3790 of SEQ ID NO: 1562032
ugauucucguaccuaugau

SEQ ID NO: 1716860 - RNA, 19 nt, Artificial Sequence
  Description of Artificial Sequence: Synthetic oligonucleotide
  Antisense strand to SEQ ID NO: 1716859
aucauagguacgagaauca

SEQ ID NO: 1716861 - RNA, 19 nt, Artificial Sequence
  Description of Artificial Sequence: Synthetic oligonucleotide
  Sense strand starting at position 3902 of SEQ ID NO: 1562032
uugugaauuccaggagguu

SEQ ID NO: 1716862 - RNA, 19 nt, Artificial Sequence
  Description of Artificial Sequence: Synthetic oligonucleotide
  Antisense strand to SEQ ID NO: 1716861
aaccuccuggaauucacaa

SEQ ID NO: 1716863 - RNA, 19 nt, Artificial Sequence
  Description of Artificial Sequence: Synthetic oligonucleotide
  Sense strand starting at position 3903 of SEQ ID NO: 1562032
ugugaauuccaggagguuu

SEQ ID NO: 1716864 - RNA, 19 nt, Artificial Sequence
  Description of Artificial Sequence: Synthetic oligonucleotide
  Antisense strand to SEQ ID NO: 1716863
aaaccuccuggaauucaca

SEQ ID NO: 1716865 - RNA, 19 nt, Artificial Sequence
  Description of Artificial Sequence: Synthetic oligonucleotide
  Sense strand starting at position 3963 of SEQ ID NO: 1562032
agagacacugccugguauu

SEQ ID NO: 1716866 - RNA, 19 nt, Artificial Sequence
  Description of Artificial Sequence: Synthetic oligonucleotide
  Antisense strand to SEQ ID NO: 1716865
aauaccaggcagugucucu

SEQ ID NO: 1716867 - RNA, 19 nt, Artificial Sequence
  Description of Artificial Sequence: Synthetic oligonucleotide
  Sense strand starting at position 3964 of SEQ ID NO: 1562032
gagacacugccugguauua

SEQ ID NO: 1716868 - RNA, 19 nt, Artificial Sequence
  Description of Artificial Sequence: Synthetic oligonucleotide
  Antisense strand to SEQ ID NO: 1716867
uaauaccaggcagugucuc

SEQ ID NO: 1716869 - RNA, 19 nt, Artificial Sequence
  Description of Artificial Sequence: Synthetic oligonucleotide
  Sense strand starting at position 3974 of SEQ ID NO: 1562032
cugguauuaucagcugaac

SEQ ID NO: 1716870 - RNA, 19 nt, Artificial Sequence
  Description of Artificial Sequence: Synthetic oligonucleotide
  Antisense strand to SEQ ID NO: 1716869
guucagcugauaauaccag

SEQ ID NO: 1716871 - RNA, 19 nt, Artificial Sequence
  Description of Artificial Sequence: Synthetic oligonucleotide
  Sense strand starting at position 62 of SEQ ID NO: 1562033
augcauacaucguccauau

SEQ ID NO: 1716872 - RNA, 19 nt, Artificial Sequence
  Description of Artificial Sequence: Synthetic oligonucleotide
  Antisense strand to SEQ ID NO: 1716871
auauggacgauguaugcau

SEQ ID NO: 1716873 - RNA, 19 nt, Artificial Sequence
  Description of Artificial Sequence: Synthetic oligonucleotide
  Sense strand starting at position 64 of SEQ ID NO: 1562033
gcauacaucguccauauau

SEQ ID NO: 1716874 - RNA, 19 nt, Artificial Sequence
  Description of Artificial Sequence: Synthetic oligonucleotide
  Antisense strand to SEQ ID NO: 1716873
auauauggacgauguaugc

SEQ ID NO: 1716875 - RNA, 19 nt, Artificial Sequence
  Description of Artificial Sequence: Synthetic oligonucleotide
  Sense strand starting at position 149 of SEQ ID NO: 1562033
ucaacauucuuagggcaga

SEQ ID NO: 1716876 - RNA, 19 nt, Artificial Sequence
  Description of Artificial Sequence: Synthetic oligonucleotide
  Antisense strand to SEQ ID NO: 1716875
ucugcccuaagaauguuga

SEQ ID NO: 1716877 - RNA, 19 nt, Artificial Sequence
  Description of Artificial Sequence: Synthetic oligonucleotide
  Sense strand starting at position 181 of SEQ ID NO: 1562033
aaagcucugucagagacuu

SEQ ID NO: 1716878 - RNA, 19 nt, Artificial Sequence
  Description of Artificial Sequence: Synthetic oligonucleotide
  Antisense strand to SEQ ID NO: 1716877
aagucucugacagagcuuu

SEQ ID NO: 1716879 - RNA, 19 nt, Artificial Sequence
  Description of Artificial Sequence: Synthetic oligonucleotide
  Sense strand starting at position 183 of SEQ ID NO: 1562033
agcucugucagagacuuga

SEQ ID NO: 1716880 - RNA, 19 nt, Artificial Sequence
  Description of Artificial Sequence: Synthetic oligonucleotide
  Antisense strand to SEQ ID NO: 1716879
ucaagucucugacagagcu

SEQ ID NO: 1716881 - RNA, 19 nt, Artificial Sequence
  Description of Artificial Sequence: Synthetic oligonucleotide
  Sense strand starting at position 285 of SEQ ID NO: 1562033
uguguucucuugugauuga

SEQ ID NO: 1716882 - RNA, 19 nt, Artificial Sequence
  Description of Artificial Sequence: Synthetic oligonucleotide
  Antisense strand to SEQ ID NO: 1716881
ucaaucacaagagaacaca

SEQ ID NO: 1716883 - RNA, 19 nt, Artificial Sequence
  Description of Artificial Sequence: Synthetic oligonucleotide
  Sense strand starting at position 286 of SEQ ID NO: 1562033
guguucucuugugauugac

SEQ ID NO: 1716884 - RNA, 19 nt, Artificial Sequence
  Description of Artificial Sequence: Synthetic oligonucleotide
  Antisense strand to SEQ ID NO: 1716883
gucaaucacaagagaacac

SEQ ID NO: 1716885 - RNA, 19 nt, Artificial Sequence
  Description of Artificial Sequence: Synthetic oligonucleotide
  Sense strand starting at position 288 of SEQ ID NO: 1562033
guucucuugugauugacau

SEQ ID NO: 1716886 - RNA, 19 nt, Artificial Sequence
  Description of Artificial Sequence: Synthetic oligonucleotide
  Antisense strand to SEQ ID NO: 1716885
augucaaucacaagagaac

SEQ ID NO: 1716887 - RNA, 19 nt, Artificial Sequence
  Description of Artificial Sequence: Synthetic oligonucleotide
  Sense strand starting at position 289 of SEQ ID NO: 1562033
uucucuugugauugacauu

SEQ ID NO: 1716888 - RNA, 19 nt, Artificial Sequence
  Description of Artificial Sequence: Synthetic oligonucleotide
  Antisense strand to SEQ ID NO: 1716887
aaugucaaucacaagagaa

SEQ ID NO: 1716889 - RNA, 19 nt, Artificial Sequence
  Description of Artificial Sequence: Synthetic oligonucleotide
  Sense strand starting at position 569 of SEQ ID NO: 1562033
ggaagcacucgcuaacuau

SEQ ID NO: 1716890 - RNA, 19 nt, Artificial Sequence
  Description of Artificial Sequence: Synthetic oligonucleotide
  Antisense strand to SEQ ID NO: 1716889
auaguuagcgagugcuucc

SEQ ID NO: 1716891 - RNA, 19 nt, Artificial Sequence
  Description of Artificial Sequence: Synthetic oligonucleotide
  Sense strand starting at position 641 of SEQ ID NO: 1562033
gcccucucucccgaagacu

SEQ ID NO: 1716892 - RNA, 19 nt, Artificial Sequence
  Description of Artificial Sequence: Synthetic oligonucleotide
  Antisense strand to SEQ ID NO: 1716891
agucuucgggagagagggc

SEQ ID NO: 1716893 - RNA, 19 nt, Artificial Sequence
  Description of Artificial Sequence: Synthetic oligonucleotide
  Sense strand starting at position 1208 of SEQ ID NO: 1562033
cccucaauacgcuauaaag

SEQ ID NO: 1716894 - RNA, 19 nt, Artificial Sequence
  Description of Artificial Sequence: Synthetic oligonucleotide
  Antisense strand to SEQ ID NO: 1716893
cuuuauagcguauugaggg

SEQ ID NO: 1716895 - RNA, 19 nt, Artificial Sequence
  Description of Artificial Sequence: Synthetic oligonucleotide
  Sense strand starting at position 1344 of SEQ ID NO: 1562033
gcaccacucugauguccua

SEQ ID NO: 1716896 - RNA, 19 nt, Artificial Sequence
  Description of Artificial Sequence: Synthetic oligonucleotide
  Antisense strand to SEQ ID NO: 1716895
uaggacaucagaguggugc

SEQ ID NO: 1716897 - RNA, 19 nt, Artificial Sequence
  Description of Artificial Sequence: Synthetic oligonucleotide
  Sense strand starting at position 1368 of SEQ ID NO: 1562033
auggcuagcuccucugaca

SEQ ID NO: 1716898 - RNA, 19 nt, Artificial Sequence
  Description of Artificial Sequence: Synthetic oligonucleotide
  Antisense strand to SEQ ID NO: 1716897
ugucagaggagcuagccau

SEQ ID NO: 1716899 - RNA, 19 nt, Artificial Sequence
  Description of Artificial Sequence: Synthetic oligonucleotide
  Sense strand starting at position 1371 of SEQ ID NO: 1562033
gcuagcuccucugacacua

SEQ ID NO: 1716900 - RNA, 19 nt, Artificial Sequence
  Description of Artificial Sequence: Synthetic oligonucleotide
  Antisense strand to SEQ ID NO: 1716899
uagugucagaggagcuagc

SEQ ID NO: 1716901 - RNA, 19 nt, Artificial Sequence
  Description of Artificial Sequence: Synthetic oligonucleotide
  Sense strand starting at position 1461 of SEQ ID NO: 1562033
ggccuagauuccugaagga

SEQ ID NO: 1716902 - RNA, 19 nt, Artificial Sequence
  Description of Artificial Sequence: Synthetic oligonucleotide
  Antisense strand to SEQ ID NO: 1716901
uccuucaggaaucuaggcc

SEQ ID NO: 1716903 - RNA, 19 nt, Artificial Sequence
  Description of Artificial Sequence: Synthetic oligonucleotide
  Sense strand starting at position 1538 of SEQ ID NO: 1562033
agaccucuucugcagcaua

SEQ ID NO: 1716904 - RNA, 19 nt, Artificial Sequence
  Description of Artificial Sequence: Synthetic oligonucleotide
  Antisense strand to SEQ ID NO: 1716903
uaugcugcagaagaggucu

SEQ ID NO: 1716905 - RNA, 19 nt, Artificial Sequence
  Description of Artificial Sequence: Synthetic oligonucleotide
  Sense strand starting at position 3115 of SEQ ID NO: 1562033
uggugagcugcuuauaucu

SEQ ID NO: 1716906 - RNA, 19 nt, Artificial Sequence
  Description of Artificial Sequence: Synthetic oligonucleotide
  Antisense strand to SEQ ID NO: 1716905
agauauaagcagcucacca

SEQ ID NO: 1716907 - RNA, 19 nt, Artificial Sequence
  Description of Artificial Sequence: Synthetic oligonucleotide
  Sense strand starting at position 3117 of SEQ ID NO: 1562033
gugagcugcuuauaucugu

SEQ ID NO: 1716908 - RNA, 19 nt, Artificial Sequence
  Description of Artificial Sequence: Synthetic oligonucleotide
  Antisense strand to SEQ ID NO: 1716907
acagauauaagcagcucac

SEQ ID NO: 1716909 - RNA, 19 nt, Artificial Sequence
  Description of Artificial Sequence: Synthetic oligonucleotide
  Sense strand starting at position 3120 of SEQ ID NO: 1562033
agcugcuuauaucuguauu

SEQ ID NO: 1716910 - RNA, 19 nt, Artificial Sequence
  Description of Artificial Sequence: Synthetic oligonucleotide
  Antisense strand to SEQ ID NO: 1716909
aauacagauauaagcagcu

SEQ ID NO: 1716911 - RNA, 19 nt, Artificial Sequence
  Description of Artificial Sequence: Synthetic oligonucleotide
  Sense strand starting at position 3150 of SEQ ID NO: 1562033
aggauccaguuggagaaua

SEQ ID NO: 1716912 - RNA, 19 nt, Artificial Sequence
  Description of Artificial Sequence: Synthetic oligonucleotide
  Antisense strand to SEQ ID NO: 1716911
uauucuccaacuggauccu

SEQ ID NO: 1716913 - RNA, 19 nt, Artificial Sequence
  Description of Artificial Sequence: Synthetic oligonucleotide
  Sense strand starting at position 3641 of SEQ ID NO: 1562033
agggcaucaugacagagaa

SEQ ID NO: 1716914 - RNA, 19 nt, Artificial Sequence
  Description of Artificial Sequence: Synthetic oligonucleotide
  Antisense strand to SEQ ID NO: 1716913
uucucugucaugaugcccu

SEQ ID NO: 1716915 - RNA, 19 nt, Artificial Sequence
  Description of Artificial Sequence: Synthetic oligonucleotide
  Sense strand starting at position 3688 of SEQ ID NO: 1562033
uggguugugguucaaauaa

SEQ ID NO: 1716916 - RNA, 19 nt, Artificial Sequence
  Description of Artificial Sequence: Synthetic oligonucleotide
  Antisense strand to SEQ ID NO: 1716915
uuauuugaaccacaaccca

SEQ ID NO: 1716917 - RNA, 19 nt, Artificial Sequence
  Description of Artificial Sequence: Synthetic oligonucleotide
  Sense strand starting at position 51 of SEQ ID NO: 1562034
cccagauguuaaguggcua

SEQ ID NO: 1716918 - RNA, 19 nt, Artificial Sequence
  Description of Artificial Sequence: Synthetic oligonucleotide
  Antisense strand to SEQ ID NO: 1716917
uagccacuuaacaucuggg

SEQ ID NO: 1716919 - RNA, 19 nt, Artificial Sequence
  Description of Artificial Sequence: Synthetic oligonucleotide
  Sense strand starting at position 52 of SEQ ID NO: 1562034
ccagauguuaaguggcuaa

SEQ ID NO: 1716920 - RNA, 19 nt, Artificial Sequence
  Description of Artificial Sequence: Synthetic oligonucleotide
  Antisense strand to SEQ ID NO: 1716919
uuagccacuuaacaucugg

SEQ ID NO: 1716921 - RNA, 19 nt, Artificial Sequence
  Description of Artificial Sequence: Synthetic oligonucleotide
  Sense strand starting at position 409 of SEQ ID NO: 1562034
caagacaacuuggaggauu

SEQ ID NO: 1716922 - RNA, 19 nt, Artificial Sequence
  Description of Artificial Sequence: Synthetic oligonucleotide
  Antisense strand to SEQ ID NO: 1716921
aauccuccaaguugucuug

SEQ ID NO: 1716923 - RNA, 19 nt, Artificial Sequence
  Description of Artificial Sequence: Synthetic oligonucleotide
  Sense strand starting at position 475 of SEQ ID NO: 1562034
gcaagaagcuucucaaaug

SEQ ID NO: 1716924 - RNA, 19 nt, Artificial Sequence
  Description of Artificial Sequence: Synthetic oligonucleotide
  Antisense strand to SEQ ID NO: 1716923
cauuugagaagcuucuugc

SEQ ID NO: 1716925 - RNA, 19 nt, Artificial Sequence
  Description of Artificial Sequence: Synthetic oligonucleotide
  Sense strand starting at position 600 of SEQ ID NO: 1562034
ucugaauacuagccagcaa

SEQ ID NO: 1716926 - RNA, 19 nt, Artificial Sequence
  Description of Artificial Sequence: Synthetic oligonucleotide
  Antisense strand to SEQ ID NO: 1716925
uugcuggcuaguauucaga

SEQ ID NO: 1716927 - RNA, 19 nt, Artificial Sequence
  Description of Artificial Sequence: Synthetic oligonucleotide
  Sense strand starting at position 642 of SEQ ID NO: 1562034
ggaggauccgauuaggcua

SEQ ID NO: 1716928 - RNA, 19 nt, Artificial Sequence
  Description of Artificial Sequence: Synthetic oligonucleotide
  Antisense strand to SEQ ID NO: 1716927
uagccuaaucggauccucc

SEQ ID NO: 1716929 - RNA, 19 nt, Artificial Sequence
  Description of Artificial Sequence: Synthetic oligonucleotide
  Sense strand starting at position 683 of SEQ ID NO: 1562034
caagauugucaagggcuuu

SEQ ID NO: 1716930 - RNA, 19 nt, Artificial Sequence
  Description of Artificial Sequence: Synthetic oligonucleotide
  Antisense strand to SEQ ID NO: 1716929
aaagcccuugacaaucuug

SEQ ID NO: 1716931 - RNA, 19 nt, Artificial Sequence
  Description of Artificial Sequence: Synthetic oligonucleotide
  Sense strand starting at position 689 of SEQ ID NO: 1562034
ugucaagggcuuuguauga

SEQ ID NO: 1716932 - RNA, 19 nt, Artificial Sequence
  Description of Artificial Sequence: Synthetic oligonucleotide
  Antisense strand to SEQ ID NO: 1716931
ucauacaaagcccuugaca

SEQ ID NO: 1716933 - RNA, 19 nt, Artificial Sequence
  Description of Artificial Sequence: Synthetic oligonucleotide
  Sense strand starting at position 696 of SEQ ID NO: 1562034
ggcuuuguaugaccugaua

SEQ ID NO: 1716934 - RNA, 19 nt, Artificial Sequence
  Description of Artificial Sequence: Synthetic oligonucleotide
  Antisense strand to SEQ ID NO: 1716933
uaucaggucauacaaagcc

SEQ ID NO: 1716935 - RNA, 19 nt, Artificial Sequence
  Description of Artificial Sequence: Synthetic oligonucleotide
  Sense strand starting at position 790 of SEQ ID NO: 1562034
agaucuguuucugaaagga

SEQ ID NO: 1716936 - RNA, 19 nt, Artificial Sequence
  Description of Artificial Sequence: Synthetic oligonucleotide
  Antisense strand to SEQ ID NO: 1716935
uccuuucagaaacagaucu

SEQ ID NO: 1716937 - RNA, 19 nt, Artificial Sequence
  Description of Artificial Sequence: Synthetic oligonucleotide
  Sense strand starting at position 820 of SEQ ID NO: 1562034
ggaagauguucgcccuuuc

SEQ ID NO: 1716938 - RNA, 19 nt, Artificial Sequence
  Description of Artificial Sequence: Synthetic oligonucleotide
  Antisense strand to SEQ ID NO: 1716937
gaaagggcgaacaucuucc

SEQ ID NO: 1716939 - RNA, 19 nt, Artificial Sequence
  Description of Artificial Sequence: Synthetic oligonucleotide
  Sense strand starting at position 910 of SEQ ID NO: 1562034
aagccaucuccagggugau

SEQ ID NO: 1716940 - RNA, 19 nt, Artificial Sequence
  Description of Artificial Sequence: Synthetic oligonucleotide
  Antisense strand to SEQ ID NO: 1716939
aucacccuggagauggcuu

SEQ ID NO: 1716941 - RNA, 19 nt, Artificial Sequence
  Description of Artificial Sequence: Synthetic oligonucleotide
  Sense strand starting at position 1074 of SEQ ID NO: 1562034
acaggacucugcucugcua

SEQ ID NO: 1716942 - RNA, 19 nt, Artificial Sequence
  Description of Artificial Sequence: Synthetic oligonucleotide
  Antisense strand to SEQ ID NO: 1716941
uagcagagcagaguccugu

SEQ ID NO: 1716943 - RNA, 19 nt, Artificial Sequence
  Description of Artificial Sequence: Synthetic oligonucleotide
  Sense strand starting at position 1076 of SEQ ID NO: 1562034
aggacucugcucugcuauu

SEQ ID NO: 1716944 - RNA, 19 nt, Artificial Sequence
  Description of Artificial Sequence: Synthetic oligonucleotide
  Antisense strand to SEQ ID NO: 1716943
aauagcagagcagaguccu

SEQ ID NO: 1716945 - RNA, 19 nt, Artificial Sequence
  Description of Artificial Sequence: Synthetic oligonucleotide
  Sense strand starting at position 1077 of SEQ ID NO: 1562034
ggacucugcucugcuauuu

SEQ ID NO: 1716946 - RNA, 19 nt, Artificial Sequence
  Description of Artificial Sequence: Synthetic oligonucleotide
  Antisense strand to SEQ ID NO: 1716945
aaauagcagagcagagucc

SEQ ID NO: 1716947 - RNA, 19 nt, Artificial Sequence
  Description of Artificial Sequence: Synthetic oligonucleotide
  Sense strand starting at position 1203 of SEQ ID NO: 1562034
uucugaauucugggcagcu

SEQ ID NO: 1716948 - RNA, 19 nt, Artificial Sequence
  Description of Artificial Sequence: Synthetic oligonucleotide
  Antisense strand to SEQ ID NO: 1716947
agcugcccagaauucagaa

SEQ ID NO: 1716949 - RNA, 19 nt, Artificial Sequence
  Description of Artificial Sequence: Synthetic oligonucleotide
  Sense strand starting at position 1413 of SEQ ID NO: 1562034
ucuguucucgccguucuaa

SEQ ID NO: 1716950 - RNA, 19 nt, Artificial Sequence
  Description of Artificial Sequence: Synthetic oligonucleotide
  Antisense strand to SEQ ID NO: 1716949
uuagaacggcgagaacaga

SEQ ID NO: 1716951 - RNA, 19 nt, Artificial Sequence
  Description of Artificial Sequence: Synthetic oligonucleotide
  Sense strand starting at position 1428 of SEQ ID NO: 1562034
cuaaguuucuucucugaga

SEQ ID NO: 1716952 - RNA, 19 nt, Artificial Sequence
  Description of Artificial Sequence: Synthetic oligonucleotide
  Antisense strand to SEQ ID NO: 1716951
ucucagagaagaaacuuag

SEQ ID NO: 1716953 - RNA, 19 nt, Artificial Sequence
  Description of Artificial Sequence: Synthetic oligonucleotide
  Sense strand starting at position 1443 of SEQ ID NO: 1562034
gagaaucaacucuggcagu

SEQ ID NO: 1716954 - RNA, 19 nt, Artificial Sequence
  Description of Artificial Sequence: Synthetic oligonucleotide
  Antisense strand to SEQ ID NO: 1716953
acugccagaguugauucuc

SEQ ID NO: 1716955 - RNA, 19 nt, Artificial Sequence
  Description of Artificial Sequence: Synthetic oligonucleotide
  Sense strand starting at position 1479 of SEQ ID NO: 1562034
gaaggacgcaugcaaaguu

SEQ ID NO: 1716956 - RNA, 19 nt, Artificial Sequence
  Description of Artificial Sequence: Synthetic oligonucleotide
  Antisense strand to SEQ ID NO: 1716955
aacuuugcaugcguccuuc

SEQ ID NO: 1716957 - RNA, 19 nt, Artificial Sequence
  Description of Artificial Sequence: Synthetic oligonucleotide
  Sense strand starting at position 1489 of SEQ ID NO: 1562034
ugcaaaguuccugggcagu

SEQ ID NO: 1716958 - RNA, 19 nt, Artificial Sequence
  Description of Artificial Sequence: Synthetic oligonucleotide
  Antisense strand to SEQ ID NO: 1716957
acugcccaggaacuuugca

SEQ ID NO: 1716959 - RNA, 19 nt, Artificial Sequence
  Description of Artificial Sequence: Synthetic oligonucleotide
  Sense strand starting at position 1599 of SEQ ID NO: 1562034
gcaggcuucuacccggaaa

SEQ ID NO: 1716960 - RNA, 19 nt, Artificial Sequence
  Description of Artificial Sequence: Synthetic oligonucleotide
  Antisense strand to SEQ ID NO: 1716959
uuuccggguagaagccugc

SEQ ID NO: 1716961 - RNA, 19 nt, Artificial Sequence
  Description of Artificial Sequence: Synthetic oligonucleotide
  Sense strand starting at position 2024 of SEQ ID NO: 1562034
gcuguaagacgcguguuca

SEQ ID NO: 1716962 - RNA, 19 nt, Artificial Sequence
  Description of Artificial Sequence: Synthetic oligonucleotide
  Antisense strand to SEQ ID NO: 1716961
ugaacacgcgucuuacagc

SEQ ID NO: 1716963 - RNA, 19 nt, Artificial Sequence
  Description of Artificial Sequence: Synthetic oligonucleotide
  Sense strand starting at position 2027 of SEQ ID NO: 1562034
guaagacgcguguucauug

SEQ ID NO: 1716964 - RNA, 19 nt, Artificial Sequence
  Description of Artificial Sequence: Synthetic oligonucleotide
  Antisense strand to SEQ ID NO: 1716963
caaugaacacgcgucuuac

SEQ ID NO: 1716965 - RNA, 19 nt, Artificial Sequence
  Description of Artificial Sequence: Synthetic oligonucleotide
  Sense strand starting at position 2439 of SEQ ID NO: 1562034
cccuaauugcugcaaagaa

SEQ ID NO: 1716966 - RNA, 19 nt, Artificial Sequence
  Description of Artificial Sequence: Synthetic oligonucleotide
  Antisense strand to SEQ ID NO: 1716965
uucuuugcagcaauuaggg

SEQ ID NO: 1716967 - RNA, 19 nt, Artificial Sequence
  Description of Artificial Sequence: Synthetic oligonucleotide
  Sense strand starting at position 2517 of SEQ ID NO: 1562034
cgugggugucgucuuauau

SEQ ID NO: 1716968 - RNA, 19 nt, Artificial Sequence
  Description of Artificial Sequence: Synthetic oligonucleotide
  Antisense strand to SEQ ID NO: 1716967
auauaagacgacacccacg

SEQ ID NO: 1716969 - RNA, 19 nt, Artificial Sequence
  Description of Artificial Sequence: Synthetic oligonucleotide
  Sense strand starting at position 2518 of SEQ ID NO: 1562034
gugggugucgucuuauauc

SEQ ID NO: 1716970 - RNA, 19 nt, Artificial Sequence
  Description of Artificial Sequence: Synthetic oligonucleotide
  Antisense strand to SEQ ID NO: 1716969
gauauaagacgacacccac

SEQ ID NO: 1716971 - RNA, 19 nt, Artificial Sequence
  Description of Artificial Sequence: Synthetic oligonucleotide
  Sense strand starting at position 2558 of SEQ ID NO: 1562034
acccgagcuccaggguaau

SEQ ID NO: 1716972 - RNA, 19 nt, Artificial Sequence
  Description of Artificial Sequence: Synthetic oligonucleotide
  Antisense strand to SEQ ID NO: 1716971
auuacccuggagcucgggu

SEQ ID NO: 1716973 - RNA, 19 nt, Artificial Sequence
  Description of Artificial Sequence: Synthetic oligonucleotide
  Sense strand starting at position 2891 of SEQ ID NO: 1562034
gccgauuacgcagucgaga

SEQ ID NO: 1716974 - RNA, 19 nt, Artificial Sequence
  Description of Artificial Sequence: Synthetic oligonucleotide
  Antisense strand to SEQ ID NO: 1716973
ucucgacugcguaaucggc

SEQ ID NO: 1716975 - RNA, 19 nt, Artificial Sequence
  Description of Artificial Sequence: Synthetic oligonucleotide
  Sense strand starting at position 2893 of SEQ ID NO: 1562034
cgauuacgcagucgagaua

SEQ ID NO: 1716976 - RNA, 19 nt, Artificial Sequence
  Description of Artificial Sequence: Synthetic oligonucleotide
  Antisense strand to SEQ ID NO: 1716975
uaucucgacugcguaaucg

SEQ ID NO: 1716977 - RNA, 19 nt, Artificial Sequence
  Description of Artificial Sequence: Synthetic oligonucleotide
  Sense strand starting at position 2906 of SEQ ID NO: 1562034
gagauaggugguggcaaau

SEQ ID NO: 1716978 - RNA, 19 nt, Artificial Sequence
  Description of Artificial Sequence: Synthetic oligonucleotide
  Antisense strand to SEQ ID NO: 1716977
auuugccaccaccuaucuc

SEQ ID NO: 1716979 - RNA, 19 nt, Artificial Sequence
  Description of Artificial Sequence: Synthetic oligonucleotide
  Sense strand starting at position 2926 of SEQ ID NO: 1562034
cgacauuucgccggguugu

SEQ ID NO: 1716980 - RNA, 19 nt, Artificial Sequence
  Description of Artificial Sequence: Synthetic oligonucleotide
  Antisense strand to SEQ ID NO: 1716979
acaacccggcgaaaugucg

SEQ ID NO: 1716981 - RNA, 19 nt, Artificial Sequence
  Description of Artificial Sequence: Synthetic oligonucleotide
  Sense strand starting at position 3348 of SEQ ID NO: 1562034
uccguauugugggcucaca

SEQ ID NO: 1716982 - RNA, 19 nt, Artificial Sequence
  Description of Artificial Sequence: Synthetic oligonucleotide
  Antisense strand to SEQ ID NO: 1716981
ugugagcccacaauacgga

SEQ ID NO: 1716983 - RNA, 19 nt, Artificial Sequence
  Description of Artificial Sequence: Synthetic oligonucleotide
  Sense strand starting at position 3458 of SEQ ID NO: 1562034
cuccguauuguggaauaag

SEQ ID NO: 1716984 - RNA, 19 nt, Artificial Sequence
  Description of Artificial Sequence: Synthetic oligonucleotide
  Antisense strand to SEQ ID NO: 1716983
cuuauuccacaauacggag

SEQ ID NO: 1716985 - RNA, 19 nt, Artificial Sequence
  Description of Artificial Sequence: Synthetic oligonucleotide
  Sense strand starting at position 3461 of SEQ ID NO: 1562034
cguauuguggaauaaguua

SEQ ID NO: 1716986 - RNA, 19 nt, Artificial Sequence
  Description of Artificial Sequence: Synthetic oligonucleotide
  Antisense strand to SEQ ID NO: 1716985
uaacuuauuccacaauacg

SEQ ID NO: 1716987 - RNA, 19 nt, Artificial Sequence
  Description of Artificial Sequence: Synthetic oligonucleotide
  Sense strand starting at position 3549 of SEQ ID NO: 1562034
agggaagucucuccuugag

SEQ ID NO: 1716988 - RNA, 19 nt, Artificial Sequence
  Description of Artificial Sequence: Synthetic oligonucleotide
  Antisense strand to SEQ ID NO: 1716987
cucaaggagagacuucccu

SEQ ID NO: 1716989 - RNA, 19 nt, Artificial Sequence
  Description of Artificial Sequence: Synthetic oligonucleotide
  Sense strand starting at position 3551 of SEQ ID NO: 1562034
ggaagucucuccuugagug

SEQ ID NO: 1716990 - RNA, 19 nt, Artificial Sequence
  Description of Artificial Sequence: Synthetic oligonucleotide
  Antisense strand to SEQ ID NO: 1716989
cacucaaggagagacuucc

SEQ ID NO: 1716991 - RNA, 19 nt, Artificial Sequence
  Description of Artificial Sequence: Synthetic oligonucleotide
  Sense strand starting at position 3563 of SEQ ID NO: 1562034
uugagugggaguugugacu

SEQ ID NO: 1716992 - RNA, 19 nt, Artificial Sequence
  Description of Artificial Sequence: Synthetic oligonucleotide
  Antisense strand to SEQ ID NO: 1716991
agucacaacucccacucaa

SEQ ID NO: 1716993 - RNA, 19 nt, Artificial Sequence
  Description of Artificial Sequence: Synthetic oligonucleotide
  Sense strand starting at position 3832 of SEQ ID NO: 1562034
acaaguaaugacugcaaac

SEQ ID NO: 1716994 - RNA, 19 nt, Artificial Sequence
  Description of Artificial Sequence: Synthetic oligonucleotide
  Antisense strand to SEQ ID NO: 1716993
guuugcagucauuacuugu

SEQ ID NO: 1716995 - RNA, 19 nt, Artificial Sequence
  Description of Artificial Sequence: Synthetic oligonucleotide
  Sense strand starting at position 3878 of SEQ ID NO: 1562034
gcagcccuaugcucuagaa

SEQ ID NO: 1716996 - RNA, 19 nt, Artificial Sequence
  Description of Artificial Sequence: Synthetic oligonucleotide
  Antisense strand to SEQ ID NO: 1716995
uucuagagcauagggcugc

SEQ ID NO: 1716997 - RNA, 19 nt, Artificial Sequence
  Description of Artificial Sequence: Synthetic oligonucleotide
  Sense strand starting at position 287 of SEQ ID NO: 1562035
ggaucaugagguugggcaa

SEQ ID NO: 1716998 - RNA, 19 nt, Artificial Sequence
  Description of Artificial Sequence: Synthetic oligonucleotide
  Antisense strand to SEQ ID NO: 1716997
uugcccaaccucaugaucc

SEQ ID NO: 1716999 - RNA, 19 nt, Artificial Sequence
  Description of Artificial Sequence: Synthetic oligonucleotide
  Sense strand starting at position 288 of SEQ ID NO: 1562035
gaucaugagguugggcaau

SEQ ID NO: 1717000 - RNA, 19 nt, Artificial Sequence
  Description of Artificial Sequence: Synthetic oligonucleotide
  Antisense strand to SEQ ID NO: 1716999
auugcccaaccucaugauc

SEQ ID NO: 1717001 - RNA, 19 nt, Artificial Sequence
  Description of Artificial Sequence: Synthetic oligonucleotide
  Sense strand starting at position 581 of SEQ ID NO: 1562035
ccuccugucagaggaagua

SEQ ID NO: 1717002 - RNA, 19 nt, Artificial Sequence
  Description of Artificial Sequence: Synthetic oligonucleotide
  Antisense strand to SEQ ID NO: 1717001
uacuuccucugacaggagg

SEQ ID NO: 1717003 - RNA, 19 nt, Artificial Sequence
  Description of Artificial Sequence: Synthetic oligonucleotide
  Sense strand starting at position 606 of SEQ ID NO: 1562035
ugaccuuuaucacuguagu

SEQ ID NO: 1717004 - RNA, 19 nt, Artificial Sequence
  Description of Artificial Sequence: Synthetic oligonucleotide
  Antisense strand to SEQ ID NO: 1717003
acuacagugauaaagguca

SEQ ID NO: 1717005 - RNA, 19 nt, Artificial Sequence
  Description of Artificial Sequence: Synthetic oligonucleotide
  Sense strand starting at position 609 of SEQ ID NO: 1562035
ccuuuaucacuguaguuua

SEQ ID NO: 1717006 - RNA, 19 nt, Artificial Sequence
  Description of Artificial Sequence: Synthetic oligonucleotide
  Antisense strand to SEQ ID NO: 1717005
uaaacuacagugauaaagg

SEQ ID NO: 1717007 - RNA, 19 nt, Artificial Sequence
  Description of Artificial Sequence: Synthetic oligonucleotide
  Sense strand starting at position 763 of SEQ ID NO: 1562035
ccauguuaucaauagugua

SEQ ID NO: 1717008 - RNA, 19 nt, Artificial Sequence
  Description of Artificial Sequence: Synthetic oligonucleotide
  Antisense strand to SEQ ID NO: 1717007
uacacuauugauaacaugg

SEQ ID NO: 1717009 - RNA, 19 nt, Artificial Sequence
  Description of Artificial Sequence: Synthetic oligonucleotide
  Sense strand starting at position 768 of SEQ ID NO: 1562035
uuaucaauaguguauguca

SEQ ID NO: 1717010 - RNA, 19 nt, Artificial Sequence
  Description of Artificial Sequence: Synthetic oligonucleotide
  Antisense strand to SEQ ID NO: 1717009
ugacauacacuauugauaa

SEQ ID NO: 1717011 - RNA, 19 nt, Artificial Sequence
  Description of Artificial Sequence: Synthetic oligonucleotide
  Sense strand starting at position 770 of SEQ ID NO: 1562035
aucaauaguguaugucaau

SEQ ID NO: 1717012 - RNA, 19 nt, Artificial Sequence
  Description of Artificial Sequence: Synthetic oligonucleotide
  Antisense strand to SEQ ID NO: 1717011
auugacauacacuauugau

SEQ ID NO: 1717013 - RNA, 19 nt, Artificial Sequence
  Description of Artificial Sequence: Synthetic oligonucleotide
  Sense strand starting at position 771 of SEQ ID NO: 1562035
ucaauaguguaugucaauu

SEQ ID NO: 1717014 - RNA, 19 nt, Artificial Sequence
  Description of Artificial Sequence: Synthetic oligonucleotide
  Antisense strand to SEQ ID NO: 1717013
aauugacauacacuauuga

SEQ ID NO: 1717015 - RNA, 19 nt, Artificial Sequence
  Description of Artificial Sequence: Synthetic oligonucleotide
  Sense strand starting at position 1112 of SEQ ID NO: 1562035
accugauuggguuacaguu

SEQ ID NO: 1717016 - RNA, 19 nt, Artificial Sequence
  Description of Artificial Sequence: Synthetic oligonucleotide
  Antisense strand to SEQ ID NO: 1717015
aacuguaacccaaucaggu

SEQ ID NO: 1717017 - RNA, 19 nt, Artificial Sequence
  Description of Artificial Sequence: Synthetic oligonucleotide
  Sense strand starting at position 1160 of SEQ ID NO: 1562035
gaacauuuguaugugcacu

SEQ ID NO: 1717018 - RNA, 19 nt, Artificial Sequence
  Description of Artificial Sequence: Synthetic oligonucleotide
  Antisense strand to SEQ ID NO: 1717017
agugcacauacaaauguuc

SEQ ID NO: 1717019 - RNA, 19 nt, Artificial Sequence
  Description of Artificial Sequence: Synthetic oligonucleotide
  Sense strand starting at position 1225 of SEQ ID NO: 1562035
auugaaauuccuggguuau

SEQ ID NO: 1717020 - RNA, 19 nt, Artificial Sequence
  Description of Artificial Sequence: Synthetic oligonucleotide
  Antisense strand to SEQ ID NO: 1717019
auaacccaggaauuucaau

SEQ ID NO: 1717021 - RNA, 19 nt, Artificial Sequence
  Description of Artificial Sequence: Synthetic oligonucleotide
  Sense strand starting at position 1226 of SEQ ID NO: 1562035
uugaaauuccuggguuauu

SEQ ID NO: 1717022 - RNA, 19 nt, Artificial Sequence
  Description of Artificial Sequence: Synthetic oligonucleotide
  Antisense strand to SEQ ID NO: 1717021
aauaacccaggaauuucaa

SEQ ID NO: 1717023 - RNA, 19 nt, Artificial Sequence
  Description of Artificial Sequence: Synthetic oligonucleotide
  Sense strand starting at position 1227 of SEQ ID NO: 1562035
ugaaauuccuggguuauua

SEQ ID NO: 1717024 - RNA, 19 nt, Artificial Sequence
  Description of Artificial Sequence: Synthetic oligonucleotide
  Antisense strand to SEQ ID NO: 1717023
uaauaacccaggaauuuca

SEQ ID NO: 1717025 - RNA, 19 nt, Artificial Sequence
  Description of Artificial Sequence: Synthetic oligonucleotide
  Sense strand starting at position 1231 of SEQ ID NO: 1562035
auuccuggguuauuagaua

SEQ ID NO: 1717026 - RNA, 19 nt, Artificial Sequence
  Description of Artificial Sequence: Synthetic oligonucleotide
  Antisense strand to SEQ ID NO: 1717025
uaucuaauaacccaggaau

SEQ ID NO: 1717027 - RNA, 19 nt, Artificial Sequence
  Description of Artificial Sequence: Synthetic oligonucleotide
  Sense strand starting at position 1236 of SEQ ID NO: 1562035
uggguuauuagauacgugu

SEQ ID NO: 1717028 - RNA, 19 nt, Artificial Sequence
  Description of Artificial Sequence: Synthetic oligonucleotide
  Antisense strand to SEQ ID NO: 1717027
acacguaucuaauaaccca

SEQ ID NO: 1717029 - RNA, 19 nt, Artificial Sequence
  Description of Artificial Sequence: Synthetic oligonucleotide
  Sense strand starting at position 1242 of SEQ ID NO: 1562035
auuagauacguguauguuu

SEQ ID NO: 1717030 - RNA, 19 nt, Artificial Sequence
  Description of Artificial Sequence: Synthetic oligonucleotide
  Antisense strand to SEQ ID NO: 1717029
aaacauacacguaucuaau

SEQ ID NO: 1717031 - RNA, 19 nt, Artificial Sequence
  Description of Artificial Sequence: Synthetic oligonucleotide
  Sense strand starting at position 1289 of SEQ ID NO: 1562035
acuauagaguugguuuaca

SEQ ID NO: 1717032 - RNA, 19 nt, Artificial Sequence
  Description of Artificial Sequence: Synthetic oligonucleotide
  Antisense strand to SEQ ID NO: 1717031
uguaaaccaacucuauagu

SEQ ID NO: 1717033 - RNA, 19 nt, Artificial Sequence
  Description of Artificial Sequence: Synthetic oligonucleotide
  Sense strand starting at position 1325 of SEQ ID NO: 1562035
uggagaucaucugugaucu

SEQ ID NO: 1717034 - RNA, 19 nt, Artificial Sequence
  Description of Artificial Sequence: Synthetic oligonucleotide
  Antisense strand to SEQ ID NO: 1717033
agaucacagaugaucucca

SEQ ID NO: 1717035 - RNA, 19 nt, Artificial Sequence
  Description of Artificial Sequence: Synthetic oligonucleotide
  Sense strand starting at position 1326 of SEQ ID NO: 1562035
ggagaucaucugugaucua

SEQ ID NO: 1717036 - RNA, 19 nt, Artificial Sequence
  Description of Artificial Sequence: Synthetic oligonucleotide
  Antisense strand to SEQ ID NO: 1717035
uagaucacagaugaucucc

SEQ ID NO: 1717037 - RNA, 19 nt, Artificial Sequence
  Description of Artificial Sequence: Synthetic oligonucleotide
  Sense strand starting at position 1338 of SEQ ID NO: 1562035
ugaucuacucaagaagcuu

SEQ ID NO: 1717038 - RNA, 19 nt, Artificial Sequence
  Description of Artificial Sequence: Synthetic oligonucleotide
  Antisense strand to SEQ ID NO: 1717037
aagcuucuugaguagauca

SEQ ID NO: 1717039 - RNA, 19 nt, Artificial Sequence
  Description of Artificial Sequence: Synthetic oligonucleotide
  Sense strand starting at position 1870 of SEQ ID NO: 1562035
acacuacuuggcuggcaaa

SEQ ID NO: 1717040 - RNA, 19 nt, Artificial Sequence
  Description of Artificial Sequence: Synthetic oligonucleotide
  Antisense strand to SEQ ID NO: 1717039
uuugccagccaaguagugu

SEQ ID NO: 1717041 - RNA, 19 nt, Artificial Sequence
  Description of Artificial Sequence: Synthetic oligonucleotide
  Sense strand starting at position 1993 of SEQ ID NO: 1562035
uugugucaccugcaacaaa

SEQ ID NO: 1717042 - RNA, 19 nt, Artificial Sequence
  Description of Artificial Sequence: Synthetic oligonucleotide
  Antisense strand to SEQ ID NO: 1717041
uuuguugcaggugacacaa

SEQ ID NO: 1717043 - RNA, 19 nt, Artificial Sequence
  Description of Artificial Sequence: Synthetic oligonucleotide
  Sense strand starting at position 2052 of SEQ ID NO: 1562035
auuguucuagcuuaggaau

SEQ ID NO: 1717044 - RNA, 19 nt, Artificial Sequence
  Description of Artificial Sequence: Synthetic oligonucleotide
  Antisense strand to SEQ ID NO: 1717043
auuccuaagcuagaacaau

SEQ ID NO: 1717045 - RNA, 19 nt, Artificial Sequence
  Description of Artificial Sequence: Synthetic oligonucleotide
  Sense strand starting at position 2374 of SEQ ID NO: 1562035
gcugaaauccugcaucuac

SEQ ID NO: 1717046 - RNA, 19 nt, Artificial Sequence
  Description of Artificial Sequence: Synthetic oligonucleotide
  Antisense strand to SEQ ID NO: 1717045
guagaugcaggauuucagc

SEQ ID NO: 1717047 - RNA, 19 nt, Artificial Sequence
  Description of Artificial Sequence: Synthetic oligonucleotide
  Sense strand starting at position 2621 of SEQ ID NO: 1562035
ggcggaucaccugagaagu

SEQ ID NO: 1717048 - RNA, 19 nt, Artificial Sequence
  Description of Artificial Sequence: Synthetic oligonucleotide
  Antisense strand to SEQ ID NO: 1717047
acuucucaggugauccgcc

SEQ ID NO: 1717049 - RNA, 19 nt, Artificial Sequence
  Description of Artificial Sequence: Synthetic oligonucleotide
  Sense strand starting at position 2912 of SEQ ID NO: 1562035
aguggaguauauccuaaca

SEQ ID NO: 1717050 - RNA, 19 nt, Artificial Sequence
  Description of Artificial Sequence: Synthetic oligonucleotide
  Antisense strand to SEQ ID NO: 1717049
uguuaggauauacuccacu

SEQ ID NO: 1717051 - RNA, 19 nt, Artificial Sequence
  Description of Artificial Sequence: Synthetic oligonucleotide
  Sense strand starting at position 3002 of SEQ ID NO: 1562035
uucugaauagcucauaggu

SEQ ID NO: 1717052 - RNA, 19 nt, Artificial Sequence
  Description of Artificial Sequence: Synthetic oligonucleotide
  Antisense strand to SEQ ID NO: 1717051
accuaugagcuauucagaa

SEQ ID NO: 1717053 - RNA, 19 nt, Artificial Sequence
  Description of Artificial Sequence: Synthetic oligonucleotide
  Sense strand starting at position 3017 of SEQ ID NO: 1562035
aggucuuuccaguaagggu

SEQ ID NO: 1717054 - RNA, 19 nt, Artificial Sequence
  Description of Artificial Sequence: Synthetic oligonucleotide
  Antisense strand to SEQ ID NO: 1717053
acccuuacuggaaagaccu

SEQ ID NO: 1717055 - RNA, 19 nt, Artificial Sequence
  Description of Artificial Sequence: Synthetic oligonucleotide
  Sense strand starting at position 3076 of SEQ ID NO: 1562035
ccaccauaggguuguuuau

SEQ ID NO: 1717056 - RNA, 19 nt, Artificial Sequence
  Description of Artificial Sequence: Synthetic oligonucleotide
  Antisense strand to SEQ ID NO: 1717055
auaaacaacccuauggugg

SEQ ID NO: 1717057 - RNA, 19 nt, Artificial Sequence
  Description of Artificial Sequence: Synthetic oligonucleotide
  Sense strand starting at position 3078 of SEQ ID NO: 1562035
accauaggguuguuuauau

SEQ ID NO: 1717058 - RNA, 19 nt, Artificial Sequence
  Description of Artificial Sequence: Synthetic oligonucleotide
  Antisense strand to SEQ ID NO: 1717057
auauaaacaacccuauggu

SEQ ID NO: 1717059 - RNA, 19 nt, Artificial Sequence
  Description of Artificial Sequence: Synthetic oligonucleotide
  Sense strand starting at position 3119 of SEQ ID NO: 1562035
aacauauggcagugucuaa

SEQ ID NO: 1717060 - RNA, 19 nt, Artificial Sequence
  Description of Artificial Sequence: Synthetic oligonucleotide
  Antisense strand to SEQ ID NO: 1717059
uuagacacugccauauguu

SEQ ID NO: 1717061 - RNA, 19 nt, Artificial Sequence
  Description of Artificial Sequence: Synthetic oligonucleotide
  Sense strand starting at position 3123 of SEQ ID NO: 1562035
uauggcagugucuaaagau

SEQ ID NO: 1717062 - RNA, 19 nt, Artificial Sequence
  Description of Artificial Sequence: Synthetic oligonucleotide
  Antisense strand to SEQ ID NO: 1717061
aucuuuagacacugccaua

SEQ ID NO: 1717063 - RNA, 19 nt, Artificial Sequence
  Description of Artificial Sequence: Synthetic oligonucleotide
  Sense strand starting at position 3323 of SEQ ID NO: 1562035
agucaaugacugugcaaag

SEQ ID NO: 1717064 - RNA, 19 nt, Artificial Sequence
  Description of Artificial Sequence: Synthetic oligonucleotide
  Antisense strand to SEQ ID NO: 1717063
cuuugcacagucauugacu

SEQ ID NO: 1717065 - RNA, 19 nt, Artificial Sequence
  Description of Artificial Sequence: Synthetic oligonucleotide
  Sense strand starting at position 3376 of SEQ ID NO: 1562035
gugguauuccucuaucagg

SEQ ID NO: 1717066 - RNA, 19 nt, Artificial Sequence
  Description of Artificial Sequence: Synthetic oligonucleotide
  Antisense strand to SEQ ID NO: 1717065
ccugauagaggaauaccac

SEQ ID NO: 1717067 - RNA, 19 nt, Artificial Sequence
  Description of Artificial Sequence: Synthetic oligonucleotide
  Sense strand starting at position 3408 of SEQ ID NO: 1562035
cagagacuucgucaggugu

SEQ ID NO: 1717068 - RNA, 19 nt, Artificial Sequence
  Description of Artificial Sequence: Synthetic oligonucleotide
  Antisense strand to SEQ ID NO: 1717067
acaccugacgaagucucug

SEQ ID NO: 1717069 - RNA, 19 nt, Artificial Sequence
  Description of Artificial Sequence: Synthetic oligonucleotide
  Sense strand starting at position 3683 of SEQ ID NO: 1562035
uguacuauccaguauucca

SEQ ID NO: 1717070 - RNA, 19 nt, Artificial Sequence
  Description of Artificial Sequence: Synthetic oligonucleotide
  Antisense strand to SEQ ID NO: 1717069
uggaauacuggauaguaca

SEQ ID NO: 1717071 - RNA, 19 nt, Artificial Sequence
  Description of Artificial Sequence: Synthetic oligonucleotide
  Sense strand starting at position 3799 of SEQ ID NO: 1562035
auugguauacucuguauau

SEQ ID NO: 1717072 - RNA, 19 nt, Artificial Sequence
  Description of Artificial Sequence: Synthetic oligonucleotide
  Antisense strand to SEQ ID NO: 1717071
auauacagaguauaccaau

SEQ ID NO: 1717073 - RNA, 19 nt, Artificial Sequence
  Description of Artificial Sequence: Synthetic oligonucleotide
  Sense strand starting at position 3800 of SEQ ID NO: 1562035
uugguauacucuguauaua

SEQ ID NO: 1717074 - RNA, 19 nt, Artificial Sequence
  Description of Artificial Sequence: Synthetic oligonucleotide
  Antisense strand to SEQ ID NO: 1717073
uauauacagaguauaccaa

SEQ ID NO: 1717075 - RNA, 19 nt, Artificial Sequence
  Description of Artificial Sequence: Synthetic oligonucleotide
  Sense strand starting at position 3801 of SEQ ID NO: 1562035
ugguauacucuguauauac

SEQ ID NO: 1717076 - RNA, 19 nt, Artificial Sequence
  Description of Artificial Sequence: Synthetic oligonucleotide
  Antisense strand to SEQ ID NO: 1717075
guauauacagaguauacca

SEQ ID NO: 1717077 - RNA, 19 nt, Artificial Sequence
  Description of Artificial Sequence: Synthetic oligonucleotide
  Sense strand starting at position 98 of SEQ ID NO: 1562036
auucgagacccgugaugga

SEQ ID NO: 1717078 - RNA, 19 nt, Artificial Sequence
  Description of Artificial Sequence: Synthetic oligonucleotide
  Antisense strand to SEQ ID NO: 1717077
uccaucacgggucucgaau

SEQ ID NO: 1717079 - RNA, 19 nt, Artificial Sequence
  Description of Artificial Sequence: Synthetic oligonucleotide
  Sense strand starting at position 128 of SEQ ID NO: 1562036
ccuguuucugccgcgggaa

SEQ ID NO: 1717080 - RNA, 19 nt, Artificial Sequence
  Description of Artificial Sequence: Synthetic oligonucleotide
  Antisense strand to SEQ ID NO: 1717079
uucccgcggcagaaacagg

SEQ ID NO: 1717081 - RNA, 19 nt, Artificial Sequence
  Description of Artificial Sequence: Synthetic oligonucleotide
  Sense strand starting at position 140 of SEQ ID NO: 1562036
gcgggaacgugagugguau

SEQ ID NO: 1717082 - RNA, 19 nt, Artificial Sequence
  Description of Artificial Sequence: Synthetic oligonucleotide
  Antisense strand to SEQ ID NO: 1717081
auaccacucacguucccgc

SEQ ID NO: 1717083 - RNA, 19 nt, Artificial Sequence
  Description of Artificial Sequence: Synthetic oligonucleotide
  Sense strand starting at position 141 of SEQ ID NO: 1562036
cgggaacgugagugguauu

SEQ ID NO: 1717084 - RNA, 19 nt, Artificial Sequence
  Description of Artificial Sequence: Synthetic oligonucleotide
  Antisense strand to SEQ ID NO: 1717083
aauaccacucacguucccg

SEQ ID NO: 1717085 - RNA, 19 nt, Artificial Sequence
  Description of Artificial Sequence: Synthetic oligonucleotide
  Sense strand starting at position 142 of SEQ ID NO: 1562036
gggaacgugagugguauua

SEQ ID NO: 1717086 - RNA, 19 nt, Artificial Sequence
  Description of Artificial Sequence: Synthetic oligonucleotide
  Antisense strand to SEQ ID NO: 1717085
uaauaccacucacguuccc

SEQ ID NO: 1717087 - RNA, 19 nt, Artificial Sequence
  Description of Artificial Sequence: Synthetic oligonucleotide
  Sense strand starting at position 152 of SEQ ID NO: 1562036
gugguauuaaugugugguu

SEQ ID NO: 1717088 - RNA, 19 nt, Artificial Sequence
  Description of Artificial Sequence: Synthetic oligonucleotide
  Antisense strand to SEQ ID NO: 1717087
aaccacacauuaauaccac

SEQ ID NO: 1717089 - RNA, 19 nt, Artificial Sequence
  Description of Artificial Sequence: Synthetic oligonucleotide
  Sense strand starting at position 173 of SEQ ID NO: 1562036
ccggucaugccuuagagga

SEQ ID NO: 1717090 - RNA, 19 nt, Artificial Sequence
  Description of Artificial Sequence: Synthetic oligonucleotide
  Antisense strand to SEQ ID NO: 1717089
uccucuaaggcaugaccgg

SEQ ID NO: 1717091 - RNA, 19 nt, Artificial Sequence
  Description of Artificial Sequence: Synthetic oligonucleotide
  Sense strand starting at position 303 of SEQ ID NO: 1562036
acaagaauugugcaccauc

SEQ ID NO: 1717092 - RNA, 19 nt, Artificial Sequence
  Description of Artificial Sequence: Synthetic oligonucleotide
  Antisense strand to SEQ ID NO: 1717091
gauggugcacaauucuugu

SEQ ID NO: 1717093 - RNA, 19 nt, Artificial Sequence
  Description of Artificial Sequence: Synthetic oligonucleotide
  Sense strand starting at position 306 of SEQ ID NO: 1562036
agaauugugcaccaucuuu

SEQ ID NO: 1717094 - RNA, 19 nt, Artificial Sequence
  Description of Artificial Sequence: Synthetic oligonucleotide
  Antisense strand to SEQ ID NO: 1717093
aaagauggugcacaauucu

SEQ ID NO: 1717095 - RNA, 19 nt, Artificial Sequence
  Description of Artificial Sequence: Synthetic oligonucleotide
  Sense strand starting at position 311 of SEQ ID NO: 1562036
ugugcaccaucuuuagaau

SEQ ID NO: 1717096 - RNA, 19 nt, Artificial Sequence
  Description of Artificial Sequence: Synthetic oligonucleotide
  Antisense strand to SEQ ID NO: 1717095
auucuaaagauggugcaca

SEQ ID NO: 1717097 - RNA, 19 nt, Artificial Sequence
  Description of Artificial Sequence: Synthetic oligonucleotide
  Sense strand starting at position 312 of SEQ ID NO: 1562036
gugcaccaucuuuagaaug

SEQ ID NO: 1717098 - RNA, 19 nt, Artificial Sequence
  Description of Artificial Sequence: Synthetic oligonucleotide
  Antisense strand to SEQ ID NO: 1717097
cauucuaaagauggugcac

SEQ ID NO: 1717099 - RNA, 19 nt, Artificial Sequence
  Description of Artificial Sequence: Synthetic oligonucleotide
  Sense strand starting at position 392 of SEQ ID NO: 1562036
aaaggagugucuucgucac

SEQ ID NO: 1717100 - RNA, 19 nt, Artificial Sequence
  Description of Artificial Sequence: Synthetic oligonucleotide
  Antisense strand to SEQ ID NO: 1717099
gugacgaagacacuccuuu

SEQ ID NO: 1717101 - RNA, 19 nt, Artificial Sequence
  Description of Artificial Sequence: Synthetic oligonucleotide
  Sense strand starting at position 396 of SEQ ID NO: 1562036
gagugucuucgucacccaa

SEQ ID NO: 1717102 - RNA, 19 nt, Artificial Sequence
  Description of Artificial Sequence: Synthetic oligonucleotide
  Antisense strand to SEQ ID NO: 1717101
uugggugacgaagacacuc

SEQ ID NO: 1717103 - RNA, 19 nt, Artificial Sequence
  Description of Artificial Sequence: Synthetic oligonucleotide
  Sense strand starting at position 398 of SEQ ID NO: 1562036
gugucuucgucacccaacu

SEQ ID NO: 1717104 - RNA, 19 nt, Artificial Sequence
  Description of Artificial Sequence: Synthetic oligonucleotide
  Antisense strand to SEQ ID NO: 1717103
aguugggugacgaagacac

SEQ ID NO: 1717105 - RNA, 19 nt, Artificial Sequence
  Description of Artificial Sequence: Synthetic oligonucleotide
  Sense strand starting at position 454 of SEQ ID NO: 1562036
cgccuauuccgcuuccauu

SEQ ID NO: 1717106 - RNA, 19 nt, Artificial Sequence
  Description of Artificial Sequence: Synthetic oligonucleotide
  Antisense strand to SEQ ID NO: 1717105
aauggaagcggaauaggcg

SEQ ID NO: 1717107 - RNA, 19 nt, Artificial Sequence
  Description of Artificial Sequence: Synthetic oligonucleotide
  Sense strand starting at position 607 of SEQ ID NO: 1562036
uuccuucuuucggugaaau

SEQ ID NO: 1717108 - RNA, 19 nt, Artificial Sequence
  Description of Artificial Sequence: Synthetic oligonucleotide
  Antisense strand to SEQ ID NO: 1717107
auuucaccgaaagaaggaa

SEQ ID NO: 1717109 - RNA, 19 nt, Artificial Sequence
  Description of Artificial Sequence: Synthetic oligonucleotide
  Sense strand starting at position 608 of SEQ ID NO: 1562036
uccuucuuucggugaaaua

SEQ ID NO: 1717110 - RNA, 19 nt, Artificial Sequence
  Description of Artificial Sequence: Synthetic oligonucleotide
  Antisense strand to SEQ ID NO: 1717109
uauuucaccgaaagaagga

SEQ ID NO: 1717111 - RNA, 19 nt, Artificial Sequence
  Description of Artificial Sequence: Synthetic oligonucleotide
  Sense strand starting at position 609 of SEQ ID NO: 1562036
ccuucuuucggugaaauaa

SEQ ID NO: 1717112 - RNA, 19 nt, Artificial Sequence
  Description of Artificial Sequence: Synthetic oligonucleotide
  Antisense strand to SEQ ID NO: 1717111
uuauuucaccgaaagaagg

SEQ ID NO: 1717113 - RNA, 19 nt, Artificial Sequence
  Description of Artificial Sequence: Synthetic oligonucleotide
  Sense strand starting at position 637 of SEQ ID NO: 1562036
acagcuguugcuuagcgau

SEQ ID NO: 1717114 - RNA, 19 nt, Artificial Sequence
  Description of Artificial Sequence: Synthetic oligonucleotide
  Antisense strand to SEQ ID NO: 1717113
aucgcuaagcaacagcugu

SEQ ID NO: 1717115 - RNA, 19 nt, Artificial Sequence
  Description of Artificial Sequence: Synthetic oligonucleotide
  Sense strand starting at position 1103 of SEQ ID NO: 1562036
cccagcuaccucggagaaa

SEQ ID NO: 1717116 - RNA, 19 nt, Artificial Sequence
  Description of Artificial Sequence: Synthetic oligonucleotide
  Antisense strand to SEQ ID NO: 1717115
uuucuccgagguagcuggg

SEQ ID NO: 1717117 - RNA, 19 nt, Artificial Sequence
  Description of Artificial Sequence: Synthetic oligonucleotide
  Sense strand starting at position 1128 of SEQ ID NO: 1562036
cggguagggcggagguauu

SEQ ID NO: 1717118 - RNA, 19 nt, Artificial Sequence
  Description of Artificial Sequence: Synthetic oligonucleotide
  Antisense strand to SEQ ID NO: 1717117
aauaccuccgcccuacccg

SEQ ID NO: 1717119 - RNA, 19 nt, Artificial Sequence
  Description of Artificial Sequence: Synthetic oligonucleotide
  Sense strand starting at position 1141 of SEQ ID NO: 1562036
gguauugcucucggucauc

SEQ ID NO: 1717120 - RNA, 19 nt, Artificial Sequence
  Description of Artificial Sequence: Synthetic oligonucleotide
  Antisense strand to SEQ ID NO: 1717119
gaugaccgagagcaauacc

SEQ ID NO: 1717121 - RNA, 19 nt, Artificial Sequence
  Description of Artificial Sequence: Synthetic oligonucleotide
  Sense strand starting at position 1152 of SEQ ID NO: 1562036
cggucaucaacgcaaacau

SEQ ID NO: 1717122 - RNA, 19 nt, Artificial Sequence
  Description of Artificial Sequence: Synthetic oligonucleotide
  Antisense strand to SEQ ID NO: 1717121
auguuugcguugaugaccg

SEQ ID NO: 1717123 - RNA, 19 nt, Artificial Sequence
  Description of Artificial Sequence: Synthetic oligonucleotide
  Sense strand starting at position 1430 of SEQ ID NO: 1562036
aguggaaauauucgcaaca

SEQ ID NO: 1717124 - RNA, 19 nt, Artificial Sequence
  Description of Artificial Sequence: Synthetic oligonucleotide
  Antisense strand to SEQ ID NO: 1717123
uguugcgaauauuuccacu

SEQ ID NO: 1717125 - RNA, 19 nt, Artificial Sequence
  Description of Artificial Sequence: Synthetic oligonucleotide
  Sense strand starting at position 1431 of SEQ ID NO: 1562036
guggaaauauucgcaacaa

SEQ ID NO: 1717126 - RNA, 19 nt, Artificial Sequence
  Description of Artificial Sequence: Synthetic oligonucleotide
  Antisense strand to SEQ ID NO: 1717125
uuguugcgaauauuuccac

SEQ ID NO: 1717127 - RNA, 19 nt, Artificial Sequence
  Description of Artificial Sequence: Synthetic oligonucleotide
  Sense strand starting at position 1443 of SEQ ID NO: 1562036
gcaacaaccgcggaaaguu

SEQ ID NO: 1717128 - RNA, 19 nt, Artificial Sequence
  Description of Artificial Sequence: Synthetic oligonucleotide
  Antisense strand to SEQ ID NO: 1717127
aacuuuccgcgguuguugc

SEQ ID NO: 1717129 - RNA, 19 nt, Artificial Sequence
  Description of Artificial Sequence: Synthetic oligonucleotide
  Sense strand starting at position 2791 of SEQ ID NO: 1562036
gagacagaaccuuguagcu

SEQ ID NO: 1717130 - RNA, 19 nt, Artificial Sequence
  Description of Artificial Sequence: Synthetic oligonucleotide
  Antisense strand to SEQ ID NO: 1717129
agcuacaagguucugucuc

SEQ ID NO: 1717131 - RNA, 19 nt, Artificial Sequence
  Description of Artificial Sequence: Synthetic oligonucleotide
  Sense strand starting at position 3117 of SEQ ID NO: 1562036
gggagacuguaagugaauu

SEQ ID NO: 1717132 - RNA, 19 nt, Artificial Sequence
  Description of Artificial Sequence: Synthetic oligonucleotide
  Antisense strand to SEQ ID NO: 1717131
aauucacuuacagucuccc

SEQ ID NO: 1717133 - RNA, 19 nt, Artificial Sequence
  Description of Artificial Sequence: Synthetic oligonucleotide
  Sense strand starting at position 3123 of SEQ ID NO: 1562036
cuguaagugaauugugaaa

SEQ ID NO: 1717134 - RNA, 19 nt, Artificial Sequence
  Description of Artificial Sequence: Synthetic oligonucleotide
  Antisense strand to SEQ ID NO: 1717133
uuucacaauucacuuacag

SEQ ID NO: 1717135 - RNA, 19 nt, Artificial Sequence
  Description of Artificial Sequence: Synthetic oligonucleotide
  Sense strand starting at position 3415 of SEQ ID NO: 1562036
cccacacuugccuggucaa

SEQ ID NO: 1717136 - RNA, 19 nt, Artificial Sequence
  Description of Artificial Sequence: Synthetic oligonucleotide
  Antisense strand to SEQ ID NO: 1717135
uugaccaggcaaguguggg

SEQ ID NO: 1717137 - RNA, 19 nt, Artificial Sequence
  Description of Artificial Sequence: Synthetic oligonucleotide
  Sense strand starting at position 3416 of SEQ ID NO: 1562036
ccacacuugccuggucaaa

SEQ ID NO: 1717138 - RNA, 19 nt, Artificial Sequence
  Description of Artificial Sequence: Synthetic oligonucleotide
  Antisense strand to SEQ ID NO: 1717137
uuugaccaggcaagugugg

SEQ ID NO: 1717139 - RNA, 19 nt, Artificial Sequence
  Description of Artificial Sequence: Synthetic oligonucleotide
  Sense strand starting at position 3418 of SEQ ID NO: 1562036
acacuugccuggucaaaga

SEQ ID NO: 1717140 - RNA, 19 nt, Artificial Sequence
  Description of Artificial Sequence: Synthetic oligonucleotide
  Antisense strand to SEQ ID NO: 1717139
ucuuugaccaggcaagugu

SEQ ID NO: 1717141 - RNA, 19 nt, Artificial Sequence
  Description of Artificial Sequence: Synthetic oligonucleotide
  Sense strand starting at position 3540 of SEQ ID NO: 1562036
agcugcuuuggagauuaau

SEQ ID NO: 1717142 - RNA, 19 nt, Artificial Sequence
  Description of Artificial Sequence: Synthetic oligonucleotide
  Antisense strand to SEQ ID NO: 1717141
auuaaucuccaaagcagcu

SEQ ID NO: 1717143 - RNA, 19 nt, Artificial Sequence
  Description of Artificial Sequence: Synthetic oligonucleotide
  Sense strand starting at position 3580 of SEQ ID NO: 1562036
gcauuuaauugugugccuu

SEQ ID NO: 1717144 - RNA, 19 nt, Artificial Sequence
  Description of Artificial Sequence: Synthetic oligonucleotide
  Antisense strand to SEQ ID NO: 1717143
aaggcacacaauuaaaugc

SEQ ID NO: 1717145 - RNA, 19 nt, Artificial Sequence
  Description of Artificial Sequence: Synthetic oligonucleotide
  Sense strand starting at position 3617 of SEQ ID NO: 1562036
gggauaccacaaugcuaua

SEQ ID NO: 1717146 - RNA, 19 nt, Artificial Sequence
  Description of Artificial Sequence: Synthetic oligonucleotide
  Antisense strand to SEQ ID NO: 1717145
uauagcauugugguauccc

SEQ ID NO: 1717147 - RNA, 19 nt, Artificial Sequence
  Description of Artificial Sequence: Synthetic oligonucleotide
  Sense strand starting at position 3688 of SEQ ID NO: 1562036
ccagcuguuugcuccauca

SEQ ID NO: 1717148 - RNA, 19 nt, Artificial Sequence
  Description of Artificial Sequence: Synthetic oligonucleotide
  Antisense strand to SEQ ID NO: 1717147
ugauggagcaaacagcugg

SEQ ID NO: 1717149 - RNA, 19 nt, Artificial Sequence
  Description of Artificial Sequence: Synthetic oligonucleotide
  Sense strand starting at position 3690 of SEQ ID NO: 1562036
agcuguuugcuccaucacu

SEQ ID NO: 1717150 - RNA, 19 nt, Artificial Sequence
  Description of Artificial Sequence: Synthetic oligonucleotide
  Antisense strand to SEQ ID NO: 1717149
agugauggagcaaacagcu

SEQ ID NO: 1717151 - RNA, 19 nt, Artificial Sequence
  Description of Artificial Sequence: Synthetic oligonucleotide
  Sense strand starting at position 3844 of SEQ ID NO: 1562036
acuaaagagcuugguguca

SEQ ID NO: 1717152 - RNA, 19 nt, Artificial Sequence
  Description of Artificial Sequence: Synthetic oligonucleotide
  Antisense strand to SEQ ID NO: 1717151
ugacaccaagcucuuuagu

SEQ ID NO: 1717153 - RNA, 19 nt, Artificial Sequence
  Description of Artificial Sequence: Synthetic oligonucleotide
  Sense strand starting at position 3855 of SEQ ID NO: 1562036
uggugucacacuuguaacu

SEQ ID NO: 1717154 - RNA, 19 nt, Artificial Sequence
  Description of Artificial Sequence: Synthetic oligonucleotide
  Antisense strand to SEQ ID NO: 1717153
aguuacaagugugacacca

SEQ ID NO: 1717155 - RNA, 19 nt, Artificial Sequence
  Description of Artificial Sequence: Synthetic oligonucleotide
  Sense strand starting at position 3912 of SEQ ID NO: 1562036
cucucaagcuuucuggaaa

SEQ ID NO: 1717156 - RNA, 19 nt, Artificial Sequence
  Description of Artificial Sequence: Synthetic oligonucleotide
  Antisense strand to SEQ ID NO: 1717155
uuuccagaaagcuugagag

SEQ ID NO: 1717157 - RNA, 19 nt, Artificial Sequence
  Description of Artificial Sequence: Synthetic oligonucleotide
  Sense strand starting at position 230 of SEQ ID NO: 1562037
auguuaucucagggcacau

SEQ ID NO: 1717158 - RNA, 19 nt, Artificial Sequence
  Description of Artificial Sequence: Synthetic oligonucleotide
  Antisense strand to SEQ ID NO: 1717157
augugcccugagauaacau

SEQ ID NO: 1717159 - RNA, 19 nt, Artificial Sequence
  Description of Artificial Sequence: Synthetic oligonucleotide
  Sense strand starting at position 282 of SEQ ID NO: 1562037
ccaguucuaccugacucuu

SEQ ID NO: 1717160 - RNA, 19 nt, Artificial Sequence
  Description of Artificial Sequence: Synthetic oligonucleotide
  Antisense strand to SEQ ID NO: 1717159
aagagucagguagaacugg

SEQ ID NO: 1717161 - RNA, 19 nt, Artificial Sequence
  Description of Artificial Sequence: Synthetic oligonucleotide
  Sense strand starting at position 338 of SEQ ID NO: 1562037
aggcauccuuggguuugaa

SEQ ID NO: 1717162 - RNA, 19 nt, Artificial Sequence
  Description of Artificial Sequence: Synthetic oligonucleotide
  Antisense strand to SEQ ID NO: 1717161
uucaaacccaaggaugccu

SEQ ID NO: 1717163 - RNA, 19 nt, Artificial Sequence
  Description of Artificial Sequence: Synthetic oligonucleotide
  Sense strand starting at position 392 of SEQ ID NO: 1562037
gagcaaugggucuaccucu

SEQ ID NO: 1717164 - RNA, 19 nt, Artificial Sequence
  Description of Artificial Sequence: Synthetic oligonucleotide
  Antisense strand to SEQ ID NO: 1717163
agagguagacccauugcuc

SEQ ID NO: 1717165 - RNA, 19 nt, Artificial Sequence
  Description of Artificial Sequence: Synthetic oligonucleotide
  Sense strand starting at position 546 of SEQ ID NO: 1562037
aaguuauggccucaugaaa

SEQ ID NO: 1717166 - RNA, 19 nt, Artificial Sequence
  Description of Artificial Sequence: Synthetic oligonucleotide
  Antisense strand to SEQ ID NO: 1717165
uuucaugaggccauaacuu

SEQ ID NO: 1717167 - RNA, 19 nt, Artificial Sequence
  Description of Artificial Sequence: Synthetic oligonucleotide
  Sense strand starting at position 1208 of SEQ ID NO: 1562037
accucucuugcagguaaga

SEQ ID NO: 1717168 - RNA, 19 nt, Artificial Sequence
  Description of Artificial Sequence: Synthetic oligonucleotide
  Antisense strand to SEQ ID NO: 1717167
ucuuaccugcaagagaggu

SEQ ID NO: 1717169 - RNA, 19 nt, Artificial Sequence
  Description of Artificial Sequence: Synthetic oligonucleotide
  Sense strand starting at position 1210 of SEQ ID NO: 1562037
cucucuugcagguaagaug

SEQ ID NO: 1717170 - RNA, 19 nt, Artificial Sequence
  Description of Artificial Sequence: Synthetic oligonucleotide
  Antisense strand to SEQ ID NO: 1717169
caucuuaccugcaagagag

SEQ ID NO: 1717171 - RNA, 19 nt, Artificial Sequence
  Description of Artificial Sequence: Synthetic oligonucleotide
  Sense strand starting at position 1221 of SEQ ID NO: 1562037
guaagaugccaggauaguu

SEQ ID NO: 1717172 - RNA, 19 nt, Artificial Sequence
  Description of Artificial Sequence: Synthetic oligonucleotide
  Antisense strand to SEQ ID NO: 1717171
aacuauccuggcaucuuac

SEQ ID NO: 1717173 - RNA, 19 nt, Artificial Sequence
  Description of Artificial Sequence: Synthetic oligonucleotide
  Sense strand starting at position 1301 of SEQ ID NO: 1562037
gcuggaguccuacagguga

SEQ ID NO: 1717174 - RNA, 19 nt, Artificial Sequence
  Description of Artificial Sequence: Synthetic oligonucleotide
  Antisense strand to SEQ ID NO: 1717173
ucaccuguaggacuccagc

SEQ ID NO: 1717175 - RNA, 19 nt, Artificial Sequence
  Description of Artificial Sequence: Synthetic oligonucleotide
  Sense strand starting at position 1303 of SEQ ID NO: 1562037
uggaguccuacaggugaga

SEQ ID NO: 1717176 - RNA, 19 nt, Artificial Sequence
  Description of Artificial Sequence: Synthetic oligonucleotide
  Antisense strand to SEQ ID NO: 1717175
ucucaccuguaggacucca

SEQ ID NO: 1717177 - RNA, 19 nt, Artificial Sequence
  Description of Artificial Sequence: Synthetic oligonucleotide
  Sense strand starting at position 1626 of SEQ ID NO: 1562037
gauggugaccuccgagacu

SEQ ID NO: 1717178 - RNA, 19 nt, Artificial Sequence
  Description of Artificial Sequence: Synthetic oligonucleotide
  Antisense strand to SEQ ID NO: 1717177
agucucggaggucaccauc

SEQ ID NO: 1717179 - RNA, 19 nt, Artificial Sequence
  Description of Artificial Sequence: Synthetic oligonucleotide
  Sense strand starting at position 1657 of SEQ ID NO: 1562037
aggacugcuccagggcaaa

SEQ ID NO: 1717180 - RNA, 19 nt, Artificial Sequence
  Description of Artificial Sequence: Synthetic oligonucleotide
  Antisense strand to SEQ ID NO: 1717179
uuugcccuggagcaguccu

SEQ ID NO: 1717181 - RNA, 19 nt, Artificial Sequence
  Description of Artificial Sequence: Synthetic oligonucleotide
  Sense strand starting at position 1972 of SEQ ID NO: 1562037
ccgacucguggcgucuaua

SEQ ID NO: 1717182 - RNA, 19 nt, Artificial Sequence
  Description of Artificial Sequence: Synthetic oligonucleotide
  Antisense strand to SEQ ID NO: 1717181
uauagacgccacgagucgg

SEQ ID NO: 1717183 - RNA, 19 nt, Artificial Sequence
  Description of Artificial Sequence: Synthetic oligonucleotide
  Sense strand starting at position 1992 of SEQ ID NO: 1562037
gcuguuucugcgucacuca

SEQ ID NO: 1717184 - RNA, 19 nt, Artificial Sequence
  Description of Artificial Sequence: Synthetic oligonucleotide
  Antisense strand to SEQ ID NO: 1717183
ugagugacgcagaaacagc

SEQ ID NO: 1717185 - RNA, 19 nt, Artificial Sequence
  Description of Artificial Sequence: Synthetic oligonucleotide
  Sense strand starting at position 2003 of SEQ ID NO: 1562037
gucacucaugcauggaaga

SEQ ID NO: 1717186 - RNA, 19 nt, Artificial Sequence
  Description of Artificial Sequence: Synthetic oligonucleotide
  Antisense strand to SEQ ID NO: 1717185
ucuuccaugcaugagugac

SEQ ID NO: 1717187 - RNA, 19 nt, Artificial Sequence
  Description of Artificial Sequence: Synthetic oligonucleotide
  Sense strand starting at position 2019 of SEQ ID NO: 1562037
agaccaaucagagagcgua

SEQ ID NO: 1717188 - RNA, 19 nt, Artificial Sequence
  Description of Artificial Sequence: Synthetic oligonucleotide
  Antisense strand to SEQ ID NO: 1717187
uacgcucucugauuggucu

SEQ ID NO: 1717189 - RNA, 19 nt, Artificial Sequence
  Description of Artificial Sequence: Synthetic oligonucleotide
  Sense strand starting at position 2065 of SEQ ID NO: 1562037
cgaaauaguugucugacug

SEQ ID NO: 1717190 - RNA, 19 nt, Artificial Sequence
  Description of Artificial Sequence: Synthetic oligonucleotide
  Antisense strand to SEQ ID NO: 1717189
cagucagacaacuauuucg

SEQ ID NO: 1717191 - RNA, 19 nt, Artificial Sequence
  Description of Artificial Sequence: Synthetic oligonucleotide
  Sense strand starting at position 2069 of SEQ ID NO: 1562037
auaguugucugacuggaag

SEQ ID NO: 1717192 - RNA, 19 nt, Artificial Sequence
  Description of Artificial Sequence: Synthetic oligonucleotide
  Antisense strand to SEQ ID NO: 1717191
cuuccagucagacaacuau

SEQ ID NO: 1717193 - RNA, 19 nt, Artificial Sequence
  Description of Artificial Sequence: Synthetic oligonucleotide
  Sense strand starting at position 2071 of SEQ ID NO: 1562037
aguugucugacuggaagag

SEQ ID NO: 1717194 - RNA, 19 nt, Artificial Sequence
  Description of Artificial Sequence: Synthetic oligonucleotide
  Antisense strand to SEQ ID NO: 1717193
cucuuccagucagacaacu

SEQ ID NO: 1717195 - RNA, 19 nt, Artificial Sequence
  Description of Artificial Sequence: Synthetic oligonucleotide
  Sense strand starting at position 2300 of SEQ ID NO: 1562037
aucuuuaugcgagauaguu

SEQ ID NO: 1717196 - RNA, 19 nt, Artificial Sequence
  Description of Artificial Sequence: Synthetic oligonucleotide
  Antisense strand to SEQ ID NO: 1717195
aacuaucucgcauaaagau

SEQ ID NO: 1717197 - RNA, 19 nt, Artificial Sequence
  Description of Artificial Sequence: Synthetic oligonucleotide
  Sense strand starting at position 2302 of SEQ ID NO: 1562037
cuuuaugcgagauaguucu

SEQ ID NO: 1717198 - RNA, 19 nt, Artificial Sequence
  Description of Artificial Sequence: Synthetic oligonucleotide
  Antisense strand to SEQ ID NO: 1717197
agaacuaucucgcauaaag

SEQ ID NO: 1717199 - RNA, 19 nt, Artificial Sequence
  Description of Artificial Sequence: Synthetic oligonucleotide
  Sense strand starting at position 2312 of SEQ ID NO: 1562037
gauaguucugacugggaua

SEQ ID NO: 1717200 - RNA, 19 nt, Artificial Sequence
  Description of Artificial Sequence: Synthetic oligonucleotide
  Antisense strand to SEQ ID NO: 1717199
uaucccagucagaacuauc

SEQ ID NO: 1717201 - RNA, 19 nt, Artificial Sequence
  Description of Artificial Sequence: Synthetic oligonucleotide
  Sense strand starting at position 2313 of SEQ ID NO: 1562037
auaguucugacugggauau

SEQ ID NO: 1717202 - RNA, 19 nt, Artificial Sequence
  Description of Artificial Sequence: Synthetic oligonucleotide
  Antisense strand to SEQ ID NO: 1717201
auaucccagucagaacuau

SEQ ID NO: 1717203 - RNA, 19 nt, Artificial Sequence
  Description of Artificial Sequence: Synthetic oligonucleotide
  Sense strand starting at position 2995 of SEQ ID NO: 1562037
uguccacucugacucauua

SEQ ID NO: 1717204 - RNA, 19 nt, Artificial Sequence
  Description of Artificial Sequence: Synthetic oligonucleotide
  Antisense strand to SEQ ID NO: 1717203
uaaugagucagaguggaca

SEQ ID NO: 1717205 - RNA, 19 nt, Artificial Sequence
  Description of Artificial Sequence: Synthetic oligonucleotide
  Sense strand starting at position 3367 of SEQ ID NO: 1562037
acuuuagacuuguuuacua

SEQ ID NO: 1717206 - RNA, 19 nt, Artificial Sequence
  Description of Artificial Sequence: Synthetic oligonucleotide
  Antisense strand to SEQ ID NO: 1717205
uaguaaacaagucuaaagu

SEQ ID NO: 1717207 - RNA, 19 nt, Artificial Sequence
  Description of Artificial Sequence: Synthetic oligonucleotide
  Sense strand starting at position 3369 of SEQ ID NO: 1562037
uuuagacuuguuuacuaug

SEQ ID NO: 1717208 - RNA, 19 nt, Artificial Sequence
  Description of Artificial Sequence: Synthetic oligonucleotide
  Antisense strand to SEQ ID NO: 1717207
cauaguaaacaagucuaaa

SEQ ID NO: 1717209 - RNA, 19 nt, Artificial Sequence
  Description of Artificial Sequence: Synthetic oligonucleotide
  Sense strand starting at position 3415 of SEQ ID NO: 1562037
cuguaaauucuaugaagga

SEQ ID NO: 1717210 - RNA, 19 nt, Artificial Sequence
  Description of Artificial Sequence: Synthetic oligonucleotide
  Antisense strand to SEQ ID NO: 1717209
uccuucauagaauuuacag

SEQ ID NO: 1717211 - RNA, 19 nt, Artificial Sequence
  Description of Artificial Sequence: Synthetic oligonucleotide
  Sense strand starting at position 3534 of SEQ ID NO: 1562037
caucucugagagcauugau

SEQ ID NO: 1717212 - RNA, 19 nt, Artificial Sequence
  Description of Artificial Sequence: Synthetic oligonucleotide
  Antisense strand to SEQ ID NO: 1717211
aucaaugcucucagagaug

SEQ ID NO: 1717213 - RNA, 19 nt, Artificial Sequence
  Description of Artificial Sequence: Synthetic oligonucleotide
  Sense strand starting at position 3542 of SEQ ID NO: 1562037
agagcauugaugggugaca

SEQ ID NO: 1717214 - RNA, 19 nt, Artificial Sequence
  Description of Artificial Sequence: Synthetic oligonucleotide
  Antisense strand to SEQ ID NO: 1717213
ugucacccaucaaugcucu

SEQ ID NO: 1717215 - RNA, 19 nt, Artificial Sequence
  Description of Artificial Sequence: Synthetic oligonucleotide
  Sense strand starting at position 3543 of SEQ ID NO: 1562037
gagcauugaugggugacau

SEQ ID NO: 1717216 - RNA, 19 nt, Artificial Sequence
  Description of Artificial Sequence: Synthetic oligonucleotide
  Antisense strand to SEQ ID NO: 1717215
augucacccaucaaugcuc

SEQ ID NO: 1717217 - RNA, 19 nt, Artificial Sequence
  Description of Artificial Sequence: Synthetic oligonucleotide
  Sense strand starting at position 3544 of SEQ ID NO: 1562037
agcauugaugggugacauu

SEQ ID NO: 1717218 - RNA, 19 nt, Artificial Sequence
  Description of Artificial Sequence: Synthetic oligonucleotide
  Antisense strand to SEQ ID NO: 1717217
aaugucacccaucaaugcu

SEQ ID NO: 1717219 - RNA, 19 nt, Artificial Sequence
  Description of Artificial Sequence: Synthetic oligonucleotide
  Sense strand starting at position 3582 of SEQ ID NO: 1562037
uggaguugucacugaauaa

SEQ ID NO: 1717220 - RNA, 19 nt, Artificial Sequence
  Description of Artificial Sequence: Synthetic oligonucleotide
  Antisense strand to SEQ ID NO: 1717219
uuauucagugacaacucca

SEQ ID NO: 1717221 - RNA, 19 nt, Artificial Sequence
  Description of Artificial Sequence: Synthetic oligonucleotide
  Sense strand starting at position 3647 of SEQ ID NO: 1562037
guacuugggccauauggua

SEQ ID NO: 1717222 - RNA, 19 nt, Artificial Sequence
  Description of Artificial Sequence: Synthetic oligonucleotide
  Antisense strand to SEQ ID NO: 1717221
uaccauauggcccaaguac

SEQ ID NO: 1717223 - RNA, 19 nt, Artificial Sequence
  Description of Artificial Sequence: Synthetic oligonucleotide
  Sense strand starting at position 3662 of SEQ ID NO: 1562037
gguauuuaccagugauguu

SEQ ID NO: 1717224 - RNA, 19 nt, Artificial Sequence
  Description of Artificial Sequence: Synthetic oligonucleotide
  Antisense strand to SEQ ID NO: 1717223
aacaucacugguaaauacc

SEQ ID NO: 1717225 - RNA, 19 nt, Artificial Sequence
  Description of Artificial Sequence: Synthetic oligonucleotide
  Sense strand starting at position 3671 of SEQ ID NO: 1562037
cagugauguuauuugcuca

SEQ ID NO: 1717226 - RNA, 19 nt, Artificial Sequence
  Description of Artificial Sequence: Synthetic oligonucleotide
  Antisense strand to SEQ ID NO: 1717225
ugagcaaauaacaucacug

SEQ ID NO: 1717227 - RNA, 19 nt, Artificial Sequence
  Description of Artificial Sequence: Synthetic oligonucleotide
  Sense strand starting at position 3675 of SEQ ID NO: 1562037
gauguuauuugcucagugu

SEQ ID NO: 1717228 - RNA, 19 nt, Artificial Sequence
  Description of Artificial Sequence: Synthetic oligonucleotide
  Antisense strand to SEQ ID NO: 1717227
acacugagcaaauaacauc

SEQ ID NO: 1717229 - RNA, 19 nt, Artificial Sequence
  Description of Artificial Sequence: Synthetic oligonucleotide
  Sense strand starting at position 3678 of SEQ ID NO: 1562037
guuauuugcucagugucag

SEQ ID NO: 1717230 - RNA, 19 nt, Artificial Sequence
  Description of Artificial Sequence: Synthetic oligonucleotide
  Antisense strand to SEQ ID NO: 1717229
cugacacugagcaaauaac

SEQ ID NO: 1717231 - RNA, 19 nt, Artificial Sequence
  Description of Artificial Sequence: Synthetic oligonucleotide
  Sense strand starting at position 3697 of SEQ ID NO: 1562037
gggacaauuucagagguca

SEQ ID NO: 1717232 - RNA, 19 nt, Artificial Sequence
  Description of Artificial Sequence: Synthetic oligonucleotide
  Antisense strand to SEQ ID NO: 1717231
ugaccucugaaauuguccc

SEQ ID NO: 1717233 - RNA, 19 nt, Artificial Sequence
  Description of Artificial Sequence: Synthetic oligonucleotide
  Sense strand starting at position 3819 of SEQ ID NO: 1562037
ugaagauaaugacuauguu

SEQ ID NO: 1717234 - RNA, 19 nt, Artificial Sequence
  Description of Artificial Sequence: Synthetic oligonucleotide
  Antisense strand to SEQ ID NO: 1717233
aacauagucauuaucuuca

SEQ ID NO: 1717235 - RNA, 19 nt, Artificial Sequence
  Description of Artificial Sequence: Synthetic oligonucleotide
  Sense strand starting at position 3823 of SEQ ID NO: 1562037
gauaaugacuauguuagau

SEQ ID NO: 1717236 - RNA, 19 nt, Artificial Sequence
  Description of Artificial Sequence: Synthetic oligonucleotide
  Antisense strand to SEQ ID NO: 1717235
aucuaacauagucauuauc

SEQ ID NO: 1717237 - RNA, 19 nt, Artificial Sequence
  Description of Artificial Sequence: Synthetic oligonucleotide
  Sense strand starting at position 222 of SEQ ID NO: 1562038
ggugcugugcaucagaacu

SEQ ID NO: 1717238 - RNA, 19 nt, Artificial Sequence
  Description of Artificial Sequence: Synthetic oligonucleotide
  Antisense strand to SEQ ID NO: 1717237
aguucugaugcacagcacc

SEQ ID NO: 1717239 - RNA, 19 nt, Artificial Sequence
  Description of Artificial Sequence: Synthetic oligonucleotide
  Sense strand starting at position 378 of SEQ ID NO: 1562038
cccaguugguauucuaaca

SEQ ID NO: 1717240 - RNA, 19 nt, Artificial Sequence
  Description of Artificial Sequence: Synthetic oligonucleotide
  Antisense strand to SEQ ID NO: 1717239
uguuagaauaccaacuggg

SEQ ID NO: 1717241 - RNA, 19 nt, Artificial Sequence
  Description of Artificial Sequence: Synthetic oligonucleotide
  Sense strand starting at position 552 of SEQ ID NO: 1562038
cuagauguacacugcaagu

SEQ ID NO: 1717242 - RNA, 19 nt, Artificial Sequence
  Description of Artificial Sequence: Synthetic oligonucleotide
  Antisense strand to SEQ ID NO: 1717241
acuugcaguguacaucuag

SEQ ID NO: 1717243 - RNA, 19 nt, Artificial Sequence
  Description of Artificial Sequence: Synthetic oligonucleotide
  Sense strand starting at position 554 of SEQ ID NO: 1562038
agauguacacugcaaguaa

SEQ ID NO: 1717244 - RNA, 19 nt, Artificial Sequence
  Description of Artificial Sequence: Synthetic oligonucleotide
  Antisense strand to SEQ ID NO: 1717243
uuacuugcaguguacaucu

SEQ ID NO: 1717245 - RNA, 19 nt, Artificial Sequence
  Description of Artificial Sequence: Synthetic oligonucleotide
  Sense strand starting at position 588 of SEQ ID NO: 1562038
gcuucaggucuggaagugu

SEQ ID NO: 1717246 - RNA, 19 nt, Artificial Sequence
  Description of Artificial Sequence: Synthetic oligonucleotide
  Antisense strand to SEQ ID NO: 1717245
acacuuccagaccugaagc

SEQ ID NO: 1717247 - RNA, 19 nt, Artificial Sequence
  Description of Artificial Sequence: Synthetic oligonucleotide
  Sense strand starting at position 652 of SEQ ID NO: 1562038
acaauucuccauggucaag

SEQ ID NO: 1717248 - RNA, 19 nt, Artificial Sequence
  Description of Artificial Sequence: Synthetic oligonucleotide
  Antisense strand to SEQ ID NO: 1717247
cuugaccauggagaauugu

SEQ ID NO: 1717249 - RNA, 19 nt, Artificial Sequence
  Description of Artificial Sequence: Synthetic oligonucleotide
  Sense strand starting at position 658 of SEQ ID NO: 1562038
cuccauggucaagaguuua

SEQ ID NO: 1717250 - RNA, 19 nt, Artificial Sequence
  Description of Artificial Sequence: Synthetic oligonucleotide
  Antisense strand to SEQ ID NO: 1717249
uaaacucuugaccauggag

SEQ ID NO: 1717251 - RNA, 19 nt, Artificial Sequence
  Description of Artificial Sequence: Synthetic oligonucleotide
  Sense strand starting at position 772 of SEQ ID NO: 1562038
ugcaaagcuguuuaucagu

SEQ ID NO: 1717252 - RNA, 19 nt, Artificial Sequence
  Description of Artificial Sequence: Synthetic oligonucleotide
  Antisense strand to SEQ ID NO: 1717251
acugauaaacagcuuugca

SEQ ID NO: 1717253 - RNA, 19 nt, Artificial Sequence
  Description of Artificial Sequence: Synthetic oligonucleotide
  Sense strand starting at position 774 of SEQ ID NO: 1562038
caaagcuguuuaucaguga

SEQ ID NO: 1717254 - RNA, 19 nt, Artificial Sequence
  Description of Artificial Sequence: Synthetic oligonucleotide
  Antisense strand to SEQ ID NO: 1717253
ucacugauaaacagcuuug

SEQ ID NO: 1717255 - RNA, 19 nt, Artificial Sequence
  Description of Artificial Sequence: Synthetic oligonucleotide
  Sense strand starting at position 796 of SEQ ID NO: 1562038
aguuacaaauguuuacgaa

SEQ ID NO: 1717256 - RNA, 19 nt, Artificial Sequence
  Description of Artificial Sequence: Synthetic oligonucleotide
  Antisense strand to SEQ ID NO: 1717255
uucguaaacauuuguaacu

SEQ ID NO: 1717257 - RNA, 19 nt, Artificial Sequence
  Description of Artificial Sequence: Synthetic oligonucleotide
  Sense strand starting at position 797 of SEQ ID NO: 1562038
guuacaaauguuuacgaau

SEQ ID NO: 1717258 - RNA, 19 nt, Artificial Sequence
  Description of Artificial Sequence: Synthetic oligonucleotide
  Antisense strand to SEQ ID NO: 1717257
auucguaaacauuuguaac

SEQ ID NO: 1717259 - RNA, 19 nt, Artificial Sequence
  Description of Artificial Sequence: Synthetic oligonucleotide
  Sense strand starting at position 836 of SEQ ID NO: 1562038
cuguaugugcauuauacuu

SEQ ID NO: 1717260 - RNA, 19 nt, Artificial Sequence
  Description of Artificial Sequence: Synthetic oligonucleotide
  Antisense strand to SEQ ID NO: 1717259
aaguauaaugcacauacag

SEQ ID NO: 1717261 - RNA, 19 nt, Artificial Sequence
  Description of Artificial Sequence: Synthetic oligonucleotide
  Sense strand starting at position 939 of SEQ ID NO: 1562038
gacaaucagugacuuuguu

SEQ ID NO: 1717262 - RNA, 19 nt, Artificial Sequence
  Description of Artificial Sequence: Synthetic oligonucleotide
  Antisense strand to SEQ ID NO: 1717261
aacaaagucacugauuguc

SEQ ID NO: 1717263 - RNA, 19 nt, Artificial Sequence
  Description of Artificial Sequence: Synthetic oligonucleotide
  Sense strand starting at position 1000 of SEQ ID NO: 1562038
uuaguaagaugaucucugu

SEQ ID NO: 1717264 - RNA, 19 nt, Artificial Sequence
  Description of Artificial Sequence: Synthetic oligonucleotide
  Antisense strand to SEQ ID NO: 1717263
acagagaucaucuuacuaa

SEQ ID NO: 1717265 - RNA, 19 nt, Artificial Sequence
  Description of Artificial Sequence: Synthetic oligonucleotide
  Sense strand starting at position 1003 of SEQ ID NO: 1562038
guaagaugaucucugucaa

SEQ ID NO: 1717266 - RNA, 19 nt, Artificial Sequence
  Description of Artificial Sequence: Synthetic oligonucleotide
  Antisense strand to SEQ ID NO: 1717265
uugacagagaucaucuuac

SEQ ID NO: 1717267 - RNA, 19 nt, Artificial Sequence
  Description of Artificial Sequence: Synthetic oligonucleotide
  Sense strand starting at position 2104 of SEQ ID NO: 1562038
agcugagaucucuggugua

SEQ ID NO: 1717268 - RNA, 19 nt, Artificial Sequence
  Description of Artificial Sequence: Synthetic oligonucleotide
  Antisense strand to SEQ ID NO: 1717267
uacaccagagaucucagcu

SEQ ID NO: 1717269 - RNA, 19 nt, Artificial Sequence
  Description of Artificial Sequence: Synthetic oligonucleotide
  Sense strand starting at position 2646 of SEQ ID NO: 1562038
gagaaacccuguucccgaa

SEQ ID NO: 1717270 - RNA, 19 nt, Artificial Sequence
  Description of Artificial Sequence: Synthetic oligonucleotide
  Antisense strand to SEQ ID NO: 1717269
uucgggaacaggguuucuc

SEQ ID NO: 1717271 - RNA, 19 nt, Artificial Sequence
  Description of Artificial Sequence: Synthetic oligonucleotide
  Sense strand starting at position 2676 of SEQ ID NO: 1562038
gacgcuguccgcuuugaga

SEQ ID NO: 1717272 - RNA, 19 nt, Artificial Sequence
  Description of Artificial Sequence: Synthetic oligonucleotide
  Antisense strand to SEQ ID NO: 1717271
ucucaaagcggacagcguc

SEQ ID NO: 1717273 - RNA, 19 nt, Artificial Sequence
  Description of Artificial Sequence: Synthetic oligonucleotide
  Sense strand starting at position 2684 of SEQ ID NO: 1562038
ccgcuuugagauuacagca

SEQ ID NO: 1717274 - RNA, 19 nt, Artificial Sequence
  Description of Artificial Sequence: Synthetic oligonucleotide
  Antisense strand to SEQ ID NO: 1717273
ugcuguaaucucaaagcgg

SEQ ID NO: 1717275 - RNA, 19 nt, Artificial Sequence
  Description of Artificial Sequence: Synthetic oligonucleotide
  Sense strand starting at position 2751 of SEQ ID NO: 1562038
agacuuagccucugucauc

SEQ ID NO: 1717276 - RNA, 19 nt, Artificial Sequence
  Description of Artificial Sequence: Synthetic oligonucleotide
  Antisense strand to SEQ ID NO: 1717275
gaugacagaggcuaagucu

SEQ ID NO: 1717277 - RNA, 19 nt, Artificial Sequence
  Description of Artificial Sequence: Synthetic oligonucleotide
  Sense strand starting at position 2874 of SEQ ID NO: 1562038
ucauguaaaggucaccuaa

SEQ ID NO: 1717278 - RNA, 19 nt, Artificial Sequence
  Description of Artificial Sequence: Synthetic oligonucleotide
  Antisense strand to SEQ ID NO: 1717277
uuaggugaccuuuacauga

SEQ ID NO: 1717279 - RNA, 19 nt, Artificial Sequence
  Description of Artificial Sequence: Synthetic oligonucleotide
  Sense strand starting at position 2876 of SEQ ID NO: 1562038
auguaaaggucaccuaaac

SEQ ID NO: 1717280 - RNA, 19 nt, Artificial Sequence
  Description of Artificial Sequence: Synthetic oligonucleotide
  Antisense strand to SEQ ID NO: 1717279
guuuaggugaccuuuacau

SEQ ID NO: 1717281 - RNA, 19 nt, Artificial Sequence
  Description of Artificial Sequence: Synthetic oligonucleotide
  Sense strand starting at position 3027 of SEQ ID NO: 1562038
cugcaaagguuacugaauu

SEQ ID NO: 1717282 - RNA, 19 nt, Artificial Sequence
  Description of Artificial Sequence: Synthetic oligonucleotide
  Antisense strand to SEQ ID NO: 1717281
aauucaguaaccuuugcag

SEQ ID NO: 1717283 - RNA, 19 nt, Artificial Sequence
  Description of Artificial Sequence: Synthetic oligonucleotide
  Sense strand starting at position 3164 of SEQ ID NO: 1562038
gaggucggagguuaaucaa

SEQ ID NO: 1717284 - RNA, 19 nt, Artificial Sequence
  Description of Artificial Sequence: Synthetic oligonucleotide
  Antisense strand to SEQ ID NO: 1717283
uugauuaaccuccgaccuc

SEQ ID NO: 1717285 - RNA, 19 nt, Artificial Sequence
  Description of Artificial Sequence: Synthetic oligonucleotide
  Sense strand starting at position 3167 of SEQ ID NO: 1562038
gucggagguuaaucaaucu

SEQ ID NO: 1717286 - RNA, 19 nt, Artificial Sequence
  Description of Artificial Sequence: Synthetic oligonucleotide
  Antisense strand to SEQ ID NO: 1717285
agauugauuaaccuccgac

SEQ ID NO: 1717287 - RNA, 19 nt, Artificial Sequence
  Description of Artificial Sequence: Synthetic oligonucleotide
  Sense strand starting at position 3173 of SEQ ID NO: 1562038
gguuaaucaaucuggaaug

SEQ ID NO: 1717288 - RNA, 19 nt, Artificial Sequence
  Description of Artificial Sequence: Synthetic oligonucleotide
  Antisense strand to SEQ ID NO: 1717287
cauuccagauugauuaacc

SEQ ID NO: 1717289 - RNA, 19 nt, Artificial Sequence
  Description of Artificial Sequence: Synthetic oligonucleotide
  Sense strand starting at position 3233 of SEQ ID NO: 1562038
cacuauguccuagggauuc

SEQ ID NO: 1717290 - RNA, 19 nt, Artificial Sequence
  Description of Artificial Sequence: Synthetic oligonucleotide
  Antisense strand to SEQ ID NO: 1717289
gaaucccuaggacauagug

SEQ ID NO: 1717291 - RNA, 19 nt, Artificial Sequence
  Description of Artificial Sequence: Synthetic oligonucleotide
  Sense strand starting at position 3329 of SEQ ID NO: 1562038
augcaaucucucugagggu

SEQ ID NO: 1717292 - RNA, 19 nt, Artificial Sequence
  Description of Artificial Sequence: Synthetic oligonucleotide
  Antisense strand to SEQ ID NO: 1717291
acccucagagagauugcau

SEQ ID NO: 1717293 - RNA, 19 nt, Artificial Sequence
  Description of Artificial Sequence: Synthetic oligonucleotide
  Sense strand starting at position 3372 of SEQ ID NO: 1562038
aaaugauagugcccuauga

SEQ ID NO: 1717294 - RNA, 19 nt, Artificial Sequence
  Description of Artificial Sequence: Synthetic oligonucleotide
  Antisense strand to SEQ ID NO: 1717293
ucauagggcacuaucauuu

SEQ ID NO: 1717295 - RNA, 19 nt, Artificial Sequence
  Description of Artificial Sequence: Synthetic oligonucleotide
  Sense strand starting at position 3468 of SEQ ID NO: 1562038
ugcuguggugugguaaagu

SEQ ID NO: 1717296 - RNA, 19 nt, Artificial Sequence
  Description of Artificial Sequence: Synthetic oligonucleotide
  Antisense strand to SEQ ID NO: 1717295
acuuuaccacaccacagca

SEQ ID NO: 1717297 - RNA, 19 nt, Artificial Sequence
  Description of Artificial Sequence: Synthetic oligonucleotide
  Sense strand starting at position 3527 of SEQ ID NO: 1562038
ggcgcugacacuuauugau

SEQ ID NO: 1717298 - RNA, 19 nt, Artificial Sequence
  Description of Artificial Sequence: Synthetic oligonucleotide
  Antisense strand to SEQ ID NO: 1717297
aucaauaagugucagcgcc

SEQ ID NO: 1717299 - RNA, 19 nt, Artificial Sequence
  Description of Artificial Sequence: Synthetic oligonucleotide
  Sense strand starting at position 3529 of SEQ ID NO: 1562038
cgcugacacuuauugauca

SEQ ID NO: 1717300 - RNA, 19 nt, Artificial Sequence
  Description of Artificial Sequence: Synthetic oligonucleotide
  Antisense strand to SEQ ID NO: 1717299
ugaucaauaagugucagcg

SEQ ID NO: 1717301 - RNA, 19 nt, Artificial Sequence
  Description of Artificial Sequence: Synthetic oligonucleotide
  Sense strand starting at position 3573 of SEQ ID NO: 1562038
uccugaucccugcaaauag

SEQ ID NO: 1717302 - RNA, 19 nt, Artificial Sequence
  Description of Artificial Sequence: Synthetic oligonucleotide
  Antisense strand to SEQ ID NO: 1717301
cuauuugcagggaucagga

SEQ ID NO: 1717303 - RNA, 19 nt, Artificial Sequence
  Description of Artificial Sequence: Synthetic oligonucleotide
  Sense strand starting at position 3604 of SEQ ID NO: 1562038
cccgcuugacaauggagaa

SEQ ID NO: 1717304 - RNA, 19 nt, Artificial Sequence
  Description of Artificial Sequence: Synthetic oligonucleotide
  Antisense strand to SEQ ID NO: 1717303
uucuccauugucaagcggg

SEQ ID NO: 1717305 - RNA, 19 nt, Artificial Sequence
  Description of Artificial Sequence: Synthetic oligonucleotide
  Sense strand starting at position 3731 of SEQ ID NO: 1562038
uguaucugugcucaaaguu

SEQ ID NO: 1717306 - RNA, 19 nt, Artificial Sequence
  Description of Artificial Sequence: Synthetic oligonucleotide
  Antisense strand to SEQ ID NO: 1717305
aacuuugagcacagauaca

SEQ ID NO: 1717307 - RNA, 19 nt, Artificial Sequence
  Description of Artificial Sequence: Synthetic oligonucleotide
  Sense strand starting at position 3789 of SEQ ID NO: 1562038
uuuaauagcuagcuaggaa

SEQ ID NO: 1717308 - RNA, 19 nt, Artificial Sequence
  Description of Artificial Sequence: Synthetic oligonucleotide
  Antisense strand to SEQ ID NO: 1717307
uuccuagcuagcuauuaaa

SEQ ID NO: 1717309 - RNA, 19 nt, Artificial Sequence
  Description of Artificial Sequence: Synthetic oligonucleotide
  Sense strand starting at position 3798 of SEQ ID NO: 1562038
uagcuaggaaggugugauu

SEQ ID NO: 1717310 - RNA, 19 nt, Artificial Sequence
  Description of Artificial Sequence: Synthetic oligonucleotide
  Antisense strand to SEQ ID NO: 1717309
aaucacaccuuccuagcua

SEQ ID NO: 1717311 - RNA, 19 nt, Artificial Sequence
  Description of Artificial Sequence: Synthetic oligonucleotide
  Sense strand starting at position 3938 of SEQ ID NO: 1562038
uagggacuacuguguuaga

SEQ ID NO: 1717312 - RNA, 19 nt, Artificial Sequence
  Description of Artificial Sequence: Synthetic oligonucleotide
  Antisense strand to SEQ ID NO: 1717311
ucuaacacaguagucccua

SEQ ID NO: 1717313 - RNA, 19 nt, Artificial Sequence
  Description of Artificial Sequence: Synthetic oligonucleotide
  Sense strand starting at position 3939 of SEQ ID NO: 1562038
agggacuacuguguuagaa

SEQ ID NO: 1717314 - RNA, 19 nt, Artificial Sequence
  Description of Artificial Sequence: Synthetic oligonucleotide
  Antisense strand to SEQ ID NO: 1717313
uucuaacacaguagucccu

SEQ ID NO: 1717315 - RNA, 19 nt, Artificial Sequence
  Description of Artificial Sequence: Synthetic oligonucleotide
  Sense strand starting at position 3951 of SEQ ID NO: 1562038
guuagaaacacagguguau

SEQ ID NO: 1717316 - RNA, 19 nt, Artificial Sequence
  Description of Artificial Sequence: Synthetic oligonucleotide
  Antisense strand to SEQ ID NO: 1717315
auacaccuguguuucuaac

SEQ ID NO: 1717317 - RNA, 19 nt, Artificial Sequence
  Description of Artificial Sequence: Synthetic oligonucleotide
  Sense strand starting at position 56 of SEQ ID NO: 1562039
aggguugucuggcccaaua

SEQ ID NO: 1717318 - RNA, 19 nt, Artificial Sequence
  Description of Artificial Sequence: Synthetic oligonucleotide
  Antisense strand to SEQ ID NO: 1717317
uauugggccagacaacccu

SEQ ID NO: 1717319 - RNA, 19 nt, Artificial Sequence
  Description of Artificial Sequence: Synthetic oligonucleotide
  Sense strand starting at position 58 of SEQ ID NO: 1562039
gguugucuggcccaauauu

SEQ ID NO: 1717320 - RNA, 19 nt, Artificial Sequence
  Description of Artificial Sequence: Synthetic oligonucleotide
  Antisense strand to SEQ ID NO: 1717319
aauauugggccagacaacc

SEQ ID NO: 1717321 - RNA, 19 nt, Artificial Sequence
  Description of Artificial Sequence: Synthetic oligonucleotide
  Sense strand starting at position 400 of SEQ ID NO: 1562039
gagugcuucccucaugcua

SEQ ID NO: 1717322 - RNA, 19 nt, Artificial Sequence
  Description of Artificial Sequence: Synthetic oligonucleotide
  Antisense strand to SEQ ID NO: 1717321
uagcaugagggaagcacuc

SEQ ID NO: 1717323 - RNA, 19 nt, Artificial Sequence
  Description of Artificial Sequence: Synthetic oligonucleotide
  Sense strand starting at position 479 of SEQ ID NO: 1562039
ccuggagucccuggugaga

SEQ ID NO: 1717324 - RNA, 19 nt, Artificial Sequence
  Description of Artificial Sequence: Synthetic oligonucleotide
  Antisense strand to SEQ ID NO: 1717323
ucucaccagggacuccagg

SEQ ID NO: 1717325 - RNA, 19 nt, Artificial Sequence
  Description of Artificial Sequence: Synthetic oligonucleotide
  Sense strand starting at position 482 of SEQ ID NO: 1562039
ggagucccuggugagauau

SEQ ID NO: 1717326 - RNA, 19 nt, Artificial Sequence
  Description of Artificial Sequence: Synthetic oligonucleotide
  Antisense strand to SEQ ID NO: 1717325
auaucucaccagggacucc

SEQ ID NO: 1717327 - RNA, 19 nt, Artificial Sequence
  Description of Artificial Sequence: Synthetic oligonucleotide
  Sense strand starting at position 570 of SEQ ID NO: 1562039
acgggugcucaauaaaugu

SEQ ID NO: 1717328 - RNA, 19 nt, Artificial Sequence
  Description of Artificial Sequence: Synthetic oligonucleotide
  Antisense strand to SEQ ID NO: 1717327
acauuuauugagcacccgu

SEQ ID NO: 1717329 - RNA, 19 nt, Artificial Sequence
  Description of Artificial Sequence: Synthetic oligonucleotide
  Sense strand starting at position 585 of SEQ ID NO: 1562039
augugccauuuguuugaaa

SEQ ID NO: 1717330 - RNA, 19 nt, Artificial Sequence
  Description of Artificial Sequence: Synthetic oligonucleotide
  Antisense strand to SEQ ID NO: 1717329
uuucaaacaaauggcacau

SEQ ID NO: 1717331 - RNA, 19 nt, Artificial Sequence
  Description of Artificial Sequence: Synthetic oligonucleotide
  Sense strand starting at position 608 of SEQ ID NO: 1562039
gagggcauucuaggugcua

SEQ ID NO: 1717332 - RNA, 19 nt, Artificial Sequence
  Description of Artificial Sequence: Synthetic oligonucleotide
  Antisense strand to SEQ ID NO: 1717331
uagcaccuagaaugcccuc

SEQ ID NO: 1717333 - RNA, 19 nt, Artificial Sequence
  Description of Artificial Sequence: Synthetic oligonucleotide
  Sense strand starting at position 609 of SEQ ID NO: 1562039
agggcauucuaggugcuaa

SEQ ID NO: 1717334 - RNA, 19 nt, Artificial Sequence
  Description of Artificial Sequence: Synthetic oligonucleotide
  Antisense strand to SEQ ID NO: 1717333
uuagcaccuagaaugcccu

SEQ ID NO: 1717335 - RNA, 19 nt, Artificial Sequence
  Description of Artificial Sequence: Synthetic oligonucleotide
  Sense strand starting at position 610 of SEQ ID NO: 1562039
gggcauucuaggugcuaac

SEQ ID NO: 1717336 - RNA, 19 nt, Artificial Sequence
  Description of Artificial Sequence: Synthetic oligonucleotide
  Antisense strand to SEQ ID NO: 1717335
guuagcaccuagaaugccc

SEQ ID NO: 1717337 - RNA, 19 nt, Artificial Sequence
  Description of Artificial Sequence: Synthetic oligonucleotide
  Sense strand starting at position 617 of SEQ ID NO: 1562039
cuaggugcuaacgaaugaa

SEQ ID NO: 1717338 - RNA, 19 nt, Artificial Sequence
  Description of Artificial Sequence: Synthetic oligonucleotide
  Antisense strand to SEQ ID NO: 1717337
uucauucguuagcaccuag

SEQ ID NO: 1717339 - RNA, 19 nt, Artificial Sequence
  Description of Artificial Sequence: Synthetic oligonucleotide
  Sense strand starting at position 620 of SEQ ID NO: 1562039
ggugcuaacgaaugaauga

SEQ ID NO: 1717340 - RNA, 19 nt, Artificial Sequence
  Description of Artificial Sequence: Synthetic oligonucleotide
  Antisense strand to SEQ ID NO: 1717339
ucauucauucguuagcacc

SEQ ID NO: 1717341 - RNA, 19 nt, Artificial Sequence
  Description of Artificial Sequence: Synthetic oligonucleotide
  Sense strand starting at position 714 of SEQ ID NO: 1562039
gccuccucacguuaucuua

SEQ ID NO: 1717342 - RNA, 19 nt, Artificial Sequence
  Description of Artificial Sequence: Synthetic oligonucleotide
  Antisense strand to SEQ ID NO: 1717341
uaagauaacgugaggaggc

SEQ ID NO: 1717343 - RNA, 19 nt, Artificial Sequence
  Description of Artificial Sequence: Synthetic oligonucleotide
  Sense strand starting at position 722 of SEQ ID NO: 1562039
acguuaucuuauguacauu

SEQ ID NO: 1717344 - RNA, 19 nt, Artificial Sequence
  Description of Artificial Sequence: Synthetic oligonucleotide
  Antisense strand to SEQ ID NO: 1717343
aauguacauaagauaacgu

SEQ ID NO: 1717345 - RNA, 19 nt, Artificial Sequence
  Description of Artificial Sequence: Synthetic oligonucleotide
  Sense strand starting at position 782 of SEQ ID NO: 1562039
aaaugucaccuucgugaag

SEQ ID NO: 1717346 - RNA, 19 nt, Artificial Sequence
  Description of Artificial Sequence: Synthetic oligonucleotide
  Antisense strand to SEQ ID NO: 1717345
cuucacgaaggugacauuu

SEQ ID NO: 1717347 - RNA, 19 nt, Artificial Sequence
  Description of Artificial Sequence: Synthetic oligonucleotide
  Sense strand starting at position 785 of SEQ ID NO: 1562039
ugucaccuucgugaaggaa

SEQ ID NO: 1717348 - RNA, 19 nt, Artificial Sequence
  Description of Artificial Sequence: Synthetic oligonucleotide
  Antisense strand to SEQ ID NO: 1717347
uuccuucacgaaggugaca

SEQ ID NO: 1717349 - RNA, 19 nt, Artificial Sequence
  Description of Artificial Sequence: Synthetic oligonucleotide
  Sense strand starting at position 809 of SEQ ID NO: 1562039
cuugucuauucuguuacca

SEQ ID NO: 1717350 - RNA, 19 nt, Artificial Sequence
  Description of Artificial Sequence: Synthetic oligonucleotide
  Antisense strand to SEQ ID NO: 1717349
ugguaacagaauagacaag

SEQ ID NO: 1717351 - RNA, 19 nt, Artificial Sequence
  Description of Artificial Sequence: Synthetic oligonucleotide
  Sense strand starting at position 862 of SEQ ID NO: 1562039
gcaaguguacuccaaguau

SEQ ID NO: 1717352 - RNA, 19 nt, Artificial Sequence
  Description of Artificial Sequence: Synthetic oligonucleotide
  Antisense strand to SEQ ID NO: 1717351
auacuuggaguacacuugc

SEQ ID NO: 1717353 - RNA, 19 nt, Artificial Sequence
  Description of Artificial Sequence: Synthetic oligonucleotide
  Sense strand starting at position 866 of SEQ ID NO: 1562039
guguacuccaaguauaagu

SEQ ID NO: 1717354 - RNA, 19 nt, Artificial Sequence
  Description of Artificial Sequence: Synthetic oligonucleotide
  Antisense strand to SEQ ID NO: 1717353
acuuauacuuggaguacac

SEQ ID NO: 1717355 - RNA, 19 nt, Artificial Sequence
  Description of Artificial Sequence: Synthetic oligonucleotide
  Sense strand starting at position 876 of SEQ ID NO: 1562039
aguauaagucaauggauac

SEQ ID NO: 1717356 - RNA, 19 nt, Artificial Sequence
  Description of Artificial Sequence: Synthetic oligonucleotide
  Antisense strand to SEQ ID NO: 1717355
guauccauugacuuauacu

SEQ ID NO: 1717357 - RNA, 19 nt, Artificial Sequence
  Description of Artificial Sequence: Synthetic oligonucleotide
  Sense strand starting at position 882 of SEQ ID NO: 1562039
agucaauggauacgaugaa

SEQ ID NO: 1717358 - RNA, 19 nt, Artificial Sequence
  Description of Artificial Sequence: Synthetic oligonucleotide
  Antisense strand to SEQ ID NO: 1717357
uucaucguauccauugacu

SEQ ID NO: 1717359 - RNA, 19 nt, Artificial Sequence
  Description of Artificial Sequence: Synthetic oligonucleotide
  Sense strand starting at position 1239 of SEQ ID NO: 1562039
ugugucagucaagaccuua

SEQ ID NO: 1717360 - RNA, 19 nt, Artificial Sequence
  Description of Artificial Sequence: Synthetic oligonucleotide
  Antisense strand to SEQ ID NO: 1717359
uaaggucuugacugacaca

SEQ ID NO: 1717361 - RNA, 19 nt, Artificial Sequence
  Description of Artificial Sequence: Synthetic oligonucleotide
  Sense strand starting at position 1343 of SEQ ID NO: 1562039
gauugugaugguuacaguu

SEQ ID NO: 1717362 - RNA, 19 nt, Artificial Sequence
  Description of Artificial Sequence: Synthetic oligonucleotide
  Antisense strand to SEQ ID NO: 1717361
aacuguaaccaucacaauc

SEQ ID NO: 1717363 - RNA, 19 nt, Artificial Sequence
  Description of Artificial Sequence: Synthetic oligonucleotide
  Sense strand starting at position 1349 of SEQ ID NO: 1562039
gaugguuacaguugugaug

SEQ ID NO: 1717364 - RNA, 19 nt, Artificial Sequence
  Description of Artificial Sequence: Synthetic oligonucleotide
  Antisense strand to SEQ ID NO: 1717363
caucacaacuguaaccauc

SEQ ID NO: 1717365 - RNA, 19 nt, Artificial Sequence
  Description of Artificial Sequence: Synthetic oligonucleotide
  Sense strand starting at position 1385 of SEQ ID NO: 1562039
gcagaccuggauugaaauc

SEQ ID NO: 1717366 - RNA, 19 nt, Artificial Sequence
  Description of Artificial Sequence: Synthetic oligonucleotide
  Antisense strand to SEQ ID NO: 1717365
gauuucaauccaggucugc

SEQ ID NO: 1717367 - RNA, 19 nt, Artificial Sequence
  Description of Artificial Sequence: Synthetic oligonucleotide
  Sense strand starting at position 1412 of SEQ ID NO: 1562039
gcaaauuaauucucugagu

SEQ ID NO: 1717368 - RNA, 19 nt, Artificial Sequence
  Description of Artificial Sequence: Synthetic oligonucleotide
  Antisense strand to SEQ ID NO: 1717367
acucagagaauuaauuugc

SEQ ID NO: 1717369 - RNA, 19 nt, Artificial Sequence
  Description of Artificial Sequence: Synthetic oligonucleotide
  Sense strand starting at position 1658 of SEQ ID NO: 1562039
cagucauucuaggccaaga

SEQ ID NO: 1717370 - RNA, 19 nt, Artificial Sequence
  Description of Artificial Sequence: Synthetic oligonucleotide
  Antisense strand to SEQ ID NO: 1717369
ucuuggccuagaaugacug

SEQ ID NO: 1717371 - RNA, 19 nt, Artificial Sequence
  Description of Artificial Sequence: Synthetic oligonucleotide
  Sense strand starting at position 1660 of SEQ ID NO: 1562039
gucauucuaggccaagaug

SEQ ID NO: 1717372 - RNA, 19 nt, Artificial Sequence
  Description of Artificial Sequence: Synthetic oligonucleotide
  Antisense strand to SEQ ID NO: 1717371
caucuuggccuagaaugac

SEQ ID NO: 1717373 - RNA, 19 nt, Artificial Sequence
  Description of Artificial Sequence: Synthetic oligonucleotide
  Sense strand starting at position 1663 of SEQ ID NO: 1562039
auucuaggccaagaugagu

SEQ ID NO: 1717374 - RNA, 19 nt, Artificial Sequence
  Description of Artificial Sequence: Synthetic oligonucleotide
  Antisense strand to SEQ ID NO: 1717373
acucaucuuggccuagaau

SEQ ID NO: 1717375 - RNA, 19 nt, Artificial Sequence
  Description of Artificial Sequence: Synthetic oligonucleotide
  Sense strand starting at position 1674 of SEQ ID NO: 1562039
agaugaguccggcugcguu

SEQ ID NO: 1717376 - RNA, 19 nt, Artificial Sequence
  Description of Artificial Sequence: Synthetic oligonucleotide
  Antisense strand to SEQ ID NO: 1717375
aacgcagccggacucaucu

SEQ ID NO: 1717377 - RNA, 19 nt, Artificial Sequence
  Description of Artificial Sequence: Synthetic oligonucleotide
  Sense strand starting at position 2083 of SEQ ID NO: 1562039
cugagcguucuccaacagu

SEQ ID NO: 1717378 - RNA, 19 nt, Artificial Sequence
  Description of Artificial Sequence: Synthetic oligonucleotide
  Antisense strand to SEQ ID NO: 1717377
acuguuggagaacgcucag

SEQ ID NO: 1717379 - RNA, 19 nt, Artificial Sequence
  Description of Artificial Sequence: Synthetic oligonucleotide
  Sense strand starting at position 2440 of SEQ ID NO: 1562039
ccugcuuugcugcaauuua

SEQ ID NO: 1717380 - RNA, 19 nt, Artificial Sequence
  Description of Artificial Sequence: Synthetic oligonucleotide
  Antisense strand to SEQ ID NO: 1717379
uaaauugcagcaaagcagg

SEQ ID NO: 1717381 - RNA, 19 nt, Artificial Sequence
  Description of Artificial Sequence: Synthetic oligonucleotide
  Sense strand starting at position 2448 of SEQ ID NO: 1562039
gcugcaauuuaggaauuga

SEQ ID NO: 1717382 - RNA, 19 nt, Artificial Sequence
  Description of Artificial Sequence: Synthetic oligonucleotide
  Antisense strand to SEQ ID NO: 1717381
ucaauuccuaaauugcagc

SEQ ID NO: 1717383 - RNA, 19 nt, Artificial Sequence
  Description of Artificial Sequence: Synthetic oligonucleotide
  Sense strand starting at position 3128 of SEQ ID NO: 1562039
cuugcaucuggagaguauu

SEQ ID NO: 1717384 - RNA, 19 nt, Artificial Sequence
  Description of Artificial Sequence: Synthetic oligonucleotide
  Antisense strand to SEQ ID NO: 1717383
aauacucuccagaugcaag

SEQ ID NO: 1717385 - RNA, 19 nt, Artificial Sequence
  Description of Artificial Sequence: Synthetic oligonucleotide
  Sense strand starting at position 3192 of SEQ ID NO: 1562039
guuaauauggcccaucuag

SEQ ID NO: 1717386 - RNA, 19 nt, Artificial Sequence
  Description of Artificial Sequence: Synthetic oligonucleotide
  Antisense strand to SEQ ID NO: 1717385
cuagaugggccauauuaac

SEQ ID NO: 1717387 - RNA, 19 nt, Artificial Sequence
  Description of Artificial Sequence: Synthetic oligonucleotide
  Sense strand starting at position 3238 of SEQ ID NO: 1562039
ggcugagugcuuuacacaa

SEQ ID NO: 1717388 - RNA, 19 nt, Artificial Sequence
  Description of Artificial Sequence: Synthetic oligonucleotide
  Antisense strand to SEQ ID NO: 1717387
uuguguaaagcacucagcc

SEQ ID NO: 1717389 - RNA, 19 nt, Artificial Sequence
  Description of Artificial Sequence: Synthetic oligonucleotide
  Sense strand starting at position 3364 of SEQ ID NO: 1562039
cugcaaucacgccaggauu

SEQ ID NO: 1717390 - RNA, 19 nt, Artificial Sequence
  Description of Artificial Sequence: Synthetic oligonucleotide
  Antisense strand to SEQ ID NO: 1717389
aauccuggcgugauugcag

SEQ ID NO: 1717391 - RNA, 19 nt, Artificial Sequence
  Description of Artificial Sequence: Synthetic oligonucleotide
  Sense strand starting at position 3366 of SEQ ID NO: 1562039
gcaaucacgccaggauuua

SEQ ID NO: 1717392 - RNA, 19 nt, Artificial Sequence
  Description of Artificial Sequence: Synthetic oligonucleotide
  Antisense strand to SEQ ID NO: 1717391
uaaauccuggcgugauugc

SEQ ID NO: 1717393 - RNA, 19 nt, Artificial Sequence
  Description of Artificial Sequence: Synthetic oligonucleotide
  Sense strand starting at position 3881 of SEQ ID NO: 1562039
gggugauguucguuaugau

SEQ ID NO: 1717394 - RNA, 19 nt, Artificial Sequence
  Description of Artificial Sequence: Synthetic oligonucleotide
  Antisense strand to SEQ ID NO: 1717393
aucauaacgaacaucaccc

SEQ ID NO: 1717395 - RNA, 19 nt, Artificial Sequence
  Description of Artificial Sequence: Synthetic oligonucleotide
  Sense strand starting at position 3882 of SEQ ID NO: 1562039
ggugauguucguuaugaug

SEQ ID NO: 1717396 - RNA, 19 nt, Artificial Sequence
  Description of Artificial Sequence: Synthetic oligonucleotide
  Antisense strand to SEQ ID NO: 1717395
caucauaacgaacaucacc

SEQ ID NO: 1717397 - RNA, 19 nt, Artificial Sequence
  Description of Artificial Sequence: Synthetic oligonucleotide
  Sense strand starting at position 168 of SEQ ID NO: 1562040
ccaguacaggaauguguaa

SEQ ID NO: 1717398 - RNA, 19 nt, Artificial Sequence
  Description of Artificial Sequence: Synthetic oligonucleotide
  Antisense strand to SEQ ID NO: 1717397
uuacacauuccuguacugg

SEQ ID NO: 1717399 - RNA, 19 nt, Artificial Sequence
  Description of Artificial Sequence: Synthetic oligonucleotide
  Sense strand starting at position 180 of SEQ ID NO: 1562040
uguguaaggguucagaucu

SEQ ID NO: 1717400 - RNA, 19 nt, Artificial Sequence
  Description of Artificial Sequence: Synthetic oligonucleotide
  Antisense strand to SEQ ID NO: 1717399
agaucugaacccuuacaca

SEQ ID NO: 1717401 - RNA, 19 nt, Artificial Sequence
  Description of Artificial Sequence: Synthetic oligonucleotide
  Sense strand starting at position 242 of SEQ ID NO: 1562040
uuuacuugauaugccugaa

SEQ ID NO: 1717402 - RNA, 19 nt, Artificial Sequence
  Description of Artificial Sequence: Synthetic oligonucleotide
  Antisense strand to SEQ ID NO: 1717401
uucaggcauaucaaguaaa

SEQ ID NO: 1717403 - RNA, 19 nt, Artificial Sequence
  Description of Artificial Sequence: Synthetic oligonucleotide
  Sense strand starting at position 245 of SEQ ID NO: 1562040
acuugauaugccugaaaga

SEQ ID NO: 1717404 - RNA, 19 nt, Artificial Sequence
  Description of Artificial Sequence: Synthetic oligonucleotide
  Antisense strand to SEQ ID NO: 1717403
ucuuucaggcauaucaagu

SEQ ID NO: 1717405 - RNA, 19 nt, Artificial Sequence
  Description of Artificial Sequence: Synthetic oligonucleotide
  Sense strand starting at position 514 of SEQ ID NO: 1562040
ggccuacaccuguaacaca

SEQ ID NO: 1717406 - RNA, 19 nt, Artificial Sequence
  Description of Artificial Sequence: Synthetic oligonucleotide
  Antisense strand to SEQ ID NO: 1717405
uguguuacagguguaggcc

SEQ ID NO: 1717407 - RNA, 19 nt, Artificial Sequence
  Description of Artificial Sequence: Synthetic oligonucleotide
  Sense strand starting at position 522 of SEQ ID NO: 1562040
ccuguaacacacuauguau

SEQ ID NO: 1717408 - RNA, 19 nt, Artificial Sequence
  Description of Artificial Sequence: Synthetic oligonucleotide
  Antisense strand to SEQ ID NO: 1717407
auacauaguguguuacagg

SEQ ID NO: 1717409 - RNA, 19 nt, Artificial Sequence
  Description of Artificial Sequence: Synthetic oligonucleotide
  Sense strand starting at position 531 of SEQ ID NO: 1562040
cacuauguauuuggaagga

SEQ ID NO: 1717410 - RNA, 19 nt, Artificial Sequence
  Description of Artificial Sequence: Synthetic oligonucleotide
  Antisense strand to SEQ ID NO: 1717409
uccuuccaaauacauagug

SEQ ID NO: 1717411 - RNA, 19 nt, Artificial Sequence
  Description of Artificial Sequence: Synthetic oligonucleotide
  Sense strand starting at position 560 of SEQ ID NO: 1562040
accuuuagauguguaucaa

SEQ ID NO: 1717412 - RNA, 19 nt, Artificial Sequence
  Description of Artificial Sequence: Synthetic oligonucleotide
  Antisense strand to SEQ ID NO: 1717411
uugauacacaucuaaaggu

SEQ ID NO: 1717413 - RNA, 19 nt, Artificial Sequence
  Description of Artificial Sequence: Synthetic oligonucleotide
  Sense strand starting at position 561 of SEQ ID NO: 1562040
ccuuuagauguguaucaaa

SEQ ID NO: 1717414 - RNA, 19 nt, Artificial Sequence
  Description of Artificial Sequence: Synthetic oligonucleotide
  Antisense strand to SEQ ID NO: 1717413
uuugauacacaucuaaagg

SEQ ID NO: 1717415 - RNA, 19 nt, Artificial Sequence
  Description of Artificial Sequence: Synthetic oligonucleotide
  Sense strand starting at position 584 of SEQ ID NO: 1562040
agucucuuacccuauuguu

SEQ ID NO: 1717416 - RNA, 19 nt, Artificial Sequence
  Description of Artificial Sequence: Synthetic oligonucleotide
  Antisense strand to SEQ ID NO: 1717415
aacaauaggguaagagacu

SEQ ID NO: 1717417 - RNA, 19 nt, Artificial Sequence
  Description of Artificial Sequence: Synthetic oligonucleotide
  Sense strand starting at position 740 of SEQ ID NO: 1562040
guggcauaaguucaggauu

SEQ ID NO: 1717418 - RNA, 19 nt, Artificial Sequence
  Description of Artificial Sequence: Synthetic oligonucleotide
  Antisense strand to SEQ ID NO: 1717417
aauccugaacuuaugccac

SEQ ID NO: 1717419 - RNA, 19 nt, Artificial Sequence
  Description of Artificial Sequence: Synthetic oligonucleotide
  Sense strand starting at position 827 of SEQ ID NO: 1562040
ucaguagaguaauuaggaa

SEQ ID NO: 1717420 - RNA, 19 nt, Artificial Sequence
  Description of Artificial Sequence: Synthetic oligonucleotide
  Antisense strand to SEQ ID NO: 1717419
uuccuaauuacucuacuga

SEQ ID NO: 1717421 - RNA, 19 nt, Artificial Sequence
  Description of Artificial Sequence: Synthetic oligonucleotide
  Sense strand starting at position 831 of SEQ ID NO: 1562040
uagaguaauuaggaaauuc

SEQ ID NO: 1717422 - RNA, 19 nt, Artificial Sequence
  Description of Artificial Sequence: Synthetic oligonucleotide
  Antisense strand to SEQ ID NO: 1717421
gaauuuccuaauuacucua

SEQ ID NO: 1717423 - RNA, 19 nt, Artificial Sequence
  Description of Artificial Sequence: Synthetic oligonucleotide
  Sense strand starting at position 912 of SEQ ID NO: 1562040
aaaguuucugcuucgugua

SEQ ID NO: 1717424 - RNA, 19 nt, Artificial Sequence
  Description of Artificial Sequence: Synthetic oligonucleotide
  Antisense strand to SEQ ID NO: 1717423
uacacgaagcagaaacuuu

SEQ ID NO: 1717425 - RNA, 19 nt, Artificial Sequence
  Description of Artificial Sequence: Synthetic oligonucleotide
  Sense strand starting at position 964 of SEQ ID NO: 1562040
guuaguaaacuuugaacuc

SEQ ID NO: 1717426 - RNA, 19 nt, Artificial Sequence
  Description of Artificial Sequence: Synthetic oligonucleotide
  Antisense strand to SEQ ID NO: 1717425
gaguucaaaguuuacuaac

SEQ ID NO: 1717427 - RNA, 19 nt, Artificial Sequence
  Description of Artificial Sequence: Synthetic oligonucleotide
  Sense strand starting at position 983 of SEQ ID NO: 1562040
cugaguuaccucugaguaa

SEQ ID NO: 1717428 - RNA, 19 nt, Artificial Sequence
  Description of Artificial Sequence: Synthetic oligonucleotide
  Antisense strand to SEQ ID NO: 1717427
uuacucagagguaacucag

SEQ ID NO: 1717429 - RNA, 19 nt, Artificial Sequence
  Description of Artificial Sequence: Synthetic oligonucleotide
  Sense strand starting at position 990 of SEQ ID NO: 1562040
accucugaguaaucccuga

SEQ ID NO: 1717430 - RNA, 19 nt, Artificial Sequence
  Description of Artificial Sequence: Synthetic oligonucleotide
  Antisense strand to SEQ ID NO: 1717429
ucagggauuacucagaggu

SEQ ID NO: 1717431 - RNA, 19 nt, Artificial Sequence
  Description of Artificial Sequence: Synthetic oligonucleotide
  Sense strand starting at position 1040 of SEQ ID NO: 1562040
aaagauuaguuauuggagu

SEQ ID NO: 1717432 - RNA, 19 nt, Artificial Sequence
  Description of Artificial Sequence: Synthetic oligonucleotide
  Antisense strand to SEQ ID NO: 1717431
acuccaauaacuaaucuuu

SEQ ID NO: 1717433 - RNA, 19 nt, Artificial Sequence
  Description of Artificial Sequence: Synthetic oligonucleotide
  Sense strand starting at position 1042 of SEQ ID NO: 1562040
agauuaguuauuggaguuc

SEQ ID NO: 1717434 - RNA, 19 nt, Artificial Sequence
  Description of Artificial Sequence: Synthetic oligonucleotide
  Antisense strand to SEQ ID NO: 1717433
gaacuccaauaacuaaucu

SEQ ID NO: 1717435 - RNA, 19 nt, Artificial Sequence
  Description of Artificial Sequence: Synthetic oligonucleotide
  Sense strand starting at position 1054 of SEQ ID NO: 1562040
ggaguuccugccgaucuuu

SEQ ID NO: 1717436 - RNA, 19 nt, Artificial Sequence
  Description of Artificial Sequence: Synthetic oligonucleotide
  Antisense strand to SEQ ID NO: 1717435
aaagaucggcaggaacucc

SEQ ID NO: 1717437 - RNA, 19 nt, Artificial Sequence
  Description of Artificial Sequence: Synthetic oligonucleotide
  Sense strand starting at position 1135 of SEQ ID NO: 1562040
cuugucuuuccugacaaga

SEQ ID NO: 1717438 - RNA, 19 nt, Artificial Sequence
  Description of Artificial Sequence: Synthetic oligonucleotide
  Antisense strand to SEQ ID NO: 1717437
ucuugucaggaaagacaag

SEQ ID NO: 1717439 - RNA, 19 nt, Artificial Sequence
  Description of Artificial Sequence: Synthetic oligonucleotide
  Sense strand starting at position 1218 of SEQ ID NO: 1562040
ggaagaguuacuuggcaaa

SEQ ID NO: 1717440 - RNA, 19 nt, Artificial Sequence
  Description of Artificial Sequence: Synthetic oligonucleotide
  Antisense strand to SEQ ID NO: 1717439
uuugccaaguaacucuucc

SEQ ID NO: 1717441 - RNA, 19 nt, Artificial Sequence
  Description of Artificial Sequence: Synthetic oligonucleotide
  Sense strand starting at position 1220 of SEQ ID NO: 1562040
aagaguuacuuggcaaagu

SEQ ID NO: 1717442 - RNA, 19 nt, Artificial Sequence
  Description of Artificial Sequence: Synthetic oligonucleotide
  Antisense strand to SEQ ID NO: 1717441
acuuugccaaguaacucuu

SEQ ID NO: 1717443 - RNA, 19 nt, Artificial Sequence
  Description of Artificial Sequence: Synthetic oligonucleotide
  Sense strand starting at position 1369 of SEQ ID NO: 1562040
acuaauaccuugguaaguu

SEQ ID NO: 1717444 - RNA, 19 nt, Artificial Sequence
  Description of Artificial Sequence: Synthetic oligonucleotide
  Antisense strand to SEQ ID NO: 1717443
aacuuaccaagguauuagu

SEQ ID NO: 1717445 - RNA, 19 nt, Artificial Sequence
  Description of Artificial Sequence: Synthetic oligonucleotide
  Sense strand starting at position 2465 of SEQ ID NO: 1562040
ggacuugcaggaugacuua

SEQ ID NO: 1717446 - RNA, 19 nt, Artificial Sequence
  Description of Artificial Sequence: Synthetic oligonucleotide
  Antisense strand to SEQ ID NO: 1717445
uaagucauccugcaagucc

SEQ ID NO: 1717447 - RNA, 19 nt, Artificial Sequence
  Description of Artificial Sequence: Synthetic oligonucleotide
  Sense strand starting at position 2474 of SEQ ID NO: 1562040
ggaugacuuagacgacugu

SEQ ID NO: 1717448 - RNA, 19 nt, Artificial Sequence
  Description of Artificial Sequence: Synthetic oligonucleotide
  Antisense strand to SEQ ID NO: 1717447
acagucgucuaagucaucc

SEQ ID NO: 1717449 - RNA, 19 nt, Artificial Sequence
  Description of Artificial Sequence: Synthetic oligonucleotide
  Sense strand starting at position 2478 of SEQ ID NO: 1562040
gacuuagacgacuguaagu

SEQ ID NO: 1717450 - RNA, 19 nt, Artificial Sequence
  Description of Artificial Sequence: Synthetic oligonucleotide
  Antisense strand to SEQ ID NO: 1717449
acuuacagucgucuaaguc

SEQ ID NO: 1717451 - RNA, 19 nt, Artificial Sequence
  Description of Artificial Sequence: Synthetic oligonucleotide
  Sense strand starting at position 2480 of SEQ ID NO: 1562040
cuuagacgacuguaaguaa

SEQ ID NO: 1717452 - RNA, 19 nt, Artificial Sequence
  Description of Artificial Sequence: Synthetic oligonucleotide
  Antisense strand to SEQ ID NO: 1717451
uuacuuacagucgucuaag

SEQ ID NO: 1717453 - RNA, 19 nt, Artificial Sequence
  Description of Artificial Sequence: Synthetic oligonucleotide
  Sense strand starting at position 2484 of SEQ ID NO: 1562040
gacgacuguaaguaagagu

SEQ ID NO: 1717454 - RNA, 19 nt, Artificial Sequence
  Description of Artificial Sequence: Synthetic oligonucleotide
  Antisense strand to SEQ ID NO: 1717453
acucuuacuuacagucguc

SEQ ID NO: 1717455 - RNA, 19 nt, Artificial Sequence
  Description of Artificial Sequence: Synthetic oligonucleotide
  Sense strand starting at position 2586 of SEQ ID NO: 1562040
acuccuugucgggaccaga

SEQ ID NO: 1717456 - RNA, 19 nt, Artificial Sequence
  Description of Artificial Sequence: Synthetic oligonucleotide
  Antisense strand to SEQ ID NO: 1717455
ucuggucccgacaaggagu

SEQ ID NO: 1717457 - RNA, 19 nt, Artificial Sequence
  Description of Artificial Sequence: Synthetic oligonucleotide
  Sense strand starting at position 3153 of SEQ ID NO: 1562040
ucaagaaacuuacugagca

SEQ ID NO: 1717458 - RNA, 19 nt, Artificial Sequence
  Description of Artificial Sequence: Synthetic oligonucleotide
  Antisense strand to SEQ ID NO: 1717457
ugcucaguaaguuucuuga

SEQ ID NO: 1717459 - RNA, 19 nt, Artificial Sequence
  Description of Artificial Sequence: Synthetic oligonucleotide
  Sense strand starting at position 3208 of SEQ ID NO: 1562040
ccugcaaggauguguugaa

SEQ ID NO: 1717460 - RNA, 19 nt, Artificial Sequence
  Description of Artificial Sequence: Synthetic oligonucleotide
  Antisense strand to SEQ ID NO: 1717459
uucaacacauccuugcagg

SEQ ID NO: 1717461 - RNA, 19 nt, Artificial Sequence
  Description of Artificial Sequence: Synthetic oligonucleotide
  Sense strand starting at position 3209 of SEQ ID NO: 1562040
cugcaaggauguguugaaa

SEQ ID NO: 1717462 - RNA, 19 nt, Artificial Sequence
  Description of Artificial Sequence: Synthetic oligonucleotide
  Antisense strand to SEQ ID NO: 1717461
uuucaacacauccuugcag

SEQ ID NO: 1717463 - RNA, 19 nt, Artificial Sequence
  Description of Artificial Sequence: Synthetic oligonucleotide
  Sense strand starting at position 3261 of SEQ ID NO: 1562040
gggagagccuacuuguaaa

SEQ ID NO: 1717464 - RNA, 19 nt, Artificial Sequence
  Description of Artificial Sequence: Synthetic oligonucleotide
  Antisense strand to SEQ ID NO: 1717463
uuuacaaguaggcucuccc

SEQ ID NO: 1717465 - RNA, 19 nt, Artificial Sequence
  Description of Artificial Sequence: Synthetic oligonucleotide
  Sense strand starting at position 3299 of SEQ ID NO: 1562040
ggagugcuugcuggugaag

SEQ ID NO: 1717466 - RNA, 19 nt, Artificial Sequence
  Description of Artificial Sequence: Synthetic oligonucleotide
  Antisense strand to SEQ ID NO: 1717465
cuucaccagcaagcacucc

SEQ ID NO: 1717467 - RNA, 19 nt, Artificial Sequence
  Description of Artificial Sequence: Synthetic oligonucleotide
  Sense strand starting at position 3426 of SEQ ID NO: 1562040
aauaguaagaguugguguu

SEQ ID NO: 1717468 - RNA, 19 nt, Artificial Sequence
  Description of Artificial Sequence: Synthetic oligonucleotide
  Antisense strand to SEQ ID NO: 1717467
aacaccaacucuuacuauu

SEQ ID NO: 1717469 - RNA, 19 nt, Artificial Sequence
  Description of Artificial Sequence: Synthetic oligonucleotide
  Sense strand starting at position 3427 of SEQ ID NO: 1562040
auaguaagaguugguguuu

SEQ ID NO: 1717470 - RNA, 19 nt, Artificial Sequence
  Description of Artificial Sequence: Synthetic oligonucleotide
  Antisense strand to SEQ ID NO: 1717469
aaacaccaacucuuacuau

SEQ ID NO: 1717471 - RNA, 19 nt, Artificial Sequence
  Description of Artificial Sequence: Synthetic oligonucleotide
  Sense strand starting at position 3428 of SEQ ID NO: 1562040
uaguaagaguugguguuua

SEQ ID NO: 1717472 - RNA, 19 nt, Artificial Sequence
  Description of Artificial Sequence: Synthetic oligonucleotide
  Antisense strand to SEQ ID NO: 1717471
uaaacaccaacucuuacua

SEQ ID NO: 1717473 - RNA, 19 nt, Artificial Sequence
  Description of Artificial Sequence: Synthetic oligonucleotide
  Sense strand starting at position 3432 of SEQ ID NO: 1562040
aagaguugguguuuacuga

SEQ ID NO: 1717474 - RNA, 19 nt, Artificial Sequence
  Description of Artificial Sequence: Synthetic oligonucleotide
  Antisense strand to SEQ ID NO: 1717473
ucaguaaacaccaacucuu

SEQ ID NO: 1717475 - RNA, 19 nt, Artificial Sequence
  Description of Artificial Sequence: Synthetic oligonucleotide
  Sense strand starting at position 3433 of SEQ ID NO: 1562040
agaguugguguuuacugaa

SEQ ID NO: 1717476 - RNA, 19 nt, Artificial Sequence
  Description of Artificial Sequence: Synthetic oligonucleotide
  Antisense strand to SEQ ID NO: 1717475
uucaguaaacaccaacucu

SEQ ID NO: 1717477 - RNA, 19 nt, Artificial Sequence
  Description of Artificial Sequence: Synthetic oligonucleotide
  Sense strand starting at position 128 of SEQ ID NO: 1562041
uaagaaggauuggauuauu

SEQ ID NO: 1717478 - RNA, 19 nt, Artificial Sequence
  Description of Artificial Sequence: Synthetic oligonucleotide
  Antisense strand to SEQ ID NO: 1717477
aauaauccaauccuucuua

SEQ ID NO: 1717479 - RNA, 19 nt, Artificial Sequence
  Description of Artificial Sequence: Synthetic oligonucleotide
  Sense strand starting at position 145 of SEQ ID NO: 1562041
uugauuuauacgcaggugu

SEQ ID NO: 1717480 - RNA, 19 nt, Artificial Sequence
  Description of Artificial Sequence: Synthetic oligonucleotide
  Antisense strand to SEQ ID NO: 1717479
acaccugcguauaaaucaa

SEQ ID NO: 1717481 - RNA, 19 nt, Artificial Sequence
  Description of Artificial Sequence: Synthetic oligonucleotide
  Sense strand starting at position 147 of SEQ ID NO: 1562041
gauuuauacgcagguguug

SEQ ID NO: 1717482 - RNA, 19 nt, Artificial Sequence
  Description of Artificial Sequence: Synthetic oligonucleotide
  Antisense strand to SEQ ID NO: 1717481
caacaccugcguauaaauc

SEQ ID NO: 1717483 - RNA, 19 nt, Artificial Sequence
  Description of Artificial Sequence: Synthetic oligonucleotide
  Sense strand starting at position 149 of SEQ ID NO: 1562041
uuuauacgcagguguugaa

SEQ ID NO: 1717484 - RNA, 19 nt, Artificial Sequence
  Description of Artificial Sequence: Synthetic oligonucleotide
  Antisense strand to SEQ ID NO: 1717483
uucaacaccugcguauaaa

SEQ ID NO: 1717485 - RNA, 19 nt, Artificial Sequence
  Description of Artificial Sequence: Synthetic oligonucleotide
  Sense strand starting at position 429 of SEQ ID NO: 1562041
acuguacuauucuugguaa

SEQ ID NO: 1717486 - RNA, 19 nt, Artificial Sequence
  Description of Artificial Sequence: Synthetic oligonucleotide
  Antisense strand to SEQ ID NO: 1717485
uuaccaagaauaguacagu

SEQ ID NO: 1717487 - RNA, 19 nt, Artificial Sequence
  Description of Artificial Sequence: Synthetic oligonucleotide
  Sense strand starting at position 431 of SEQ ID NO: 1562041
uguacuauucuugguaaca

SEQ ID NO: 1717488 - RNA, 19 nt, Artificial Sequence
  Description of Artificial Sequence: Synthetic oligonucleotide
  Antisense strand to SEQ ID NO: 1717487
uguuaccaagaauaguaca

SEQ ID NO: 1717489 - RNA, 19 nt, Artificial Sequence
  Description of Artificial Sequence: Synthetic oligonucleotide
  Sense strand starting at position 432 of SEQ ID NO: 1562041
guacuauucuugguaacac

SEQ ID NO: 1717490 - RNA, 19 nt, Artificial Sequence
  Description of Artificial Sequence: Synthetic oligonucleotide
  Antisense strand to SEQ ID NO: 1717489
guguuaccaagaauaguac

SEQ ID NO: 1717491 - RNA, 19 nt, Artificial Sequence
  Description of Artificial Sequence: Synthetic oligonucleotide
  Sense strand starting at position 449 of SEQ ID NO: 1562041
accauagggcucuaucacu

SEQ ID NO: 1717492 - RNA, 19 nt, Artificial Sequence
  Description of Artificial Sequence: Synthetic oligonucleotide
  Antisense strand to SEQ ID NO: 1717491
agugauagagcccuauggu

SEQ ID NO: 1717493 - RNA, 19 nt, Artificial Sequence
  Description of Artificial Sequence: Synthetic oligonucleotide
  Sense strand starting at position 455 of SEQ ID NO: 1562041
gggcucuaucacuaagcua

SEQ ID NO: 1717494 - RNA, 19 nt, Artificial Sequence
  Description of Artificial Sequence: Synthetic oligonucleotide
  Antisense strand to SEQ ID NO: 1717493
uagcuuagugauagagccc

SEQ ID NO: 1717495 - RNA, 19 nt, Artificial Sequence
  Description of Artificial Sequence: Synthetic oligonucleotide
  Sense strand starting at position 489 of SEQ ID NO: 1562041
guuauagcacuuugguuga

SEQ ID NO: 1717496 - RNA, 19 nt, Artificial Sequence
  Description of Artificial Sequence: Synthetic oligonucleotide
  Antisense strand to SEQ ID NO: 1717495
ucaaccaaagugcuauaac

SEQ ID NO: 1717497 - RNA, 19 nt, Artificial Sequence
  Description of Artificial Sequence: Synthetic oligonucleotide
  Sense strand starting at position 500 of SEQ ID NO: 1562041
uugguugacuucuagggaa

SEQ ID NO: 1717498 - RNA, 19 nt, Artificial Sequence
  Description of Artificial Sequence: Synthetic oligonucleotide
  Antisense strand to SEQ ID NO: 1717497
uucccuagaagucaaccaa

SEQ ID NO: 1717499 - RNA, 19 nt, Artificial Sequence
  Description of Artificial Sequence: Synthetic oligonucleotide
  Sense strand starting at position 502 of SEQ ID NO: 1562041
gguugacuucuagggaaga

SEQ ID NO: 1717500 - RNA, 19 nt, Artificial Sequence
  Description of Artificial Sequence: Synthetic oligonucleotide
  Antisense strand to SEQ ID NO: 1717499
ucuucccuagaagucaacc

SEQ ID NO: 1717501 - RNA, 19 nt, Artificial Sequence
  Description of Artificial Sequence: Synthetic oligonucleotide
  Sense strand starting at position 503 of SEQ ID NO: 1562041
guugacuucuagggaagaa

SEQ ID NO: 1717502 - RNA, 19 nt, Artificial Sequence
  Description of Artificial Sequence: Synthetic oligonucleotide
  Antisense strand to SEQ ID NO: 1717501
uucuucccuagaagucaac

SEQ ID NO: 1717503 - RNA, 19 nt, Artificial Sequence
  Description of Artificial Sequence: Synthetic oligonucleotide
  Sense strand starting at position 830 of SEQ ID NO: 1562041
uuucgcucucucggaauaa

SEQ ID NO: 1717504 - RNA, 19 nt, Artificial Sequence
  Description of Artificial Sequence: Synthetic oligonucleotide
  Antisense strand to SEQ ID NO: 1717503
uuauuccgagagagcgaaa

SEQ ID NO: 1717505 - RNA, 19 nt, Artificial Sequence
  Description of Artificial Sequence: Synthetic oligonucleotide
  Sense strand starting at position 834 of SEQ ID NO: 1562041
gcucucucggaauaaauuc

SEQ ID NO: 1717506 - RNA, 19 nt, Artificial Sequence
  Description of Artificial Sequence: Synthetic oligonucleotide
  Antisense strand to SEQ ID NO: 1717505
gaauuuauuccgagagagc

SEQ ID NO: 1717507 - RNA, 19 nt, Artificial Sequence
  Description of Artificial Sequence: Synthetic oligonucleotide
  Sense strand starting at position 873 of SEQ ID NO: 1562041
cucccaguggugugaggua

SEQ ID NO: 1717508 - RNA, 19 nt, Artificial Sequence
  Description of Artificial Sequence: Synthetic oligonucleotide
  Antisense strand to SEQ ID NO: 1717507
uaccucacaccacugggag

SEQ ID NO: 1717509 - RNA, 19 nt, Artificial Sequence
  Description of Artificial Sequence: Synthetic oligonucleotide
  Sense strand starting at position 1271 of SEQ ID NO: 1562041
auuugcuauuccugagaca

SEQ ID NO: 1717510 - RNA, 19 nt, Artificial Sequence
  Description of Artificial Sequence: Synthetic oligonucleotide
  Antisense strand to SEQ ID NO: 1717509
ugucucaggaauagcaaau

SEQ ID NO: 1717511 - RNA, 19 nt, Artificial Sequence
  Description of Artificial Sequence: Synthetic oligonucleotide
  Sense strand starting at position 1272 of SEQ ID NO: 1562041
uuugcuauuccugagacau

SEQ ID NO: 1717512 - RNA, 19 nt, Artificial Sequence
  Description of Artificial Sequence: Synthetic oligonucleotide
  Antisense strand to SEQ ID NO: 1717511
augucucaggaauagcaaa

SEQ ID NO: 1717513 - RNA, 19 nt, Artificial Sequence
  Description of Artificial Sequence: Synthetic oligonucleotide
  Sense strand starting at position 2024 of SEQ ID NO: 1562041
gcgaggagucgccaaguca

SEQ ID NO: 1717514 - RNA, 19 nt, Artificial Sequence
  Description of Artificial Sequence: Synthetic oligonucleotide
  Antisense strand to SEQ ID NO: 1717513
ugacuuggcgacuccucgc

SEQ ID NO: 1717515 - RNA, 19 nt, Artificial Sequence
  Description of Artificial Sequence: Synthetic oligonucleotide
  Sense strand starting at position 2711 of SEQ ID NO: 1562041
uguugugaaaggugaucuu

SEQ ID NO: 1717516 - RNA, 19 nt, Artificial Sequence
  Description of Artificial Sequence: Synthetic oligonucleotide
  Antisense strand to SEQ ID NO: 1717515
aagaucaccuuucacaaca

SEQ ID NO: 1717517 - RNA, 19 nt, Artificial Sequence
  Description of Artificial Sequence: Synthetic oligonucleotide
  Sense strand starting at position 2714 of SEQ ID NO: 1562041
ugugaaaggugaucuuucu

SEQ ID NO: 1717518 - RNA, 19 nt, Artificial Sequence
  Description of Artificial Sequence: Synthetic oligonucleotide
  Antisense strand to SEQ ID NO: 1717517
agaaagaucaccuuucaca

SEQ ID NO: 1717519 - RNA, 19 nt, Artificial Sequence
  Description of Artificial Sequence: Synthetic oligonucleotide
  Sense strand starting at position 2723 of SEQ ID NO: 1562041
ugaucuuucuggcugaucu

SEQ ID NO: 1717520 - RNA, 19 nt, Artificial Sequence
  Description of Artificial Sequence: Synthetic oligonucleotide
  Antisense strand to SEQ ID NO: 1717519
agaucagccagaaagauca

SEQ ID NO: 1717521 - RNA, 19 nt, Artificial Sequence
  Description of Artificial Sequence: Synthetic oligonucleotide
  Sense strand starting at position 2730 of SEQ ID NO: 1562041
ucuggcugaucucugaaca

SEQ ID NO: 1717522 - RNA, 19 nt, Artificial Sequence
  Description of Artificial Sequence: Synthetic oligonucleotide
  Antisense strand to SEQ ID NO: 1717521
uguucagagaucagccaga

SEQ ID NO: 1717523 - RNA, 19 nt, Artificial Sequence
  Description of Artificial Sequence: Synthetic oligonucleotide
  Sense strand starting at position 2731 of SEQ ID NO: 1562041
cuggcugaucucugaacau

SEQ ID NO: 1717524 - RNA, 19 nt, Artificial Sequence
  Description of Artificial Sequence: Synthetic oligonucleotide
  Antisense strand to SEQ ID NO: 1717523
auguucagagaucagccag

SEQ ID NO: 1717525 - RNA, 19 nt, Artificial Sequence
  Description of Artificial Sequence: Synthetic oligonucleotide
  Sense strand starting at position 2743 of SEQ ID NO: 1562041
ugaacaucccuaugaugca

SEQ ID NO: 1717526 - RNA, 19 nt, Artificial Sequence
  Description of Artificial Sequence: Synthetic oligonucleotide
  Antisense strand to SEQ ID NO: 1717525
ugcaucauagggauguuca

SEQ ID NO: 1717527 - RNA, 19 nt, Artificial Sequence
  Description of Artificial Sequence: Synthetic oligonucleotide
  Sense strand starting at position 2780 of SEQ ID NO: 1562041
cacuuauagcuggagguca

SEQ ID NO: 1717528 - RNA, 19 nt, Artificial Sequence
  Description of Artificial Sequence: Synthetic oligonucleotide
  Antisense strand to SEQ ID NO: 1717527
ugaccuccagcuauaagug

SEQ ID NO: 1717529 - RNA, 19 nt, Artificial Sequence
  Description of Artificial Sequence: Synthetic oligonucleotide
  Sense strand starting at position 2788 of SEQ ID NO: 1562041
gcuggaggucacuggagaa

SEQ ID NO: 1717530 - RNA, 19 nt, Artificial Sequence
  Description of Artificial Sequence: Synthetic oligonucleotide
  Antisense strand to SEQ ID NO: 1717529
uucuccagugaccuccagc

SEQ ID NO: 1717531 - RNA, 19 nt, Artificial Sequence
  Description of Artificial Sequence: Synthetic oligonucleotide
  Sense strand starting at position 3024 of SEQ ID NO: 1562041
ccuggaauaucacaguucu

SEQ ID NO: 1717532 - RNA, 19 nt, Artificial Sequence
  Description of Artificial Sequence: Synthetic oligonucleotide
  Antisense strand to SEQ ID NO: 1717531
agaacugugauauuccagg

SEQ ID NO: 1717533 - RNA, 19 nt, Artificial Sequence
  Description of Artificial Sequence: Synthetic oligonucleotide
  Sense strand starting at position 3058 of SEQ ID NO: 1562041
agugcuagaaccugagaaa

SEQ ID NO: 1717534 - RNA, 19 nt, Artificial Sequence
  Description of Artificial Sequence: Synthetic oligonucleotide
  Antisense strand to SEQ ID NO: 1717533
uuucucagguucuagcacu

SEQ ID NO: 1717535 - RNA, 19 nt, Artificial Sequence
  Description of Artificial Sequence: Synthetic oligonucleotide
  Sense strand starting at position 3105 of SEQ ID NO: 1562041
cugguuuccucucuugagu

SEQ ID NO: 1717536 - RNA, 19 nt, Artificial Sequence
  Description of Artificial Sequence: Synthetic oligonucleotide
  Antisense strand to SEQ ID NO: 1717535
acucaagagaggaaaccag

SEQ ID NO: 1717537 - RNA, 19 nt, Artificial Sequence
  Description of Artificial Sequence: Synthetic oligonucleotide
  Sense strand starting at position 3113 of SEQ ID NO: 1562041
cucucuugaguuugauagu

SEQ ID NO: 1717538 - RNA, 19 nt, Artificial Sequence
  Description of Artificial Sequence: Synthetic oligonucleotide
  Antisense strand to SEQ ID NO: 1717537
acuaucaaacucaagagag

SEQ ID NO: 1717539 - RNA, 19 nt, Artificial Sequence
  Description of Artificial Sequence: Synthetic oligonucleotide
  Sense strand starting at position 3116 of SEQ ID NO: 1562041
ucuugaguuugauaguaaa

SEQ ID NO: 1717540 - RNA, 19 nt, Artificial Sequence
  Description of Artificial Sequence: Synthetic oligonucleotide
  Antisense strand to SEQ ID NO: 1717539
uuuacuaucaaacucaaga

SEQ ID NO: 1717541 - RNA, 19 nt, Artificial Sequence
  Description of Artificial Sequence: Synthetic oligonucleotide
  Sense strand starting at position 3119 of SEQ ID NO: 1562041
ugaguuugauaguaaauac

SEQ ID NO: 1717542 - RNA, 19 nt, Artificial Sequence
  Description of Artificial Sequence: Synthetic oligonucleotide
  Antisense strand to SEQ ID NO: 1717541
guauuuacuaucaaacuca

SEQ ID NO: 1717543 - RNA, 19 nt, Artificial Sequence
  Description of Artificial Sequence: Synthetic oligonucleotide
  Sense strand starting at position 3141 of SEQ ID NO: 1562041
uaaaucuuggagcggcaau

SEQ ID NO: 1717544 - RNA, 19 nt, Artificial Sequence
  Description of Artificial Sequence: Synthetic oligonucleotide
  Antisense strand to SEQ ID NO: 1717543
auugccgcuccaagauuua

SEQ ID NO: 1717545 - RNA, 19 nt, Artificial Sequence
  Description of Artificial Sequence: Synthetic oligonucleotide
  Sense strand starting at position 3171 of SEQ ID NO: 1562041
uaagguuauugauaagguu

SEQ ID NO: 1717546 - RNA, 19 nt, Artificial Sequence
  Description of Artificial Sequence: Synthetic oligonucleotide
  Antisense strand to SEQ ID NO: 1717545
aaccuuaucaauaaccuua

SEQ ID NO: 1717547 - RNA, 19 nt, Artificial Sequence
  Description of Artificial Sequence: Synthetic oligonucleotide
  Sense strand starting at position 3214 of SEQ ID NO: 1562041
uggguugucucauugacuc

SEQ ID NO: 1717548 - RNA, 19 nt, Artificial Sequence
  Description of Artificial Sequence: Synthetic oligonucleotide
  Antisense strand to SEQ ID NO: 1717547
gagucaaugagacaaccca

SEQ ID NO: 1717549 - RNA, 19 nt, Artificial Sequence
  Description of Artificial Sequence: Synthetic oligonucleotide
  Sense strand starting at position 3315 of SEQ ID NO: 1562041
gggucacgugguugggaau

SEQ ID NO: 1717550 - RNA, 19 nt, Artificial Sequence
  Description of Artificial Sequence: Synthetic oligonucleotide
  Antisense strand to SEQ ID NO: 1717549
auucccaaccacgugaccc

SEQ ID NO: 1717551 - RNA, 19 nt, Artificial Sequence
  Description of Artificial Sequence: Synthetic oligonucleotide
  Sense strand starting at position 3322 of SEQ ID NO: 1562041
gugguugggaauuguagag

SEQ ID NO: 1717552 - RNA, 19 nt, Artificial Sequence
  Description of Artificial Sequence: Synthetic oligonucleotide
  Antisense strand to SEQ ID NO: 1717551
cucuacaauucccaaccac

SEQ ID NO: 1717553 - RNA, 19 nt, Artificial Sequence
  Description of Artificial Sequence: Synthetic oligonucleotide
  Sense strand starting at position 3768 of SEQ ID NO: 1562041
gcgaaaccuauugggaacu

SEQ ID NO: 1717554 - RNA, 19 nt, Artificial Sequence
  Description of Artificial Sequence: Synthetic oligonucleotide
  Antisense strand to SEQ ID NO: 1717553
aguucccaauagguuucgc

SEQ ID NO: 1717555 - RNA, 19 nt, Artificial Sequence
  Description of Artificial Sequence: Synthetic oligonucleotide
  Sense strand starting at position 3890 of SEQ ID NO: 1562041
gccaaauagguuggagacu

SEQ ID NO: 1717556 - RNA, 19 nt, Artificial Sequence
  Description of Artificial Sequence: Synthetic oligonucleotide
  Antisense strand to SEQ ID NO: 1717555
agucuccaaccuauuuggc

SEQ ID NO: 1717557 - RNA, 19 nt, Artificial Sequence
  Description of Artificial Sequence: Synthetic oligonucleotide
  Sense strand starting at position 4 of SEQ ID NO: 1562042
ucagcauccgcaugaaacu

SEQ ID NO: 1717558 - RNA, 19 nt, Artificial Sequence
  Description of Artificial Sequence: Synthetic oligonucleotide
  Antisense strand to SEQ ID NO: 1717557
aguuucaugcggaugcuga

SEQ ID NO: 1717559 - RNA, 19 nt, Artificial Sequence
  Description of Artificial Sequence: Synthetic oligonucleotide
  Sense strand starting at position 13 of SEQ ID NO: 1562042
gcaugaaacuaccuagaac

SEQ ID NO: 1717560 - RNA, 19 nt, Artificial Sequence
  Description of Artificial Sequence: Synthetic oligonucleotide
  Antisense strand to SEQ ID NO: 1717559
guucuagguaguuucaugc

SEQ ID NO: 1717561 - RNA, 19 nt, Artificial Sequence
  Description of Artificial Sequence: Synthetic oligonucleotide
  Sense strand starting at position 50 of SEQ ID NO: 1562042
aucagcaauuucuucguaa

SEQ ID NO: 1717562 - RNA, 19 nt, Artificial Sequence
  Description of Artificial Sequence: Synthetic oligonucleotide
  Antisense strand to SEQ ID NO: 1717561
uuacgaagaaauugcugau

SEQ ID NO: 1717563 - RNA, 19 nt, Artificial Sequence
  Description of Artificial Sequence: Synthetic oligonucleotide
  Sense strand starting at position 51 of SEQ ID NO: 1562042
ucagcaauuucuucguaaa

SEQ ID NO: 1717564 - RNA, 19 nt, Artificial Sequence
  Description of Artificial Sequence: Synthetic oligonucleotide
  Antisense strand to SEQ ID NO: 1717563
uuuacgaagaaauugcuga

SEQ ID NO: 1717565 - RNA, 19 nt, Artificial Sequence
  Description of Artificial Sequence: Synthetic oligonucleotide
  Sense strand starting at position 284 of SEQ ID NO: 1562042
gggaucaaaucagauuaug

SEQ ID NO: 1717566 - RNA, 19 nt, Artificial Sequence
  Description of Artificial Sequence: Synthetic oligonucleotide
  Antisense strand to SEQ ID NO: 1717565
cauaaucugauuugauccc

SEQ ID NO: 1717567 - RNA, 19 nt, Artificial Sequence
  Description of Artificial Sequence: Synthetic oligonucleotide
  Sense strand starting at position 375 of SEQ ID NO: 1562042
cgaggaguuacguacacug

SEQ ID NO: 1717568 - RNA, 19 nt, Artificial Sequence
  Description of Artificial Sequence: Synthetic oligonucleotide
  Antisense strand to SEQ ID NO: 1717567
caguguacguaacuccucg

SEQ ID NO: 1717569 - RNA, 19 nt, Artificial Sequence
  Description of Artificial Sequence: Synthetic oligonucleotide
  Sense strand starting at position 377 of SEQ ID NO: 1562042
aggaguuacguacacugaa

SEQ ID NO: 1717570 - RNA, 19 nt, Artificial Sequence
  Description of Artificial Sequence: Synthetic oligonucleotide
  Antisense strand to SEQ ID NO: 1717569
uucaguguacguaacuccu

SEQ ID NO: 1717571 - RNA, 19 nt, Artificial Sequence
  Description of Artificial Sequence: Synthetic oligonucleotide
  Sense strand starting at position 412 of SEQ ID NO: 1562042
acuaccuguuacgcugaaa

SEQ ID NO: 1717572 - RNA, 19 nt, Artificial Sequence
  Description of Artificial Sequence: Synthetic oligonucleotide
  Antisense strand to SEQ ID NO: 1717571
uuucagcguaacagguagu

SEQ ID NO: 1717573 - RNA, 19 nt, Artificial Sequence
  Description of Artificial Sequence: Synthetic oligonucleotide
  Sense strand starting at position 461 of SEQ ID NO: 1562042
gagccaaauggcugaguga

SEQ ID NO: 1717574 - RNA, 19 nt, Artificial Sequence
  Description of Artificial Sequence: Synthetic oligonucleotide
  Antisense strand to SEQ ID NO: 1717573
ucacucagccauuuggcuc

SEQ ID NO: 1717575 - RNA, 19 nt, Artificial Sequence
  Description of Artificial Sequence: Synthetic oligonucleotide
  Sense strand starting at position 464 of SEQ ID NO: 1562042
ccaaauggcugagugacau

SEQ ID NO: 1717576 - RNA, 19 nt, Artificial Sequence
  Description of Artificial Sequence: Synthetic oligonucleotide
  Antisense strand to SEQ ID NO: 1717575
augucacucagccauuugg

SEQ ID NO: 1717577 - RNA, 19 nt, Artificial Sequence
  Description of Artificial Sequence: Synthetic oligonucleotide
  Sense strand starting at position 474 of SEQ ID NO: 1562042
gagugacauccuugcuaac

SEQ ID NO: 1717578 - RNA, 19 nt, Artificial Sequence
  Description of Artificial Sequence: Synthetic oligonucleotide
  Antisense strand to SEQ ID NO: 1717577
guuagcaaggaugucacuc

SEQ ID NO: 1717579 - RNA, 19 nt, Artificial Sequence
  Description of Artificial Sequence: Synthetic oligonucleotide
  Sense strand starting at position 476 of SEQ ID NO: 1562042
gugacauccuugcuaacaa

SEQ ID NO: 1717580 - RNA, 19 nt, Artificial Sequence
  Description of Artificial Sequence: Synthetic oligonucleotide
  Antisense strand to SEQ ID NO: 1717579
uuguuagcaaggaugucac

SEQ ID NO: 1717581 - RNA, 19 nt, Artificial Sequence
  Description of Artificial Sequence: Synthetic oligonucleotide
  Sense strand starting at position 537 of SEQ ID NO: 1562042
auuugaguuuccucagcuu

SEQ ID NO: 1717582 - RNA, 19 nt, Artificial Sequence
  Description of Artificial Sequence: Synthetic oligonucleotide
  Antisense strand to SEQ ID NO: 1717581
aagcugaggaaacucaaau

SEQ ID NO: 1717583 - RNA, 19 nt, Artificial Sequence
  Description of Artificial Sequence: Synthetic oligonucleotide
  Sense strand starting at position 666 of SEQ ID NO: 1562042
ugcagagguacuugaaaca

SEQ ID NO: 1717584 - RNA, 19 nt, Artificial Sequence
  Description of Artificial Sequence: Synthetic oligonucleotide
  Antisense strand to SEQ ID NO: 1717583
uguuucaaguaccucugca

SEQ ID NO: 1717585 - RNA, 19 nt, Artificial Sequence
  Description of Artificial Sequence: Synthetic oligonucleotide
  Sense strand starting at position 682 of SEQ ID NO: 1562042
acaccaguuggcuguauga

SEQ ID NO: 1717586 - RNA, 19 nt, Artificial Sequence
  Description of Artificial Sequence: Synthetic oligonucleotide
  Antisense strand to SEQ ID NO: 1717585
ucauacagccaacuggugu

SEQ ID NO: 1717587 - RNA, 19 nt, Artificial Sequence
  Description of Artificial Sequence: Synthetic oligonucleotide
  Sense strand starting at position 684 of SEQ ID NO: 1562042
accaguuggcuguaugaac

SEQ ID NO: 1717588 - RNA, 19 nt, Artificial Sequence
  Description of Artificial Sequence: Synthetic oligonucleotide
  Antisense strand to SEQ ID NO: 1717587
guucauacagccaacuggu

SEQ ID NO: 1717589 - RNA, 19 nt, Artificial Sequence
  Description of Artificial Sequence: Synthetic oligonucleotide
  Sense strand starting at position 691 of SEQ ID NO: 1562042
ggcuguaugaacgaacaaa

SEQ ID NO: 1717590 - RNA, 19 nt, Artificial Sequence
  Description of Artificial Sequence: Synthetic oligonucleotide
  Antisense strand to SEQ ID NO: 1717589
uuuguucguucauacagcc

SEQ ID NO: 1717591 - RNA, 19 nt, Artificial Sequence
  Description of Artificial Sequence: Synthetic oligonucleotide
  Sense strand starting at position 930 of SEQ ID NO: 1562042
agagaacauuucugccauu

SEQ ID NO: 1717592 - RNA, 19 nt, Artificial Sequence
  Description of Artificial Sequence: Synthetic oligonucleotide
  Antisense strand to SEQ ID NO: 1717591
aauggcagaaauguucucu

SEQ ID NO: 1717593 - RNA, 19 nt, Artificial Sequence
  Description of Artificial Sequence: Synthetic oligonucleotide
  Sense strand starting at position 942 of SEQ ID NO: 1562042
ugccauuagggaugaacuu

SEQ ID NO: 1717594 - RNA, 19 nt, Artificial Sequence
  Description of Artificial Sequence: Synthetic oligonucleotide
  Antisense strand to SEQ ID NO: 1717593
aaguucaucccuaauggca

SEQ ID NO: 1717595 - RNA, 19 nt, Artificial Sequence
  Description of Artificial Sequence: Synthetic oligonucleotide
  Sense strand starting at position 969 of SEQ ID NO: 1562042
gaacaugguaggugagaau

SEQ ID NO: 1717596 - RNA, 19 nt, Artificial Sequence
  Description of Artificial Sequence: Synthetic oligonucleotide
  Antisense strand to SEQ ID NO: 1717595
auucucaccuaccauguuc

SEQ ID NO: 1717597 - RNA, 19 nt, Artificial Sequence
  Description of Artificial Sequence: Synthetic oligonucleotide
  Sense strand starting at position 979 of SEQ ID NO: 1562042
ggugagaaucguucguguu

SEQ ID NO: 1717598 - RNA, 19 nt, Artificial Sequence
  Description of Artificial Sequence: Synthetic oligonucleotide
  Antisense strand to SEQ ID NO: 1717597
aacacgaacgauucucacc

SEQ ID NO: 1717599 - RNA, 19 nt, Artificial Sequence
  Description of Artificial Sequence: Synthetic oligonucleotide
  Sense strand starting at position 983 of SEQ ID NO: 1562042
agaaucguucguguuaguc

SEQ ID NO: 1717600 - RNA, 19 nt, Artificial Sequence
  Description of Artificial Sequence: Synthetic oligonucleotide
  Antisense strand to SEQ ID NO: 1717599
gacuaacacgaacgauucu

SEQ ID NO: 1717601 - RNA, 19 nt, Artificial Sequence
  Description of Artificial Sequence: Synthetic oligonucleotide
  Sense strand starting at position 1053 of SEQ ID NO: 1562042
ggcacagucaucuguggga

SEQ ID NO: 1717602 - RNA, 19 nt, Artificial Sequence
  Description of Artificial Sequence: Synthetic oligonucleotide
  Antisense strand to SEQ ID NO: 1717601
ucccacagaugacugugcc

SEQ ID NO: 1717603 - RNA, 19 nt, Artificial Sequence
  Description of Artificial Sequence: Synthetic oligonucleotide
  Sense strand starting at position 1230 of SEQ ID NO: 1562042
acagcuaccuccguuugaa

SEQ ID NO: 1717604 - RNA, 19 nt, Artificial Sequence
  Description of Artificial Sequence: Synthetic oligonucleotide
  Antisense strand to SEQ ID NO: 1717603
uucaaacggagguagcugu

SEQ ID NO: 1717605 - RNA, 19 nt, Artificial Sequence
  Description of Artificial Sequence: Synthetic oligonucleotide
  Sense strand starting at position 1531 of SEQ ID NO: 1562042
ccagaaugcuggcuccaag

SEQ ID NO: 1717606 - RNA, 19 nt, Artificial Sequence
  Description of Artificial Sequence: Synthetic oligonucleotide
  Antisense strand to SEQ ID NO: 1717605
cuuggagccagcauucugg

SEQ ID NO: 1717607 - RNA, 19 nt, Artificial Sequence
  Description of Artificial Sequence: Synthetic oligonucleotide
  Sense strand starting at position 1565 of SEQ ID NO: 1562042
cuggauucuucccuuaaug

SEQ ID NO: 1717608 - RNA, 19 nt, Artificial Sequence
  Description of Artificial Sequence: Synthetic oligonucleotide
  Antisense strand to SEQ ID NO: 1717607
cauuaagggaagaauccag

SEQ ID NO: 1717609 - RNA, 19 nt, Artificial Sequence
  Description of Artificial Sequence: Synthetic oligonucleotide
  Sense strand starting at position 1567 of SEQ ID NO: 1562042
ggauucuucccuuaaugca

SEQ ID NO: 1717610 - RNA, 19 nt, Artificial Sequence
  Description of Artificial Sequence: Synthetic oligonucleotide
  Antisense strand to SEQ ID NO: 1717609
ugcauuaagggaagaaucc

SEQ ID NO: 1717611 - RNA, 19 nt, Artificial Sequence
  Description of Artificial Sequence: Synthetic oligonucleotide
  Sense strand starting at position 1633 of SEQ ID NO: 1562042
auacuacuugccuggagaa

SEQ ID NO: 1717612 - RNA, 19 nt, Artificial Sequence
  Description of Artificial Sequence: Synthetic oligonucleotide
  Antisense strand to SEQ ID NO: 1717611
uucuccaggcaaguaguau

SEQ ID NO: 1717613 - RNA, 19 nt, Artificial Sequence
  Description of Artificial Sequence: Synthetic oligonucleotide
  Sense strand starting at position 1635 of SEQ ID NO: 1562042
acuacuugccuggagaagu

SEQ ID NO: 1717614 - RNA, 19 nt, Artificial Sequence
  Description of Artificial Sequence: Synthetic oligonucleotide
  Antisense strand to SEQ ID NO: 1717613
acuucuccaggcaaguagu

SEQ ID NO: 1717615 - RNA, 19 nt, Artificial Sequence
  Description of Artificial Sequence: Synthetic oligonucleotide
  Sense strand starting at position 2900 of SEQ ID NO: 1562042
gucaaucaauccgcaacua

SEQ ID NO: 1717616 - RNA, 19 nt, Artificial Sequence
  Description of Artificial Sequence: Synthetic oligonucleotide
  Antisense strand to SEQ ID NO: 1717615
uaguugcggauugauugac

SEQ ID NO: 1717617 - RNA, 19 nt, Artificial Sequence
  Description of Artificial Sequence: Synthetic oligonucleotide
  Sense strand starting at position 2992 of SEQ ID NO: 1562042
agauucugauugcuuccaa

SEQ ID NO: 1717618 - RNA, 19 nt, Artificial Sequence
  Description of Artificial Sequence: Synthetic oligonucleotide
  Antisense strand to SEQ ID NO: 1717617
uuggaagcaaucagaaucu

SEQ ID NO: 1717619 - RNA, 19 nt, Artificial Sequence
  Description of Artificial Sequence: Synthetic oligonucleotide
  Sense strand starting at position 3188 of SEQ ID NO: 1562042
ggcuguuccuaauuagggu

SEQ ID NO: 1717620 - RNA, 19 nt, Artificial Sequence
  Description of Artificial Sequence: Synthetic oligonucleotide
  Antisense strand to SEQ ID NO: 1717619
acccuaauuaggaacagcc

SEQ ID NO: 1717621 - RNA, 19 nt, Artificial Sequence
  Description of Artificial Sequence: Synthetic oligonucleotide
  Sense strand starting at position 3209 of SEQ ID NO: 1562042
agugaaaucauacgugaac

SEQ ID NO: 1717622 - RNA, 19 nt, Artificial Sequence
  Description of Artificial Sequence: Synthetic oligonucleotide
  Antisense strand to SEQ ID NO: 1717621
guucacguaugauuucacu

SEQ ID NO: 1717623 - RNA, 19 nt, Artificial Sequence
  Description of Artificial Sequence: Synthetic oligonucleotide
  Sense strand starting at position 3210 of SEQ ID NO: 1562042
gugaaaucauacgugaacu

SEQ ID NO: 1717624 - RNA, 19 nt, Artificial Sequence
  Description of Artificial Sequence: Synthetic oligonucleotide
  Antisense strand to SEQ ID NO: 1717623
aguucacguaugauuucac

SEQ ID NO: 1717625 - RNA, 19 nt, Artificial Sequence
  Description of Artificial Sequence: Synthetic oligonucleotide
  Sense strand starting at position 3238 of SEQ ID NO: 1562042
aauagaacugucuguagaa

SEQ ID NO: 1717626 - RNA, 19 nt, Artificial Sequence
  Description of Artificial Sequence: Synthetic oligonucleotide
  Antisense strand to SEQ ID NO: 1717625
uucuacagacaguucuauu

SEQ ID NO: 1717627 - RNA, 19 nt, Artificial Sequence
  Description of Artificial Sequence: Synthetic oligonucleotide
  Sense strand starting at position 3239 of SEQ ID NO: 1562042
auagaacugucuguagaaa

SEQ ID NO: 1717628 - RNA, 19 nt, Artificial Sequence
  Description of Artificial Sequence: Synthetic oligonucleotide
  Antisense strand to SEQ ID NO: 1717627
uuucuacagacaguucuau

SEQ ID NO: 1717629 - RNA, 19 nt, Artificial Sequence
  Description of Artificial Sequence: Synthetic oligonucleotide
  Sense strand starting at position 3305 of SEQ ID NO: 1562042
guugguuguuuccucccaa

SEQ ID NO: 1717630 - RNA, 19 nt, Artificial Sequence
  Description of Artificial Sequence: Synthetic oligonucleotide
  Antisense strand to SEQ ID NO: 1717629
uugggaggaaacaaccaac

SEQ ID NO: 1717631 - RNA, 19 nt, Artificial Sequence
  Description of Artificial Sequence: Synthetic oligonucleotide
  Sense strand starting at position 3566 of SEQ ID NO: 1562042
ggccgugaaccagaguuaa

SEQ ID NO: 1717632 - RNA, 19 nt, Artificial Sequence
  Description of Artificial Sequence: Synthetic oligonucleotide
  Antisense strand to SEQ ID NO: 1717631
uuaacucugguucacggcc

SEQ ID NO: 1717633 - RNA, 19 nt, Artificial Sequence
  Description of Artificial Sequence: Synthetic oligonucleotide
  Sense strand starting at position 3789 of SEQ ID NO: 1562042
ugagcaucacccuaugcua

SEQ ID NO: 1717634 - RNA, 19 nt, Artificial Sequence
  Description of Artificial Sequence: Synthetic oligonucleotide
  Antisense strand to SEQ ID NO: 1717633
uagcauagggugaugcuca

SEQ ID NO: 1717635 - RNA, 19 nt, Artificial Sequence
  Description of Artificial Sequence: Synthetic oligonucleotide
  Sense strand starting at position 3858 of SEQ ID NO: 1562042
uagguauugugauuaucuc

SEQ ID NO: 1717636 - RNA, 19 nt, Artificial Sequence
  Description of Artificial Sequence: Synthetic oligonucleotide
  Antisense strand to SEQ ID NO: 1717635
gagauaaucacaauaccua

SEQ ID NO: 1717637 - RNA, 19 nt, Artificial Sequence
  Description of Artificial Sequence: Synthetic oligonucleotide
  Sense strand starting at position 1 of SEQ ID NO: 1562043
gagugacauccuugcuaac

SEQ ID NO: 1717638 - RNA, 19 nt, Artificial Sequence
  Description of Artificial Sequence: Synthetic oligonucleotide
  Antisense strand to SEQ ID NO: 1717637
guuagcaaggaugucacuc

SEQ ID NO: 1717639 - RNA, 19 nt, Artificial Sequence
  Description of Artificial Sequence: Synthetic oligonucleotide
  Sense strand starting at position 3 of SEQ ID NO: 1562043
gugacauccuugcuaacaa

SEQ ID NO: 1717640 - RNA, 19 nt, Artificial Sequence
  Description of Artificial Sequence: Synthetic oligonucleotide
  Antisense strand to SEQ ID NO: 1717639
uuguuagcaaggaugucac

SEQ ID NO: 1717641 - RNA, 19 nt, Artificial Sequence
  Description of Artificial Sequence: Synthetic oligonucleotide
  Sense strand starting at position 64 of SEQ ID NO: 1562043
auuugaguuuccucagcuu

SEQ ID NO: 1717642 - RNA, 19 nt, Artificial Sequence
  Description of Artificial Sequence: Synthetic oligonucleotide
  Antisense strand to SEQ ID NO: 1717641
aagcugaggaaacucaaau

SEQ ID NO: 1717643 - RNA, 19 nt, Artificial Sequence
  Description of Artificial Sequence: Synthetic oligonucleotide
  Sense strand starting at position 193 of SEQ ID NO: 1562043
ugcagagguacuugaaaca

SEQ ID NO: 1717644 - RNA, 19 nt, Artificial Sequence
  Description of Artificial Sequence: Synthetic oligonucleotide
  Antisense strand to SEQ ID NO: 1717643
uguuucaaguaccucugca

SEQ ID NO: 1717645 - RNA, 19 nt, Artificial Sequence
  Description of Artificial Sequence: Synthetic oligonucleotide
  Sense strand starting at position 209 of SEQ ID NO: 1562043
acaccaguuggcuguauga

SEQ ID NO: 1717646 - RNA, 19 nt, Artificial Sequence
  Description of Artificial Sequence: Synthetic oligonucleotide
  Antisense strand to SEQ ID NO: 1717645
ucauacagccaacuggugu

SEQ ID NO: 1717647 - RNA, 19 nt, Artificial Sequence
  Description of Artificial Sequence: Synthetic oligonucleotide
  Sense strand starting at position 211 of SEQ ID NO: 1562043
accaguuggcuguaugaac

SEQ ID NO: 1717648 - RNA, 19 nt, Artificial Sequence
  Description of Artificial Sequence: Synthetic oligonucleotide
  Antisense strand to SEQ ID NO: 1717647
guucauacagccaacuggu

SEQ ID NO: 1717649 - RNA, 19 nt, Artificial Sequence
  Description of Artificial Sequence: Synthetic oligonucleotide
  Sense strand starting at position 218 of SEQ ID NO: 1562043
ggcuguaugaacgaacaaa

SEQ ID NO: 1717650 - RNA, 19 nt, Artificial Sequence
  Description of Artificial Sequence: Synthetic oligonucleotide
  Antisense strand to SEQ ID NO: 1717649
uuuguucguucauacagcc

SEQ ID NO: 1717651 - RNA, 19 nt, Artificial Sequence
  Description of Artificial Sequence: Synthetic oligonucleotide
  Sense strand starting at position 457 of SEQ ID NO: 1562043
agagaacauuucugccauu

SEQ ID NO: 1717652 - RNA, 19 nt, Artificial Sequence
  Description of Artificial Sequence: Synthetic oligonucleotide
  Antisense strand to SEQ ID NO: 1717651
aauggcagaaauguucucu

SEQ ID NO: 1717653 - RNA, 19 nt, Artificial Sequence
  Description of Artificial Sequence: Synthetic oligonucleotide
  Sense strand starting at position 469 of SEQ ID NO: 1562043
ugccauuagggaugaacuu

SEQ ID NO: 1717654 - RNA, 19 nt, Artificial Sequence
  Description of Artificial Sequence: Synthetic oligonucleotide
  Antisense strand to SEQ ID NO: 1717653
aaguucaucccuaauggca

SEQ ID NO: 1717655 - RNA, 19 nt, Artificial Sequence
  Description of Artificial Sequence: Synthetic oligonucleotide
  Sense strand starting at position 496 of SEQ ID NO: 1562043
gaacaugguaggugagaau

SEQ ID NO: 1717656 - RNA, 19 nt, Artificial Sequence
  Description of Artificial Sequence: Synthetic oligonucleotide
  Antisense strand to SEQ ID NO: 1717655
auucucaccuaccauguuc

SEQ ID NO: 1717657 - RNA, 19 nt, Artificial Sequence
  Description of Artificial Sequence: Synthetic oligonucleotide
  Sense strand starting at position 505 of SEQ ID NO: 1562043
aggugagaaucguucgugu

SEQ ID NO: 1717658 - RNA, 19 nt, Artificial Sequence
  Description of Artificial Sequence: Synthetic oligonucleotide
  Antisense strand to SEQ ID NO: 1717657
acacgaacgauucucaccu

SEQ ID NO: 1717659 - RNA, 19 nt, Artificial Sequence
  Description of Artificial Sequence: Synthetic oligonucleotide
  Sense strand starting at position 506 of SEQ ID NO: 1562043
ggugagaaucguucguguu

SEQ ID NO: 1717660 - RNA, 19 nt, Artificial Sequence
  Description of Artificial Sequence: Synthetic oligonucleotide
  Antisense strand to SEQ ID NO: 1717659
aacacgaacgauucucacc

SEQ ID NO: 1717661 - RNA, 19 nt, Artificial Sequence
  Description of Artificial Sequence: Synthetic oligonucleotide
  Sense strand starting at position 508 of SEQ ID NO: 1562043
ugagaaucguucguguuag

SEQ ID NO: 1717662 - RNA, 19 nt, Artificial Sequence
  Description of Artificial Sequence: Synthetic oligonucleotide
  Antisense strand to SEQ ID NO: 1717661
cuaacacgaacgauucuca

SEQ ID NO: 1717663 - RNA, 19 nt, Artificial Sequence
  Description of Artificial Sequence: Synthetic oligonucleotide
  Sense strand starting at position 510 of SEQ ID NO: 1562043
agaaucguucguguuaguc

SEQ ID NO: 1717664 - RNA, 19 nt, Artificial Sequence
  Description of Artificial Sequence: Synthetic oligonucleotide
  Antisense strand to SEQ ID NO: 1717663
gacuaacacgaacgauucu

SEQ ID NO: 1717665 - RNA, 19 nt, Artificial Sequence
  Description of Artificial Sequence: Synthetic oligonucleotide
  Sense strand starting at position 580 of SEQ ID NO: 1562043
ggcacagucaucuguggga

SEQ ID NO: 1717666 - RNA, 19 nt, Artificial Sequence
  Description of Artificial Sequence: Synthetic oligonucleotide
  Antisense strand to SEQ ID NO: 1717665
ucccacagaugacugugcc

SEQ ID NO: 1717667 - RNA, 19 nt, Artificial Sequence
  Description of Artificial Sequence: Synthetic oligonucleotide
  Sense strand starting at position 757 of SEQ ID NO: 1562043
acagcuaccuccguuugaa

SEQ ID NO: 1717668 - RNA, 19 nt, Artificial Sequence
  Description of Artificial Sequence: Synthetic oligonucleotide
  Antisense strand to SEQ ID NO: 1717667
uucaaacggagguagcugu

SEQ ID NO: 1717669 - RNA, 19 nt, Artificial Sequence
  Description of Artificial Sequence: Synthetic oligonucleotide
  Sense strand starting at position 760 of SEQ ID NO: 1562043
gcuaccuccguuugaaucu

SEQ ID NO: 1717670 - RNA, 19 nt, Artificial Sequence
  Description of Artificial Sequence: Synthetic oligonucleotide
  Antisense strand to SEQ ID NO: 1717669
agauucaaacggagguagc

SEQ ID NO: 1717671 - RNA, 19 nt, Artificial Sequence
  Description of Artificial Sequence: Synthetic oligonucleotide
  Sense strand starting at position 839 of SEQ ID NO: 1562043
auuugaacuugccauguuu

SEQ ID NO: 1717672 - RNA, 19 nt, Artificial Sequence
  Description of Artificial Sequence: Synthetic oligonucleotide
  Antisense strand to SEQ ID NO: 1717671
aaacauggcaaguucaaau

SEQ ID NO: 1717673 - RNA, 19 nt, Artificial Sequence
  Description of Artificial Sequence: Synthetic oligonucleotide
  Sense strand starting at position 1020 of SEQ ID NO: 1562043
ccuggaauuucuuguuuac

SEQ ID NO: 1717674 - RNA, 19 nt, Artificial Sequence
  Description of Artificial Sequence: Synthetic oligonucleotide
  Antisense strand to SEQ ID NO: 1717673
guaaacaagaaauuccagg

SEQ ID NO: 1717675 - RNA, 19 nt, Artificial Sequence
  Description of Artificial Sequence: Synthetic oligonucleotide
  Sense strand starting at position 1058 of SEQ ID NO: 1562043
ccagaaugcuggcuccaag

SEQ ID NO: 1717676 - RNA, 19 nt, Artificial Sequence
  Description of Artificial Sequence: Synthetic oligonucleotide
  Antisense strand to SEQ ID NO: 1717675
cuuggagccagcauucugg

SEQ ID NO: 1717677 - RNA, 19 nt, Artificial Sequence
  Description of Artificial Sequence: Synthetic oligonucleotide
  Sense strand starting at position 1092 of SEQ ID NO: 1562043
cuggauucuucccuuaaug

SEQ ID NO: 1717678 - RNA, 19 nt, Artificial Sequence
  Description of Artificial Sequence: Synthetic oligonucleotide
  Antisense strand to SEQ ID NO: 1717677
cauuaagggaagaauccag

SEQ ID NO: 1717679 - RNA, 19 nt, Artificial Sequence
  Description of Artificial Sequence: Synthetic oligonucleotide
  Sense strand starting at position 1094 of SEQ ID NO: 1562043
ggauucuucccuuaaugca

SEQ ID NO: 1717680 - RNA, 19 nt, Artificial Sequence
  Description of Artificial Sequence: Synthetic oligonucleotide
  Antisense strand to SEQ ID NO: 1717679
ugcauuaagggaagaaucc

SEQ ID NO: 1717681 - RNA, 19 nt, Artificial Sequence
  Description of Artificial Sequence: Synthetic oligonucleotide
  Sense strand starting at position 1146 of SEQ ID NO: 1562043
gcggcugguguuuaauacu

SEQ ID NO: 1717682 - RNA, 19 nt, Artificial Sequence
  Description of Artificial Sequence: Synthetic oligonucleotide
  Antisense strand to SEQ ID NO: 1717681
aguauuaaacaccagccgc

SEQ ID NO: 1717683 - RNA, 19 nt, Artificial Sequence
  Description of Artificial Sequence: Synthetic oligonucleotide
  Sense strand starting at position 1160 of SEQ ID NO: 1562043
auacuacuugccuggagaa

SEQ ID NO: 1717684 - RNA, 19 nt, Artificial Sequence
  Description of Artificial Sequence: Synthetic oligonucleotide
  Antisense strand to SEQ ID NO: 1717683
uucuccaggcaaguaguau

SEQ ID NO: 1717685 - RNA, 19 nt, Artificial Sequence
  Description of Artificial Sequence: Synthetic oligonucleotide
  Sense strand starting at position 1162 of SEQ ID NO: 1562043
acuacuugccuggagaagu

SEQ ID NO: 1717686 - RNA, 19 nt, Artificial Sequence
  Description of Artificial Sequence: Synthetic oligonucleotide
  Antisense strand to SEQ ID NO: 1717685
acuucuccaggcaaguagu

SEQ ID NO: 1717687 - RNA, 19 nt, Artificial Sequence
  Description of Artificial Sequence: Synthetic oligonucleotide
  Sense strand starting at position 2427 of SEQ ID NO: 1562043
gucaaucaauccgcaacua

SEQ ID NO: 1717688 - RNA, 19 nt, Artificial Sequence
  Description of Artificial Sequence: Synthetic oligonucleotide
  Antisense strand to SEQ ID NO: 1717687
uaguugcggauugauugac

SEQ ID NO: 1717689 - RNA, 19 nt, Artificial Sequence
  Description of Artificial Sequence: Synthetic oligonucleotide
  Sense strand starting at position 2519 of SEQ ID NO: 1562043
agauucugauugcuuccaa

SEQ ID NO: 1717690 - RNA, 19 nt, Artificial Sequence
  Description of Artificial Sequence: Synthetic oligonucleotide
  Antisense strand to SEQ ID NO: 1717689
uuggaagcaaucagaaucu

SEQ ID NO: 1717691 - RNA, 19 nt, Artificial Sequence
  Description of Artificial Sequence: Synthetic oligonucleotide
  Sense strand starting at position 2715 of SEQ ID NO: 1562043
ggcuguuccuaauuagggu

SEQ ID NO: 1717692 - RNA, 19 nt, Artificial Sequence
  Description of Artificial Sequence: Synthetic oligonucleotide
  Antisense strand to SEQ ID NO: 1717691
acccuaauuaggaacagcc

SEQ ID NO: 1717693 - RNA, 19 nt, Artificial Sequence
  Description of Artificial Sequence: Synthetic oligonucleotide
  Sense strand starting at position 2736 of SEQ ID NO: 1562043
agugaaaucauacgugaac

SEQ ID NO: 1717694 - RNA, 19 nt, Artificial Sequence
  Description of Artificial Sequence: Synthetic oligonucleotide
  Antisense strand to SEQ ID NO: 1717693
guucacguaugauuucacu

SEQ ID NO: 1717695 - RNA, 19 nt, Artificial Sequence
  Description of Artificial Sequence: Synthetic oligonucleotide
  Sense strand starting at position 2737 of SEQ ID NO: 1562043
gugaaaucauacgugaacu

SEQ ID NO: 1717696 - RNA, 19 nt, Artificial Sequence
  Description of Artificial Sequence: Synthetic oligonucleotide
  Antisense strand to SEQ ID NO: 1717695
aguucacguaugauuucac

SEQ ID NO: 1717697 - RNA, 19 nt, Artificial Sequence
  Description of Artificial Sequence: Synthetic oligonucleotide
  Sense strand starting at position 2765 of SEQ ID NO: 1562043
aauagaacugucuguagaa

SEQ ID NO: 1717698 - RNA, 19 nt, Artificial Sequence
  Description of Artificial Sequence: Synthetic oligonucleotide
  Antisense strand to SEQ ID NO: 1717697
uucuacagacaguucuauu

SEQ ID NO: 1717699 - RNA, 19 nt, Artificial Sequence
  Description of Artificial Sequence: Synthetic oligonucleotide
  Sense strand starting at position 2766 of SEQ ID NO: 1562043
auagaacugucuguagaaa

SEQ ID NO: 1717700 - RNA, 19 nt, Artificial Sequence
  Description of Artificial Sequence: Synthetic oligonucleotide
  Antisense strand to SEQ ID NO: 1717699
uuucuacagacaguucuau

SEQ ID NO: 1717701 - RNA, 19 nt, Artificial Sequence
  Description of Artificial Sequence: Synthetic oligonucleotide
  Sense strand starting at position 2832 of SEQ ID NO: 1562043
guugguuguuuccucccaa

SEQ ID NO: 1717702 - RNA, 19 nt, Artificial Sequence
  Description of Artificial Sequence: Synthetic oligonucleotide
  Antisense strand to SEQ ID NO: 1717701
uugggaggaaacaaccaac

SEQ ID NO: 1717703 - RNA, 19 nt, Artificial Sequence
  Description of Artificial Sequence: Synthetic oligonucleotide
  Sense strand starting at position 2909 of SEQ ID NO: 1562043
gggauuucgugagguuaug

SEQ ID NO: 1717704 - RNA, 19 nt, Artificial Sequence
  Description of Artificial Sequence: Synthetic oligonucleotide
  Antisense strand to SEQ ID NO: 1717703
cauaaccucacgaaauccc

SEQ ID NO: 1717705 - RNA, 19 nt, Artificial Sequence
  Description of Artificial Sequence: Synthetic oligonucleotide
  Sense strand starting at position 2915 of SEQ ID NO: 1562043
ucgugagguuauguagcua

SEQ ID NO: 1717706 - RNA, 19 nt, Artificial Sequence
  Description of Artificial Sequence: Synthetic oligonucleotide
  Antisense strand to SEQ ID NO: 1717705
uagcuacauaaccucacga

SEQ ID NO: 1717707 - RNA, 19 nt, Artificial Sequence
  Description of Artificial Sequence: Synthetic oligonucleotide
  Sense strand starting at position 3093 of SEQ ID NO: 1562043
ggccgugaaccagaguuaa

SEQ ID NO: 1717708 - RNA, 19 nt, Artificial Sequence
  Description of Artificial Sequence: Synthetic oligonucleotide
  Antisense strand to SEQ ID NO: 1717707
uuaacucugguucacggcc

SEQ ID NO: 1717709 - RNA, 19 nt, Artificial Sequence
  Description of Artificial Sequence: Synthetic oligonucleotide
  Sense strand starting at position 3289 of SEQ ID NO: 1562043
agacgaugaugguaauaau

SEQ ID NO: 1717710 - RNA, 19 nt, Artificial Sequence
  Description of Artificial Sequence: Synthetic oligonucleotide
  Antisense strand to SEQ ID NO: 1717709
auuauuaccaucaucgucu

SEQ ID NO: 1717711 - RNA, 19 nt, Artificial Sequence
  Description of Artificial Sequence: Synthetic oligonucleotide
  Sense strand starting at position 3316 of SEQ ID NO: 1562043
ugagcaucacccuaugcua

SEQ ID NO: 1717712 - RNA, 19 nt, Artificial Sequence
  Description of Artificial Sequence: Synthetic oligonucleotide
  Antisense strand to SEQ ID NO: 1717711
uagcauagggugaugcuca

SEQ ID NO: 1717713 - RNA, 19 nt, Artificial Sequence
  Description of Artificial Sequence: Synthetic oligonucleotide
  Sense strand starting at position 3385 of SEQ ID NO: 1562043
uagguauugugauuaucuc

SEQ ID NO: 1717714 - RNA, 19 nt, Artificial Sequence
  Description of Artificial Sequence: Synthetic oligonucleotide
  Antisense strand to SEQ ID NO: 1717713
gagauaaucacaauaccua

SEQ ID NO: 1717715 - RNA, 19 nt, Artificial Sequence
  Description of Artificial Sequence: Synthetic oligonucleotide
  Sense strand starting at position 3436 of SEQ ID NO: 1562043
aggugauguuguguccgga

SEQ ID NO: 1717716 - RNA, 19 nt, Artificial Sequence
  Description of Artificial Sequence: Synthetic oligonucleotide
  Antisense strand to SEQ ID NO: 1717715
uccggacacaacaucaccu

SEQ ID NO: 1717717 - RNA, 19 nt, Artificial Sequence
  Description of Artificial Sequence: Synthetic oligonucleotide
  Sense strand starting at position 118 of SEQ ID NO: 1562044
gaaauaaccugaucuaggu

SEQ ID NO: 1717718 - RNA, 19 nt, Artificial Sequence
  Description of Artificial Sequence: Synthetic oligonucleotide
  Antisense strand to SEQ ID NO: 1717717
accuagaucagguuauuuc

SEQ ID NO: 1717719 - RNA, 19 nt, Artificial Sequence
  Description of Artificial Sequence: Synthetic oligonucleotide
  Sense strand starting at position 128 of SEQ ID NO: 1562044
gaucuagguuuacuugauu

SEQ ID NO: 1717720 - RNA, 19 nt, Artificial Sequence
  Description of Artificial Sequence: Synthetic oligonucleotide
  Antisense strand to SEQ ID NO: 1717719
aaucaaguaaaccuagauc

SEQ ID NO: 1717721 - RNA, 19 nt, Artificial Sequence
  Description of Artificial Sequence: Synthetic oligonucleotide
  Sense strand starting at position 290 of SEQ ID NO: 1562044
agguguuaaucagucacua

SEQ ID NO: 1717722 - RNA, 19 nt, Artificial Sequence
  Description of Artificial Sequence: Synthetic oligonucleotide
  Antisense strand to SEQ ID NO: 1717721
uagugacugauuaacaccu

SEQ ID NO: 1717723 - RNA, 19 nt, Artificial Sequence
  Description of Artificial Sequence: Synthetic oligonucleotide
  Sense strand starting at position 354 of SEQ ID NO: 1562044
gugcaugguaucuacagga

SEQ ID NO: 1717724 - RNA, 19 nt, Artificial Sequence
  Description of Artificial Sequence: Synthetic oligonucleotide
  Antisense strand to SEQ ID NO: 1717723
uccuguagauaccaugcac

SEQ ID NO: 1717725 - RNA, 19 nt, Artificial Sequence
  Description of Artificial Sequence: Synthetic oligonucleotide
  Sense strand starting at position 358 of SEQ ID NO: 1562044
augguaucuacaggaagua

SEQ ID NO: 1717726 - RNA, 19 nt, Artificial Sequence
  Description of Artificial Sequence: Synthetic oligonucleotide
  Antisense strand to SEQ ID NO: 1717725
uacuuccuguagauaccau

SEQ ID NO: 1717727 - RNA, 19 nt, Artificial Sequence
  Description of Artificial Sequence: Synthetic oligonucleotide
  Sense strand starting at position 501 of SEQ ID NO: 1562044
accucaagguaugugagau

SEQ ID NO: 1717728 - RNA, 19 nt, Artificial Sequence
  Description of Artificial Sequence: Synthetic oligonucleotide
  Antisense strand to SEQ ID NO: 1717727
aucucacauaccuugaggu

SEQ ID NO: 1717729 - RNA, 19 nt, Artificial Sequence
  Description of Artificial Sequence: Synthetic oligonucleotide
  Sense strand starting at position 502 of SEQ ID NO: 1562044
ccucaagguaugugagauu

SEQ ID NO: 1717730 - RNA, 19 nt, Artificial Sequence
  Description of Artificial Sequence: Synthetic oligonucleotide
  Antisense strand to SEQ ID NO: 1717729
aaucucacauaccuugagg

SEQ ID NO: 1717731 - RNA, 19 nt, Artificial Sequence
  Description of Artificial Sequence: Synthetic oligonucleotide
  Sense strand starting at position 786 of SEQ ID NO: 1562044
acagguaagugugucuaua

SEQ ID NO: 1717732 - RNA, 19 nt, Artificial Sequence
  Description of Artificial Sequence: Synthetic oligonucleotide
  Antisense strand to SEQ ID NO: 1717731
uauagacacacuuaccugu

SEQ ID NO: 1717733 - RNA, 19 nt, Artificial Sequence
  Description of Artificial Sequence: Synthetic oligonucleotide
  Sense strand starting at position 788 of SEQ ID NO: 1562044
agguaagugugucuauaga

SEQ ID NO: 1717734 - RNA, 19 nt, Artificial Sequence
  Description of Artificial Sequence: Synthetic oligonucleotide
  Antisense strand to SEQ ID NO: 1717733
ucuauagacacacuuaccu

SEQ ID NO: 1717735 - RNA, 19 nt, Artificial Sequence
  Description of Artificial Sequence: Synthetic oligonucleotide
  Sense strand starting at position 1044 of SEQ ID NO: 1562044
cugucaugccgguaauaaa

SEQ ID NO: 1717736 - RNA, 19 nt, Artificial Sequence
  Description of Artificial Sequence: Synthetic oligonucleotide
  Antisense strand to SEQ ID NO: 1717735
uuuauuaccggcaugacag

SEQ ID NO: 1717737 - RNA, 19 nt, Artificial Sequence
  Description of Artificial Sequence: Synthetic oligonucleotide
  Sense strand starting at position 1221 of SEQ ID NO: 1562044
cugggaucgccuggaaucu

SEQ ID NO: 1717738 - RNA, 19 nt, Artificial Sequence
  Description of Artificial Sequence: Synthetic oligonucleotide
  Antisense strand to SEQ ID NO: 1717737
agauuccaggcgaucccag

SEQ ID NO: 1717739 - RNA, 19 nt, Artificial Sequence
  Description of Artificial Sequence: Synthetic oligonucleotide
  Sense strand starting at position 1230 of SEQ ID NO: 1562044
ccuggaaucucggucuaua

SEQ ID NO: 1717740 - RNA, 19 nt, Artificial Sequence
  Description of Artificial Sequence: Synthetic oligonucleotide
  Antisense strand to SEQ ID NO: 1717739
uauagaccgagauuccagg

SEQ ID NO: 1717741 - RNA, 19 nt, Artificial Sequence
  Description of Artificial Sequence: Synthetic oligonucleotide
  Sense strand starting at position 1518 of SEQ ID NO: 1562044
gagaaucugggcuaaguuu

SEQ ID NO: 1717742 - RNA, 19 nt, Artificial Sequence
  Description of Artificial Sequence: Synthetic oligonucleotide
  Antisense strand to SEQ ID NO: 1717741
aaacuuagcccagauucuc

SEQ ID NO: 1717743 - RNA, 19 nt, Artificial Sequence
  Description of Artificial Sequence: Synthetic oligonucleotide
  Sense strand starting at position 1575 of SEQ ID NO: 1562044
ugcggcuuucuggaaacaa

SEQ ID NO: 1717744 - RNA, 19 nt, Artificial Sequence
  Description of Artificial Sequence: Synthetic oligonucleotide
  Antisense strand to SEQ ID NO: 1717743
uuguuuccagaaagccgca

SEQ ID NO: 1717745 - RNA, 19 nt, Artificial Sequence
  Description of Artificial Sequence: Synthetic oligonucleotide
  Sense strand starting at position 2383 of SEQ ID NO: 1562044
gcuccugggaaaugaaguu

SEQ ID NO: 1717746 - RNA, 19 nt, Artificial Sequence
  Description of Artificial Sequence: Synthetic oligonucleotide
  Antisense strand to SEQ ID NO: 1717745
aacuucauuucccaggagc

SEQ ID NO: 1717747 - RNA, 19 nt, Artificial Sequence
  Description of Artificial Sequence: Synthetic oligonucleotide
  Sense strand starting at position 2484 of SEQ ID NO: 1562044
ccuagaucgcccgugguuu

SEQ ID NO: 1717748 - RNA, 19 nt, Artificial Sequence
  Description of Artificial Sequence: Synthetic oligonucleotide
  Antisense strand to SEQ ID NO: 1717747
aaaccacgggcgaucuagg

SEQ ID NO: 1717749 - RNA, 19 nt, Artificial Sequence
  Description of Artificial Sequence: Synthetic oligonucleotide
  Sense strand starting at position 2704 of SEQ ID NO: 1562044
uugcuuuggcacuagggaa

SEQ ID NO: 1717750 - RNA, 19 nt, Artificial Sequence
  Description of Artificial Sequence: Synthetic oligonucleotide
  Antisense strand to SEQ ID NO: 1717749
uucccuagugccaaagcaa

SEQ ID NO: 1717751 - RNA, 19 nt, Artificial Sequence
  Description of Artificial Sequence: Synthetic oligonucleotide
  Sense strand starting at position 2910 of SEQ ID NO: 1562044
gacucaggccuguauacuu

SEQ ID NO: 1717752 - RNA, 19 nt, Artificial Sequence
  Description of Artificial Sequence: Synthetic oligonucleotide
  Antisense strand to SEQ ID NO: 1717751
aaguauacaggccugaguc

SEQ ID NO: 1717753 - RNA, 19 nt, Artificial Sequence
  Description of Artificial Sequence: Synthetic oligonucleotide
  Sense strand starting at position 2956 of SEQ ID NO: 1562044
gcaagacuuugagcugaaa

SEQ ID NO: 1717754 - RNA, 19 nt, Artificial Sequence
  Description of Artificial Sequence: Synthetic oligonucleotide
  Antisense strand to SEQ ID NO: 1717753
uuucagcucaaagucuugc

SEQ ID NO: 1717755 - RNA, 19 nt, Artificial Sequence
  Description of Artificial Sequence: Synthetic oligonucleotide
  Sense strand starting at position 2983 of SEQ ID NO: 1562044
ggagauuucuuacacugua

SEQ ID NO: 1717756 - RNA, 19 nt, Artificial Sequence
  Description of Artificial Sequence: Synthetic oligonucleotide
  Antisense strand to SEQ ID NO: 1717755
uacaguguaagaaaucucc

SEQ ID NO: 1717757 - RNA, 19 nt, Artificial Sequence
  Description of Artificial Sequence: Synthetic oligonucleotide
  Sense strand starting at position 2988 of SEQ ID NO: 1562044
uuucuuacacuguaggauu

SEQ ID NO: 1717758 - RNA, 19 nt, Artificial Sequence
  Description of Artificial Sequence: Synthetic oligonucleotide
  Antisense strand to SEQ ID NO: 1717757
aauccuacaguguaagaaa

SEQ ID NO: 1717759 - RNA, 19 nt, Artificial Sequence
  Description of Artificial Sequence: Synthetic oligonucleotide
  Sense strand starting at position 3017 of SEQ ID NO: 1562044
auccgaauccugcaaguuu

SEQ ID NO: 1717760 - RNA, 19 nt, Artificial Sequence
  Description of Artificial Sequence: Synthetic oligonucleotide
  Antisense strand to SEQ ID NO: 1717759
aaacuugcaggauucggau

SEQ ID NO: 1717761 - RNA, 19 nt, Artificial Sequence
  Description of Artificial Sequence: Synthetic oligonucleotide
  Sense strand starting at position 3073 of SEQ ID NO: 1562044
agaaucacgugguuuccau

SEQ ID NO: 1717762 - RNA, 19 nt, Artificial Sequence
  Description of Artificial Sequence: Synthetic oligonucleotide
  Antisense strand to SEQ ID NO: 1717761
auggaaaccacgugauucu

SEQ ID NO: 1717763 - RNA, 19 nt, Artificial Sequence
  Description of Artificial Sequence: Synthetic oligonucleotide
  Sense strand starting at position 3203 of SEQ ID NO: 1562044
cccauagggucacucaaua

SEQ ID NO: 1717764 - RNA, 19 nt, Artificial Sequence
  Description of Artificial Sequence: Synthetic oligonucleotide
  Antisense strand to SEQ ID NO: 1717763
uauugagugacccuauggg

SEQ ID NO: 1717765 - RNA, 19 nt, Artificial Sequence
  Description of Artificial Sequence: Synthetic oligonucleotide
  Sense strand starting at position 3593 of SEQ ID NO: 1562044
uugagagucuucguuacag

SEQ ID NO: 1717766 - RNA, 19 nt, Artificial Sequence
  Description of Artificial Sequence: Synthetic oligonucleotide
  Antisense strand to SEQ ID NO: 1717765
cuguaacgaagacucucaa

SEQ ID NO: 1717767 - RNA, 19 nt, Artificial Sequence
  Description of Artificial Sequence: Synthetic oligonucleotide
  Sense strand starting at position 3595 of SEQ ID NO: 1562044
gagagucuucguuacagca

SEQ ID NO: 1717768 - RNA, 19 nt, Artificial Sequence
  Description of Artificial Sequence: Synthetic oligonucleotide
  Antisense strand to SEQ ID NO: 1717767
ugcuguaacgaagacucuc

SEQ ID NO: 1717769 - RNA, 19 nt, Artificial Sequence
  Description of Artificial Sequence: Synthetic oligonucleotide
  Sense strand starting at position 3615 of SEQ ID NO: 1562044
uugagcuuguaccugauua

SEQ ID NO: 1717770 - RNA, 19 nt, Artificial Sequence
  Description of Artificial Sequence: Synthetic oligonucleotide
  Antisense strand to SEQ ID NO: 1717769
uaaucagguacaagcucaa

SEQ ID NO: 1717771 - RNA, 19 nt, Artificial Sequence
  Description of Artificial Sequence: Synthetic oligonucleotide
  Sense strand starting at position 3617 of SEQ ID NO: 1562044
gagcuuguaccugauuaca

SEQ ID NO: 1717772 - RNA, 19 nt, Artificial Sequence
  Description of Artificial Sequence: Synthetic oligonucleotide
  Antisense strand to SEQ ID NO: 1717771
uguaaucagguacaagcuc

SEQ ID NO: 1717773 - RNA, 19 nt, Artificial Sequence
  Description of Artificial Sequence: Synthetic oligonucleotide
  Sense strand starting at position 3619 of SEQ ID NO: 1562044
gcuuguaccugauuacaca

SEQ ID NO: 1717774 - RNA, 19 nt, Artificial Sequence
  Description of Artificial Sequence: Synthetic oligonucleotide
  Antisense strand to SEQ ID NO: 1717773
uguguaaucagguacaagc

SEQ ID NO: 1717775 - RNA, 19 nt, Artificial Sequence
  Description of Artificial Sequence: Synthetic oligonucleotide
  Sense strand starting at position 3620 of SEQ ID NO: 1562044
cuuguaccugauuacacau

SEQ ID NO: 1717776 - RNA, 19 nt, Artificial Sequence
  Description of Artificial Sequence: Synthetic oligonucleotide
  Antisense strand to SEQ ID NO: 1717775
auguguaaucagguacaag

SEQ ID NO: 1717777 - RNA, 19 nt, Artificial Sequence
  Description of Artificial Sequence: Synthetic oligonucleotide
  Sense strand starting at position 3657 of SEQ ID NO: 1562044
cuguccaauuccuuuagga

SEQ ID NO: 1717778 - RNA, 19 nt, Artificial Sequence
  Description of Artificial Sequence: Synthetic oligonucleotide
  Antisense strand to SEQ ID NO: 1717777
uccuaaaggaauuggacag

SEQ ID NO: 1717779 - RNA, 19 nt, Artificial Sequence
  Description of Artificial Sequence: Synthetic oligonucleotide
  Sense strand starting at position 3709 of SEQ ID NO: 1562044
agaauauacuugucuuagg

SEQ ID NO: 1717780 - RNA, 19 nt, Artificial Sequence
  Description of Artificial Sequence: Synthetic oligonucleotide
  Antisense strand to SEQ ID NO: 1717779
ccuaagacaaguauauucu

SEQ ID NO: 1717781 - RNA, 19 nt, Artificial Sequence
  Description of Artificial Sequence: Synthetic oligonucleotide
  Sense strand starting at position 3710 of SEQ ID NO: 1562044
gaauauacuugucuuagga

SEQ ID NO: 1717782 - RNA, 19 nt, Artificial Sequence
  Description of Artificial Sequence: Synthetic oligonucleotide
  Antisense strand to SEQ ID NO: 1717781
uccuaagacaaguauauuc

SEQ ID NO: 1717783 - RNA, 19 nt, Artificial Sequence
  Description of Artificial Sequence: Synthetic oligonucleotide
  Sense strand starting at position 3793 of SEQ ID NO: 1562044
auguguaaggcaugauucu

SEQ ID NO: 1717784 - RNA, 19 nt, Artificial Sequence
  Description of Artificial Sequence: Synthetic oligonucleotide
  Antisense strand to SEQ ID NO: 1717783
agaaucaugccuuacacau

SEQ ID NO: 1717785 - RNA, 19 nt, Artificial Sequence
  Description of Artificial Sequence: Synthetic oligonucleotide
  Sense strand starting at position 3794 of SEQ ID NO: 1562044
uguguaaggcaugauucua

SEQ ID NO: 1717786 - RNA, 19 nt, Artificial Sequence
  Description of Artificial Sequence: Synthetic oligonucleotide
  Antisense strand to SEQ ID NO: 1717785
uagaaucaugccuuacaca

SEQ ID NO: 1717787 - RNA, 19 nt, Artificial Sequence
  Description of Artificial Sequence: Synthetic oligonucleotide
  Sense strand starting at position 3888 of SEQ ID NO: 1562044
cgauuagauacauguggga

SEQ ID NO: 1717788 - RNA, 19 nt, Artificial Sequence
  Description of Artificial Sequence: Synthetic oligonucleotide
  Antisense strand to SEQ ID NO: 1717787
ucccacauguaucuaaucg

SEQ ID NO: 1717789 - RNA, 19 nt, Artificial Sequence
  Description of Artificial Sequence: Synthetic oligonucleotide
  Sense strand starting at position 3893 of SEQ ID NO: 1562044
agauacaugugggaauaaa

SEQ ID NO: 1717790 - RNA, 19 nt, Artificial Sequence
  Description of Artificial Sequence: Synthetic oligonucleotide
  Antisense strand to SEQ ID NO: 1717789
uuuauucccacauguaucu

SEQ ID NO: 1717791 - RNA, 19 nt, Artificial Sequence
  Description of Artificial Sequence: Synthetic oligonucleotide
  Sense strand starting at position 3913 of SEQ ID NO: 1562044
gacaguguacagugaacau

SEQ ID NO: 1717792 - RNA, 19 nt, Artificial Sequence
  Description of Artificial Sequence: Synthetic oligonucleotide
  Antisense strand to SEQ ID NO: 1717791
auguucacuguacacuguc

SEQ ID NO: 1717793 - RNA, 19 nt, Artificial Sequence
  Description of Artificial Sequence: Synthetic oligonucleotide
  Sense strand starting at position 3963 of SEQ ID NO: 1562044
caggcaucugugcauauaa

SEQ ID NO: 1717794 - RNA, 19 nt, Artificial Sequence
  Description of Artificial Sequence: Synthetic oligonucleotide
  Antisense strand to SEQ ID NO: 1717793
uuauaugcacagaugccug

SEQ ID NO: 1717795 - RNA, 19 nt, Artificial Sequence
  Description of Artificial Sequence: Synthetic oligonucleotide
  Sense strand starting at position 3965 of SEQ ID NO: 1562044
ggcaucugugcauauaaau

SEQ ID NO: 1717796 - RNA, 19 nt, Artificial Sequence
  Description of Artificial Sequence: Synthetic oligonucleotide
  Antisense strand to SEQ ID NO: 1717795
auuuauaugcacagaugcc

SEQ ID NO: 1717797 - RNA, 19 nt, Artificial Sequence
  Description of Artificial Sequence: Synthetic oligonucleotide
  Sense strand starting at position 172 of SEQ ID NO: 1562045
ucuugaagggaaugcuuaa

SEQ ID NO: 1717798 - RNA, 19 nt, Artificial Sequence
  Description of Artificial Sequence: Synthetic oligonucleotide
  Antisense strand to SEQ ID NO: 1717797
uuaagcauucccuucaaga

SEQ ID NO: 1717799 - RNA, 19 nt, Artificial Sequence
  Description of Artificial Sequence: Synthetic oligonucleotide
  Sense strand starting at position 528 of SEQ ID NO: 1562045
uguguauaugcauauagga

SEQ ID NO: 1717800 - RNA, 19 nt, Artificial Sequence
  Description of Artificial Sequence: Synthetic oligonucleotide
  Antisense strand to SEQ ID NO: 1717799
uccuauaugcauauacaca

SEQ ID NO: 1717801 - RNA, 19 nt, Artificial Sequence
  Description of Artificial Sequence: Synthetic oligonucleotide
  Sense strand starting at position 607 of SEQ ID NO: 1562045
agacuuccagcauauguaa

SEQ ID NO: 1717802 - RNA, 19 nt, Artificial Sequence
  Description of Artificial Sequence: Synthetic oligonucleotide
  Antisense strand to SEQ ID NO: 1717801
uuacauaugcuggaagucu

SEQ ID NO: 1717803 - RNA, 19 nt, Artificial Sequence
  Description of Artificial Sequence: Synthetic oligonucleotide
  Sense strand starting at position 778 of SEQ ID NO: 1562045
gguguaguggucagucaac

SEQ ID NO: 1717804 - RNA, 19 nt, Artificial Sequence
  Description of Artificial Sequence: Synthetic oligonucleotide
  Antisense strand to SEQ ID NO: 1717803
guugacugaccacuacacc

SEQ ID NO: 1717805 - RNA, 19 nt, Artificial Sequence
  Description of Artificial Sequence: Synthetic oligonucleotide
  Sense strand starting at position 1061 of SEQ ID NO: 1562045
gauucuacaguguagcaaa

SEQ ID NO: 1717806 - RNA, 19 nt, Artificial Sequence
  Description of Artificial Sequence: Synthetic oligonucleotide
  Antisense strand to SEQ ID NO: 1717805
uuugcuacacuguagaauc

SEQ ID NO: 1717807 - RNA, 19 nt, Artificial Sequence
  Description of Artificial Sequence: Synthetic oligonucleotide
  Sense strand starting at position 1145 of SEQ ID NO: 1562045
augugaccuuggguaauua

SEQ ID NO: 1717808 - RNA, 19 nt, Artificial Sequence
  Description of Artificial Sequence: Synthetic oligonucleotide
  Antisense strand to SEQ ID NO: 1717807
uaauuacccaaggucacau

SEQ ID NO: 1717809 - RNA, 19 nt, Artificial Sequence
  Description of Artificial Sequence: Synthetic oligonucleotide
  Sense strand starting at position 1240 of SEQ ID NO: 1562045
ugaaguuagacguggagaa

SEQ ID NO: 1717810 - RNA, 19 nt, Artificial Sequence
  Description of Artificial Sequence: Synthetic oligonucleotide
  Antisense strand to SEQ ID NO: 1717809
uucuccacgucuaacuuca

SEQ ID NO: 1717811 - RNA, 19 nt, Artificial Sequence
  Description of Artificial Sequence: Synthetic oligonucleotide
  Sense strand starting at position 1241 of SEQ ID NO: 1562045
gaaguuagacguggagaac

SEQ ID NO: 1717812 - RNA, 19 nt, Artificial Sequence
  Description of Artificial Sequence: Synthetic oligonucleotide
  Antisense strand to SEQ ID NO: 1717811
guucuccacgucuaacuuc

SEQ ID NO: 1717813 - RNA, 19 nt, Artificial Sequence
  Description of Artificial Sequence: Synthetic oligonucleotide
  Sense strand starting at position 1401 of SEQ ID NO: 1562045
accuuucugcuggaccaaa

SEQ ID NO: 1717814 - RNA, 19 nt, Artificial Sequence
  Description of Artificial Sequence: Synthetic oligonucleotide
  Antisense strand to SEQ ID NO: 1717813
uuugguccagcagaaaggu

SEQ ID NO: 1717815 - RNA, 19 nt, Artificial Sequence
  Description of Artificial Sequence: Synthetic oligonucleotide
  Sense strand starting at position 1500 of SEQ ID NO: 1562045
guagcucccaaggauuaga

SEQ ID NO: 1717816 - RNA, 19 nt, Artificial Sequence
  Description of Artificial Sequence: Synthetic oligonucleotide
  Antisense strand to SEQ ID NO: 1717815
ucuaauccuugggagcuac

SEQ ID NO: 1717817 - RNA, 19 nt, Artificial Sequence
  Description of Artificial Sequence: Synthetic oligonucleotide
  Sense strand starting at position 1508 of SEQ ID NO: 1562045
caaggauuagaccggguuu

SEQ ID NO: 1717818 - RNA, 19 nt, Artificial Sequence
  Description of Artificial Sequence: Synthetic oligonucleotide
  Antisense strand to SEQ ID NO: 1717817
aaacccggucuaauccuug

SEQ ID NO: 1717819 - RNA, 19 nt, Artificial Sequence
  Description of Artificial Sequence: Synthetic oligonucleotide
  Sense strand starting at position 1509 of SEQ ID NO: 1562045
aaggauuagaccggguuua

SEQ ID NO: 1717820 - RNA, 19 nt, Artificial Sequence
  Description of Artificial Sequence: Synthetic oligonucleotide
  Antisense strand to SEQ ID NO: 1717819
uaaacccggucuaauccuu

SEQ ID NO: 1717821 - RNA, 19 nt, Artificial Sequence
  Description of Artificial Sequence: Synthetic oligonucleotide
  Sense strand starting at position 2417 of SEQ ID NO: 1562045
ugaacagugcucuauucca

SEQ ID NO: 1717822 - RNA, 19 nt, Artificial Sequence
  Description of Artificial Sequence: Synthetic oligonucleotide
  Antisense strand to SEQ ID NO: 1717821
uggaauagagcacuguuca

SEQ ID NO: 1717823 - RNA, 19 nt, Artificial Sequence
  Description of Artificial Sequence: Synthetic oligonucleotide
  Sense strand starting at position 2444 of SEQ ID NO: 1562045
guggguuacaaaggugaau

SEQ ID NO: 1717824 - RNA, 19 nt, Artificial Sequence
  Description of Artificial Sequence: Synthetic oligonucleotide
  Antisense strand to SEQ ID NO: 1717823
auucaccuuuguaacccac

SEQ ID NO: 1717825 - RNA, 19 nt, Artificial Sequence
  Description of Artificial Sequence: Synthetic oligonucleotide
  Sense strand starting at position 2494 of SEQ ID NO: 1562045
agcugaaucugaucgagau

SEQ ID NO: 1717826 - RNA, 19 nt, Artificial Sequence
  Description of Artificial Sequence: Synthetic oligonucleotide
  Antisense strand to SEQ ID NO: 1717825
aucucgaucagauucagcu

SEQ ID NO: 1717827 - RNA, 19 nt, Artificial Sequence
  Description of Artificial Sequence: Synthetic oligonucleotide
  Sense strand starting at position 2495 of SEQ ID NO: 1562045
gcugaaucugaucgagaua

SEQ ID NO: 1717828 - RNA, 19 nt, Artificial Sequence
  Description of Artificial Sequence: Synthetic oligonucleotide
  Antisense strand to SEQ ID NO: 1717827
uaucucgaucagauucagc

SEQ ID NO: 1717829 - RNA, 19 nt, Artificial Sequence
  Description of Artificial Sequence: Synthetic oligonucleotide
  Sense strand starting at position 2535 of SEQ ID NO: 1562045
gagauacuacuucgagcac

SEQ ID NO: 1717830 - RNA, 19 nt, Artificial Sequence
  Description of Artificial Sequence: Synthetic oligonucleotide
  Antisense strand to SEQ ID NO: 1717829
gugcucgaaguaguaucuc

SEQ ID NO: 1717831 - RNA, 19 nt, Artificial Sequence
  Description of Artificial Sequence: Synthetic oligonucleotide
  Sense strand starting at position 2555 of SEQ ID NO: 1562045
ugccaugcgcuagacauuu

SEQ ID NO: 1717832 - RNA, 19 nt, Artificial Sequence
  Description of Artificial Sequence: Synthetic oligonucleotide
  Antisense strand to SEQ ID NO: 1717831
aaaugucuagcgcauggca

SEQ ID NO: 1717833 - RNA, 19 nt, Artificial Sequence
  Description of Artificial Sequence: Synthetic oligonucleotide
  Sense strand starting at position 2707 of SEQ ID NO: 1562045
gguggaauucuucacggag

SEQ ID NO: 1717834 - RNA, 19 nt, Artificial Sequence
  Description of Artificial Sequence: Synthetic oligonucleotide
  Antisense strand to SEQ ID NO: 1717833
cuccgugaagaauuccacc

SEQ ID NO: 1717835 - RNA, 19 nt, Artificial Sequence
  Description of Artificial Sequence: Synthetic oligonucleotide
  Sense strand starting at position 2710 of SEQ ID NO: 1562045
ggaauucuucacggaggac

SEQ ID NO: 1717836 - RNA, 19 nt, Artificial Sequence
  Description of Artificial Sequence: Synthetic oligonucleotide
  Antisense strand to SEQ ID NO: 1717835
guccuccgugaagaauucc

SEQ ID NO: 1717837 - RNA, 19 nt, Artificial Sequence
  Description of Artificial Sequence: Synthetic oligonucleotide
  Sense strand starting at position 2736 of SEQ ID NO: 1562045
ugagacugaccuuggguau

SEQ ID NO: 1717838 - RNA, 19 nt, Artificial Sequence
  Description of Artificial Sequence: Synthetic oligonucleotide
  Antisense strand to SEQ ID NO: 1717837
auacccaaggucagucuca

SEQ ID NO: 1717839 - RNA, 19 nt, Artificial Sequence
  Description of Artificial Sequence: Synthetic oligonucleotide
  Sense strand starting at position 2737 of SEQ ID NO: 1562045
gagacugaccuuggguauu

SEQ ID NO: 1717840 - RNA, 19 nt, Artificial Sequence
  Description of Artificial Sequence: Synthetic oligonucleotide
  Antisense strand to SEQ ID NO: 1717839
aauacccaaggucagucuc

SEQ ID NO: 1717841 - RNA, 19 nt, Artificial Sequence
  Description of Artificial Sequence: Synthetic oligonucleotide
  Sense strand starting at position 2884 of SEQ ID NO: 1562045
gggaacuaguauccucaca

SEQ ID NO: 1717842 - RNA, 19 nt, Artificial Sequence
  Description of Artificial Sequence: Synthetic oligonucleotide
  Antisense strand to SEQ ID NO: 1717841
ugugaggauacuaguuccc

SEQ ID NO: 1717843 - RNA, 19 nt, Artificial Sequence
  Description of Artificial Sequence: Synthetic oligonucleotide
  Sense strand starting at position 2914 of SEQ ID NO: 1562045
acugaagaguguuuccuca

SEQ ID NO: 1717844 - RNA, 19 nt, Artificial Sequence
  Description of Artificial Sequence: Synthetic oligonucleotide
  Antisense strand to SEQ ID NO: 1717843
ugaggaaacacucuucagu

SEQ ID NO: 1717845 - RNA, 19 nt, Artificial Sequence
  Description of Artificial Sequence: Synthetic oligonucleotide
  Sense strand starting at position 2916 of SEQ ID NO: 1562045
ugaagaguguuuccucaag

SEQ ID NO: 1717846 - RNA, 19 nt, Artificial Sequence
  Description of Artificial Sequence: Synthetic oligonucleotide
  Antisense strand to SEQ ID NO: 1717845
cuugaggaaacacucuuca

SEQ ID NO: 1717847 - RNA, 19 nt, Artificial Sequence
  Description of Artificial Sequence: Synthetic oligonucleotide
  Sense strand starting at position 2918 of SEQ ID NO: 1562045
aagaguguuuccucaagac

SEQ ID NO: 1717848 - RNA, 19 nt, Artificial Sequence
  Description of Artificial Sequence: Synthetic oligonucleotide
  Antisense strand to SEQ ID NO: 1717847
gucuugaggaaacacucuu

SEQ ID NO: 1717849 - RNA, 19 nt, Artificial Sequence
  Description of Artificial Sequence: Synthetic oligonucleotide
  Sense strand starting at position 2922 of SEQ ID NO: 1562045
guguuuccucaagaccaca

SEQ ID NO: 1717850 - RNA, 19 nt, Artificial Sequence
  Description of Artificial Sequence: Synthetic oligonucleotide
  Antisense strand to SEQ ID NO: 1717849
uguggucuugaggaaacac

SEQ ID NO: 1717851 - RNA, 19 nt, Artificial Sequence
  Description of Artificial Sequence: Synthetic oligonucleotide
  Sense strand starting at position 2987 of SEQ ID NO: 1562045
ggguaagaaugugcuagga

SEQ ID NO: 1717852 - RNA, 19 nt, Artificial Sequence
  Description of Artificial Sequence: Synthetic oligonucleotide
  Antisense strand to SEQ ID NO: 1717851
uccuagcacauucuuaccc

SEQ ID NO: 1717853 - RNA, 19 nt, Artificial Sequence
  Description of Artificial Sequence: Synthetic oligonucleotide
  Sense strand starting at position 3083 of SEQ ID NO: 1562045
uggcuaacucaagaucuau

SEQ ID NO: 1717854 - RNA, 19 nt, Artificial Sequence
  Description of Artificial Sequence: Synthetic oligonucleotide
  Antisense strand to SEQ ID NO: 1717853
auagaucuugaguuagcca

SEQ ID NO: 1717855 - RNA, 19 nt, Artificial Sequence
  Description of Artificial Sequence: Synthetic oligonucleotide
  Sense strand starting at position 3206 of SEQ ID NO: 1562045
cacugagauguaggcagaa

SEQ ID NO: 1717856 - RNA, 19 nt, Artificial Sequence
  Description of Artificial Sequence: Synthetic oligonucleotide
  Antisense strand to SEQ ID NO: 1717855
uucugccuacaucucagug

SEQ ID NO: 1717857 - RNA, 19 nt, Artificial Sequence
  Description of Artificial Sequence: Synthetic oligonucleotide
  Sense strand starting at position 3208 of SEQ ID NO: 1562045
cugagauguaggcagaagu

SEQ ID NO: 1717858 - RNA, 19 nt, Artificial Sequence
  Description of Artificial Sequence: Synthetic oligonucleotide
  Antisense strand to SEQ ID NO: 1717857
acuucugccuacaucucag

SEQ ID NO: 1717859 - RNA, 19 nt, Artificial Sequence
  Description of Artificial Sequence: Synthetic oligonucleotide
  Sense strand starting at position 3247 of SEQ ID NO: 1562045
ccuucuucccuuggagaag

SEQ ID NO: 1717860 - RNA, 19 nt, Artificial Sequence
  Description of Artificial Sequence: Synthetic oligonucleotide
  Antisense strand to SEQ ID NO: 1717859
cuucuccaagggaagaagg

SEQ ID NO: 1717861 - RNA, 19 nt, Artificial Sequence
  Description of Artificial Sequence: Synthetic oligonucleotide
  Sense strand starting at position 3436 of SEQ ID NO: 1562045
cugucuuaucgggaugagg

SEQ ID NO: 1717862 - RNA, 19 nt, Artificial Sequence
  Description of Artificial Sequence: Synthetic oligonucleotide
  Antisense strand to SEQ ID NO: 1717861
ccucaucccgauaagacag

SEQ ID NO: 1717863 - RNA, 19 nt, Artificial Sequence
  Description of Artificial Sequence: Synthetic oligonucleotide
  Sense strand starting at position 3438 of SEQ ID NO: 1562045
gucuuaucgggaugaggga

SEQ ID NO: 1717864 - RNA, 19 nt, Artificial Sequence
  Description of Artificial Sequence: Synthetic oligonucleotide
  Antisense strand to SEQ ID NO: 1717863
ucccucaucccgauaagac

SEQ ID NO: 1717865 - RNA, 19 nt, Artificial Sequence
  Description of Artificial Sequence: Synthetic oligonucleotide
  Sense strand starting at position 3612 of SEQ ID NO: 1562045
ugggaaagcugucccaaag

SEQ ID NO: 1717866 - RNA, 19 nt, Artificial Sequence
  Description of Artificial Sequence: Synthetic oligonucleotide
  Antisense strand to SEQ ID NO: 1717865
cuuugggacagcuuuccca

SEQ ID NO: 1717867 - RNA, 19 nt, Artificial Sequence
  Description of Artificial Sequence: Synthetic oligonucleotide
  Sense strand starting at position 3688 of SEQ ID NO: 1562045
cugaaauucugcuucuaag

SEQ ID NO: 1717868 - RNA, 19 nt, Artificial Sequence
  Description of Artificial Sequence: Synthetic oligonucleotide
  Antisense strand to SEQ ID NO: 1717867
cuuagaagcagaauuucag

SEQ ID NO: 1717869 - RNA, 19 nt, Artificial Sequence
  Description of Artificial Sequence: Synthetic oligonucleotide
  Sense strand starting at position 3863 of SEQ ID NO: 1562045
cauguaaggcaguaagacu

SEQ ID NO: 1717870 - RNA, 19 nt, Artificial Sequence
  Description of Artificial Sequence: Synthetic oligonucleotide
  Antisense strand to SEQ ID NO: 1717869
agucuuacugccuuacaug

SEQ ID NO: 1717871 - RNA, 19 nt, Artificial Sequence
  Description of Artificial Sequence: Synthetic oligonucleotide
  Sense strand starting at position 3878 of SEQ ID NO: 1562045
gacuuacugcucuggacag

SEQ ID NO: 1717872 - RNA, 19 nt, Artificial Sequence
  Description of Artificial Sequence: Synthetic oligonucleotide
  Antisense strand to SEQ ID NO: 1717871
cuguccagagcaguaaguc

SEQ ID NO: 1717873 - RNA, 19 nt, Artificial Sequence
  Description of Artificial Sequence: Synthetic oligonucleotide
  Sense strand starting at position 3880 of SEQ ID NO: 1562045
cuuacugcucuggacagaa

SEQ ID NO: 1717874 - RNA, 19 nt, Artificial Sequence
  Description of Artificial Sequence: Synthetic oligonucleotide
  Antisense strand to SEQ ID NO: 1717873
uucuguccagagcaguaag

SEQ ID NO: 1717875 - RNA, 19 nt, Artificial Sequence
  Description of Artificial Sequence: Synthetic oligonucleotide
  Sense strand starting at position 3951 of SEQ ID NO: 1562045
gguucucuaaaugaugguu

SEQ ID NO: 1717876 - RNA, 19 nt, Artificial Sequence
  Description of Artificial Sequence: Synthetic oligonucleotide
  Antisense strand to SEQ ID NO: 1717875
aaccaucauuuagagaacc

SEQ ID NO: 1717877 - RNA, 19 nt, Artificial Sequence
  Description of Artificial Sequence: Synthetic oligonucleotide
  Sense strand starting at position 129 of SEQ ID NO: 1562046
uggaacauuugccaaaguu

SEQ ID NO: 1717878 - RNA, 19 nt, Artificial Sequence
  Description of Artificial Sequence: Synthetic oligonucleotide
  Antisense strand to SEQ ID NO: 1717877
aacuuuggcaaauguucca

SEQ ID NO: 1717879 - RNA, 19 nt, Artificial Sequence
  Description of Artificial Sequence: Synthetic oligonucleotide
  Sense strand starting at position 195 of SEQ ID NO: 1562046
uaauauuuguuugaaggca

SEQ ID NO: 1717880 - RNA, 19 nt, Artificial Sequence
  Description of Artificial Sequence: Synthetic oligonucleotide
  Antisense strand to SEQ ID NO: 1717879
ugccuucaaacaaauauua

SEQ ID NO: 1717881 - RNA, 19 nt, Artificial Sequence
  Description of Artificial Sequence: Synthetic oligonucleotide
  Sense strand starting at position 378 of SEQ ID NO: 1562046
uugaguugugucugagacc

SEQ ID NO: 1717882 - RNA, 19 nt, Artificial Sequence
  Description of Artificial Sequence: Synthetic oligonucleotide
  Antisense strand to SEQ ID NO: 1717881
ggucucagacacaacucaa

SEQ ID NO: 1717883 - RNA, 19 nt, Artificial Sequence
  Description of Artificial Sequence: Synthetic oligonucleotide
  Sense strand starting at position 461 of SEQ ID NO: 1562046
ccuuuagaacuaugguaac

SEQ ID NO: 1717884 - RNA, 19 nt, Artificial Sequence
  Description of Artificial Sequence: Synthetic oligonucleotide
  Antisense strand to SEQ ID NO: 1717883
guuaccauaguucuaaagg

SEQ ID NO: 1717885 - RNA, 19 nt, Artificial Sequence
  Description of Artificial Sequence: Synthetic oligonucleotide
  Sense strand starting at position 612 of SEQ ID NO: 1562046
augcucacaccaggaaaua

SEQ ID NO: 1717886 - RNA, 19 nt, Artificial Sequence
  Description of Artificial Sequence: Synthetic oligonucleotide
  Antisense strand to SEQ ID NO: 1717885
uauuuccuggugugagcau

SEQ ID NO: 1717887 - RNA, 19 nt, Artificial Sequence
  Description of Artificial Sequence: Synthetic oligonucleotide
  Sense strand starting at position 746 of SEQ ID NO: 1562046
ccagaaggccguugugaac

SEQ ID NO: 1717888 - RNA, 19 nt, Artificial Sequence
  Description of Artificial Sequence: Synthetic oligonucleotide
  Antisense strand to SEQ ID NO: 1717887
guucacaacggccuucugg

SEQ ID NO: 1717889 - RNA, 19 nt, Artificial Sequence
  Description of Artificial Sequence: Synthetic oligonucleotide
  Sense strand starting at position 772 of SEQ ID NO: 1562046
gaaauaaggcuugggaagu

SEQ ID NO: 1717890 - RNA, 19 nt, Artificial Sequence
  Description of Artificial Sequence: Synthetic oligonucleotide
  Antisense strand to SEQ ID NO: 1717889
acuucccaagccuuauuuc

SEQ ID NO: 1717891 - RNA, 19 nt, Artificial Sequence
  Description of Artificial Sequence: Synthetic oligonucleotide
  Sense strand starting at position 783 of SEQ ID NO: 1562046
ugggaaguuccugggugaa

SEQ ID NO: 1717892 - RNA, 19 nt, Artificial Sequence
  Description of Artificial Sequence: Synthetic oligonucleotide
  Antisense strand to SEQ ID NO: 1717891
uucacccaggaacuuccca

SEQ ID NO: 1717893 - RNA, 19 nt, Artificial Sequence
  Description of Artificial Sequence: Synthetic oligonucleotide
  Sense strand starting at position 785 of SEQ ID NO: 1562046
ggaaguuccugggugaagu

SEQ ID NO: 1717894 - RNA, 19 nt, Artificial Sequence
  Description of Artificial Sequence: Synthetic oligonucleotide
  Antisense strand to SEQ ID NO: 1717893
acuucacccaggaacuucc

SEQ ID NO: 1717895 - RNA, 19 nt, Artificial Sequence
  Description of Artificial Sequence: Synthetic oligonucleotide
  Sense strand starting at position 786 of SEQ ID NO: 1562046
gaaguuccugggugaaguc

SEQ ID NO: 1717896 - RNA, 19 nt, Artificial Sequence
  Description of Artificial Sequence: Synthetic oligonucleotide
  Antisense strand to SEQ ID NO: 1717895
gacuucacccaggaacuuc

SEQ ID NO: 1717897 - RNA, 19 nt, Artificial Sequence
  Description of Artificial Sequence: Synthetic oligonucleotide
  Sense strand starting at position 796 of SEQ ID NO: 1562046
ggugaagucucauuaaaug

SEQ ID NO: 1717898 - RNA, 19 nt, Artificial Sequence
  Description of Artificial Sequence: Synthetic oligonucleotide
  Antisense strand to SEQ ID NO: 1717897
cauuuaaugagacuucacc

SEQ ID NO: 1717899 - RNA, 19 nt, Artificial Sequence
  Description of Artificial Sequence: Synthetic oligonucleotide
  Sense strand starting at position 904 of SEQ ID NO: 1562046
ccaugucaccgagaggcaa

SEQ ID NO: 1717900 - RNA, 19 nt, Artificial Sequence
  Description of Artificial Sequence: Synthetic oligonucleotide
  Antisense strand to SEQ ID NO: 1717899
uugccucucggugacaugg

SEQ ID NO: 1717901 - RNA, 19 nt, Artificial Sequence
  Description of Artificial Sequence: Synthetic oligonucleotide
  Sense strand starting at position 2118 of SEQ ID NO: 1562046
cagguuuggagccgaagua

SEQ ID NO: 1717902 - RNA, 19 nt, Artificial Sequence
  Description of Artificial Sequence: Synthetic oligonucleotide
  Antisense strand to SEQ ID NO: 1717901
uacuucggcuccaaaccug

SEQ ID NO: 1717903 - RNA, 19 nt, Artificial Sequence
  Description of Artificial Sequence: Synthetic oligonucleotide
  Sense strand starting at position 2480 of SEQ ID NO: 1562046
ggagauggcgcucaaaucu

SEQ ID NO: 1717904 - RNA, 19 nt, Artificial Sequence
  Description of Artificial Sequence: Synthetic oligonucleotide
  Antisense strand to SEQ ID NO: 1717903
agauuugagcgccaucucc

SEQ ID NO: 1717905 - RNA, 19 nt, Artificial Sequence
  Description of Artificial Sequence: Synthetic oligonucleotide
  Sense strand starting at position 2679 of SEQ ID NO: 1562046
uuuauaacuugauccaggu

SEQ ID NO: 1717906 - RNA, 19 nt, Artificial Sequence
  Description of Artificial Sequence: Synthetic oligonucleotide
  Antisense strand to SEQ ID NO: 1717905
accuggaucaaguuauaaa

SEQ ID NO: 1717907 - RNA, 19 nt, Artificial Sequence
  Description of Artificial Sequence: Synthetic oligonucleotide
  Sense strand starting at position 2683 of SEQ ID NO: 1562046
uaacuugauccaggugcua

SEQ ID NO: 1717908 - RNA, 19 nt, Artificial Sequence
  Description of Artificial Sequence: Synthetic oligonucleotide
  Antisense strand to SEQ ID NO: 1717907
uagcaccuggaucaaguua

SEQ ID NO: 1717909 - RNA, 19 nt, Artificial Sequence
  Description of Artificial Sequence: Synthetic oligonucleotide
  Sense strand starting at position 2685 of SEQ ID NO: 1562046
acuugauccaggugcuagu

SEQ ID NO: 1717910 - RNA, 19 nt, Artificial Sequence
  Description of Artificial Sequence: Synthetic oligonucleotide
  Antisense strand to SEQ ID NO: 1717909
acuagcaccuggaucaagu

SEQ ID NO: 1717911 - RNA, 19 nt, Artificial Sequence
  Description of Artificial Sequence: Synthetic oligonucleotide
  Sense strand starting at position 2764 of SEQ ID NO: 1562046
gaaccagucuuccuaguga

SEQ ID NO: 1717912 - RNA, 19 nt, Artificial Sequence
  Description of Artificial Sequence: Synthetic oligonucleotide
  Antisense strand to SEQ ID NO: 1717911
ucacuaggaagacugguuc

SEQ ID NO: 1717913 - RNA, 19 nt, Artificial Sequence
  Description of Artificial Sequence: Synthetic oligonucleotide
  Sense strand starting at position 2769 of SEQ ID NO: 1562046
agucuuccuagugagagca

SEQ ID NO: 1717914 - RNA, 19 nt, Artificial Sequence
  Description of Artificial Sequence: Synthetic oligonucleotide
  Antisense strand to SEQ ID NO: 1717913
ugcucucacuaggaagacu

SEQ ID NO: 1717915 - RNA, 19 nt, Artificial Sequence
  Description of Artificial Sequence: Synthetic oligonucleotide
  Sense strand starting at position 2828 of SEQ ID NO: 1562046
ccugaaaguugagaacuga

SEQ ID NO: 1717916 - RNA, 19 nt, Artificial Sequence
  Description of Artificial Sequence: Synthetic oligonucleotide
  Antisense strand to SEQ ID NO: 1717915
ucaguucucaacuuucagg

SEQ ID NO: 1717917 - RNA, 19 nt, Artificial Sequence
  Description of Artificial Sequence: Synthetic oligonucleotide
  Sense strand starting at position 2907 of SEQ ID NO: 1562046
cugcuuaacagacgggauu

SEQ ID NO: 1717918 - RNA, 19 nt, Artificial Sequence
  Description of Artificial Sequence: Synthetic oligonucleotide
  Antisense strand to SEQ ID NO: 1717917
aaucccgucuguuaagcag

SEQ ID NO: 1717919 - RNA, 19 nt, Artificial Sequence
  Description of Artificial Sequence: Synthetic oligonucleotide
  Sense strand starting at position 2965 of SEQ ID NO: 1562046
uugccauaccagcaguuau

SEQ ID NO: 1717920 - RNA, 19 nt, Artificial Sequence
  Description of Artificial Sequence: Synthetic oligonucleotide
  Antisense strand to SEQ ID NO: 1717919
auaacugcugguauggcaa

SEQ ID NO: 1717921 - RNA, 19 nt, Artificial Sequence
  Description of Artificial Sequence: Synthetic oligonucleotide
  Sense strand starting at position 2980 of SEQ ID NO: 1562046
uuauaauuguccuucuguu

SEQ ID NO: 1717922 - RNA, 19 nt, Artificial Sequence
  Description of Artificial Sequence: Synthetic oligonucleotide
  Antisense strand to SEQ ID NO: 1717921
aacagaaggacaauuauaa

SEQ ID NO: 1717923 - RNA, 19 nt, Artificial Sequence
  Description of Artificial Sequence: Synthetic oligonucleotide
  Sense strand starting at position 2989 of SEQ ID NO: 1562046
uccuucuguuguuugauga

SEQ ID NO: 1717924 - RNA, 19 nt, Artificial Sequence
  Description of Artificial Sequence: Synthetic oligonucleotide
  Antisense strand to SEQ ID NO: 1717923
ucaucaaacaacagaagga

SEQ ID NO: 1717925 - RNA, 19 nt, Artificial Sequence
  Description of Artificial Sequence: Synthetic oligonucleotide
  Sense strand starting at position 3136 of SEQ ID NO: 1562046
gucucaagauguucucuag

SEQ ID NO: 1717926 - RNA, 19 nt, Artificial Sequence
  Description of Artificial Sequence: Synthetic oligonucleotide
  Antisense strand to SEQ ID NO: 1717925
cuagagaacaucuugagac

SEQ ID NO: 1717927 - RNA, 19 nt, Artificial Sequence
  Description of Artificial Sequence: Synthetic oligonucleotide
  Sense strand starting at position 3139 of SEQ ID NO: 1562046
ucaagauguucucuaguuu

SEQ ID NO: 1717928 - RNA, 19 nt, Artificial Sequence
  Description of Artificial Sequence: Synthetic oligonucleotide
  Antisense strand to SEQ ID NO: 1717927
aaacuagagaacaucuuga

SEQ ID NO: 1717929 - RNA, 19 nt, Artificial Sequence
  Description of Artificial Sequence: Synthetic oligonucleotide
  Sense strand starting at position 3140 of SEQ ID NO: 1562046
caagauguucucuaguuug

SEQ ID NO: 1717930 - RNA, 19 nt, Artificial Sequence
  Description of Artificial Sequence: Synthetic oligonucleotide
  Antisense strand to SEQ ID NO: 1717929
caaacuagagaacaucuug

SEQ ID NO: 1717931 - RNA, 19 nt, Artificial Sequence
  Description of Artificial Sequence: Synthetic oligonucleotide
  Sense strand starting at position 3159 of SEQ ID NO: 1562046
ucuucuuguucugucauuu

SEQ ID NO: 1717932 - RNA, 19 nt, Artificial Sequence
  Description of Artificial Sequence: Synthetic oligonucleotide
  Antisense strand to SEQ ID NO: 1717931
aaaugacagaacaagaaga

SEQ ID NO: 1717933 - RNA, 19 nt, Artificial Sequence
  Description of Artificial Sequence: Synthetic oligonucleotide
  Sense strand starting at position 3428 of SEQ ID NO: 1562046
ggaucugcauuugaggaua

SEQ ID NO: 1717934 - RNA, 19 nt, Artificial Sequence
  Description of Artificial Sequence: Synthetic oligonucleotide
  Antisense strand to SEQ ID NO: 1717933
uauccucaaaugcagaucc

SEQ ID NO: 1717935 - RNA, 19 nt, Artificial Sequence
  Description of Artificial Sequence: Synthetic oligonucleotide
  Sense strand starting at position 3430 of SEQ ID NO: 1562046
aucugcauuugaggauaaa

SEQ ID NO: 1717936 - RNA, 19 nt, Artificial Sequence
  Description of Artificial Sequence: Synthetic oligonucleotide
  Antisense strand to SEQ ID NO: 1717935
uuuauccucaaaugcagau

SEQ ID NO: 1717937 - RNA, 19 nt, Artificial Sequence
  Description of Artificial Sequence: Synthetic oligonucleotide
  Sense strand starting at position 3440 of SEQ ID NO: 1562046
gaggauaaacccugucuug

SEQ ID NO: 1717938 - RNA, 19 nt, Artificial Sequence
  Description of Artificial Sequence: Synthetic oligonucleotide
  Antisense strand to SEQ ID NO: 1717937
caagacaggguuuauccuc

SEQ ID NO: 1717939 - RNA, 19 nt, Artificial Sequence
  Description of Artificial Sequence: Synthetic oligonucleotide
  Sense strand starting at position 3511 of SEQ ID NO: 1562046
cccgguuaucaccaguguu

SEQ ID NO: 1717940 - RNA, 19 nt, Artificial Sequence
  Description of Artificial Sequence: Synthetic oligonucleotide
  Antisense strand to SEQ ID NO: 1717939
aacacuggugauaaccggg

SEQ ID NO: 1717941 - RNA, 19 nt, Artificial Sequence
  Description of Artificial Sequence: Synthetic oligonucleotide
  Sense strand starting at position 3514 of SEQ ID NO: 1562046
gguuaucaccaguguucuc

SEQ ID NO: 1717942 - RNA, 19 nt, Artificial Sequence
  Description of Artificial Sequence: Synthetic oligonucleotide
  Antisense strand to SEQ ID NO: 1717941
gagaacacuggugauaacc

SEQ ID NO: 1717943 - RNA, 19 nt, Artificial Sequence
  Description of Artificial Sequence: Synthetic oligonucleotide
  Sense strand starting at position 3525 of SEQ ID NO: 1562046
guguucucgguugcaaauu

SEQ ID NO: 1717944 - RNA, 19 nt, Artificial Sequence
  Description of Artificial Sequence: Synthetic oligonucleotide
  Antisense strand to SEQ ID NO: 1717943
aauuugcaaccgagaacac

SEQ ID NO: 1717945 - RNA, 19 nt, Artificial Sequence
  Description of Artificial Sequence: Synthetic oligonucleotide
  Sense strand starting at position 3582 of SEQ ID NO: 1562046
aggaauuuaucaggaagga

SEQ ID NO: 1717946 - RNA, 19 nt, Artificial Sequence
  Description of Artificial Sequence: Synthetic oligonucleotide
  Antisense strand to SEQ ID NO: 1717945
uccuuccugauaaauuccu

SEQ ID NO: 1717947 - RNA, 19 nt, Artificial Sequence
  Description of Artificial Sequence: Synthetic oligonucleotide
  Sense strand starting at position 3791 of SEQ ID NO: 1562046
acccguuccaccggagaga

SEQ ID NO: 1717948 - RNA, 19 nt, Artificial Sequence
  Description of Artificial Sequence: Synthetic oligonucleotide
  Antisense strand to SEQ ID NO: 1717947
ucucuccgguggaacgggu

SEQ ID NO: 1717949 - RNA, 19 nt, Artificial Sequence
  Description of Artificial Sequence: Synthetic oligonucleotide
  Sense strand starting at position 3822 of SEQ ID NO: 1562046
cugcuucuggucugaagga

SEQ ID NO: 1717950 - RNA, 19 nt, Artificial Sequence
  Description of Artificial Sequence: Synthetic oligonucleotide
  Antisense strand to SEQ ID NO: 1717949
uccuucagaccagaagcag

SEQ ID NO: 1717951 - RNA, 19 nt, Artificial Sequence
  Description of Artificial Sequence: Synthetic oligonucleotide
  Sense strand starting at position 3859 of SEQ ID NO: 1562046
cuuugauugguccaacaua

SEQ ID NO: 1717952 - RNA, 19 nt, Artificial Sequence
  Description of Artificial Sequence: Synthetic oligonucleotide
  Antisense strand to SEQ ID NO: 1717951
uauguuggaccaaucaaag

SEQ ID NO: 1717953 - RNA, 19 nt, Artificial Sequence
  Description of Artificial Sequence: Synthetic oligonucleotide
  Sense strand starting at position 3927 of SEQ ID NO: 1562046
cugugacuggcccaacuua

SEQ ID NO: 1717954 - RNA, 19 nt, Artificial Sequence
  Description of Artificial Sequence: Synthetic oligonucleotide
  Antisense strand to SEQ ID NO: 1717953
uaaguugggccagucacag

SEQ ID NO: 1717955 - RNA, 19 nt, Artificial Sequence
  Description of Artificial Sequence: Synthetic oligonucleotide
  Sense strand starting at position 3951 of SEQ ID NO: 1562046
ggugccauucucuaaccaa

SEQ ID NO: 1717956 - RNA, 19 nt, Artificial Sequence
  Description of Artificial Sequence: Synthetic oligonucleotide
  Antisense strand to SEQ ID NO: 1717955
uugguuagagaauggcacc

SEQ ID NO: 1717957 - RNA, 19 nt, Artificial Sequence
  Description of Artificial Sequence: Synthetic oligonucleotide
  Sense strand starting at position 264 of SEQ ID NO: 1562047
aagggucucugaucccaaa

SEQ ID NO: 1717958 - RNA, 19 nt, Artificial Sequence
  Description of Artificial Sequence: Synthetic oligonucleotide
  Antisense strand to SEQ ID NO: 1717957
uuugggaucagagacccuu

SEQ ID NO: 1717959 - RNA, 19 nt, Artificial Sequence
  Description of Artificial Sequence: Synthetic oligonucleotide
  Sense strand starting at position 380 of SEQ ID NO: 1562047
cccgauauaucuucgccau

SEQ ID NO: 1717960 - RNA, 19 nt, Artificial Sequence
  Description of Artificial Sequence: Synthetic oligonucleotide
  Antisense strand to SEQ ID NO: 1717959
auggcgaagauauaucggg

SEQ ID NO: 1717961 - RNA, 19 nt, Artificial Sequence
  Description of Artificial Sequence: Synthetic oligonucleotide
  Sense strand starting at position 381 of SEQ ID NO: 1562047
ccgauauaucuucgccaug

SEQ ID NO: 1717962 - RNA, 19 nt, Artificial Sequence
  Description of Artificial Sequence: Synthetic oligonucleotide
  Antisense strand to SEQ ID NO: 1717961
cauggcgaagauauaucgg

SEQ ID NO: 1717963 - RNA, 19 nt, Artificial Sequence
  Description of Artificial Sequence: Synthetic oligonucleotide
  Sense strand starting at position 384 of SEQ ID NO: 1562047
auauaucuucgccaugcga

SEQ ID NO: 1717964 - RNA, 19 nt, Artificial Sequence
  Description of Artificial Sequence: Synthetic oligonucleotide
  Antisense strand to SEQ ID NO: 1717963
ucgcauggcgaagauauau

SEQ ID NO: 1717965 - RNA, 19 nt, Artificial Sequence
  Description of Artificial Sequence: Synthetic oligonucleotide
  Sense strand starting at position 397 of SEQ ID NO: 1562047
augcgaggcuucuuuaauc

SEQ ID NO: 1717966 - RNA, 19 nt, Artificial Sequence
  Description of Artificial Sequence: Synthetic oligonucleotide
  Antisense strand to SEQ ID NO: 1717965
gauuaaagaagccucgcau

SEQ ID NO: 1717967 - RNA, 19 nt, Artificial Sequence
  Description of Artificial Sequence: Synthetic oligonucleotide
  Sense strand starting at position 442 of SEQ ID NO: 1562047
cugguaaguaaauguggau

SEQ ID NO: 1717968 - RNA, 19 nt, Artificial Sequence
  Description of Artificial Sequence: Synthetic oligonucleotide
  Antisense strand to SEQ ID NO: 1717967
auccacauuuacuuaccag

SEQ ID NO: 1717969 - RNA, 19 nt, Artificial Sequence
  Description of Artificial Sequence: Synthetic oligonucleotide
  Sense strand starting at position 445 of SEQ ID NO: 1562047
guaaguaaauguggauuua

SEQ ID NO: 1717970 - RNA, 19 nt, Artificial Sequence
  Description of Artificial Sequence: Synthetic oligonucleotide
  Antisense strand to SEQ ID NO: 1717969
uaaauccacauuuacuuac

SEQ ID NO: 1717971 - RNA, 19 nt, Artificial Sequence
  Description of Artificial Sequence: Synthetic oligonucleotide
  Sense strand starting at position 481 of SEQ ID NO: 1562047
gcugcagauuccucaucca

SEQ ID NO: 1717972 - RNA, 19 nt, Artificial Sequence
  Description of Artificial Sequence: Synthetic oligonucleotide
  Antisense strand to SEQ ID NO: 1717971
uggaugaggaaucugcagc

SEQ ID NO: 1717973 - RNA, 19 nt, Artificial Sequence
  Description of Artificial Sequence: Synthetic oligonucleotide
  Sense strand starting at position 484 of SEQ ID NO: 1562047
gcagauuccucauccagau

SEQ ID NO: 1717974 - RNA, 19 nt, Artificial Sequence
  Description of Artificial Sequence: Synthetic oligonucleotide
  Antisense strand to SEQ ID NO: 1717973
aucuggaugaggaaucugc

SEQ ID NO: 1717975 - RNA, 19 nt, Artificial Sequence
  Description of Artificial Sequence: Synthetic oligonucleotide
  Sense strand starting at position 527 of SEQ ID NO: 1562047
cugucuucccggcuguuua

SEQ ID NO: 1717976 - RNA, 19 nt, Artificial Sequence
  Description of Artificial Sequence: Synthetic oligonucleotide
  Antisense strand to SEQ ID NO: 1717975
uaaacagccgggaagacag

SEQ ID NO: 1717977 - RNA, 19 nt, Artificial Sequence
  Description of Artificial Sequence: Synthetic oligonucleotide
  Sense strand starting at position 621 of SEQ ID NO: 1562047
gacaaauuguuguuuguca

SEQ ID NO: 1717978 - RNA, 19 nt, Artificial Sequence
  Description of Artificial Sequence: Synthetic oligonucleotide
  Antisense strand to SEQ ID NO: 1717977
ugacaaacaacaauuuguc

SEQ ID NO: 1717979 - RNA, 19 nt, Artificial Sequence
  Description of Artificial Sequence: Synthetic oligonucleotide
  Sense strand starting at position 709 of SEQ ID NO: 1562047
agccuuugcucucccgaaa

SEQ ID NO: 1717980 - RNA, 19 nt, Artificial Sequence
  Description of Artificial Sequence: Synthetic oligonucleotide
  Antisense strand to SEQ ID NO: 1717979
uuucgggagagcaaaggcu

SEQ ID NO: 1717981 - RNA, 19 nt, Artificial Sequence
  Description of Artificial Sequence: Synthetic oligonucleotide
  Sense strand starting at position 751 of SEQ ID NO: 1562047
ccagauaccugggaaauag

SEQ ID NO: 1717982 - RNA, 19 nt, Artificial Sequence
  Description of Artificial Sequence: Synthetic oligonucleotide
  Antisense strand to SEQ ID NO: 1717981
cuauuucccagguaucugg

SEQ ID NO: 1717983 - RNA, 19 nt, Artificial Sequence
  Description of Artificial Sequence: Synthetic oligonucleotide
  Sense strand starting at position 917 of SEQ ID NO: 1562047
cccagagcucuccgacuua

SEQ ID NO: 1717984 - RNA, 19 nt, Artificial Sequence
  Description of Artificial Sequence: Synthetic oligonucleotide
  Antisense strand to SEQ ID NO: 1717983
uaagucggagagcucuggg

SEQ ID NO: 1717985 - RNA, 19 nt, Artificial Sequence
  Description of Artificial Sequence: Synthetic oligonucleotide
  Sense strand starting at position 929 of SEQ ID NO: 1562047
cgacuuagagcugaaugca

SEQ ID NO: 1717986 - RNA, 19 nt, Artificial Sequence
  Description of Artificial Sequence: Synthetic oligonucleotide
  Antisense strand to SEQ ID NO: 1717985
ugcauucagcucuaagucg

SEQ ID NO: 1717987 - RNA, 19 nt, Artificial Sequence
  Description of Artificial Sequence: Synthetic oligonucleotide
  Sense strand starting at position 947 of SEQ ID NO: 1562047
aaaguaagcgcucgaaaug

SEQ ID NO: 1717988 - RNA, 19 nt, Artificial Sequence
  Description of Artificial Sequence: Synthetic oligonucleotide
  Antisense strand to SEQ ID NO: 1717987
cauuucgagcgcuuacuuu

SEQ ID NO: 1717989 - RNA, 19 nt, Artificial Sequence
  Description of Artificial Sequence: Synthetic oligonucleotide
  Sense strand starting at position 2332 of SEQ ID NO: 1562047
ggcagagguugugggauuu

SEQ ID NO: 1717990 - RNA, 19 nt, Artificial Sequence
  Description of Artificial Sequence: Synthetic oligonucleotide
  Antisense strand to SEQ ID NO: 1717989
aaaucccacaaccucugcc

SEQ ID NO: 1717991 - RNA, 19 nt, Artificial Sequence
  Description of Artificial Sequence: Synthetic oligonucleotide
  Sense strand starting at position 2460 of SEQ ID NO: 1562047
ggccaaguuucuuugucca

SEQ ID NO: 1717992 - RNA, 19 nt, Artificial Sequence
  Description of Artificial Sequence: Synthetic oligonucleotide
  Antisense strand to SEQ ID NO: 1717991
uggacaaagaaacuuggcc

SEQ ID NO: 1717993 - RNA, 19 nt, Artificial Sequence
  Description of Artificial Sequence: Synthetic oligonucleotide
  Sense strand starting at position 2462 of SEQ ID NO: 1562047
ccaaguuucuuuguccauu

SEQ ID NO: 1717994 - RNA, 19 nt, Artificial Sequence
  Description of Artificial Sequence: Synthetic oligonucleotide
  Antisense strand to SEQ ID NO: 1717993
aauggacaaagaaacuugg

SEQ ID NO: 1717995 - RNA, 19 nt, Artificial Sequence
  Description of Artificial Sequence: Synthetic oligonucleotide
  Sense strand starting at position 2551 of SEQ ID NO: 1562047
gcugcagguucccuaucua

SEQ ID NO: 1717996 - RNA, 19 nt, Artificial Sequence
  Description of Artificial Sequence: Synthetic oligonucleotide
  Antisense strand to SEQ ID NO: 1717995
uagauagggaaccugcagc

SEQ ID NO: 1717997 - RNA, 19 nt, Artificial Sequence
  Description of Artificial Sequence: Synthetic oligonucleotide
  Sense strand starting at position 2559 of SEQ ID NO: 1562047
uucccuaucuacucagagu

SEQ ID NO: 1717998 - RNA, 19 nt, Artificial Sequence
  Description of Artificial Sequence: Synthetic oligonucleotide
  Antisense strand to SEQ ID NO: 1717997
acucugaguagauagggaa

SEQ ID NO: 1717999 - RNA, 19 nt, Artificial Sequence
  Description of Artificial Sequence: Synthetic oligonucleotide
  Sense strand starting at position 2726 of SEQ ID NO: 1562047
gaaugugucucccuuagaa

SEQ ID NO: 1718000 - RNA, 19 nt, Artificial Sequence
  Description of Artificial Sequence: Synthetic oligonucleotide
  Antisense strand to SEQ ID NO: 1717999
uucuaagggagacacauuc

SEQ ID NO: 1718001 - RNA, 19 nt, Artificial Sequence
  Description of Artificial Sequence: Synthetic oligonucleotide
  Sense strand starting at position 2728 of SEQ ID NO: 1562047
augugucucccuuagaaac

SEQ ID NO: 1718002 - RNA, 19 nt, Artificial Sequence
  Description of Artificial Sequence: Synthetic oligonucleotide
  Antisense strand to SEQ ID NO: 1718001
guuucuaagggagacacau

SEQ ID NO: 1718003 - RNA, 19 nt, Artificial Sequence
  Description of Artificial Sequence: Synthetic oligonucleotide
  Sense strand starting at position 2752 of SEQ ID NO: 1562047
uauaaauggugaucugcuu

SEQ ID NO: 1718004 - RNA, 19 nt, Artificial Sequence
  Description of Artificial Sequence: Synthetic oligonucleotide
  Antisense strand to SEQ ID NO: 1718003
aagcagaucaccauuuaua

SEQ ID NO: 1718005 - RNA, 19 nt, Artificial Sequence
  Description of Artificial Sequence: Synthetic oligonucleotide
  Sense strand starting at position 2820 of SEQ ID NO: 1562047
ggugcugagaacuguguca

SEQ ID NO: 1718006 - RNA, 19 nt, Artificial Sequence
  Description of Artificial Sequence: Synthetic oligonucleotide
  Antisense strand to SEQ ID NO: 1718005
ugacacaguucucagcacc

SEQ ID NO: 1718007 - RNA, 19 nt, Artificial Sequence
  Description of Artificial Sequence: Synthetic oligonucleotide
  Sense strand starting at position 2832 of SEQ ID NO: 1562047
ugugucagcuacccugaaa

SEQ ID NO: 1718008 - RNA, 19 nt, Artificial Sequence
  Description of Artificial Sequence: Synthetic oligonucleotide
  Antisense strand to SEQ ID NO: 1718007
uuucaggguagcugacaca

SEQ ID NO: 1718009 - RNA, 19 nt, Artificial Sequence
  Description of Artificial Sequence: Synthetic oligonucleotide
  Sense strand starting at position 2856 of SEQ ID NO: 1562047
ggccacugaucagcuuuau

SEQ ID NO: 1718010 - RNA, 19 nt, Artificial Sequence
  Description of Artificial Sequence: Synthetic oligonucleotide
  Antisense strand to SEQ ID NO: 1718009
auaaagcugaucaguggcc

SEQ ID NO: 1718011 - RNA, 19 nt, Artificial Sequence
  Description of Artificial Sequence: Synthetic oligonucleotide
  Sense strand starting at position 2888 of SEQ ID NO: 1562047
auguauauaucuucugguu

SEQ ID NO: 1718012 - RNA, 19 nt, Artificial Sequence
  Description of Artificial Sequence: Synthetic oligonucleotide
  Antisense strand to SEQ ID NO: 1718011
aaccagaagauauauacau

SEQ ID NO: 1718013 - RNA, 19 nt, Artificial Sequence
  Description of Artificial Sequence: Synthetic oligonucleotide
  Sense strand starting at position 2907 of SEQ ID NO: 1562047
cuuucuucuugggcuauaa

SEQ ID NO: 1718014 - RNA, 19 nt, Artificial Sequence
  Description of Artificial Sequence: Synthetic oligonucleotide
  Antisense strand to SEQ ID NO: 1718013
uuauagcccaagaagaaag

SEQ ID NO: 1718015 - RNA, 19 nt, Artificial Sequence
  Description of Artificial Sequence: Synthetic oligonucleotide
  Sense strand starting at position 2978 of SEQ ID NO: 1562047
cccacuacucuauguguua

SEQ ID NO: 1718016 - RNA, 19 nt, Artificial Sequence
  Description of Artificial Sequence: Synthetic oligonucleotide
  Antisense strand to SEQ ID NO: 1718015
uaacacauagaguaguggg

SEQ ID NO: 1718017 - RNA, 19 nt, Artificial Sequence
  Description of Artificial Sequence: Synthetic oligonucleotide
  Sense strand starting at position 2979 of SEQ ID NO: 1562047
ccacuacucuauguguuaa

SEQ ID NO: 1718018 - RNA, 19 nt, Artificial Sequence
  Description of Artificial Sequence: Synthetic oligonucleotide
  Antisense strand to SEQ ID NO: 1718017
uuaacacauagaguagugg

SEQ ID NO: 1718019 - RNA, 19 nt, Artificial Sequence
  Description of Artificial Sequence: Synthetic oligonucleotide
  Sense strand starting at position 2991 of SEQ ID NO: 1562047
guguuaagcuucuuuccuu

SEQ ID NO: 1718020 - RNA, 19 nt, Artificial Sequence
  Description of Artificial Sequence: Synthetic oligonucleotide
  Antisense strand to SEQ ID NO: 1718019
aaggaaagaagcuuaacac

SEQ ID NO: 1718021 - RNA, 19 nt, Artificial Sequence
  Description of Artificial Sequence: Synthetic oligonucleotide
  Sense strand starting at position 3002 of SEQ ID NO: 1562047
cuuuccuuugcagguaaua

SEQ ID NO: 1718022 - RNA, 19 nt, Artificial Sequence
  Description of Artificial Sequence: Synthetic oligonucleotide
  Antisense strand to SEQ ID NO: 1718021
uauuaccugcaaaggaaag

SEQ ID NO: 1718023 - RNA, 19 nt, Artificial Sequence
  Description of Artificial Sequence: Synthetic oligonucleotide
  Sense strand starting at position 3055 of SEQ ID NO: 1562047
gugguuucucgauaaucuc

SEQ ID NO: 1718024 - RNA, 19 nt, Artificial Sequence
  Description of Artificial Sequence: Synthetic oligonucleotide
  Antisense strand to SEQ ID NO: 1718023
gagauuaucgagaaaccac

SEQ ID NO: 1718025 - RNA, 19 nt, Artificial Sequence
  Description of Artificial Sequence: Synthetic oligonucleotide
  Sense strand starting at position 3074 of SEQ ID NO: 1562047
aucuaaucucagugucaga

SEQ ID NO: 1718026 - RNA, 19 nt, Artificial Sequence
  Description of Artificial Sequence: Synthetic oligonucleotide
  Antisense strand to SEQ ID NO: 1718025
ucugacacugagauuagau

SEQ ID NO: 1718027 - RNA, 19 nt, Artificial Sequence
  Description of Artificial Sequence: Synthetic oligonucleotide
  Sense strand starting at position 3150 of SEQ ID NO: 1562047
cccagaaagucuucccuga

SEQ ID NO: 1718028 - RNA, 19 nt, Artificial Sequence
  Description of Artificial Sequence: Synthetic oligonucleotide
  Antisense strand to SEQ ID NO: 1718027
ucagggaagacuuucuggg

SEQ ID NO: 1718029 - RNA, 19 nt, Artificial Sequence
  Description of Artificial Sequence: Synthetic oligonucleotide
  Sense strand starting at position 3225 of SEQ ID NO: 1562047
gugaaagguggccaugacu

SEQ ID NO: 1718030 - RNA, 19 nt, Artificial Sequence
  Description of Artificial Sequence: Synthetic oligonucleotide
  Antisense strand to SEQ ID NO: 1718029
agucauggccaccuuucac

SEQ ID NO: 1718031 - RNA, 19 nt, Artificial Sequence
  Description of Artificial Sequence: Synthetic oligonucleotide
  Sense strand starting at position 3261 of SEQ ID NO: 1562047
gagcucugcugcucaggaa

SEQ ID NO: 1718032 - RNA, 19 nt, Artificial Sequence
  Description of Artificial Sequence: Synthetic oligonucleotide
  Antisense strand to SEQ ID NO: 1718031
uuccugagcagcagagcuc

SEQ ID NO: 1718033 - RNA, 19 nt, Artificial Sequence
  Description of Artificial Sequence: Synthetic oligonucleotide
  Sense strand starting at position 3262 of SEQ ID NO: 1562047
agcucugcugcucaggaaa

SEQ ID NO: 1718034 - RNA, 19 nt, Artificial Sequence
  Description of Artificial Sequence: Synthetic oligonucleotide
  Antisense strand to SEQ ID NO: 1718033
uuuccugagcagcagagcu

SEQ ID NO: 1718035 - RNA, 19 nt, Artificial Sequence
  Description of Artificial Sequence: Synthetic oligonucleotide
  Sense strand starting at position 3659 of SEQ ID NO: 1562047
uguccaggcuagucguaaa

SEQ ID NO: 1718036 - RNA, 19 nt, Artificial Sequence
  Description of Artificial Sequence: Synthetic oligonucleotide
  Antisense strand to SEQ ID NO: 1718035
uuuacgacuagccuggaca

SEQ ID NO: 1718037 - RNA, 19 nt, Artificial Sequence
  Description of Artificial Sequence: Synthetic oligonucleotide
  Sense strand starting at position 477 of SEQ ID NO: 1562048
gaccuuuaggauggauguu

SEQ ID NO: 1718038 - RNA, 19 nt, Artificial Sequence
  Description of Artificial Sequence: Synthetic oligonucleotide
  Antisense strand to SEQ ID NO: 1718037
aacauccauccuaaagguc

SEQ ID NO: 1718039 - RNA, 19 nt, Artificial Sequence
  Description of Artificial Sequence: Synthetic oligonucleotide
  Sense strand starting at position 490 of SEQ ID NO: 1562048
gauguugcagaaggaaauu

SEQ ID NO: 1718040 - RNA, 19 nt, Artificial Sequence
  Description of Artificial Sequence: Synthetic oligonucleotide
  Antisense strand to SEQ ID NO: 1718039
aauuuccuucugcaacauc

SEQ ID NO: 1718041 - RNA, 19 nt, Artificial Sequence
  Description of Artificial Sequence: Synthetic oligonucleotide
  Sense strand starting at position 743 of SEQ ID NO: 1562048
gugcuugguauguguagaa

SEQ ID NO: 1718042 - RNA, 19 nt, Artificial Sequence
  Description of Artificial Sequence: Synthetic oligonucleotide
  Antisense strand to SEQ ID NO: 1718041
uucuacacauaccaagcac

SEQ ID NO: 1718043 - RNA, 19 nt, Artificial Sequence
  Description of Artificial Sequence: Synthetic oligonucleotide
  Sense strand starting at position 747 of SEQ ID NO: 1562048
uugguauguguagaauuag

SEQ ID NO: 1718044 - RNA, 19 nt, Artificial Sequence
  Description of Artificial Sequence: Synthetic oligonucleotide
  Antisense strand to SEQ ID NO: 1718043
cuaauucuacacauaccaa

SEQ ID NO: 1718045 - RNA, 19 nt, Artificial Sequence
  Description of Artificial Sequence: Synthetic oligonucleotide
  Sense strand starting at position 758 of SEQ ID NO: 1562048
agaauuagacucuggcuca

SEQ ID NO: 1718046 - RNA, 19 nt, Artificial Sequence
  Description of Artificial Sequence: Synthetic oligonucleotide
  Antisense strand to SEQ ID NO: 1718045
ugagccagagucuaauucu

SEQ ID NO: 1718047 - RNA, 19 nt, Artificial Sequence
  Description of Artificial Sequence: Synthetic oligonucleotide
  Sense strand starting at position 845 of SEQ ID NO: 1562048
ugagacauuccaugugacu

SEQ ID NO: 1718048 - RNA, 19 nt, Artificial Sequence
  Description of Artificial Sequence: Synthetic oligonucleotide
  Antisense strand to SEQ ID NO: 1718047
agucacauggaaugucuca

SEQ ID NO: 1718049 - RNA, 19 nt, Artificial Sequence
  Description of Artificial Sequence: Synthetic oligonucleotide
  Sense strand starting at position 1204 of SEQ ID NO: 1562048
agauuucuuugguaucgac

SEQ ID NO: 1718050 - RNA, 19 nt, Artificial Sequence
  Description of Artificial Sequence: Synthetic oligonucleotide
  Antisense strand to SEQ ID NO: 1718049
gucgauaccaaagaaaucu

SEQ ID NO: 1718051 - RNA, 19 nt, Artificial Sequence
  Description of Artificial Sequence: Synthetic oligonucleotide
  Sense strand starting at position 1227 of SEQ ID NO: 1562048
ccuguuuacugagugguuu

SEQ ID NO: 1718052 - RNA, 19 nt, Artificial Sequence
  Description of Artificial Sequence: Synthetic oligonucleotide
  Antisense strand to SEQ ID NO: 1718051
aaaccacucaguaaacagg

SEQ ID NO: 1718053 - RNA, 19 nt, Artificial Sequence
  Description of Artificial Sequence: Synthetic oligonucleotide
  Sense strand starting at position 1231 of SEQ ID NO: 1562048
uuuacugagugguuuccaa

SEQ ID NO: 1718054 - RNA, 19 nt, Artificial Sequence
  Description of Artificial Sequence: Synthetic oligonucleotide
  Antisense strand to SEQ ID NO: 1718053
uuggaaaccacucaguaaa

SEQ ID NO: 1718055 - RNA, 19 nt, Artificial Sequence
  Description of Artificial Sequence: Synthetic oligonucleotide
  Sense strand starting at position 1324 of SEQ ID NO: 1562048
ggugcuauaggcugagacu

SEQ ID NO: 1718056 - RNA, 19 nt, Artificial Sequence
  Description of Artificial Sequence: Synthetic oligonucleotide
  Antisense strand to SEQ ID NO: 1718055
agucucagccuauagcacc

SEQ ID NO: 1718057 - RNA, 19 nt, Artificial Sequence
  Description of Artificial Sequence: Synthetic oligonucleotide
  Sense strand starting at position 1355 of SEQ ID NO: 1562048
ugcggagaucuugagguuu

SEQ ID NO: 1718058 - RNA, 19 nt, Artificial Sequence
  Description of Artificial Sequence: Synthetic oligonucleotide
  Antisense strand to SEQ ID NO: 1718057
aaaccucaagaucuccgca

SEQ ID NO: 1718059 - RNA, 19 nt, Artificial Sequence
  Description of Artificial Sequence: Synthetic oligonucleotide
  Sense strand starting at position 1363 of SEQ ID NO: 1562048
ucuugagguuuccucuacu

SEQ ID NO: 1718060 - RNA, 19 nt, Artificial Sequence
  Description of Artificial Sequence: Synthetic oligonucleotide
  Antisense strand to SEQ ID NO: 1718059
aguagaggaaaccucaaga

SEQ ID NO: 1718061 - RNA, 19 nt, Artificial Sequence
  Description of Artificial Sequence: Synthetic oligonucleotide
  Sense strand starting at position 1537 of SEQ ID NO: 1562048
gcagucauugcggcauauc

SEQ ID NO: 1718062 - RNA, 19 nt, Artificial Sequence
  Description of Artificial Sequence: Synthetic oligonucleotide
  Antisense strand to SEQ ID NO: 1718061
gauaugccgcaaugacugc

SEQ ID NO: 1718063 - RNA, 19 nt, Artificial Sequence
  Description of Artificial Sequence: Synthetic oligonucleotide
  Sense strand starting at position 1538 of SEQ ID NO: 1562048
cagucauugcggcauaucu

SEQ ID NO: 1718064 - RNA, 19 nt, Artificial Sequence
  Description of Artificial Sequence: Synthetic oligonucleotide
  Antisense strand to SEQ ID NO: 1718063
agauaugccgcaaugacug

SEQ ID NO: 1718065 - RNA, 19 nt, Artificial Sequence
  Description of Artificial Sequence: Synthetic oligonucleotide
  Sense strand starting at position 1540 of SEQ ID NO: 1562048
gucauugcggcauaucuga

SEQ ID NO: 1718066 - RNA, 19 nt, Artificial Sequence
  Description of Artificial Sequence: Synthetic oligonucleotide
  Antisense strand to SEQ ID NO: 1718065
ucagauaugccgcaaugac

SEQ ID NO: 1718067 - RNA, 19 nt, Artificial Sequence
  Description of Artificial Sequence: Synthetic oligonucleotide
  Sense strand starting at position 1648 of SEQ ID NO: 1562048
cuccuagugccaggagaaa

SEQ ID NO: 1718068 - RNA, 19 nt, Artificial Sequence
  Description of Artificial Sequence: Synthetic oligonucleotide
  Antisense strand to SEQ ID NO: 1718067
uuucuccuggcacuaggag

SEQ ID NO: 1718069 - RNA, 19 nt, Artificial Sequence
  Description of Artificial Sequence: Synthetic oligonucleotide
  Sense strand starting at position 1851 of SEQ ID NO: 1562048
acgacuaccuaagauuaau

SEQ ID NO: 1718070 - RNA, 19 nt, Artificial Sequence
  Description of Artificial Sequence: Synthetic oligonucleotide
  Antisense strand to SEQ ID NO: 1718069
auuaaucuuagguagucgu

SEQ ID NO: 1718071 - RNA, 19 nt, Artificial Sequence
  Description of Artificial Sequence: Synthetic oligonucleotide
  Sense strand starting at position 1857 of SEQ ID NO: 1562048
accuaagauuaauaaggua

SEQ ID NO: 1718072 - RNA, 19 nt, Artificial Sequence
  Description of Artificial Sequence: Synthetic oligonucleotide
  Antisense strand to SEQ ID NO: 1718071
uaccuuauuaaucuuaggu

SEQ ID NO: 1718073 - RNA, 19 nt, Artificial Sequence
  Description of Artificial Sequence: Synthetic oligonucleotide
  Sense strand starting at position 1996 of SEQ ID NO: 1562048
gcauuugccucagagcaaa

SEQ ID NO: 1718074 - RNA, 19 nt, Artificial Sequence
  Description of Artificial Sequence: Synthetic oligonucleotide
  Antisense strand to SEQ ID NO: 1718073
uuugcucugaggcaaaugc

SEQ ID NO: 1718075 - RNA, 19 nt, Artificial Sequence
  Description of Artificial Sequence: Synthetic oligonucleotide
  Sense strand starting at position 2008 of SEQ ID NO: 1562048
gagcaaaugucccagagaa

SEQ ID NO: 1718076 - RNA, 19 nt, Artificial Sequence
  Description of Artificial Sequence: Synthetic oligonucleotide
  Antisense strand to SEQ ID NO: 1718075
uucucugggacauuugcuc

SEQ ID NO: 1718077 - RNA, 19 nt, Artificial Sequence
  Description of Artificial Sequence: Synthetic oligonucleotide
  Sense strand starting at position 2192 of SEQ ID NO: 1562048
gcccuaaaugucuguguga

SEQ ID NO: 1718078 - RNA, 19 nt, Artificial Sequence
  Description of Artificial Sequence: Synthetic oligonucleotide
  Antisense strand to SEQ ID NO: 1718077
ucacacagacauuuagggc

SEQ ID NO: 1718079 - RNA, 19 nt, Artificial Sequence
  Description of Artificial Sequence: Synthetic oligonucleotide
  Sense strand starting at position 2193 of SEQ ID NO: 1562048
cccuaaaugucugugugau

SEQ ID NO: 1718080 - RNA, 19 nt, Artificial Sequence
  Description of Artificial Sequence: Synthetic oligonucleotide
  Antisense strand to SEQ ID NO: 1718079
aucacacagacauuuaggg

SEQ ID NO: 1718081 - RNA, 19 nt, Artificial Sequence
  Description of Artificial Sequence: Synthetic oligonucleotide
  Sense strand starting at position 2194 of SEQ ID NO: 1562048
ccuaaaugucugugugaug

SEQ ID NO: 1718082 - RNA, 19 nt, Artificial Sequence
  Description of Artificial Sequence: Synthetic oligonucleotide
  Antisense strand to SEQ ID NO: 1718081
caucacacagacauuuagg

SEQ ID NO: 1718083 - RNA, 19 nt, Artificial Sequence
  Description of Artificial Sequence: Synthetic oligonucleotide
  Sense strand starting at position 2195 of SEQ ID NO: 1562048
cuaaaugucugugugauga

SEQ ID NO: 1718084 - RNA, 19 nt, Artificial Sequence
  Description of Artificial Sequence: Synthetic oligonucleotide
  Antisense strand to SEQ ID NO: 1718083
ucaucacacagacauuuag

SEQ ID NO: 1718085 - RNA, 19 nt, Artificial Sequence
  Description of Artificial Sequence: Synthetic oligonucleotide
  Sense strand starting at position 2444 of SEQ ID NO: 1562048
cagagauccuccuucucga

SEQ ID NO: 1718086 - RNA, 19 nt, Artificial Sequence
  Description of Artificial Sequence: Synthetic oligonucleotide
  Antisense strand to SEQ ID NO: 1718085
ucgagaaggaggaucucug

SEQ ID NO: 1718087 - RNA, 19 nt, Artificial Sequence
  Description of Artificial Sequence: Synthetic oligonucleotide
  Sense strand starting at position 2471 of SEQ ID NO: 1562048
gaagcuaguguccacacaa

SEQ ID NO: 1718088 - RNA, 19 nt, Artificial Sequence
  Description of Artificial Sequence: Synthetic oligonucleotide
  Antisense strand to SEQ ID NO: 1718087
uuguguggacacuagcuuc

SEQ ID NO: 1718089 - RNA, 19 nt, Artificial Sequence
  Description of Artificial Sequence: Synthetic oligonucleotide
  Sense strand starting at position 2492 of SEQ ID NO: 1562048
ccacuucuaccugguuuga

SEQ ID NO: 1718090 - RNA, 19 nt, Artificial Sequence
  Description of Artificial Sequence: Synthetic oligonucleotide
  Antisense strand to SEQ ID NO: 1718089
ucaaaccagguagaagugg

SEQ ID NO: 1718091 - RNA, 19 nt, Artificial Sequence
  Description of Artificial Sequence: Synthetic oligonucleotide
  Sense strand starting at position 2494 of SEQ ID NO: 1562048
acuucuaccugguuugaau

SEQ ID NO: 1718092 - RNA, 19 nt, Artificial Sequence
  Description of Artificial Sequence: Synthetic oligonucleotide
  Antisense strand to SEQ ID NO: 1718091
auucaaaccagguagaagu

SEQ ID NO: 1718093 - RNA, 19 nt, Artificial Sequence
  Description of Artificial Sequence: Synthetic oligonucleotide
  Sense strand starting at position 2538 of SEQ ID NO: 1562048
ccucaaagucauggcgaau

SEQ ID NO: 1718094 - RNA, 19 nt, Artificial Sequence
  Description of Artificial Sequence: Synthetic oligonucleotide
  Antisense strand to SEQ ID NO: 1718093
auucgccaugacuuugagg

SEQ ID NO: 1718095 - RNA, 19 nt, Artificial Sequence
  Description of Artificial Sequence: Synthetic oligonucleotide
  Sense strand starting at position 3249 of SEQ ID NO: 1562048
guuugauuccauugauaug

SEQ ID NO: 1718096 - RNA, 19 nt, Artificial Sequence
  Description of Artificial Sequence: Synthetic oligonucleotide
  Antisense strand to SEQ ID NO: 1718095
cauaucaauggaaucaaac

SEQ ID NO: 1718097 - RNA, 19 nt, Artificial Sequence
  Description of Artificial Sequence: Synthetic oligonucleotide
  Sense strand starting at position 3300 of SEQ ID NO: 1562048
guaaguagacuagaagcua

SEQ ID NO: 1718098 - RNA, 19 nt, Artificial Sequence
  Description of Artificial Sequence: Synthetic oligonucleotide
  Antisense strand to SEQ ID NO: 1718097
uagcuucuagucuacuuac

SEQ ID NO: 1718099 - RNA, 19 nt, Artificial Sequence
  Description of Artificial Sequence: Synthetic oligonucleotide
  Sense strand starting at position 3395 of SEQ ID NO: 1562048
aguucuggacauggauaau

SEQ ID NO: 1718100 - RNA, 19 nt, Artificial Sequence
  Description of Artificial Sequence: Synthetic oligonucleotide
  Antisense strand to SEQ ID NO: 1718099
auuauccauguccagaacu

SEQ ID NO: 1718101 - RNA, 19 nt, Artificial Sequence
  Description of Artificial Sequence: Synthetic oligonucleotide
  Sense strand starting at position 3428 of SEQ ID NO: 1562048
caacguugugaauggaguu

SEQ ID NO: 1718102 - RNA, 19 nt, Artificial Sequence
  Description of Artificial Sequence: Synthetic oligonucleotide
  Antisense strand to SEQ ID NO: 1718101
aacuccauucacaacguug

SEQ ID NO: 1718103 - RNA, 19 nt, Artificial Sequence
  Description of Artificial Sequence: Synthetic oligonucleotide
  Sense strand starting at position 3429 of SEQ ID NO: 1562048
aacguugugaauggaguua

SEQ ID NO: 1718104 - RNA, 19 nt, Artificial Sequence
  Description of Artificial Sequence: Synthetic oligonucleotide
  Antisense strand to SEQ ID NO: 1718103
uaacuccauucacaacguu

SEQ ID NO: 1718105 - RNA, 19 nt, Artificial Sequence
  Description of Artificial Sequence: Synthetic oligonucleotide
  Sense strand starting at position 3502 of SEQ ID NO: 1562048
cguacuuugccacaauaaa

SEQ ID NO: 1718106 - RNA, 19 nt, Artificial Sequence
  Description of Artificial Sequence: Synthetic oligonucleotide
  Antisense strand to SEQ ID NO: 1718105
uuuauuguggcaaaguacg

SEQ ID NO: 1718107 - RNA, 19 nt, Artificial Sequence
  Description of Artificial Sequence: Synthetic oligonucleotide
  Sense strand starting at position 3629 of SEQ ID NO: 1562048
ugcuaauauagauggguga

SEQ ID NO: 1718108 - RNA, 19 nt, Artificial Sequence
  Description of Artificial Sequence: Synthetic oligonucleotide
  Antisense strand to SEQ ID NO: 1718107
ucacccaucuauauuagca

SEQ ID NO: 1718109 - RNA, 19 nt, Artificial Sequence
  Description of Artificial Sequence: Synthetic oligonucleotide
  Sense strand starting at position 3630 of SEQ ID NO: 1562048
gcuaauauagaugggugau

SEQ ID NO: 1718110 - RNA, 19 nt, Artificial Sequence
  Description of Artificial Sequence: Synthetic oligonucleotide
  Antisense strand to SEQ ID NO: 1718109
aucacccaucuauauuagc

SEQ ID NO: 1718111 - RNA, 19 nt, Artificial Sequence
  Description of Artificial Sequence: Synthetic oligonucleotide
  Sense strand starting at position 3665 of SEQ ID NO: 1562048
gcacauaguuugguaagcu

SEQ ID NO: 1718112 - RNA, 19 nt, Artificial Sequence
  Description of Artificial Sequence: Synthetic oligonucleotide
  Antisense strand to SEQ ID NO: 1718111
agcuuaccaaacuaugugc

SEQ ID NO: 1718113 - RNA, 19 nt, Artificial Sequence
  Description of Artificial Sequence: Synthetic oligonucleotide
  Sense strand starting at position 3674 of SEQ ID NO: 1562048
uugguaagcugcuucuuaa

SEQ ID NO: 1718114 - RNA, 19 nt, Artificial Sequence
  Description of Artificial Sequence: Synthetic oligonucleotide
  Antisense strand to SEQ ID NO: 1718113
uuaagaagcagcuuaccaa

SEQ ID NO: 1718115 - RNA, 19 nt, Artificial Sequence
  Description of Artificial Sequence: Synthetic oligonucleotide
  Sense strand starting at position 3927 of SEQ ID NO: 1562048
aguugagaucauggcauug

SEQ ID NO: 1718116 - RNA, 19 nt, Artificial Sequence
  Description of Artificial Sequence: Synthetic oligonucleotide
  Antisense strand to SEQ ID NO: 1718115
caaugccaugaucucaacu

SEQ ID NO: 1718117 - RNA, 19 nt, Artificial Sequence
  Description of Artificial Sequence: Synthetic oligonucleotide
  Sense strand starting at position 652 of SEQ ID NO: 1562049
ggcugcuguugaucacaua

SEQ ID NO: 1718118 - RNA, 19 nt, Artificial Sequence
  Description of Artificial Sequence: Synthetic oligonucleotide
  Antisense strand to SEQ ID NO: 1718117
uaugugaucaacagcagcc

SEQ ID NO: 1718119 - RNA, 19 nt, Artificial Sequence
  Description of Artificial Sequence: Synthetic oligonucleotide
  Sense strand starting at position 665 of SEQ ID NO: 1562049
cacauacuguucuguguca

SEQ ID NO: 1718120 - RNA, 19 nt, Artificial Sequence
  Description of Artificial Sequence: Synthetic oligonucleotide
  Antisense strand to SEQ ID NO: 1718119
ugacacagaacaguaugug

SEQ ID NO: 1718121 - RNA, 19 nt, Artificial Sequence
  Description of Artificial Sequence: Synthetic oligonucleotide
  Sense strand starting at position 666 of SEQ ID NO: 1562049
acauacuguucugugucaa

SEQ ID NO: 1718122 - RNA, 19 nt, Artificial Sequence
  Description of Artificial Sequence: Synthetic oligonucleotide
  Antisense strand to SEQ ID NO: 1718121
uugacacagaacaguaugu

SEQ ID NO: 1718123 - RNA, 19 nt, Artificial Sequence
  Description of Artificial Sequence: Synthetic oligonucleotide
  Sense strand starting at position 667 of SEQ ID NO: 1562049
cauacuguucugugucaag

SEQ ID NO: 1718124 - RNA, 19 nt, Artificial Sequence
  Description of Artificial Sequence: Synthetic oligonucleotide
  Antisense strand to SEQ ID NO: 1718123
cuugacacagaacaguaug

SEQ ID NO: 1718125 - RNA, 19 nt, Artificial Sequence
  Description of Artificial Sequence: Synthetic oligonucleotide
  Sense strand starting at position 901 of SEQ ID NO: 1562049
ggaagugcugauugucuca

SEQ ID NO: 1718126 - RNA, 19 nt, Artificial Sequence
  Description of Artificial Sequence: Synthetic oligonucleotide
  Antisense strand to SEQ ID NO: 1718125
ugagacaaucagcacuucc

SEQ ID NO: 1718127 - RNA, 19 nt, Artificial Sequence
  Description of Artificial Sequence: Synthetic oligonucleotide
  Sense strand starting at position 903 of SEQ ID NO: 1562049
aagugcugauugucucauu

SEQ ID NO: 1718128 - RNA, 19 nt, Artificial Sequence
  Description of Artificial Sequence: Synthetic oligonucleotide
  Antisense strand to SEQ ID NO: 1718127
aaugagacaaucagcacuu

SEQ ID NO: 1718129 - RNA, 19 nt, Artificial Sequence
  Description of Artificial Sequence: Synthetic oligonucleotide
  Sense strand starting at position 906 of SEQ ID NO: 1562049
ugcugauugucucauucua

SEQ ID NO: 1718130 - RNA, 19 nt, Artificial Sequence
  Description of Artificial Sequence: Synthetic oligonucleotide
  Antisense strand to SEQ ID NO: 1718129
uagaaugagacaaucagca

SEQ ID NO: 1718131 - RNA, 19 nt, Artificial Sequence
  Description of Artificial Sequence: Synthetic oligonucleotide
  Sense strand starting at position 908 of SEQ ID NO: 1562049
cugauugucucauucuaca

SEQ ID NO: 1718132 - RNA, 19 nt, Artificial Sequence
  Description of Artificial Sequence: Synthetic oligonucleotide
  Antisense strand to SEQ ID NO: 1718131
uguagaaugagacaaucag

SEQ ID NO: 1718133 - RNA, 19 nt, Artificial Sequence
  Description of Artificial Sequence: Synthetic oligonucleotide
  Sense strand starting at position 913 of SEQ ID NO: 1562049
ugucucauucuacagguuu

SEQ ID NO: 1718134 - RNA, 19 nt, Artificial Sequence
  Description of Artificial Sequence: Synthetic oligonucleotide
  Antisense strand to SEQ ID NO: 1718133
aaaccuguagaaugagaca

SEQ ID NO: 1718135 - RNA, 19 nt, Artificial Sequence
  Description of Artificial Sequence: Synthetic oligonucleotide
  Sense strand starting at position 1080 of SEQ ID NO: 1562049
cucaguuucugugacugua

SEQ ID NO: 1718136 - RNA, 19 nt, Artificial Sequence
  Description of Artificial Sequence: Synthetic oligonucleotide
  Antisense strand to SEQ ID NO: 1718135
uacagucacagaaacugag

SEQ ID NO: 1718137 - RNA, 19 nt, Artificial Sequence
  Description of Artificial Sequence: Synthetic oligonucleotide
  Sense strand starting at position 1082 of SEQ ID NO: 1562049
caguuucugugacuguaga

SEQ ID NO: 1718138 - RNA, 19 nt, Artificial Sequence
  Description of Artificial Sequence: Synthetic oligonucleotide
  Antisense strand to SEQ ID NO: 1718137
ucuacagucacagaaacug

SEQ ID NO: 1718139 - RNA, 19 nt, Artificial Sequence
  Description of Artificial Sequence: Synthetic oligonucleotide
  Sense strand starting at position 1083 of SEQ ID NO: 1562049
aguuucugugacuguagaa

SEQ ID NO: 1718140 - RNA, 19 nt, Artificial Sequence
  Description of Artificial Sequence: Synthetic oligonucleotide
  Antisense strand to SEQ ID NO: 1718139
uucuacagucacagaaacu

SEQ ID NO: 1718141 - RNA, 19 nt, Artificial Sequence
  Description of Artificial Sequence: Synthetic oligonucleotide
  Sense strand starting at position 1226 of SEQ ID NO: 1562049
gugcacucguguguacaca

SEQ ID NO: 1718142 - RNA, 19 nt, Artificial Sequence
  Description of Artificial Sequence: Synthetic oligonucleotide
  Antisense strand to SEQ ID NO: 1718141
uguguacacacgagugcac

SEQ ID NO: 1718143 - RNA, 19 nt, Artificial Sequence
  Description of Artificial Sequence: Synthetic oligonucleotide
  Sense strand starting at position 1227 of SEQ ID NO: 1562049
ugcacucguguguacacau

SEQ ID NO: 1718144 - RNA, 19 nt, Artificial Sequence
  Description of Artificial Sequence: Synthetic oligonucleotide
  Antisense strand to SEQ ID NO: 1718143
auguguacacacgagugca

SEQ ID NO: 1718145 - RNA, 19 nt, Artificial Sequence
  Description of Artificial Sequence: Synthetic oligonucleotide
  Sense strand starting at position 1684 of SEQ ID NO: 1562049
ugagcucucuccguugcua

SEQ ID NO: 1718146 - RNA, 19 nt, Artificial Sequence
  Description of Artificial Sequence: Synthetic oligonucleotide
  Antisense strand to SEQ ID NO: 1718145
uagcaacggagagagcuca

SEQ ID NO: 1718147 - RNA, 19 nt, Artificial Sequence
  Description of Artificial Sequence: Synthetic oligonucleotide
  Sense strand starting at position 1939 of SEQ ID NO: 1562049
cgcucuucacagggagaga

SEQ ID NO: 1718148 - RNA, 19 nt, Artificial Sequence
  Description of Artificial Sequence: Synthetic oligonucleotide
  Antisense strand to SEQ ID NO: 1718147
ucucucccugugaagagcg

SEQ ID NO: 1718149 - RNA, 19 nt, Artificial Sequence
  Description of Artificial Sequence: Synthetic oligonucleotide
  Sense strand starting at position 2129 of SEQ ID NO: 1562049
gccacauagaguugggauu

SEQ ID NO: 1718150 - RNA, 19 nt, Artificial Sequence
  Description of Artificial Sequence: Synthetic oligonucleotide
  Antisense strand to SEQ ID NO: 1718149
aaucccaacucuauguggc

SEQ ID NO: 1718151 - RNA, 19 nt, Artificial Sequence
  Description of Artificial Sequence: Synthetic oligonucleotide
  Sense strand starting at position 2140 of SEQ ID NO: 1562049
uugggauuguuuccucaua

SEQ ID NO: 1718152 - RNA, 19 nt, Artificial Sequence
  Description of Artificial Sequence: Synthetic oligonucleotide
  Antisense strand to SEQ ID NO: 1718151
uaugaggaaacaaucccaa

SEQ ID NO: 1718153 - RNA, 19 nt, Artificial Sequence
  Description of Artificial Sequence: Synthetic oligonucleotide
  Sense strand starting at position 2141 of SEQ ID NO: 1562049
ugggauuguuuccucauaa

SEQ ID NO: 1718154 - RNA, 19 nt, Artificial Sequence
  Description of Artificial Sequence: Synthetic oligonucleotide
  Antisense strand to SEQ ID NO: 1718153
uuaugaggaaacaauccca

SEQ ID NO: 1718155 - RNA, 19 nt, Artificial Sequence
  Description of Artificial Sequence: Synthetic oligonucleotide
  Sense strand starting at position 2142 of SEQ ID NO: 1562049
gggauuguuuccucauaau

SEQ ID NO: 1718156 - RNA, 19 nt, Artificial Sequence
  Description of Artificial Sequence: Synthetic oligonucleotide
  Antisense strand to SEQ ID NO: 1718155
auuaugaggaaacaauccc

SEQ ID NO: 1718157 - RNA, 19 nt, Artificial Sequence
  Description of Artificial Sequence: Synthetic oligonucleotide
  Sense strand starting at position 2154 of SEQ ID NO: 1562049
ucauaaucacugugaggcu

SEQ ID NO: 1718158 - RNA, 19 nt, Artificial Sequence
  Description of Artificial Sequence: Synthetic oligonucleotide
  Antisense strand to SEQ ID NO: 1718157
agccucacagugauuauga

SEQ ID NO: 1718159 - RNA, 19 nt, Artificial Sequence
  Description of Artificial Sequence: Synthetic oligonucleotide
  Sense strand starting at position 2189 of SEQ ID NO: 1562049
gcugguuagcacugagaau

SEQ ID NO: 1718160 - RNA, 19 nt, Artificial Sequence
  Description of Artificial Sequence: Synthetic oligonucleotide
  Antisense strand to SEQ ID NO: 1718159
auucucagugcuaaccagc

SEQ ID NO: 1718161 - RNA, 19 nt, Artificial Sequence
  Description of Artificial Sequence: Synthetic oligonucleotide
  Sense strand starting at position 2190 of SEQ ID NO: 1562049
cugguuagcacugagaauc

SEQ ID NO: 1718162 - RNA, 19 nt, Artificial Sequence
  Description of Artificial Sequence: Synthetic oligonucleotide
  Antisense strand to SEQ ID NO: 1718161
gauucucagugcuaaccag

SEQ ID NO: 1718163 - RNA, 19 nt, Artificial Sequence
  Description of Artificial Sequence: Synthetic oligonucleotide
  Sense strand starting at position 2209 of SEQ ID NO: 1562049
caguuuggugccugugaca

SEQ ID NO: 1718164 - RNA, 19 nt, Artificial Sequence
  Description of Artificial Sequence: Synthetic oligonucleotide
  Antisense strand to SEQ ID NO: 1718163
ugucacaggcaccaaacug

SEQ ID NO: 1718165 - RNA, 19 nt, Artificial Sequence
  Description of Artificial Sequence: Synthetic oligonucleotide
  Sense strand starting at position 2463 of SEQ ID NO: 1562049
aagagcugucccugccaga

SEQ ID NO: 1718166 - RNA, 19 nt, Artificial Sequence
  Description of Artificial Sequence: Synthetic oligonucleotide
  Antisense strand to SEQ ID NO: 1718165
ucuggcagggacagcucuu

SEQ ID NO: 1718167 - RNA, 19 nt, Artificial Sequence
  Description of Artificial Sequence: Synthetic oligonucleotide
  Sense strand starting at position 2772 of SEQ ID NO: 1562049
guguguucccuggacagca

SEQ ID NO: 1718168 - RNA, 19 nt, Artificial Sequence
  Description of Artificial Sequence: Synthetic oligonucleotide
  Antisense strand to SEQ ID NO: 1718167
ugcuguccagggaacacac

SEQ ID NO: 1718169 - RNA, 19 nt, Artificial Sequence
  Description of Artificial Sequence: Synthetic oligonucleotide
  Sense strand starting at position 2911 of SEQ ID NO: 1562049
ugucuuagcucugcacgga

SEQ ID NO: 1718170 - RNA, 19 nt, Artificial Sequence
  Description of Artificial Sequence: Synthetic oligonucleotide
  Antisense strand to SEQ ID NO: 1718169
uccgugcagagcuaagaca

SEQ ID NO: 1718171 - RNA, 19 nt, Artificial Sequence
  Description of Artificial Sequence: Synthetic oligonucleotide
  Sense strand starting at position 2912 of SEQ ID NO: 1562049
gucuuagcucugcacggaa

SEQ ID NO: 1718172 - RNA, 19 nt, Artificial Sequence
  Description of Artificial Sequence: Synthetic oligonucleotide
  Antisense strand to SEQ ID NO: 1718171
uuccgugcagagcuaagac

SEQ ID NO: 1718173 - RNA, 19 nt, Artificial Sequence
  Description of Artificial Sequence: Synthetic oligonucleotide
  Sense strand starting at position 3375 of SEQ ID NO: 1562049
gugugugcaugucuuacau

SEQ ID NO: 1718174 - RNA, 19 nt, Artificial Sequence
  Description of Artificial Sequence: Synthetic oligonucleotide
  Antisense strand to SEQ ID NO: 1718173
auguaagacaugcacacac

SEQ ID NO: 1718175 - RNA, 19 nt, Artificial Sequence
  Description of Artificial Sequence: Synthetic oligonucleotide
  Sense strand starting at position 3381 of SEQ ID NO: 1562049
gcaugucuuacaugugugu

SEQ ID NO: 1718176 - RNA, 19 nt, Artificial Sequence
  Description of Artificial Sequence: Synthetic oligonucleotide
  Antisense strand to SEQ ID NO: 1718175
acacacauguaagacaugc

SEQ ID NO: 1718177 - RNA, 19 nt, Artificial Sequence
  Description of Artificial Sequence: Synthetic oligonucleotide
  Sense strand starting at position 3497 of SEQ ID NO: 1562049
cccagauucucguugaaau

SEQ ID NO: 1718178 - RNA, 19 nt, Artificial Sequence
  Description of Artificial Sequence: Synthetic oligonucleotide
  Antisense strand to SEQ ID NO: 1718177
auuucaacgagaaucuggg

SEQ ID NO: 1718179 - RNA, 19 nt, Artificial Sequence
  Description of Artificial Sequence: Synthetic oligonucleotide
  Sense strand starting at position 3498 of SEQ ID NO: 1562049
ccagauucucguugaaauc

SEQ ID NO: 1718180 - RNA, 19 nt, Artificial Sequence
  Description of Artificial Sequence: Synthetic oligonucleotide
  Antisense strand to SEQ ID NO: 1718179
gauuucaacgagaaucugg

SEQ ID NO: 1718181 - RNA, 19 nt, Artificial Sequence
  Description of Artificial Sequence: Synthetic oligonucleotide
  Sense strand starting at position 3594 of SEQ ID NO: 1562049
ggaucaguguccuucuaca

SEQ ID NO: 1718182 - RNA, 19 nt, Artificial Sequence
  Description of Artificial Sequence: Synthetic oligonucleotide
  Antisense strand to SEQ ID NO: 1718181
uguagaaggacacugaucc

SEQ ID NO: 1718183 - RNA, 19 nt, Artificial Sequence
  Description of Artificial Sequence: Synthetic oligonucleotide
  Sense strand starting at position 3661 of SEQ ID NO: 1562049
gauggugccgucuaugaac

SEQ ID NO: 1718184 - RNA, 19 nt, Artificial Sequence
  Description of Artificial Sequence: Synthetic oligonucleotide
  Antisense strand to SEQ ID NO: 1718183
guucauagacggcaccauc

SEQ ID NO: 1718185 - RNA, 19 nt, Artificial Sequence
  Description of Artificial Sequence: Synthetic oligonucleotide
  Sense strand starting at position 3669 of SEQ ID NO: 1562049
cgucuaugaaccgggaagu

SEQ ID NO: 1718186 - RNA, 19 nt, Artificial Sequence
  Description of Artificial Sequence: Synthetic oligonucleotide
  Antisense strand to SEQ ID NO: 1718185
acuucccgguucauagacg

SEQ ID NO: 1718187 - RNA, 19 nt, Artificial Sequence
  Description of Artificial Sequence: Synthetic oligonucleotide
  Sense strand starting at position 3708 of SEQ ID NO: 1562049
acaaguuggugccuugauu

SEQ ID NO: 1718188 - RNA, 19 nt, Artificial Sequence
  Description of Artificial Sequence: Synthetic oligonucleotide
  Antisense strand to SEQ ID NO: 1718187
aaucaaggcaccaacuugu

SEQ ID NO: 1718189 - RNA, 19 nt, Artificial Sequence
  Description of Artificial Sequence: Synthetic oligonucleotide
  Sense strand starting at position 3735 of SEQ ID NO: 1562049
gcagccuccagguaugaau

SEQ ID NO: 1718190 - RNA, 19 nt, Artificial Sequence
  Description of Artificial Sequence: Synthetic oligonucleotide
  Antisense strand to SEQ ID NO: 1718189
auucauaccuggaggcugc

SEQ ID NO: 1718191 - RNA, 19 nt, Artificial Sequence
  Description of Artificial Sequence: Synthetic oligonucleotide
  Sense strand starting at position 3870 of SEQ ID NO: 1562049
uugaguuccucccugagca

SEQ ID NO: 1718192 - RNA, 19 nt, Artificial Sequence
  Description of Artificial Sequence: Synthetic oligonucleotide
  Antisense strand to SEQ ID NO: 1718191
ugcucagggaggaacucaa

SEQ ID NO: 1718193 - RNA, 19 nt, Artificial Sequence
  Description of Artificial Sequence: Synthetic oligonucleotide
  Sense strand starting at position 3871 of SEQ ID NO: 1562049
ugaguuccucccugagcaa

SEQ ID NO: 1718194 - RNA, 19 nt, Artificial Sequence
  Description of Artificial Sequence: Synthetic oligonucleotide
  Antisense strand to SEQ ID NO: 1718193
uugcucagggaggaacuca

SEQ ID NO: 1718195 - RNA, 19 nt, Artificial Sequence
  Description of Artificial Sequence: Synthetic oligonucleotide
  Sense strand starting at position 3968 of SEQ ID NO: 1562049
uguccaggccuuggugaua

SEQ ID NO: 1718196 - RNA, 19 nt, Artificial Sequence
  Description of Artificial Sequence: Synthetic oligonucleotide
  Antisense strand to SEQ ID NO: 1718195
uaucaccaaggccuggaca

SEQ ID NO: 1718197 - RNA, 19 nt, Artificial Sequence
  Description of Artificial Sequence: Synthetic oligonucleotide
  Sense strand starting at position 467 of SEQ ID NO: 1562050
ccuuauucuuucuuaggua

SEQ ID NO: 1718198 - RNA, 19 nt, Artificial Sequence
  Description of Artificial Sequence: Synthetic oligonucleotide
  Antisense strand to SEQ ID NO: 1718197
uaccuaagaaagaauaagg

SEQ ID NO: 1718199 - RNA, 19 nt, Artificial Sequence
  Description of Artificial Sequence: Synthetic oligonucleotide
  Sense strand starting at position 498 of SEQ ID NO: 1562050
ugguuccuccacuaugaua

SEQ ID NO: 1718200 - RNA, 19 nt, Artificial Sequence
  Description of Artificial Sequence: Synthetic oligonucleotide
  Antisense strand to SEQ ID NO: 1718199
uaucauaguggaggaacca

SEQ ID NO: 1718201 - RNA, 19 nt, Artificial Sequence
  Description of Artificial Sequence: Synthetic oligonucleotide
  Sense strand starting at position 500 of SEQ ID NO: 1562050
guuccuccacuaugauauu

SEQ ID NO: 1718202 - RNA, 19 nt, Artificial Sequence
  Description of Artificial Sequence: Synthetic oligonucleotide
  Antisense strand to SEQ ID NO: 1718201
aauaucauaguggaggaac

SEQ ID NO: 1718203 - RNA, 19 nt, Artificial Sequence
  Description of Artificial Sequence: Synthetic oligonucleotide
  Sense strand starting at position 506 of SEQ ID NO: 1562050
ccacuaugauauucuuguu

SEQ ID NO: 1718204 - RNA, 19 nt, Artificial Sequence
  Description of Artificial Sequence: Synthetic oligonucleotide
  Antisense strand to SEQ ID NO: 1718203
aacaagaauaucauagugg

SEQ ID NO: 1718205 - RNA, 19 nt, Artificial Sequence
  Description of Artificial Sequence: Synthetic oligonucleotide
  Sense strand starting at position 512 of SEQ ID NO: 1562050
ugauauucuuguucucuac

SEQ ID NO: 1718206 - RNA, 19 nt, Artificial Sequence
  Description of Artificial Sequence: Synthetic oligonucleotide
  Antisense strand to SEQ ID NO: 1718205
guagagaacaagaauauca

SEQ ID NO: 1718207 - RNA, 19 nt, Artificial Sequence
  Description of Artificial Sequence: Synthetic oligonucleotide
  Sense strand starting at position 626 of SEQ ID NO: 1562050
gaaaccagguaucuaugau

SEQ ID NO: 1718208 - RNA, 19 nt, Artificial Sequence
  Description of Artificial Sequence: Synthetic oligonucleotide
  Antisense strand to SEQ ID NO: 1718207
aucauagauaccugguuuc

SEQ ID NO: 1718209 - RNA, 19 nt, Artificial Sequence
  Description of Artificial Sequence: Synthetic oligonucleotide
  Sense strand starting at position 717 of SEQ ID NO: 1562050
cugauaugaucguuaccaa

SEQ ID NO: 1718210 - RNA, 19 nt, Artificial Sequence
  Description of Artificial Sequence: Synthetic oligonucleotide
  Antisense strand to SEQ ID NO: 1718209
uugguaacgaucauaucag

SEQ ID NO: 1718211 - RNA, 19 nt, Artificial Sequence
  Description of Artificial Sequence: Synthetic oligonucleotide
  Sense strand starting at position 718 of SEQ ID NO: 1562050
ugauaugaucguuaccaau

SEQ ID NO: 1718212 - RNA, 19 nt, Artificial Sequence
  Description of Artificial Sequence: Synthetic oligonucleotide
  Antisense strand to SEQ ID NO: 1718211
auugguaacgaucauauca

SEQ ID NO: 1718213 - RNA, 19 nt, Artificial Sequence
  Description of Artificial Sequence: Synthetic oligonucleotide
  Sense strand starting at position 720 of SEQ ID NO: 1562050
auaugaucguuaccaauuc

SEQ ID NO: 1718214 - RNA, 19 nt, Artificial Sequence
  Description of Artificial Sequence: Synthetic oligonucleotide
  Antisense strand to SEQ ID NO: 1718213
gaauugguaacgaucauau

SEQ ID NO: 1718215 - RNA, 19 nt, Artificial Sequence
  Description of Artificial Sequence: Synthetic oligonucleotide
  Sense strand starting at position 740 of SEQ ID NO: 1562050
guauuaacuuguguuauga

SEQ ID NO: 1718216 - RNA, 19 nt, Artificial Sequence
  Description of Artificial Sequence: Synthetic oligonucleotide
  Antisense strand to SEQ ID NO: 1718215
ucauaacacaaguuaauac

SEQ ID NO: 1718217 - RNA, 19 nt, Artificial Sequence
  Description of Artificial Sequence: Synthetic oligonucleotide
  Sense strand starting at position 750 of SEQ ID NO: 1562050
guguuaugaaaugaaguag

SEQ ID NO: 1718218 - RNA, 19 nt, Artificial Sequence
  Description of Artificial Sequence: Synthetic oligonucleotide
  Antisense strand to SEQ ID NO: 1718217
cuacuucauuucauaacac

SEQ ID NO: 1718219 - RNA, 19 nt, Artificial Sequence
  Description of Artificial Sequence: Synthetic oligonucleotide
  Sense strand starting at position 767 of SEQ ID NO: 1562050
agguuaagugaccaucuuu

SEQ ID NO: 1718220 - RNA, 19 nt, Artificial Sequence
  Description of Artificial Sequence: Synthetic oligonucleotide
  Antisense strand to SEQ ID NO: 1718219
aaagauggucacuuaaccu

SEQ ID NO: 1718221 - RNA, 19 nt, Artificial Sequence
  Description of Artificial Sequence: Synthetic oligonucleotide
  Sense strand starting at position 800 of SEQ ID NO: 1562050
ucuguaguucuguaucuag

SEQ ID NO: 1718222 - RNA, 19 nt, Artificial Sequence
  Description of Artificial Sequence: Synthetic oligonucleotide
  Antisense strand to SEQ ID NO: 1718221
cuagauacagaacuacaga

SEQ ID NO: 1718223 - RNA, 19 nt, Artificial Sequence
  Description of Artificial Sequence: Synthetic oligonucleotide
  Sense strand starting at position 823 of SEQ ID NO: 1562050
cucugcugaucucuauaga

SEQ ID NO: 1718224 - RNA, 19 nt, Artificial Sequence
  Description of Artificial Sequence: Synthetic oligonucleotide
  Antisense strand to SEQ ID NO: 1718223
ucuauagagaucagcagag

SEQ ID NO: 1718225 - RNA, 19 nt, Artificial Sequence
  Description of Artificial Sequence: Synthetic oligonucleotide
  Sense strand starting at position 824 of SEQ ID NO: 1562050
ucugcugaucucuauagag

SEQ ID NO: 1718226 - RNA, 19 nt, Artificial Sequence
  Description of Artificial Sequence: Synthetic oligonucleotide
  Antisense strand to SEQ ID NO: 1718225
cucuauagagaucagcaga

SEQ ID NO: 1718227 - RNA, 19 nt, Artificial Sequence
  Description of Artificial Sequence: Synthetic oligonucleotide
  Sense strand starting at position 907 of SEQ ID NO: 1562050
gaacaaauguguucuagac

SEQ ID NO: 1718228 - RNA, 19 nt, Artificial Sequence
  Description of Artificial Sequence: Synthetic oligonucleotide
  Antisense strand to SEQ ID NO: 1718227
gucuagaacacauuuguuc

SEQ ID NO: 1718229 - RNA, 19 nt, Artificial Sequence
  Description of Artificial Sequence: Synthetic oligonucleotide
  Sense strand starting at position 940 of SEQ ID NO: 1562050
ccaaauagacuguguucca

SEQ ID NO: 1718230 - RNA, 19 nt, Artificial Sequence
  Description of Artificial Sequence: Synthetic oligonucleotide
  Antisense strand to SEQ ID NO: 1718229
uggaacacagucuauuugg

SEQ ID NO: 1718231 - RNA, 19 nt, Artificial Sequence
  Description of Artificial Sequence: Synthetic oligonucleotide
  Sense strand starting at position 947 of SEQ ID NO: 1562050
gacuguguuccagggagua

SEQ ID NO: 1718232 - RNA, 19 nt, Artificial Sequence
  Description of Artificial Sequence: Synthetic oligonucleotide
  Antisense strand to SEQ ID NO: 1718231
uacucccuggaacacaguc

SEQ ID NO: 1718233 - RNA, 19 nt, Artificial Sequence
  Description of Artificial Sequence: Synthetic oligonucleotide
  Sense strand starting at position 1230 of SEQ ID NO: 1562050
aauagaacagucuguuguu

SEQ ID NO: 1718234 - RNA, 19 nt, Artificial Sequence
  Description of Artificial Sequence: Synthetic oligonucleotide
  Antisense strand to SEQ ID NO: 1718233
aacaacagacuguucuauu

SEQ ID NO: 1718235 - RNA, 19 nt, Artificial Sequence
  Description of Artificial Sequence: Synthetic oligonucleotide
  Sense strand starting at position 1341 of SEQ ID NO: 1562050
acauaagggucguuuggaa

SEQ ID NO: 1718236 - RNA, 19 nt, Artificial Sequence
  Description of Artificial Sequence: Synthetic oligonucleotide
  Antisense strand to SEQ ID NO: 1718235
uuccaaacgacccuuaugu

SEQ ID NO: 1718237 - RNA, 19 nt, Artificial Sequence
  Description of Artificial Sequence: Synthetic oligonucleotide
  Sense strand starting at position 1348 of SEQ ID NO: 1562050
ggucguuuggaagaugaug

SEQ ID NO: 1718238 - RNA, 19 nt, Artificial Sequence
  Description of Artificial Sequence: Synthetic oligonucleotide
  Antisense strand to SEQ ID NO: 1718237
caucaucuuccaaacgacc

SEQ ID NO: 1718239 - RNA, 19 nt, Artificial Sequence
  Description of Artificial Sequence: Synthetic oligonucleotide
  Sense strand starting at position 1350 of SEQ ID NO: 1562050
ucguuuggaagaugaugua

SEQ ID NO: 1718240 - RNA, 19 nt, Artificial Sequence
  Description of Artificial Sequence: Synthetic oligonucleotide
  Antisense strand to SEQ ID NO: 1718239
uacaucaucuuccaaacga

SEQ ID NO: 1718241 - RNA, 19 nt, Artificial Sequence
  Description of Artificial Sequence: Synthetic oligonucleotide
  Sense strand starting at position 1421 of SEQ ID NO: 1562050
uguagacgcauguuacgua

SEQ ID NO: 1718242 - RNA, 19 nt, Artificial Sequence
  Description of Artificial Sequence: Synthetic oligonucleotide
  Antisense strand to SEQ ID NO: 1718241
uacguaacaugcgucuaca

SEQ ID NO: 1718243 - RNA, 19 nt, Artificial Sequence
  Description of Artificial Sequence: Synthetic oligonucleotide
  Sense strand starting at position 1593 of SEQ ID NO: 1562050
ggguuccuuuaacucuaaa

SEQ ID NO: 1718244 - RNA, 19 nt, Artificial Sequence
  Description of Artificial Sequence: Synthetic oligonucleotide
  Antisense strand to SEQ ID NO: 1718243
uuuagaguuaaaggaaccc

SEQ ID NO: 1718245 - RNA, 19 nt, Artificial Sequence
  Description of Artificial Sequence: Synthetic oligonucleotide
  Sense strand starting at position 1882 of SEQ ID NO: 1562050
cuccguucccgggaacaau

SEQ ID NO: 1718246 - RNA, 19 nt, Artificial Sequence
  Description of Artificial Sequence: Synthetic oligonucleotide
  Antisense strand to SEQ ID NO: 1718245
auuguucccgggaacggag

SEQ ID NO: 1718247 - RNA, 19 nt, Artificial Sequence
  Description of Artificial Sequence: Synthetic oligonucleotide
  Sense strand starting at position 2004 of SEQ ID NO: 1562050
cggcauccugggaguugua

SEQ ID NO: 1718248 - RNA, 19 nt, Artificial Sequence
  Description of Artificial Sequence: Synthetic oligonucleotide
  Antisense strand to SEQ ID NO: 1718247
uacaacucccaggaugccg

SEQ ID NO: 1718249 - RNA, 19 nt, Artificial Sequence
  Description of Artificial Sequence: Synthetic oligonucleotide
  Sense strand starting at position 2206 of SEQ ID NO: 1562050
uguguuauuucuuugcuag

SEQ ID NO: 1718250 - RNA, 19 nt, Artificial Sequence
  Description of Artificial Sequence: Synthetic oligonucleotide
  Antisense strand to SEQ ID NO: 1718249
cuagcaaagaaauaacaca

SEQ ID NO: 1718251 - RNA, 19 nt, Artificial Sequence
  Description of Artificial Sequence: Synthetic oligonucleotide
  Sense strand starting at position 2207 of SEQ ID NO: 1562050
guguuauuucuuugcuaga

SEQ ID NO: 1718252 - RNA, 19 nt, Artificial Sequence
  Description of Artificial Sequence: Synthetic oligonucleotide
  Antisense strand to SEQ ID NO: 1718251
ucuagcaaagaaauaacac

SEQ ID NO: 1718253 - RNA, 19 nt, Artificial Sequence
  Description of Artificial Sequence: Synthetic oligonucleotide
  Sense strand starting at position 2208 of SEQ ID NO: 1562050
uguuauuucuuugcuagau

SEQ ID NO: 1718254 - RNA, 19 nt, Artificial Sequence
  Description of Artificial Sequence: Synthetic oligonucleotide
  Antisense strand to SEQ ID NO: 1718253
aucuagcaaagaaauaaca

SEQ ID NO: 1718255 - RNA, 19 nt, Artificial Sequence
  Description of Artificial Sequence: Synthetic oligonucleotide
  Sense strand starting at position 2209 of SEQ ID NO: 1562050
guuauuucuuugcuagauu

SEQ ID NO: 1718256 - RNA, 19 nt, Artificial Sequence
  Description of Artificial Sequence: Synthetic oligonucleotide
  Antisense strand to SEQ ID NO: 1718255
aaucuagcaaagaaauaac

SEQ ID NO: 1718257 - RNA, 19 nt, Artificial Sequence
  Description of Artificial Sequence: Synthetic oligonucleotide
  Sense strand starting at position 2523 of SEQ ID NO: 1562050
ugcuuagucccauauuccu

SEQ ID NO: 1718258 - RNA, 19 nt, Artificial Sequence
  Description of Artificial Sequence: Synthetic oligonucleotide
  Antisense strand to SEQ ID NO: 1718257
aggaauaugggacuaagca

SEQ ID NO: 1718259 - RNA, 19 nt, Artificial Sequence
  Description of Artificial Sequence: Synthetic oligonucleotide
  Sense strand starting at position 2633 of SEQ ID NO: 1562050
uccaauuugucauucuggu

SEQ ID NO: 1718260 - RNA, 19 nt, Artificial Sequence
  Description of Artificial Sequence: Synthetic oligonucleotide
  Antisense strand to SEQ ID NO: 1718259
accagaaugacaaauugga

SEQ ID NO: 1718261 - RNA, 19 nt, Artificial Sequence
  Description of Artificial Sequence: Synthetic oligonucleotide
  Sense strand starting at position 2757 of SEQ ID NO: 1562050
cuggaaacauuggagaaga

SEQ ID NO: 1718262 - RNA, 19 nt, Artificial Sequence
  Description of Artificial Sequence: Synthetic oligonucleotide
  Antisense strand to SEQ ID NO: 1718261
ucuucuccaauguuuccag

SEQ ID NO: 1718263 - RNA, 19 nt, Artificial Sequence
  Description of Artificial Sequence: Synthetic oligonucleotide
  Sense strand starting at position 2768 of SEQ ID NO: 1562050
ggagaagacuguccuuguc

SEQ ID NO: 1718264 - RNA, 19 nt, Artificial Sequence
  Description of Artificial Sequence: Synthetic oligonucleotide
  Antisense strand to SEQ ID NO: 1718263
gacaaggacagucuucucc

SEQ ID NO: 1718265 - RNA, 19 nt, Artificial Sequence
  Description of Artificial Sequence: Synthetic oligonucleotide
  Sense strand starting at position 2770 of SEQ ID NO: 1562050
agaagacuguccuugucau

SEQ ID NO: 1718266 - RNA, 19 nt, Artificial Sequence
  Description of Artificial Sequence: Synthetic oligonucleotide
  Antisense strand to SEQ ID NO: 1718265
augacaaggacagucuucu

SEQ ID NO: 1718267 - RNA, 19 nt, Artificial Sequence
  Description of Artificial Sequence: Synthetic oligonucleotide
  Sense strand starting at position 2771 of SEQ ID NO: 1562050
gaagacuguccuugucauc

SEQ ID NO: 1718268 - RNA, 19 nt, Artificial Sequence
  Description of Artificial Sequence: Synthetic oligonucleotide
  Antisense strand to SEQ ID NO: 1718267
gaugacaaggacagucuuc

SEQ ID NO: 1718269 - RNA, 19 nt, Artificial Sequence
  Description of Artificial Sequence: Synthetic oligonucleotide
  Sense strand starting at position 3160 of SEQ ID NO: 1562050
gcccgaaguagguaagaaa

SEQ ID NO: 1718270 - RNA, 19 nt, Artificial Sequence
  Description of Artificial Sequence: Synthetic oligonucleotide
  Antisense strand to SEQ ID NO: 1718269
uuucuuaccuacuucgggc

SEQ ID NO: 1718271 - RNA, 19 nt, Artificial Sequence
  Description of Artificial Sequence: Synthetic oligonucleotide
  Sense strand starting at position 3316 of SEQ ID NO: 1562050
uuuaccaugguuugaagua

SEQ ID NO: 1718272 - RNA, 19 nt, Artificial Sequence
  Description of Artificial Sequence: Synthetic oligonucleotide
  Antisense strand to SEQ ID NO: 1718271
uacuucaaaccaugguaaa

SEQ ID NO: 1718273 - RNA, 19 nt, Artificial Sequence
  Description of Artificial Sequence: Synthetic oligonucleotide
  Sense strand starting at position 3350 of SEQ ID NO: 1562050
agaaauguaucccucauug

SEQ ID NO: 1718274 - RNA, 19 nt, Artificial Sequence
  Description of Artificial Sequence: Synthetic oligonucleotide
  Antisense strand to SEQ ID NO: 1718273
caaugagggauacauuucu

SEQ ID NO: 1718275 - RNA, 19 nt, Artificial Sequence
  Description of Artificial Sequence: Synthetic oligonucleotide
  Sense strand starting at position 3703 of SEQ ID NO: 1562050
cgaagaaauugcuuaguca

SEQ ID NO: 1718276 - RNA, 19 nt, Artificial Sequence
  Description of Artificial Sequence: Synthetic oligonucleotide
  Antisense strand to SEQ ID NO: 1718275
ugacuaagcaauuucuucg

SEQ ID NO: 1718277 - RNA, 19 nt, Artificial Sequence
  Description of Artificial Sequence: Synthetic oligonucleotide
  Sense strand starting at position 172 of SEQ ID NO: 1562051
ggccauuuccucugcugaa

SEQ ID NO: 1718278 - RNA, 19 nt, Artificial Sequence
  Description of Artificial Sequence: Synthetic oligonucleotide
  Antisense strand to SEQ ID NO: 1718277
uucagcagaggaaauggcc

SEQ ID NO: 1718279 - RNA, 19 nt, Artificial Sequence
  Description of Artificial Sequence: Synthetic oligonucleotide
  Sense strand starting at position 173 of SEQ ID NO: 1562051
gccauuuccucugcugaaa

SEQ ID NO: 1718280 - RNA, 19 nt, Artificial Sequence
  Description of Artificial Sequence: Synthetic oligonucleotide
  Antisense strand to SEQ ID NO: 1718279
uuucagcagaggaaauggc

SEQ ID NO: 1718281 - RNA, 19 nt, Artificial Sequence
  Description of Artificial Sequence: Synthetic oligonucleotide
  Sense strand starting at position 208 of SEQ ID NO: 1562051
ccaguuagcacaggguuua

SEQ ID NO: 1718282 - RNA, 19 nt, Artificial Sequence
  Description of Artificial Sequence: Synthetic oligonucleotide
  Antisense strand to SEQ ID NO: 1718281
uaaacccugugcuaacugg

SEQ ID NO: 1718283 - RNA, 19 nt, Artificial Sequence
  Description of Artificial Sequence: Synthetic oligonucleotide
  Sense strand starting at position 209 of SEQ ID NO: 1562051
caguuagcacaggguuuau

SEQ ID NO: 1718284 - RNA, 19 nt, Artificial Sequence
  Description of Artificial Sequence: Synthetic oligonucleotide
  Antisense strand to SEQ ID NO: 1718283
auaaacccugugcuaacug

SEQ ID NO: 1718285 - RNA, 19 nt, Artificial Sequence
  Description of Artificial Sequence: Synthetic oligonucleotide
  Sense strand starting at position 287 of SEQ ID NO: 1562051
cucugucuuccuggugaac

SEQ ID NO: 1718286 - RNA, 19 nt, Artificial Sequence
  Description of Artificial Sequence: Synthetic oligonucleotide
  Antisense strand to SEQ ID NO: 1718285
guucaccaggaagacagag

SEQ ID NO: 1718287 - RNA, 19 nt, Artificial Sequence
  Description of Artificial Sequence: Synthetic oligonucleotide
  Sense strand starting at position 289 of SEQ ID NO: 1562051
cugucuuccuggugaacuc

SEQ ID NO: 1718288 - RNA, 19 nt, Artificial Sequence
  Description of Artificial Sequence: Synthetic oligonucleotide
  Antisense strand to SEQ ID NO: 1718287
gaguucaccaggaagacag

SEQ ID NO: 1718289 - RNA, 19 nt, Artificial Sequence
  Description of Artificial Sequence: Synthetic oligonucleotide
  Sense strand starting at position 398 of SEQ ID NO: 1562051
gguuguuuguccuucccau

SEQ ID NO: 1718290 - RNA, 19 nt, Artificial Sequence
  Description of Artificial Sequence: Synthetic oligonucleotide
  Antisense strand to SEQ ID NO: 1718289
augggaaggacaaacaacc

SEQ ID NO: 1718291 - RNA, 19 nt, Artificial Sequence
  Description of Artificial Sequence: Synthetic oligonucleotide
  Sense strand starting at position 455 of SEQ ID NO: 1562051
agcaguuauugagcuucua

SEQ ID NO: 1718292 - RNA, 19 nt, Artificial Sequence
  Description of Artificial Sequence: Synthetic oligonucleotide
  Antisense strand to SEQ ID NO: 1718291
uagaagcucaauaacugcu

SEQ ID NO: 1718293 - RNA, 19 nt, Artificial Sequence
  Description of Artificial Sequence: Synthetic oligonucleotide
  Sense strand starting at position 598 of SEQ ID NO: 1562051
aagucagauugcgauccuu

SEQ ID NO: 1718294 - RNA, 19 nt, Artificial Sequence
  Description of Artificial Sequence: Synthetic oligonucleotide
  Antisense strand to SEQ ID NO: 1718293
aaggaucgcaaucugacuu

SEQ ID NO: 1718295 - RNA, 19 nt, Artificial Sequence
  Description of Artificial Sequence: Synthetic oligonucleotide
  Sense strand starting at position 613 of SEQ ID NO: 1562051
ccuugcuggcagggaaaua

SEQ ID NO: 1718296 - RNA, 19 nt, Artificial Sequence
  Description of Artificial Sequence: Synthetic oligonucleotide
  Antisense strand to SEQ ID NO: 1718295
uauuucccugccagcaagg

SEQ ID NO: 1718297 - RNA, 19 nt, Artificial Sequence
  Description of Artificial Sequence: Synthetic oligonucleotide
  Sense strand starting at position 729 of SEQ ID NO: 1562051
aagagugguccagguggaa

SEQ ID NO: 1718298 - RNA, 19 nt, Artificial Sequence
  Description of Artificial Sequence: Synthetic oligonucleotide
  Antisense strand to SEQ ID NO: 1718297
uuccaccuggaccacucuu

SEQ ID NO: 1718299 - RNA, 19 nt, Artificial Sequence
  Description of Artificial Sequence: Synthetic oligonucleotide
  Sense strand starting at position 905 of SEQ ID NO: 1562051
gaggguuuccagcaaggca

SEQ ID NO: 1718300 - RNA, 19 nt, Artificial Sequence
  Description of Artificial Sequence: Synthetic oligonucleotide
  Antisense strand to SEQ ID NO: 1718299
ugccuugcuggaaacccuc

SEQ ID NO: 1718301 - RNA, 19 nt, Artificial Sequence
  Description of Artificial Sequence: Synthetic oligonucleotide
  Sense strand starting at position 1044 of SEQ ID NO: 1562051
cccuguguccucugcgagu

SEQ ID NO: 1718302 - RNA, 19 nt, Artificial Sequence
  Description of Artificial Sequence: Synthetic oligonucleotide
  Antisense strand to SEQ ID NO: 1718301
acucgcagaggacacaggg

SEQ ID NO: 1718303 - RNA, 19 nt, Artificial Sequence
  Description of Artificial Sequence: Synthetic oligonucleotide
  Sense strand starting at position 2289 of SEQ ID NO: 1562051
ccguuugcacaugaauaaa

SEQ ID NO: 1718304 - RNA, 19 nt, Artificial Sequence
  Description of Artificial Sequence: Synthetic oligonucleotide
  Antisense strand to SEQ ID NO: 1718303
uuuauucaugugcaaacgg

SEQ ID NO: 1718305 - RNA, 19 nt, Artificial Sequence
  Description of Artificial Sequence: Synthetic oligonucleotide
  Sense strand starting at position 2305 of SEQ ID NO: 1562051
aaacgaaggcucuguuugu

SEQ ID NO: 1718306 - RNA, 19 nt, Artificial Sequence
  Description of Artificial Sequence: Synthetic oligonucleotide
  Antisense strand to SEQ ID NO: 1718305
acaaacagagccuucguuu

SEQ ID NO: 1718307 - RNA, 19 nt, Artificial Sequence
  Description of Artificial Sequence: Synthetic oligonucleotide
  Sense strand starting at position 2306 of SEQ ID NO: 1562051
aacgaaggcucuguuuguu

SEQ ID NO: 1718308 - RNA, 19 nt, Artificial Sequence
  Description of Artificial Sequence: Synthetic oligonucleotide
  Antisense strand to SEQ ID NO: 1718307
aacaaacagagccuucguu

SEQ ID NO: 1718309 - RNA, 19 nt, Artificial Sequence
  Description of Artificial Sequence: Synthetic oligonucleotide
  Sense strand starting at position 2309 of SEQ ID NO: 1562051
gaaggcucuguuuguugau

SEQ ID NO: 1718310 - RNA, 19 nt, Artificial Sequence
  Description of Artificial Sequence: Synthetic oligonucleotide
  Antisense strand to SEQ ID NO: 1718309
aucaacaaacagagccuuc

SEQ ID NO: 1718311 - RNA, 19 nt, Artificial Sequence
  Description of Artificial Sequence: Synthetic oligonucleotide
  Sense strand starting at position 2311 of SEQ ID NO: 1562051
aggcucuguuuguugauga

SEQ ID NO: 1718312 - RNA, 19 nt, Artificial Sequence
  Description of Artificial Sequence: Synthetic oligonucleotide
  Antisense strand to SEQ ID NO: 1718311
ucaucaacaaacagagccu

SEQ ID NO: 1718313 - RNA, 19 nt, Artificial Sequence
  Description of Artificial Sequence: Synthetic oligonucleotide
  Sense strand starting at position 2437 of SEQ ID NO: 1562051
cguugagcuauuggugaag

SEQ ID NO: 1718314 - RNA, 19 nt, Artificial Sequence
  Description of Artificial Sequence: Synthetic oligonucleotide
  Antisense strand to SEQ ID NO: 1718313
cuucaccaauagcucaacg

SEQ ID NO: 1718315 - RNA, 19 nt, Artificial Sequence
  Description of Artificial Sequence: Synthetic oligonucleotide
  Sense strand starting at position 2439 of SEQ ID NO: 1562051
uugagcuauuggugaaguu

SEQ ID NO: 1718316 - RNA, 19 nt, Artificial Sequence
  Description of Artificial Sequence: Synthetic oligonucleotide
  Antisense strand to SEQ ID NO: 1718315
aacuucaccaauagcucaa

SEQ ID NO: 1718317 - RNA, 19 nt, Artificial Sequence
  Description of Artificial Sequence: Synthetic oligonucleotide
  Sense strand starting at position 2440 of SEQ ID NO: 1562051
ugagcuauuggugaaguuu

SEQ ID NO: 1718318 - RNA, 19 nt, Artificial Sequence
  Description of Artificial Sequence: Synthetic oligonucleotide
  Antisense strand to SEQ ID NO: 1718317
aaacuucaccaauagcuca

SEQ ID NO: 1718319 - RNA, 19 nt, Artificial Sequence
  Description of Artificial Sequence: Synthetic oligonucleotide
  Sense strand starting at position 2456 of SEQ ID NO: 1562051
uuugcauucgucugccuca

SEQ ID NO: 1718320 - RNA, 19 nt, Artificial Sequence
  Description of Artificial Sequence: Synthetic oligonucleotide
  Antisense strand to SEQ ID NO: 1718319
ugaggcagacgaaugcaaa

SEQ ID NO: 1718321 - RNA, 19 nt, Artificial Sequence
  Description of Artificial Sequence: Synthetic oligonucleotide
  Sense strand starting at position 2469 of SEQ ID NO: 1562051
gccucaugcgccgcuuuaa

SEQ ID NO: 1718322 - RNA, 19 nt, Artificial Sequence
  Description of Artificial Sequence: Synthetic oligonucleotide
  Antisense strand to SEQ ID NO: 1718321
uuaaagcggcgcaugaggc

SEQ ID NO: 1718323 - RNA, 19 nt, Artificial Sequence
  Description of Artificial Sequence: Synthetic oligonucleotide
  Sense strand starting at position 2470 of SEQ ID NO: 1562051
ccucaugcgccgcuuuaau

SEQ ID NO: 1718324 - RNA, 19 nt, Artificial Sequence
  Description of Artificial Sequence: Synthetic oligonucleotide
  Antisense strand to SEQ ID NO: 1718323
auuaaagcggcgcaugagg

SEQ ID NO: 1718325 - RNA, 19 nt, Artificial Sequence
  Description of Artificial Sequence: Synthetic oligonucleotide
  Sense strand starting at position 2586 of SEQ ID NO: 1562051
ccaucagugcuccaucauc

SEQ ID NO: 1718326 - RNA, 19 nt, Artificial Sequence
  Description of Artificial Sequence: Synthetic oligonucleotide
  Antisense strand to SEQ ID NO: 1718325
gaugauggagcacugaugg

SEQ ID NO: 1718327 - RNA, 19 nt, Artificial Sequence
  Description of Artificial Sequence: Synthetic oligonucleotide
  Sense strand starting at position 2794 of SEQ ID NO: 1562051
cccgaucucugucuucgua

SEQ ID NO: 1718328 - RNA, 19 nt, Artificial Sequence
  Description of Artificial Sequence: Synthetic oligonucleotide
  Antisense strand to SEQ ID NO: 1718327
uacgaagacagagaucggg

SEQ ID NO: 1718329 - RNA, 19 nt, Artificial Sequence
  Description of Artificial Sequence: Synthetic oligonucleotide
  Sense strand starting at position 3063 of SEQ ID NO: 1562051
ucuauuacugucuaacgga

SEQ ID NO: 1718330 - RNA, 19 nt, Artificial Sequence
  Description of Artificial Sequence: Synthetic oligonucleotide
  Antisense strand to SEQ ID NO: 1718329
uccguuagacaguaauaga

SEQ ID NO: 1718331 - RNA, 19 nt, Artificial Sequence
  Description of Artificial Sequence: Synthetic oligonucleotide
  Sense strand starting at position 3098 of SEQ ID NO: 1562051
uauguuauucugggucugu

SEQ ID NO: 1718332 - RNA, 19 nt, Artificial Sequence
  Description of Artificial Sequence: Synthetic oligonucleotide
  Antisense strand to SEQ ID NO: 1718331
acagacccagaauaacaua

SEQ ID NO: 1718333 - RNA, 19 nt, Artificial Sequence
  Description of Artificial Sequence: Synthetic oligonucleotide
  Sense strand starting at position 3099 of SEQ ID NO: 1562051
auguuauucugggucuguu

SEQ ID NO: 1718334 - RNA, 19 nt, Artificial Sequence
  Description of Artificial Sequence: Synthetic oligonucleotide
  Antisense strand to SEQ ID NO: 1718333
aacagacccagaauaacau

SEQ ID NO: 1718335 - RNA, 19 nt, Artificial Sequence
  Description of Artificial Sequence: Synthetic oligonucleotide
  Sense strand starting at position 3166 of SEQ ID NO: 1562051
guuccuggugucuagaaca

SEQ ID NO: 1718336 - RNA, 19 nt, Artificial Sequence
  Description of Artificial Sequence: Synthetic oligonucleotide
  Antisense strand to SEQ ID NO: 1718335
uguucuagacaccaggaac

SEQ ID NO: 1718337 - RNA, 19 nt, Artificial Sequence
  Description of Artificial Sequence: Synthetic oligonucleotide
  Sense strand starting at position 3201 of SEQ ID NO: 1562051
ggaggcuccauauguugaa

SEQ ID NO: 1718338 - RNA, 19 nt, Artificial Sequence
  Description of Artificial Sequence: Synthetic oligonucleotide
  Antisense strand to SEQ ID NO: 1718337
uucaacauauggagccucc

SEQ ID NO: 1718339 - RNA, 19 nt, Artificial Sequence
  Description of Artificial Sequence: Synthetic oligonucleotide
  Sense strand starting at position 3202 of SEQ ID NO: 1562051
gaggcuccauauguugaau

SEQ ID NO: 1718340 - RNA, 19 nt, Artificial Sequence
  Description of Artificial Sequence: Synthetic oligonucleotide
  Antisense strand to SEQ ID NO: 1718339
auucaacauauggagccuc

SEQ ID NO: 1718341 - RNA, 19 nt, Artificial Sequence
  Description of Artificial Sequence: Synthetic oligonucleotide
  Sense strand starting at position 3204 of SEQ ID NO: 1562051
ggcuccauauguugaauga

SEQ ID NO: 1718342 - RNA, 19 nt, Artificial Sequence
  Description of Artificial Sequence: Synthetic oligonucleotide
  Antisense strand to SEQ ID NO: 1718341
ucauucaacauauggagcc

SEQ ID NO: 1718343 - RNA, 19 nt, Artificial Sequence
  Description of Artificial Sequence: Synthetic oligonucleotide
  Sense strand starting at position 3205 of SEQ ID NO: 1562051
gcuccauauguugaaugaa

SEQ ID NO: 1718344 - RNA, 19 nt, Artificial Sequence
  Description of Artificial Sequence: Synthetic oligonucleotide
  Antisense strand to SEQ ID NO: 1718343
uucauucaacauauggagc

SEQ ID NO: 1718345 - RNA, 19 nt, Artificial Sequence
  Description of Artificial Sequence: Synthetic oligonucleotide
  Sense strand starting at position 3581 of SEQ ID NO: 1562051
cugggaaaugguugcuguu

SEQ ID NO: 1718346 - RNA, 19 nt, Artificial Sequence
  Description of Artificial Sequence: Synthetic oligonucleotide
  Antisense strand to SEQ ID NO: 1718345
aacagcaaccauuucccag

SEQ ID NO: 1718347 - RNA, 19 nt, Artificial Sequence
  Description of Artificial Sequence: Synthetic oligonucleotide
  Sense strand starting at position 3583 of SEQ ID NO: 1562051
gggaaaugguugcuguuga

SEQ ID NO: 1718348 - RNA, 19 nt, Artificial Sequence
  Description of Artificial Sequence: Synthetic oligonucleotide
  Antisense strand to SEQ ID NO: 1718347
ucaacagcaaccauuuccc

SEQ ID NO: 1718349 - RNA, 19 nt, Artificial Sequence
  Description of Artificial Sequence: Synthetic oligonucleotide
  Sense strand starting at position 3587 of SEQ ID NO: 1562051
aaugguugcuguugagaua

SEQ ID NO: 1718350 - RNA, 19 nt, Artificial Sequence
  Description of Artificial Sequence: Synthetic oligonucleotide
  Antisense strand to SEQ ID NO: 1718349
uaucucaacagcaaccauu

SEQ ID NO: 1718351 - RNA, 19 nt, Artificial Sequence
  Description of Artificial Sequence: Synthetic oligonucleotide
  Sense strand starting at position 3588 of SEQ ID NO: 1562051
augguugcuguugagauau

SEQ ID NO: 1718352 - RNA, 19 nt, Artificial Sequence
  Description of Artificial Sequence: Synthetic oligonucleotide
  Antisense strand to SEQ ID NO: 1718351
auaucucaacagcaaccau

SEQ ID NO: 1718353 - RNA, 19 nt, Artificial Sequence
  Description of Artificial Sequence: Synthetic oligonucleotide
  Sense strand starting at position 3590 of SEQ ID NO: 1562051
gguugcuguugagauauca

SEQ ID NO: 1718354 - RNA, 19 nt, Artificial Sequence
  Description of Artificial Sequence: Synthetic oligonucleotide
  Antisense strand to SEQ ID NO: 1718353
ugauaucucaacagcaacc

SEQ ID NO: 1718355 - RNA, 19 nt, Artificial Sequence
  Description of Artificial Sequence: Synthetic oligonucleotide
  Sense strand starting at position 3598 of SEQ ID NO: 1562051
uugagauaucaucaccugu

SEQ ID NO: 1718356 - RNA, 19 nt, Artificial Sequence
  Description of Artificial Sequence: Synthetic oligonucleotide
  Antisense strand to SEQ ID NO: 1718355
acaggugaugauaucucaa

SEQ ID NO: 1718357 - RNA, 19 nt, Artificial Sequence
  Description of Artificial Sequence: Synthetic oligonucleotide
  Sense strand starting at position 120 of SEQ ID NO: 1562052
ggaacaaacuugucauauu

SEQ ID NO: 1718358 - RNA, 19 nt, Artificial Sequence
  Description of Artificial Sequence: Synthetic oligonucleotide
  Antisense strand to SEQ ID NO: 1718357
aauaugacaaguuuguucc

SEQ ID NO: 1718359 - RNA, 19 nt, Artificial Sequence
  Description of Artificial Sequence: Synthetic oligonucleotide
  Sense strand starting at position 153 of SEQ ID NO: 1562052
aggugcaugccuugaccau

SEQ ID NO: 1718360 - RNA, 19 nt, Artificial Sequence
  Description of Artificial Sequence: Synthetic oligonucleotide
  Antisense strand to SEQ ID NO: 1718359
auggucaaggcaugcaccu

SEQ ID NO: 1718361 - RNA, 19 nt, Artificial Sequence
  Description of Artificial Sequence: Synthetic oligonucleotide
  Sense strand starting at position 154 of SEQ ID NO: 1562052
ggugcaugccuugaccaua

SEQ ID NO: 1718362 - RNA, 19 nt, Artificial Sequence
  Description of Artificial Sequence: Synthetic oligonucleotide
  Antisense strand to SEQ ID NO: 1718361
uauggucaaggcaugcacc

SEQ ID NO: 1718363 - RNA, 19 nt, Artificial Sequence
  Description of Artificial Sequence: Synthetic oligonucleotide
  Sense strand starting at position 162 of SEQ ID NO: 1562052
ccuugaccauaguuugaca

SEQ ID NO: 1718364 - RNA, 19 nt, Artificial Sequence
  Description of Artificial Sequence: Synthetic oligonucleotide
  Antisense strand to SEQ ID NO: 1718363
ugucaaacuauggucaagg

SEQ ID NO: 1718365 - RNA, 19 nt, Artificial Sequence
  Description of Artificial Sequence: Synthetic oligonucleotide
  Sense strand starting at position 238 of SEQ ID NO: 1562052
gaccuaggaugucagaaau

SEQ ID NO: 1718366 - RNA, 19 nt, Artificial Sequence
  Description of Artificial Sequence: Synthetic oligonucleotide
  Antisense strand to SEQ ID NO: 1718365
auuucugacauccuagguc

SEQ ID NO: 1718367 - RNA, 19 nt, Artificial Sequence
  Description of Artificial Sequence: Synthetic oligonucleotide
  Sense strand starting at position 244 of SEQ ID NO: 1562052
ggaugucagaaaugcuuuc

SEQ ID NO: 1718368 - RNA, 19 nt, Artificial Sequence
  Description of Artificial Sequence: Synthetic oligonucleotide
  Antisense strand to SEQ ID NO: 1718367
gaaagcauuucugacaucc

SEQ ID NO: 1718369 - RNA, 19 nt, Artificial Sequence
  Description of Artificial Sequence: Synthetic oligonucleotide
  Sense strand starting at position 395 of SEQ ID NO: 1562052
uccaguucugaagacacuu

SEQ ID NO: 1718370 - RNA, 19 nt, Artificial Sequence
  Description of Artificial Sequence: Synthetic oligonucleotide
  Antisense strand to SEQ ID NO: 1718369
aagugucuucagaacugga

SEQ ID NO: 1718371 - RNA, 19 nt, Artificial Sequence
  Description of Artificial Sequence: Synthetic oligonucleotide
  Sense strand starting at position 540 of SEQ ID NO: 1562052
gcgcccuuggcacaugaaa

SEQ ID NO: 1718372 - RNA, 19 nt, Artificial Sequence
  Description of Artificial Sequence: Synthetic oligonucleotide
  Antisense strand to SEQ ID NO: 1718371
uuucaugugccaagggcgc

SEQ ID NO: 1718373 - RNA, 19 nt, Artificial Sequence
  Description of Artificial Sequence: Synthetic oligonucleotide
  Sense strand starting at position 553 of SEQ ID NO: 1562052
augaaagccuuugaacaug

SEQ ID NO: 1718374 - RNA, 19 nt, Artificial Sequence
  Description of Artificial Sequence: Synthetic oligonucleotide
  Antisense strand to SEQ ID NO: 1718373
cauguucaaaggcuuucau

SEQ ID NO: 1718375 - RNA, 19 nt, Artificial Sequence
  Description of Artificial Sequence: Synthetic oligonucleotide
  Sense strand starting at position 577 of SEQ ID NO: 1562052
aguggugcuacaugaaaua

SEQ ID NO: 1718376 - RNA, 19 nt, Artificial Sequence
  Description of Artificial Sequence: Synthetic oligonucleotide
  Antisense strand to SEQ ID NO: 1718375
uauuucauguagcaccacu

SEQ ID NO: 1718377 - RNA, 19 nt, Artificial Sequence
  Description of Artificial Sequence: Synthetic oligonucleotide
  Sense strand starting at position 933 of SEQ ID NO: 1562052
cagccuggguuucuauauu

SEQ ID NO: 1718378 - RNA, 19 nt, Artificial Sequence
  Description of Artificial Sequence: Synthetic oligonucleotide
  Antisense strand to SEQ ID NO: 1718377
aauauagaaacccaggcug

SEQ ID NO: 1718379 - RNA, 19 nt, Artificial Sequence
  Description of Artificial Sequence: Synthetic oligonucleotide
  Sense strand starting at position 950 of SEQ ID NO: 1562052
uuagaauaauccuaggcaa

SEQ ID NO: 1718380 - RNA, 19 nt, Artificial Sequence
  Description of Artificial Sequence: Synthetic oligonucleotide
  Antisense strand to SEQ ID NO: 1718379
uugccuaggauuauucuaa

SEQ ID NO: 1718381 - RNA, 19 nt, Artificial Sequence
  Description of Artificial Sequence: Synthetic oligonucleotide
  Sense strand starting at position 974 of SEQ ID NO: 1562052
ccuucugagccuugccauu

SEQ ID NO: 1718382 - RNA, 19 nt, Artificial Sequence
  Description of Artificial Sequence: Synthetic oligonucleotide
  Antisense strand to SEQ ID NO: 1718381
aauggcaaggcucagaagg

SEQ ID NO: 1718383 - RNA, 19 nt, Artificial Sequence
  Description of Artificial Sequence: Synthetic oligonucleotide
  Sense strand starting at position 976 of SEQ ID NO: 1562052
uucugagccuugccauuau

SEQ ID NO: 1718384 - RNA, 19 nt, Artificial Sequence
  Description of Artificial Sequence: Synthetic oligonucleotide
  Antisense strand to SEQ ID NO: 1718383
auaauggcaaggcucagaa

SEQ ID NO: 1718385 - RNA, 19 nt, Artificial Sequence
  Description of Artificial Sequence: Synthetic oligonucleotide
  Sense strand starting at position 1164 of SEQ ID NO: 1562052
aaacguagggcugagauca

SEQ ID NO: 1718386 - RNA, 19 nt, Artificial Sequence
  Description of Artificial Sequence: Synthetic oligonucleotide
  Antisense strand to SEQ ID NO: 1718385
ugaucucagcccuacguuu

SEQ ID NO: 1718387 - RNA, 19 nt, Artificial Sequence
  Description of Artificial Sequence: Synthetic oligonucleotide
  Sense strand starting at position 1192 of SEQ ID NO: 1562052
gcacauuggcuuugaucaa

SEQ ID NO: 1718388 - RNA, 19 nt, Artificial Sequence
  Description of Artificial Sequence: Synthetic oligonucleotide
  Antisense strand to SEQ ID NO: 1718387
uugaucaaagccaaugugc

SEQ ID NO: 1718389 - RNA, 19 nt, Artificial Sequence
  Description of Artificial Sequence: Synthetic oligonucleotide
  Sense strand starting at position 1293 of SEQ ID NO: 1562052
ucucuaaccgugugaccuu

SEQ ID NO: 1718390 - RNA, 19 nt, Artificial Sequence
  Description of Artificial Sequence: Synthetic oligonucleotide
  Antisense strand to SEQ ID NO: 1718389
aaggucacacgguuagaga

SEQ ID NO: 1718391 - RNA, 19 nt, Artificial Sequence
  Description of Artificial Sequence: Synthetic oligonucleotide
  Sense strand starting at position 1340 of SEQ ID NO: 1562052
ccgcuuccucuugcgugaa

SEQ ID NO: 1718392 - RNA, 19 nt, Artificial Sequence
  Description of Artificial Sequence: Synthetic oligonucleotide
  Antisense strand to SEQ ID NO: 1718391
uucacgcaagaggaagcgg

SEQ ID NO: 1718393 - RNA, 19 nt, Artificial Sequence
  Description of Artificial Sequence: Synthetic oligonucleotide
  Sense strand starting at position 1343 of SEQ ID NO: 1562052
cuuccucuugcgugaaaug

SEQ ID NO: 1718394 - RNA, 19 nt, Artificial Sequence
  Description of Artificial Sequence: Synthetic oligonucleotide
  Antisense strand to SEQ ID NO: 1718393
cauuucacgcaagaggaag

SEQ ID NO: 1718395 - RNA, 19 nt, Artificial Sequence
  Description of Artificial Sequence: Synthetic oligonucleotide
  Sense strand starting at position 1415 of SEQ ID NO: 1562052
agugaugucuuggcaugca

SEQ ID NO: 1718396 - RNA, 19 nt, Artificial Sequence
  Description of Artificial Sequence: Synthetic oligonucleotide
  Antisense strand to SEQ ID NO: 1718395
ugcaugccaagacaucacu

SEQ ID NO: 1718397 - RNA, 19 nt, Artificial Sequence
  Description of Artificial Sequence: Synthetic oligonucleotide
  Sense strand starting at position 1515 of SEQ ID NO: 1562052
agggaaguguggucaggaa

SEQ ID NO: 1718398 - RNA, 19 nt, Artificial Sequence
  Description of Artificial Sequence: Synthetic oligonucleotide
  Antisense strand to SEQ ID NO: 1718397
uuccugaccacacuucccu

SEQ ID NO: 1718399 - RNA, 19 nt, Artificial Sequence
  Description of Artificial Sequence: Synthetic oligonucleotide
  Sense strand starting at position 1779 of SEQ ID NO: 1562052
gcuguaguugccucggaug

SEQ ID NO: 1718400 - RNA, 19 nt, Artificial Sequence
  Description of Artificial Sequence: Synthetic oligonucleotide
  Antisense strand to SEQ ID NO: 1718399
cauccgaggcaacuacagc

SEQ ID NO: 1718401 - RNA, 19 nt, Artificial Sequence
  Description of Artificial Sequence: Synthetic oligonucleotide
  Sense strand starting at position 1911 of SEQ ID NO: 1562052
gggcuuguccucgaacauc

SEQ ID NO: 1718402 - RNA, 19 nt, Artificial Sequence
  Description of Artificial Sequence: Synthetic oligonucleotide
  Antisense strand to SEQ ID NO: 1718401
gauguucgaggacaagccc

SEQ ID NO: 1718403 - RNA, 19 nt, Artificial Sequence
  Description of Artificial Sequence: Synthetic oligonucleotide
  Sense strand starting at position 2121 of SEQ ID NO: 1562052
ccggaaaugugauaagaag

SEQ ID NO: 1718404 - RNA, 19 nt, Artificial Sequence
  Description of Artificial Sequence: Synthetic oligonucleotide
  Antisense strand to SEQ ID NO: 1718403
cuucuuaucacauuuccgg

SEQ ID NO: 1718405 - RNA, 19 nt, Artificial Sequence
  Description of Artificial Sequence: Synthetic oligonucleotide
  Sense strand starting at position 2129 of SEQ ID NO: 1562052
gugauaagaagauguaccu

SEQ ID NO: 1718406 - RNA, 19 nt, Artificial Sequence
  Description of Artificial Sequence: Synthetic oligonucleotide
  Antisense strand to SEQ ID NO: 1718405
agguacaucuucuuaucac

SEQ ID NO: 1718407 - RNA, 19 nt, Artificial Sequence
  Description of Artificial Sequence: Synthetic oligonucleotide
  Sense strand starting at position 2262 of SEQ ID NO: 1562052
aguccaucucuugggagau

SEQ ID NO: 1718408 - RNA, 19 nt, Artificial Sequence
  Description of Artificial Sequence: Synthetic oligonucleotide
  Antisense strand to SEQ ID NO: 1718407
aucucccaagagauggacu

SEQ ID NO: 1718409 - RNA, 19 nt, Artificial Sequence
  Description of Artificial Sequence: Synthetic oligonucleotide
  Sense strand starting at position 2264 of SEQ ID NO: 1562052
uccaucucuugggagauga

SEQ ID NO: 1718410 - RNA, 19 nt, Artificial Sequence
  Description of Artificial Sequence: Synthetic oligonucleotide
  Antisense strand to SEQ ID NO: 1718409
ucaucucccaagagaugga

SEQ ID NO: 1718411 - RNA, 19 nt, Artificial Sequence
  Description of Artificial Sequence: Synthetic oligonucleotide
  Sense strand starting at position 2539 of SEQ ID NO: 1562052
cagugagugguucgcuaaa

SEQ ID NO: 1718412 - RNA, 19 nt, Artificial Sequence
  Description of Artificial Sequence: Synthetic oligonucleotide
  Antisense strand to SEQ ID NO: 1718411
uuuagcgaaccacucacug

SEQ ID NO: 1718413 - RNA, 19 nt, Artificial Sequence
  Description of Artificial Sequence: Synthetic oligonucleotide
  Sense strand starting at position 2541 of SEQ ID NO: 1562052
gugagugguucgcuaaaug

SEQ ID NO: 1718414 - RNA, 19 nt, Artificial Sequence
  Description of Artificial Sequence: Synthetic oligonucleotide
  Antisense strand to SEQ ID NO: 1718413
cauuuagcgaaccacucac

SEQ ID NO: 1718415 - RNA, 19 nt, Artificial Sequence
  Description of Artificial Sequence: Synthetic oligonucleotide
  Sense strand starting at position 2570 of SEQ ID NO: 1562052
aggauuggugacggauauu

SEQ ID NO: 1718416 - RNA, 19 nt, Artificial Sequence
  Description of Artificial Sequence: Synthetic oligonucleotide
  Antisense strand to SEQ ID NO: 1718415
aauauccgucaccaauccu

SEQ ID NO: 1718417 - RNA, 19 nt, Artificial Sequence
  Description of Artificial Sequence: Synthetic oligonucleotide
  Sense strand starting at position 2576 of SEQ ID NO: 1562052
ggugacggauauuagaaga

SEQ ID NO: 1718418 - RNA, 19 nt, Artificial Sequence
  Description of Artificial Sequence: Synthetic oligonucleotide
  Antisense strand to SEQ ID NO: 1718417
ucuucuaauauccgucacc

SEQ ID NO: 1718419 - RNA, 19 nt, Artificial Sequence
  Description of Artificial Sequence: Synthetic oligonucleotide
  Sense strand starting at position 2697 of SEQ ID NO: 1562052
ucacgugacuucuuagaac

SEQ ID NO: 1718420 - RNA, 19 nt, Artificial Sequence
  Description of Artificial Sequence: Synthetic oligonucleotide
  Antisense strand to SEQ ID NO: 1718419
guucuaagaagucacguga

SEQ ID NO: 1718421 - RNA, 19 nt, Artificial Sequence
  Description of Artificial Sequence: Synthetic oligonucleotide
  Sense strand starting at position 2918 of SEQ ID NO: 1562052
gcgggagagucuuccuuug

SEQ ID NO: 1718422 - RNA, 19 nt, Artificial Sequence
  Description of Artificial Sequence: Synthetic oligonucleotide
  Antisense strand to SEQ ID NO: 1718421
caaaggaagacucucccgc

SEQ ID NO: 1718423 - RNA, 19 nt, Artificial Sequence
  Description of Artificial Sequence: Synthetic oligonucleotide
  Sense strand starting at position 2920 of SEQ ID NO: 1562052
gggagagucuuccuuugca

SEQ ID NO: 1718424 - RNA, 19 nt, Artificial Sequence
  Description of Artificial Sequence: Synthetic oligonucleotide
  Antisense strand to SEQ ID NO: 1718423
ugcaaaggaagacucuccc

SEQ ID NO: 1718425 - RNA, 19 nt, Artificial Sequence
  Description of Artificial Sequence: Synthetic oligonucleotide
  Sense strand starting at position 3192 of SEQ ID NO: 1562052
uuauuugcuuugccuguaa

SEQ ID NO: 1718426 - RNA, 19 nt, Artificial Sequence
  Description of Artificial Sequence: Synthetic oligonucleotide
  Antisense strand to SEQ ID NO: 1718425
uuacaggcaaagcaaauaa

SEQ ID NO: 1718427 - RNA, 19 nt, Artificial Sequence
  Description of Artificial Sequence: Synthetic oligonucleotide
  Sense strand starting at position 3194 of SEQ ID NO: 1562052
auuugcuuugccuguaauc

SEQ ID NO: 1718428 - RNA, 19 nt, Artificial Sequence
  Description of Artificial Sequence: Synthetic oligonucleotide
  Antisense strand to SEQ ID NO: 1718427
gauuacaggcaaagcaaau

SEQ ID NO: 1718429 - RNA, 19 nt, Artificial Sequence
  Description of Artificial Sequence: Synthetic oligonucleotide
  Sense strand starting at position 3331 of SEQ ID NO: 1562052
ggugcacuuguguaauccu

SEQ ID NO: 1718430 - RNA, 19 nt, Artificial Sequence
  Description of Artificial Sequence: Synthetic oligonucleotide
  Antisense strand to SEQ ID NO: 1718429
aggauuacacaagugcacc

SEQ ID NO: 1718431 - RNA, 19 nt, Artificial Sequence
  Description of Artificial Sequence: Synthetic oligonucleotide
  Sense strand starting at position 3334 of SEQ ID NO: 1562052
gcacuuguguaauccuaac

SEQ ID NO: 1718432 - RNA, 19 nt, Artificial Sequence
  Description of Artificial Sequence: Synthetic oligonucleotide
  Antisense strand to SEQ ID NO: 1718431
guuaggauuacacaagugc

SEQ ID NO: 1718433 - RNA, 19 nt, Artificial Sequence
  Description of Artificial Sequence: Synthetic oligonucleotide
  Sense strand starting at position 3379 of SEQ ID NO: 1562052
aaagaaucgcuugaaccga

SEQ ID NO: 1718434 - RNA, 19 nt, Artificial Sequence
  Description of Artificial Sequence: Synthetic oligonucleotide
  Antisense strand to SEQ ID NO: 1718433
ucgguucaagcgauucuuu

SEQ ID NO: 1718435 - RNA, 19 nt, Artificial Sequence
  Description of Artificial Sequence: Synthetic oligonucleotide
  Sense strand starting at position 3576 of SEQ ID NO: 1562052
cuuauuaucccaggacaug

SEQ ID NO: 1718436 - RNA, 19 nt, Artificial Sequence
  Description of Artificial Sequence: Synthetic oligonucleotide
  Antisense strand to SEQ ID NO: 1718435
cauguccugggauaauaag

SEQ ID NO: 1718437 - RNA, 19 nt, Artificial Sequence
  Description of Artificial Sequence: Synthetic oligonucleotide
  Sense strand starting at position 103 of SEQ ID NO: 1562053
guauaaacacgccaaacau

SEQ ID NO: 1718438 - RNA, 19 nt, Artificial Sequence
  Description of Artificial Sequence: Synthetic oligonucleotide
  Antisense strand to SEQ ID NO: 1718437
auguuuggcguguuuauac

SEQ ID NO: 1718439 - RNA, 19 nt, Artificial Sequence
  Description of Artificial Sequence: Synthetic oligonucleotide
  Sense strand starting at position 163 of SEQ ID NO: 1562053
cuguaacaguucuucccaa

SEQ ID NO: 1718440 - RNA, 19 nt, Artificial Sequence
  Description of Artificial Sequence: Synthetic oligonucleotide
  Antisense strand to SEQ ID NO: 1718439
uugggaagaacuguuacag

SEQ ID NO: 1718441 - RNA, 19 nt, Artificial Sequence
  Description of Artificial Sequence: Synthetic oligonucleotide
  Sense strand starting at position 282 of SEQ ID NO: 1562053
cuuguauuguaguucuaua

SEQ ID NO: 1718442 - RNA, 19 nt, Artificial Sequence
  Description of Artificial Sequence: Synthetic oligonucleotide
  Antisense strand to SEQ ID NO: 1718441
uauagaacuacaauacaag

SEQ ID NO: 1718443 - RNA, 19 nt, Artificial Sequence
  Description of Artificial Sequence: Synthetic oligonucleotide
  Sense strand starting at position 318 of SEQ ID NO: 1562053
ucccuauguguccagacuu

SEQ ID NO: 1718444 - RNA, 19 nt, Artificial Sequence
  Description of Artificial Sequence: Synthetic oligonucleotide
  Antisense strand to SEQ ID NO: 1718443
aagucuggacacauaggga

SEQ ID NO: 1718445 - RNA, 19 nt, Artificial Sequence
  Description of Artificial Sequence: Synthetic oligonucleotide
  Sense strand starting at position 351 of SEQ ID NO: 1562053
gacugcaaaugcucugaga

SEQ ID NO: 1718446 - RNA, 19 nt, Artificial Sequence
  Description of Artificial Sequence: Synthetic oligonucleotide
  Antisense strand to SEQ ID NO: 1718445
ucucagagcauuugcaguc

SEQ ID NO: 1718447 - RNA, 19 nt, Artificial Sequence
  Description of Artificial Sequence: Synthetic oligonucleotide
  Sense strand starting at position 353 of SEQ ID NO: 1562053
cugcaaaugcucugagaug

SEQ ID NO: 1718448 - RNA, 19 nt, Artificial Sequence
  Description of Artificial Sequence: Synthetic oligonucleotide
  Antisense strand to SEQ ID NO: 1718447
caucucagagcauuugcag

SEQ ID NO: 1718449 - RNA, 19 nt, Artificial Sequence
  Description of Artificial Sequence: Synthetic oligonucleotide
  Sense strand starting at position 404 of SEQ ID NO: 1562053
agacaauucuuguugcuaa

SEQ ID NO: 1718450 - RNA, 19 nt, Artificial Sequence
  Description of Artificial Sequence: Synthetic oligonucleotide
  Antisense strand to SEQ ID NO: 1718449
uuagcaacaagaauugucu

SEQ ID NO: 1718451 - RNA, 19 nt, Artificial Sequence
  Description of Artificial Sequence: Synthetic oligonucleotide
  Sense strand starting at position 545 of SEQ ID NO: 1562053
guggguuauacugacucua

SEQ ID NO: 1718452 - RNA, 19 nt, Artificial Sequence
  Description of Artificial Sequence: Synthetic oligonucleotide
  Antisense strand to SEQ ID NO: 1718451
uagagucaguauaacccac

SEQ ID NO: 1718453 - RNA, 19 nt, Artificial Sequence
  Description of Artificial Sequence: Synthetic oligonucleotide
  Sense strand starting at position 547 of SEQ ID NO: 1562053
ggguuauacugacucuauu

SEQ ID NO: 1718454 - RNA, 19 nt, Artificial Sequence
  Description of Artificial Sequence: Synthetic oligonucleotide
  Antisense strand to SEQ ID NO: 1718453
aauagagucaguauaaccc

SEQ ID NO: 1718455 - RNA, 19 nt, Artificial Sequence
  Description of Artificial Sequence: Synthetic oligonucleotide
  Sense strand starting at position 610 of SEQ ID NO: 1562053
uuagguuaucucugagaau

SEQ ID NO: 1718456 - RNA, 19 nt, Artificial Sequence
  Description of Artificial Sequence: Synthetic oligonucleotide
  Antisense strand to SEQ ID NO: 1718455
auucucagagauaaccuaa

SEQ ID NO: 1718457 - RNA, 19 nt, Artificial Sequence
  Description of Artificial Sequence: Synthetic oligonucleotide
  Sense strand starting at position 673 of SEQ ID NO: 1562053
cugcaauucucagcaugac

SEQ ID NO: 1718458 - RNA, 19 nt, Artificial Sequence
  Description of Artificial Sequence: Synthetic oligonucleotide
  Antisense strand to SEQ ID NO: 1718457
gucaugcugagaauugcag

SEQ ID NO: 1718459 - RNA, 19 nt, Artificial Sequence
  Description of Artificial Sequence: Synthetic oligonucleotide
  Sense strand starting at position 674 of SEQ ID NO: 1562053
ugcaauucucagcaugaca

SEQ ID NO: 1718460 - RNA, 19 nt, Artificial Sequence
  Description of Artificial Sequence: Synthetic oligonucleotide
  Antisense strand to SEQ ID NO: 1718459
ugucaugcugagaauugca

SEQ ID NO: 1718461 - RNA, 19 nt, Artificial Sequence
  Description of Artificial Sequence: Synthetic oligonucleotide
  Sense strand starting at position 702 of SEQ ID NO: 1562053
ugaguaaauguuuagcacu

SEQ ID NO: 1718462 - RNA, 19 nt, Artificial Sequence
  Description of Artificial Sequence: Synthetic oligonucleotide
  Antisense strand to SEQ ID NO: 1718461
agugcuaaacauuuacuca

SEQ ID NO: 1718463 - RNA, 19 nt, Artificial Sequence
  Description of Artificial Sequence: Synthetic oligonucleotide
  Sense strand starting at position 704 of SEQ ID NO: 1562053
aguaaauguuuagcacuua

SEQ ID NO: 1718464 - RNA, 19 nt, Artificial Sequence
  Description of Artificial Sequence: Synthetic oligonucleotide
  Antisense strand to SEQ ID NO: 1718463
uaagugcuaaacauuuacu

SEQ ID NO: 1718465 - RNA, 19 nt, Artificial Sequence
  Description of Artificial Sequence: Synthetic oligonucleotide
  Sense strand starting at position 853 of SEQ ID NO: 1562053
accuguagauccucaaagu

SEQ ID NO: 1718466 - RNA, 19 nt, Artificial Sequence
  Description of Artificial Sequence: Synthetic oligonucleotide
  Antisense strand to SEQ ID NO: 1718465
acuuugaggaucuacaggu

SEQ ID NO: 1718467 - RNA, 19 nt, Artificial Sequence
  Description of Artificial Sequence: Synthetic oligonucleotide
  Sense strand starting at position 973 of SEQ ID NO: 1562053
uggaucucguccuccugaa

SEQ ID NO: 1718468 - RNA, 19 nt, Artificial Sequence
  Description of Artificial Sequence: Synthetic oligonucleotide
  Antisense strand to SEQ ID NO: 1718467
uucaggaggacgagaucca

SEQ ID NO: 1718469 - RNA, 19 nt, Artificial Sequence
  Description of Artificial Sequence: Synthetic oligonucleotide
  Sense strand starting at position 1008 of SEQ ID NO: 1562053
ucccgagggagccguaaau

SEQ ID NO: 1718470 - RNA, 19 nt, Artificial Sequence
  Description of Artificial Sequence: Synthetic oligonucleotide
  Antisense strand to SEQ ID NO: 1718469
auuuacggcucccucggga

SEQ ID NO: 1718471 - RNA, 19 nt, Artificial Sequence
  Description of Artificial Sequence: Synthetic oligonucleotide
  Sense strand starting at position 1010 of SEQ ID NO: 1562053
ccgagggagccguaaaugu

SEQ ID NO: 1718472 - RNA, 19 nt, Artificial Sequence
  Description of Artificial Sequence: Synthetic oligonucleotide
  Antisense strand to SEQ ID NO: 1718471
acauuuacggcucccucgg

SEQ ID NO: 1718473 - RNA, 19 nt, Artificial Sequence
  Description of Artificial Sequence: Synthetic oligonucleotide
  Sense strand starting at position 1018 of SEQ ID NO: 1562053
gccguaaaugugcugcuca

SEQ ID NO: 1718474 - RNA, 19 nt, Artificial Sequence
  Description of Artificial Sequence: Synthetic oligonucleotide
  Antisense strand to SEQ ID NO: 1718473
ugagcagcacauuuacggc

SEQ ID NO: 1718475 - RNA, 19 nt, Artificial Sequence
  Description of Artificial Sequence: Synthetic oligonucleotide
  Sense strand starting at position 1020 of SEQ ID NO: 1562053
cguaaaugugcugcucaca

SEQ ID NO: 1718476 - RNA, 19 nt, Artificial Sequence
  Description of Artificial Sequence: Synthetic oligonucleotide
  Antisense strand to SEQ ID NO: 1718475
ugugagcagcacauuuacg

SEQ ID NO: 1718477 - RNA, 19 nt, Artificial Sequence
  Description of Artificial Sequence: Synthetic oligonucleotide
  Sense strand starting at position 1158 of SEQ ID NO: 1562053
cugcuacacccucgaguaa

SEQ ID NO: 1718478 - RNA, 19 nt, Artificial Sequence
  Description of Artificial Sequence: Synthetic oligonucleotide
  Antisense strand to SEQ ID NO: 1718477
uuacucgaggguguagcag

SEQ ID NO: 1718479 - RNA, 19 nt, Artificial Sequence
  Description of Artificial Sequence: Synthetic oligonucleotide
  Sense strand starting at position 1159 of SEQ ID NO: 1562053
ugcuacacccucgaguaaa

SEQ ID NO: 1718480 - RNA, 19 nt, Artificial Sequence
  Description of Artificial Sequence: Synthetic oligonucleotide
  Antisense strand to SEQ ID NO: 1718479
uuuacucgaggguguagca

SEQ ID NO: 1718481 - RNA, 19 nt, Artificial Sequence
  Description of Artificial Sequence: Synthetic oligonucleotide
  Sense strand starting at position 1253 of SEQ ID NO: 1562053
ugugacacuuccuuucuga

SEQ ID NO: 1718482 - RNA, 19 nt, Artificial Sequence
  Description of Artificial Sequence: Synthetic oligonucleotide
  Antisense strand to SEQ ID NO: 1718481
ucagaaaggaagugucaca

SEQ ID NO: 1718483 - RNA, 19 nt, Artificial Sequence
  Description of Artificial Sequence: Synthetic oligonucleotide
  Sense strand starting at position 1370 of SEQ ID NO: 1562053
gaaggaguguccucacuac

SEQ ID NO: 1718484 - RNA, 19 nt, Artificial Sequence
  Description of Artificial Sequence: Synthetic oligonucleotide
  Antisense strand to SEQ ID NO: 1718483
guagugaggacacuccuuc

SEQ ID NO: 1718485 - RNA, 19 nt, Artificial Sequence
  Description of Artificial Sequence: Synthetic oligonucleotide
  Sense strand starting at position 1374 of SEQ ID NO: 1562053
gaguguccucacuacgauu

SEQ ID NO: 1718486 - RNA, 19 nt, Artificial Sequence
  Description of Artificial Sequence: Synthetic oligonucleotide
  Antisense strand to SEQ ID NO: 1718485
aaucguagugaggacacuc

SEQ ID NO: 1718487 - RNA, 19 nt, Artificial Sequence
  Description of Artificial Sequence: Synthetic oligonucleotide
  Sense strand starting at position 1376 of SEQ ID NO: 1562053
guguccucacuacgauuau

SEQ ID NO: 1718488 - RNA, 19 nt, Artificial Sequence
  Description of Artificial Sequence: Synthetic oligonucleotide
  Antisense strand to SEQ ID NO: 1718487
auaaucguagugaggacac

SEQ ID NO: 1718489 - RNA, 19 nt, Artificial Sequence
  Description of Artificial Sequence: Synthetic oligonucleotide
  Sense strand starting at position 1408 of SEQ ID NO: 1562053
ggcacagagauguaguuau

SEQ ID NO: 1718490 - RNA, 19 nt, Artificial Sequence
  Description of Artificial Sequence: Synthetic oligonucleotide
  Antisense strand to SEQ ID NO: 1718489
auaacuacaucucugugcc

SEQ ID NO: 1718491 - RNA, 19 nt, Artificial Sequence
  Description of Artificial Sequence: Synthetic oligonucleotide
  Sense strand starting at position 2038 of SEQ ID NO: 1562053
ggcgaucucccggaaguua

SEQ ID NO: 1718492 - RNA, 19 nt, Artificial Sequence
  Description of Artificial Sequence: Synthetic oligonucleotide
  Antisense strand to SEQ ID NO: 1718491
uaacuuccgggagaucgcc

SEQ ID NO: 1718493 - RNA, 19 nt, Artificial Sequence
  Description of Artificial Sequence: Synthetic oligonucleotide
  Sense strand starting at position 2151 of SEQ ID NO: 1562053
ggguaugagugucuagcuu

SEQ ID NO: 1718494 - RNA, 19 nt, Artificial Sequence
  Description of Artificial Sequence: Synthetic oligonucleotide
  Antisense strand to SEQ ID NO: 1718493
aagcuagacacucauaccc

SEQ ID NO: 1718495 - RNA, 19 nt, Artificial Sequence
  Description of Artificial Sequence: Synthetic oligonucleotide
  Sense strand starting at position 2178 of SEQ ID NO: 1562053
acugcaagacugugcaaau

SEQ ID NO: 1718496 - RNA, 19 nt, Artificial Sequence
  Description of Artificial Sequence: Synthetic oligonucleotide
  Antisense strand to SEQ ID NO: 1718495
auuugcacagucuugcagu

SEQ ID NO: 1718497 - RNA, 19 nt, Artificial Sequence
  Description of Artificial Sequence: Synthetic oligonucleotide
  Sense strand starting at position 2179 of SEQ ID NO: 1562053
cugcaagacugugcaaauu

SEQ ID NO: 1718498 - RNA, 19 nt, Artificial Sequence
  Description of Artificial Sequence: Synthetic oligonucleotide
  Antisense strand to SEQ ID NO: 1718497
aauuugcacagucuugcag

SEQ ID NO: 1718499 - RNA, 19 nt, Artificial Sequence
  Description of Artificial Sequence: Synthetic oligonucleotide
  Sense strand starting at position 2209 of SEQ ID NO: 1562053
uccaguuuccgcggaagga

SEQ ID NO: 1718500 - RNA, 19 nt, Artificial Sequence
  Description of Artificial Sequence: Synthetic oligonucleotide
  Antisense strand to SEQ ID NO: 1718499
uccuuccgcggaaacugga

SEQ ID NO: 1718501 - RNA, 19 nt, Artificial Sequence
  Description of Artificial Sequence: Synthetic oligonucleotide
  Sense strand starting at position 2222 of SEQ ID NO: 1562053
gaaggagcgaauugugcuu

SEQ ID NO: 1718502 - RNA, 19 nt, Artificial Sequence
  Description of Artificial Sequence: Synthetic oligonucleotide
  Antisense strand to SEQ ID NO: 1718501
aagcacaauucgcuccuuc

SEQ ID NO: 1718503 - RNA, 19 nt, Artificial Sequence
  Description of Artificial Sequence: Synthetic oligonucleotide
  Sense strand starting at position 2234 of SEQ ID NO: 1562053
ugugcuuaccucuaaguuu

SEQ ID NO: 1718504 - RNA, 19 nt, Artificial Sequence
  Description of Artificial Sequence: Synthetic oligonucleotide
  Antisense strand to SEQ ID NO: 1718503
aaacuuagagguaagcaca

SEQ ID NO: 1718505 - RNA, 19 nt, Artificial Sequence
  Description of Artificial Sequence: Synthetic oligonucleotide
  Sense strand starting at position 2273 of SEQ ID NO: 1562053
caacgugguggcuaguuau

SEQ ID NO: 1718506 - RNA, 19 nt, Artificial Sequence
  Description of Artificial Sequence: Synthetic oligonucleotide
  Antisense strand to SEQ ID NO: 1718505
auaacuagccaccacguug

SEQ ID NO: 1718507 - RNA, 19 nt, Artificial Sequence
  Description of Artificial Sequence: Synthetic oligonucleotide
  Sense strand starting at position 2279 of SEQ ID NO: 1562053
gguggcuaguuauuauauc

SEQ ID NO: 1718508 - RNA, 19 nt, Artificial Sequence
  Description of Artificial Sequence: Synthetic oligonucleotide
  Antisense strand to SEQ ID NO: 1718507
gauauaauaacuagccacc

SEQ ID NO: 1718509 - RNA, 19 nt, Artificial Sequence
  Description of Artificial Sequence: Synthetic oligonucleotide
  Sense strand starting at position 3550 of SEQ ID NO: 1562053
ggcuuaagucuguaguccu

SEQ ID NO: 1718510 - RNA, 19 nt, Artificial Sequence
  Description of Artificial Sequence: Synthetic oligonucleotide
  Antisense strand to SEQ ID NO: 1718509
aggacuacagacuuaagcc

SEQ ID NO: 1718511 - RNA, 19 nt, Artificial Sequence
  Description of Artificial Sequence: Synthetic oligonucleotide
  Sense strand starting at position 3646 of SEQ ID NO: 1562053
ugcacuuuagcucagguaa

SEQ ID NO: 1718512 - RNA, 19 nt, Artificial Sequence
  Description of Artificial Sequence: Synthetic oligonucleotide
  Antisense strand to SEQ ID NO: 1718511
uuaccugagcuaaagugca

SEQ ID NO: 1718513 - RNA, 19 nt, Artificial Sequence
  Description of Artificial Sequence: Synthetic oligonucleotide
  Sense strand starting at position 3846 of SEQ ID NO: 1562053
guuugcucuguguagguaa

SEQ ID NO: 1718514 - RNA, 19 nt, Artificial Sequence
  Description of Artificial Sequence: Synthetic oligonucleotide
  Antisense strand to SEQ ID NO: 1718513
uuaccuacacagagcaaac

SEQ ID NO: 1718515 - RNA, 19 nt, Artificial Sequence
  Description of Artificial Sequence: Synthetic oligonucleotide
  Sense strand starting at position 3971 of SEQ ID NO: 1562053
gaaguuuaggccgggcaua

SEQ ID NO: 1718516 - RNA, 19 nt, Artificial Sequence
  Description of Artificial Sequence: Synthetic oligonucleotide
  Antisense strand to SEQ ID NO: 1718515
uaugcccggccuaaacuuc

SEQ ID NO: 1718517 - RNA, 19 nt, Artificial Sequence
  Description of Artificial Sequence: Synthetic oligonucleotide
  Sense strand starting at position 129 of SEQ ID NO: 1562054
agagaacaaucagggacuu

SEQ ID NO: 1718518 - RNA, 19 nt, Artificial Sequence
  Description of Artificial Sequence: Synthetic oligonucleotide
  Antisense strand to SEQ ID NO: 1718517
aagucccugauuguucucu

SEQ ID NO: 1718519 - RNA, 19 nt, Artificial Sequence
  Description of Artificial Sequence: Synthetic oligonucleotide
  Sense strand starting at position 547 of SEQ ID NO: 1562054
cucuuuccacccgacagau

SEQ ID NO: 1718520 - RNA, 19 nt, Artificial Sequence
  Description of Artificial Sequence: Synthetic oligonucleotide
  Antisense strand to SEQ ID NO: 1718519
aucugucggguggaaagag

SEQ ID NO: 1718521 - RNA, 19 nt, Artificial Sequence
  Description of Artificial Sequence: Synthetic oligonucleotide
  Sense strand starting at position 883 of SEQ ID NO: 1562054
agccaaagcuccucugaac

SEQ ID NO: 1718522 - RNA, 19 nt, Artificial Sequence
  Description of Artificial Sequence: Synthetic oligonucleotide
  Antisense strand to SEQ ID NO: 1718521
guucagaggagcuuuggcu

SEQ ID NO: 1718523 - RNA, 19 nt, Artificial Sequence
  Description of Artificial Sequence: Synthetic oligonucleotide
  Sense strand starting at position 1073 of SEQ ID NO: 1562054
ggccgagacuuuccucuga

SEQ ID NO: 1718524 - RNA, 19 nt, Artificial Sequence
  Description of Artificial Sequence: Synthetic oligonucleotide
  Antisense strand to SEQ ID NO: 1718523
ucagaggaaagucucggcc

SEQ ID NO: 1718525 - RNA, 19 nt, Artificial Sequence
  Description of Artificial Sequence: Synthetic oligonucleotide
  Sense strand starting at position 1075 of SEQ ID NO: 1562054
ccgagacuuuccucugaga

SEQ ID NO: 1718526 - RNA, 19 nt, Artificial Sequence
  Description of Artificial Sequence: Synthetic oligonucleotide
  Antisense strand to SEQ ID NO: 1718525
ucucagaggaaagucucgg

SEQ ID NO: 1718527 - RNA, 19 nt, Artificial Sequence
  Description of Artificial Sequence: Synthetic oligonucleotide
  Sense strand starting at position 1078 of SEQ ID NO: 1562054
agacuuuccucugagaagg

SEQ ID NO: 1718528 - RNA, 19 nt, Artificial Sequence
  Description of Artificial Sequence: Synthetic oligonucleotide
  Antisense strand to SEQ ID NO: 1718527
ccuucucagaggaaagucu

SEQ ID NO: 1718529 - RNA, 19 nt, Artificial Sequence
  Description of Artificial Sequence: Synthetic oligonucleotide
  Sense strand starting at position 1092 of SEQ ID NO: 1562054
gaaggaguuugcgacgcua

SEQ ID NO: 1718530 - RNA, 19 nt, Artificial Sequence
  Description of Artificial Sequence: Synthetic oligonucleotide
  Antisense strand to SEQ ID NO: 1718529
uagcgucgcaaacuccuuc

SEQ ID NO: 1718531 - RNA, 19 nt, Artificial Sequence
  Description of Artificial Sequence: Synthetic oligonucleotide
  Sense strand starting at position 1105 of SEQ ID NO: 1562054
acgcuaugcuuggaaggua

SEQ ID NO: 1718532 - RNA, 19 nt, Artificial Sequence
  Description of Artificial Sequence: Synthetic oligonucleotide
  Antisense strand to SEQ ID NO: 1718531
uaccuuccaagcauagcgu

SEQ ID NO: 1718533 - RNA, 19 nt, Artificial Sequence
  Description of Artificial Sequence: Synthetic oligonucleotide
  Sense strand starting at position 1125 of SEQ ID NO: 1562054
gcaggaaagugucuucaag

SEQ ID NO: 1718534 - RNA, 19 nt, Artificial Sequence
  Description of Artificial Sequence: Synthetic oligonucleotide
  Antisense strand to SEQ ID NO: 1718533
cuugaagacacuuuccugc

SEQ ID NO: 1718535 - RNA, 19 nt, Artificial Sequence
  Description of Artificial Sequence: Synthetic oligonucleotide
  Sense strand starting at position 1177 of SEQ ID NO: 1562054
ggcugagagggcuguuaaa

SEQ ID NO: 1718536 - RNA, 19 nt, Artificial Sequence
  Description of Artificial Sequence: Synthetic oligonucleotide
  Antisense strand to SEQ ID NO: 1718535
uuuaacagcccucucagcc

SEQ ID NO: 1718537 - RNA, 19 nt, Artificial Sequence
  Description of Artificial Sequence: Synthetic oligonucleotide
  Sense strand starting at position 2101 of SEQ ID NO: 1562054
cgggaagcguaguucuaac

SEQ ID NO: 1718538 - RNA, 19 nt, Artificial Sequence
  Description of Artificial Sequence: Synthetic oligonucleotide
  Antisense strand to SEQ ID NO: 1718537
guuagaacuacgcuucccg

SEQ ID NO: 1718539 - RNA, 19 nt, Artificial Sequence
  Description of Artificial Sequence: Synthetic oligonucleotide
  Sense strand starting at position 2309 of SEQ ID NO: 1562054
agcgcaccgucuggugaau

SEQ ID NO: 1718540 - RNA, 19 nt, Artificial Sequence
  Description of Artificial Sequence: Synthetic oligonucleotide
  Antisense strand to SEQ ID NO: 1718539
auucaccagacggugcgcu

SEQ ID NO: 1718541 - RNA, 19 nt, Artificial Sequence
  Description of Artificial Sequence: Synthetic oligonucleotide
  Sense strand starting at position 2310 of SEQ ID NO: 1562054
gcgcaccgucuggugaauu

SEQ ID NO: 1718542 - RNA, 19 nt, Artificial Sequence
  Description of Artificial Sequence: Synthetic oligonucleotide
  Antisense strand to SEQ ID NO: 1718541
aauucaccagacggugcgc

SEQ ID NO: 1718543 - RNA, 19 nt, Artificial Sequence
  Description of Artificial Sequence: Synthetic oligonucleotide
  Sense strand starting at position 2311 of SEQ ID NO: 1562054
cgcaccgucuggugaauua

SEQ ID NO: 1718544 - RNA, 19 nt, Artificial Sequence
  Description of Artificial Sequence: Synthetic oligonucleotide
  Antisense strand to SEQ ID NO: 1718543
uaauucaccagacggugcg

SEQ ID NO: 1718545 - RNA, 19 nt, Artificial Sequence
  Description of Artificial Sequence: Synthetic oligonucleotide
  Sense strand starting at position 2363 of SEQ ID NO: 1562054
uuagcaucuuguuaauuga

SEQ ID NO: 1718546 - RNA, 19 nt, Artificial Sequence
  Description of Artificial Sequence: Synthetic oligonucleotide
  Antisense strand to SEQ ID NO: 1718545
ucaauuaacaagaugcuaa

SEQ ID NO: 1718547 - RNA, 19 nt, Artificial Sequence
  Description of Artificial Sequence: Synthetic oligonucleotide
  Sense strand starting at position 2370 of SEQ ID NO: 1562054
cuuguuaauugagucggua

SEQ ID NO: 1718548 - RNA, 19 nt, Artificial Sequence
  Description of Artificial Sequence: Synthetic oligonucleotide
  Antisense strand to SEQ ID NO: 1718547
uaccgacucaauuaacaag

SEQ ID NO: 1718549 - RNA, 19 nt, Artificial Sequence
  Description of Artificial Sequence: Synthetic oligonucleotide
  Sense strand starting at position 2372 of SEQ ID NO: 1562054
uguuaauugagucgguauu

SEQ ID NO: 1718550 - RNA, 19 nt, Artificial Sequence
  Description of Artificial Sequence: Synthetic oligonucleotide
  Antisense strand to SEQ ID NO: 1718549
aauaccgacucaauuaaca

SEQ ID NO: 1718551 - RNA, 19 nt, Artificial Sequence
  Description of Artificial Sequence: Synthetic oligonucleotide
  Sense strand starting at position 2373 of SEQ ID NO: 1562054
guuaauugagucgguauuu

SEQ ID NO: 1718552 - RNA, 19 nt, Artificial Sequence
  Description of Artificial Sequence: Synthetic oligonucleotide
  Antisense strand to SEQ ID NO: 1718551
aaauaccgacucaauuaac

SEQ ID NO: 1718553 - RNA, 19 nt, Artificial Sequence
  Description of Artificial Sequence: Synthetic oligonucleotide
  Sense strand starting at position 2409 of SEQ ID NO: 1562054
ggaagagccacgugccaua

SEQ ID NO: 1718554 - RNA, 19 nt, Artificial Sequence
  Description of Artificial Sequence: Synthetic oligonucleotide
  Antisense strand to SEQ ID NO: 1718553
uauggcacguggcucuucc

SEQ ID NO: 1718555 - RNA, 19 nt, Artificial Sequence
  Description of Artificial Sequence: Synthetic oligonucleotide
  Sense strand starting at position 2414 of SEQ ID NO: 1562054
agccacgugccauauuaaa

SEQ ID NO: 1718556 - RNA, 19 nt, Artificial Sequence
  Description of Artificial Sequence: Synthetic oligonucleotide
  Antisense strand to SEQ ID NO: 1718555
uuuaauauggcacguggcu

SEQ ID NO: 1718557 - RNA, 19 nt, Artificial Sequence
  Description of Artificial Sequence: Synthetic oligonucleotide
  Sense strand starting at position 2541 of SEQ ID NO: 1562054
gcguccaggacugagaauu

SEQ ID NO: 1718558 - RNA, 19 nt, Artificial Sequence
  Description of Artificial Sequence: Synthetic oligonucleotide
  Antisense strand to SEQ ID NO: 1718557
aauucucaguccuggacgc

SEQ ID NO: 1718559 - RNA, 19 nt, Artificial Sequence
  Description of Artificial Sequence: Synthetic oligonucleotide
  Sense strand starting at position 2549 of SEQ ID NO: 1562054
gacugagaauucggcuagu

SEQ ID NO: 1718560 - RNA, 19 nt, Artificial Sequence
  Description of Artificial Sequence: Synthetic oligonucleotide
  Antisense strand to SEQ ID NO: 1718559
acuagccgaauucucaguc

SEQ ID NO: 1718561 - RNA, 19 nt, Artificial Sequence
  Description of Artificial Sequence: Synthetic oligonucleotide
  Sense strand starting at position 2552 of SEQ ID NO: 1562054
ugagaauucggcuaguaaa

SEQ ID NO: 1718562 - RNA, 19 nt, Artificial Sequence
  Description of Artificial Sequence: Synthetic oligonucleotide
  Antisense strand to SEQ ID NO: 1718561
uuuacuagccgaauucuca

SEQ ID NO: 1718563 - RNA, 19 nt, Artificial Sequence
  Description of Artificial Sequence: Synthetic oligonucleotide
  Sense strand starting at position 2555 of SEQ ID NO: 1562054
gaauucggcuaguaaacau

SEQ ID NO: 1718564 - RNA, 19 nt, Artificial Sequence
  Description of Artificial Sequence: Synthetic oligonucleotide
  Antisense strand to SEQ ID NO: 1718563
auguuuacuagccgaauuc

SEQ ID NO: 1718565 - RNA, 19 nt, Artificial Sequence
  Description of Artificial Sequence: Synthetic oligonucleotide
  Sense strand starting at position 2905 of SEQ ID NO: 1562054
agcgguugagcaugaaacu

SEQ ID NO: 1718566 - RNA, 19 nt, Artificial Sequence
  Description of Artificial Sequence: Synthetic oligonucleotide
  Antisense strand to SEQ ID NO: 1718565
aguuucaugcucaaccgcu

SEQ ID NO: 1718567 - RNA, 19 nt, Artificial Sequence
  Description of Artificial Sequence: Synthetic oligonucleotide
  Sense strand starting at position 2929 of SEQ ID NO: 1562054
ccgggcuuuccugagcgaa

SEQ ID NO: 1718568 - RNA, 19 nt, Artificial Sequence
  Description of Artificial Sequence: Synthetic oligonucleotide
  Antisense strand to SEQ ID NO: 1718567
uucgcucaggaaagcccgg

SEQ ID NO: 1718569 - RNA, 19 nt, Artificial Sequence
  Description of Artificial Sequence: Synthetic oligonucleotide
  Sense strand starting at position 2930 of SEQ ID NO: 1562054
cgggcuuuccugagcgaag

SEQ ID NO: 1718570 - RNA, 19 nt, Artificial Sequence
  Description of Artificial Sequence: Synthetic oligonucleotide
  Antisense strand to SEQ ID NO: 1718569
cuucgcucaggaaagcccg

SEQ ID NO: 1718571 - RNA, 19 nt, Artificial Sequence
  Description of Artificial Sequence: Synthetic oligonucleotide
  Sense strand starting at position 3240 of SEQ ID NO: 1562054
ccgaggaguucuccgcguu

SEQ ID NO: 1718572 - RNA, 19 nt, Artificial Sequence
  Description of Artificial Sequence: Synthetic oligonucleotide
  Antisense strand to SEQ ID NO: 1718571
aacgcggagaacuccucgg

SEQ ID NO: 1718573 - RNA, 19 nt, Artificial Sequence
  Description of Artificial Sequence: Synthetic oligonucleotide
  Sense strand starting at position 3241 of SEQ ID NO: 1562054
cgaggaguucuccgcguuu

SEQ ID NO: 1718574 - RNA, 19 nt, Artificial Sequence
  Description of Artificial Sequence: Synthetic oligonucleotide
  Antisense strand to SEQ ID NO: 1718573
aaacgcggagaacuccucg

SEQ ID NO: 1718575 - RNA, 19 nt, Artificial Sequence
  Description of Artificial Sequence: Synthetic oligonucleotide
  Sense strand starting at position 3411 of SEQ ID NO: 1562054
ccgagucuuccggaagccu

SEQ ID NO: 1718576 - RNA, 19 nt, Artificial Sequence
  Description of Artificial Sequence: Synthetic oligonucleotide
  Antisense strand to SEQ ID NO: 1718575
aggcuuccggaagacucgg

SEQ ID NO: 1718577 - RNA, 19 nt, Artificial Sequence
  Description of Artificial Sequence: Synthetic oligonucleotide
  Sense strand starting at position 3659 of SEQ ID NO: 1562054
agggcucugggauauguuu

SEQ ID NO: 1718578 - RNA, 19 nt, Artificial Sequence
  Description of Artificial Sequence: Synthetic oligonucleotide
  Antisense strand to SEQ ID NO: 1718577
aaacauaucccagagcccu

SEQ ID NO: 1718579 - RNA, 19 nt, Artificial Sequence
  Description of Artificial Sequence: Synthetic oligonucleotide
  Sense strand starting at position 3665 of SEQ ID NO: 1562054
cugggauauguuuguugag

SEQ ID NO: 1718580 - RNA, 19 nt, Artificial Sequence
  Description of Artificial Sequence: Synthetic oligonucleotide
  Antisense strand to SEQ ID NO: 1718579
cucaacaaacauaucccag

SEQ ID NO: 1718581 - RNA, 19 nt, Artificial Sequence
  Description of Artificial Sequence: Synthetic oligonucleotide
  Sense strand starting at position 3666 of SEQ ID NO: 1562054
ugggauauguuuguugagu

SEQ ID NO: 1718582 - RNA, 19 nt, Artificial Sequence
  Description of Artificial Sequence: Synthetic oligonucleotide
  Antisense strand to SEQ ID NO: 1718581
acucaacaaacauauccca

SEQ ID NO: 1718583 - RNA, 19 nt, Artificial Sequence
  Description of Artificial Sequence: Synthetic oligonucleotide
  Sense strand starting at position 3667 of SEQ ID NO: 1562054
gggauauguuuguugagug

SEQ ID NO: 1718584 - RNA, 19 nt, Artificial Sequence
  Description of Artificial Sequence: Synthetic oligonucleotide
  Antisense strand to SEQ ID NO: 1718583
cacucaacaaacauauccc

SEQ ID NO: 1718585 - RNA, 19 nt, Artificial Sequence
  Description of Artificial Sequence: Synthetic oligonucleotide
  Sense strand starting at position 3668 of SEQ ID NO: 1562054
ggauauguuuguugagugu

SEQ ID NO: 1718586 - RNA, 19 nt, Artificial Sequence
  Description of Artificial Sequence: Synthetic oligonucleotide
  Antisense strand to SEQ ID NO: 1718585
acacucaacaaacauaucc

SEQ ID NO: 1718587 - RNA, 19 nt, Artificial Sequence
  Description of Artificial Sequence: Synthetic oligonucleotide
  Sense strand starting at position 3677 of SEQ ID NO: 1562054
uguugaguguauccacgau

SEQ ID NO: 1718588 - RNA, 19 nt, Artificial Sequence
  Description of Artificial Sequence: Synthetic oligonucleotide
  Antisense strand to SEQ ID NO: 1718587
aucguggauacacucaaca

SEQ ID NO: 1718589 - RNA, 19 nt, Artificial Sequence
  Description of Artificial Sequence: Synthetic oligonucleotide
  Sense strand starting at position 3681 of SEQ ID NO: 1562054
gaguguauccacgauggaa

SEQ ID NO: 1718590 - RNA, 19 nt, Artificial Sequence
  Description of Artificial Sequence: Synthetic oligonucleotide
  Antisense strand to SEQ ID NO: 1718589
uuccaucguggauacacuc

SEQ ID NO: 1718591 - RNA, 19 nt, Artificial Sequence
  Description of Artificial Sequence: Synthetic oligonucleotide
  Sense strand starting at position 3683 of SEQ ID NO: 1562054
guguauccacgauggaaca

SEQ ID NO: 1718592 - RNA, 19 nt, Artificial Sequence
  Description of Artificial Sequence: Synthetic oligonucleotide
  Antisense strand to SEQ ID NO: 1718591
uguuccaucguggauacac

SEQ ID NO: 1718593 - RNA, 19 nt, Artificial Sequence
  Description of Artificial Sequence: Synthetic oligonucleotide
  Sense strand starting at position 185 of SEQ ID NO: 1562055
cuaccuuaugauugacagu

SEQ ID NO: 1718594 - RNA, 19 nt, Artificial Sequence
  Description of Artificial Sequence: Synthetic oligonucleotide
  Antisense strand to SEQ ID NO: 1718593
acugucaaucauaagguag

SEQ ID NO: 1718595 - RNA, 19 nt, Artificial Sequence
  Description of Artificial Sequence: Synthetic oligonucleotide
  Sense strand starting at position 219 of SEQ ID NO: 1562055
aggugaauucaugggagua

SEQ ID NO: 1718596 - RNA, 19 nt, Artificial Sequence
  Description of Artificial Sequence: Synthetic oligonucleotide
  Antisense strand to SEQ ID NO: 1718595
uacucccaugaauucaccu

SEQ ID NO: 1718597 - RNA, 19 nt, Artificial Sequence
  Description of Artificial Sequence: Synthetic oligonucleotide
  Sense strand starting at position 241 of SEQ ID NO: 1562055
gugagauaucguuaggcaa

SEQ ID NO: 1718598 - RNA, 19 nt, Artificial Sequence
  Description of Artificial Sequence: Synthetic oligonucleotide
  Antisense strand to SEQ ID NO: 1718597
uugccuaacgauaucucac

SEQ ID NO: 1718599 - RNA, 19 nt, Artificial Sequence
  Description of Artificial Sequence: Synthetic oligonucleotide
  Sense strand starting at position 303 of SEQ ID NO: 1562055
gugaaacuacugcacaaua

SEQ ID NO: 1718600 - RNA, 19 nt, Artificial Sequence
  Description of Artificial Sequence: Synthetic oligonucleotide
  Antisense strand to SEQ ID NO: 1718599
uauugugcaguaguuucac

SEQ ID NO: 1718601 - RNA, 19 nt, Artificial Sequence
  Description of Artificial Sequence: Synthetic oligonucleotide
  Sense strand starting at position 522 of SEQ ID NO: 1562055
ucaauaucgucugccauuu

SEQ ID NO: 1718602 - RNA, 19 nt, Artificial Sequence
  Description of Artificial Sequence: Synthetic oligonucleotide
  Antisense strand to SEQ ID NO: 1718601
aaauggcagacgauauuga

SEQ ID NO: 1718603 - RNA, 19 nt, Artificial Sequence
  Description of Artificial Sequence: Synthetic oligonucleotide
  Sense strand starting at position 643 of SEQ ID NO: 1562055
ucucuaaacgccuaggaaa

SEQ ID NO: 1718604 - RNA, 19 nt, Artificial Sequence
  Description of Artificial Sequence: Synthetic oligonucleotide
  Antisense strand to SEQ ID NO: 1718603
uuuccuaggcguuuagaga

SEQ ID NO: 1718605 - RNA, 19 nt, Artificial Sequence
  Description of Artificial Sequence: Synthetic oligonucleotide
  Sense strand starting at position 668 of SEQ ID NO: 1562055
agacgauuccgugaguaaa

SEQ ID NO: 1718606 - RNA, 19 nt, Artificial Sequence
  Description of Artificial Sequence: Synthetic oligonucleotide
  Antisense strand to SEQ ID NO: 1718605
uuuacucacggaaucgucu

SEQ ID NO: 1718607 - RNA, 19 nt, Artificial Sequence
  Description of Artificial Sequence: Synthetic oligonucleotide
  Sense strand starting at position 671 of SEQ ID NO: 1562055
cgauuccgugaguaaacau

SEQ ID NO: 1718608 - RNA, 19 nt, Artificial Sequence
  Description of Artificial Sequence: Synthetic oligonucleotide
  Antisense strand to SEQ ID NO: 1718607
auguuuacucacggaaucg

SEQ ID NO: 1718609 - RNA, 19 nt, Artificial Sequence
  Description of Artificial Sequence: Synthetic oligonucleotide
  Sense strand starting at position 902 of SEQ ID NO: 1562055
ugaugagguuggucucgaa

SEQ ID NO: 1718610 - RNA, 19 nt, Artificial Sequence
  Description of Artificial Sequence: Synthetic oligonucleotide
  Antisense strand to SEQ ID NO: 1718609
uucgagaccaaccucauca

SEQ ID NO: 1718611 - RNA, 19 nt, Artificial Sequence
  Description of Artificial Sequence: Synthetic oligonucleotide
  Sense strand starting at position 1551 of SEQ ID NO: 1562055
ggagccaaaccucgagaaa

SEQ ID NO: 1718612 - RNA, 19 nt, Artificial Sequence
  Description of Artificial Sequence: Synthetic oligonucleotide
  Antisense strand to SEQ ID NO: 1718611
uuucucgagguuuggcucc

SEQ ID NO: 1718613 - RNA, 19 nt, Artificial Sequence
  Description of Artificial Sequence: Synthetic oligonucleotide
  Sense strand starting at position 1560 of SEQ ID NO: 1562055
ccucgagaaagcugagaua

SEQ ID NO: 1718614 - RNA, 19 nt, Artificial Sequence
  Description of Artificial Sequence: Synthetic oligonucleotide
  Antisense strand to SEQ ID NO: 1718613
uaucucagcuuucucgagg

SEQ ID NO: 1718615 - RNA, 19 nt, Artificial Sequence
  Description of Artificial Sequence: Synthetic oligonucleotide
  Sense strand starting at position 1864 of SEQ ID NO: 1562055
ucgacaagcucccugaaau

SEQ ID NO: 1718616 - RNA, 19 nt, Artificial Sequence
  Description of Artificial Sequence: Synthetic oligonucleotide
  Antisense strand to SEQ ID NO: 1718615
auuucagggagcuugucga

SEQ ID NO: 1718617 - RNA, 19 nt, Artificial Sequence
  Description of Artificial Sequence: Synthetic oligonucleotide
  Sense strand starting at position 1865 of SEQ ID NO: 1562055
cgacaagcucccugaaaug

SEQ ID NO: 1718618 - RNA, 19 nt, Artificial Sequence
  Description of Artificial Sequence: Synthetic oligonucleotide
  Antisense strand to SEQ ID NO: 1718617
cauuucagggagcuugucg

SEQ ID NO: 1718619 - RNA, 19 nt, Artificial Sequence
  Description of Artificial Sequence: Synthetic oligonucleotide
  Sense strand starting at position 1999 of SEQ ID NO: 1562055
auuugagcggccgaaguau

SEQ ID NO: 1718620 - RNA, 19 nt, Artificial Sequence
  Description of Artificial Sequence: Synthetic oligonucleotide
  Antisense strand to SEQ ID NO: 1718619
auacuucggccgcucaaau

SEQ ID NO: 1718621 - RNA, 19 nt, Artificial Sequence
  Description of Artificial Sequence: Synthetic oligonucleotide
  Sense strand starting at position 2010 of SEQ ID NO: 1562055
cgaaguaucgcgagaccua

SEQ ID NO: 1718622 - RNA, 19 nt, Artificial Sequence
  Description of Artificial Sequence: Synthetic oligonucleotide
  Antisense strand to SEQ ID NO: 1718621
uaggucucgcgauacuucg

SEQ ID NO: 1718623 - RNA, 19 nt, Artificial Sequence
  Description of Artificial Sequence: Synthetic oligonucleotide
  Sense strand starting at position 2011 of SEQ ID NO: 1562055
gaaguaucgcgagaccuaa

SEQ ID NO: 1718624 - RNA, 19 nt, Artificial Sequence
  Description of Artificial Sequence: Synthetic oligonucleotide
  Antisense strand to SEQ ID NO: 1718623
uuaggucucgcgauacuuc

SEQ ID NO: 1718625 - RNA, 19 nt, Artificial Sequence
  Description of Artificial Sequence: Synthetic oligonucleotide
  Sense strand starting at position 2050 of SEQ ID NO: 1562055
gcccaaucucgcgcaauga

SEQ ID NO: 1718626 - RNA, 19 nt, Artificial Sequence
  Description of Artificial Sequence: Synthetic oligonucleotide
  Antisense strand to SEQ ID NO: 1718625
ucauugcgcgagauugggc

SEQ ID NO: 1718627 - RNA, 19 nt, Artificial Sequence
  Description of Artificial Sequence: Synthetic oligonucleotide
  Sense strand starting at position 2063 of SEQ ID NO: 1562055
caaugauugcgccacagau

SEQ ID NO: 1718628 - RNA, 19 nt, Artificial Sequence
  Description of Artificial Sequence: Synthetic oligonucleotide
  Antisense strand to SEQ ID NO: 1718627
aucuguggcgcaaucauug

SEQ ID NO: 1718629 - RNA, 19 nt, Artificial Sequence
  Description of Artificial Sequence: Synthetic oligonucleotide
  Sense strand starting at position 2065 of SEQ ID NO: 1562055
augauugcgccacagauau

SEQ ID NO: 1718630 - RNA, 19 nt, Artificial Sequence
  Description of Artificial Sequence: Synthetic oligonucleotide
  Antisense strand to SEQ ID NO: 1718629
auaucuguggcgcaaucau

SEQ ID NO: 1718631 - RNA, 19 nt, Artificial Sequence
  Description of Artificial Sequence: Synthetic oligonucleotide
  Sense strand starting at position 2349 of SEQ ID NO: 1562055
aguccuuauggcgauagga

SEQ ID NO: 1718632 - RNA, 19 nt, Artificial Sequence
  Description of Artificial Sequence: Synthetic oligonucleotide
  Antisense strand to SEQ ID NO: 1718631
uccuaucgccauaaggacu

SEQ ID NO: 1718633 - RNA, 19 nt, Artificial Sequence
  Description of Artificial Sequence: Synthetic oligonucleotide
  Sense strand starting at position 2351 of SEQ ID NO: 1562055
uccuuauggcgauaggaua

SEQ ID NO: 1718634 - RNA, 19 nt, Artificial Sequence
  Description of Artificial Sequence: Synthetic oligonucleotide
  Antisense strand to SEQ ID NO: 1718633
uauccuaucgccauaagga

SEQ ID NO: 1718635 - RNA, 19 nt, Artificial Sequence
  Description of Artificial Sequence: Synthetic oligonucleotide
  Sense strand starting at position 2683 of SEQ ID NO: 1562055
cugaauauuacuggacgau

SEQ ID NO: 1718636 - RNA, 19 nt, Artificial Sequence
  Description of Artificial Sequence: Synthetic oligonucleotide
  Antisense strand to SEQ ID NO: 1718635
aucguccaguaauauucag

SEQ ID NO: 1718637 - RNA, 19 nt, Artificial Sequence
  Description of Artificial Sequence: Synthetic oligonucleotide
  Sense strand starting at position 2777 of SEQ ID NO: 1562055
ugaagucuucuagaugcca

SEQ ID NO: 1718638 - RNA, 19 nt, Artificial Sequence
  Description of Artificial Sequence: Synthetic oligonucleotide
  Antisense strand to SEQ ID NO: 1718637
uggcaucuagaagacuuca

SEQ ID NO: 1718639 - RNA, 19 nt, Artificial Sequence
  Description of Artificial Sequence: Synthetic oligonucleotide
  Sense strand starting at position 2786 of SEQ ID NO: 1562055
cuagaugccagguaauuag

SEQ ID NO: 1718640 - RNA, 19 nt, Artificial Sequence
  Description of Artificial Sequence: Synthetic oligonucleotide
  Antisense strand to SEQ ID NO: 1718639
cuaauuaccuggcaucuag

SEQ ID NO: 1718641 - RNA, 19 nt, Artificial Sequence
  Description of Artificial Sequence: Synthetic oligonucleotide
  Sense strand starting at position 2790 of SEQ ID NO: 1562055
augccagguaauuagagua

SEQ ID NO: 1718642 - RNA, 19 nt, Artificial Sequence
  Description of Artificial Sequence: Synthetic oligonucleotide
  Antisense strand to SEQ ID NO: 1718641
uacucuaauuaccuggcau

SEQ ID NO: 1718643 - RNA, 19 nt, Artificial Sequence
  Description of Artificial Sequence: Synthetic oligonucleotide
  Sense strand starting at position 2816 of SEQ ID NO: 1562055
gccauuuguucuuugguca

SEQ ID NO: 1718644 - RNA, 19 nt, Artificial Sequence
  Description of Artificial Sequence: Synthetic oligonucleotide
  Antisense strand to SEQ ID NO: 1718643
ugaccaaagaacaaauggc

SEQ ID NO: 1718645 - RNA, 19 nt, Artificial Sequence
  Description of Artificial Sequence: Synthetic oligonucleotide
  Sense strand starting at position 2819 of SEQ ID NO: 1562055
auuuguucuuuggucagua

SEQ ID NO: 1718646 - RNA, 19 nt, Artificial Sequence
  Description of Artificial Sequence: Synthetic oligonucleotide
  Antisense strand to SEQ ID NO: 1718645
uacugaccaaagaacaaau

SEQ ID NO: 1718647 - RNA, 19 nt, Artificial Sequence
  Description of Artificial Sequence: Synthetic oligonucleotide
  Sense strand starting at position 2953 of SEQ ID NO: 1562055
augagacgccuugauuagu

SEQ ID NO: 1718648 - RNA, 19 nt, Artificial Sequence
  Description of Artificial Sequence: Synthetic oligonucleotide
  Antisense strand to SEQ ID NO: 1718647
acuaaucaaggcgucucau

SEQ ID NO: 1718649 - RNA, 19 nt, Artificial Sequence
  Description of Artificial Sequence: Synthetic oligonucleotide
  Sense strand starting at position 2961 of SEQ ID NO: 1562055
ccuugauuaguguaacuag

SEQ ID NO: 1718650 - RNA, 19 nt, Artificial Sequence
  Description of Artificial Sequence: Synthetic oligonucleotide
  Antisense strand to SEQ ID NO: 1718649
cuaguuacacuaaucaagg

SEQ ID NO: 1718651 - RNA, 19 nt, Artificial Sequence
  Description of Artificial Sequence: Synthetic oligonucleotide
  Sense strand starting at position 3080 of SEQ ID NO: 1562055
gcuacuugagacugaggaa

SEQ ID NO: 1718652 - RNA, 19 nt, Artificial Sequence
  Description of Artificial Sequence: Synthetic oligonucleotide
  Antisense strand to SEQ ID NO: 1718651
uuccucagucucaaguagc

SEQ ID NO: 1718653 - RNA, 19 nt, Artificial Sequence
  Description of Artificial Sequence: Synthetic oligonucleotide
  Sense strand starting at position 3103 of SEQ ID NO: 1562055
gguaaugcucaguacugaa

SEQ ID NO: 1718654 - RNA, 19 nt, Artificial Sequence
  Description of Artificial Sequence: Synthetic oligonucleotide
  Antisense strand to SEQ ID NO: 1718653
uucaguacugagcauuacc

SEQ ID NO: 1718655 - RNA, 19 nt, Artificial Sequence
  Description of Artificial Sequence: Synthetic oligonucleotide
  Sense strand starting at position 3153 of SEQ ID NO: 1562055
aguggacccucaguaaauu

SEQ ID NO: 1718656 - RNA, 19 nt, Artificial Sequence
  Description of Artificial Sequence: Synthetic oligonucleotide
  Antisense strand to SEQ ID NO: 1718655
aauuuacugaggguccacu

SEQ ID NO: 1718657 - RNA, 19 nt, Artificial Sequence
  Description of Artificial Sequence: Synthetic oligonucleotide
  Sense strand starting at position 3154 of SEQ ID NO: 1562055
guggacccucaguaaauua

SEQ ID NO: 1718658 - RNA, 19 nt, Artificial Sequence
  Description of Artificial Sequence: Synthetic oligonucleotide
  Antisense strand to SEQ ID NO: 1718657
uaauuuacugaggguccac

SEQ ID NO: 1718659 - RNA, 19 nt, Artificial Sequence
  Description of Artificial Sequence: Synthetic oligonucleotide
  Sense strand starting at position 3348 of SEQ ID NO: 1562055
uaggauuuaucuuagagga

SEQ ID NO: 1718660 - RNA, 19 nt, Artificial Sequence
  Description of Artificial Sequence: Synthetic oligonucleotide
  Antisense strand to SEQ ID NO: 1718659
uccucuaagauaaauccua

SEQ ID NO: 1718661 - RNA, 19 nt, Artificial Sequence
  Description of Artificial Sequence: Synthetic oligonucleotide
  Sense strand starting at position 3350 of SEQ ID NO: 1562055
ggauuuaucuuagaggauu

SEQ ID NO: 1718662 - RNA, 19 nt, Artificial Sequence
  Description of Artificial Sequence: Synthetic oligonucleotide
  Antisense strand to SEQ ID NO: 1718661
aauccucuaagauaaaucc

SEQ ID NO: 1718663 - RNA, 19 nt, Artificial Sequence
  Description of Artificial Sequence: Synthetic oligonucleotide
  Sense strand starting at position 3850 of SEQ ID NO: 1562055
cgguaauuccaguauuaug

SEQ ID NO: 1718664 - RNA, 19 nt, Artificial Sequence
  Description of Artificial Sequence: Synthetic oligonucleotide
  Antisense strand to SEQ ID NO: 1718663
cauaauacuggaauuaccg

SEQ ID NO: 1718665 - RNA, 19 nt, Artificial Sequence
  Description of Artificial Sequence: Synthetic oligonucleotide
  Sense strand starting at position 3859 of SEQ ID NO: 1562055
caguauuaugacuagugca

SEQ ID NO: 1718666 - RNA, 19 nt, Artificial Sequence
  Description of Artificial Sequence: Synthetic oligonucleotide
  Antisense strand to SEQ ID NO: 1718665
ugcacuagucauaauacug

SEQ ID NO: 1718667 - RNA, 19 nt, Artificial Sequence
  Description of Artificial Sequence: Synthetic oligonucleotide
  Sense strand starting at position 3932 of SEQ ID NO: 1562055
augacagaauuugaccuua

SEQ ID NO: 1718668 - RNA, 19 nt, Artificial Sequence
  Description of Artificial Sequence: Synthetic oligonucleotide
  Antisense strand to SEQ ID NO: 1718667
uaaggucaaauucugucau

SEQ ID NO: 1718669 - RNA, 19 nt, Artificial Sequence
  Description of Artificial Sequence: Synthetic oligonucleotide
  Sense strand starting at position 3955 of SEQ ID NO: 1562055
cuagacuucuuguuuggga

SEQ ID NO: 1718670 - RNA, 19 nt, Artificial Sequence
  Description of Artificial Sequence: Synthetic oligonucleotide
  Antisense strand to SEQ ID NO: 1718669
ucccaaacaagaagucuag

SEQ ID NO: 1718671 - RNA, 19 nt, Artificial Sequence
  Description of Artificial Sequence: Synthetic oligonucleotide
  Sense strand starting at position 3956 of SEQ ID NO: 1562055
uagacuucuuguuugggaa

SEQ ID NO: 1718672 - RNA, 19 nt, Artificial Sequence
  Description of Artificial Sequence: Synthetic oligonucleotide
  Antisense strand to SEQ ID NO: 1718671
uucccaaacaagaagucua

SEQ ID NO: 1718673 - RNA, 19 nt, Artificial Sequence
  Description of Artificial Sequence: Synthetic oligonucleotide
  Sense strand starting at position 24 of SEQ ID NO: 1562056
guggguaggcccgagcaau

SEQ ID NO: 1718674 - RNA, 19 nt, Artificial Sequence
  Description of Artificial Sequence: Synthetic oligonucleotide
  Antisense strand to SEQ ID NO: 1718673
auugcucgggccuacccac

SEQ ID NO: 1718675 - RNA, 19 nt, Artificial Sequence
  Description of Artificial Sequence: Synthetic oligonucleotide
  Sense strand starting at position 25 of SEQ ID NO: 1562056
uggguaggcccgagcaauu

SEQ ID NO: 1718676 - RNA, 19 nt, Artificial Sequence
  Description of Artificial Sequence: Synthetic oligonucleotide
  Antisense strand to SEQ ID NO: 1718675
aauugcucgggccuaccca

SEQ ID NO: 1718677 - RNA, 19 nt, Artificial Sequence
  Description of Artificial Sequence: Synthetic oligonucleotide
  Sense strand starting at position 36 of SEQ ID NO: 1562056
gagcaauugcagggagcaa

SEQ ID NO: 1718678 - RNA, 19 nt, Artificial Sequence
  Description of Artificial Sequence: Synthetic oligonucleotide
  Antisense strand to SEQ ID NO: 1718677
uugcucccugcaauugcuc

SEQ ID NO: 1718679 - RNA, 19 nt, Artificial Sequence
  Description of Artificial Sequence: Synthetic oligonucleotide
  Sense strand starting at position 501 of SEQ ID NO: 1562056
ccgccagcccuggguuaaa

SEQ ID NO: 1718680 - RNA, 19 nt, Artificial Sequence
  Description of Artificial Sequence: Synthetic oligonucleotide
  Antisense strand to SEQ ID NO: 1718679
uuuaacccagggcuggcgg

SEQ ID NO: 1718681 - RNA, 19 nt, Artificial Sequence
  Description of Artificial Sequence: Synthetic oligonucleotide
  Sense strand starting at position 726 of SEQ ID NO: 1562056
aggucaggcgaguguauuu

SEQ ID NO: 1718682 - RNA, 19 nt, Artificial Sequence
  Description of Artificial Sequence: Synthetic oligonucleotide
  Antisense strand to SEQ ID NO: 1718681
aaauacacucgccugaccu

SEQ ID NO: 1718683 - RNA, 19 nt, Artificial Sequence
  Description of Artificial Sequence: Synthetic oligonucleotide
  Sense strand starting at position 1006 of SEQ ID NO: 1562056
auuaacuccucagaggaau

SEQ ID NO: 1718684 - RNA, 19 nt, Artificial Sequence
  Description of Artificial Sequence: Synthetic oligonucleotide
  Antisense strand to SEQ ID NO: 1718683
auuccucugaggaguuaau

SEQ ID NO: 1718685 - RNA, 19 nt, Artificial Sequence
  Description of Artificial Sequence: Synthetic oligonucleotide
  Sense strand starting at position 1017 of SEQ ID NO: 1562056
agaggaaucccagguucua

SEQ ID NO: 1718686 - RNA, 19 nt, Artificial Sequence
  Description of Artificial Sequence: Synthetic oligonucleotide
  Antisense strand to SEQ ID NO: 1718685
uagaaccugggauuccucu

SEQ ID NO: 1718687 - RNA, 19 nt, Artificial Sequence
  Description of Artificial Sequence: Synthetic oligonucleotide
  Sense strand starting at position 1092 of SEQ ID NO: 1562056
ggaccuaguuccuuucuuu

SEQ ID NO: 1718688 - RNA, 19 nt, Artificial Sequence
  Description of Artificial Sequence: Synthetic oligonucleotide
  Antisense strand to SEQ ID NO: 1718687
aaagaaaggaacuaggucc

SEQ ID NO: 1718689 - RNA, 19 nt, Artificial Sequence
  Description of Artificial Sequence: Synthetic oligonucleotide
  Sense strand starting at position 1095 of SEQ ID NO: 1562056
ccuaguuccuuucuuugua

SEQ ID NO: 1718690 - RNA, 19 nt, Artificial Sequence
  Description of Artificial Sequence: Synthetic oligonucleotide
  Antisense strand to SEQ ID NO: 1718689
uacaaagaaaggaacuagg

SEQ ID NO: 1718691 - RNA, 19 nt, Artificial Sequence
  Description of Artificial Sequence: Synthetic oligonucleotide
  Sense strand starting at position 1098 of SEQ ID NO: 1562056
aguuccuuucuuuguagaa

SEQ ID NO: 1718692 - RNA, 19 nt, Artificial Sequence
  Description of Artificial Sequence: Synthetic oligonucleotide
  Antisense strand to SEQ ID NO: 1718691
uucuacaaagaaaggaacu

SEQ ID NO: 1718693 - RNA, 19 nt, Artificial Sequence
  Description of Artificial Sequence: Synthetic oligonucleotide
  Sense strand starting at position 1099 of SEQ ID NO: 1562056
guuccuuucuuuguagaau

SEQ ID NO: 1718694 - RNA, 19 nt, Artificial Sequence
  Description of Artificial Sequence: Synthetic oligonucleotide
  Antisense strand to SEQ ID NO: 1718693
auucuacaaagaaaggaac

SEQ ID NO: 1718695 - RNA, 19 nt, Artificial Sequence
  Description of Artificial Sequence: Synthetic oligonucleotide
  Sense strand starting at position 1125 of SEQ ID NO: 1562056
uuggaaaggugaugaacuu

SEQ ID NO: 1718696 - RNA, 19 nt, Artificial Sequence
  Description of Artificial Sequence: Synthetic oligonucleotide
  Antisense strand to SEQ ID NO: 1718695
aaguucaucaccuuuccaa

SEQ ID NO: 1718697 - RNA, 19 nt, Artificial Sequence
  Description of Artificial Sequence: Synthetic oligonucleotide
  Sense strand starting at position 1132 of SEQ ID NO: 1562056
ggugaugaacuuugaggca

SEQ ID NO: 1718698 - RNA, 19 nt, Artificial Sequence
  Description of Artificial Sequence: Synthetic oligonucleotide
  Antisense strand to SEQ ID NO: 1718697
ugccucaaaguucaucacc

SEQ ID NO: 1718699 - RNA, 19 nt, Artificial Sequence
  Description of Artificial Sequence: Synthetic oligonucleotide
  Sense strand starting at position 1135 of SEQ ID NO: 1562056
gaugaacuuugaggcauuu

SEQ ID NO: 1718700 - RNA, 19 nt, Artificial Sequence
  Description of Artificial Sequence: Synthetic oligonucleotide
  Antisense strand to SEQ ID NO: 1718699
aaaugccucaaaguucauc

SEQ ID NO: 1718701 - RNA, 19 nt, Artificial Sequence
  Description of Artificial Sequence: Synthetic oligonucleotide
  Sense strand starting at position 1200 of SEQ ID NO: 1562056
gugagaaguuggcucagac

SEQ ID NO: 1718702 - RNA, 19 nt, Artificial Sequence
  Description of Artificial Sequence: Synthetic oligonucleotide
  Antisense strand to SEQ ID NO: 1718701
gucugagccaacuucucac

SEQ ID NO: 1718703 - RNA, 19 nt, Artificial Sequence
  Description of Artificial Sequence: Synthetic oligonucleotide
  Sense strand starting at position 1207 of SEQ ID NO: 1562056
guuggcucagaccaagaau

SEQ ID NO: 1718704 - RNA, 19 nt, Artificial Sequence
  Description of Artificial Sequence: Synthetic oligonucleotide
  Antisense strand to SEQ ID NO: 1718703
auucuuggucugagccaac

SEQ ID NO: 1718705 - RNA, 19 nt, Artificial Sequence
  Description of Artificial Sequence: Synthetic oligonucleotide
  Sense strand starting at position 1263 of SEQ ID NO: 1562056
gaggcaucuccggguagga

SEQ ID NO: 1718706 - RNA, 19 nt, Artificial Sequence
  Description of Artificial Sequence: Synthetic oligonucleotide
  Antisense strand to SEQ ID NO: 1718705
uccuacccggagaugccuc

SEQ ID NO: 1718707 - RNA, 19 nt, Artificial Sequence
  Description of Artificial Sequence: Synthetic oligonucleotide
  Sense strand starting at position 1265 of SEQ ID NO: 1562056
ggcaucuccggguaggaaa

SEQ ID NO: 1718708 - RNA, 19 nt, Artificial Sequence
  Description of Artificial Sequence: Synthetic oligonucleotide
  Antisense strand to SEQ ID NO: 1718707
uuuccuacccggagaugcc

SEQ ID NO: 1718709 - RNA, 19 nt, Artificial Sequence
  Description of Artificial Sequence: Synthetic oligonucleotide
  Sense strand starting at position 1322 of SEQ ID NO: 1562056
caugcuguccagggauguu

SEQ ID NO: 1718710 - RNA, 19 nt, Artificial Sequence
  Description of Artificial Sequence: Synthetic oligonucleotide
  Antisense strand to SEQ ID NO: 1718709
aacaucccuggacagcaug

SEQ ID NO: 1718711 - RNA, 19 nt, Artificial Sequence
  Description of Artificial Sequence: Synthetic oligonucleotide
  Sense strand starting at position 1401 of SEQ ID NO: 1562056
gccacaucuugcuugguca

SEQ ID NO: 1718712 - RNA, 19 nt, Artificial Sequence
  Description of Artificial Sequence: Synthetic oligonucleotide
  Antisense strand to SEQ ID NO: 1718711
ugaccaagcaagauguggc

SEQ ID NO: 1718713 - RNA, 19 nt, Artificial Sequence
  Description of Artificial Sequence: Synthetic oligonucleotide
  Sense strand starting at position 1483 of SEQ ID NO: 1562056
ggagaagaauccgggauga

SEQ ID NO: 1718714 - RNA, 19 nt, Artificial Sequence
  Description of Artificial Sequence: Synthetic oligonucleotide
  Antisense strand to SEQ ID NO: 1718713
ucaucccggauucuucucc

SEQ ID NO: 1718715 - RNA, 19 nt, Artificial Sequence
  Description of Artificial Sequence: Synthetic oligonucleotide
  Sense strand starting at position 1529 of SEQ ID NO: 1562056
acuggccucgcucagaaua

SEQ ID NO: 1718716 - RNA, 19 nt, Artificial Sequence
  Description of Artificial Sequence: Synthetic oligonucleotide
  Antisense strand to SEQ ID NO: 1718715
uauucugagcgaggccagu

SEQ ID NO: 1718717 - RNA, 19 nt, Artificial Sequence
  Description of Artificial Sequence: Synthetic oligonucleotide
  Sense strand starting at position 1690 of SEQ ID NO: 1562056
aaaugagguuuagugaauu

SEQ ID NO: 1718718 - RNA, 19 nt, Artificial Sequence
  Description of Artificial Sequence: Synthetic oligonucleotide
  Antisense strand to SEQ ID NO: 1718717
aauucacuaaaccucauuu

SEQ ID NO: 1718719 - RNA, 19 nt, Artificial Sequence
  Description of Artificial Sequence: Synthetic oligonucleotide
  Sense strand starting at position 1700 of SEQ ID NO: 1562056
uagugaauucuaggcgcca

SEQ ID NO: 1718720 - RNA, 19 nt, Artificial Sequence
  Description of Artificial Sequence: Synthetic oligonucleotide
  Antisense strand to SEQ ID NO: 1718719
uggcgccuagaauucacua

SEQ ID NO: 1718721 - RNA, 19 nt, Artificial Sequence
  Description of Artificial Sequence: Synthetic oligonucleotide
  Sense strand starting at position 2014 of SEQ ID NO: 1562056
gcucuugcgcggguuauau

SEQ ID NO: 1718722 - RNA, 19 nt, Artificial Sequence
  Description of Artificial Sequence: Synthetic oligonucleotide
  Antisense strand to SEQ ID NO: 1718721
auauaacccgcgcaagagc

SEQ ID NO: 1718723 - RNA, 19 nt, Artificial Sequence
  Description of Artificial Sequence: Synthetic oligonucleotide
  Sense strand starting at position 2524 of SEQ ID NO: 1562056
gguaccagcgcuuaacuuu

SEQ ID NO: 1718724 - RNA, 19 nt, Artificial Sequence
  Description of Artificial Sequence: Synthetic oligonucleotide
  Antisense strand to SEQ ID NO: 1718723
aaaguuaagcgcugguacc

SEQ ID NO: 1718725 - RNA, 19 nt, Artificial Sequence
  Description of Artificial Sequence: Synthetic oligonucleotide
  Sense strand starting at position 2694 of SEQ ID NO: 1562056
gcauauuuguaucuaugua

SEQ ID NO: 1718726 - RNA, 19 nt, Artificial Sequence
  Description of Artificial Sequence: Synthetic oligonucleotide
  Antisense strand to SEQ ID NO: 1718725
uacauagauacaaauaugc

SEQ ID NO: 1718727 - RNA, 19 nt, Artificial Sequence
  Description of Artificial Sequence: Synthetic oligonucleotide
  Sense strand starting at position 3056 of SEQ ID NO: 1562056
cagcaaucccacugugaug

SEQ ID NO: 1718728 - RNA, 19 nt, Artificial Sequence
  Description of Artificial Sequence: Synthetic oligonucleotide
  Antisense strand to SEQ ID NO: 1718727
caucacagugggauugcug

SEQ ID NO: 1718729 - RNA, 19 nt, Artificial Sequence
  Description of Artificial Sequence: Synthetic oligonucleotide
  Sense strand starting at position 3177 of SEQ ID NO: 1562056
auaagagcucuguaaauac

SEQ ID NO: 1718730 - RNA, 19 nt, Artificial Sequence
  Description of Artificial Sequence: Synthetic oligonucleotide
  Antisense strand to SEQ ID NO: 1718729
guauuuacagagcucuuau

SEQ ID NO: 1718731 - RNA, 19 nt, Artificial Sequence
  Description of Artificial Sequence: Synthetic oligonucleotide
  Sense strand starting at position 3440 of SEQ ID NO: 1562056
acauaugggacuggguuua

SEQ ID NO: 1718732 - RNA, 19 nt, Artificial Sequence
  Description of Artificial Sequence: Synthetic oligonucleotide
  Antisense strand to SEQ ID NO: 1718731
uaaacccagucccauaugu

SEQ ID NO: 1718733 - RNA, 19 nt, Artificial Sequence
  Description of Artificial Sequence: Synthetic oligonucleotide
  Sense strand starting at position 3611 of SEQ ID NO: 1562056
uguuuaguauuucucuuga

SEQ ID NO: 1718734 - RNA, 19 nt, Artificial Sequence
  Description of Artificial Sequence: Synthetic oligonucleotide
  Antisense strand to SEQ ID NO: 1718733
ucaagagaaauacuaaaca

SEQ ID NO: 1718735 - RNA, 19 nt, Artificial Sequence
  Description of Artificial Sequence: Synthetic oligonucleotide
  Sense strand starting at position 3637 of SEQ ID NO: 1562056
gggaucugcugacauccaa

SEQ ID NO: 1718736 - RNA, 19 nt, Artificial Sequence
  Description of Artificial Sequence: Synthetic oligonucleotide
  Antisense strand to SEQ ID NO: 1718735
uuggaugucagcagauccc

SEQ ID NO: 1718737 - RNA, 19 nt, Artificial Sequence
  Description of Artificial Sequence: Synthetic oligonucleotide
  Sense strand starting at position 3692 of SEQ ID NO: 1562056
ugcccaauuuaggagugau

SEQ ID NO: 1718738 - RNA, 19 nt, Artificial Sequence
  Description of Artificial Sequence: Synthetic oligonucleotide
  Antisense strand to SEQ ID NO: 1718737
aucacuccuaaauugggca

SEQ ID NO: 1718739 - RNA, 19 nt, Artificial Sequence
  Description of Artificial Sequence: Synthetic oligonucleotide
  Sense strand starting at position 3776 of SEQ ID NO: 1562056
gcaggcuuugaguuugcga

SEQ ID NO: 1718740 - RNA, 19 nt, Artificial Sequence
  Description of Artificial Sequence: Synthetic oligonucleotide
  Antisense strand to SEQ ID NO: 1718739
ucgcaaacucaaagccugc

SEQ ID NO: 1718741 - RNA, 19 nt, Artificial Sequence
  Description of Artificial Sequence: Synthetic oligonucleotide
  Sense strand starting at position 3820 of SEQ ID NO: 1562056
guaauaccgccucagaaua

SEQ ID NO: 1718742 - RNA, 19 nt, Artificial Sequence
  Description of Artificial Sequence: Synthetic oligonucleotide
  Antisense strand to SEQ ID NO: 1718741
uauucugaggcgguauuac

SEQ ID NO: 1718743 - RNA, 19 nt, Artificial Sequence
  Description of Artificial Sequence: Synthetic oligonucleotide
  Sense strand starting at position 3839 of SEQ ID NO: 1562056
gcccucagaucuguaagau

SEQ ID NO: 1718744 - RNA, 19 nt, Artificial Sequence
  Description of Artificial Sequence: Synthetic oligonucleotide
  Antisense strand to SEQ ID NO: 1718743
aucuuacagaucugagggc

SEQ ID NO: 1718745 - RNA, 19 nt, Artificial Sequence
  Description of Artificial Sequence: Synthetic oligonucleotide
  Sense strand starting at position 3848 of SEQ ID NO: 1562056
ucuguaagaugagggaauu

SEQ ID NO: 1718746 - RNA, 19 nt, Artificial Sequence
  Description of Artificial Sequence: Synthetic oligonucleotide
  Antisense strand to SEQ ID NO: 1718745
aauucccucaucuuacaga

SEQ ID NO: 1718747 - RNA, 19 nt, Artificial Sequence
  Description of Artificial Sequence: Synthetic oligonucleotide
  Sense strand starting at position 3858 of SEQ ID NO: 1562056
gagggaauuugugaaaucu

SEQ ID NO: 1718748 - RNA, 19 nt, Artificial Sequence
  Description of Artificial Sequence: Synthetic oligonucleotide
  Antisense strand to SEQ ID NO: 1718747
agauuucacaaauucccuc

SEQ ID NO: 1718749 - RNA, 19 nt, Artificial Sequence
  Description of Artificial Sequence: Synthetic oligonucleotide
  Sense strand starting at position 3907 of SEQ ID NO: 1562056
gagugcaucugucuaaucu

SEQ ID NO: 1718750 - RNA, 19 nt, Artificial Sequence
  Description of Artificial Sequence: Synthetic oligonucleotide
  Antisense strand to SEQ ID NO: 1718749
agauuagacagaugcacuc

SEQ ID NO: 1718751 - RNA, 19 nt, Artificial Sequence
  Description of Artificial Sequence: Synthetic oligonucleotide
  Sense strand starting at position 3941 of SEQ ID NO: 1562056
ggcgcuguuaugucggcau

SEQ ID NO: 1718752 - RNA, 19 nt, Artificial Sequence
  Description of Artificial Sequence: Synthetic oligonucleotide
  Antisense strand to SEQ ID NO: 1718751
augccgacauaacagcgcc

SEQ ID NO: 1718753 - RNA, 19 nt, Artificial Sequence
  Description of Artificial Sequence: Synthetic oligonucleotide
  Sense strand starting at position 8 of SEQ ID NO: 1562057
acagcaguucuugggaaua

SEQ ID NO: 1718754 - RNA, 19 nt, Artificial Sequence
  Description of Artificial Sequence: Synthetic oligonucleotide
  Antisense strand to SEQ ID NO: 1718753
uauucccaagaacugcugu

SEQ ID NO: 1718755 - RNA, 19 nt, Artificial Sequence
  Description of Artificial Sequence: Synthetic oligonucleotide
  Sense strand starting at position 139 of SEQ ID NO: 1562057
cuaagagucagaggaguca

SEQ ID NO: 1718756 - RNA, 19 nt, Artificial Sequence
  Description of Artificial Sequence: Synthetic oligonucleotide
  Antisense strand to SEQ ID NO: 1718755
ugacuccucugacucuuag

SEQ ID NO: 1718757 - RNA, 19 nt, Artificial Sequence
  Description of Artificial Sequence: Synthetic oligonucleotide
  Sense strand starting at position 163 of SEQ ID NO: 1562057
gggaguuucugaccuuggu

SEQ ID NO: 1718758 - RNA, 19 nt, Artificial Sequence
  Description of Artificial Sequence: Synthetic oligonucleotide
  Antisense strand to SEQ ID NO: 1718757
accaaggucagaaacuccc

SEQ ID NO: 1718759 - RNA, 19 nt, Artificial Sequence
  Description of Artificial Sequence: Synthetic oligonucleotide
  Sense strand starting at position 167 of SEQ ID NO: 1562057
guuucugaccuugguggaa

SEQ ID NO: 1718760 - RNA, 19 nt, Artificial Sequence
  Description of Artificial Sequence: Synthetic oligonucleotide
  Antisense strand to SEQ ID NO: 1718759
uuccaccaaggucagaaac

SEQ ID NO: 1718761 - RNA, 19 nt, Artificial Sequence
  Description of Artificial Sequence: Synthetic oligonucleotide
  Sense strand starting at position 221 of SEQ ID NO: 1562057
acccgcaugacauggaaau

SEQ ID NO: 1718762 - RNA, 19 nt, Artificial Sequence
  Description of Artificial Sequence: Synthetic oligonucleotide
  Antisense strand to SEQ ID NO: 1718761
auuuccaugucaugcgggu

SEQ ID NO: 1718763 - RNA, 19 nt, Artificial Sequence
  Description of Artificial Sequence: Synthetic oligonucleotide
  Sense strand starting at position 363 of SEQ ID NO: 1562057
caugucauagucuaaguga

SEQ ID NO: 1718764 - RNA, 19 nt, Artificial Sequence
  Description of Artificial Sequence: Synthetic oligonucleotide
  Antisense strand to SEQ ID NO: 1718763
ucacuuagacuaugacaug

SEQ ID NO: 1718765 - RNA, 19 nt, Artificial Sequence
  Description of Artificial Sequence: Synthetic oligonucleotide
  Sense strand starting at position 366 of SEQ ID NO: 1562057
gucauagucuaagugaaug

SEQ ID NO: 1718766 - RNA, 19 nt, Artificial Sequence
  Description of Artificial Sequence: Synthetic oligonucleotide
  Antisense strand to SEQ ID NO: 1718765
cauucacuuagacuaugac

SEQ ID NO: 1718767 - RNA, 19 nt, Artificial Sequence
  Description of Artificial Sequence: Synthetic oligonucleotide
  Sense strand starting at position 394 of SEQ ID NO: 1562057
agaguugaacagugcauga

SEQ ID NO: 1718768 - RNA, 19 nt, Artificial Sequence
  Description of Artificial Sequence: Synthetic oligonucleotide
  Antisense strand to SEQ ID NO: 1718767
ucaugcacuguucaacucu

SEQ ID NO: 1718769 - RNA, 19 nt, Artificial Sequence
  Description of Artificial Sequence: Synthetic oligonucleotide
  Sense strand starting at position 407 of SEQ ID NO: 1562057
gcaugacuuguacaacugu

SEQ ID NO: 1718770 - RNA, 19 nt, Artificial Sequence
  Description of Artificial Sequence: Synthetic oligonucleotide
  Antisense strand to SEQ ID NO: 1718769
acaguuguacaagucaugc

SEQ ID NO: 1718771 - RNA, 19 nt, Artificial Sequence
  Description of Artificial Sequence: Synthetic oligonucleotide
  Sense strand starting at position 1134 of SEQ ID NO: 1562057
uugucuuaaggaugaucua

SEQ ID NO: 1718772 - RNA, 19 nt, Artificial Sequence
  Description of Artificial Sequence: Synthetic oligonucleotide
  Antisense strand to SEQ ID NO: 1718771
uagaucauccuuaagacaa

SEQ ID NO: 1718773 - RNA, 19 nt, Artificial Sequence
  Description of Artificial Sequence: Synthetic oligonucleotide
  Sense strand starting at position 1696 of SEQ ID NO: 1562057
gagcuuucucagccggcau

SEQ ID NO: 1718774 - RNA, 19 nt, Artificial Sequence
  Description of Artificial Sequence: Synthetic oligonucleotide
  Antisense strand to SEQ ID NO: 1718773
augccggcugagaaagcuc

SEQ ID NO: 1718775 - RNA, 19 nt, Artificial Sequence
  Description of Artificial Sequence: Synthetic oligonucleotide
  Sense strand starting at position 2412 of SEQ ID NO: 1562057
ccaagugauccugaugcag

SEQ ID NO: 1718776 - RNA, 19 nt, Artificial Sequence
  Description of Artificial Sequence: Synthetic oligonucleotide
  Antisense strand to SEQ ID NO: 1718775
cugcaucaggaucacuugg

SEQ ID NO: 1718777 - RNA, 19 nt, Artificial Sequence
  Description of Artificial Sequence: Synthetic oligonucleotide
  Sense strand starting at position 2454 of SEQ ID NO: 1562057
gaaacucugcucuggauga

SEQ ID NO: 1718778 - RNA, 19 nt, Artificial Sequence
  Description of Artificial Sequence: Synthetic oligonucleotide
  Antisense strand to SEQ ID NO: 1718777
ucauccagagcagaguuuc

SEQ ID NO: 1718779 - RNA, 19 nt, Artificial Sequence
  Description of Artificial Sequence: Synthetic oligonucleotide
  Sense strand starting at position 2458 of SEQ ID NO: 1562057
cucugcucuggaugaagaa

SEQ ID NO: 1718780 - RNA, 19 nt, Artificial Sequence
  Description of Artificial Sequence: Synthetic oligonucleotide
  Antisense strand to SEQ ID NO: 1718779
uucuucauccagagcagag

SEQ ID NO: 1718781 - RNA, 19 nt, Artificial Sequence
  Description of Artificial Sequence: Synthetic oligonucleotide
  Sense strand starting at position 2512 of SEQ ID NO: 1562057
ucaggaagucugcacugaa

SEQ ID NO: 1718782 - RNA, 19 nt, Artificial Sequence
  Description of Artificial Sequence: Synthetic oligonucleotide
  Antisense strand to SEQ ID NO: 1718781
uucagugcagacuuccuga

SEQ ID NO: 1718783 - RNA, 19 nt, Artificial Sequence
  Description of Artificial Sequence: Synthetic oligonucleotide
  Sense strand starting at position 2515 of SEQ ID NO: 1562057
ggaagucugcacugaagaa

SEQ ID NO: 1718784 - RNA, 19 nt, Artificial Sequence
  Description of Artificial Sequence: Synthetic oligonucleotide
  Antisense strand to SEQ ID NO: 1718783
uucuucagugcagacuucc

SEQ ID NO: 1718785 - RNA, 19 nt, Artificial Sequence
  Description of Artificial Sequence: Synthetic oligonucleotide
  Sense strand starting at position 2519 of SEQ ID NO: 1562057
gucugcacugaagaauuau

SEQ ID NO: 1718786 - RNA, 19 nt, Artificial Sequence
  Description of Artificial Sequence: Synthetic oligonucleotide
  Antisense strand to SEQ ID NO: 1718785
auaauucuucagugcagac

SEQ ID NO: 1718787 - RNA, 19 nt, Artificial Sequence
  Description of Artificial Sequence: Synthetic oligonucleotide
  Sense strand starting at position 2627 of SEQ ID NO: 1562057
ucuauuacugauggcugaa

SEQ ID NO: 1718788 - RNA, 19 nt, Artificial Sequence
  Description of Artificial Sequence: Synthetic oligonucleotide
  Antisense strand to SEQ ID NO: 1718787
uucagccaucaguaauaga

SEQ ID NO: 1718789 - RNA, 19 nt, Artificial Sequence
  Description of Artificial Sequence: Synthetic oligonucleotide
  Sense strand starting at position 2844 of SEQ ID NO: 1562057
agguguucagcuuggaaua

SEQ ID NO: 1718790 - RNA, 19 nt, Artificial Sequence
  Description of Artificial Sequence: Synthetic oligonucleotide
  Antisense strand to SEQ ID NO: 1718789
uauuccaagcugaacaccu

SEQ ID NO: 1718791 - RNA, 19 nt, Artificial Sequence
  Description of Artificial Sequence: Synthetic oligonucleotide
  Sense strand starting at position 2845 of SEQ ID NO: 1562057
gguguucagcuuggaauaa

SEQ ID NO: 1718792 - RNA, 19 nt, Artificial Sequence
  Description of Artificial Sequence: Synthetic oligonucleotide
  Antisense strand to SEQ ID NO: 1718791
uuauuccaagcugaacacc

SEQ ID NO: 1718793 - RNA, 19 nt, Artificial Sequence
  Description of Artificial Sequence: Synthetic oligonucleotide
  Sense strand starting at position 2901 of SEQ ID NO: 1562057
aggucuuggagcugauaca

SEQ ID NO: 1718794 - RNA, 19 nt, Artificial Sequence
  Description of Artificial Sequence: Synthetic oligonucleotide
  Antisense strand to SEQ ID NO: 1718793
uguaucagcuccaagaccu

SEQ ID NO: 1718795 - RNA, 19 nt, Artificial Sequence
  Description of Artificial Sequence: Synthetic oligonucleotide
  Sense strand starting at position 3010 of SEQ ID NO: 1562057
cuucauugucugggaguga

SEQ ID NO: 1718796 - RNA, 19 nt, Artificial Sequence
  Description of Artificial Sequence: Synthetic oligonucleotide
  Antisense strand to SEQ ID NO: 1718795
ucacucccagacaaugaag

SEQ ID NO: 1718797 - RNA, 19 nt, Artificial Sequence
  Description of Artificial Sequence: Synthetic oligonucleotide
  Sense strand starting at position 3159 of SEQ ID NO: 1562057
uuugguugucuauaauaca

SEQ ID NO: 1718798 - RNA, 19 nt, Artificial Sequence
  Description of Artificial Sequence: Synthetic oligonucleotide
  Antisense strand to SEQ ID NO: 1718797
uguauuauagacaaccaaa

SEQ ID NO: 1718799 - RNA, 19 nt, Artificial Sequence
  Description of Artificial Sequence: Synthetic oligonucleotide
  Sense strand starting at position 3340 of SEQ ID NO: 1562057
cuuagauuccuguguacca

SEQ ID NO: 1718800 - RNA, 19 nt, Artificial Sequence
  Description of Artificial Sequence: Synthetic oligonucleotide
  Antisense strand to SEQ ID NO: 1718799
ugguacacaggaaucuaag

SEQ ID NO: 1718801 - RNA, 19 nt, Artificial Sequence
  Description of Artificial Sequence: Synthetic oligonucleotide
  Sense strand starting at position 3342 of SEQ ID NO: 1562057
uagauuccuguguaccaga

SEQ ID NO: 1718802 - RNA, 19 nt, Artificial Sequence
  Description of Artificial Sequence: Synthetic oligonucleotide
  Antisense strand to SEQ ID NO: 1718801
ucugguacacaggaaucua

SEQ ID NO: 1718803 - RNA, 19 nt, Artificial Sequence
  Description of Artificial Sequence: Synthetic oligonucleotide
  Sense strand starting at position 3416 of SEQ ID NO: 1562057
guguuagaaucacuuggag

SEQ ID NO: 1718804 - RNA, 19 nt, Artificial Sequence
  Description of Artificial Sequence: Synthetic oligonucleotide
  Antisense strand to SEQ ID NO: 1718803
cuccaagugauucuaacac

SEQ ID NO: 1718805 - RNA, 19 nt, Artificial Sequence
  Description of Artificial Sequence: Synthetic oligonucleotide
  Sense strand starting at position 3473 of SEQ ID NO: 1562057
ucucaucuaugacuaguga

SEQ ID NO: 1718806 - RNA, 19 nt, Artificial Sequence
  Description of Artificial Sequence: Synthetic oligonucleotide
  Antisense strand to SEQ ID NO: 1718805
ucacuagucauagaugaga

SEQ ID NO: 1718807 - RNA, 19 nt, Artificial Sequence
  Description of Artificial Sequence: Synthetic oligonucleotide
  Sense strand starting at position 3474 of SEQ ID NO: 1562057
cucaucuaugacuagugau

SEQ ID NO: 1718808 - RNA, 19 nt, Artificial Sequence
  Description of Artificial Sequence: Synthetic oligonucleotide
  Antisense strand to SEQ ID NO: 1718807
aucacuagucauagaugag

SEQ ID NO: 1718809 - RNA, 19 nt, Artificial Sequence
  Description of Artificial Sequence: Synthetic oligonucleotide
  Sense strand starting at position 3534 of SEQ ID NO: 1562057
gaaucuguggucuaacuug

SEQ ID NO: 1718810 - RNA, 19 nt, Artificial Sequence
  Description of Artificial Sequence: Synthetic oligonucleotide
  Antisense strand to SEQ ID NO: 1718809
caaguuagaccacagauuc

SEQ ID NO: 1718811 - RNA, 19 nt, Artificial Sequence
  Description of Artificial Sequence: Synthetic oligonucleotide
  Sense strand starting at position 3560 of SEQ ID NO: 1562057
ugguuuaaccugugaccca

SEQ ID NO: 1718812 - RNA, 19 nt, Artificial Sequence
  Description of Artificial Sequence: Synthetic oligonucleotide
  Antisense strand to SEQ ID NO: 1718811
ugggucacagguuaaacca

SEQ ID NO: 1718813 - RNA, 19 nt, Artificial Sequence
  Description of Artificial Sequence: Synthetic oligonucleotide
  Sense strand starting at position 3609 of SEQ ID NO: 1562057
ugcuuaggaagaggugaau

SEQ ID NO: 1718814 - RNA, 19 nt, Artificial Sequence
  Description of Artificial Sequence: Synthetic oligonucleotide
  Antisense strand to SEQ ID NO: 1718813
auucaccucuuccuaagca

SEQ ID NO: 1718815 - RNA, 19 nt, Artificial Sequence
  Description of Artificial Sequence: Synthetic oligonucleotide
  Sense strand starting at position 3620 of SEQ ID NO: 1562057
aggugaauucaguagguuu

SEQ ID NO: 1718816 - RNA, 19 nt, Artificial Sequence
  Description of Artificial Sequence: Synthetic oligonucleotide
  Antisense strand to SEQ ID NO: 1718815
aaaccuacugaauucaccu

SEQ ID NO: 1718817 - RNA, 19 nt, Artificial Sequence
  Description of Artificial Sequence: Synthetic oligonucleotide
  Sense strand starting at position 3645 of SEQ ID NO: 1562057
gggcuaaagaacugguguu

SEQ ID NO: 1718818 - RNA, 19 nt, Artificial Sequence
  Description of Artificial Sequence: Synthetic oligonucleotide
  Antisense strand to SEQ ID NO: 1718817
aacaccaguucuuuagccc

SEQ ID NO: 1718819 - RNA, 19 nt, Artificial Sequence
  Description of Artificial Sequence: Synthetic oligonucleotide
  Sense strand starting at position 3646 of SEQ ID NO: 1562057
ggcuaaagaacugguguuu

SEQ ID NO: 1718820 - RNA, 19 nt, Artificial Sequence
  Description of Artificial Sequence: Synthetic oligonucleotide
  Antisense strand to SEQ ID NO: 1718819
aaacaccaguucuuuagcc

SEQ ID NO: 1718821 - RNA, 19 nt, Artificial Sequence
  Description of Artificial Sequence: Synthetic oligonucleotide
  Sense strand starting at position 3803 of SEQ ID NO: 1562057
agaguaggccugcauacau

SEQ ID NO: 1718822 - RNA, 19 nt, Artificial Sequence
  Description of Artificial Sequence: Synthetic oligonucleotide
  Antisense strand to SEQ ID NO: 1718821
auguaugcaggccuacucu

SEQ ID NO: 1718823 - RNA, 19 nt, Artificial Sequence
  Description of Artificial Sequence: Synthetic oligonucleotide
  Sense strand starting at position 3841 of SEQ ID NO: 1562057
aagggaugcuugucaucau

SEQ ID NO: 1718824 - RNA, 19 nt, Artificial Sequence
  Description of Artificial Sequence: Synthetic oligonucleotide
  Antisense strand to SEQ ID NO: 1718823
augaugacaagcaucccuu

SEQ ID NO: 1718825 - RNA, 19 nt, Artificial Sequence
  Description of Artificial Sequence: Synthetic oligonucleotide
  Sense strand starting at position 3844 of SEQ ID NO: 1562057
ggaugcuugucaucauuuc

SEQ ID NO: 1718826 - RNA, 19 nt, Artificial Sequence
  Description of Artificial Sequence: Synthetic oligonucleotide
  Antisense strand to SEQ ID NO: 1718825
gaaaugaugacaagcaucc

SEQ ID NO: 1718827 - RNA, 19 nt, Artificial Sequence
  Description of Artificial Sequence: Synthetic oligonucleotide
  Sense strand starting at position 3891 of SEQ ID NO: 1562057
uuaagugacuugucugaug

SEQ ID NO: 1718828 - RNA, 19 nt, Artificial Sequence
  Description of Artificial Sequence: Synthetic oligonucleotide
  Antisense strand to SEQ ID NO: 1718827
caucagacaagucacuuaa

SEQ ID NO: 1718829 - RNA, 19 nt, Artificial Sequence
  Description of Artificial Sequence: Synthetic oligonucleotide
  Sense strand starting at position 3942 of SEQ ID NO: 1562057
ugaacuaggucucucuuaa

SEQ ID NO: 1718830 - RNA, 19 nt, Artificial Sequence
  Description of Artificial Sequence: Synthetic oligonucleotide
  Antisense strand to SEQ ID NO: 1718829
uuaagagagaccuaguuca

SEQ ID NO: 1718831 - RNA, 19 nt, Artificial Sequence
  Description of Artificial Sequence: Synthetic oligonucleotide
  Sense strand starting at position 3949 of SEQ ID NO: 1562057
ggucucucuuaagccaaga

SEQ ID NO: 1718832 - RNA, 19 nt, Artificial Sequence
  Description of Artificial Sequence: Synthetic oligonucleotide
  Antisense strand to SEQ ID NO: 1718831
ucuuggcuuaagagagacc

SEQ ID NO: 1718833 - RNA, 19 nt, Artificial Sequence
  Description of Artificial Sequence: Synthetic oligonucleotide
  Sense strand starting at position 181 of SEQ ID NO: 1562058
gcuggaguucugcacucuu

SEQ ID NO: 1718834 - RNA, 19 nt, Artificial Sequence
  Description of Artificial Sequence: Synthetic oligonucleotide
  Antisense strand to SEQ ID NO: 1718833
aagagugcagaacuccagc

SEQ ID NO: 1718835 - RNA, 19 nt, Artificial Sequence
  Description of Artificial Sequence: Synthetic oligonucleotide
  Sense strand starting at position 302 of SEQ ID NO: 1562058
ggcccaguuuccucugaga

SEQ ID NO: 1718836 - RNA, 19 nt, Artificial Sequence
  Description of Artificial Sequence: Synthetic oligonucleotide
  Antisense strand to SEQ ID NO: 1718835
ucucagaggaaacugggcc

SEQ ID NO: 1718837 - RNA, 19 nt, Artificial Sequence
  Description of Artificial Sequence: Synthetic oligonucleotide
  Sense strand starting at position 304 of SEQ ID NO: 1562058
cccaguuuccucugagacu

SEQ ID NO: 1718838 - RNA, 19 nt, Artificial Sequence
  Description of Artificial Sequence: Synthetic oligonucleotide
  Antisense strand to SEQ ID NO: 1718837
agucucagaggaaacuggg

SEQ ID NO: 1718839 - RNA, 19 nt, Artificial Sequence
  Description of Artificial Sequence: Synthetic oligonucleotide
  Sense strand starting at position 305 of SEQ ID NO: 1562058
ccaguuuccucugagacug

SEQ ID NO: 1718840 - RNA, 19 nt, Artificial Sequence
  Description of Artificial Sequence: Synthetic oligonucleotide
  Antisense strand to SEQ ID NO: 1718839
cagucucagaggaaacugg

SEQ ID NO: 1718841 - RNA, 19 nt, Artificial Sequence
  Description of Artificial Sequence: Synthetic oligonucleotide
  Sense strand starting at position 336 of SEQ ID NO: 1562058
gcuccuagcaaguagauga

SEQ ID NO: 1718842 - RNA, 19 nt, Artificial Sequence
  Description of Artificial Sequence: Synthetic oligonucleotide
  Antisense strand to SEQ ID NO: 1718841
ucaucuacuugcuaggagc

SEQ ID NO: 1718843 - RNA, 19 nt, Artificial Sequence
  Description of Artificial Sequence: Synthetic oligonucleotide
  Sense strand starting at position 394 of SEQ ID NO: 1562058
gggucaaguuucuagggaa

SEQ ID NO: 1718844 - RNA, 19 nt, Artificial Sequence
  Description of Artificial Sequence: Synthetic oligonucleotide
  Antisense strand to SEQ ID NO: 1718843
uucccuagaaacuugaccc

SEQ ID NO: 1718845 - RNA, 19 nt, Artificial Sequence
  Description of Artificial Sequence: Synthetic oligonucleotide
  Sense strand starting at position 397 of SEQ ID NO: 1562058
ucaaguuucuagggaaagg

SEQ ID NO: 1718846 - RNA, 19 nt, Artificial Sequence
  Description of Artificial Sequence: Synthetic oligonucleotide
  Antisense strand to SEQ ID NO: 1718845
ccuuucccuagaaacuuga

SEQ ID NO: 1718847 - RNA, 19 nt, Artificial Sequence
  Description of Artificial Sequence: Synthetic oligonucleotide
  Sense strand starting at position 803 of SEQ ID NO: 1562058
ggguccuccugcuugucaa

SEQ ID NO: 1718848 - RNA, 19 nt, Artificial Sequence
  Description of Artificial Sequence: Synthetic oligonucleotide
  Antisense strand to SEQ ID NO: 1718847
uugacaagcaggaggaccc

SEQ ID NO: 1718849 - RNA, 19 nt, Artificial Sequence
  Description of Artificial Sequence: Synthetic oligonucleotide
  Sense strand starting at position 867 of SEQ ID NO: 1562058
ccaagucugggaugggaua

SEQ ID NO: 1718850 - RNA, 19 nt, Artificial Sequence
  Description of Artificial Sequence: Synthetic oligonucleotide
  Antisense strand to SEQ ID NO: 1718849
uaucccaucccagacuugg

SEQ ID NO: 1718851 - RNA, 19 nt, Artificial Sequence
  Description of Artificial Sequence: Synthetic oligonucleotide
  Sense strand starting at position 941 of SEQ ID NO: 1562058
ugccgcuuugcuccacaga

SEQ ID NO: 1718852 - RNA, 19 nt, Artificial Sequence
  Description of Artificial Sequence: Synthetic oligonucleotide
  Antisense strand to SEQ ID NO: 1718851
ucuguggagcaaagcggca

SEQ ID NO: 1718853 - RNA, 19 nt, Artificial Sequence
  Description of Artificial Sequence: Synthetic oligonucleotide
  Sense strand starting at position 942 of SEQ ID NO: 1562058
gccgcuuugcuccacagaa

SEQ ID NO: 1718854 - RNA, 19 nt, Artificial Sequence
  Description of Artificial Sequence: Synthetic oligonucleotide
  Antisense strand to SEQ ID NO: 1718853
uucuguggagcaaagcggc

SEQ ID NO: 1718855 - RNA, 19 nt, Artificial Sequence
  Description of Artificial Sequence: Synthetic oligonucleotide
  Sense strand starting at position 1065 of SEQ ID NO: 1562058
gcuccauucucaguccuua

SEQ ID NO: 1718856 - RNA, 19 nt, Artificial Sequence
  Description of Artificial Sequence: Synthetic oligonucleotide
  Antisense strand to SEQ ID NO: 1718855
uaaggacugagaauggagc

SEQ ID NO: 1718857 - RNA, 19 nt, Artificial Sequence
  Description of Artificial Sequence: Synthetic oligonucleotide
  Sense strand starting at position 1622 of SEQ ID NO: 1562058
cgcggaaaccuggguucuu

SEQ ID NO: 1718858 - RNA, 19 nt, Artificial Sequence
  Description of Artificial Sequence: Synthetic oligonucleotide
  Antisense strand to SEQ ID NO: 1718857
aagaacccagguuuccgcg

SEQ ID NO: 1718859 - RNA, 19 nt, Artificial Sequence
  Description of Artificial Sequence: Synthetic oligonucleotide
  Sense strand starting at position 2410 of SEQ ID NO: 1562058
ccgugagccgcgucuguaa

SEQ ID NO: 1718860 - RNA, 19 nt, Artificial Sequence
  Description of Artificial Sequence: Synthetic oligonucleotide
  Antisense strand to SEQ ID NO: 1718859
uuacagacgcggcucacgg

SEQ ID NO: 1718861 - RNA, 19 nt, Artificial Sequence
  Description of Artificial Sequence: Synthetic oligonucleotide
  Sense strand starting at position 2519 of SEQ ID NO: 1562058
gcggguucuugcauccgga

SEQ ID NO: 1718862 - RNA, 19 nt, Artificial Sequence
  Description of Artificial Sequence: Synthetic oligonucleotide
  Antisense strand to SEQ ID NO: 1718861
uccggaugcaagaacccgc

SEQ ID NO: 1718863 - RNA, 19 nt, Artificial Sequence
  Description of Artificial Sequence: Synthetic oligonucleotide
  Sense strand starting at position 2671 of SEQ ID NO: 1562058
cuuuaugacucgguacaga

SEQ ID NO: 1718864 - RNA, 19 nt, Artificial Sequence
  Description of Artificial Sequence: Synthetic oligonucleotide
  Antisense strand to SEQ ID NO: 1718863
ucuguaccgagucauaaag

SEQ ID NO: 1718865 - RNA, 19 nt, Artificial Sequence
  Description of Artificial Sequence: Synthetic oligonucleotide
  Sense strand starting at position 2715 of SEQ ID NO: 1562058
augcuuuggcccuguguca

SEQ ID NO: 1718866 - RNA, 19 nt, Artificial Sequence
  Description of Artificial Sequence: Synthetic oligonucleotide
  Antisense strand to SEQ ID NO: 1718865
ugacacagggccaaagcau

SEQ ID NO: 1718867 - RNA, 19 nt, Artificial Sequence
  Description of Artificial Sequence: Synthetic oligonucleotide
  Sense strand starting at position 2842 of SEQ ID NO: 1562058
cccggauaguucccagugu

SEQ ID NO: 1718868 - RNA, 19 nt, Artificial Sequence
  Description of Artificial Sequence: Synthetic oligonucleotide
  Antisense strand to SEQ ID NO: 1718867
acacugggaacuauccggg

SEQ ID NO: 1718869 - RNA, 19 nt, Artificial Sequence
  Description of Artificial Sequence: Synthetic oligonucleotide
  Sense strand starting at position 2949 of SEQ ID NO: 1562058
uggagauucuacuuguauu

SEQ ID NO: 1718870 - RNA, 19 nt, Artificial Sequence
  Description of Artificial Sequence: Synthetic oligonucleotide
  Antisense strand to SEQ ID NO: 1718869
aauacaaguagaaucucca

SEQ ID NO: 1718871 - RNA, 19 nt, Artificial Sequence
  Description of Artificial Sequence: Synthetic oligonucleotide
  Sense strand starting at position 2979 of SEQ ID NO: 1562058
ggacaaguaucaguaucug

SEQ ID NO: 1718872 - RNA, 19 nt, Artificial Sequence
  Description of Artificial Sequence: Synthetic oligonucleotide
  Antisense strand to SEQ ID NO: 1718871
cagauacugauacuugucc

SEQ ID NO: 1718873 - RNA, 19 nt, Artificial Sequence
  Description of Artificial Sequence: Synthetic oligonucleotide
  Sense strand starting at position 3039 of SEQ ID NO: 1562058
cauagaucagccuggaucu

SEQ ID NO: 1718874 - RNA, 19 nt, Artificial Sequence
  Description of Artificial Sequence: Synthetic oligonucleotide
  Antisense strand to SEQ ID NO: 1718873
agauccaggcugaucuaug

SEQ ID NO: 1718875 - RNA, 19 nt, Artificial Sequence
  Description of Artificial Sequence: Synthetic oligonucleotide
  Sense strand starting at position 3040 of SEQ ID NO: 1562058
auagaucagccuggaucuu

SEQ ID NO: 1718876 - RNA, 19 nt, Artificial Sequence
  Description of Artificial Sequence: Synthetic oligonucleotide
  Antisense strand to SEQ ID NO: 1718875
aagauccaggcugaucuau

SEQ ID NO: 1718877 - RNA, 19 nt, Artificial Sequence
  Description of Artificial Sequence: Synthetic oligonucleotide
  Sense strand starting at position 3041 of SEQ ID NO: 1562058
uagaucagccuggaucuua

SEQ ID NO: 1718878 - RNA, 19 nt, Artificial Sequence
  Description of Artificial Sequence: Synthetic oligonucleotide
  Antisense strand to SEQ ID NO: 1718877
uaagauccaggcugaucua

SEQ ID NO: 1718879 - RNA, 19 nt, Artificial Sequence
  Description of Artificial Sequence: Synthetic oligonucleotide
  Sense strand starting at position 3135 of SEQ ID NO: 1562058
gaggguauugcgcugcuga

SEQ ID NO: 1718880 - RNA, 19 nt, Artificial Sequence
  Description of Artificial Sequence: Synthetic oligonucleotide
  Antisense strand to SEQ ID NO: 1718879
ucagcagcgcaauacccuc

SEQ ID NO: 1718881 - RNA, 19 nt, Artificial Sequence
  Description of Artificial Sequence: Synthetic oligonucleotide
  Sense strand starting at position 3305 of SEQ ID NO: 1562058
gaggcaggcugcuacuuau

SEQ ID NO: 1718882 - RNA, 19 nt, Artificial Sequence
  Description of Artificial Sequence: Synthetic oligonucleotide
  Antisense strand to SEQ ID NO: 1718881
auaaguagcagccugccuc

SEQ ID NO: 1718883 - RNA, 19 nt, Artificial Sequence
  Description of Artificial Sequence: Synthetic oligonucleotide
  Sense strand starting at position 119 of SEQ ID NO: 1562059
gccucuaggcugugaaacu

SEQ ID NO: 1718884 - RNA, 19 nt, Artificial Sequence
  Description of Artificial Sequence: Synthetic oligonucleotide
  Antisense strand to SEQ ID NO: 1718883
aguuucacagccuagaggc

SEQ ID NO: 1718885 - RNA, 19 nt, Artificial Sequence
  Description of Artificial Sequence: Synthetic oligonucleotide
  Sense strand starting at position 128 of SEQ ID NO: 1562059
cugugaaacugcuguggaa

SEQ ID NO: 1718886 - RNA, 19 nt, Artificial Sequence
  Description of Artificial Sequence: Synthetic oligonucleotide
  Antisense strand to SEQ ID NO: 1718885
uuccacagcaguuucacag

SEQ ID NO: 1718887 - RNA, 19 nt, Artificial Sequence
  Description of Artificial Sequence: Synthetic oligonucleotide
  Sense strand starting at position 258 of SEQ ID NO: 1562059
gcaugucccucccagcauu

SEQ ID NO: 1718888 - RNA, 19 nt, Artificial Sequence
  Description of Artificial Sequence: Synthetic oligonucleotide
  Antisense strand to SEQ ID NO: 1718887
aaugcugggagggacaugc

SEQ ID NO: 1718889 - RNA, 19 nt, Artificial Sequence
  Description of Artificial Sequence: Synthetic oligonucleotide
  Sense strand starting at position 362 of SEQ ID NO: 1562059
ccaagucuccuugggcgau

SEQ ID NO: 1718890 - RNA, 19 nt, Artificial Sequence
  Description of Artificial Sequence: Synthetic oligonucleotide
  Antisense strand to SEQ ID NO: 1718889
aucgcccaaggagacuugg

SEQ ID NO: 1718891 - RNA, 19 nt, Artificial Sequence
  Description of Artificial Sequence: Synthetic oligonucleotide
  Sense strand starting at position 660 of SEQ ID NO: 1562059
gcuggaguucugcacucuu

SEQ ID NO: 1718892 - RNA, 19 nt, Artificial Sequence
  Description of Artificial Sequence: Synthetic oligonucleotide
  Antisense strand to SEQ ID NO: 1718891
aagagugcagaacuccagc

SEQ ID NO: 1718893 - RNA, 19 nt, Artificial Sequence
  Description of Artificial Sequence: Synthetic oligonucleotide
  Sense strand starting at position 781 of SEQ ID NO: 1562059
ggcccaguuuccucugaga

SEQ ID NO: 1718894 - RNA, 19 nt, Artificial Sequence
  Description of Artificial Sequence: Synthetic oligonucleotide
  Antisense strand to SEQ ID NO: 1718893
ucucagaggaaacugggcc

SEQ ID NO: 1718895 - RNA, 19 nt, Artificial Sequence
  Description of Artificial Sequence: Synthetic oligonucleotide
  Sense strand starting at position 783 of SEQ ID NO: 1562059
cccaguuuccucugagacu

SEQ ID NO: 1718896 - RNA, 19 nt, Artificial Sequence
  Description of Artificial Sequence: Synthetic oligonucleotide
  Antisense strand to SEQ ID NO: 1718895
agucucagaggaaacuggg

SEQ ID NO: 1718897 - RNA, 19 nt, Artificial Sequence
  Description of Artificial Sequence: Synthetic oligonucleotide
  Sense strand starting at position 784 of SEQ ID NO: 1562059
ccaguuuccucugagacug

SEQ ID NO: 1718898 - RNA, 19 nt, Artificial Sequence
  Description of Artificial Sequence: Synthetic oligonucleotide
  Antisense strand to SEQ ID NO: 1718897
cagucucagaggaaacugg

SEQ ID NO: 1718899 - RNA, 19 nt, Artificial Sequence
  Description of Artificial Sequence: Synthetic oligonucleotide
  Sense strand starting at position 815 of SEQ ID NO: 1562059
gcuccuagcaaguagauga

SEQ ID NO: 1718900 - RNA, 19 nt, Artificial Sequence
  Description of Artificial Sequence: Synthetic oligonucleotide
  Antisense strand to SEQ ID NO: 1718899
ucaucuacuugcuaggagc

SEQ ID NO: 1718901 - RNA, 19 nt, Artificial Sequence
  Description of Artificial Sequence: Synthetic oligonucleotide
  Sense strand starting at position 873 of SEQ ID NO: 1562059
gggucaaguuucuagggaa

SEQ ID NO: 1718902 - RNA, 19 nt, Artificial Sequence
  Description of Artificial Sequence: Synthetic oligonucleotide
  Antisense strand to SEQ ID NO: 1718901
uucccuagaaacuugaccc

SEQ ID NO: 1718903 - RNA, 19 nt, Artificial Sequence
  Description of Artificial Sequence: Synthetic oligonucleotide
  Sense strand starting at position 876 of SEQ ID NO: 1562059
ucaaguuucuagggaaagg

SEQ ID NO: 1718904 - RNA, 19 nt, Artificial Sequence
  Description of Artificial Sequence: Synthetic oligonucleotide
  Antisense strand to SEQ ID NO: 1718903
ccuuucccuagaaacuuga

SEQ ID NO: 1718905 - RNA, 19 nt, Artificial Sequence
  Description of Artificial Sequence: Synthetic oligonucleotide
  Sense strand starting at position 1282 of SEQ ID NO: 1562059
ggguccuccugcuugucaa

SEQ ID NO: 1718906 - RNA, 19 nt, Artificial Sequence
  Description of Artificial Sequence: Synthetic oligonucleotide
  Antisense strand to SEQ ID NO: 1718905
uugacaagcaggaggaccc

SEQ ID NO: 1718907 - RNA, 19 nt, Artificial Sequence
  Description of Artificial Sequence: Synthetic oligonucleotide
  Sense strand starting at position 1346 of SEQ ID NO: 1562059
ccaagucugggaugggaua

SEQ ID NO: 1718908 - RNA, 19 nt, Artificial Sequence
  Description of Artificial Sequence: Synthetic oligonucleotide
  Antisense strand to SEQ ID NO: 1718907
uaucccaucccagacuugg

SEQ ID NO: 1718909 - RNA, 19 nt, Artificial Sequence
  Description of Artificial Sequence: Synthetic oligonucleotide
  Sense strand starting at position 1420 of SEQ ID NO: 1562059
ugccgcuuugcuccacaga

SEQ ID NO: 1718910 - RNA, 19 nt, Artificial Sequence
  Description of Artificial Sequence: Synthetic oligonucleotide
  Antisense strand to SEQ ID NO: 1718909
ucuguggagcaaagcggca

SEQ ID NO: 1718911 - RNA, 19 nt, Artificial Sequence
  Description of Artificial Sequence: Synthetic oligonucleotide
  Sense strand starting at position 1421 of SEQ ID NO: 1562059
gccgcuuugcuccacagaa

SEQ ID NO: 1718912 - RNA, 19 nt, Artificial Sequence
  Description of Artificial Sequence: Synthetic oligonucleotide
  Antisense strand to SEQ ID NO: 1718911
uucuguggagcaaagcggc

SEQ ID NO: 1718913 - RNA, 19 nt, Artificial Sequence
  Description of Artificial Sequence: Synthetic oligonucleotide
  Sense strand starting at position 1544 of SEQ ID NO: 1562059
gcuccauucucaguccuua

SEQ ID NO: 1718914 - RNA, 19 nt, Artificial Sequence
  Description of Artificial Sequence: Synthetic oligonucleotide
  Antisense strand to SEQ ID NO: 1718913
uaaggacugagaauggagc

SEQ ID NO: 1718915 - RNA, 19 nt, Artificial Sequence
  Description of Artificial Sequence: Synthetic oligonucleotide
  Sense strand starting at position 2101 of SEQ ID NO: 1562059
cgcggaaaccuggguucuu

SEQ ID NO: 1718916 - RNA, 19 nt, Artificial Sequence
  Description of Artificial Sequence: Synthetic oligonucleotide
  Antisense strand to SEQ ID NO: 1718915
aagaacccagguuuccgcg

SEQ ID NO: 1718917 - RNA, 19 nt, Artificial Sequence
  Description of Artificial Sequence: Synthetic oligonucleotide
  Sense strand starting at position 2889 of SEQ ID NO: 1562059
ccgugagccgcgucuguaa

SEQ ID NO: 1718918 - RNA, 19 nt, Artificial Sequence
  Description of Artificial Sequence: Synthetic oligonucleotide
  Antisense strand to SEQ ID NO: 1718917
uuacagacgcggcucacgg

SEQ ID NO: 1718919 - RNA, 19 nt, Artificial Sequence
  Description of Artificial Sequence: Synthetic oligonucleotide
  Sense strand starting at position 2998 of SEQ ID NO: 1562059
gcggguucuugcauccgga

SEQ ID NO: 1718920 - RNA, 19 nt, Artificial Sequence
  Description of Artificial Sequence: Synthetic oligonucleotide
  Antisense strand to SEQ ID NO: 1718919
uccggaugcaagaacccgc

SEQ ID NO: 1718921 - RNA, 19 nt, Artificial Sequence
  Description of Artificial Sequence: Synthetic oligonucleotide
  Sense strand starting at position 3150 of SEQ ID NO: 1562059
cuuuaugacucgguacaga

SEQ ID NO: 1718922 - RNA, 19 nt, Artificial Sequence
  Description of Artificial Sequence: Synthetic oligonucleotide
  Antisense strand to SEQ ID NO: 1718921
ucuguaccgagucauaaag

SEQ ID NO: 1718923 - RNA, 19 nt, Artificial Sequence
  Description of Artificial Sequence: Synthetic oligonucleotide
  Sense strand starting at position 3194 of SEQ ID NO: 1562059
augcuuuggcccuguguca

SEQ ID NO: 1718924 - RNA, 19 nt, Artificial Sequence
  Description of Artificial Sequence: Synthetic oligonucleotide
  Antisense strand to SEQ ID NO: 1718923
ugacacagggccaaagcau

SEQ ID NO: 1718925 - RNA, 19 nt, Artificial Sequence
  Description of Artificial Sequence: Synthetic oligonucleotide
  Sense strand starting at position 3321 of SEQ ID NO: 1562059
cccggauaguucccagugu

SEQ ID NO: 1718926 - RNA, 19 nt, Artificial Sequence
  Description of Artificial Sequence: Synthetic oligonucleotide
  Antisense strand to SEQ ID NO: 1718925
acacugggaacuauccggg

SEQ ID NO: 1718927 - RNA, 19 nt, Artificial Sequence
  Description of Artificial Sequence: Synthetic oligonucleotide
  Sense strand starting at position 3428 of SEQ ID NO: 1562059
uggagauucuacuuguauu

SEQ ID NO: 1718928 - RNA, 19 nt, Artificial Sequence
  Description of Artificial Sequence: Synthetic oligonucleotide
  Antisense strand to SEQ ID NO: 1718927
aauacaaguagaaucucca

SEQ ID NO: 1718929 - RNA, 19 nt, Artificial Sequence
  Description of Artificial Sequence: Synthetic oligonucleotide
  Sense strand starting at position 3458 of SEQ ID NO: 1562059
ggacaaguaucaguaucug

SEQ ID NO: 1718930 - RNA, 19 nt, Artificial Sequence
  Description of Artificial Sequence: Synthetic oligonucleotide
  Antisense strand to SEQ ID NO: 1718929
cagauacugauacuugucc

SEQ ID NO: 1718931 - RNA, 19 nt, Artificial Sequence
  Description of Artificial Sequence: Synthetic oligonucleotide
  Sense strand starting at position 3518 of SEQ ID NO: 1562059
cauagaucagccuggaucu

SEQ ID NO: 1718932 - RNA, 19 nt, Artificial Sequence
  Description of Artificial Sequence: Synthetic oligonucleotide
  Antisense strand to SEQ ID NO: 1718931
agauccaggcugaucuaug

SEQ ID NO: 1718933 - RNA, 19 nt, Artificial Sequence
  Description of Artificial Sequence: Synthetic oligonucleotide
  Sense strand starting at position 3519 of SEQ ID NO: 1562059
auagaucagccuggaucuu

SEQ ID NO: 1718934 - RNA, 19 nt, Artificial Sequence
  Description of Artificial Sequence: Synthetic oligonucleotide
  Antisense strand to SEQ ID NO: 1718933
aagauccaggcugaucuau

SEQ ID NO: 1718935 - RNA, 19 nt, Artificial Sequence
  Description of Artificial Sequence: Synthetic oligonucleotide
  Sense strand starting at position 3520 of SEQ ID NO: 1562059
uagaucagccuggaucuua

SEQ ID NO: 1718936 - RNA, 19 nt, Artificial Sequence
  Description of Artificial Sequence: Synthetic oligonucleotide
  Antisense strand to SEQ ID NO: 1718935
uaagauccaggcugaucua

SEQ ID NO: 1718937 - RNA, 19 nt, Artificial Sequence
  Description of Artificial Sequence: Synthetic oligonucleotide
  Sense strand starting at position 3614 of SEQ ID NO: 1562059
gaggguauugcgcugcuga

SEQ ID NO: 1718938 - RNA, 19 nt, Artificial Sequence
  Description of Artificial Sequence: Synthetic oligonucleotide
  Antisense strand to SEQ ID NO: 1718937
ucagcagcgcaauacccuc

SEQ ID NO: 1718939 - RNA, 19 nt, Artificial Sequence
  Description of Artificial Sequence: Synthetic oligonucleotide
  Sense strand starting at position 3784 of SEQ ID NO: 1562059
gaggcaggcugcuacuuau

SEQ ID NO: 1718940 - RNA, 19 nt, Artificial Sequence
  Description of Artificial Sequence: Synthetic oligonucleotide
  Antisense strand to SEQ ID NO: 1718939
auaaguagcagccugccuc

SEQ ID NO: 1718941 - RNA, 19 nt, Artificial Sequence
  Description of Artificial Sequence: Synthetic oligonucleotide
  Sense strand starting at position 14 of SEQ ID NO: 1562060
ugcaauaaccaagguguuu

SEQ ID NO: 1718942 - RNA, 19 nt, Artificial Sequence
  Description of Artificial Sequence: Synthetic oligonucleotide
  Antisense strand to SEQ ID NO: 1718941
aaacaccuugguuauugca

SEQ ID NO: 1718943 - RNA, 19 nt, Artificial Sequence
  Description of Artificial Sequence: Synthetic oligonucleotide
  Sense strand starting at position 25 of SEQ ID NO: 1562060
agguguuugacccaugaca

SEQ ID NO: 1718944 - RNA, 19 nt, Artificial Sequence
  Description of Artificial Sequence: Synthetic oligonucleotide
  Antisense strand to SEQ ID NO: 1718943
ugucaugggucaaacaccu

SEQ ID NO: 1718945 - RNA, 19 nt, Artificial Sequence
  Description of Artificial Sequence: Synthetic oligonucleotide
  Sense strand starting at position 27 of SEQ ID NO: 1562060
guguuugacccaugacaca

SEQ ID NO: 1718946 - RNA, 19 nt, Artificial Sequence
  Description of Artificial Sequence: Synthetic oligonucleotide
  Antisense strand to SEQ ID NO: 1718945
ugugucaugggucaaacac

SEQ ID NO: 1718947 - RNA, 19 nt, Artificial Sequence
  Description of Artificial Sequence: Synthetic oligonucleotide
  Sense strand starting at position 45 of SEQ ID NO: 1562060
acagcaugacuuugaagaa

SEQ ID NO: 1718948 - RNA, 19 nt, Artificial Sequence
  Description of Artificial Sequence: Synthetic oligonucleotide
  Antisense strand to SEQ ID NO: 1718947
uucuucaaagucaugcugu

SEQ ID NO: 1718949 - RNA, 19 nt, Artificial Sequence
  Description of Artificial Sequence: Synthetic oligonucleotide
  Sense strand starting at position 114 of SEQ ID NO: 1562060
cagccuggcucuugagauc

SEQ ID NO: 1718950 - RNA, 19 nt, Artificial Sequence
  Description of Artificial Sequence: Synthetic oligonucleotide
  Antisense strand to SEQ ID NO: 1718949
gaucucaagagccaggcug

SEQ ID NO: 1718951 - RNA, 19 nt, Artificial Sequence
  Description of Artificial Sequence: Synthetic oligonucleotide
  Sense strand starting at position 117 of SEQ ID NO: 1562060
ccuggcucuugagauccaa

SEQ ID NO: 1718952 - RNA, 19 nt, Artificial Sequence
  Description of Artificial Sequence: Synthetic oligonucleotide
  Antisense strand to SEQ ID NO: 1718951
uuggaucucaagagccagg

SEQ ID NO: 1718953 - RNA, 19 nt, Artificial Sequence
  Description of Artificial Sequence: Synthetic oligonucleotide
  Sense strand starting at position 186 of SEQ ID NO: 1562060
ccuugccuuguccagaaua

SEQ ID NO: 1718954 - RNA, 19 nt, Artificial Sequence
  Description of Artificial Sequence: Synthetic oligonucleotide
  Antisense strand to SEQ ID NO: 1718953
uauucuggacaaggcaagg

SEQ ID NO: 1718955 - RNA, 19 nt, Artificial Sequence
  Description of Artificial Sequence: Synthetic oligonucleotide
  Sense strand starting at position 188 of SEQ ID NO: 1562060
uugccuuguccagaauaau

SEQ ID NO: 1718956 - RNA, 19 nt, Artificial Sequence
  Description of Artificial Sequence: Synthetic oligonucleotide
  Antisense strand to SEQ ID NO: 1718955
auuauucuggacaaggcaa

SEQ ID NO: 1718957 - RNA, 19 nt, Artificial Sequence
  Description of Artificial Sequence: Synthetic oligonucleotide
  Sense strand starting at position 300 of SEQ ID NO: 1562060
augucucugcaguaaucau

SEQ ID NO: 1718958 - RNA, 19 nt, Artificial Sequence
  Description of Artificial Sequence: Synthetic oligonucleotide
  Antisense strand to SEQ ID NO: 1718957
augauuacugcagagacau

SEQ ID NO: 1718959 - RNA, 19 nt, Artificial Sequence
  Description of Artificial Sequence: Synthetic oligonucleotide
  Sense strand starting at position 411 of SEQ ID NO: 1562060
acaaauucuucuggagaaa

SEQ ID NO: 1718960 - RNA, 19 nt, Artificial Sequence
  Description of Artificial Sequence: Synthetic oligonucleotide
  Antisense strand to SEQ ID NO: 1718959
uuucuccagaagaauuugu

SEQ ID NO: 1718961 - RNA, 19 nt, Artificial Sequence
  Description of Artificial Sequence: Synthetic oligonucleotide
  Sense strand starting at position 476 of SEQ ID NO: 1562060
uggccagguugaucagaca

SEQ ID NO: 1718962 - RNA, 19 nt, Artificial Sequence
  Description of Artificial Sequence: Synthetic oligonucleotide
  Antisense strand to SEQ ID NO: 1718961
ugucugaucaaccuggcca

SEQ ID NO: 1718963 - RNA, 19 nt, Artificial Sequence
  Description of Artificial Sequence: Synthetic oligonucleotide
  Sense strand starting at position 574 of SEQ ID NO: 1562060
uaugcacuucgggagagau

SEQ ID NO: 1718964 - RNA, 19 nt, Artificial Sequence
  Description of Artificial Sequence: Synthetic oligonucleotide
  Antisense strand to SEQ ID NO: 1718963
aucucucccgaagugcaua

SEQ ID NO: 1718965 - RNA, 19 nt, Artificial Sequence
  Description of Artificial Sequence: Synthetic oligonucleotide
  Sense strand starting at position 613 of SEQ ID NO: 1562060
acuugaaagugcccaugaa

SEQ ID NO: 1718966 - RNA, 19 nt, Artificial Sequence
  Description of Artificial Sequence: Synthetic oligonucleotide
  Antisense strand to SEQ ID NO: 1718965
uucaugggcacuuucaagu

SEQ ID NO: 1718967 - RNA, 19 nt, Artificial Sequence
  Description of Artificial Sequence: Synthetic oligonucleotide
  Sense strand starting at position 614 of SEQ ID NO: 1562060
cuugaaagugcccaugaaa

SEQ ID NO: 1718968 - RNA, 19 nt, Artificial Sequence
  Description of Artificial Sequence: Synthetic oligonucleotide
  Antisense strand to SEQ ID NO: 1718967
uuucaugggcacuuucaag

SEQ ID NO: 1718969 - RNA, 19 nt, Artificial Sequence
  Description of Artificial Sequence: Synthetic oligonucleotide
  Sense strand starting at position 756 of SEQ ID NO: 1562060
uacagagcuuugcaucgau

SEQ ID NO: 1718970 - RNA, 19 nt, Artificial Sequence
  Description of Artificial Sequence: Synthetic oligonucleotide
  Antisense strand to SEQ ID NO: 1718969
aucgaugcaaagcucugua

SEQ ID NO: 1718971 - RNA, 19 nt, Artificial Sequence
  Description of Artificial Sequence: Synthetic oligonucleotide
  Sense strand starting at position 760 of SEQ ID NO: 1562060
gagcuuugcaucgauacga

SEQ ID NO: 1718972 - RNA, 19 nt, Artificial Sequence
  Description of Artificial Sequence: Synthetic oligonucleotide
  Antisense strand to SEQ ID NO: 1718971
ucguaucgaugcaaagcuc

SEQ ID NO: 1718973 - RNA, 19 nt, Artificial Sequence
  Description of Artificial Sequence: Synthetic oligonucleotide
  Sense strand starting at position 764 of SEQ ID NO: 1562060
uuugcaucgauacgaugau

SEQ ID NO: 1718974 - RNA, 19 nt, Artificial Sequence
  Description of Artificial Sequence: Synthetic oligonucleotide
  Antisense strand to SEQ ID NO: 1718973
aucaucguaucgaugcaaa

SEQ ID NO: 1718975 - RNA, 19 nt, Artificial Sequence
  Description of Artificial Sequence: Synthetic oligonucleotide
  Sense strand starting at position 1015 of SEQ ID NO: 1562060
aagaguagguuucccuaca

SEQ ID NO: 1718976 - RNA, 19 nt, Artificial Sequence
  Description of Artificial Sequence: Synthetic oligonucleotide
  Antisense strand to SEQ ID NO: 1718975
uguagggaaaccuacucuu

SEQ ID NO: 1718977 - RNA, 19 nt, Artificial Sequence
  Description of Artificial Sequence: Synthetic oligonucleotide
  Sense strand starting at position 1207 of SEQ ID NO: 1562060
acaccucucuccgggaaga

SEQ ID NO: 1718978 - RNA, 19 nt, Artificial Sequence
  Description of Artificial Sequence: Synthetic oligonucleotide
  Antisense strand to SEQ ID NO: 1718977
ucuucccggagagaggugu

SEQ ID NO: 1718979 - RNA, 19 nt, Artificial Sequence
  Description of Artificial Sequence: Synthetic oligonucleotide
  Sense strand starting at position 1489 of SEQ ID NO: 1562060
cuugaagagugggcacauu

SEQ ID NO: 1718980 - RNA, 19 nt, Artificial Sequence
  Description of Artificial Sequence: Synthetic oligonucleotide
  Antisense strand to SEQ ID NO: 1718979
aaugugcccacucuucaag

SEQ ID NO: 1718981 - RNA, 19 nt, Artificial Sequence
  Description of Artificial Sequence: Synthetic oligonucleotide
  Sense strand starting at position 1843 of SEQ ID NO: 1562060
ccucgucgucgaaggaguu

SEQ ID NO: 1718982 - RNA, 19 nt, Artificial Sequence
  Description of Artificial Sequence: Synthetic oligonucleotide
  Antisense strand to SEQ ID NO: 1718981
aacuccuucgacgacgagg

SEQ ID NO: 1718983 - RNA, 19 nt, Artificial Sequence
  Description of Artificial Sequence: Synthetic oligonucleotide
  Sense strand starting at position 2007 of SEQ ID NO: 1562060
ccauucuugacgcggagua

SEQ ID NO: 1718984 - RNA, 19 nt, Artificial Sequence
  Description of Artificial Sequence: Synthetic oligonucleotide
  Antisense strand to SEQ ID NO: 1718983
uacuccgcgucaagaaugg

SEQ ID NO: 1718985 - RNA, 19 nt, Artificial Sequence
  Description of Artificial Sequence: Synthetic oligonucleotide
  Sense strand starting at position 2972 of SEQ ID NO: 1562060
cugugaucaucucagcacu

SEQ ID NO: 1718986 - RNA, 19 nt, Artificial Sequence
  Description of Artificial Sequence: Synthetic oligonucleotide
  Antisense strand to SEQ ID NO: 1718985
agugcugagaugaucacag

SEQ ID NO: 1718987 - RNA, 19 nt, Artificial Sequence
  Description of Artificial Sequence: Synthetic oligonucleotide
  Sense strand starting at position 2974 of SEQ ID NO: 1562060
gugaucaucucagcacugu

SEQ ID NO: 1718988 - RNA, 19 nt, Artificial Sequence
  Description of Artificial Sequence: Synthetic oligonucleotide
  Antisense strand to SEQ ID NO: 1718987
acagugcugagaugaucac

SEQ ID NO: 1718989 - RNA, 19 nt, Artificial Sequence
  Description of Artificial Sequence: Synthetic oligonucleotide
  Sense strand starting at position 2990 of SEQ ID NO: 1562060
ugucaaacacucugacuga

SEQ ID NO: 1718990 - RNA, 19 nt, Artificial Sequence
  Description of Artificial Sequence: Synthetic oligonucleotide
  Antisense strand to SEQ ID NO: 1718989
ucagucagaguguuugaca

SEQ ID NO: 1718991 - RNA, 19 nt, Artificial Sequence
  Description of Artificial Sequence: Synthetic oligonucleotide
  Sense strand starting at position 3265 of SEQ ID NO: 1562060
aucggaaacccguguucca

SEQ ID NO: 1718992 - RNA, 19 nt, Artificial Sequence
  Description of Artificial Sequence: Synthetic oligonucleotide
  Antisense strand to SEQ ID NO: 1718991
uggaacacggguuuccgau

SEQ ID NO: 1718993 - RNA, 19 nt, Artificial Sequence
  Description of Artificial Sequence: Synthetic oligonucleotide
  Sense strand starting at position 3363 of SEQ ID NO: 1562060
ucgcacaccucuuuaugaa

SEQ ID NO: 1718994 - RNA, 19 nt, Artificial Sequence
  Description of Artificial Sequence: Synthetic oligonucleotide
  Antisense strand to SEQ ID NO: 1718993
uucauaaagaggugugcga

SEQ ID NO: 1718995 - RNA, 19 nt, Artificial Sequence
  Description of Artificial Sequence: Synthetic oligonucleotide
  Sense strand starting at position 3431 of SEQ ID NO: 1562060
gaguuugaaucucagcugu

SEQ ID NO: 1718996 - RNA, 19 nt, Artificial Sequence
  Description of Artificial Sequence: Synthetic oligonucleotide
  Antisense strand to SEQ ID NO: 1718995
acagcugagauucaaacuc

SEQ ID NO: 1718997 - RNA, 19 nt, Artificial Sequence
  Description of Artificial Sequence: Synthetic oligonucleotide
  Sense strand starting at position 3548 of SEQ ID NO: 1562060
uugugaacugccuguaaga

SEQ ID NO: 1718998 - RNA, 19 nt, Artificial Sequence
  Description of Artificial Sequence: Synthetic oligonucleotide
  Antisense strand to SEQ ID NO: 1718997
ucuuacaggcaguucacaa

SEQ ID NO: 1718999 - RNA, 19 nt, Artificial Sequence
  Description of Artificial Sequence: Synthetic oligonucleotide
  Sense strand starting at position 3550 of SEQ ID NO: 1562060
gugaacugccuguaagaua

SEQ ID NO: 1719000 - RNA, 19 nt, Artificial Sequence
  Description of Artificial Sequence: Synthetic oligonucleotide
  Antisense strand to SEQ ID NO: 1718999
uaucuuacaggcaguucac

SEQ ID NO: 1719001 - RNA, 19 nt, Artificial Sequence
  Description of Artificial Sequence: Synthetic oligonucleotide
  Sense strand starting at position 3632 of SEQ ID NO: 1562060
gauuuacaauccuguaggu

SEQ ID NO: 1719002 - RNA, 19 nt, Artificial Sequence
  Description of Artificial Sequence: Synthetic oligonucleotide
  Antisense strand to SEQ ID NO: 1719001
accuacaggauuguaaauc

SEQ ID NO: 1719003 - RNA, 19 nt, Artificial Sequence
  Description of Artificial Sequence: Synthetic oligonucleotide
  Sense strand starting at position 3634 of SEQ ID NO: 1562060
uuuacaauccuguagguca

SEQ ID NO: 1719004 - RNA, 19 nt, Artificial Sequence
  Description of Artificial Sequence: Synthetic oligonucleotide
  Antisense strand to SEQ ID NO: 1719003
ugaccuacaggauuguaaa

SEQ ID NO: 1719005 - RNA, 19 nt, Artificial Sequence
  Description of Artificial Sequence: Synthetic oligonucleotide
  Sense strand starting at position 3735 of SEQ ID NO: 1562060
ggagaagaauccgcuucca

SEQ ID NO: 1719006 - RNA, 19 nt, Artificial Sequence
  Description of Artificial Sequence: Synthetic oligonucleotide
  Antisense strand to SEQ ID NO: 1719005
uggaagcggauucuucucc

SEQ ID NO: 1719007 - RNA, 19 nt, Artificial Sequence
  Description of Artificial Sequence: Synthetic oligonucleotide
  Sense strand starting at position 3743 of SEQ ID NO: 1562060
auccgcuuccaagaucauu

SEQ ID NO: 1719008 - RNA, 19 nt, Artificial Sequence
  Description of Artificial Sequence: Synthetic oligonucleotide
  Antisense strand to SEQ ID NO: 1719007
aaugaucuuggaagcggau

SEQ ID NO: 1719009 - RNA, 19 nt, Artificial Sequence
  Description of Artificial Sequence: Synthetic oligonucleotide
  Sense strand starting at position 3821 of SEQ ID NO: 1562060
cuggcugucagccagaagu

SEQ ID NO: 1719010 - RNA, 19 nt, Artificial Sequence
  Description of Artificial Sequence: Synthetic oligonucleotide
  Antisense strand to SEQ ID NO: 1719009
acuucuggcugacagccag

SEQ ID NO: 1719011 - RNA, 19 nt, Artificial Sequence
  Description of Artificial Sequence: Synthetic oligonucleotide
  Sense strand starting at position 3936 of SEQ ID NO: 1562060
guagaaucuuucuaccuug

SEQ ID NO: 1719012 - RNA, 19 nt, Artificial Sequence
  Description of Artificial Sequence: Synthetic oligonucleotide
  Antisense strand to SEQ ID NO: 1719011
caagguagaaagauucuac

SEQ ID NO: 1719013 - RNA, 19 nt, Artificial Sequence
  Description of Artificial Sequence: Synthetic oligonucleotide
  Sense strand starting at position 3958 of SEQ ID NO: 1562060
ucugcuuacuggccugaga

SEQ ID NO: 1719014 - RNA, 19 nt, Artificial Sequence
  Description of Artificial Sequence: Synthetic oligonucleotide
  Antisense strand to SEQ ID NO: 1719013
ucucaggccaguaagcaga

SEQ ID NO: 1719015 - RNA, 19 nt, Artificial Sequence
  Description of Artificial Sequence: Synthetic oligonucleotide
  Sense strand starting at position 3960 of SEQ ID NO: 1562060
ugcuuacuggccugagaga

SEQ ID NO: 1719016 - RNA, 19 nt, Artificial Sequence
  Description of Artificial Sequence: Synthetic oligonucleotide
  Antisense strand to SEQ ID NO: 1719015
ucucucaggccaguaagca

SEQ ID NO: 1719017 - RNA, 19 nt, Artificial Sequence
  Description of Artificial Sequence: Synthetic oligonucleotide
  Sense strand starting at position 3961 of SEQ ID NO: 1562060
gcuuacuggccugagagau

SEQ ID NO: 1719018 - RNA, 19 nt, Artificial Sequence
  Description of Artificial Sequence: Synthetic oligonucleotide
  Antisense strand to SEQ ID NO: 1719017
aucucucaggccaguaagc

SEQ ID NO: 1719019 - RNA, 19 nt, Artificial Sequence
  Description of Artificial Sequence: Synthetic oligonucleotide
  Sense strand starting at position 91 of SEQ ID NO: 1562061
ggacauugagggcgauauu

SEQ ID NO: 1719020 - RNA, 19 nt, Artificial Sequence
  Description of Artificial Sequence: Synthetic oligonucleotide
  Antisense strand to SEQ ID NO: 1719019
aauaucgcccucaaugucc

SEQ ID NO: 1719021 - RNA, 19 nt, Artificial Sequence
  Description of Artificial Sequence: Synthetic oligonucleotide
  Sense strand starting at position 145 of SEQ ID NO: 1562061
auagcugagaagugcauau

SEQ ID NO: 1719022 - RNA, 19 nt, Artificial Sequence
  Description of Artificial Sequence: Synthetic oligonucleotide
  Antisense strand to SEQ ID NO: 1719021
auaugcacuucucagcuau

SEQ ID NO: 1719023 - RNA, 19 nt, Artificial Sequence
  Description of Artificial Sequence: Synthetic oligonucleotide
  Sense strand starting at position 147 of SEQ ID NO: 1562061
agcugagaagugcauauca

SEQ ID NO: 1719024 - RNA, 19 nt, Artificial Sequence
  Description of Artificial Sequence: Synthetic oligonucleotide
  Antisense strand to SEQ ID NO: 1719023
ugauaugcacuucucagcu

SEQ ID NO: 1719025 - RNA, 19 nt, Artificial Sequence
  Description of Artificial Sequence: Synthetic oligonucleotide
  Sense strand starting at position 149 of SEQ ID NO: 1562061
cugagaagugcauaucagu

SEQ ID NO: 1719026 - RNA, 19 nt, Artificial Sequence
  Description of Artificial Sequence: Synthetic oligonucleotide
  Antisense strand to SEQ ID NO: 1719025
acugauaugcacuucucag

SEQ ID NO: 1719027 - RNA, 19 nt, Artificial Sequence
  Description of Artificial Sequence: Synthetic oligonucleotide
  Sense strand starting at position 159 of SEQ ID NO: 1562061
cauaucagugagugagcaa

SEQ ID NO: 1719028 - RNA, 19 nt, Artificial Sequence
  Description of Artificial Sequence: Synthetic oligonucleotide
  Antisense strand to SEQ ID NO: 1719027
uugcucacucacugauaug

SEQ ID NO: 1719029 - RNA, 19 nt, Artificial Sequence
  Description of Artificial Sequence: Synthetic oligonucleotide
  Sense strand starting at position 166 of SEQ ID NO: 1562061
gugagugagcaaggaucuu

SEQ ID NO: 1719030 - RNA, 19 nt, Artificial Sequence
  Description of Artificial Sequence: Synthetic oligonucleotide
  Antisense strand to SEQ ID NO: 1719029
aagauccuugcucacucac

SEQ ID NO: 1719031 - RNA, 19 nt, Artificial Sequence
  Description of Artificial Sequence: Synthetic oligonucleotide
  Sense strand starting at position 172 of SEQ ID NO: 1562061
gagcaaggaucuuugcaca

SEQ ID NO: 1719032 - RNA, 19 nt, Artificial Sequence
  Description of Artificial Sequence: Synthetic oligonucleotide
  Antisense strand to SEQ ID NO: 1719031
ugugcaaagauccuugcuc

SEQ ID NO: 1719033 - RNA, 19 nt, Artificial Sequence
  Description of Artificial Sequence: Synthetic oligonucleotide
  Sense strand starting at position 177 of SEQ ID NO: 1562061
aggaucuuugcacaaaggu

SEQ ID NO: 1719034 - RNA, 19 nt, Artificial Sequence
  Description of Artificial Sequence: Synthetic oligonucleotide
  Antisense strand to SEQ ID NO: 1719033
accuuugugcaaagauccu

SEQ ID NO: 1719035 - RNA, 19 nt, Artificial Sequence
  Description of Artificial Sequence: Synthetic oligonucleotide
  Sense strand starting at position 245 of SEQ ID NO: 1562061
ugaugaucugugcacggaa

SEQ ID NO: 1719036 - RNA, 19 nt, Artificial Sequence
  Description of Artificial Sequence: Synthetic oligonucleotide
  Antisense strand to SEQ ID NO: 1719035
uuccgugcacagaucauca

SEQ ID NO: 1719037 - RNA, 19 nt, Artificial Sequence
  Description of Artificial Sequence: Synthetic oligonucleotide
  Sense strand starting at position 397 of SEQ ID NO: 1562061
gugauccugcugggaugaa

SEQ ID NO: 1719038 - RNA, 19 nt, Artificial Sequence
  Description of Artificial Sequence: Synthetic oligonucleotide
  Antisense strand to SEQ ID NO: 1719037
uucaucccagcaggaucac

SEQ ID NO: 1719039 - RNA, 19 nt, Artificial Sequence
  Description of Artificial Sequence: Synthetic oligonucleotide
  Sense strand starting at position 417 of SEQ ID NO: 1562061
gccaauguuccagaaaccu

SEQ ID NO: 1719040 - RNA, 19 nt, Artificial Sequence
  Description of Artificial Sequence: Synthetic oligonucleotide
  Antisense strand to SEQ ID NO: 1719039
agguuucuggaacauuggc

SEQ ID NO: 1719041 - RNA, 19 nt, Artificial Sequence
  Description of Artificial Sequence: Synthetic oligonucleotide
  Sense strand starting at position 533 of SEQ ID NO: 1562061
aagaaaucacagugccaug

SEQ ID NO: 1719042 - RNA, 19 nt, Artificial Sequence
  Description of Artificial Sequence: Synthetic oligonucleotide
  Antisense strand to SEQ ID NO: 1719041
cauggcacugugauuucuu

SEQ ID NO: 1719043 - RNA, 19 nt, Artificial Sequence
  Description of Artificial Sequence: Synthetic oligonucleotide
  Sense strand starting at position 660 of SEQ ID NO: 1562061
aggccuaaugucuggaauu

SEQ ID NO: 1719044 - RNA, 19 nt, Artificial Sequence
  Description of Artificial Sequence: Synthetic oligonucleotide
  Antisense strand to SEQ ID NO: 1719043
aauuccagacauuaggccu

SEQ ID NO: 1719045 - RNA, 19 nt, Artificial Sequence
  Description of Artificial Sequence: Synthetic oligonucleotide
  Sense strand starting at position 662 of SEQ ID NO: 1562061
gccuaaugucuggaauucu

SEQ ID NO: 1719046 - RNA, 19 nt, Artificial Sequence
  Description of Artificial Sequence: Synthetic oligonucleotide
  Antisense strand to SEQ ID NO: 1719045
agaauuccagacauuaggc

SEQ ID NO: 1719047 - RNA, 19 nt, Artificial Sequence
  Description of Artificial Sequence: Synthetic oligonucleotide
  Sense strand starting at position 856 of SEQ ID NO: 1562061
acagcauuggagcaguuua

SEQ ID NO: 1719048 - RNA, 19 nt, Artificial Sequence
  Description of Artificial Sequence: Synthetic oligonucleotide
  Antisense strand to SEQ ID NO: 1719047
uaaacugcuccaaugcugu

SEQ ID NO: 1719049 - RNA, 19 nt, Artificial Sequence
  Description of Artificial Sequence: Synthetic oligonucleotide
  Sense strand starting at position 876 of SEQ ID NO: 1562061
guuccagaaauguacuagu

SEQ ID NO: 1719050 - RNA, 19 nt, Artificial Sequence
  Description of Artificial Sequence: Synthetic oligonucleotide
  Antisense strand to SEQ ID NO: 1719049
acuaguacauuucuggaac

SEQ ID NO: 1719051 - RNA, 19 nt, Artificial Sequence
  Description of Artificial Sequence: Synthetic oligonucleotide
  Sense strand starting at position 968 of SEQ ID NO: 1562061
uugaauucugcucagggca

SEQ ID NO: 1719052 - RNA, 19 nt, Artificial Sequence
  Description of Artificial Sequence: Synthetic oligonucleotide
  Antisense strand to SEQ ID NO: 1719051
ugcccugagcagaauucaa

SEQ ID NO: 1719053 - RNA, 19 nt, Artificial Sequence
  Description of Artificial Sequence: Synthetic oligonucleotide
  Sense strand starting at position 1095 of SEQ ID NO: 1562061
agguacaucccaugggauu

SEQ ID NO: 1719054 - RNA, 19 nt, Artificial Sequence
  Description of Artificial Sequence: Synthetic oligonucleotide
  Antisense strand to SEQ ID NO: 1719053
aaucccaugggauguaccu

SEQ ID NO: 1719055 - RNA, 19 nt, Artificial Sequence
  Description of Artificial Sequence: Synthetic oligonucleotide
  Sense strand starting at position 1096 of SEQ ID NO: 1562061
gguacaucccaugggauua

SEQ ID NO: 1719056 - RNA, 19 nt, Artificial Sequence
  Description of Artificial Sequence: Synthetic oligonucleotide
  Antisense strand to SEQ ID NO: 1719055
uaaucccaugggauguacc

SEQ ID NO: 1719057 - RNA, 19 nt, Artificial Sequence
  Description of Artificial Sequence: Synthetic oligonucleotide
  Sense strand starting at position 1177 of SEQ ID NO: 1562061
uaaaguccuuggccagaaa

SEQ ID NO: 1719058 - RNA, 19 nt, Artificial Sequence
  Description of Artificial Sequence: Synthetic oligonucleotide
  Antisense strand to SEQ ID NO: 1719057
uuucuggccaaggacuuua

SEQ ID NO: 1719059 - RNA, 19 nt, Artificial Sequence
  Description of Artificial Sequence: Synthetic oligonucleotide
  Sense strand starting at position 1514 of SEQ ID NO: 1562061
agaguucugguuuaagauc

SEQ ID NO: 1719060 - RNA, 19 nt, Artificial Sequence
  Description of Artificial Sequence: Synthetic oligonucleotide
  Antisense strand to SEQ ID NO: 1719059
gaucuuaaaccagaacucu

SEQ ID NO: 1719061 - RNA, 19 nt, Artificial Sequence
  Description of Artificial Sequence: Synthetic oligonucleotide
  Sense strand starting at position 1522 of SEQ ID NO: 1562061
gguuuaagaucuuucugua

SEQ ID NO: 1719062 - RNA, 19 nt, Artificial Sequence
  Description of Artificial Sequence: Synthetic oligonucleotide
  Antisense strand to SEQ ID NO: 1719061
uacagaaagaucuuaaacc

SEQ ID NO: 1719063 - RNA, 19 nt, Artificial Sequence
  Description of Artificial Sequence: Synthetic oligonucleotide
  Sense strand starting at position 1526 of SEQ ID NO: 1562061
uaagaucuuucuguaguag

SEQ ID NO: 1719064 - RNA, 19 nt, Artificial Sequence
  Description of Artificial Sequence: Synthetic oligonucleotide
  Antisense strand to SEQ ID NO: 1719063
cuacuacagaaagaucuua

SEQ ID NO: 1719065 - RNA, 19 nt, Artificial Sequence
  Description of Artificial Sequence: Synthetic oligonucleotide
  Sense strand starting at position 2047 of SEQ ID NO: 1562061
gcaggaagugacuauuccu

SEQ ID NO: 1719066 - RNA, 19 nt, Artificial Sequence
  Description of Artificial Sequence: Synthetic oligonucleotide
  Antisense strand to SEQ ID NO: 1719065
aggaauagucacuuccugc

SEQ ID NO: 1719067 - RNA, 19 nt, Artificial Sequence
  Description of Artificial Sequence: Synthetic oligonucleotide
  Sense strand starting at position 2050 of SEQ ID NO: 1562061
ggaagugacuauuccucau

SEQ ID NO: 1719068 - RNA, 19 nt, Artificial Sequence
  Description of Artificial Sequence: Synthetic oligonucleotide
  Antisense strand to SEQ ID NO: 1719067
augaggaauagucacuucc

SEQ ID NO: 1719069 - RNA, 19 nt, Artificial Sequence
  Description of Artificial Sequence: Synthetic oligonucleotide
  Sense strand starting at position 2053 of SEQ ID NO: 1562061
agugacuauuccucauucu

SEQ ID NO: 1719070 - RNA, 19 nt, Artificial Sequence
  Description of Artificial Sequence: Synthetic oligonucleotide
  Antisense strand to SEQ ID NO: 1719069
agaaugaggaauagucacu

SEQ ID NO: 1719071 - RNA, 19 nt, Artificial Sequence
  Description of Artificial Sequence: Synthetic oligonucleotide
  Sense strand starting at position 2054 of SEQ ID NO: 1562061
gugacuauuccucauucuc

SEQ ID NO: 1719072 - RNA, 19 nt, Artificial Sequence
  Description of Artificial Sequence: Synthetic oligonucleotide
  Antisense strand to SEQ ID NO: 1719071
gagaaugaggaauagucac

SEQ ID NO: 1719073 - RNA, 19 nt, Artificial Sequence
  Description of Artificial Sequence: Synthetic oligonucleotide
  Sense strand starting at position 2385 of SEQ ID NO: 1562061
gguugagucacuggcauuu

SEQ ID NO: 1719074 - RNA, 19 nt, Artificial Sequence
  Description of Artificial Sequence: Synthetic oligonucleotide
  Antisense strand to SEQ ID NO: 1719073
aaaugccagugacucaacc

SEQ ID NO: 1719075 - RNA, 19 nt, Artificial Sequence
  Description of Artificial Sequence: Synthetic oligonucleotide
  Sense strand starting at position 2430 of SEQ ID NO: 1562061
aggccagaucuuggcaaga

SEQ ID NO: 1719076 - RNA, 19 nt, Artificial Sequence
  Description of Artificial Sequence: Synthetic oligonucleotide
  Antisense strand to SEQ ID NO: 1719075
ucuugccaagaucuggccu

SEQ ID NO: 1719077 - RNA, 19 nt, Artificial Sequence
  Description of Artificial Sequence: Synthetic oligonucleotide
  Sense strand starting at position 2784 of SEQ ID NO: 1562061
acaaucuccugucuucgaa

SEQ ID NO: 1719078 - RNA, 19 nt, Artificial Sequence
  Description of Artificial Sequence: Synthetic oligonucleotide
  Antisense strand to SEQ ID NO: 1719077
uucgaagacaggagauugu

SEQ ID NO: 1719079 - RNA, 19 nt, Artificial Sequence
  Description of Artificial Sequence: Synthetic oligonucleotide
  Sense strand starting at position 3366 of SEQ ID NO: 1562061
ggauuccacuacucacagu

SEQ ID NO: 1719080 - RNA, 19 nt, Artificial Sequence
  Description of Artificial Sequence: Synthetic oligonucleotide
  Antisense strand to SEQ ID NO: 1719079
acugugaguaguggaaucc

SEQ ID NO: 1719081 - RNA, 19 nt, Artificial Sequence
  Description of Artificial Sequence: Synthetic oligonucleotide
  Sense strand starting at position 3396 of SEQ ID NO: 1562061
agacacuuaguguacucaa

SEQ ID NO: 1719082 - RNA, 19 nt, Artificial Sequence
  Description of Artificial Sequence: Synthetic oligonucleotide
  Antisense strand to SEQ ID NO: 1719081
uugaguacacuaagugucu

SEQ ID NO: 1719083 - RNA, 19 nt, Artificial Sequence
  Description of Artificial Sequence: Synthetic oligonucleotide
  Sense strand starting at position 3486 of SEQ ID NO: 1562061
cuuucuagccguuaaauga

SEQ ID NO: 1719084 - RNA, 19 nt, Artificial Sequence
  Description of Artificial Sequence: Synthetic oligonucleotide
  Antisense strand to SEQ ID NO: 1719083
ucauuuaacggcuagaaag

SEQ ID NO: 1719085 - RNA, 19 nt, Artificial Sequence
  Description of Artificial Sequence: Synthetic oligonucleotide
  Sense strand starting at position 3536 of SEQ ID NO: 1562061
acaagaccucguuauugua

SEQ ID NO: 1719086 - RNA, 19 nt, Artificial Sequence
  Description of Artificial Sequence: Synthetic oligonucleotide
  Antisense strand to SEQ ID NO: 1719085
uacaauaacgaggucuugu

SEQ ID NO: 1719087 - RNA, 19 nt, Artificial Sequence
  Description of Artificial Sequence: Synthetic oligonucleotide
  Sense strand starting at position 3765 of SEQ ID NO: 1562061
cagggaaguucucugaaua

SEQ ID NO: 1719088 - RNA, 19 nt, Artificial Sequence
  Description of Artificial Sequence: Synthetic oligonucleotide
  Antisense strand to SEQ ID NO: 1719087
uauucagagaacuucccug

SEQ ID NO: 1719089 - RNA, 19 nt, Artificial Sequence
  Description of Artificial Sequence: Synthetic oligonucleotide
  Sense strand starting at position 3766 of SEQ ID NO: 1562061
agggaaguucucugaauau

SEQ ID NO: 1719090 - RNA, 19 nt, Artificial Sequence
  Description of Artificial Sequence: Synthetic oligonucleotide
  Antisense strand to SEQ ID NO: 1719089
auauucagagaacuucccu

SEQ ID NO: 1719091 - RNA, 19 nt, Artificial Sequence
  Description of Artificial Sequence: Synthetic oligonucleotide
  Sense strand starting at position 3830 of SEQ ID NO: 1562061
gacaaauguuauuccagga

SEQ ID NO: 1719092 - RNA, 19 nt, Artificial Sequence
  Description of Artificial Sequence: Synthetic oligonucleotide
  Antisense strand to SEQ ID NO: 1719091
uccuggaauaacauuuguc

SEQ ID NO: 1719093 - RNA, 19 nt, Artificial Sequence
  Description of Artificial Sequence: Synthetic oligonucleotide
  Sense strand starting at position 3834 of SEQ ID NO: 1562061
aauguuauuccaggaucag

SEQ ID NO: 1719094 - RNA, 19 nt, Artificial Sequence
  Description of Artificial Sequence: Synthetic oligonucleotide
  Antisense strand to SEQ ID NO: 1719093
cugauccuggaauaacauu

SEQ ID NO: 1719095 - RNA, 19 nt, Artificial Sequence
  Description of Artificial Sequence: Synthetic oligonucleotide
  Sense strand starting at position 3861 of SEQ ID NO: 1562061
auucgaacuaugugaauug

SEQ ID NO: 1719096 - RNA, 19 nt, Artificial Sequence
  Description of Artificial Sequence: Synthetic oligonucleotide
  Antisense strand to SEQ ID NO: 1719095
caauucacauaguucgaau

SEQ ID NO: 1719097 - RNA, 19 nt, Artificial Sequence
  Description of Artificial Sequence: Synthetic oligonucleotide
  Sense strand starting at position 3901 of SEQ ID NO: 1562061
uggaucacuguuugacaca

SEQ ID NO: 1719098 - RNA, 19 nt, Artificial Sequence
  Description of Artificial Sequence: Synthetic oligonucleotide
  Antisense strand to SEQ ID NO: 1719097
ugugucaaacagugaucca

SEQ ID NO: 1719099 - RNA, 19 nt, Artificial Sequence
  Description of Artificial Sequence: Synthetic oligonucleotide
  Sense strand starting at position 103 of SEQ ID NO: 1562062
ccaucauaaggugguaauu

SEQ ID NO: 1719100 - RNA, 19 nt, Artificial Sequence
  Description of Artificial Sequence: Synthetic oligonucleotide
  Antisense strand to SEQ ID NO: 1719099
aauuaccaccuuaugaugg

SEQ ID NO: 1719101 - RNA, 19 nt, Artificial Sequence
  Description of Artificial Sequence: Synthetic oligonucleotide
  Sense strand starting at position 116 of SEQ ID NO: 1562062
guaauuauggacuagccaa

SEQ ID NO: 1719102 - RNA, 19 nt, Artificial Sequence
  Description of Artificial Sequence: Synthetic oligonucleotide
  Antisense strand to SEQ ID NO: 1719101
uuggcuaguccauaauuac

SEQ ID NO: 1719103 - RNA, 19 nt, Artificial Sequence
  Description of Artificial Sequence: Synthetic oligonucleotide
  Sense strand starting at position 331 of SEQ ID NO: 1562062
ggagguuauacagguuuga

SEQ ID NO: 1719104 - RNA, 19 nt, Artificial Sequence
  Description of Artificial Sequence: Synthetic oligonucleotide
  Antisense strand to SEQ ID NO: 1719103
ucaaaccuguauaaccucc

SEQ ID NO: 1719105 - RNA, 19 nt, Artificial Sequence
  Description of Artificial Sequence: Synthetic oligonucleotide
  Sense strand starting at position 335 of SEQ ID NO: 1562062
guuauacagguuugaucaa

SEQ ID NO: 1719106 - RNA, 19 nt, Artificial Sequence
  Description of Artificial Sequence: Synthetic oligonucleotide
  Antisense strand to SEQ ID NO: 1719105
uugaucaaaccuguauaac

SEQ ID NO: 1719107 - RNA, 19 nt, Artificial Sequence
  Description of Artificial Sequence: Synthetic oligonucleotide
  Sense strand starting at position 359 of SEQ ID NO: 1562062
aguaaaucauuugagaacu

SEQ ID NO: 1719108 - RNA, 19 nt, Artificial Sequence
  Description of Artificial Sequence: Synthetic oligonucleotide
  Antisense strand to SEQ ID NO: 1719107
aguucucaaaugauuuacu

SEQ ID NO: 1719109 - RNA, 19 nt, Artificial Sequence
  Description of Artificial Sequence: Synthetic oligonucleotide
  Sense strand starting at position 377 of SEQ ID NO: 1562062
ugagacuacuuuguccaca

SEQ ID NO: 1719110 - RNA, 19 nt, Artificial Sequence
  Description of Artificial Sequence: Synthetic oligonucleotide
  Antisense strand to SEQ ID NO: 1719109
uguggacaaaguagucuca

SEQ ID NO: 1719111 - RNA, 19 nt, Artificial Sequence
  Description of Artificial Sequence: Synthetic oligonucleotide
  Sense strand starting at position 445 of SEQ ID NO: 1562062
guaacucauucuuccagga

SEQ ID NO: 1719112 - RNA, 19 nt, Artificial Sequence
  Description of Artificial Sequence: Synthetic oligonucleotide
  Antisense strand to SEQ ID NO: 1719111
uccuggaagaaugaguuac

SEQ ID NO: 1719113 - RNA, 19 nt, Artificial Sequence
  Description of Artificial Sequence: Synthetic oligonucleotide
  Sense strand starting at position 460 of SEQ ID NO: 1562062
aggaucuucuugcccagaa

SEQ ID NO: 1719114 - RNA, 19 nt, Artificial Sequence
  Description of Artificial Sequence: Synthetic oligonucleotide
  Antisense strand to SEQ ID NO: 1719113
uucugggcaagaagauccu

SEQ ID NO: 1719115 - RNA, 19 nt, Artificial Sequence
  Description of Artificial Sequence: Synthetic oligonucleotide
  Sense strand starting at position 461 of SEQ ID NO: 1562062
ggaucuucuugcccagaaa

SEQ ID NO: 1719116 - RNA, 19 nt, Artificial Sequence
  Description of Artificial Sequence: Synthetic oligonucleotide
  Antisense strand to SEQ ID NO: 1719115
uuucugggcaagaagaucc

SEQ ID NO: 1719117 - RNA, 19 nt, Artificial Sequence
  Description of Artificial Sequence: Synthetic oligonucleotide
  Sense strand starting at position 519 of SEQ ID NO: 1562062
gcaggaaaugucuacacac

SEQ ID NO: 1719118 - RNA, 19 nt, Artificial Sequence
  Description of Artificial Sequence: Synthetic oligonucleotide
  Antisense strand to SEQ ID NO: 1719117
guguguagacauuuccugc

SEQ ID NO: 1719119 - RNA, 19 nt, Artificial Sequence
  Description of Artificial Sequence: Synthetic oligonucleotide
  Sense strand starting at position 594 of SEQ ID NO: 1562062
aggguuuacuugucaagag

SEQ ID NO: 1719120 - RNA, 19 nt, Artificial Sequence
  Description of Artificial Sequence: Synthetic oligonucleotide
  Antisense strand to SEQ ID NO: 1719119
cucuugacaaguaaacccu

SEQ ID NO: 1719121 - RNA, 19 nt, Artificial Sequence
  Description of Artificial Sequence: Synthetic oligonucleotide
  Sense strand starting at position 661 of SEQ ID NO: 1562062
uggcauagacgucacugaa

SEQ ID NO: 1719122 - RNA, 19 nt, Artificial Sequence
  Description of Artificial Sequence: Synthetic oligonucleotide
  Antisense strand to SEQ ID NO: 1719121
uucagugacgucuaugcca

SEQ ID NO: 1719123 - RNA, 19 nt, Artificial Sequence
  Description of Artificial Sequence: Synthetic oligonucleotide
  Sense strand starting at position 664 of SEQ ID NO: 1562062
cauagacgucacugaaauc

SEQ ID NO: 1719124 - RNA, 19 nt, Artificial Sequence
  Description of Artificial Sequence: Synthetic oligonucleotide
  Antisense strand to SEQ ID NO: 1719123
gauuucagugacgucuaug

SEQ ID NO: 1719125 - RNA, 19 nt, Artificial Sequence
  Description of Artificial Sequence: Synthetic oligonucleotide
  Sense strand starting at position 972 of SEQ ID NO: 1562062
acccauaaagguugguuaa

SEQ ID NO: 1719126 - RNA, 19 nt, Artificial Sequence
  Description of Artificial Sequence: Synthetic oligonucleotide
  Antisense strand to SEQ ID NO: 1719125
uuaaccaaccuuuaugggu

SEQ ID NO: 1719127 - RNA, 19 nt, Artificial Sequence
  Description of Artificial Sequence: Synthetic oligonucleotide
  Sense strand starting at position 973 of SEQ ID NO: 1562062
cccauaaagguugguuaau

SEQ ID NO: 1719128 - RNA, 19 nt, Artificial Sequence
  Description of Artificial Sequence: Synthetic oligonucleotide
  Antisense strand to SEQ ID NO: 1719127
auuaaccaaccuuuauggg

SEQ ID NO: 1719129 - RNA, 19 nt, Artificial Sequence
  Description of Artificial Sequence: Synthetic oligonucleotide
  Sense strand starting at position 974 of SEQ ID NO: 1562062
ccauaaagguugguuaauu

SEQ ID NO: 1719130 - RNA, 19 nt, Artificial Sequence
  Description of Artificial Sequence: Synthetic oligonucleotide
  Antisense strand to SEQ ID NO: 1719129
aauuaaccaaccuuuaugg

SEQ ID NO: 1719131 - RNA, 19 nt, Artificial Sequence
  Description of Artificial Sequence: Synthetic oligonucleotide
  Sense strand starting at position 1006 of SEQ ID NO: 1562062
acuuguccucgguaauaaa

SEQ ID NO: 1719132 - RNA, 19 nt, Artificial Sequence
  Description of Artificial Sequence: Synthetic oligonucleotide
  Antisense strand to SEQ ID NO: 1719131
uuuauuaccgaggacaagu

SEQ ID NO: 1719133 - RNA, 19 nt, Artificial Sequence
  Description of Artificial Sequence: Synthetic oligonucleotide
  Sense strand starting at position 1169 of SEQ ID NO: 1562062
uuaauucgagggugaauga

SEQ ID NO: 1719134 - RNA, 19 nt, Artificial Sequence
  Description of Artificial Sequence: Synthetic oligonucleotide
  Antisense strand to SEQ ID NO: 1719133
ucauucacccucgaauuaa

SEQ ID NO: 1719135 - RNA, 19 nt, Artificial Sequence
  Description of Artificial Sequence: Synthetic oligonucleotide
  Sense strand starting at position 1216 of SEQ ID NO: 1562062
gggaauugauucccaagug

SEQ ID NO: 1719136 - RNA, 19 nt, Artificial Sequence
  Description of Artificial Sequence: Synthetic oligonucleotide
  Antisense strand to SEQ ID NO: 1719135
cacuugggaaucaauuccc

SEQ ID NO: 1719137 - RNA, 19 nt, Artificial Sequence
  Description of Artificial Sequence: Synthetic oligonucleotide
  Sense strand starting at position 1697 of SEQ ID NO: 1562062
ccgaguccugugccuguau

SEQ ID NO: 1719138 - RNA, 19 nt, Artificial Sequence
  Description of Artificial Sequence: Synthetic oligonucleotide
  Antisense strand to SEQ ID NO: 1719137
auacaggcacaggacucgg

SEQ ID NO: 1719139 - RNA, 19 nt, Artificial Sequence
  Description of Artificial Sequence: Synthetic oligonucleotide
  Sense strand starting at position 2039 of SEQ ID NO: 1562062
guaggaaauuccuuucuaa

SEQ ID NO: 1719140 - RNA, 19 nt, Artificial Sequence
  Description of Artificial Sequence: Synthetic oligonucleotide
  Antisense strand to SEQ ID NO: 1719139
uuagaaaggaauuuccuac

SEQ ID NO: 1719141 - RNA, 19 nt, Artificial Sequence
  Description of Artificial Sequence: Synthetic oligonucleotide
  Sense strand starting at position 2232 of SEQ ID NO: 1562062
guagaagguccuugggacu

SEQ ID NO: 1719142 - RNA, 19 nt, Artificial Sequence
  Description of Artificial Sequence: Synthetic oligonucleotide
  Antisense strand to SEQ ID NO: 1719141
agucccaaggaccuucuac

SEQ ID NO: 1719143 - RNA, 19 nt, Artificial Sequence
  Description of Artificial Sequence: Synthetic oligonucleotide
  Sense strand starting at position 2349 of SEQ ID NO: 1562062
gauugaauguggcugauca

SEQ ID NO: 1719144 - RNA, 19 nt, Artificial Sequence
  Description of Artificial Sequence: Synthetic oligonucleotide
  Antisense strand to SEQ ID NO: 1719143
ugaucagccacauucaauc

SEQ ID NO: 1719145 - RNA, 19 nt, Artificial Sequence
  Description of Artificial Sequence: Synthetic oligonucleotide
  Sense strand starting at position 2351 of SEQ ID NO: 1562062
uugaauguggcugaucaca

SEQ ID NO: 1719146 - RNA, 19 nt, Artificial Sequence
  Description of Artificial Sequence: Synthetic oligonucleotide
  Antisense strand to SEQ ID NO: 1719145
ugugaucagccacauucaa

SEQ ID NO: 1719147 - RNA, 19 nt, Artificial Sequence
  Description of Artificial Sequence: Synthetic oligonucleotide
  Sense strand starting at position 2353 of SEQ ID NO: 1562062
gaauguggcugaucacaga

SEQ ID NO: 1719148 - RNA, 19 nt, Artificial Sequence
  Description of Artificial Sequence: Synthetic oligonucleotide
  Antisense strand to SEQ ID NO: 1719147
ucugugaucagccacauuc

SEQ ID NO: 1719149 - RNA, 19 nt, Artificial Sequence
  Description of Artificial Sequence: Synthetic oligonucleotide
  Sense strand starting at position 2384 of SEQ ID NO: 1562062
gaaggagguucuguacauc

SEQ ID NO: 1719150 - RNA, 19 nt, Artificial Sequence
  Description of Artificial Sequence: Synthetic oligonucleotide
  Antisense strand to SEQ ID NO: 1719149
gauguacagaaccuccuuc

SEQ ID NO: 1719151 - RNA, 19 nt, Artificial Sequence
  Description of Artificial Sequence: Synthetic oligonucleotide
  Sense strand starting at position 2394 of SEQ ID NO: 1562062
cuguacaucccaggaaauc

SEQ ID NO: 1719152 - RNA, 19 nt, Artificial Sequence
  Description of Artificial Sequence: Synthetic oligonucleotide
  Antisense strand to SEQ ID NO: 1719151
gauuuccugggauguacag

SEQ ID NO: 1719153 - RNA, 19 nt, Artificial Sequence
  Description of Artificial Sequence: Synthetic oligonucleotide
  Sense strand starting at position 2544 of SEQ ID NO: 1562062
acuguuuacagggaucagu

SEQ ID NO: 1719154 - RNA, 19 nt, Artificial Sequence
  Description of Artificial Sequence: Synthetic oligonucleotide
  Antisense strand to SEQ ID NO: 1719153
acugaucccuguaaacagu

SEQ ID NO: 1719155 - RNA, 19 nt, Artificial Sequence
  Description of Artificial Sequence: Synthetic oligonucleotide
  Sense strand starting at position 2555 of SEQ ID NO: 1562062
ggaucaguucacggaagag

SEQ ID NO: 1719156 - RNA, 19 nt, Artificial Sequence
  Description of Artificial Sequence: Synthetic oligonucleotide
  Antisense strand to SEQ ID NO: 1719155
cucuuccgugaacugaucc

SEQ ID NO: 1719157 - RNA, 19 nt, Artificial Sequence
  Description of Artificial Sequence: Synthetic oligonucleotide
  Sense strand starting at position 2860 of SEQ ID NO: 1562062
gugacugucccaggaucaa

SEQ ID NO: 1719158 - RNA, 19 nt, Artificial Sequence
  Description of Artificial Sequence: Synthetic oligonucleotide
  Antisense strand to SEQ ID NO: 1719157
uugauccugggacagucac

SEQ ID NO: 1719159 - RNA, 19 nt, Artificial Sequence
  Description of Artificial Sequence: Synthetic oligonucleotide
  Sense strand starting at position 3136 of SEQ ID NO: 1562062
ggacauugagggcgauauu

SEQ ID NO: 1719160 - RNA, 19 nt, Artificial Sequence
  Description of Artificial Sequence: Synthetic oligonucleotide
  Antisense strand to SEQ ID NO: 1719159
aauaucgcccucaaugucc

SEQ ID NO: 1719161 - RNA, 19 nt, Artificial Sequence
  Description of Artificial Sequence: Synthetic oligonucleotide
  Sense strand starting at position 3192 of SEQ ID NO: 1562062
agcugagaagugcauauca

SEQ ID NO: 1719162 - RNA, 19 nt, Artificial Sequence
  Description of Artificial Sequence: Synthetic oligonucleotide
  Antisense strand to SEQ ID NO: 1719161
ugauaugcacuucucagcu

SEQ ID NO: 1719163 - RNA, 19 nt, Artificial Sequence
  Description of Artificial Sequence: Synthetic oligonucleotide
  Sense strand starting at position 3194 of SEQ ID NO: 1562062
cugagaagugcauaucagu

SEQ ID NO: 1719164 - RNA, 19 nt, Artificial Sequence
  Description of Artificial Sequence: Synthetic oligonucleotide
  Antisense strand to SEQ ID NO: 1719163
acugauaugcacuucucag

SEQ ID NO: 1719165 - RNA, 19 nt, Artificial Sequence
  Description of Artificial Sequence: Synthetic oligonucleotide
  Sense strand starting at position 3222 of SEQ ID NO: 1562062
aggaucuuugcacaaaggu

SEQ ID NO: 1719166 - RNA, 19 nt, Artificial Sequence
  Description of Artificial Sequence: Synthetic oligonucleotide
  Antisense strand to SEQ ID NO: 1719165
accuuugugcaaagauccu

SEQ ID NO: 1719167 - RNA, 19 nt, Artificial Sequence
  Description of Artificial Sequence: Synthetic oligonucleotide
  Sense strand starting at position 3290 of SEQ ID NO: 1562062
ugaugaucugugcacggaa

SEQ ID NO: 1719168 - RNA, 19 nt, Artificial Sequence
  Description of Artificial Sequence: Synthetic oligonucleotide
  Antisense strand to SEQ ID NO: 1719167
uuccgugcacagaucauca

SEQ ID NO: 1719169 - RNA, 19 nt, Artificial Sequence
  Description of Artificial Sequence: Synthetic oligonucleotide
  Sense strand starting at position 3462 of SEQ ID NO: 1562062
gccaauguuccagaaaccu

SEQ ID NO: 1719170 - RNA, 19 nt, Artificial Sequence
  Description of Artificial Sequence: Synthetic oligonucleotide
  Antisense strand to SEQ ID NO: 1719169
agguuucuggaacauuggc

SEQ ID NO: 1719171 - RNA, 19 nt, Artificial Sequence
  Description of Artificial Sequence: Synthetic oligonucleotide
  Sense strand starting at position 3578 of SEQ ID NO: 1562062
aagaaaucacagugccaug

SEQ ID NO: 1719172 - RNA, 19 nt, Artificial Sequence
  Description of Artificial Sequence: Synthetic oligonucleotide
  Antisense strand to SEQ ID NO: 1719171
cauggcacugugauuucuu

SEQ ID NO: 1719173 - RNA, 19 nt, Artificial Sequence
  Description of Artificial Sequence: Synthetic oligonucleotide
  Sense strand starting at position 3707 of SEQ ID NO: 1562062
gccuaaugucuggaauucu

SEQ ID NO: 1719174 - RNA, 19 nt, Artificial Sequence
  Description of Artificial Sequence: Synthetic oligonucleotide
  Antisense strand to SEQ ID NO: 1719173
agaauuccagacauuaggc

SEQ ID NO: 1719175 - RNA, 19 nt, Artificial Sequence
  Description of Artificial Sequence: Synthetic oligonucleotide
  Sense strand starting at position 3901 of SEQ ID NO: 1562062
acagcauuggagcaguuua

SEQ ID NO: 1719176 - RNA, 19 nt, Artificial Sequence
  Description of Artificial Sequence: Synthetic oligonucleotide
  Antisense strand to SEQ ID NO: 1719175
uaaacugcuccaaugcugu

SEQ ID NO: 1719177 - RNA, 19 nt, Artificial Sequence
  Description of Artificial Sequence: Synthetic oligonucleotide
  Sense strand starting at position 3921 of SEQ ID NO: 1562062
guuccagaaauguacuagu

SEQ ID NO: 1719178 - RNA, 19 nt, Artificial Sequence
  Description of Artificial Sequence: Synthetic oligonucleotide
  Antisense strand to SEQ ID NO: 1719177
acuaguacauuucuggaac

SEQ ID NO: 1719179 - RNA, 19 nt, Artificial Sequence
  Description of Artificial Sequence: Synthetic oligonucleotide
  Sense strand starting at position 223 of SEQ ID NO: 1562063
ucagguaaaucugauccaa

SEQ ID NO: 1719180 - RNA, 19 nt, Artificial Sequence
  Description of Artificial Sequence: Synthetic oligonucleotide
  Antisense strand to SEQ ID NO: 1719179
uuggaucagauuuaccuga

SEQ ID NO: 1719181 - RNA, 19 nt, Artificial Sequence
  Description of Artificial Sequence: Synthetic oligonucleotide
  Sense strand starting at position 292 of SEQ ID NO: 1562063
gcuugcuuacacgacuuau

SEQ ID NO: 1719182 - RNA, 19 nt, Artificial Sequence
  Description of Artificial Sequence: Synthetic oligonucleotide
  Antisense strand to SEQ ID NO: 1719181
auaagucguguaagcaagc

SEQ ID NO: 1719183 - RNA, 19 nt, Artificial Sequence
  Description of Artificial Sequence: Synthetic oligonucleotide
  Sense strand starting at position 353 of SEQ ID NO: 1562063
aggugugaucccugaaaua

SEQ ID NO: 1719184 - RNA, 19 nt, Artificial Sequence
  Description of Artificial Sequence: Synthetic oligonucleotide
  Antisense strand to SEQ ID NO: 1719183
uauuucagggaucacaccu

SEQ ID NO: 1719185 - RNA, 19 nt, Artificial Sequence
  Description of Artificial Sequence: Synthetic oligonucleotide
  Sense strand starting at position 374 of SEQ ID NO: 1562063
cucccacuugcagaaugaa

SEQ ID NO: 1719186 - RNA, 19 nt, Artificial Sequence
  Description of Artificial Sequence: Synthetic oligonucleotide
  Antisense strand to SEQ ID NO: 1719185
uucauucugcaagugggag

SEQ ID NO: 1719187 - RNA, 19 nt, Artificial Sequence
  Description of Artificial Sequence: Synthetic oligonucleotide
  Sense strand starting at position 396 of SEQ ID NO: 1562063
uuacaauaguuugaccagu

SEQ ID NO: 1719188 - RNA, 19 nt, Artificial Sequence
  Description of Artificial Sequence: Synthetic oligonucleotide
  Antisense strand to SEQ ID NO: 1719187
acuggucaaacuauuguaa

SEQ ID NO: 1719189 - RNA, 19 nt, Artificial Sequence
  Description of Artificial Sequence: Synthetic oligonucleotide
  Sense strand starting at position 398 of SEQ ID NO: 1562063
acaauaguuugaccaguca

SEQ ID NO: 1719190 - RNA, 19 nt, Artificial Sequence
  Description of Artificial Sequence: Synthetic oligonucleotide
  Antisense strand to SEQ ID NO: 1719189
ugacuggucaaacuauugu

SEQ ID NO: 1719191 - RNA, 19 nt, Artificial Sequence
  Description of Artificial Sequence: Synthetic oligonucleotide
  Sense strand starting at position 409 of SEQ ID NO: 1562063
accagucauugguacuuau

SEQ ID NO: 1719192 - RNA, 19 nt, Artificial Sequence
  Description of Artificial Sequence: Synthetic oligonucleotide
  Antisense strand to SEQ ID NO: 1719191
auaaguaccaaugacuggu

SEQ ID NO: 1719193 - RNA, 19 nt, Artificial Sequence
  Description of Artificial Sequence: Synthetic oligonucleotide
  Sense strand starting at position 446 of SEQ ID NO: 1562063
acuguaaacucugaaggca

SEQ ID NO: 1719194 - RNA, 19 nt, Artificial Sequence
  Description of Artificial Sequence: Synthetic oligonucleotide
  Antisense strand to SEQ ID NO: 1719193
ugccuucagaguuuacagu

SEQ ID NO: 1719195 - RNA, 19 nt, Artificial Sequence
  Description of Artificial Sequence: Synthetic oligonucleotide
  Sense strand starting at position 579 of SEQ ID NO: 1562063
gaaguuaagucccagaaag

SEQ ID NO: 1719196 - RNA, 19 nt, Artificial Sequence
  Description of Artificial Sequence: Synthetic oligonucleotide
  Antisense strand to SEQ ID NO: 1719195
cuuucugggacuuaacuuc

SEQ ID NO: 1719197 - RNA, 19 nt, Artificial Sequence
  Description of Artificial Sequence: Synthetic oligonucleotide
  Sense strand starting at position 624 of SEQ ID NO: 1562063
gaugguauuuggugaggua

SEQ ID NO: 1719198 - RNA, 19 nt, Artificial Sequence
  Description of Artificial Sequence: Synthetic oligonucleotide
  Antisense strand to SEQ ID NO: 1719197
uaccucaccaaauaccauc

SEQ ID NO: 1719199 - RNA, 19 nt, Artificial Sequence
  Description of Artificial Sequence: Synthetic oligonucleotide
  Sense strand starting at position 627 of SEQ ID NO: 1562063
gguauuuggugagguaacu

SEQ ID NO: 1719200 - RNA, 19 nt, Artificial Sequence
  Description of Artificial Sequence: Synthetic oligonucleotide
  Antisense strand to SEQ ID NO: 1719199
aguuaccucaccaaauacc

SEQ ID NO: 1719201 - RNA, 19 nt, Artificial Sequence
  Description of Artificial Sequence: Synthetic oligonucleotide
  Sense strand starting at position 639 of SEQ ID NO: 1562063
gguaacuuaaccugggacu

SEQ ID NO: 1719202 - RNA, 19 nt, Artificial Sequence
  Description of Artificial Sequence: Synthetic oligonucleotide
  Antisense strand to SEQ ID NO: 1719201
agucccagguuaaguuacc

SEQ ID NO: 1719203 - RNA, 19 nt, Artificial Sequence
  Description of Artificial Sequence: Synthetic oligonucleotide
  Sense strand starting at position 640 of SEQ ID NO: 1562063
guaacuuaaccugggacuu

SEQ ID NO: 1719204 - RNA, 19 nt, Artificial Sequence
  Description of Artificial Sequence: Synthetic oligonucleotide
  Antisense strand to SEQ ID NO: 1719203
aagucccagguuaaguuac

SEQ ID NO: 1719205 - RNA, 19 nt, Artificial Sequence
  Description of Artificial Sequence: Synthetic oligonucleotide
  Sense strand starting at position 684 of SEQ ID NO: 1562063
ggaagaguuccaggcuaac

SEQ ID NO: 1719206 - RNA, 19 nt, Artificial Sequence
  Description of Artificial Sequence: Synthetic oligonucleotide
  Antisense strand to SEQ ID NO: 1719205
guuagccuggaacucuucc

SEQ ID NO: 1719207 - RNA, 19 nt, Artificial Sequence
  Description of Artificial Sequence: Synthetic oligonucleotide
  Sense strand starting at position 767 of SEQ ID NO: 1562063
agcacuguucucuggacua

SEQ ID NO: 1719208 - RNA, 19 nt, Artificial Sequence
  Description of Artificial Sequence: Synthetic oligonucleotide
  Antisense strand to SEQ ID NO: 1719207
uaguccagagaacagugcu

SEQ ID NO: 1719209 - RNA, 19 nt, Artificial Sequence
  Description of Artificial Sequence: Synthetic oligonucleotide
  Sense strand starting at position 772 of SEQ ID NO: 1562063
uguucucuggacuacugaa

SEQ ID NO: 1719210 - RNA, 19 nt, Artificial Sequence
  Description of Artificial Sequence: Synthetic oligonucleotide
  Antisense strand to SEQ ID NO: 1719209
uucaguaguccagagaaca

SEQ ID NO: 1719211 - RNA, 19 nt, Artificial Sequence
  Description of Artificial Sequence: Synthetic oligonucleotide
  Sense strand starting at position 800 of SEQ ID NO: 1562063
ugcaguacaucugggaaga

SEQ ID NO: 1719212 - RNA, 19 nt, Artificial Sequence
  Description of Artificial Sequence: Synthetic oligonucleotide
  Antisense strand to SEQ ID NO: 1719211
ucuucccagauguacugca

SEQ ID NO: 1719213 - RNA, 19 nt, Artificial Sequence
  Description of Artificial Sequence: Synthetic oligonucleotide
  Sense strand starting at position 828 of SEQ ID NO: 1562063
cggugacccuucccuaaga

SEQ ID NO: 1719214 - RNA, 19 nt, Artificial Sequence
  Description of Artificial Sequence: Synthetic oligonucleotide
  Antisense strand to SEQ ID NO: 1719213
ucuuagggaagggucaccg

SEQ ID NO: 1719215 - RNA, 19 nt, Artificial Sequence
  Description of Artificial Sequence: Synthetic oligonucleotide
  Sense strand starting at position 851 of SEQ ID NO: 1562063
cucggacccucaguguauu

SEQ ID NO: 1719216 - RNA, 19 nt, Artificial Sequence
  Description of Artificial Sequence: Synthetic oligonucleotide
  Antisense strand to SEQ ID NO: 1719215
aauacacugaggguccgag

SEQ ID NO: 1719217 - RNA, 19 nt, Artificial Sequence
  Description of Artificial Sequence: Synthetic oligonucleotide
  Sense strand starting at position 917 of SEQ ID NO: 1562063
gaauaaugcccauggagug

SEQ ID NO: 1719218 - RNA, 19 nt, Artificial Sequence
  Description of Artificial Sequence: Synthetic oligonucleotide
  Antisense strand to SEQ ID NO: 1719217
cacuccaugggcauuauuc

SEQ ID NO: 1719219 - RNA, 19 nt, Artificial Sequence
  Description of Artificial Sequence: Synthetic oligonucleotide
  Sense strand starting at position 961 of SEQ ID NO: 1562063
gaccaaugccaaggugauc

SEQ ID NO: 1719220 - RNA, 19 nt, Artificial Sequence
  Description of Artificial Sequence: Synthetic oligonucleotide
  Antisense strand to SEQ ID NO: 1719219
gaucaccuuggcauugguc

SEQ ID NO: 1719221 - RNA, 19 nt, Artificial Sequence
  Description of Artificial Sequence: Synthetic oligonucleotide
  Sense strand starting at position 1037 of SEQ ID NO: 1562063
uggccacguugucuacaau

SEQ ID NO: 1719222 - RNA, 19 nt, Artificial Sequence
  Description of Artificial Sequence: Synthetic oligonucleotide
  Antisense strand to SEQ ID NO: 1719221
auuguagacaacguggcca

SEQ ID NO: 1719223 - RNA, 19 nt, Artificial Sequence
  Description of Artificial Sequence: Synthetic oligonucleotide
  Sense strand starting at position 1038 of SEQ ID NO: 1562063
ggccacguugucuacaauu

SEQ ID NO: 1719224 - RNA, 19 nt, Artificial Sequence
  Description of Artificial Sequence: Synthetic oligonucleotide
  Antisense strand to SEQ ID NO: 1719223
aauuguagacaacguggcc

SEQ ID NO: 1719225 - RNA, 19 nt, Artificial Sequence
  Description of Artificial Sequence: Synthetic oligonucleotide
  Sense strand starting at position 1040 of SEQ ID NO: 1562063
ccacguugucuacaauucu

SEQ ID NO: 1719226 - RNA, 19 nt, Artificial Sequence
  Description of Artificial Sequence: Synthetic oligonucleotide
  Antisense strand to SEQ ID NO: 1719225
agaauuguagacaacgugg

SEQ ID NO: 1719227 - RNA, 19 nt, Artificial Sequence
  Description of Artificial Sequence: Synthetic oligonucleotide
  Sense strand starting at position 1064 of SEQ ID NO: 1562063
cucagauguguuugugcgu

SEQ ID NO: 1719228 - RNA, 19 nt, Artificial Sequence
  Description of Artificial Sequence: Synthetic oligonucleotide
  Antisense strand to SEQ ID NO: 1719227
acgcacaaacacaucugag

SEQ ID NO: 1719229 - RNA, 19 nt, Artificial Sequence
  Description of Artificial Sequence: Synthetic oligonucleotide
  Sense strand starting at position 1069 of SEQ ID NO: 1562063
auguguuugugcgucugau

SEQ ID NO: 1719230 - RNA, 19 nt, Artificial Sequence
  Description of Artificial Sequence: Synthetic oligonucleotide
  Antisense strand to SEQ ID NO: 1719229
aucagacgcacaaacacau

SEQ ID NO: 1719231 - RNA, 19 nt, Artificial Sequence
  Description of Artificial Sequence: Synthetic oligonucleotide
  Sense strand starting at position 1070 of SEQ ID NO: 1562063
uguguuugugcgucugaug

SEQ ID NO: 1719232 - RNA, 19 nt, Artificial Sequence
  Description of Artificial Sequence: Synthetic oligonucleotide
  Antisense strand to SEQ ID NO: 1719231
caucagacgcacaaacaca

SEQ ID NO: 1719233 - RNA, 19 nt, Artificial Sequence
  Description of Artificial Sequence: Synthetic oligonucleotide
  Sense strand starting at position 1379 of SEQ ID NO: 1562063
agcguuucucccgacuuua

SEQ ID NO: 1719234 - RNA, 19 nt, Artificial Sequence
  Description of Artificial Sequence: Synthetic oligonucleotide
  Antisense strand to SEQ ID NO: 1719233
uaaagucgggagaaacgcu

SEQ ID NO: 1719235 - RNA, 19 nt, Artificial Sequence
  Description of Artificial Sequence: Synthetic oligonucleotide
  Sense strand starting at position 1381 of SEQ ID NO: 1562063
cguuucucccgacuuuagu

SEQ ID NO: 1719236 - RNA, 19 nt, Artificial Sequence
  Description of Artificial Sequence: Synthetic oligonucleotide
  Antisense strand to SEQ ID NO: 1719235
acuaaagucgggagaaacg

SEQ ID NO: 1719237 - RNA, 19 nt, Artificial Sequence
  Description of Artificial Sequence: Synthetic oligonucleotide
  Sense strand starting at position 1391 of SEQ ID NO: 1562063
gacuuuagugcacaguaga

SEQ ID NO: 1719238 - RNA, 19 nt, Artificial Sequence
  Description of Artificial Sequence: Synthetic oligonucleotide
  Antisense strand to SEQ ID NO: 1719237
ucuacugugcacuaaaguc

SEQ ID NO: 1719239 - RNA, 19 nt, Artificial Sequence
  Description of Artificial Sequence: Synthetic oligonucleotide
  Sense strand starting at position 1394 of SEQ ID NO: 1562063
uuuagugcacaguagaaua

SEQ ID NO: 1719240 - RNA, 19 nt, Artificial Sequence
  Description of Artificial Sequence: Synthetic oligonucleotide
  Antisense strand to SEQ ID NO: 1719239
uauucuacugugcacuaaa

SEQ ID NO: 1719241 - RNA, 19 nt, Artificial Sequence
  Description of Artificial Sequence: Synthetic oligonucleotide
  Sense strand starting at position 1407 of SEQ ID NO: 1562063
agaauaacucgccacagcu

SEQ ID NO: 1719242 - RNA, 19 nt, Artificial Sequence
  Description of Artificial Sequence: Synthetic oligonucleotide
  Antisense strand to SEQ ID NO: 1719241
agcuguggcgaguuauucu

SEQ ID NO: 1719243 - RNA, 19 nt, Artificial Sequence
  Description of Artificial Sequence: Synthetic oligonucleotide
  Sense strand starting at position 1533 of SEQ ID NO: 1562063
uccacuaucacguguggga

SEQ ID NO: 1719244 - RNA, 19 nt, Artificial Sequence
  Description of Artificial Sequence: Synthetic oligonucleotide
  Antisense strand to SEQ ID NO: 1719243
ucccacacgugauagugga

SEQ ID NO: 1719245 - RNA, 19 nt, Artificial Sequence
  Description of Artificial Sequence: Synthetic oligonucleotide
  Sense strand starting at position 1627 of SEQ ID NO: 1562063
acgggauacuuaggaguga

SEQ ID NO: 1719246 - RNA, 19 nt, Artificial Sequence
  Description of Artificial Sequence: Synthetic oligonucleotide
  Antisense strand to SEQ ID NO: 1719245
ucacuccuaaguaucccgu

SEQ ID NO: 1719247 - RNA, 19 nt, Artificial Sequence
  Description of Artificial Sequence: Synthetic oligonucleotide
  Sense strand starting at position 2140 of SEQ ID NO: 1562063
uccaaaggcugccagaauu

SEQ ID NO: 1719248 - RNA, 19 nt, Artificial Sequence
  Description of Artificial Sequence: Synthetic oligonucleotide
  Antisense strand to SEQ ID NO: 1719247
aauucuggcagccuuugga

SEQ ID NO: 1719249 - RNA, 19 nt, Artificial Sequence
  Description of Artificial Sequence: Synthetic oligonucleotide
  Sense strand starting at position 2188 of SEQ ID NO: 1562063
uuccaaauuuaucguuagu

SEQ ID NO: 1719250 - RNA, 19 nt, Artificial Sequence
  Description of Artificial Sequence: Synthetic oligonucleotide
  Antisense strand to SEQ ID NO: 1719249
acuaacgauaaauuuggaa

SEQ ID NO: 1719251 - RNA, 19 nt, Artificial Sequence
  Description of Artificial Sequence: Synthetic oligonucleotide
  Sense strand starting at position 2190 of SEQ ID NO: 1562063
ccaaauuuaucguuaguuc

SEQ ID NO: 1719252 - RNA, 19 nt, Artificial Sequence
  Description of Artificial Sequence: Synthetic oligonucleotide
  Antisense strand to SEQ ID NO: 1719251
gaacuaacgauaaauuugg

SEQ ID NO: 1719253 - RNA, 19 nt, Artificial Sequence
  Description of Artificial Sequence: Synthetic oligonucleotide
  Sense strand starting at position 2658 of SEQ ID NO: 1562063
ucuaauuccugagcugcaa

SEQ ID NO: 1719254 - RNA, 19 nt, Artificial Sequence
  Description of Artificial Sequence: Synthetic oligonucleotide
  Antisense strand to SEQ ID NO: 1719253
uugcagcucaggaauuaga

SEQ ID NO: 1719255 - RNA, 19 nt, Artificial Sequence
  Description of Artificial Sequence: Synthetic oligonucleotide
  Sense strand starting at position 3333 of SEQ ID NO: 1562063
cuggucuucuugcuaaacu

SEQ ID NO: 1719256 - RNA, 19 nt, Artificial Sequence
  Description of Artificial Sequence: Synthetic oligonucleotide
  Antisense strand to SEQ ID NO: 1719255
aguuuagcaagaagaccag

SEQ ID NO: 1719257 - RNA, 19 nt, Artificial Sequence
  Description of Artificial Sequence: Synthetic oligonucleotide
  Sense strand starting at position 3925 of SEQ ID NO: 1562063
uguguaaauuuccacaaau

SEQ ID NO: 1719258 - RNA, 19 nt, Artificial Sequence
  Description of Artificial Sequence: Synthetic oligonucleotide
  Antisense strand to SEQ ID NO: 1719257
auuuguggaaauuuacaca

SEQ ID NO: 1719259 - RNA, 19 nt, Artificial Sequence
  Description of Artificial Sequence: Synthetic oligonucleotide
  Sense strand starting at position 206 of SEQ ID NO: 1562064
gcacccgacccauaauaaa

SEQ ID NO: 1719260 - RNA, 19 nt, Artificial Sequence
  Description of Artificial Sequence: Synthetic oligonucleotide
  Antisense strand to SEQ ID NO: 1719259
uuuauuaugggucgggugc

SEQ ID NO: 1719261 - RNA, 19 nt, Artificial Sequence
  Description of Artificial Sequence: Synthetic oligonucleotide
  Sense strand starting at position 244 of SEQ ID NO: 1562064
ucuuguaaaugaguggcua

SEQ ID NO: 1719262 - RNA, 19 nt, Artificial Sequence
  Description of Artificial Sequence: Synthetic oligonucleotide
  Antisense strand to SEQ ID NO: 1719261
uagccacucauuuacaaga

SEQ ID NO: 1719263 - RNA, 19 nt, Artificial Sequence
  Description of Artificial Sequence: Synthetic oligonucleotide
  Sense strand starting at position 245 of SEQ ID NO: 1562064
cuuguaaaugaguggcuaa

SEQ ID NO: 1719264 - RNA, 19 nt, Artificial Sequence
  Description of Artificial Sequence: Synthetic oligonucleotide
  Antisense strand to SEQ ID NO: 1719263
uuagccacucauuuacaag

SEQ ID NO: 1719265 - RNA, 19 nt, Artificial Sequence
  Description of Artificial Sequence: Synthetic oligonucleotide
  Sense strand starting at position 246 of SEQ ID NO: 1562064
uuguaaaugaguggcuaau

SEQ ID NO: 1719266 - RNA, 19 nt, Artificial Sequence
  Description of Artificial Sequence: Synthetic oligonucleotide
  Antisense strand to SEQ ID NO: 1719265
auuagccacucauuuacaa

SEQ ID NO: 1719267 - RNA, 19 nt, Artificial Sequence
  Description of Artificial Sequence: Synthetic oligonucleotide
  Sense strand starting at position 377 of SEQ ID NO: 1562064
caaggaagagcugguguua

SEQ ID NO: 1719268 - RNA, 19 nt, Artificial Sequence
  Description of Artificial Sequence: Synthetic oligonucleotide
  Antisense strand to SEQ ID NO: 1719267
uaacaccagcucuuccuug

SEQ ID NO: 1719269 - RNA, 19 nt, Artificial Sequence
  Description of Artificial Sequence: Synthetic oligonucleotide
  Sense strand starting at position 390 of SEQ ID NO: 1562064
guguuaucccaauagccuc

SEQ ID NO: 1719270 - RNA, 19 nt, Artificial Sequence
  Description of Artificial Sequence: Synthetic oligonucleotide
  Antisense strand to SEQ ID NO: 1719269
gaggcuauugggauaacac

SEQ ID NO: 1719271 - RNA, 19 nt, Artificial Sequence
  Description of Artificial Sequence: Synthetic oligonucleotide
  Sense strand starting at position 472 of SEQ ID NO: 1562064
ggcagucugacagagucaa

SEQ ID NO: 1719272 - RNA, 19 nt, Artificial Sequence
  Description of Artificial Sequence: Synthetic oligonucleotide
  Antisense strand to SEQ ID NO: 1719271
uugacucugucagacugcc

SEQ ID NO: 1719273 - RNA, 19 nt, Artificial Sequence
  Description of Artificial Sequence: Synthetic oligonucleotide
  Sense strand starting at position 476 of SEQ ID NO: 1562064
gucugacagagucaacguu

SEQ ID NO: 1719274 - RNA, 19 nt, Artificial Sequence
  Description of Artificial Sequence: Synthetic oligonucleotide
  Antisense strand to SEQ ID NO: 1719273
aacguugacucugucagac

SEQ ID NO: 1719275 - RNA, 19 nt, Artificial Sequence
  Description of Artificial Sequence: Synthetic oligonucleotide
  Sense strand starting at position 483 of SEQ ID NO: 1562064
agagucaacguuuguggga

SEQ ID NO: 1719276 - RNA, 19 nt, Artificial Sequence
  Description of Artificial Sequence: Synthetic oligonucleotide
  Antisense strand to SEQ ID NO: 1719275
ucccacaaacguugacucu

SEQ ID NO: 1719277 - RNA, 19 nt, Artificial Sequence
  Description of Artificial Sequence: Synthetic oligonucleotide
  Sense strand starting at position 484 of SEQ ID NO: 1562064
gagucaacguuugugggaa

SEQ ID NO: 1719278 - RNA, 19 nt, Artificial Sequence
  Description of Artificial Sequence: Synthetic oligonucleotide
  Antisense strand to SEQ ID NO: 1719277
uucccacaaacguugacuc

SEQ ID NO: 1719279 - RNA, 19 nt, Artificial Sequence
  Description of Artificial Sequence: Synthetic oligonucleotide
  Sense strand starting at position 562 of SEQ ID NO: 1562064
ccaguaguccuguaagagg

SEQ ID NO: 1719280 - RNA, 19 nt, Artificial Sequence
  Description of Artificial Sequence: Synthetic oligonucleotide
  Antisense strand to SEQ ID NO: 1719279
ccucuuacaggacuacugg

SEQ ID NO: 1719281 - RNA, 19 nt, Artificial Sequence
  Description of Artificial Sequence: Synthetic oligonucleotide
  Sense strand starting at position 773 of SEQ ID NO: 1562064
gccuguauucaggagcgga

SEQ ID NO: 1719282 - RNA, 19 nt, Artificial Sequence
  Description of Artificial Sequence: Synthetic oligonucleotide
  Antisense strand to SEQ ID NO: 1719281
uccgcuccugaauacaggc

SEQ ID NO: 1719283 - RNA, 19 nt, Artificial Sequence
  Description of Artificial Sequence: Synthetic oligonucleotide
  Sense strand starting at position 799 of SEQ ID NO: 1562064
guguccuagauauauugga

SEQ ID NO: 1719284 - RNA, 19 nt, Artificial Sequence
  Description of Artificial Sequence: Synthetic oligonucleotide
  Antisense strand to SEQ ID NO: 1719283
uccaauauaucuaggacac

SEQ ID NO: 1719285 - RNA, 19 nt, Artificial Sequence
  Description of Artificial Sequence: Synthetic oligonucleotide
  Sense strand starting at position 812 of SEQ ID NO: 1562064
auuggaguauuccuauaga

SEQ ID NO: 1719286 - RNA, 19 nt, Artificial Sequence
  Description of Artificial Sequence: Synthetic oligonucleotide
  Antisense strand to SEQ ID NO: 1719285
ucuauaggaauacuccaau

SEQ ID NO: 1719287 - RNA, 19 nt, Artificial Sequence
  Description of Artificial Sequence: Synthetic oligonucleotide
  Sense strand starting at position 839 of SEQ ID NO: 1562064
ugagcauucggacaaauua

SEQ ID NO: 1719288 - RNA, 19 nt, Artificial Sequence
  Description of Artificial Sequence: Synthetic oligonucleotide
  Antisense strand to SEQ ID NO: 1719287
uaauuuguccgaaugcuca

SEQ ID NO: 1719289 - RNA, 19 nt, Artificial Sequence
  Description of Artificial Sequence: Synthetic oligonucleotide
  Sense strand starting at position 885 of SEQ ID NO: 1562064
uccuguacgguggaguauu

SEQ ID NO: 1719290 - RNA, 19 nt, Artificial Sequence
  Description of Artificial Sequence: Synthetic oligonucleotide
  Antisense strand to SEQ ID NO: 1719289
aauacuccaccguacagga

SEQ ID NO: 1719291 - RNA, 19 nt, Artificial Sequence
  Description of Artificial Sequence: Synthetic oligonucleotide
  Sense strand starting at position 893 of SEQ ID NO: 1562064
gguggaguauuccuaugua

SEQ ID NO: 1719292 - RNA, 19 nt, Artificial Sequence
  Description of Artificial Sequence: Synthetic oligonucleotide
  Antisense strand to SEQ ID NO: 1719291
uacauaggaauacuccacc

SEQ ID NO: 1719293 - RNA, 19 nt, Artificial Sequence
  Description of Artificial Sequence: Synthetic oligonucleotide
  Sense strand starting at position 896 of SEQ ID NO: 1562064
ggaguauuccuauguagac

SEQ ID NO: 1719294 - RNA, 19 nt, Artificial Sequence
  Description of Artificial Sequence: Synthetic oligonucleotide
  Antisense strand to SEQ ID NO: 1719293
gucuacauaggaauacucc

SEQ ID NO: 1719295 - RNA, 19 nt, Artificial Sequence
  Description of Artificial Sequence: Synthetic oligonucleotide
  Sense strand starting at position 897 of SEQ ID NO: 1562064
gaguauuccuauguagaca

SEQ ID NO: 1719296 - RNA, 19 nt, Artificial Sequence
  Description of Artificial Sequence: Synthetic oligonucleotide
  Antisense strand to SEQ ID NO: 1719295
ugucuacauaggaauacuc

SEQ ID NO: 1719297 - RNA, 19 nt, Artificial Sequence
  Description of Artificial Sequence: Synthetic oligonucleotide
  Sense strand starting at position 1067 of SEQ ID NO: 1562064
uggguaaaggugugaugaa

SEQ ID NO: 1719298 - RNA, 19 nt, Artificial Sequence
  Description of Artificial Sequence: Synthetic oligonucleotide
  Antisense strand to SEQ ID NO: 1719297
uucaucacaccuuuaccca

SEQ ID NO: 1719299 - RNA, 19 nt, Artificial Sequence
  Description of Artificial Sequence: Synthetic oligonucleotide
  Sense strand starting at position 1208 of SEQ ID NO: 1562064
aucauuaggucuccagaaa

SEQ ID NO: 1719300 - RNA, 19 nt, Artificial Sequence
  Description of Artificial Sequence: Synthetic oligonucleotide
  Antisense strand to SEQ ID NO: 1719299
uuucuggagaccuaaugau

SEQ ID NO: 1719301 - RNA, 19 nt, Artificial Sequence
  Description of Artificial Sequence: Synthetic oligonucleotide
  Sense strand starting at position 1228 of SEQ ID NO: 1562064
aaaggaggguccuuaauuc

SEQ ID NO: 1719302 - RNA, 19 nt, Artificial Sequence
  Description of Artificial Sequence: Synthetic oligonucleotide
  Antisense strand to SEQ ID NO: 1719301
gaauuaaggacccuccuuu

SEQ ID NO: 1719303 - RNA, 19 nt, Artificial Sequence
  Description of Artificial Sequence: Synthetic oligonucleotide
  Sense strand starting at position 1301 of SEQ ID NO: 1562064
ugaguaagccgagggaaga

SEQ ID NO: 1719304 - RNA, 19 nt, Artificial Sequence
  Description of Artificial Sequence: Synthetic oligonucleotide
  Antisense strand to SEQ ID NO: 1719303
ucuucccucggcuuacuca

SEQ ID NO: 1719305 - RNA, 19 nt, Artificial Sequence
  Description of Artificial Sequence: Synthetic oligonucleotide
  Sense strand starting at position 1581 of SEQ ID NO: 1562064
cuccgugaucuccagguga

SEQ ID NO: 1719306 - RNA, 19 nt, Artificial Sequence
  Description of Artificial Sequence: Synthetic oligonucleotide
  Antisense strand to SEQ ID NO: 1719305
ucaccuggagaucacggag

SEQ ID NO: 1719307 - RNA, 19 nt, Artificial Sequence
  Description of Artificial Sequence: Synthetic oligonucleotide
  Sense strand starting at position 1583 of SEQ ID NO: 1562064
ccgugaucuccaggugaca

SEQ ID NO: 1719308 - RNA, 19 nt, Artificial Sequence
  Description of Artificial Sequence: Synthetic oligonucleotide
  Antisense strand to SEQ ID NO: 1719307
ugucaccuggagaucacgg

SEQ ID NO: 1719309 - RNA, 19 nt, Artificial Sequence
  Description of Artificial Sequence: Synthetic oligonucleotide
  Sense strand starting at position 1612 of SEQ ID NO: 1562064
gcccuuugugagggacuca

SEQ ID NO: 1719310 - RNA, 19 nt, Artificial Sequence
  Description of Artificial Sequence: Synthetic oligonucleotide
  Antisense strand to SEQ ID NO: 1719309
ugagucccucacaaagggc

SEQ ID NO: 1719311 - RNA, 19 nt, Artificial Sequence
  Description of Artificial Sequence: Synthetic oligonucleotide
  Sense strand starting at position 2194 of SEQ ID NO: 1562064
cucuguuccugguuagaac

SEQ ID NO: 1719312 - RNA, 19 nt, Artificial Sequence
  Description of Artificial Sequence: Synthetic oligonucleotide
  Antisense strand to SEQ ID NO: 1719311
guucuaaccaggaacagag

SEQ ID NO: 1719313 - RNA, 19 nt, Artificial Sequence
  Description of Artificial Sequence: Synthetic oligonucleotide
  Sense strand starting at position 2195 of SEQ ID NO: 1562064
ucuguuccugguuagaacu

SEQ ID NO: 1719314 - RNA, 19 nt, Artificial Sequence
  Description of Artificial Sequence: Synthetic oligonucleotide
  Antisense strand to SEQ ID NO: 1719313
aguucuaaccaggaacaga

SEQ ID NO: 1719315 - RNA, 19 nt, Artificial Sequence
  Description of Artificial Sequence: Synthetic oligonucleotide
  Sense strand starting at position 2310 of SEQ ID NO: 1562064
cuuggcuaacgcgaugaaa

SEQ ID NO: 1719316 - RNA, 19 nt, Artificial Sequence
  Description of Artificial Sequence: Synthetic oligonucleotide
  Antisense strand to SEQ ID NO: 1719315
uuucaucgcguuagccaag

SEQ ID NO: 1719317 - RNA, 19 nt, Artificial Sequence
  Description of Artificial Sequence: Synthetic oligonucleotide
  Sense strand starting at position 3050 of SEQ ID NO: 1562064
agcugagugcuagaaccuu

SEQ ID NO: 1719318 - RNA, 19 nt, Artificial Sequence
  Description of Artificial Sequence: Synthetic oligonucleotide
  Antisense strand to SEQ ID NO: 1719317
aagguucuagcacucagcu

SEQ ID NO: 1719319 - RNA, 19 nt, Artificial Sequence
  Description of Artificial Sequence: Synthetic oligonucleotide
  Sense strand starting at position 3056 of SEQ ID NO: 1562064
gugcuagaaccuuggugau

SEQ ID NO: 1719320 - RNA, 19 nt, Artificial Sequence
  Description of Artificial Sequence: Synthetic oligonucleotide
  Antisense strand to SEQ ID NO: 1719319
aucaccaagguucuagcac

SEQ ID NO: 1719321 - RNA, 19 nt, Artificial Sequence
  Description of Artificial Sequence: Synthetic oligonucleotide
  Sense strand starting at position 3083 of SEQ ID NO: 1562064
ccuagacucugcccagaua

SEQ ID NO: 1719322 - RNA, 19 nt, Artificial Sequence
  Description of Artificial Sequence: Synthetic oligonucleotide
  Antisense strand to SEQ ID NO: 1719321
uaucugggcagagucuagg

SEQ ID NO: 1719323 - RNA, 19 nt, Artificial Sequence
  Description of Artificial Sequence: Synthetic oligonucleotide
  Sense strand starting at position 3105 of SEQ ID NO: 1562064
gagagaggugugugcaaga

SEQ ID NO: 1719324 - RNA, 19 nt, Artificial Sequence
  Description of Artificial Sequence: Synthetic oligonucleotide
  Antisense strand to SEQ ID NO: 1719323
ucuugcacacaccucucuc

SEQ ID NO: 1719325 - RNA, 19 nt, Artificial Sequence
  Description of Artificial Sequence: Synthetic oligonucleotide
  Sense strand starting at position 3185 of SEQ ID NO: 1562064
gcaauaaauugaccuccga

SEQ ID NO: 1719326 - RNA, 19 nt, Artificial Sequence
  Description of Artificial Sequence: Synthetic oligonucleotide
  Antisense strand to SEQ ID NO: 1719325
ucggaggucaauuuauugc

SEQ ID NO: 1719327 - RNA, 19 nt, Artificial Sequence
  Description of Artificial Sequence: Synthetic oligonucleotide
  Sense strand starting at position 3275 of SEQ ID NO: 1562064
caguguauucugcagauac

SEQ ID NO: 1719328 - RNA, 19 nt, Artificial Sequence
  Description of Artificial Sequence: Synthetic oligonucleotide
  Antisense strand to SEQ ID NO: 1719327
guaucugcagaauacacug

SEQ ID NO: 1719329 - RNA, 19 nt, Artificial Sequence
  Description of Artificial Sequence: Synthetic oligonucleotide
  Sense strand starting at position 3277 of SEQ ID NO: 1562064
guguauucugcagauacuc

SEQ ID NO: 1719330 - RNA, 19 nt, Artificial Sequence
  Description of Artificial Sequence: Synthetic oligonucleotide
  Antisense strand to SEQ ID NO: 1719329
gaguaucugcagaauacac

SEQ ID NO: 1719331 - RNA, 19 nt, Artificial Sequence
  Description of Artificial Sequence: Synthetic oligonucleotide
  Sense strand starting at position 3337 of SEQ ID NO: 1562064
gaaguuucuggagaggcua

SEQ ID NO: 1719332 - RNA, 19 nt, Artificial Sequence
  Description of Artificial Sequence: Synthetic oligonucleotide
  Antisense strand to SEQ ID NO: 1719331
uagccucuccagaaacuuc

SEQ ID NO: 1719333 - RNA, 19 nt, Artificial Sequence
  Description of Artificial Sequence: Synthetic oligonucleotide
  Sense strand starting at position 3522 of SEQ ID NO: 1562064
agcucaguagcuuaacuuu

SEQ ID NO: 1719334 - RNA, 19 nt, Artificial Sequence
  Description of Artificial Sequence: Synthetic oligonucleotide
  Antisense strand to SEQ ID NO: 1719333
aaaguuaagcuacugagcu

SEQ ID NO: 1719335 - RNA, 19 nt, Artificial Sequence
  Description of Artificial Sequence: Synthetic oligonucleotide
  Sense strand starting at position 3528 of SEQ ID NO: 1562064
guagcuuaacuuugggaag

SEQ ID NO: 1719336 - RNA, 19 nt, Artificial Sequence
  Description of Artificial Sequence: Synthetic oligonucleotide
  Antisense strand to SEQ ID NO: 1719335
cuucccaaaguuaagcuac

SEQ ID NO: 1719337 - RNA, 19 nt, Artificial Sequence
  Description of Artificial Sequence: Synthetic oligonucleotide
  Sense strand starting at position 3632 of SEQ ID NO: 1562064
gggaaacauuagugaauuu

SEQ ID NO: 1719338 - RNA, 19 nt, Artificial Sequence
  Description of Artificial Sequence: Synthetic oligonucleotide
  Antisense strand to SEQ ID NO: 1719337
aaauucacuaauguuuccc

SEQ ID NO: 1719339 - RNA, 19 nt, Artificial Sequence
  Description of Artificial Sequence: Synthetic oligonucleotide
  Sense strand starting at position 368 of SEQ ID NO: 1562065
gcacccgacccauaauaaa

SEQ ID NO: 1719340 - RNA, 19 nt, Artificial Sequence
  Description of Artificial Sequence: Synthetic oligonucleotide
  Antisense strand to SEQ ID NO: 1719339
uuuauuaugggucgggugc

SEQ ID NO: 1719341 - RNA, 19 nt, Artificial Sequence
  Description of Artificial Sequence: Synthetic oligonucleotide
  Sense strand starting at position 406 of SEQ ID NO: 1562065
ucuuguaaaugaguggcua

SEQ ID NO: 1719342 - RNA, 19 nt, Artificial Sequence
  Description of Artificial Sequence: Synthetic oligonucleotide
  Antisense strand to SEQ ID NO: 1719341
uagccacucauuuacaaga

SEQ ID NO: 1719343 - RNA, 19 nt, Artificial Sequence
  Description of Artificial Sequence: Synthetic oligonucleotide
  Sense strand starting at position 407 of SEQ ID NO: 1562065
cuuguaaaugaguggcuaa

SEQ ID NO: 1719344 - RNA, 19 nt, Artificial Sequence
  Description of Artificial Sequence: Synthetic oligonucleotide
  Antisense strand to SEQ ID NO: 1719343
uuagccacucauuuacaag

SEQ ID NO: 1719345 - RNA, 19 nt, Artificial Sequence
  Description of Artificial Sequence: Synthetic oligonucleotide
  Sense strand starting at position 408 of SEQ ID NO: 1562065
uuguaaaugaguggcuaau

SEQ ID NO: 1719346 - RNA, 19 nt, Artificial Sequence
  Description of Artificial Sequence: Synthetic oligonucleotide
  Antisense strand to SEQ ID NO: 1719345
auuagccacucauuuacaa

SEQ ID NO: 1719347 - RNA, 19 nt, Artificial Sequence
  Description of Artificial Sequence: Synthetic oligonucleotide
  Sense strand starting at position 539 of SEQ ID NO: 1562065
caaggaagagcugguguua

SEQ ID NO: 1719348 - RNA, 19 nt, Artificial Sequence
  Description of Artificial Sequence: Synthetic oligonucleotide
  Antisense strand to SEQ ID NO: 1719347
uaacaccagcucuuccuug

SEQ ID NO: 1719349 - RNA, 19 nt, Artificial Sequence
  Description of Artificial Sequence: Synthetic oligonucleotide
  Sense strand starting at position 552 of SEQ ID NO: 1562065
guguuaucccaauagccuc

SEQ ID NO: 1719350 - RNA, 19 nt, Artificial Sequence
  Description of Artificial Sequence: Synthetic oligonucleotide
  Antisense strand to SEQ ID NO: 1719349
gaggcuauugggauaacac

SEQ ID NO: 1719351 - RNA, 19 nt, Artificial Sequence
  Description of Artificial Sequence: Synthetic oligonucleotide
  Sense strand starting at position 634 of SEQ ID NO: 1562065
ggcagucugacagagucaa

SEQ ID NO: 1719352 - RNA, 19 nt, Artificial Sequence
  Description of Artificial Sequence: Synthetic oligonucleotide
  Antisense strand to SEQ ID NO: 1719351
uugacucugucagacugcc

SEQ ID NO: 1719353 - RNA, 19 nt, Artificial Sequence
  Description of Artificial Sequence: Synthetic oligonucleotide
  Sense strand starting at position 638 of SEQ ID NO: 1562065
gucugacagagucaacguu

SEQ ID NO: 1719354 - RNA, 19 nt, Artificial Sequence
  Description of Artificial Sequence: Synthetic oligonucleotide
  Antisense strand to SEQ ID NO: 1719353
aacguugacucugucagac

SEQ ID NO: 1719355 - RNA, 19 nt, Artificial Sequence
  Description of Artificial Sequence: Synthetic oligonucleotide
  Sense strand starting at position 645 of SEQ ID NO: 1562065
agagucaacguuuguggga

SEQ ID NO: 1719356 - RNA, 19 nt, Artificial Sequence
  Description of Artificial Sequence: Synthetic oligonucleotide
  Antisense strand to SEQ ID NO: 1719355
ucccacaaacguugacucu

SEQ ID NO: 1719357 - RNA, 19 nt, Artificial Sequence
  Description of Artificial Sequence: Synthetic oligonucleotide
  Sense strand starting at position 646 of SEQ ID NO: 1562065
gagucaacguuugugggaa

SEQ ID NO: 1719358 - RNA, 19 nt, Artificial Sequence
  Description of Artificial Sequence: Synthetic oligonucleotide
  Antisense strand to SEQ ID NO: 1719357
uucccacaaacguugacuc

SEQ ID NO: 1719359 - RNA, 19 nt, Artificial Sequence
  Description of Artificial Sequence: Synthetic oligonucleotide
  Sense strand starting at position 724 of SEQ ID NO: 1562065
ccaguaguccuguaagagg

SEQ ID NO: 1719360 - RNA, 19 nt, Artificial Sequence
  Description of Artificial Sequence: Synthetic oligonucleotide
  Antisense strand to SEQ ID NO: 1719359
ccucuuacaggacuacugg

SEQ ID NO: 1719361 - RNA, 19 nt, Artificial Sequence
  Description of Artificial Sequence: Synthetic oligonucleotide
  Sense strand starting at position 935 of SEQ ID NO: 1562065
gccuguauucaggagcgga

SEQ ID NO: 1719362 - RNA, 19 nt, Artificial Sequence
  Description of Artificial Sequence: Synthetic oligonucleotide
  Antisense strand to SEQ ID NO: 1719361
uccgcuccugaauacaggc

SEQ ID NO: 1719363 - RNA, 19 nt, Artificial Sequence
  Description of Artificial Sequence: Synthetic oligonucleotide
  Sense strand starting at position 961 of SEQ ID NO: 1562065
guguccuagauauauugga

SEQ ID NO: 1719364 - RNA, 19 nt, Artificial Sequence
  Description of Artificial Sequence: Synthetic oligonucleotide
  Antisense strand to SEQ ID NO: 1719363
uccaauauaucuaggacac

SEQ ID NO: 1719365 - RNA, 19 nt, Artificial Sequence
  Description of Artificial Sequence: Synthetic oligonucleotide
  Sense strand starting at position 974 of SEQ ID NO: 1562065
auuggaguauuccuauaga

SEQ ID NO: 1719366 - RNA, 19 nt, Artificial Sequence
  Description of Artificial Sequence: Synthetic oligonucleotide
  Antisense strand to SEQ ID NO: 1719365
ucuauaggaauacuccaau

SEQ ID NO: 1719367 - RNA, 19 nt, Artificial Sequence
  Description of Artificial Sequence: Synthetic oligonucleotide
  Sense strand starting at position 1001 of SEQ ID NO: 1562065
ugagcauucggacaaauua

SEQ ID NO: 1719368 - RNA, 19 nt, Artificial Sequence
  Description of Artificial Sequence: Synthetic oligonucleotide
  Antisense strand to SEQ ID NO: 1719367
uaauuuguccgaaugcuca

SEQ ID NO: 1719369 - RNA, 19 nt, Artificial Sequence
  Description of Artificial Sequence: Synthetic oligonucleotide
  Sense strand starting at position 1047 of SEQ ID NO: 1562065
uccuguacgguggaguauu

SEQ ID NO: 1719370 - RNA, 19 nt, Artificial Sequence
  Description of Artificial Sequence: Synthetic oligonucleotide
  Antisense strand to SEQ ID NO: 1719369
aauacuccaccguacagga

SEQ ID NO: 1719371 - RNA, 19 nt, Artificial Sequence
  Description of Artificial Sequence: Synthetic oligonucleotide
  Sense strand starting at position 1055 of SEQ ID NO: 1562065
gguggaguauuccuaugua

SEQ ID NO: 1719372 - RNA, 19 nt, Artificial Sequence
  Description of Artificial Sequence: Synthetic oligonucleotide
  Antisense strand to SEQ ID NO: 1719371
uacauaggaauacuccacc

SEQ ID NO: 1719373 - RNA, 19 nt, Artificial Sequence
  Description of Artificial Sequence: Synthetic oligonucleotide
  Sense strand starting at position 1058 of SEQ ID NO: 1562065
ggaguauuccuauguagac

SEQ ID NO: 1719374 - RNA, 19 nt, Artificial Sequence
  Description of Artificial Sequence: Synthetic oligonucleotide
  Antisense strand to SEQ ID NO: 1719373
gucuacauaggaauacucc

SEQ ID NO: 1719375 - RNA, 19 nt, Artificial Sequence
  Description of Artificial Sequence: Synthetic oligonucleotide
  Sense strand starting at position 1059 of SEQ ID NO: 1562065
gaguauuccuauguagaca

SEQ ID NO: 1719376 - RNA, 19 nt, Artificial Sequence
  Description of Artificial Sequence: Synthetic oligonucleotide
  Antisense strand to SEQ ID NO: 1719375
ugucuacauaggaauacuc

SEQ ID NO: 1719377 - RNA, 19 nt, Artificial Sequence
  Description of Artificial Sequence: Synthetic oligonucleotide
  Sense strand starting at position 1229 of SEQ ID NO: 1562065
uggguaaaggugugaugaa

SEQ ID NO: 1719378 - RNA, 19 nt, Artificial Sequence
  Description of Artificial Sequence: Synthetic oligonucleotide
  Antisense strand to SEQ ID NO: 1719377
uucaucacaccuuuaccca

SEQ ID NO: 1719379 - RNA, 19 nt, Artificial Sequence
  Description of Artificial Sequence: Synthetic oligonucleotide
  Sense strand starting at position 1370 of SEQ ID NO: 1562065
aucauuaggucuccagaaa

SEQ ID NO: 1719380 - RNA, 19 nt, Artificial Sequence
  Description of Artificial Sequence: Synthetic oligonucleotide
  Antisense strand to SEQ ID NO: 1719379
uuucuggagaccuaaugau

SEQ ID NO: 1719381 - RNA, 19 nt, Artificial Sequence
  Description of Artificial Sequence: Synthetic oligonucleotide
  Sense strand starting at position 1390 of SEQ ID NO: 1562065
aaaggaggguccuuaauuc

SEQ ID NO: 1719382 - RNA, 19 nt, Artificial Sequence
  Description of Artificial Sequence: Synthetic oligonucleotide
  Antisense strand to SEQ ID NO: 1719381
gaauuaaggacccuccuuu

SEQ ID NO: 1719383 - RNA, 19 nt, Artificial Sequence
  Description of Artificial Sequence: Synthetic oligonucleotide
  Sense strand starting at position 1463 of SEQ ID NO: 1562065
ugaguaagccgagggaaga

SEQ ID NO: 1719384 - RNA, 19 nt, Artificial Sequence
  Description of Artificial Sequence: Synthetic oligonucleotide
  Antisense strand to SEQ ID NO: 1719383
ucuucccucggcuuacuca

SEQ ID NO: 1719385 - RNA, 19 nt, Artificial Sequence
  Description of Artificial Sequence: Synthetic oligonucleotide
  Sense strand starting at position 1743 of SEQ ID NO: 1562065
cuccgugaucuccagguga

SEQ ID NO: 1719386 - RNA, 19 nt, Artificial Sequence
  Description of Artificial Sequence: Synthetic oligonucleotide
  Antisense strand to SEQ ID NO: 1719385
ucaccuggagaucacggag

SEQ ID NO: 1719387 - RNA, 19 nt, Artificial Sequence
  Description of Artificial Sequence: Synthetic oligonucleotide
  Sense strand starting at position 1745 of SEQ ID NO: 1562065
ccgugaucuccaggugaca

SEQ ID NO: 1719388 - RNA, 19 nt, Artificial Sequence
  Description of Artificial Sequence: Synthetic oligonucleotide
  Antisense strand to SEQ ID NO: 1719387
ugucaccuggagaucacgg

SEQ ID NO: 1719389 - RNA, 19 nt, Artificial Sequence
  Description of Artificial Sequence: Synthetic oligonucleotide
  Sense strand starting at position 1774 of SEQ ID NO: 1562065
gcccuuugugagggacuca

SEQ ID NO: 1719390 - RNA, 19 nt, Artificial Sequence
  Description of Artificial Sequence: Synthetic oligonucleotide
  Antisense strand to SEQ ID NO: 1719389
ugagucccucacaaagggc

SEQ ID NO: 1719391 - RNA, 19 nt, Artificial Sequence
  Description of Artificial Sequence: Synthetic oligonucleotide
  Sense strand starting at position 2356 of SEQ ID NO: 1562065
cucuguuccugguuagaac

SEQ ID NO: 1719392 - RNA, 19 nt, Artificial Sequence
  Description of Artificial Sequence: Synthetic oligonucleotide
  Antisense strand to SEQ ID NO: 1719391
guucuaaccaggaacagag

SEQ ID NO: 1719393 - RNA, 19 nt, Artificial Sequence
  Description of Artificial Sequence: Synthetic oligonucleotide
  Sense strand starting at position 2357 of SEQ ID NO: 1562065
ucuguuccugguuagaacu

SEQ ID NO: 1719394 - RNA, 19 nt, Artificial Sequence
  Description of Artificial Sequence: Synthetic oligonucleotide
  Antisense strand to SEQ ID NO: 1719393
aguucuaaccaggaacaga

SEQ ID NO: 1719395 - RNA, 19 nt, Artificial Sequence
  Description of Artificial Sequence: Synthetic oligonucleotide
  Sense strand starting at position 2472 of SEQ ID NO: 1562065
cuuggcuaacgcgaugaaa

SEQ ID NO: 1719396 - RNA, 19 nt, Artificial Sequence
  Description of Artificial Sequence: Synthetic oligonucleotide
  Antisense strand to SEQ ID NO: 1719395
uuucaucgcguuagccaag

SEQ ID NO: 1719397 - RNA, 19 nt, Artificial Sequence
  Description of Artificial Sequence: Synthetic oligonucleotide
  Sense strand starting at position 3212 of SEQ ID NO: 1562065
agcugagugcuagaaccuu

SEQ ID NO: 1719398 - RNA, 19 nt, Artificial Sequence
  Description of Artificial Sequence: Synthetic oligonucleotide
  Antisense strand to SEQ ID NO: 1719397
aagguucuagcacucagcu

SEQ ID NO: 1719399 - RNA, 19 nt, Artificial Sequence
  Description of Artificial Sequence: Synthetic oligonucleotide
  Sense strand starting at position 3218 of SEQ ID NO: 1562065
gugcuagaaccuuggugau

SEQ ID NO: 1719400 - RNA, 19 nt, Artificial Sequence
  Description of Artificial Sequence: Synthetic oligonucleotide
  Antisense strand to SEQ ID NO: 1719399
aucaccaagguucuagcac

SEQ ID NO: 1719401 - RNA, 19 nt, Artificial Sequence
  Description of Artificial Sequence: Synthetic oligonucleotide
  Sense strand starting at position 3245 of SEQ ID NO: 1562065
ccuagacucugcccagaua

SEQ ID NO: 1719402 - RNA, 19 nt, Artificial Sequence
  Description of Artificial Sequence: Synthetic oligonucleotide
  Antisense strand to SEQ ID NO: 1719401
uaucugggcagagucuagg

SEQ ID NO: 1719403 - RNA, 19 nt, Artificial Sequence
  Description of Artificial Sequence: Synthetic oligonucleotide
  Sense strand starting at position 3267 of SEQ ID NO: 1562065
gagagaggugugugcaaga

SEQ ID NO: 1719404 - RNA, 19 nt, Artificial Sequence
  Description of Artificial Sequence: Synthetic oligonucleotide
  Antisense strand to SEQ ID NO: 1719403
ucuugcacacaccucucuc

SEQ ID NO: 1719405 - RNA, 19 nt, Artificial Sequence
  Description of Artificial Sequence: Synthetic oligonucleotide
  Sense strand starting at position 3347 of SEQ ID NO: 1562065
gcaauaaauugaccuccga

SEQ ID NO: 1719406 - RNA, 19 nt, Artificial Sequence
  Description of Artificial Sequence: Synthetic oligonucleotide
  Antisense strand to SEQ ID NO: 1719405
ucggaggucaauuuauugc

SEQ ID NO: 1719407 - RNA, 19 nt, Artificial Sequence
  Description of Artificial Sequence: Synthetic oligonucleotide
  Sense strand starting at position 3437 of SEQ ID NO: 1562065
caguguauucugcagauac

SEQ ID NO: 1719408 - RNA, 19 nt, Artificial Sequence
  Description of Artificial Sequence: Synthetic oligonucleotide
  Antisense strand to SEQ ID NO: 1719407
guaucugcagaauacacug

SEQ ID NO: 1719409 - RNA, 19 nt, Artificial Sequence
  Description of Artificial Sequence: Synthetic oligonucleotide
  Sense strand starting at position 3439 of SEQ ID NO: 1562065
guguauucugcagauacuc

SEQ ID NO: 1719410 - RNA, 19 nt, Artificial Sequence
  Description of Artificial Sequence: Synthetic oligonucleotide
  Antisense strand to SEQ ID NO: 1719409
gaguaucugcagaauacac

SEQ ID NO: 1719411 - RNA, 19 nt, Artificial Sequence
  Description of Artificial Sequence: Synthetic oligonucleotide
  Sense strand starting at position 3499 of SEQ ID NO: 1562065
gaaguuucuggagaggcua

SEQ ID NO: 1719412 - RNA, 19 nt, Artificial Sequence
  Description of Artificial Sequence: Synthetic oligonucleotide
  Antisense strand to SEQ ID NO: 1719411
uagccucuccagaaacuuc

SEQ ID NO: 1719413 - RNA, 19 nt, Artificial Sequence
  Description of Artificial Sequence: Synthetic oligonucleotide
  Sense strand starting at position 3684 of SEQ ID NO: 1562065
agcucaguagcuuaacuuu

SEQ ID NO: 1719414 - RNA, 19 nt, Artificial Sequence
  Description of Artificial Sequence: Synthetic oligonucleotide
  Antisense strand to SEQ ID NO: 1719413
aaaguuaagcuacugagcu

SEQ ID NO: 1719415 - RNA, 19 nt, Artificial Sequence
  Description of Artificial Sequence: Synthetic oligonucleotide
  Sense strand starting at position 3690 of SEQ ID NO: 1562065
guagcuuaacuuugggaag

SEQ ID NO: 1719416 - RNA, 19 nt, Artificial Sequence
  Description of Artificial Sequence: Synthetic oligonucleotide
  Antisense strand to SEQ ID NO: 1719415
cuucccaaaguuaagcuac

SEQ ID NO: 1719417 - RNA, 19 nt, Artificial Sequence
  Description of Artificial Sequence: Synthetic oligonucleotide
  Sense strand starting at position 3794 of SEQ ID NO: 1562065
gggaaacauuagugaauuu

SEQ ID NO: 1719418 - RNA, 19 nt, Artificial Sequence
  Description of Artificial Sequence: Synthetic oligonucleotide
  Antisense strand to SEQ ID NO: 1719417
aaauucacuaauguuuccc

SEQ ID NO: 1719419 - RNA, 19 nt, Artificial Sequence
  Description of Artificial Sequence: Synthetic oligonucleotide
  Sense strand starting at position 5 of SEQ ID NO: 1562066
ggaugaacauugcuuugga

SEQ ID NO: 1719420 - RNA, 19 nt, Artificial Sequence
  Description of Artificial Sequence: Synthetic oligonucleotide
  Antisense strand to SEQ ID NO: 1719419
uccaaagcaauguucaucc

SEQ ID NO: 1719421 - RNA, 19 nt, Artificial Sequence
  Description of Artificial Sequence: Synthetic oligonucleotide
  Sense strand starting at position 6 of SEQ ID NO: 1562066
gaugaacauugcuuuggaa

SEQ ID NO: 1719422 - RNA, 19 nt, Artificial Sequence
  Description of Artificial Sequence: Synthetic oligonucleotide
  Antisense strand to SEQ ID NO: 1719421
uuccaaagcaauguucauc

SEQ ID NO: 1719423 - RNA, 19 nt, Artificial Sequence
  Description of Artificial Sequence: Synthetic oligonucleotide
  Sense strand starting at position 8 of SEQ ID NO: 1562066
ugaacauugcuuuggaaau

SEQ ID NO: 1719424 - RNA, 19 nt, Artificial Sequence
  Description of Artificial Sequence: Synthetic oligonucleotide
  Antisense strand to SEQ ID NO: 1719423
auuuccaaagcaauguuca

SEQ ID NO: 1719425 - RNA, 19 nt, Artificial Sequence
  Description of Artificial Sequence: Synthetic oligonucleotide
  Sense strand starting at position 22 of SEQ ID NO: 1562066
gaaauaaugcaauguguga

SEQ ID NO: 1719426 - RNA, 19 nt, Artificial Sequence
  Description of Artificial Sequence: Synthetic oligonucleotide
  Antisense strand to SEQ ID NO: 1719425
ucacacauugcauuauuuc

SEQ ID NO: 1719427 - RNA, 19 nt, Artificial Sequence
  Description of Artificial Sequence: Synthetic oligonucleotide
  Sense strand starting at position 123 of SEQ ID NO: 1562066
aguuguacugaguaauuag

SEQ ID NO: 1719428 - RNA, 19 nt, Artificial Sequence
  Description of Artificial Sequence: Synthetic oligonucleotide
  Antisense strand to SEQ ID NO: 1719427
cuaauuacucaguacaacu

SEQ ID NO: 1719429 - RNA, 19 nt, Artificial Sequence
  Description of Artificial Sequence: Synthetic oligonucleotide
  Sense strand starting at position 130 of SEQ ID NO: 1562066
cugaguaauuaguugaaua

SEQ ID NO: 1719430 - RNA, 19 nt, Artificial Sequence
  Description of Artificial Sequence: Synthetic oligonucleotide
  Antisense strand to SEQ ID NO: 1719429
uauucaacuaauuacucag

SEQ ID NO: 1719431 - RNA, 19 nt, Artificial Sequence
  Description of Artificial Sequence: Synthetic oligonucleotide
  Sense strand starting at position 131 of SEQ ID NO: 1562066
ugaguaauuaguugaauag

SEQ ID NO: 1719432 - RNA, 19 nt, Artificial Sequence
  Description of Artificial Sequence: Synthetic oligonucleotide
  Antisense strand to SEQ ID NO: 1719431
cuauucaacuaauuacuca

SEQ ID NO: 1719433 - RNA, 19 nt, Artificial Sequence
  Description of Artificial Sequence: Synthetic oligonucleotide
  Sense strand starting at position 132 of SEQ ID NO: 1562066
gaguaauuaguugaauagu

SEQ ID NO: 1719434 - RNA, 19 nt, Artificial Sequence
  Description of Artificial Sequence: Synthetic oligonucleotide
  Antisense strand to SEQ ID NO: 1719433
acuauucaacuaauuacuc

SEQ ID NO: 1719435 - RNA, 19 nt, Artificial Sequence
  Description of Artificial Sequence: Synthetic oligonucleotide
  Sense strand starting at position 141 of SEQ ID NO: 1562066
guugaauaguaucuaugga

SEQ ID NO: 1719436 - RNA, 19 nt, Artificial Sequence
  Description of Artificial Sequence: Synthetic oligonucleotide
  Antisense strand to SEQ ID NO: 1719435
uccauagauacuauucaac

SEQ ID NO: 1719437 - RNA, 19 nt, Artificial Sequence
  Description of Artificial Sequence: Synthetic oligonucleotide
  Sense strand starting at position 250 of SEQ ID NO: 1562066
aucucuuuagugcagaaga

SEQ ID NO: 1719438 - RNA, 19 nt, Artificial Sequence
  Description of Artificial Sequence: Synthetic oligonucleotide
  Antisense strand to SEQ ID NO: 1719437
ucuucugcacuaaagagau

SEQ ID NO: 1719439 - RNA, 19 nt, Artificial Sequence
  Description of Artificial Sequence: Synthetic oligonucleotide
  Sense strand starting at position 252 of SEQ ID NO: 1562066
cucuuuagugcagaagauc

SEQ ID NO: 1719440 - RNA, 19 nt, Artificial Sequence
  Description of Artificial Sequence: Synthetic oligonucleotide
  Antisense strand to SEQ ID NO: 1719439
gaucuucugcacuaaagag

SEQ ID NO: 1719441 - RNA, 19 nt, Artificial Sequence
  Description of Artificial Sequence: Synthetic oligonucleotide
  Sense strand starting at position 261 of SEQ ID NO: 1562066
gcagaagauccuuggcaaa

SEQ ID NO: 1719442 - RNA, 19 nt, Artificial Sequence
  Description of Artificial Sequence: Synthetic oligonucleotide
  Antisense strand to SEQ ID NO: 1719441
uuugccaaggaucuucugc

SEQ ID NO: 1719443 - RNA, 19 nt, Artificial Sequence
  Description of Artificial Sequence: Synthetic oligonucleotide
  Sense strand starting at position 272 of SEQ ID NO: 1562066
uuggcaaagcuggauaaua

SEQ ID NO: 1719444 - RNA, 19 nt, Artificial Sequence
  Description of Artificial Sequence: Synthetic oligonucleotide
  Antisense strand to SEQ ID NO: 1719443
uauuauccagcuuugccaa

SEQ ID NO: 1719445 - RNA, 19 nt, Artificial Sequence
  Description of Artificial Sequence: Synthetic oligonucleotide
  Sense strand starting at position 923 of SEQ ID NO: 1562066
ugggcaucucaacauuauu

SEQ ID NO: 1719446 - RNA, 19 nt, Artificial Sequence
  Description of Artificial Sequence: Synthetic oligonucleotide
  Antisense strand to SEQ ID NO: 1719445
aauaauguugagaugccca

SEQ ID NO: 1719447 - RNA, 19 nt, Artificial Sequence
  Description of Artificial Sequence: Synthetic oligonucleotide
  Sense strand starting at position 1056 of SEQ ID NO: 1562066
ugaccuuuagaguguaaag

SEQ ID NO: 1719448 - RNA, 19 nt, Artificial Sequence
  Description of Artificial Sequence: Synthetic oligonucleotide
  Antisense strand to SEQ ID NO: 1719447
cuuuacacucuaaagguca

SEQ ID NO: 1719449 - RNA, 19 nt, Artificial Sequence
  Description of Artificial Sequence: Synthetic oligonucleotide
  Sense strand starting at position 1058 of SEQ ID NO: 1562066
accuuuagaguguaaaguu

SEQ ID NO: 1719450 - RNA, 19 nt, Artificial Sequence
  Description of Artificial Sequence: Synthetic oligonucleotide
  Antisense strand to SEQ ID NO: 1719449
aacuuuacacucuaaaggu

SEQ ID NO: 1719451 - RNA, 19 nt, Artificial Sequence
  Description of Artificial Sequence: Synthetic oligonucleotide
  Sense strand starting at position 1180 of SEQ ID NO: 1562066
cuaguuacugagcacuuaa

SEQ ID NO: 1719452 - RNA, 19 nt, Artificial Sequence
  Description of Artificial Sequence: Synthetic oligonucleotide
  Antisense strand to SEQ ID NO: 1719451
uuaagugcucaguaacuag

SEQ ID NO: 1719453 - RNA, 19 nt, Artificial Sequence
  Description of Artificial Sequence: Synthetic oligonucleotide
  Sense strand starting at position 1219 of SEQ ID NO: 1562066
aagugugcugaucgaauuu

SEQ ID NO: 1719454 - RNA, 19 nt, Artificial Sequence
  Description of Artificial Sequence: Synthetic oligonucleotide
  Antisense strand to SEQ ID NO: 1719453
aaauucgaucagcacacuu

SEQ ID NO: 1719455 - RNA, 19 nt, Artificial Sequence
  Description of Artificial Sequence: Synthetic oligonucleotide
  Sense strand starting at position 1391 of SEQ ID NO: 1562066
gacuuuacagauugaaggu

SEQ ID NO: 1719456 - RNA, 19 nt, Artificial Sequence
  Description of Artificial Sequence: Synthetic oligonucleotide
  Antisense strand to SEQ ID NO: 1719455
accuucaaucuguaaaguc

SEQ ID NO: 1719457 - RNA, 19 nt, Artificial Sequence
  Description of Artificial Sequence: Synthetic oligonucleotide
  Sense strand starting at position 1400 of SEQ ID NO: 1562066
gauugaaggugguuuggaa

SEQ ID NO: 1719458 - RNA, 19 nt, Artificial Sequence
  Description of Artificial Sequence: Synthetic oligonucleotide
  Antisense strand to SEQ ID NO: 1719457
uuccaaaccaccuucaauc

SEQ ID NO: 1719459 - RNA, 19 nt, Artificial Sequence
  Description of Artificial Sequence: Synthetic oligonucleotide
  Sense strand starting at position 1512 of SEQ ID NO: 1562066
uuguccugcccagagauca

SEQ ID NO: 1719460 - RNA, 19 nt, Artificial Sequence
  Description of Artificial Sequence: Synthetic oligonucleotide
  Antisense strand to SEQ ID NO: 1719459
ugaucucugggcaggacaa

SEQ ID NO: 1719461 - RNA, 19 nt, Artificial Sequence
  Description of Artificial Sequence: Synthetic oligonucleotide
  Sense strand starting at position 2180 of SEQ ID NO: 1562066
cugaauauuccggagccuu

SEQ ID NO: 1719462 - RNA, 19 nt, Artificial Sequence
  Description of Artificial Sequence: Synthetic oligonucleotide
  Antisense strand to SEQ ID NO: 1719461
aaggcuccggaauauucag

SEQ ID NO: 1719463 - RNA, 19 nt, Artificial Sequence
  Description of Artificial Sequence: Synthetic oligonucleotide
  Sense strand starting at position 2785 of SEQ ID NO: 1562066
agugcugcgaccucucuau

SEQ ID NO: 1719464 - RNA, 19 nt, Artificial Sequence
  Description of Artificial Sequence: Synthetic oligonucleotide
  Antisense strand to SEQ ID NO: 1719463
auagagaggucgcagcacu

SEQ ID NO: 1719465 - RNA, 19 nt, Artificial Sequence
  Description of Artificial Sequence: Synthetic oligonucleotide
  Sense strand starting at position 2791 of SEQ ID NO: 1562066
gcgaccucucuauauggau

SEQ ID NO: 1719466 - RNA, 19 nt, Artificial Sequence
  Description of Artificial Sequence: Synthetic oligonucleotide
  Antisense strand to SEQ ID NO: 1719465
auccauauagagaggucgc

SEQ ID NO: 1719467 - RNA, 19 nt, Artificial Sequence
  Description of Artificial Sequence: Synthetic oligonucleotide
  Sense strand starting at position 2817 of SEQ ID NO: 1562066
cuacaacuccucugguaag

SEQ ID NO: 1719468 - RNA, 19 nt, Artificial Sequence
  Description of Artificial Sequence: Synthetic oligonucleotide
  Antisense strand to SEQ ID NO: 1719467
cuuaccagaggaguuguag

SEQ ID NO: 1719469 - RNA, 19 nt, Artificial Sequence
  Description of Artificial Sequence: Synthetic oligonucleotide
  Sense strand starting at position 2899 of SEQ ID NO: 1562066
ggcugaaucccuggagaag

SEQ ID NO: 1719470 - RNA, 19 nt, Artificial Sequence
  Description of Artificial Sequence: Synthetic oligonucleotide
  Antisense strand to SEQ ID NO: 1719469
cuucuccagggauucagcc

SEQ ID NO: 1719471 - RNA, 19 nt, Artificial Sequence
  Description of Artificial Sequence: Synthetic oligonucleotide
  Sense strand starting at position 2900 of SEQ ID NO: 1562066
gcugaaucccuggagaagu

SEQ ID NO: 1719472 - RNA, 19 nt, Artificial Sequence
  Description of Artificial Sequence: Synthetic oligonucleotide
  Antisense strand to SEQ ID NO: 1719471
acuucuccagggauucagc

SEQ ID NO: 1719473 - RNA, 19 nt, Artificial Sequence
  Description of Artificial Sequence: Synthetic oligonucleotide
  Sense strand starting at position 3012 of SEQ ID NO: 1562066
aauugaccuuggucagauc

SEQ ID NO: 1719474 - RNA, 19 nt, Artificial Sequence
  Description of Artificial Sequence: Synthetic oligonucleotide
  Antisense strand to SEQ ID NO: 1719473
gaucugaccaaggucaauu

SEQ ID NO: 1719475 - RNA, 19 nt, Artificial Sequence
  Description of Artificial Sequence: Synthetic oligonucleotide
  Sense strand starting at position 3116 of SEQ ID NO: 1562066
acaaguauuaaacggguua

SEQ ID NO: 1719476 - RNA, 19 nt, Artificial Sequence
  Description of Artificial Sequence: Synthetic oligonucleotide
  Antisense strand to SEQ ID NO: 1719475
uaacccguuuaauacuugu

SEQ ID NO: 1719477 - RNA, 19 nt, Artificial Sequence
  Description of Artificial Sequence: Synthetic oligonucleotide
  Sense strand starting at position 3628 of SEQ ID NO: 1562066
guuaguacacaggagucua

SEQ ID NO: 1719478 - RNA, 19 nt, Artificial Sequence
  Description of Artificial Sequence: Synthetic oligonucleotide
  Antisense strand to SEQ ID NO: 1719477
uagacuccuguguacuaac

SEQ ID NO: 1719479 - RNA, 19 nt, Artificial Sequence
  Description of Artificial Sequence: Synthetic oligonucleotide
  Sense strand starting at position 3685 of SEQ ID NO: 1562066
aggcauuucuuucuuggua

SEQ ID NO: 1719480 - RNA, 19 nt, Artificial Sequence
  Description of Artificial Sequence: Synthetic oligonucleotide
  Antisense strand to SEQ ID NO: 1719479
uaccaagaaagaaaugccu

SEQ ID NO: 1719481 - RNA, 19 nt, Artificial Sequence
  Description of Artificial Sequence: Synthetic oligonucleotide
  Sense strand starting at position 3706 of SEQ ID NO: 1562066
ugugcauggagguagaaau

SEQ ID NO: 1719482 - RNA, 19 nt, Artificial Sequence
  Description of Artificial Sequence: Synthetic oligonucleotide
  Antisense strand to SEQ ID NO: 1719481
auuucuaccuccaugcaca

SEQ ID NO: 1719483 - RNA, 19 nt, Artificial Sequence
  Description of Artificial Sequence: Synthetic oligonucleotide
  Sense strand starting at position 3728 of SEQ ID NO: 1562066
uuuggauucuuucuggaag

SEQ ID NO: 1719484 - RNA, 19 nt, Artificial Sequence
  Description of Artificial Sequence: Synthetic oligonucleotide
  Antisense strand to SEQ ID NO: 1719483
cuuccagaaagaauccaaa

SEQ ID NO: 1719485 - RNA, 19 nt, Artificial Sequence
  Description of Artificial Sequence: Synthetic oligonucleotide
  Sense strand starting at position 3781 of SEQ ID NO: 1562066
gcauuugauugguucccau

SEQ ID NO: 1719486 - RNA, 19 nt, Artificial Sequence
  Description of Artificial Sequence: Synthetic oligonucleotide
  Antisense strand to SEQ ID NO: 1719485
augggaaccaaucaaaugc

SEQ ID NO: 1719487 - RNA, 19 nt, Artificial Sequence
  Description of Artificial Sequence: Synthetic oligonucleotide
  Sense strand starting at position 3893 of SEQ ID NO: 1562066
aggguuacuggguggauua

SEQ ID NO: 1719488 - RNA, 19 nt, Artificial Sequence
  Description of Artificial Sequence: Synthetic oligonucleotide
  Antisense strand to SEQ ID NO: 1719487
uaauccacccaguaacccu

SEQ ID NO: 1719489 - RNA, 19 nt, Artificial Sequence
  Description of Artificial Sequence: Synthetic oligonucleotide
  Sense strand starting at position 3894 of SEQ ID NO: 1562066
ggguuacuggguggauuaa

SEQ ID NO: 1719490 - RNA, 19 nt, Artificial Sequence
  Description of Artificial Sequence: Synthetic oligonucleotide
  Antisense strand to SEQ ID NO: 1719489
uuaauccacccaguaaccc

SEQ ID NO: 1719491 - RNA, 19 nt, Artificial Sequence
  Description of Artificial Sequence: Synthetic oligonucleotide
  Sense strand starting at position 3924 of SEQ ID NO: 1562066
cugauaaaguguuuauuac

SEQ ID NO: 1719492 - RNA, 19 nt, Artificial Sequence
  Description of Artificial Sequence: Synthetic oligonucleotide
  Antisense strand to SEQ ID NO: 1719491
guaauaaacacuuuaucag

SEQ ID NO: 1719493 - RNA, 19 nt, Artificial Sequence
  Description of Artificial Sequence: Synthetic oligonucleotide
  Sense strand starting at position 3941 of SEQ ID NO: 1562066
accacaacaucuguaagua

SEQ ID NO: 1719494 - RNA, 19 nt, Artificial Sequence
  Description of Artificial Sequence: Synthetic oligonucleotide
  Antisense strand to SEQ ID NO: 1719493
uacuuacagauguuguggu

SEQ ID NO: 1719495 - RNA, 19 nt, Artificial Sequence
  Description of Artificial Sequence: Synthetic oligonucleotide
  Sense strand starting at position 3973 of SEQ ID NO: 1562066
auaguaagagcucaauagu

SEQ ID NO: 1719496 - RNA, 19 nt, Artificial Sequence
  Description of Artificial Sequence: Synthetic oligonucleotide
  Antisense strand to SEQ ID NO: 1719495
acuauugagcucuuacuau

SEQ ID NO: 1719497 - RNA, 19 nt, Artificial Sequence
  Description of Artificial Sequence: Synthetic oligonucleotide
  Sense strand starting at position 3976 of SEQ ID NO: 1562066
guaagagcucaauaguucu

SEQ ID NO: 1719498 - RNA, 19 nt, Artificial Sequence
  Description of Artificial Sequence: Synthetic oligonucleotide
  Antisense strand to SEQ ID NO: 1719497
agaacuauugagcucuuac

SEQ ID NO: 1719499 - RNA, 19 nt, Artificial Sequence
  Description of Artificial Sequence: Synthetic oligonucleotide
  Sense strand starting at position 121 of SEQ ID NO: 1562067
guucuaagcagaggaguga

SEQ ID NO: 1719500 - RNA, 19 nt, Artificial Sequence
  Description of Artificial Sequence: Synthetic oligonucleotide
  Antisense strand to SEQ ID NO: 1719499
ucacuccucugcuuagaac

SEQ ID NO: 1719501 - RNA, 19 nt, Artificial Sequence
  Description of Artificial Sequence: Synthetic oligonucleotide
  Sense strand starting at position 142 of SEQ ID NO: 1562067
ugacuuacacucuaauggu

SEQ ID NO: 1719502 - RNA, 19 nt, Artificial Sequence
  Description of Artificial Sequence: Synthetic oligonucleotide
  Antisense strand to SEQ ID NO: 1719501
accauuagaguguaaguca

SEQ ID NO: 1719503 - RNA, 19 nt, Artificial Sequence
  Description of Artificial Sequence: Synthetic oligonucleotide
  Sense strand starting at position 156 of SEQ ID NO: 1562067
augguauuacuguguugag

SEQ ID NO: 1719504 - RNA, 19 nt, Artificial Sequence
  Description of Artificial Sequence: Synthetic oligonucleotide
  Antisense strand to SEQ ID NO: 1719503
cucaacacaguaauaccau

SEQ ID NO: 1719505 - RNA, 19 nt, Artificial Sequence
  Description of Artificial Sequence: Synthetic oligonucleotide
  Sense strand starting at position 157 of SEQ ID NO: 1562067
ugguauuacuguguugaga

SEQ ID NO: 1719506 - RNA, 19 nt, Artificial Sequence
  Description of Artificial Sequence: Synthetic oligonucleotide
  Antisense strand to SEQ ID NO: 1719505
ucucaacacaguaauacca

SEQ ID NO: 1719507 - RNA, 19 nt, Artificial Sequence
  Description of Artificial Sequence: Synthetic oligonucleotide
  Sense strand starting at position 160 of SEQ ID NO: 1562067
uauuacuguguugagaaua

SEQ ID NO: 1719508 - RNA, 19 nt, Artificial Sequence
  Description of Artificial Sequence: Synthetic oligonucleotide
  Antisense strand to SEQ ID NO: 1719507
uauucucaacacaguaaua

SEQ ID NO: 1719509 - RNA, 19 nt, Artificial Sequence
  Description of Artificial Sequence: Synthetic oligonucleotide
  Sense strand starting at position 178 of SEQ ID NO: 1562067
aaacaauacuguguggaga

SEQ ID NO: 1719510 - RNA, 19 nt, Artificial Sequence
  Description of Artificial Sequence: Synthetic oligonucleotide
  Antisense strand to SEQ ID NO: 1719509
ucuccacacaguauuguuu

SEQ ID NO: 1719511 - RNA, 19 nt, Artificial Sequence
  Description of Artificial Sequence: Synthetic oligonucleotide
  Sense strand starting at position 179 of SEQ ID NO: 1562067
aacaauacuguguggagaa

SEQ ID NO: 1719512 - RNA, 19 nt, Artificial Sequence
  Description of Artificial Sequence: Synthetic oligonucleotide
  Antisense strand to SEQ ID NO: 1719511
uucuccacacaguauuguu

SEQ ID NO: 1719513 - RNA, 19 nt, Artificial Sequence
  Description of Artificial Sequence: Synthetic oligonucleotide
  Sense strand starting at position 301 of SEQ ID NO: 1562067
ugaacaugaugagaaguga

SEQ ID NO: 1719514 - RNA, 19 nt, Artificial Sequence
  Description of Artificial Sequence: Synthetic oligonucleotide
  Antisense strand to SEQ ID NO: 1719513
ucacuucucaucauguuca

SEQ ID NO: 1719515 - RNA, 19 nt, Artificial Sequence
  Description of Artificial Sequence: Synthetic oligonucleotide
  Sense strand starting at position 323 of SEQ ID NO: 1562067
gaguuagucuggcuagaau

SEQ ID NO: 1719516 - RNA, 19 nt, Artificial Sequence
  Description of Artificial Sequence: Synthetic oligonucleotide
  Antisense strand to SEQ ID NO: 1719515
auucuagccagacuaacuc

SEQ ID NO: 1719517 - RNA, 19 nt, Artificial Sequence
  Description of Artificial Sequence: Synthetic oligonucleotide
  Sense strand starting at position 441 of SEQ ID NO: 1562067
gcggguacccaauauauga

SEQ ID NO: 1719518 - RNA, 19 nt, Artificial Sequence
  Description of Artificial Sequence: Synthetic oligonucleotide
  Antisense strand to SEQ ID NO: 1719517
ucauauauuggguacccgc

SEQ ID NO: 1719519 - RNA, 19 nt, Artificial Sequence
  Description of Artificial Sequence: Synthetic oligonucleotide
  Sense strand starting at position 552 of SEQ ID NO: 1562067
ccauguuaacgagagcagu

SEQ ID NO: 1719520 - RNA, 19 nt, Artificial Sequence
  Description of Artificial Sequence: Synthetic oligonucleotide
  Antisense strand to SEQ ID NO: 1719519
acugcucucguuaacaugg

SEQ ID NO: 1719521 - RNA, 19 nt, Artificial Sequence
  Description of Artificial Sequence: Synthetic oligonucleotide
  Sense strand starting at position 558 of SEQ ID NO: 1562067
uaacgagagcaguaacuuu

SEQ ID NO: 1719522 - RNA, 19 nt, Artificial Sequence
  Description of Artificial Sequence: Synthetic oligonucleotide
  Antisense strand to SEQ ID NO: 1719521
aaaguuacugcucucguua

SEQ ID NO: 1719523 - RNA, 19 nt, Artificial Sequence
  Description of Artificial Sequence: Synthetic oligonucleotide
  Sense strand starting at position 828 of SEQ ID NO: 1562067
cggugagccacugacucau

SEQ ID NO: 1719524 - RNA, 19 nt, Artificial Sequence
  Description of Artificial Sequence: Synthetic oligonucleotide
  Antisense strand to SEQ ID NO: 1719523
augagucaguggcucaccg

SEQ ID NO: 1719525 - RNA, 19 nt, Artificial Sequence
  Description of Artificial Sequence: Synthetic oligonucleotide
  Sense strand starting at position 934 of SEQ ID NO: 1562067
caaaguuacgaugaggcua

SEQ ID NO: 1719526 - RNA, 19 nt, Artificial Sequence
  Description of Artificial Sequence: Synthetic oligonucleotide
  Antisense strand to SEQ ID NO: 1719525
uagccucaucguaacuuug

SEQ ID NO: 1719527 - RNA, 19 nt, Artificial Sequence
  Description of Artificial Sequence: Synthetic oligonucleotide
  Sense strand starting at position 984 of SEQ ID NO: 1562067
aguaacuuccaaugcaguu

SEQ ID NO: 1719528 - RNA, 19 nt, Artificial Sequence
  Description of Artificial Sequence: Synthetic oligonucleotide
  Antisense strand to SEQ ID NO: 1719527
aacugcauuggaaguuacu

SEQ ID NO: 1719529 - RNA, 19 nt, Artificial Sequence
  Description of Artificial Sequence: Synthetic oligonucleotide
  Sense strand starting at position 1082 of SEQ ID NO: 1562067
ggcagauaacgugacuaau

SEQ ID NO: 1719530 - RNA, 19 nt, Artificial Sequence
  Description of Artificial Sequence: Synthetic oligonucleotide
  Antisense strand to SEQ ID NO: 1719529
auuagucacguuaucugcc

SEQ ID NO: 1719531 - RNA, 19 nt, Artificial Sequence
  Description of Artificial Sequence: Synthetic oligonucleotide
  Sense strand starting at position 1153 of SEQ ID NO: 1562067
ccugcuuuggguuacacaa

SEQ ID NO: 1719532 - RNA, 19 nt, Artificial Sequence
  Description of Artificial Sequence: Synthetic oligonucleotide
  Antisense strand to SEQ ID NO: 1719531
uuguguaacccaaagcagg

SEQ ID NO: 1719533 - RNA, 19 nt, Artificial Sequence
  Description of Artificial Sequence: Synthetic oligonucleotide
  Sense strand starting at position 1160 of SEQ ID NO: 1562067
uggguuacacaaugaauac

SEQ ID NO: 1719534 - RNA, 19 nt, Artificial Sequence
  Description of Artificial Sequence: Synthetic oligonucleotide
  Antisense strand to SEQ ID NO: 1719533
guauucauuguguaaccca

SEQ ID NO: 1719535 - RNA, 19 nt, Artificial Sequence
  Description of Artificial Sequence: Synthetic oligonucleotide
  Sense strand starting at position 1200 of SEQ ID NO: 1562067
ccuagagugucacuugaga

SEQ ID NO: 1719536 - RNA, 19 nt, Artificial Sequence
  Description of Artificial Sequence: Synthetic oligonucleotide
  Antisense strand to SEQ ID NO: 1719535
ucucaagugacacucuagg

SEQ ID NO: 1719537 - RNA, 19 nt, Artificial Sequence
  Description of Artificial Sequence: Synthetic oligonucleotide
  Sense strand starting at position 2058 of SEQ ID NO: 1562067
gccugucugcugucacuca

SEQ ID NO: 1719538 - RNA, 19 nt, Artificial Sequence
  Description of Artificial Sequence: Synthetic oligonucleotide
  Antisense strand to SEQ ID NO: 1719537
ugagugacagcagacaggc

SEQ ID NO: 1719539 - RNA, 19 nt, Artificial Sequence
  Description of Artificial Sequence: Synthetic oligonucleotide
  Sense strand starting at position 2527 of SEQ ID NO: 1562067
guuaauaacugaccuacga

SEQ ID NO: 1719540 - RNA, 19 nt, Artificial Sequence
  Description of Artificial Sequence: Synthetic oligonucleotide
  Antisense strand to SEQ ID NO: 1719539
ucguaggucaguuauuaac

SEQ ID NO: 1719541 - RNA, 19 nt, Artificial Sequence
  Description of Artificial Sequence: Synthetic oligonucleotide
  Sense strand starting at position 2567 of SEQ ID NO: 1562067
agagcaaugcagugacuca

SEQ ID NO: 1719542 - RNA, 19 nt, Artificial Sequence
  Description of Artificial Sequence: Synthetic oligonucleotide
  Antisense strand to SEQ ID NO: 1719541
ugagucacugcauugcucu

SEQ ID NO: 1719543 - RNA, 19 nt, Artificial Sequence
  Description of Artificial Sequence: Synthetic oligonucleotide
  Sense strand starting at position 2639 of SEQ ID NO: 1562067
ggaacaccgcucuaauaac

SEQ ID NO: 1719544 - RNA, 19 nt, Artificial Sequence
  Description of Artificial Sequence: Synthetic oligonucleotide
  Antisense strand to SEQ ID NO: 1719543
guuauuagagcgguguucc

SEQ ID NO: 1719545 - RNA, 19 nt, Artificial Sequence
  Description of Artificial Sequence: Synthetic oligonucleotide
  Sense strand starting at position 2739 of SEQ ID NO: 1562067
uuuauugauacgggaucuu

SEQ ID NO: 1719546 - RNA, 19 nt, Artificial Sequence
  Description of Artificial Sequence: Synthetic oligonucleotide
  Antisense strand to SEQ ID NO: 1719545
aagaucccguaucaauaaa

SEQ ID NO: 1719547 - RNA, 19 nt, Artificial Sequence
  Description of Artificial Sequence: Synthetic oligonucleotide
  Sense strand starting at position 3129 of SEQ ID NO: 1562067
acguuauuauugucccaaa

SEQ ID NO: 1719548 - RNA, 19 nt, Artificial Sequence
  Description of Artificial Sequence: Synthetic oligonucleotide
  Antisense strand to SEQ ID NO: 1719547
uuugggacaauaauaacgu

SEQ ID NO: 1719549 - RNA, 19 nt, Artificial Sequence
  Description of Artificial Sequence: Synthetic oligonucleotide
  Sense strand starting at position 3146 of SEQ ID NO: 1562067
aauguuaucccgcauggga

SEQ ID NO: 1719550 - RNA, 19 nt, Artificial Sequence
  Description of Artificial Sequence: Synthetic oligonucleotide
  Antisense strand to SEQ ID NO: 1719549
ucccaugcgggauaacauu

SEQ ID NO: 1719551 - RNA, 19 nt, Artificial Sequence
  Description of Artificial Sequence: Synthetic oligonucleotide
  Sense strand starting at position 3148 of SEQ ID NO: 1562067
uguuaucccgcaugggaga

SEQ ID NO: 1719552 - RNA, 19 nt, Artificial Sequence
  Description of Artificial Sequence: Synthetic oligonucleotide
  Antisense strand to SEQ ID NO: 1719551
ucucccaugcgggauaaca

SEQ ID NO: 1719553 - RNA, 19 nt, Artificial Sequence
  Description of Artificial Sequence: Synthetic oligonucleotide
  Sense strand starting at position 3161 of SEQ ID NO: 1562067
gggagagagucaguucuuu

SEQ ID NO: 1719554 - RNA, 19 nt, Artificial Sequence
  Description of Artificial Sequence: Synthetic oligonucleotide
  Antisense strand to SEQ ID NO: 1719553
aaagaacugacucucuccc

SEQ ID NO: 1719555 - RNA, 19 nt, Artificial Sequence
  Description of Artificial Sequence: Synthetic oligonucleotide
  Sense strand starting at position 3173 of SEQ ID NO: 1562067
guucuuucugugucuguua

SEQ ID NO: 1719556 - RNA, 19 nt, Artificial Sequence
  Description of Artificial Sequence: Synthetic oligonucleotide
  Antisense strand to SEQ ID NO: 1719555
uaacagacacagaaagaac

SEQ ID NO: 1719557 - RNA, 19 nt, Artificial Sequence
  Description of Artificial Sequence: Synthetic oligonucleotide
  Sense strand starting at position 3371 of SEQ ID NO: 1562067
gaaaguuccauugggcagu

SEQ ID NO: 1719558 - RNA, 19 nt, Artificial Sequence
  Description of Artificial Sequence: Synthetic oligonucleotide
  Antisense strand to SEQ ID NO: 1719557
acugcccaauggaacuuuc

SEQ ID NO: 1719559 - RNA, 19 nt, Artificial Sequence
  Description of Artificial Sequence: Synthetic oligonucleotide
  Sense strand starting at position 3387 of SEQ ID NO: 1562067
agugcugauguagaauaua

SEQ ID NO: 1719560 - RNA, 19 nt, Artificial Sequence
  Description of Artificial Sequence: Synthetic oligonucleotide
  Antisense strand to SEQ ID NO: 1719559
uauauucuacaucagcacu

SEQ ID NO: 1719561 - RNA, 19 nt, Artificial Sequence
  Description of Artificial Sequence: Synthetic oligonucleotide
  Sense strand starting at position 3461 of SEQ ID NO: 1562067
gucucauacuaucuugaga

SEQ ID NO: 1719562 - RNA, 19 nt, Artificial Sequence
  Description of Artificial Sequence: Synthetic oligonucleotide
  Antisense strand to SEQ ID NO: 1719561
ucucaagauaguaugagac

SEQ ID NO: 1719563 - RNA, 19 nt, Artificial Sequence
  Description of Artificial Sequence: Synthetic oligonucleotide
  Sense strand starting at position 3474 of SEQ ID NO: 1562067
uugagaguccauuguuaaa

SEQ ID NO: 1719564 - RNA, 19 nt, Artificial Sequence
  Description of Artificial Sequence: Synthetic oligonucleotide
  Antisense strand to SEQ ID NO: 1719563
uuuaacaauggacucucaa

SEQ ID NO: 1719565 - RNA, 19 nt, Artificial Sequence
  Description of Artificial Sequence: Synthetic oligonucleotide
  Sense strand starting at position 3476 of SEQ ID NO: 1562067
gagaguccauuguuaaauu

SEQ ID NO: 1719566 - RNA, 19 nt, Artificial Sequence
  Description of Artificial Sequence: Synthetic oligonucleotide
  Antisense strand to SEQ ID NO: 1719565
aauuuaacaauggacucuc

SEQ ID NO: 1719567 - RNA, 19 nt, Artificial Sequence
  Description of Artificial Sequence: Synthetic oligonucleotide
  Sense strand starting at position 3477 of SEQ ID NO: 1562067
agaguccauuguuaaauuu

SEQ ID NO: 1719568 - RNA, 19 nt, Artificial Sequence
  Description of Artificial Sequence: Synthetic oligonucleotide
  Antisense strand to SEQ ID NO: 1719567
aaauuuaacaauggacucu

SEQ ID NO: 1719569 - RNA, 19 nt, Artificial Sequence
  Description of Artificial Sequence: Synthetic oligonucleotide
  Sense strand starting at position 3505 of SEQ ID NO: 1562067
uugcaaauugguuaaauac

SEQ ID NO: 1719570 - RNA, 19 nt, Artificial Sequence
  Description of Artificial Sequence: Synthetic oligonucleotide
  Antisense strand to SEQ ID NO: 1719569
guauuuaaccaauuugcaa

SEQ ID NO: 1719571 - RNA, 19 nt, Artificial Sequence
  Description of Artificial Sequence: Synthetic oligonucleotide
  Sense strand starting at position 3658 of SEQ ID NO: 1562067
gguggaaauauaugacagu

SEQ ID NO: 1719572 - RNA, 19 nt, Artificial Sequence
  Description of Artificial Sequence: Synthetic oligonucleotide
  Antisense strand to SEQ ID NO: 1719571
acugucauauauuuccacc

SEQ ID NO: 1719573 - RNA, 19 nt, Artificial Sequence
  Description of Artificial Sequence: Synthetic oligonucleotide
  Sense strand starting at position 3672 of SEQ ID NO: 1562067
acaguaugccauugaacau

SEQ ID NO: 1719574 - RNA, 19 nt, Artificial Sequence
  Description of Artificial Sequence: Synthetic oligonucleotide
  Antisense strand to SEQ ID NO: 1719573
auguucaauggcauacugu

SEQ ID NO: 1719575 - RNA, 19 nt, Artificial Sequence
  Description of Artificial Sequence: Synthetic oligonucleotide
  Sense strand starting at position 3689 of SEQ ID NO: 1562067
aucucuucccaagguagua

SEQ ID NO: 1719576 - RNA, 19 nt, Artificial Sequence
  Description of Artificial Sequence: Synthetic oligonucleotide
  Antisense strand to SEQ ID NO: 1719575
uacuaccuugggaagagau

SEQ ID NO: 1719577 - RNA, 19 nt, Artificial Sequence
  Description of Artificial Sequence: Synthetic oligonucleotide
  Sense strand starting at position 3756 of SEQ ID NO: 1562067
agcauaugcagccaggaau

SEQ ID NO: 1719578 - RNA, 19 nt, Artificial Sequence
  Description of Artificial Sequence: Synthetic oligonucleotide
  Antisense strand to SEQ ID NO: 1719577
auuccuggcugcauaugcu

SEQ ID NO: 1719579 - RNA, 19 nt, Artificial Sequence
  Description of Artificial Sequence: Synthetic oligonucleotide
  Sense strand starting at position 24 of SEQ ID NO: 1562068
agaacugggucuccugaaa

SEQ ID NO: 1719580 - RNA, 19 nt, Artificial Sequence
  Description of Artificial Sequence: Synthetic oligonucleotide
  Antisense strand to SEQ ID NO: 1719579
uuucaggagacccaguucu

SEQ ID NO: 1719581 - RNA, 19 nt, Artificial Sequence
  Description of Artificial Sequence: Synthetic oligonucleotide
  Sense strand starting at position 275 of SEQ ID NO: 1562068
uuaugaaacucauccggga

SEQ ID NO: 1719582 - RNA, 19 nt, Artificial Sequence
  Description of Artificial Sequence: Synthetic oligonucleotide
  Antisense strand to SEQ ID NO: 1719581
ucccggaugaguuucauaa

SEQ ID NO: 1719583 - RNA, 19 nt, Artificial Sequence
  Description of Artificial Sequence: Synthetic oligonucleotide
  Sense strand starting at position 277 of SEQ ID NO: 1562068
augaaacucauccgggagu

SEQ ID NO: 1719584 - RNA, 19 nt, Artificial Sequence
  Description of Artificial Sequence: Synthetic oligonucleotide
  Antisense strand to SEQ ID NO: 1719583
acucccggaugaguuucau

SEQ ID NO: 1719585 - RNA, 19 nt, Artificial Sequence
  Description of Artificial Sequence: Synthetic oligonucleotide
  Sense strand starting at position 280 of SEQ ID NO: 1562068
aaacucauccgggagugua

SEQ ID NO: 1719586 - RNA, 19 nt, Artificial Sequence
  Description of Artificial Sequence: Synthetic oligonucleotide
  Antisense strand to SEQ ID NO: 1719585
uacacucccggaugaguuu

SEQ ID NO: 1719587 - RNA, 19 nt, Artificial Sequence
  Description of Artificial Sequence: Synthetic oligonucleotide
  Sense strand starting at position 351 of SEQ ID NO: 1562068
ccucacagugaguaaucaa

SEQ ID NO: 1719588 - RNA, 19 nt, Artificial Sequence
  Description of Artificial Sequence: Synthetic oligonucleotide
  Antisense strand to SEQ ID NO: 1719587
uugauuacucacugugagg

SEQ ID NO: 1719589 - RNA, 19 nt, Artificial Sequence
  Description of Artificial Sequence: Synthetic oligonucleotide
  Sense strand starting at position 530 of SEQ ID NO: 1562068
auggcaauguauguaaaga

SEQ ID NO: 1719590 - RNA, 19 nt, Artificial Sequence
  Description of Artificial Sequence: Synthetic oligonucleotide
  Antisense strand to SEQ ID NO: 1719589
ucuuuacauacauugccau

SEQ ID NO: 1719591 - RNA, 19 nt, Artificial Sequence
  Description of Artificial Sequence: Synthetic oligonucleotide
  Sense strand starting at position 531 of SEQ ID NO: 1562068
uggcaauguauguaaagau

SEQ ID NO: 1719592 - RNA, 19 nt, Artificial Sequence
  Description of Artificial Sequence: Synthetic oligonucleotide
  Antisense strand to SEQ ID NO: 1719591
aucuuuacauacauugcca

SEQ ID NO: 1719593 - RNA, 19 nt, Artificial Sequence
  Description of Artificial Sequence: Synthetic oligonucleotide
  Sense strand starting at position 748 of SEQ ID NO: 1562068
caaugaauugucugucaga

SEQ ID NO: 1719594 - RNA, 19 nt, Artificial Sequence
  Description of Artificial Sequence: Synthetic oligonucleotide
  Antisense strand to SEQ ID NO: 1719593
ucugacagacaauucauug

SEQ ID NO: 1719595 - RNA, 19 nt, Artificial Sequence
  Description of Artificial Sequence: Synthetic oligonucleotide
  Sense strand starting at position 749 of SEQ ID NO: 1562068
aaugaauugucugucagaa

SEQ ID NO: 1719596 - RNA, 19 nt, Artificial Sequence
  Description of Artificial Sequence: Synthetic oligonucleotide
  Antisense strand to SEQ ID NO: 1719595
uucugacagacaauucauu

SEQ ID NO: 1719597 - RNA, 19 nt, Artificial Sequence
  Description of Artificial Sequence: Synthetic oligonucleotide
  Sense strand starting at position 778 of SEQ ID NO: 1562068
gccugaaaucaaugacaac

SEQ ID NO: 1719598 - RNA, 19 nt, Artificial Sequence
  Description of Artificial Sequence: Synthetic oligonucleotide
  Antisense strand to SEQ ID NO: 1719597
guugucauugauuucaggc

SEQ ID NO: 1719599 - RNA, 19 nt, Artificial Sequence
  Description of Artificial Sequence: Synthetic oligonucleotide
  Sense strand starting at position 890 of SEQ ID NO: 1562068
gacugagugcgaggauaca

SEQ ID NO: 1719600 - RNA, 19 nt, Artificial Sequence
  Description of Artificial Sequence: Synthetic oligonucleotide
  Antisense strand to SEQ ID NO: 1719599
uguauccucgcacucaguc

SEQ ID NO: 1719601 - RNA, 19 nt, Artificial Sequence
  Description of Artificial Sequence: Synthetic oligonucleotide
  Sense strand starting at position 921 of SEQ ID NO: 1562068
aguauagugacugguauga

SEQ ID NO: 1719602 - RNA, 19 nt, Artificial Sequence
  Description of Artificial Sequence: Synthetic oligonucleotide
  Antisense strand to SEQ ID NO: 1719601
ucauaccagucacuauacu

SEQ ID NO: 1719603 - RNA, 19 nt, Artificial Sequence
  Description of Artificial Sequence: Synthetic oligonucleotide
  Sense strand starting at position 925 of SEQ ID NO: 1562068
uagugacugguaugaagua

SEQ ID NO: 1719604 - RNA, 19 nt, Artificial Sequence
  Description of Artificial Sequence: Synthetic oligonucleotide
  Antisense strand to SEQ ID NO: 1719603
uacuucauaccagucacua

SEQ ID NO: 1719605 - RNA, 19 nt, Artificial Sequence
  Description of Artificial Sequence: Synthetic oligonucleotide
  Sense strand starting at position 1011 of SEQ ID NO: 1562068
ugaagaaacucucccagua

SEQ ID NO: 1719606 - RNA, 19 nt, Artificial Sequence
  Description of Artificial Sequence: Synthetic oligonucleotide
  Antisense strand to SEQ ID NO: 1719605
uacugggagaguuucuuca

SEQ ID NO: 1719607 - RNA, 19 nt, Artificial Sequence
  Description of Artificial Sequence: Synthetic oligonucleotide
  Sense strand starting at position 1148 of SEQ ID NO: 1562068
gugaaugcagccgagauaa

SEQ ID NO: 1719608 - RNA, 19 nt, Artificial Sequence
  Description of Artificial Sequence: Synthetic oligonucleotide
  Antisense strand to SEQ ID NO: 1719607
uuaucucggcugcauucac

SEQ ID NO: 1719609 - RNA, 19 nt, Artificial Sequence
  Description of Artificial Sequence: Synthetic oligonucleotide
  Sense strand starting at position 1150 of SEQ ID NO: 1562068
gaaugcagccgagauaaua

SEQ ID NO: 1719610 - RNA, 19 nt, Artificial Sequence
  Description of Artificial Sequence: Synthetic oligonucleotide
  Antisense strand to SEQ ID NO: 1719609
uauuaucucggcugcauuc

SEQ ID NO: 1719611 - RNA, 19 nt, Artificial Sequence
  Description of Artificial Sequence: Synthetic oligonucleotide
  Sense strand starting at position 1290 of SEQ ID NO: 1562068
uuccuucuucgagaaaugg

SEQ ID NO: 1719612 - RNA, 19 nt, Artificial Sequence
  Description of Artificial Sequence: Synthetic oligonucleotide
  Antisense strand to SEQ ID NO: 1719611
ccauuucucgaagaaggaa

SEQ ID NO: 1719613 - RNA, 19 nt, Artificial Sequence
  Description of Artificial Sequence: Synthetic oligonucleotide
  Sense strand starting at position 2392 of SEQ ID NO: 1562068
gcucguucucuguccgaaa

SEQ ID NO: 1719614 - RNA, 19 nt, Artificial Sequence
  Description of Artificial Sequence: Synthetic oligonucleotide
  Antisense strand to SEQ ID NO: 1719613
uuucggacagagaacgagc

SEQ ID NO: 1719615 - RNA, 19 nt, Artificial Sequence
  Description of Artificial Sequence: Synthetic oligonucleotide
  Sense strand starting at position 2493 of SEQ ID NO: 1562068
guaacagcgccgucaugaa

SEQ ID NO: 1719616 - RNA, 19 nt, Artificial Sequence
  Description of Artificial Sequence: Synthetic oligonucleotide
  Antisense strand to SEQ ID NO: 1719615
uucaugacggcgcuguuac

SEQ ID NO: 1719617 - RNA, 19 nt, Artificial Sequence
  Description of Artificial Sequence: Synthetic oligonucleotide
  Sense strand starting at position 2540 of SEQ ID NO: 1562068
uggguucucacucagggua

SEQ ID NO: 1719618 - RNA, 19 nt, Artificial Sequence
  Description of Artificial Sequence: Synthetic oligonucleotide
  Antisense strand to SEQ ID NO: 1719617
uacccugagugagaaccca

SEQ ID NO: 1719619 - RNA, 19 nt, Artificial Sequence
  Description of Artificial Sequence: Synthetic oligonucleotide
  Sense strand starting at position 2545 of SEQ ID NO: 1562068
ucucacucaggguauuauu

SEQ ID NO: 1719620 - RNA, 19 nt, Artificial Sequence
  Description of Artificial Sequence: Synthetic oligonucleotide
  Antisense strand to SEQ ID NO: 1719619
aauaauacccugagugaga

SEQ ID NO: 1719621 - RNA, 19 nt, Artificial Sequence
  Description of Artificial Sequence: Synthetic oligonucleotide
  Sense strand starting at position 2556 of SEQ ID NO: 1562068
guauuauuacgugcugcuu

SEQ ID NO: 1719622 - RNA, 19 nt, Artificial Sequence
  Description of Artificial Sequence: Synthetic oligonucleotide
  Antisense strand to SEQ ID NO: 1719621
aagcagcacguaauaauac

SEQ ID NO: 1719623 - RNA, 19 nt, Artificial Sequence
  Description of Artificial Sequence: Synthetic oligonucleotide
  Sense strand starting at position 2931 of SEQ ID NO: 1562068
cgagacucuucucugaaac

SEQ ID NO: 1719624 - RNA, 19 nt, Artificial Sequence
  Description of Artificial Sequence: Synthetic oligonucleotide
  Antisense strand to SEQ ID NO: 1719623
guuucagagaagagucucg

SEQ ID NO: 1719625 - RNA, 19 nt, Artificial Sequence
  Description of Artificial Sequence: Synthetic oligonucleotide
  Sense strand starting at position 3059 of SEQ ID NO: 1562068
ggugaugguagggaguuaa

SEQ ID NO: 1719626 - RNA, 19 nt, Artificial Sequence
  Description of Artificial Sequence: Synthetic oligonucleotide
  Antisense strand to SEQ ID NO: 1719625
uuaacucccuaccaucacc

SEQ ID NO: 1719627 - RNA, 19 nt, Artificial Sequence
  Description of Artificial Sequence: Synthetic oligonucleotide
  Sense strand starting at position 3063 of SEQ ID NO: 1562068
augguagggaguuaaguua

SEQ ID NO: 1719628 - RNA, 19 nt, Artificial Sequence
  Description of Artificial Sequence: Synthetic oligonucleotide
  Antisense strand to SEQ ID NO: 1719627
uaacuuaacucccuaccau

SEQ ID NO: 1719629 - RNA, 19 nt, Artificial Sequence
  Description of Artificial Sequence: Synthetic oligonucleotide
  Sense strand starting at position 3133 of SEQ ID NO: 1562068
gugggcagacucuaguuua

SEQ ID NO: 1719630 - RNA, 19 nt, Artificial Sequence
  Description of Artificial Sequence: Synthetic oligonucleotide
  Antisense strand to SEQ ID NO: 1719629
uaaacuagagucugcccac

SEQ ID NO: 1719631 - RNA, 19 nt, Artificial Sequence
  Description of Artificial Sequence: Synthetic oligonucleotide
  Sense strand starting at position 3136 of SEQ ID NO: 1562068
ggcagacucuaguuuagga

SEQ ID NO: 1719632 - RNA, 19 nt, Artificial Sequence
  Description of Artificial Sequence: Synthetic oligonucleotide
  Antisense strand to SEQ ID NO: 1719631
uccuaaacuagagucugcc

SEQ ID NO: 1719633 - RNA, 19 nt, Artificial Sequence
  Description of Artificial Sequence: Synthetic oligonucleotide
  Sense strand starting at position 3322 of SEQ ID NO: 1562068
acaacaaagcugugaggua

SEQ ID NO: 1719634 - RNA, 19 nt, Artificial Sequence
  Description of Artificial Sequence: Synthetic oligonucleotide
  Antisense strand to SEQ ID NO: 1719633
uaccucacagcuuuguugu

SEQ ID NO: 1719635 - RNA, 19 nt, Artificial Sequence
  Description of Artificial Sequence: Synthetic oligonucleotide
  Sense strand starting at position 3548 of SEQ ID NO: 1562068
ugugucgaaaucuagauca

SEQ ID NO: 1719636 - RNA, 19 nt, Artificial Sequence
  Description of Artificial Sequence: Synthetic oligonucleotide
  Antisense strand to SEQ ID NO: 1719635
ugaucuagauuucgacaca

SEQ ID NO: 1719637 - RNA, 19 nt, Artificial Sequence
  Description of Artificial Sequence: Synthetic oligonucleotide
  Sense strand starting at position 3550 of SEQ ID NO: 1562068
ugucgaaaucuagaucauc

SEQ ID NO: 1719638 - RNA, 19 nt, Artificial Sequence
  Description of Artificial Sequence: Synthetic oligonucleotide
  Antisense strand to SEQ ID NO: 1719637
gaugaucuagauuucgaca

SEQ ID NO: 1719639 - RNA, 19 nt, Artificial Sequence
  Description of Artificial Sequence: Synthetic oligonucleotide
  Sense strand starting at position 3666 of SEQ ID NO: 1562068
agucuuaggaguugaaauu

SEQ ID NO: 1719640 - RNA, 19 nt, Artificial Sequence
  Description of Artificial Sequence: Synthetic oligonucleotide
  Antisense strand to SEQ ID NO: 1719639
aauuucaacuccuaagacu

SEQ ID NO: 1719641 - RNA, 19 nt, Artificial Sequence
  Description of Artificial Sequence: Synthetic oligonucleotide
  Sense strand starting at position 3691 of SEQ ID NO: 1562068
aucacuauuugauagacga

SEQ ID NO: 1719642 - RNA, 19 nt, Artificial Sequence
  Description of Artificial Sequence: Synthetic oligonucleotide
  Antisense strand to SEQ ID NO: 1719641
ucgucuaucaaauagugau

SEQ ID NO: 1719643 - RNA, 19 nt, Artificial Sequence
  Description of Artificial Sequence: Synthetic oligonucleotide
  Sense strand starting at position 3712 of SEQ ID NO: 1562068
aaauguaaagcaugguuaa

SEQ ID NO: 1719644 - RNA, 19 nt, Artificial Sequence
  Description of Artificial Sequence: Synthetic oligonucleotide
  Antisense strand to SEQ ID NO: 1719643
uuaaccaugcuuuacauuu

SEQ ID NO: 1719645 - RNA, 19 nt, Artificial Sequence
  Description of Artificial Sequence: Synthetic oligonucleotide
  Sense strand starting at position 3725 of SEQ ID NO: 1562068
gguuaaguacccuauguac

SEQ ID NO: 1719646 - RNA, 19 nt, Artificial Sequence
  Description of Artificial Sequence: Synthetic oligonucleotide
  Antisense strand to SEQ ID NO: 1719645
guacauaggguacuuaacc

SEQ ID NO: 1719647 - RNA, 19 nt, Artificial Sequence
  Description of Artificial Sequence: Synthetic oligonucleotide
  Sense strand starting at position 3734 of SEQ ID NO: 1562068
cccuauguacuuggacaua

SEQ ID NO: 1719648 - RNA, 19 nt, Artificial Sequence
  Description of Artificial Sequence: Synthetic oligonucleotide
  Antisense strand to SEQ ID NO: 1719647
uauguccaaguacauaggg

SEQ ID NO: 1719649 - RNA, 19 nt, Artificial Sequence
  Description of Artificial Sequence: Synthetic oligonucleotide
  Sense strand starting at position 3779 of SEQ ID NO: 1562068
aaauuaggguuaucuuaug

SEQ ID NO: 1719650 - RNA, 19 nt, Artificial Sequence
  Description of Artificial Sequence: Synthetic oligonucleotide
  Antisense strand to SEQ ID NO: 1719649
cauaagauaacccuaauuu

SEQ ID NO: 1719651 - RNA, 19 nt, Artificial Sequence
  Description of Artificial Sequence: Synthetic oligonucleotide
  Sense strand starting at position 3905 of SEQ ID NO: 1562068
ccacguucucaggaacuua

SEQ ID NO: 1719652 - RNA, 19 nt, Artificial Sequence
  Description of Artificial Sequence: Synthetic oligonucleotide
  Antisense strand to SEQ ID NO: 1719651
uaaguuccugagaacgugg

SEQ ID NO: 1719653 - RNA, 19 nt, Artificial Sequence
  Description of Artificial Sequence: Synthetic oligonucleotide
  Sense strand starting at position 3916 of SEQ ID NO: 1562068
ggaacuuacuuucuacuga

SEQ ID NO: 1719654 - RNA, 19 nt, Artificial Sequence
  Description of Artificial Sequence: Synthetic oligonucleotide
  Antisense strand to SEQ ID NO: 1719653
ucaguagaaaguaaguucc

SEQ ID NO: 1719655 - RNA, 19 nt, Artificial Sequence
  Description of Artificial Sequence: Synthetic oligonucleotide
  Sense strand starting at position 3956 of SEQ ID NO: 1562068
gcaaguuuagaauaaguca

SEQ ID NO: 1719656 - RNA, 19 nt, Artificial Sequence
  Description of Artificial Sequence: Synthetic oligonucleotide
  Antisense strand to SEQ ID NO: 1719655
ugacuuauucuaaacuugc

SEQ ID NO: 1719657 - RNA, 19 nt, Artificial Sequence
  Description of Artificial Sequence: Synthetic oligonucleotide
  Sense strand starting at position 3969 of SEQ ID NO: 1562068
aagucagaaagugguaagu

SEQ ID NO: 1719658 - RNA, 19 nt, Artificial Sequence
  Description of Artificial Sequence: Synthetic oligonucleotide
  Antisense strand to SEQ ID NO: 1719657
acuuaccacuuucugacuu

SEQ ID NO: 1719659 - RNA, 19 nt, Artificial Sequence
  Description of Artificial Sequence: Synthetic oligonucleotide
  Sense strand starting at position 3 of SEQ ID NO: 1562069
acacaugaaugcgagaaau

SEQ ID NO: 1719660 - RNA, 19 nt, Artificial Sequence
  Description of Artificial Sequence: Synthetic oligonucleotide
  Antisense strand to SEQ ID NO: 1719659
auuucucgcauucaugugu

SEQ ID NO: 1719661 - RNA, 19 nt, Artificial Sequence
  Description of Artificial Sequence: Synthetic oligonucleotide
  Sense strand starting at position 13 of SEQ ID NO: 1562069
gcgagaaauggcugauaag

SEQ ID NO: 1719662 - RNA, 19 nt, Artificial Sequence
  Description of Artificial Sequence: Synthetic oligonucleotide
  Antisense strand to SEQ ID NO: 1719661
cuuaucagccauuucucgc

SEQ ID NO: 1719663 - RNA, 19 nt, Artificial Sequence
  Description of Artificial Sequence: Synthetic oligonucleotide
  Sense strand starting at position 22 of SEQ ID NO: 1562069
ggcugauaagcacaguaau

SEQ ID NO: 1719664 - RNA, 19 nt, Artificial Sequence
  Description of Artificial Sequence: Synthetic oligonucleotide
  Antisense strand to SEQ ID NO: 1719663
auuacugugcuuaucagcc

SEQ ID NO: 1719665 - RNA, 19 nt, Artificial Sequence
  Description of Artificial Sequence: Synthetic oligonucleotide
  Sense strand starting at position 36 of SEQ ID NO: 1562069
guaauuuaagauugcguau

SEQ ID NO: 1719666 - RNA, 19 nt, Artificial Sequence
  Description of Artificial Sequence: Synthetic oligonucleotide
  Antisense strand to SEQ ID NO: 1719665
auacgcaaucuuaaauuac

SEQ ID NO: 1719667 - RNA, 19 nt, Artificial Sequence
  Description of Artificial Sequence: Synthetic oligonucleotide
  Sense strand starting at position 38 of SEQ ID NO: 1562069
aauuuaagauugcguauuc

SEQ ID NO: 1719668 - RNA, 19 nt, Artificial Sequence
  Description of Artificial Sequence: Synthetic oligonucleotide
  Antisense strand to SEQ ID NO: 1719667
gaauacgcaaucuuaaauu

SEQ ID NO: 1719669 - RNA, 19 nt, Artificial Sequence
  Description of Artificial Sequence: Synthetic oligonucleotide
  Sense strand starting at position 88 of SEQ ID NO: 1562069
gucuuugugaugugugaag

SEQ ID NO: 1719670 - RNA, 19 nt, Artificial Sequence
  Description of Artificial Sequence: Synthetic oligonucleotide
  Antisense strand to SEQ ID NO: 1719669
cuucacacaucacaaagac

SEQ ID NO: 1719671 - RNA, 19 nt, Artificial Sequence
  Description of Artificial Sequence: Synthetic oligonucleotide
  Sense strand starting at position 153 of SEQ ID NO: 1562069
cugugugguauucgaggau

SEQ ID NO: 1719672 - RNA, 19 nt, Artificial Sequence
  Description of Artificial Sequence: Synthetic oligonucleotide
  Antisense strand to SEQ ID NO: 1719671
auccucgaauaccacacag

SEQ ID NO: 1719673 - RNA, 19 nt, Artificial Sequence
  Description of Artificial Sequence: Synthetic oligonucleotide
  Sense strand starting at position 156 of SEQ ID NO: 1562069
ugugguauucgaggauuau

SEQ ID NO: 1719674 - RNA, 19 nt, Artificial Sequence
  Description of Artificial Sequence: Synthetic oligonucleotide
  Antisense strand to SEQ ID NO: 1719673
auaauccucgaauaccaca

SEQ ID NO: 1719675 - RNA, 19 nt, Artificial Sequence
  Description of Artificial Sequence: Synthetic oligonucleotide
  Sense strand starting at position 157 of SEQ ID NO: 1562069
gugguauucgaggauuauu

SEQ ID NO: 1719676 - RNA, 19 nt, Artificial Sequence
  Description of Artificial Sequence: Synthetic oligonucleotide
  Antisense strand to SEQ ID NO: 1719675
aauaauccucgaauaccac

SEQ ID NO: 1719677 - RNA, 19 nt, Artificial Sequence
  Description of Artificial Sequence: Synthetic oligonucleotide
  Sense strand starting at position 160 of SEQ ID NO: 1562069
guauucgaggauuauugca

SEQ ID NO: 1719678 - RNA, 19 nt, Artificial Sequence
  Description of Artificial Sequence: Synthetic oligonucleotide
  Antisense strand to SEQ ID NO: 1719677
ugcaauaauccucgaauac

SEQ ID NO: 1719679 - RNA, 19 nt, Artificial Sequence
  Description of Artificial Sequence: Synthetic oligonucleotide
  Sense strand starting at position 165 of SEQ ID NO: 1562069
cgaggauuauugcaacaaa

SEQ ID NO: 1719680 - RNA, 19 nt, Artificial Sequence
  Description of Artificial Sequence: Synthetic oligonucleotide
  Antisense strand to SEQ ID NO: 1719679
uuuguugcaauaauccucg

SEQ ID NO: 1719681 - RNA, 19 nt, Artificial Sequence
  Description of Artificial Sequence: Synthetic oligonucleotide
  Sense strand starting at position 204 of SEQ ID NO: 1562069
acagucucagccugucauu

SEQ ID NO: 1719682 - RNA, 19 nt, Artificial Sequence
  Description of Artificial Sequence: Synthetic oligonucleotide
  Antisense strand to SEQ ID NO: 1719681
aaugacaggcugagacugu

SEQ ID NO: 1719683 - RNA, 19 nt, Artificial Sequence
  Description of Artificial Sequence: Synthetic oligonucleotide
  Sense strand starting at position 213 of SEQ ID NO: 1562069
gccugucauucucuagaac

SEQ ID NO: 1719684 - RNA, 19 nt, Artificial Sequence
  Description of Artificial Sequence: Synthetic oligonucleotide
  Antisense strand to SEQ ID NO: 1719683
guucuagagaaugacaggc

SEQ ID NO: 1719685 - RNA, 19 nt, Artificial Sequence
  Description of Artificial Sequence: Synthetic oligonucleotide
  Sense strand starting at position 320 of SEQ ID NO: 1562069
ggaugucagugugcauaag

SEQ ID NO: 1719686 - RNA, 19 nt, Artificial Sequence
  Description of Artificial Sequence: Synthetic oligonucleotide
  Antisense strand to SEQ ID NO: 1719685
cuuaugcacacugacaucc

SEQ ID NO: 1719687 - RNA, 19 nt, Artificial Sequence
  Description of Artificial Sequence: Synthetic oligonucleotide
  Sense strand starting at position 349 of SEQ ID NO: 1562069
accucagaauguuugaguu

SEQ ID NO: 1719688 - RNA, 19 nt, Artificial Sequence
  Description of Artificial Sequence: Synthetic oligonucleotide
  Antisense strand to SEQ ID NO: 1719687
aacucaaacauucugaggu

SEQ ID NO: 1719689 - RNA, 19 nt, Artificial Sequence
  Description of Artificial Sequence: Synthetic oligonucleotide
  Sense strand starting at position 351 of SEQ ID NO: 1562069
cucagaauguuugaguuau

SEQ ID NO: 1719690 - RNA, 19 nt, Artificial Sequence
  Description of Artificial Sequence: Synthetic oligonucleotide
  Antisense strand to SEQ ID NO: 1719689
auaacucaaacauucugag

SEQ ID NO: 1719691 - RNA, 19 nt, Artificial Sequence
  Description of Artificial Sequence: Synthetic oligonucleotide
  Sense strand starting at position 970 of SEQ ID NO: 1562069
gccugagugucuucucaga

SEQ ID NO: 1719692 - RNA, 19 nt, Artificial Sequence
  Description of Artificial Sequence: Synthetic oligonucleotide
  Antisense strand to SEQ ID NO: 1719691
ucugagaagacacucaggc

SEQ ID NO: 1719693 - RNA, 19 nt, Artificial Sequence
  Description of Artificial Sequence: Synthetic oligonucleotide
  Sense strand starting at position 1107 of SEQ ID NO: 1562069
ccacgaugucccgaaguga

SEQ ID NO: 1719694 - RNA, 19 nt, Artificial Sequence
  Description of Artificial Sequence: Synthetic oligonucleotide
  Antisense strand to SEQ ID NO: 1719693
ucacuucgggacaucgugg

SEQ ID NO: 1719695 - RNA, 19 nt, Artificial Sequence
  Description of Artificial Sequence: Synthetic oligonucleotide
  Sense strand starting at position 1115 of SEQ ID NO: 1562069
ucccgaagugaugagcaaa

SEQ ID NO: 1719696 - RNA, 19 nt, Artificial Sequence
  Description of Artificial Sequence: Synthetic oligonucleotide
  Antisense strand to SEQ ID NO: 1719695
uuugcucaucacuucggga

SEQ ID NO: 1719697 - RNA, 19 nt, Artificial Sequence
  Description of Artificial Sequence: Synthetic oligonucleotide
  Sense strand starting at position 1337 of SEQ ID NO: 1562069
cugccuuucccgcacauau

SEQ ID NO: 1719698 - RNA, 19 nt, Artificial Sequence
  Description of Artificial Sequence: Synthetic oligonucleotide
  Antisense strand to SEQ ID NO: 1719697
auaugugcgggaaaggcag

SEQ ID NO: 1719699 - RNA, 19 nt, Artificial Sequence
  Description of Artificial Sequence: Synthetic oligonucleotide
  Sense strand starting at position 1339 of SEQ ID NO: 1562069
gccuuucccgcacauauau

SEQ ID NO: 1719700 - RNA, 19 nt, Artificial Sequence
  Description of Artificial Sequence: Synthetic oligonucleotide
  Antisense strand to SEQ ID NO: 1719699
auauaugugcgggaaaggc

SEQ ID NO: 1719701 - RNA, 19 nt, Artificial Sequence
  Description of Artificial Sequence: Synthetic oligonucleotide
  Sense strand starting at position 1485 of SEQ ID NO: 1562069
ggacuugggcgguaagaau

SEQ ID NO: 1719702 - RNA, 19 nt, Artificial Sequence
  Description of Artificial Sequence: Synthetic oligonucleotide
  Antisense strand to SEQ ID NO: 1719701
auucuuaccgcccaagucc

SEQ ID NO: 1719703 - RNA, 19 nt, Artificial Sequence
  Description of Artificial Sequence: Synthetic oligonucleotide
  Sense strand starting at position 1627 of SEQ ID NO: 1562069
ggacguggugguuagguaa

SEQ ID NO: 1719704 - RNA, 19 nt, Artificial Sequence
  Description of Artificial Sequence: Synthetic oligonucleotide
  Antisense strand to SEQ ID NO: 1719703
uuaccuaaccaccacgucc

SEQ ID NO: 1719705 - RNA, 19 nt, Artificial Sequence
  Description of Artificial Sequence: Synthetic oligonucleotide
  Sense strand starting at position 2668 of SEQ ID NO: 1562069
cgcguuugucguagugcua

SEQ ID NO: 1719706 - RNA, 19 nt, Artificial Sequence
  Description of Artificial Sequence: Synthetic oligonucleotide
  Antisense strand to SEQ ID NO: 1719705
uagcacuacgacaaacgcg

SEQ ID NO: 1719707 - RNA, 19 nt, Artificial Sequence
  Description of Artificial Sequence: Synthetic oligonucleotide
  Sense strand starting at position 2768 of SEQ ID NO: 1562069
cgaaguauggucguugguu

SEQ ID NO: 1719708 - RNA, 19 nt, Artificial Sequence
  Description of Artificial Sequence: Synthetic oligonucleotide
  Antisense strand to SEQ ID NO: 1719707
aaccaacgaccauacuucg

SEQ ID NO: 1719709 - RNA, 19 nt, Artificial Sequence
  Description of Artificial Sequence: Synthetic oligonucleotide
  Sense strand starting at position 2769 of SEQ ID NO: 1562069
gaaguauggucguugguua

SEQ ID NO: 1719710 - RNA, 19 nt, Artificial Sequence
  Description of Artificial Sequence: Synthetic oligonucleotide
  Antisense strand to SEQ ID NO: 1719709
uaaccaacgaccauacuuc

SEQ ID NO: 1719711 - RNA, 19 nt, Artificial Sequence
  Description of Artificial Sequence: Synthetic oligonucleotide
  Sense strand starting at position 2770 of SEQ ID NO: 1562069
aaguauggucguugguuau

SEQ ID NO: 1719712 - RNA, 19 nt, Artificial Sequence
  Description of Artificial Sequence: Synthetic oligonucleotide
  Antisense strand to SEQ ID NO: 1719711
auaaccaacgaccauacuu

SEQ ID NO: 1719713 - RNA, 19 nt, Artificial Sequence
  Description of Artificial Sequence: Synthetic oligonucleotide
  Sense strand starting at position 2800 of SEQ ID NO: 1562069
ugaggaaggccuuguuagu

SEQ ID NO: 1719714 - RNA, 19 nt, Artificial Sequence
  Description of Artificial Sequence: Synthetic oligonucleotide
  Antisense strand to SEQ ID NO: 1719713
acuaacaaggccuuccuca

SEQ ID NO: 1719715 - RNA, 19 nt, Artificial Sequence
  Description of Artificial Sequence: Synthetic oligonucleotide
  Sense strand starting at position 2903 of SEQ ID NO: 1562069
gggacaugauccuaggaug

SEQ ID NO: 1719716 - RNA, 19 nt, Artificial Sequence
  Description of Artificial Sequence: Synthetic oligonucleotide
  Antisense strand to SEQ ID NO: 1719715
cauccuaggaucauguccc

SEQ ID NO: 1719717 - RNA, 19 nt, Artificial Sequence
  Description of Artificial Sequence: Synthetic oligonucleotide
  Sense strand starting at position 2906 of SEQ ID NO: 1562069
acaugauccuaggauguag

SEQ ID NO: 1719718 - RNA, 19 nt, Artificial Sequence
  Description of Artificial Sequence: Synthetic oligonucleotide
  Antisense strand to SEQ ID NO: 1719717
cuacauccuaggaucaugu

SEQ ID NO: 1719719 - RNA, 19 nt, Artificial Sequence
  Description of Artificial Sequence: Synthetic oligonucleotide
  Sense strand starting at position 3320 of SEQ ID NO: 1562069
gcaugcagugcguaguaau

SEQ ID NO: 1719720 - RNA, 19 nt, Artificial Sequence
  Description of Artificial Sequence: Synthetic oligonucleotide
  Antisense strand to SEQ ID NO: 1719719
auuacuacgcacugcaugc

SEQ ID NO: 1719721 - RNA, 19 nt, Artificial Sequence
  Description of Artificial Sequence: Synthetic oligonucleotide
  Sense strand starting at position 3345 of SEQ ID NO: 1562069
ggguauauggagcauccau

SEQ ID NO: 1719722 - RNA, 19 nt, Artificial Sequence
  Description of Artificial Sequence: Synthetic oligonucleotide
  Antisense strand to SEQ ID NO: 1719721
auggaugcuccauauaccc

SEQ ID NO: 1719723 - RNA, 19 nt, Artificial Sequence
  Description of Artificial Sequence: Synthetic oligonucleotide
  Sense strand starting at position 3441 of SEQ ID NO: 1562069
aucauuauugacuguagac

SEQ ID NO: 1719724 - RNA, 19 nt, Artificial Sequence
  Description of Artificial Sequence: Synthetic oligonucleotide
  Antisense strand to SEQ ID NO: 1719723
gucuacagucaauaaugau

SEQ ID NO: 1719725 - RNA, 19 nt, Artificial Sequence
  Description of Artificial Sequence: Synthetic oligonucleotide
  Sense strand starting at position 3485 of SEQ ID NO: 1562069
gucuuauucuuucugucuu

SEQ ID NO: 1719726 - RNA, 19 nt, Artificial Sequence
  Description of Artificial Sequence: Synthetic oligonucleotide
  Antisense strand to SEQ ID NO: 1719725
aagacagaaagaauaagac

SEQ ID NO: 1719727 - RNA, 19 nt, Artificial Sequence
  Description of Artificial Sequence: Synthetic oligonucleotide
  Sense strand starting at position 3583 of SEQ ID NO: 1562069
acugucugucuccacaaau

SEQ ID NO: 1719728 - RNA, 19 nt, Artificial Sequence
  Description of Artificial Sequence: Synthetic oligonucleotide
  Antisense strand to SEQ ID NO: 1719727
auuuguggagacagacagu

SEQ ID NO: 1719729 - RNA, 19 nt, Artificial Sequence
  Description of Artificial Sequence: Synthetic oligonucleotide
  Sense strand starting at position 3629 of SEQ ID NO: 1562069
aaauaauagugcugugaua

SEQ ID NO: 1719730 - RNA, 19 nt, Artificial Sequence
  Description of Artificial Sequence: Synthetic oligonucleotide
  Antisense strand to SEQ ID NO: 1719729
uaucacagcacuauuauuu

SEQ ID NO: 1719731 - RNA, 19 nt, Artificial Sequence
  Description of Artificial Sequence: Synthetic oligonucleotide
  Sense strand starting at position 3638 of SEQ ID NO: 1562069
ugcugugauaaacaucgua

SEQ ID NO: 1719732 - RNA, 19 nt, Artificial Sequence
  Description of Artificial Sequence: Synthetic oligonucleotide
  Antisense strand to SEQ ID NO: 1719731
uacgauguuuaucacagca

SEQ ID NO: 1719733 - RNA, 19 nt, Artificial Sequence
  Description of Artificial Sequence: Synthetic oligonucleotide
  Sense strand starting at position 3641 of SEQ ID NO: 1562069
ugugauaaacaucguagca

SEQ ID NO: 1719734 - RNA, 19 nt, Artificial Sequence
  Description of Artificial Sequence: Synthetic oligonucleotide
  Antisense strand to SEQ ID NO: 1719733
ugcuacgauguuuaucaca

SEQ ID NO: 1719735 - RNA, 19 nt, Artificial Sequence
  Description of Artificial Sequence: Synthetic oligonucleotide
  Sense strand starting at position 3643 of SEQ ID NO: 1562069
ugauaaacaucguagcaca

SEQ ID NO: 1719736 - RNA, 19 nt, Artificial Sequence
  Description of Artificial Sequence: Synthetic oligonucleotide
  Antisense strand to SEQ ID NO: 1719735
ugugcuacgauguuuauca

SEQ ID NO: 1719737 - RNA, 19 nt, Artificial Sequence
  Description of Artificial Sequence: Synthetic oligonucleotide
  Sense strand starting at position 3910 of SEQ ID NO: 1562069
gcagcucuauucuuaguuu

SEQ ID NO: 1719738 - RNA, 19 nt, Artificial Sequence
  Description of Artificial Sequence: Synthetic oligonucleotide
  Antisense strand to SEQ ID NO: 1719737
aaacuaagaauagagcugc

SEQ ID NO: 1719739 - RNA, 19 nt, Artificial Sequence
  Description of Artificial Sequence: Synthetic oligonucleotide
  Sense strand starting at position 57 of SEQ ID NO: 1562070
cccaguucugaagagguau

SEQ ID NO: 1719740 - RNA, 19 nt, Artificial Sequence
  Description of Artificial Sequence: Synthetic oligonucleotide
  Antisense strand to SEQ ID NO: 1719739
auaccucuucagaacuggg

SEQ ID NO: 1719741 - RNA, 19 nt, Artificial Sequence
  Description of Artificial Sequence: Synthetic oligonucleotide
  Sense strand starting at position 70 of SEQ ID NO: 1562070
agguaucuaaugugagaua

SEQ ID NO: 1719742 - RNA, 19 nt, Artificial Sequence
  Description of Artificial Sequence: Synthetic oligonucleotide
  Antisense strand to SEQ ID NO: 1719741
uaucucacauuagauaccu

SEQ ID NO: 1719743 - RNA, 19 nt, Artificial Sequence
  Description of Artificial Sequence: Synthetic oligonucleotide
  Sense strand starting at position 71 of SEQ ID NO: 1562070
gguaucuaaugugagauau

SEQ ID NO: 1719744 - RNA, 19 nt, Artificial Sequence
  Description of Artificial Sequence: Synthetic oligonucleotide
  Antisense strand to SEQ ID NO: 1719743
auaucucacauuagauacc

SEQ ID NO: 1719745 - RNA, 19 nt, Artificial Sequence
  Description of Artificial Sequence: Synthetic oligonucleotide
  Sense strand starting at position 73 of SEQ ID NO: 1562070
uaucuaaugugagauauga

SEQ ID NO: 1719746 - RNA, 19 nt, Artificial Sequence
  Description of Artificial Sequence: Synthetic oligonucleotide
  Antisense strand to SEQ ID NO: 1719745
ucauaucucacauuagaua

SEQ ID NO: 1719747 - RNA, 19 nt, Artificial Sequence
  Description of Artificial Sequence: Synthetic oligonucleotide
  Sense strand starting at position 169 of SEQ ID NO: 1562070
gagugaauagcugagcagu

SEQ ID NO: 1719748 - RNA, 19 nt, Artificial Sequence
  Description of Artificial Sequence: Synthetic oligonucleotide
  Antisense strand to SEQ ID NO: 1719747
acugcucagcuauucacuc

SEQ ID NO: 1719749 - RNA, 19 nt, Artificial Sequence
  Description of Artificial Sequence: Synthetic oligonucleotide
  Sense strand starting at position 171 of SEQ ID NO: 1562070
gugaauagcugagcaguga

SEQ ID NO: 1719750 - RNA, 19 nt, Artificial Sequence
  Description of Artificial Sequence: Synthetic oligonucleotide
  Antisense strand to SEQ ID NO: 1719749
ucacugcucagcuauucac

SEQ ID NO: 1719751 - RNA, 19 nt, Artificial Sequence
  Description of Artificial Sequence: Synthetic oligonucleotide
  Sense strand starting at position 254 of SEQ ID NO: 1562070
ucugaccucucagaguaau

SEQ ID NO: 1719752 - RNA, 19 nt, Artificial Sequence
  Description of Artificial Sequence: Synthetic oligonucleotide
  Antisense strand to SEQ ID NO: 1719751
auuacucugagaggucaga

SEQ ID NO: 1719753 - RNA, 19 nt, Artificial Sequence
  Description of Artificial Sequence: Synthetic oligonucleotide
  Sense strand starting at position 260 of SEQ ID NO: 1562070
cucucagaguaauugccaa

SEQ ID NO: 1719754 - RNA, 19 nt, Artificial Sequence
  Description of Artificial Sequence: Synthetic oligonucleotide
  Antisense strand to SEQ ID NO: 1719753
uuggcaauuacucugagag

SEQ ID NO: 1719755 - RNA, 19 nt, Artificial Sequence
  Description of Artificial Sequence: Synthetic oligonucleotide
  Sense strand starting at position 280 of SEQ ID NO: 1562070
uugccuucuguuuguacaa

SEQ ID NO: 1719756 - RNA, 19 nt, Artificial Sequence
  Description of Artificial Sequence: Synthetic oligonucleotide
  Antisense strand to SEQ ID NO: 1719755
uuguacaaacagaaggcaa

SEQ ID NO: 1719757 - RNA, 19 nt, Artificial Sequence
  Description of Artificial Sequence: Synthetic oligonucleotide
  Sense strand starting at position 709 of SEQ ID NO: 1562070
cgacuuaucauucggagag

SEQ ID NO: 1719758 - RNA, 19 nt, Artificial Sequence
  Description of Artificial Sequence: Synthetic oligonucleotide
  Antisense strand to SEQ ID NO: 1719757
cucuccgaaugauaagucg

SEQ ID NO: 1719759 - RNA, 19 nt, Artificial Sequence
  Description of Artificial Sequence: Synthetic oligonucleotide
  Sense strand starting at position 1939 of SEQ ID NO: 1562070
uguggagucguggcacuuu

SEQ ID NO: 1719760 - RNA, 19 nt, Artificial Sequence
  Description of Artificial Sequence: Synthetic oligonucleotide
  Antisense strand to SEQ ID NO: 1719759
aaagugccacgacuccaca

SEQ ID NO: 1719761 - RNA, 19 nt, Artificial Sequence
  Description of Artificial Sequence: Synthetic oligonucleotide
  Sense strand starting at position 2327 of SEQ ID NO: 1562070
agcagucucugacuaggau

SEQ ID NO: 1719762 - RNA, 19 nt, Artificial Sequence
  Description of Artificial Sequence: Synthetic oligonucleotide
  Antisense strand to SEQ ID NO: 1719761
auccuagucagagacugcu

SEQ ID NO: 1719763 - RNA, 19 nt, Artificial Sequence
  Description of Artificial Sequence: Synthetic oligonucleotide
  Sense strand starting at position 2565 of SEQ ID NO: 1562070
gagagcaaguucuuaucau

SEQ ID NO: 1719764 - RNA, 19 nt, Artificial Sequence
  Description of Artificial Sequence: Synthetic oligonucleotide
  Antisense strand to SEQ ID NO: 1719763
augauaagaacuugcucuc

SEQ ID NO: 1719765 - RNA, 19 nt, Artificial Sequence
  Description of Artificial Sequence: Synthetic oligonucleotide
  Sense strand starting at position 2966 of SEQ ID NO: 1562070
ccauuaugucagcgucucu

SEQ ID NO: 1719766 - RNA, 19 nt, Artificial Sequence
  Description of Artificial Sequence: Synthetic oligonucleotide
  Antisense strand to SEQ ID NO: 1719765
agagacgcugacauaaugg

SEQ ID NO: 1719767 - RNA, 19 nt, Artificial Sequence
  Description of Artificial Sequence: Synthetic oligonucleotide
  Sense strand starting at position 2971 of SEQ ID NO: 1562070
augucagcgucucuuaaag

SEQ ID NO: 1719768 - RNA, 19 nt, Artificial Sequence
  Description of Artificial Sequence: Synthetic oligonucleotide
  Antisense strand to SEQ ID NO: 1719767
cuuuaagagacgcugacau

SEQ ID NO: 1719769 - RNA, 19 nt, Artificial Sequence
  Description of Artificial Sequence: Synthetic oligonucleotide
  Sense strand starting at position 3031 of SEQ ID NO: 1562070
uuuggauucugagcgacca

SEQ ID NO: 1719770 - RNA, 19 nt, Artificial Sequence
  Description of Artificial Sequence: Synthetic oligonucleotide
  Antisense strand to SEQ ID NO: 1719769
uggucgcucagaauccaaa

SEQ ID NO: 1719771 - RNA, 19 nt, Artificial Sequence
  Description of Artificial Sequence: Synthetic oligonucleotide
  Sense strand starting at position 3032 of SEQ ID NO: 1562070
uuggauucugagcgaccaa

SEQ ID NO: 1719772 - RNA, 19 nt, Artificial Sequence
  Description of Artificial Sequence: Synthetic oligonucleotide
  Antisense strand to SEQ ID NO: 1719771
uuggucgcucagaauccaa

SEQ ID NO: 1719773 - RNA, 19 nt, Artificial Sequence
  Description of Artificial Sequence: Synthetic oligonucleotide
  Sense strand starting at position 3033 of SEQ ID NO: 1562070
uggauucugagcgaccaaa

SEQ ID NO: 1719774 - RNA, 19 nt, Artificial Sequence
  Description of Artificial Sequence: Synthetic oligonucleotide
  Antisense strand to SEQ ID NO: 1719773
uuuggucgcucagaaucca

SEQ ID NO: 1719775 - RNA, 19 nt, Artificial Sequence
  Description of Artificial Sequence: Synthetic oligonucleotide
  Sense strand starting at position 3084 of SEQ ID NO: 1562070
gcuccuguugcugcagaau

SEQ ID NO: 1719776 - RNA, 19 nt, Artificial Sequence
  Description of Artificial Sequence: Synthetic oligonucleotide
  Antisense strand to SEQ ID NO: 1719775
auucugcagcaacaggagc

SEQ ID NO: 1719777 - RNA, 19 nt, Artificial Sequence
  Description of Artificial Sequence: Synthetic oligonucleotide
  Sense strand starting at position 3095 of SEQ ID NO: 1562070
ugcagaaucccgugccuaa

SEQ ID NO: 1719778 - RNA, 19 nt, Artificial Sequence
  Description of Artificial Sequence: Synthetic oligonucleotide
  Antisense strand to SEQ ID NO: 1719777
uuaggcacgggauucugca

SEQ ID NO: 1719779 - RNA, 19 nt, Artificial Sequence
  Description of Artificial Sequence: Synthetic oligonucleotide
  Sense strand starting at position 3153 of SEQ ID NO: 1562070
auuugucacuaguacugua

SEQ ID NO: 1719780 - RNA, 19 nt, Artificial Sequence
  Description of Artificial Sequence: Synthetic oligonucleotide
  Antisense strand to SEQ ID NO: 1719779
uacaguacuagugacaaau

SEQ ID NO: 1719781 - RNA, 19 nt, Artificial Sequence
  Description of Artificial Sequence: Synthetic oligonucleotide
  Sense strand starting at position 3177 of SEQ ID NO: 1562070
uguuguuagaaagauguga

SEQ ID NO: 1719782 - RNA, 19 nt, Artificial Sequence
  Description of Artificial Sequence: Synthetic oligonucleotide
  Antisense strand to SEQ ID NO: 1719781
ucacaucuuucuaacaaca

SEQ ID NO: 1719783 - RNA, 19 nt, Artificial Sequence
  Description of Artificial Sequence: Synthetic oligonucleotide
  Sense strand starting at position 3179 of SEQ ID NO: 1562070
uuguuagaaagaugugaaa

SEQ ID NO: 1719784 - RNA, 19 nt, Artificial Sequence
  Description of Artificial Sequence: Synthetic oligonucleotide
  Antisense strand to SEQ ID NO: 1719783
uuucacaucuuucuaacaa

SEQ ID NO: 1719785 - RNA, 19 nt, Artificial Sequence
  Description of Artificial Sequence: Synthetic oligonucleotide
  Sense strand starting at position 3221 of SEQ ID NO: 1562070
aagagcgauuggguugaaa

SEQ ID NO: 1719786 - RNA, 19 nt, Artificial Sequence
  Description of Artificial Sequence: Synthetic oligonucleotide
  Antisense strand to SEQ ID NO: 1719785
uuucaacccaaucgcucuu

SEQ ID NO: 1719787 - RNA, 19 nt, Artificial Sequence
  Description of Artificial Sequence: Synthetic oligonucleotide
  Sense strand starting at position 3223 of SEQ ID NO: 1562070
gagcgauuggguugaaauu

SEQ ID NO: 1719788 - RNA, 19 nt, Artificial Sequence
  Description of Artificial Sequence: Synthetic oligonucleotide
  Antisense strand to SEQ ID NO: 1719787
aauuucaacccaaucgcuc

SEQ ID NO: 1719789 - RNA, 19 nt, Artificial Sequence
  Description of Artificial Sequence: Synthetic oligonucleotide
  Sense strand starting at position 3224 of SEQ ID NO: 1562070
agcgauuggguugaaauua

SEQ ID NO: 1719790 - RNA, 19 nt, Artificial Sequence
  Description of Artificial Sequence: Synthetic oligonucleotide
  Antisense strand to SEQ ID NO: 1719789
uaauuucaacccaaucgcu

SEQ ID NO: 1719791 - RNA, 19 nt, Artificial Sequence
  Description of Artificial Sequence: Synthetic oligonucleotide
  Sense strand starting at position 3272 of SEQ ID NO: 1562070
gguuccuuagcccauuaau

SEQ ID NO: 1719792 - RNA, 19 nt, Artificial Sequence
  Description of Artificial Sequence: Synthetic oligonucleotide
  Antisense strand to SEQ ID NO: 1719791
auuaaugggcuaaggaacc

SEQ ID NO: 1719793 - RNA, 19 nt, Artificial Sequence
  Description of Artificial Sequence: Synthetic oligonucleotide
  Sense strand starting at position 3313 of SEQ ID NO: 1562070
uggauuaacucuggaacac

SEQ ID NO: 1719794 - RNA, 19 nt, Artificial Sequence
  Description of Artificial Sequence: Synthetic oligonucleotide
  Antisense strand to SEQ ID NO: 1719793
guguuccagaguuaaucca

SEQ ID NO: 1719795 - RNA, 19 nt, Artificial Sequence
  Description of Artificial Sequence: Synthetic oligonucleotide
  Sense strand starting at position 3405 of SEQ ID NO: 1562070
accaaugaguccuacuuga

SEQ ID NO: 1719796 - RNA, 19 nt, Artificial Sequence
  Description of Artificial Sequence: Synthetic oligonucleotide
  Antisense strand to SEQ ID NO: 1719795
ucaaguaggacucauuggu

SEQ ID NO: 1719797 - RNA, 19 nt, Artificial Sequence
  Description of Artificial Sequence: Synthetic oligonucleotide
  Sense strand starting at position 3444 of SEQ ID NO: 1562070
cuuucugaacauggguaua

SEQ ID NO: 1719798 - RNA, 19 nt, Artificial Sequence
  Description of Artificial Sequence: Synthetic oligonucleotide
  Antisense strand to SEQ ID NO: 1719797
uauacccauguucagaaag

SEQ ID NO: 1719799 - RNA, 19 nt, Artificial Sequence
  Description of Artificial Sequence: Synthetic oligonucleotide
  Sense strand starting at position 3455 of SEQ ID NO: 1562070
uggguauacuccuuuagga

SEQ ID NO: 1719800 - RNA, 19 nt, Artificial Sequence
  Description of Artificial Sequence: Synthetic oligonucleotide
  Antisense strand to SEQ ID NO: 1719799
uccuaaaggaguauaccca

SEQ ID NO: 1719801 - RNA, 19 nt, Artificial Sequence
  Description of Artificial Sequence: Synthetic oligonucleotide
  Sense strand starting at position 3500 of SEQ ID NO: 1562070
ggaggaaauucauucguuc

SEQ ID NO: 1719802 - RNA, 19 nt, Artificial Sequence
  Description of Artificial Sequence: Synthetic oligonucleotide
  Antisense strand to SEQ ID NO: 1719801
gaacgaaugaauuuccucc

SEQ ID NO: 1719803 - RNA, 19 nt, Artificial Sequence
  Description of Artificial Sequence: Synthetic oligonucleotide
  Sense strand starting at position 3688 of SEQ ID NO: 1562070
gaagcagauccuggcagua

SEQ ID NO: 1719804 - RNA, 19 nt, Artificial Sequence
  Description of Artificial Sequence: Synthetic oligonucleotide
  Antisense strand to SEQ ID NO: 1719803
uacugccaggaucugcuuc

SEQ ID NO: 1719805 - RNA, 19 nt, Artificial Sequence
  Description of Artificial Sequence: Synthetic oligonucleotide
  Sense strand starting at position 3700 of SEQ ID NO: 1562070
ggcaguaggguuuguucaa

SEQ ID NO: 1719806 - RNA, 19 nt, Artificial Sequence
  Description of Artificial Sequence: Synthetic oligonucleotide
  Antisense strand to SEQ ID NO: 1719805
uugaacaaacccuacugcc

SEQ ID NO: 1719807 - RNA, 19 nt, Artificial Sequence
  Description of Artificial Sequence: Synthetic oligonucleotide
  Sense strand starting at position 3701 of SEQ ID NO: 1562070
gcaguaggguuuguucaau

SEQ ID NO: 1719808 - RNA, 19 nt, Artificial Sequence
  Description of Artificial Sequence: Synthetic oligonucleotide
  Antisense strand to SEQ ID NO: 1719807
auugaacaaacccuacugc

SEQ ID NO: 1719809 - RNA, 19 nt, Artificial Sequence
  Description of Artificial Sequence: Synthetic oligonucleotide
  Sense strand starting at position 3732 of SEQ ID NO: 1562070
ggauaaucauaagaaacau

SEQ ID NO: 1719810 - RNA, 19 nt, Artificial Sequence
  Description of Artificial Sequence: Synthetic oligonucleotide
  Antisense strand to SEQ ID NO: 1719809
auguuucuuaugauuaucc

SEQ ID NO: 1719811 - RNA, 19 nt, Artificial Sequence
  Description of Artificial Sequence: Synthetic oligonucleotide
  Sense strand starting at position 3887 of SEQ ID NO: 1562070
gggugaggaccugguuauu

SEQ ID NO: 1719812 - RNA, 19 nt, Artificial Sequence
  Description of Artificial Sequence: Synthetic oligonucleotide
  Antisense strand to SEQ ID NO: 1719811
aauaaccagguccucaccc

SEQ ID NO: 1719813 - RNA, 19 nt, Artificial Sequence
  Description of Artificial Sequence: Synthetic oligonucleotide
  Sense strand starting at position 3897 of SEQ ID NO: 1562070
cugguuauuuauccagcca

SEQ ID NO: 1719814 - RNA, 19 nt, Artificial Sequence
  Description of Artificial Sequence: Synthetic oligonucleotide
  Antisense strand to SEQ ID NO: 1719813
uggcuggauaaauaaccag

SEQ ID NO: 1719815 - RNA, 19 nt, Artificial Sequence
  Description of Artificial Sequence: Synthetic oligonucleotide
  Sense strand starting at position 3918 of SEQ ID NO: 1562070
cccaguccucauugguuaa

SEQ ID NO: 1719816 - RNA, 19 nt, Artificial Sequence
  Description of Artificial Sequence: Synthetic oligonucleotide
  Antisense strand to SEQ ID NO: 1719815
uuaaccaaugaggacuggg

SEQ ID NO: 1719817 - RNA, 19 nt, Artificial Sequence
  Description of Artificial Sequence: Synthetic oligonucleotide
  Sense strand starting at position 3979 of SEQ ID NO: 1562070
uggagaaagccuugcagca

SEQ ID NO: 1719818 - RNA, 19 nt, Artificial Sequence
  Description of Artificial Sequence: Synthetic oligonucleotide
  Antisense strand to SEQ ID NO: 1719817
ugcugcaaggcuuucucca

SEQ ID NO: 1719819 - RNA, 19 nt, Artificial Sequence
  Description of Artificial Sequence: Synthetic oligonucleotide
  Sense strand starting at position 112 of SEQ ID NO: 1562071
ccacuaagccacugugagu

SEQ ID NO: 1719820 - RNA, 19 nt, Artificial Sequence
  Description of Artificial Sequence: Synthetic oligonucleotide
  Antisense strand to SEQ ID NO: 1719819
acucacaguggcuuagugg

SEQ ID NO: 1719821 - RNA, 19 nt, Artificial Sequence
  Description of Artificial Sequence: Synthetic oligonucleotide
  Sense strand starting at position 121 of SEQ ID NO: 1562071
cacugugaguagccaaaga

SEQ ID NO: 1719822 - RNA, 19 nt, Artificial Sequence
  Description of Artificial Sequence: Synthetic oligonucleotide
  Antisense strand to SEQ ID NO: 1719821
ucuuuggcuacucacagug

SEQ ID NO: 1719823 - RNA, 19 nt, Artificial Sequence
  Description of Artificial Sequence: Synthetic oligonucleotide
  Sense strand starting at position 189 of SEQ ID NO: 1562071
gagccuguguccuuagcua

SEQ ID NO: 1719824 - RNA, 19 nt, Artificial Sequence
  Description of Artificial Sequence: Synthetic oligonucleotide
  Antisense strand to SEQ ID NO: 1719823
uagcuaaggacacaggcuc

SEQ ID NO: 1719825 - RNA, 19 nt, Artificial Sequence
  Description of Artificial Sequence: Synthetic oligonucleotide
  Sense strand starting at position 225 of SEQ ID NO: 1562071
ccuccuuaugagcaggaua

SEQ ID NO: 1719826 - RNA, 19 nt, Artificial Sequence
  Description of Artificial Sequence: Synthetic oligonucleotide
  Antisense strand to SEQ ID NO: 1719825
uauccugcucauaaggagg

SEQ ID NO: 1719827 - RNA, 19 nt, Artificial Sequence
  Description of Artificial Sequence: Synthetic oligonucleotide
  Sense strand starting at position 227 of SEQ ID NO: 1562071
uccuuaugagcaggauacu

SEQ ID NO: 1719828 - RNA, 19 nt, Artificial Sequence
  Description of Artificial Sequence: Synthetic oligonucleotide
  Antisense strand to SEQ ID NO: 1719827
aguauccugcucauaagga

SEQ ID NO: 1719829 - RNA, 19 nt, Artificial Sequence
  Description of Artificial Sequence: Synthetic oligonucleotide
  Sense strand starting at position 228 of SEQ ID NO: 1562071
ccuuaugagcaggauacuu

SEQ ID NO: 1719830 - RNA, 19 nt, Artificial Sequence
  Description of Artificial Sequence: Synthetic oligonucleotide
  Antisense strand to SEQ ID NO: 1719829
aaguauccugcucauaagg

SEQ ID NO: 1719831 - RNA, 19 nt, Artificial Sequence
  Description of Artificial Sequence: Synthetic oligonucleotide
  Sense strand starting at position 233 of SEQ ID NO: 1562071
ugagcaggauacuuaagua

SEQ ID NO: 1719832 - RNA, 19 nt, Artificial Sequence
  Description of Artificial Sequence: Synthetic oligonucleotide
  Antisense strand to SEQ ID NO: 1719831
uacuuaaguauccugcuca

SEQ ID NO: 1719833 - RNA, 19 nt, Artificial Sequence
  Description of Artificial Sequence: Synthetic oligonucleotide
  Sense strand starting at position 292 of SEQ ID NO: 1562071
uuugguauuguuuagaaug

SEQ ID NO: 1719834 - RNA, 19 nt, Artificial Sequence
  Description of Artificial Sequence: Synthetic oligonucleotide
  Antisense strand to SEQ ID NO: 1719833
cauucuaaacaauaccaaa

SEQ ID NO: 1719835 - RNA, 19 nt, Artificial Sequence
  Description of Artificial Sequence: Synthetic oligonucleotide
  Sense strand starting at position 310 of SEQ ID NO: 1562071
ggagaaagaucucagagau

SEQ ID NO: 1719836 - RNA, 19 nt, Artificial Sequence
  Description of Artificial Sequence: Synthetic oligonucleotide
  Antisense strand to SEQ ID NO: 1719835
aucucugagaucuuucucc

SEQ ID NO: 1719837 - RNA, 19 nt, Artificial Sequence
  Description of Artificial Sequence: Synthetic oligonucleotide
  Sense strand starting at position 825 of SEQ ID NO: 1562071
cagucugagccuuggaauc

SEQ ID NO: 1719838 - RNA, 19 nt, Artificial Sequence
  Description of Artificial Sequence: Synthetic oligonucleotide
  Antisense strand to SEQ ID NO: 1719837
gauuccaaggcucagacug

SEQ ID NO: 1719839 - RNA, 19 nt, Artificial Sequence
  Description of Artificial Sequence: Synthetic oligonucleotide
  Sense strand starting at position 835 of SEQ ID NO: 1562071
cuuggaaucccaggcuuua

SEQ ID NO: 1719840 - RNA, 19 nt, Artificial Sequence
  Description of Artificial Sequence: Synthetic oligonucleotide
  Antisense strand to SEQ ID NO: 1719839
uaaagccugggauuccaag

SEQ ID NO: 1719841 - RNA, 19 nt, Artificial Sequence
  Description of Artificial Sequence: Synthetic oligonucleotide
  Sense strand starting at position 873 of SEQ ID NO: 1562071
augucaugagcauauaguu

SEQ ID NO: 1719842 - RNA, 19 nt, Artificial Sequence
  Description of Artificial Sequence: Synthetic oligonucleotide
  Antisense strand to SEQ ID NO: 1719841
aacuauaugcucaugacau

SEQ ID NO: 1719843 - RNA, 19 nt, Artificial Sequence
  Description of Artificial Sequence: Synthetic oligonucleotide
  Sense strand starting at position 879 of SEQ ID NO: 1562071
ugagcauauaguugggauu

SEQ ID NO: 1719844 - RNA, 19 nt, Artificial Sequence
  Description of Artificial Sequence: Synthetic oligonucleotide
  Antisense strand to SEQ ID NO: 1719843
aaucccaacuauaugcuca

SEQ ID NO: 1719845 - RNA, 19 nt, Artificial Sequence
  Description of Artificial Sequence: Synthetic oligonucleotide
  Sense strand starting at position 882 of SEQ ID NO: 1562071
gcauauaguugggauuuga

SEQ ID NO: 1719846 - RNA, 19 nt, Artificial Sequence
  Description of Artificial Sequence: Synthetic oligonucleotide
  Antisense strand to SEQ ID NO: 1719845
ucaaaucccaacuauaugc

SEQ ID NO: 1719847 - RNA, 19 nt, Artificial Sequence
  Description of Artificial Sequence: Synthetic oligonucleotide
  Sense strand starting at position 1199 of SEQ ID NO: 1562071
uggccugagaggugaagau

SEQ ID NO: 1719848 - RNA, 19 nt, Artificial Sequence
  Description of Artificial Sequence: Synthetic oligonucleotide
  Antisense strand to SEQ ID NO: 1719847
aucuucaccucucaggcca

SEQ ID NO: 1719849 - RNA, 19 nt, Artificial Sequence
  Description of Artificial Sequence: Synthetic oligonucleotide
  Sense strand starting at position 1245 of SEQ ID NO: 1562071
ggacuucuucuaggucauc

SEQ ID NO: 1719850 - RNA, 19 nt, Artificial Sequence
  Description of Artificial Sequence: Synthetic oligonucleotide
  Antisense strand to SEQ ID NO: 1719849
gaugaccuagaagaagucc

SEQ ID NO: 1719851 - RNA, 19 nt, Artificial Sequence
  Description of Artificial Sequence: Synthetic oligonucleotide
  Sense strand starting at position 1374 of SEQ ID NO: 1562071
gagugaugaggcugggacu

SEQ ID NO: 1719852 - RNA, 19 nt, Artificial Sequence
  Description of Artificial Sequence: Synthetic oligonucleotide
  Antisense strand to SEQ ID NO: 1719851
agucccagccucaucacuc

SEQ ID NO: 1719853 - RNA, 19 nt, Artificial Sequence
  Description of Artificial Sequence: Synthetic oligonucleotide
  Sense strand starting at position 1441 of SEQ ID NO: 1562071
gagcauggaugcuuggaau

SEQ ID NO: 1719854 - RNA, 19 nt, Artificial Sequence
  Description of Artificial Sequence: Synthetic oligonucleotide
  Antisense strand to SEQ ID NO: 1719853
auuccaagcauccaugcuc

SEQ ID NO: 1719855 - RNA, 19 nt, Artificial Sequence
  Description of Artificial Sequence: Synthetic oligonucleotide
  Sense strand starting at position 1510 of SEQ ID NO: 1562071
gcucuugagucuucugucu

SEQ ID NO: 1719856 - RNA, 19 nt, Artificial Sequence
  Description of Artificial Sequence: Synthetic oligonucleotide
  Antisense strand to SEQ ID NO: 1719855
agacagaagacucaagagc

SEQ ID NO: 1719857 - RNA, 19 nt, Artificial Sequence
  Description of Artificial Sequence: Synthetic oligonucleotide
  Sense strand starting at position 1519 of SEQ ID NO: 1562071
ucuucugucucugcacgaa

SEQ ID NO: 1719858 - RNA, 19 nt, Artificial Sequence
  Description of Artificial Sequence: Synthetic oligonucleotide
  Antisense strand to SEQ ID NO: 1719857
uucgugcagagacagaaga

SEQ ID NO: 1719859 - RNA, 19 nt, Artificial Sequence
  Description of Artificial Sequence: Synthetic oligonucleotide
  Sense strand starting at position 1680 of SEQ ID NO: 1562071
gguugagacucgucuggag

SEQ ID NO: 1719860 - RNA, 19 nt, Artificial Sequence
  Description of Artificial Sequence: Synthetic oligonucleotide
  Antisense strand to SEQ ID NO: 1719859
cuccagacgagucucaacc

SEQ ID NO: 1719861 - RNA, 19 nt, Artificial Sequence
  Description of Artificial Sequence: Synthetic oligonucleotide
  Sense strand starting at position 1682 of SEQ ID NO: 1562071
uugagacucgucuggagga

SEQ ID NO: 1719862 - RNA, 19 nt, Artificial Sequence
  Description of Artificial Sequence: Synthetic oligonucleotide
  Antisense strand to SEQ ID NO: 1719861
uccuccagacgagucucaa

SEQ ID NO: 1719863 - RNA, 19 nt, Artificial Sequence
  Description of Artificial Sequence: Synthetic oligonucleotide
  Sense strand starting at position 2714 of SEQ ID NO: 1562071
gccacuaacccugaauguu

SEQ ID NO: 1719864 - RNA, 19 nt, Artificial Sequence
  Description of Artificial Sequence: Synthetic oligonucleotide
  Antisense strand to SEQ ID NO: 1719863
aacauucaggguuaguggc

SEQ ID NO: 1719865 - RNA, 19 nt, Artificial Sequence
  Description of Artificial Sequence: Synthetic oligonucleotide
  Sense strand starting at position 2723 of SEQ ID NO: 1562071
ccugaauguuuccugugca

SEQ ID NO: 1719866 - RNA, 19 nt, Artificial Sequence
  Description of Artificial Sequence: Synthetic oligonucleotide
  Antisense strand to SEQ ID NO: 1719865
ugcacaggaaacauucagg

SEQ ID NO: 1719867 - RNA, 19 nt, Artificial Sequence
  Description of Artificial Sequence: Synthetic oligonucleotide
  Sense strand starting at position 2726 of SEQ ID NO: 1562071
gaauguuuccugugcaguc

SEQ ID NO: 1719868 - RNA, 19 nt, Artificial Sequence
  Description of Artificial Sequence: Synthetic oligonucleotide
  Antisense strand to SEQ ID NO: 1719867
gacugcacaggaaacauuc

SEQ ID NO: 1719869 - RNA, 19 nt, Artificial Sequence
  Description of Artificial Sequence: Synthetic oligonucleotide
  Sense strand starting at position 2749 of SEQ ID NO: 1562071
gggaucaucuacuccgacu

SEQ ID NO: 1719870 - RNA, 19 nt, Artificial Sequence
  Description of Artificial Sequence: Synthetic oligonucleotide
  Antisense strand to SEQ ID NO: 1719869
agucggaguagaugauccc

SEQ ID NO: 1719871 - RNA, 19 nt, Artificial Sequence
  Description of Artificial Sequence: Synthetic oligonucleotide
  Sense strand starting at position 2816 of SEQ ID NO: 1562071
uggacuguguuuccuccaa

SEQ ID NO: 1719872 - RNA, 19 nt, Artificial Sequence
  Description of Artificial Sequence: Synthetic oligonucleotide
  Antisense strand to SEQ ID NO: 1719871
uuggaggaaacacagucca

SEQ ID NO: 1719873 - RNA, 19 nt, Artificial Sequence
  Description of Artificial Sequence: Synthetic oligonucleotide
  Sense strand starting at position 2820 of SEQ ID NO: 1562071
cuguguuuccuccaaccuu

SEQ ID NO: 1719874 - RNA, 19 nt, Artificial Sequence
  Description of Artificial Sequence: Synthetic oligonucleotide
  Antisense strand to SEQ ID NO: 1719873
aagguuggaggaaacacag

SEQ ID NO: 1719875 - RNA, 19 nt, Artificial Sequence
  Description of Artificial Sequence: Synthetic oligonucleotide
  Sense strand starting at position 2963 of SEQ ID NO: 1562071
gcuaucauuugugaggcau

SEQ ID NO: 1719876 - RNA, 19 nt, Artificial Sequence
  Description of Artificial Sequence: Synthetic oligonucleotide
  Antisense strand to SEQ ID NO: 1719875
augccucacaaaugauagc

SEQ ID NO: 1719877 - RNA, 19 nt, Artificial Sequence
  Description of Artificial Sequence: Synthetic oligonucleotide
  Sense strand starting at position 2965 of SEQ ID NO: 1562071
uaucauuugugaggcauau

SEQ ID NO: 1719878 - RNA, 19 nt, Artificial Sequence
  Description of Artificial Sequence: Synthetic oligonucleotide
  Antisense strand to SEQ ID NO: 1719877
auaugccucacaaaugaua

SEQ ID NO: 1719879 - RNA, 19 nt, Artificial Sequence
  Description of Artificial Sequence: Synthetic oligonucleotide
  Sense strand starting at position 2977 of SEQ ID NO: 1562071
ggcauauauggugggcauu

SEQ ID NO: 1719880 - RNA, 19 nt, Artificial Sequence
  Description of Artificial Sequence: Synthetic oligonucleotide
  Antisense strand to SEQ ID NO: 1719879
aaugcccaccauauaugcc

SEQ ID NO: 1719881 - RNA, 19 nt, Artificial Sequence
  Description of Artificial Sequence: Synthetic oligonucleotide
  Sense strand starting at position 3042 of SEQ ID NO: 1562071
uuggguuuguauucugagu

SEQ ID NO: 1719882 - RNA, 19 nt, Artificial Sequence
  Description of Artificial Sequence: Synthetic oligonucleotide
  Antisense strand to SEQ ID NO: 1719881
acucagaauacaaacccaa

SEQ ID NO: 1719883 - RNA, 19 nt, Artificial Sequence
  Description of Artificial Sequence: Synthetic oligonucleotide
  Sense strand starting at position 3047 of SEQ ID NO: 1562071
uuuguauucugaguaauuc

SEQ ID NO: 1719884 - RNA, 19 nt, Artificial Sequence
  Description of Artificial Sequence: Synthetic oligonucleotide
  Antisense strand to SEQ ID NO: 1719883
gaauuacucagaauacaaa

SEQ ID NO: 1719885 - RNA, 19 nt, Artificial Sequence
  Description of Artificial Sequence: Synthetic oligonucleotide
  Sense strand starting at position 3179 of SEQ ID NO: 1562071
ggcacagacucaucagaau

SEQ ID NO: 1719886 - RNA, 19 nt, Artificial Sequence
  Description of Artificial Sequence: Synthetic oligonucleotide
  Antisense strand to SEQ ID NO: 1719885
auucugaugagucugugcc

SEQ ID NO: 1719887 - RNA, 19 nt, Artificial Sequence
  Description of Artificial Sequence: Synthetic oligonucleotide
  Sense strand starting at position 3221 of SEQ ID NO: 1562071
uagagaaacuuacaguuga

SEQ ID NO: 1719888 - RNA, 19 nt, Artificial Sequence
  Description of Artificial Sequence: Synthetic oligonucleotide
  Antisense strand to SEQ ID NO: 1719887
ucaacuguaaguuucucua

SEQ ID NO: 1719889 - RNA, 19 nt, Artificial Sequence
  Description of Artificial Sequence: Synthetic oligonucleotide
  Sense strand starting at position 3626 of SEQ ID NO: 1562071
aagguaaaugcugguaucu

SEQ ID NO: 1719890 - RNA, 19 nt, Artificial Sequence
  Description of Artificial Sequence: Synthetic oligonucleotide
  Antisense strand to SEQ ID NO: 1719889
agauaccagcauuuaccuu

SEQ ID NO: 1719891 - RNA, 19 nt, Artificial Sequence
  Description of Artificial Sequence: Synthetic oligonucleotide
  Sense strand starting at position 3791 of SEQ ID NO: 1562071
ggagaacuugguggaaugu

SEQ ID NO: 1719892 - RNA, 19 nt, Artificial Sequence
  Description of Artificial Sequence: Synthetic oligonucleotide
  Antisense strand to SEQ ID NO: 1719891
acauuccaccaaguucucc

SEQ ID NO: 1719893 - RNA, 19 nt, Artificial Sequence
  Description of Artificial Sequence: Synthetic oligonucleotide
  Sense strand starting at position 3800 of SEQ ID NO: 1562071
gguggaaugucagagacag

SEQ ID NO: 1719894 - RNA, 19 nt, Artificial Sequence
  Description of Artificial Sequence: Synthetic oligonucleotide
  Antisense strand to SEQ ID NO: 1719893
cugucucugacauuccacc

SEQ ID NO: 1719895 - RNA, 19 nt, Artificial Sequence
  Description of Artificial Sequence: Synthetic oligonucleotide
  Sense strand starting at position 3962 of SEQ ID NO: 1562071
aggaccucuuguucugaua

SEQ ID NO: 1719896 - RNA, 19 nt, Artificial Sequence
  Description of Artificial Sequence: Synthetic oligonucleotide
  Antisense strand to SEQ ID NO: 1719895
uaucagaacaagagguccu

SEQ ID NO: 1719897 - RNA, 19 nt, Artificial Sequence
  Description of Artificial Sequence: Synthetic oligonucleotide
  Sense strand starting at position 3976 of SEQ ID NO: 1562071
ugauaucucugaucucagu

SEQ ID NO: 1719898 - RNA, 19 nt, Artificial Sequence
  Description of Artificial Sequence: Synthetic oligonucleotide
  Antisense strand to SEQ ID NO: 1719897
acugagaucagagauauca

SEQ ID NO: 1719899 - RNA, 19 nt, Artificial Sequence
  Description of Artificial Sequence: Synthetic oligonucleotide
  Sense strand starting at position 70 of SEQ ID NO: 1562072
cgucccgccugaugagaaa

SEQ ID NO: 1719900 - RNA, 19 nt, Artificial Sequence
  Description of Artificial Sequence: Synthetic oligonucleotide
  Antisense strand to SEQ ID NO: 1719899
uuucucaucaggcgggacg

SEQ ID NO: 1719901 - RNA, 19 nt, Artificial Sequence
  Description of Artificial Sequence: Synthetic oligonucleotide
  Sense strand starting at position 588 of SEQ ID NO: 1562072
acaguaagacucuguuugu

SEQ ID NO: 1719902 - RNA, 19 nt, Artificial Sequence
  Description of Artificial Sequence: Synthetic oligonucleotide
  Antisense strand to SEQ ID NO: 1719901
acaaacagagucuuacugu

SEQ ID NO: 1719903 - RNA, 19 nt, Artificial Sequence
  Description of Artificial Sequence: Synthetic oligonucleotide
  Sense strand starting at position 589 of SEQ ID NO: 1562072
caguaagacucuguuugua

SEQ ID NO: 1719904 - RNA, 19 nt, Artificial Sequence
  Description of Artificial Sequence: Synthetic oligonucleotide
  Antisense strand to SEQ ID NO: 1719903
uacaaacagagucuuacug

SEQ ID NO: 1719905 - RNA, 19 nt, Artificial Sequence
  Description of Artificial Sequence: Synthetic oligonucleotide
  Sense strand starting at position 591 of SEQ ID NO: 1562072
guaagacucuguuuguaga

SEQ ID NO: 1719906 - RNA, 19 nt, Artificial Sequence
  Description of Artificial Sequence: Synthetic oligonucleotide
  Antisense strand to SEQ ID NO: 1719905
ucuacaaacagagucuuac

SEQ ID NO: 1719907 - RNA, 19 nt, Artificial Sequence
  Description of Artificial Sequence: Synthetic oligonucleotide
  Sense strand starting at position 593 of SEQ ID NO: 1562072
aagacucuguuuguagaca

SEQ ID NO: 1719908 - RNA, 19 nt, Artificial Sequence
  Description of Artificial Sequence: Synthetic oligonucleotide
  Antisense strand to SEQ ID NO: 1719907
ugucuacaaacagagucuu

SEQ ID NO: 1719909 - RNA, 19 nt, Artificial Sequence
  Description of Artificial Sequence: Synthetic oligonucleotide
  Sense strand starting at position 676 of SEQ ID NO: 1562072
gagagcaacccugguauau

SEQ ID NO: 1719910 - RNA, 19 nt, Artificial Sequence
  Description of Artificial Sequence: Synthetic oligonucleotide
  Antisense strand to SEQ ID NO: 1719909
auauaccaggguugcucuc

SEQ ID NO: 1719911 - RNA, 19 nt, Artificial Sequence
  Description of Artificial Sequence: Synthetic oligonucleotide
  Sense strand starting at position 765 of SEQ ID NO: 1562072
cuccguccuucucuggaaa

SEQ ID NO: 1719912 - RNA, 19 nt, Artificial Sequence
  Description of Artificial Sequence: Synthetic oligonucleotide
  Antisense strand to SEQ ID NO: 1719911
uuuccagagaaggacggag

SEQ ID NO: 1719913 - RNA, 19 nt, Artificial Sequence
  Description of Artificial Sequence: Synthetic oligonucleotide
  Sense strand starting at position 800 of SEQ ID NO: 1562072
gcaaguuccgccugcagua

SEQ ID NO: 1719914 - RNA, 19 nt, Artificial Sequence
  Description of Artificial Sequence: Synthetic oligonucleotide
  Antisense strand to SEQ ID NO: 1719913
uacugcaggcggaacuugc

SEQ ID NO: 1719915 - RNA, 19 nt, Artificial Sequence
  Description of Artificial Sequence: Synthetic oligonucleotide
  Sense strand starting at position 812 of SEQ ID NO: 1562072
ugcaguaauuccgcgacuu

SEQ ID NO: 1719916 - RNA, 19 nt, Artificial Sequence
  Description of Artificial Sequence: Synthetic oligonucleotide
  Antisense strand to SEQ ID NO: 1719915
aagucgcggaauuacugca

SEQ ID NO: 1719917 - RNA, 19 nt, Artificial Sequence
  Description of Artificial Sequence: Synthetic oligonucleotide
  Sense strand starting at position 813 of SEQ ID NO: 1562072
gcaguaauuccgcgacuuc

SEQ ID NO: 1719918 - RNA, 19 nt, Artificial Sequence
  Description of Artificial Sequence: Synthetic oligonucleotide
  Antisense strand to SEQ ID NO: 1719917
gaagucgcggaauuacugc

SEQ ID NO: 1719919 - RNA, 19 nt, Artificial Sequence
  Description of Artificial Sequence: Synthetic oligonucleotide
  Sense strand starting at position 1262 of SEQ ID NO: 1562072
cgggagcuguaguuucgaa

SEQ ID NO: 1719920 - RNA, 19 nt, Artificial Sequence
  Description of Artificial Sequence: Synthetic oligonucleotide
  Antisense strand to SEQ ID NO: 1719919
uucgaaacuacagcucccg

SEQ ID NO: 1719921 - RNA, 19 nt, Artificial Sequence
  Description of Artificial Sequence: Synthetic oligonucleotide
  Sense strand starting at position 2109 of SEQ ID NO: 1562072
gggaguuggcgcugcguga

SEQ ID NO: 1719922 - RNA, 19 nt, Artificial Sequence
  Description of Artificial Sequence: Synthetic oligonucleotide
  Antisense strand to SEQ ID NO: 1719921
ucacgcagcgccaacuccc

SEQ ID NO: 1719923 - RNA, 19 nt, Artificial Sequence
  Description of Artificial Sequence: Synthetic oligonucleotide
  Sense strand starting at position 2174 of SEQ ID NO: 1562072
uguguuuaauguccacuga

SEQ ID NO: 1719924 - RNA, 19 nt, Artificial Sequence
  Description of Artificial Sequence: Synthetic oligonucleotide
  Antisense strand to SEQ ID NO: 1719923
ucaguggacauuaaacaca

SEQ ID NO: 1719925 - RNA, 19 nt, Artificial Sequence
  Description of Artificial Sequence: Synthetic oligonucleotide
  Sense strand starting at position 2221 of SEQ ID NO: 1562072
cgcuccugggugugagaua

SEQ ID NO: 1719926 - RNA, 19 nt, Artificial Sequence
  Description of Artificial Sequence: Synthetic oligonucleotide
  Antisense strand to SEQ ID NO: 1719925
uaucucacacccaggagcg

SEQ ID NO: 1719927 - RNA, 19 nt, Artificial Sequence
  Description of Artificial Sequence: Synthetic oligonucleotide
  Sense strand starting at position 2232 of SEQ ID NO: 1562072
gugagauagugcucggaga

SEQ ID NO: 1719928 - RNA, 19 nt, Artificial Sequence
  Description of Artificial Sequence: Synthetic oligonucleotide
  Antisense strand to SEQ ID NO: 1719927
ucuccgagcacuaucucac

SEQ ID NO: 1719929 - RNA, 19 nt, Artificial Sequence
  Description of Artificial Sequence: Synthetic oligonucleotide
  Sense strand starting at position 2233 of SEQ ID NO: 1562072
ugagauagugcucggagaa

SEQ ID NO: 1719930 - RNA, 19 nt, Artificial Sequence
  Description of Artificial Sequence: Synthetic oligonucleotide
  Antisense strand to SEQ ID NO: 1719929
uucuccgagcacuaucuca

SEQ ID NO: 1719931 - RNA, 19 nt, Artificial Sequence
  Description of Artificial Sequence: Synthetic oligonucleotide
  Sense strand starting at position 2234 of SEQ ID NO: 1562072
gagauagugcucggagaag

SEQ ID NO: 1719932 - RNA, 19 nt, Artificial Sequence
  Description of Artificial Sequence: Synthetic oligonucleotide
  Antisense strand to SEQ ID NO: 1719931
cuucuccgagcacuaucuc

SEQ ID NO: 1719933 - RNA, 19 nt, Artificial Sequence
  Description of Artificial Sequence: Synthetic oligonucleotide
  Sense strand starting at position 2358 of SEQ ID NO: 1562072
cacacacucguugaaugaa

SEQ ID NO: 1719934 - RNA, 19 nt, Artificial Sequence
  Description of Artificial Sequence: Synthetic oligonucleotide
  Antisense strand to SEQ ID NO: 1719933
uucauucaacgagugugug

SEQ ID NO: 1719935 - RNA, 19 nt, Artificial Sequence
  Description of Artificial Sequence: Synthetic oligonucleotide
  Sense strand starting at position 2407 of SEQ ID NO: 1562072
cauacaugcugauaugguu

SEQ ID NO: 1719936 - RNA, 19 nt, Artificial Sequence
  Description of Artificial Sequence: Synthetic oligonucleotide
  Antisense strand to SEQ ID NO: 1719935
aaccauaucagcauguaug

SEQ ID NO: 1719937 - RNA, 19 nt, Artificial Sequence
  Description of Artificial Sequence: Synthetic oligonucleotide
  Sense strand starting at position 2445 of SEQ ID NO: 1562072
aagucucaccucgaauugu

SEQ ID NO: 1719938 - RNA, 19 nt, Artificial Sequence
  Description of Artificial Sequence: Synthetic oligonucleotide
  Antisense strand to SEQ ID NO: 1719937
acaauucgaggugagacuu

SEQ ID NO: 1719939 - RNA, 19 nt, Artificial Sequence
  Description of Artificial Sequence: Synthetic oligonucleotide
  Sense strand starting at position 2502 of SEQ ID NO: 1562072
guuggaucaugcggucagu

SEQ ID NO: 1719940 - RNA, 19 nt, Artificial Sequence
  Description of Artificial Sequence: Synthetic oligonucleotide
  Antisense strand to SEQ ID NO: 1719939
acugaccgcaugauccaac

SEQ ID NO: 1719941 - RNA, 19 nt, Artificial Sequence
  Description of Artificial Sequence: Synthetic oligonucleotide
  Sense strand starting at position 2552 of SEQ ID NO: 1562072
aggagacccgaugguuuaa

SEQ ID NO: 1719942 - RNA, 19 nt, Artificial Sequence
  Description of Artificial Sequence: Synthetic oligonucleotide
  Antisense strand to SEQ ID NO: 1719941
uuaaaccaucgggucuccu

SEQ ID NO: 1719943 - RNA, 19 nt, Artificial Sequence
  Description of Artificial Sequence: Synthetic oligonucleotide
  Sense strand starting at position 2977 of SEQ ID NO: 1562072
ccacacuuucugggugaga

SEQ ID NO: 1719944 - RNA, 19 nt, Artificial Sequence
  Description of Artificial Sequence: Synthetic oligonucleotide
  Antisense strand to SEQ ID NO: 1719943
ucucacccagaaagugugg

SEQ ID NO: 1719945 - RNA, 19 nt, Artificial Sequence
  Description of Artificial Sequence: Synthetic oligonucleotide
  Sense strand starting at position 2978 of SEQ ID NO: 1562072
cacacuuucugggugagaa

SEQ ID NO: 1719946 - RNA, 19 nt, Artificial Sequence
  Description of Artificial Sequence: Synthetic oligonucleotide
  Antisense strand to SEQ ID NO: 1719945
uucucacccagaaagugug

SEQ ID NO: 1719947 - RNA, 19 nt, Artificial Sequence
  Description of Artificial Sequence: Synthetic oligonucleotide
  Sense strand starting at position 2979 of SEQ ID NO: 1562072
acacuuucugggugagaaa

SEQ ID NO: 1719948 - RNA, 19 nt, Artificial Sequence
  Description of Artificial Sequence: Synthetic oligonucleotide
  Antisense strand to SEQ ID NO: 1719947
uuucucacccagaaagugu

SEQ ID NO: 1719949 - RNA, 19 nt, Artificial Sequence
  Description of Artificial Sequence: Synthetic oligonucleotide
  Sense strand starting at position 3071 of SEQ ID NO: 1562072
aucucaucuccugagagca

SEQ ID NO: 1719950 - RNA, 19 nt, Artificial Sequence
  Description of Artificial Sequence: Synthetic oligonucleotide
  Antisense strand to SEQ ID NO: 1719949
ugcucucaggagaugagau

SEQ ID NO: 1719951 - RNA, 19 nt, Artificial Sequence
  Description of Artificial Sequence: Synthetic oligonucleotide
  Sense strand starting at position 3117 of SEQ ID NO: 1562072
ugagcugaagucugaguca

SEQ ID NO: 1719952 - RNA, 19 nt, Artificial Sequence
  Description of Artificial Sequence: Synthetic oligonucleotide
  Antisense strand to SEQ ID NO: 1719951
ugacucagacuucagcuca

SEQ ID NO: 1719953 - RNA, 19 nt, Artificial Sequence
  Description of Artificial Sequence: Synthetic oligonucleotide
  Sense strand starting at position 3120 of SEQ ID NO: 1562072
gcugaagucugagucaucu

SEQ ID NO: 1719954 - RNA, 19 nt, Artificial Sequence
  Description of Artificial Sequence: Synthetic oligonucleotide
  Antisense strand to SEQ ID NO: 1719953
agaugacucagacuucagc

SEQ ID NO: 1719955 - RNA, 19 nt, Artificial Sequence
  Description of Artificial Sequence: Synthetic oligonucleotide
  Sense strand starting at position 3208 of SEQ ID NO: 1562072
uccucuaauugcugacgua

SEQ ID NO: 1719956 - RNA, 19 nt, Artificial Sequence
  Description of Artificial Sequence: Synthetic oligonucleotide
  Antisense strand to SEQ ID NO: 1719955
uacgucagcaauuagagga

SEQ ID NO: 1719957 - RNA, 19 nt, Artificial Sequence
  Description of Artificial Sequence: Synthetic oligonucleotide
  Sense strand starting at position 3250 of SEQ ID NO: 1562072
gugcuugacagaugucugu

SEQ ID NO: 1719958 - RNA, 19 nt, Artificial Sequence
  Description of Artificial Sequence: Synthetic oligonucleotide
  Antisense strand to SEQ ID NO: 1719957
acagacaucugucaagcac

SEQ ID NO: 1719959 - RNA, 19 nt, Artificial Sequence
  Description of Artificial Sequence: Synthetic oligonucleotide
  Sense strand starting at position 3254 of SEQ ID NO: 1562072
uugacagaugucuguugaa

SEQ ID NO: 1719960 - RNA, 19 nt, Artificial Sequence
  Description of Artificial Sequence: Synthetic oligonucleotide
  Antisense strand to SEQ ID NO: 1719959
uucaacagacaucugucaa

SEQ ID NO: 1719961 - RNA, 19 nt, Artificial Sequence
  Description of Artificial Sequence: Synthetic oligonucleotide
  Sense strand starting at position 3257 of SEQ ID NO: 1562072
acagaugucuguugaauga

SEQ ID NO: 1719962 - RNA, 19 nt, Artificial Sequence
  Description of Artificial Sequence: Synthetic oligonucleotide
  Antisense strand to SEQ ID NO: 1719961
ucauucaacagacaucugu

SEQ ID NO: 1719963 - RNA, 19 nt, Artificial Sequence
  Description of Artificial Sequence: Synthetic oligonucleotide
  Sense strand starting at position 3278 of SEQ ID NO: 1562072
gaguguccugcugagauau

SEQ ID NO: 1719964 - RNA, 19 nt, Artificial Sequence
  Description of Artificial Sequence: Synthetic oligonucleotide
  Antisense strand to SEQ ID NO: 1719963
auaucucagcaggacacuc

SEQ ID NO: 1719965 - RNA, 19 nt, Artificial Sequence
  Description of Artificial Sequence: Synthetic oligonucleotide
  Sense strand starting at position 3280 of SEQ ID NO: 1562072
guguccugcugagauauag

SEQ ID NO: 1719966 - RNA, 19 nt, Artificial Sequence
  Description of Artificial Sequence: Synthetic oligonucleotide
  Antisense strand to SEQ ID NO: 1719965
cuauaucucagcaggacac

SEQ ID NO: 1719967 - RNA, 19 nt, Artificial Sequence
  Description of Artificial Sequence: Synthetic oligonucleotide
  Sense strand starting at position 3378 of SEQ ID NO: 1562072
ggaauagaguggugcgauc

SEQ ID NO: 1719968 - RNA, 19 nt, Artificial Sequence
  Description of Artificial Sequence: Synthetic oligonucleotide
  Antisense strand to SEQ ID NO: 1719967
gaucgcaccacucuauucc

SEQ ID NO: 1719969 - RNA, 19 nt, Artificial Sequence
  Description of Artificial Sequence: Synthetic oligonucleotide
  Sense strand starting at position 3648 of SEQ ID NO: 1562072
aaugcagaggucugauaaa

SEQ ID NO: 1719970 - RNA, 19 nt, Artificial Sequence
  Description of Artificial Sequence: Synthetic oligonucleotide
  Antisense strand to SEQ ID NO: 1719969
uuuaucagaccucugcauu

SEQ ID NO: 1719971 - RNA, 19 nt, Artificial Sequence
  Description of Artificial Sequence: Synthetic oligonucleotide
  Sense strand starting at position 7 of SEQ ID NO: 1562073
ucccgucacccaggaaauu

SEQ ID NO: 1719972 - RNA, 19 nt, Artificial Sequence
  Description of Artificial Sequence: Synthetic oligonucleotide
  Antisense strand to SEQ ID NO: 1719971
aauuuccugggugacggga

SEQ ID NO: 1719973 - RNA, 19 nt, Artificial Sequence
  Description of Artificial Sequence: Synthetic oligonucleotide
  Sense strand starting at position 8 of SEQ ID NO: 1562073
cccgucacccaggaaauua

SEQ ID NO: 1719974 - RNA, 19 nt, Artificial Sequence
  Description of Artificial Sequence: Synthetic oligonucleotide
  Antisense strand to SEQ ID NO: 1719973
uaauuuccugggugacggg

SEQ ID NO: 1719975 - RNA, 19 nt, Artificial Sequence
  Description of Artificial Sequence: Synthetic oligonucleotide
  Sense strand starting at position 68 of SEQ ID NO: 1562073
ucacaauauugauccgaaa

SEQ ID NO: 1719976 - RNA, 19 nt, Artificial Sequence
  Description of Artificial Sequence: Synthetic oligonucleotide
  Antisense strand to SEQ ID NO: 1719975
uuucggaucaauauuguga

SEQ ID NO: 1719977 - RNA, 19 nt, Artificial Sequence
  Description of Artificial Sequence: Synthetic oligonucleotide
  Sense strand starting at position 138 of SEQ ID NO: 1562073
ggccuacaacaauguauau

SEQ ID NO: 1719978 - RNA, 19 nt, Artificial Sequence
  Description of Artificial Sequence: Synthetic oligonucleotide
  Antisense strand to SEQ ID NO: 1719977
auauacauuguuguaggcc

SEQ ID NO: 1719979 - RNA, 19 nt, Artificial Sequence
  Description of Artificial Sequence: Synthetic oligonucleotide
  Sense strand starting at position 174 of SEQ ID NO: 1562073
agcauuuguugugugaaua

SEQ ID NO: 1719980 - RNA, 19 nt, Artificial Sequence
  Description of Artificial Sequence: Synthetic oligonucleotide
  Antisense strand to SEQ ID NO: 1719979
uauucacacaacaaaugcu

SEQ ID NO: 1719981 - RNA, 19 nt, Artificial Sequence
  Description of Artificial Sequence: Synthetic oligonucleotide
  Sense strand starting at position 175 of SEQ ID NO: 1562073
gcauuuguugugugaauag

SEQ ID NO: 1719982 - RNA, 19 nt, Artificial Sequence
  Description of Artificial Sequence: Synthetic oligonucleotide
  Antisense strand to SEQ ID NO: 1719981
cuauucacacaacaaaugc

SEQ ID NO: 1719983 - RNA, 19 nt, Artificial Sequence
  Description of Artificial Sequence: Synthetic oligonucleotide
  Sense strand starting at position 391 of SEQ ID NO: 1562073
uccagcauucgccuguuua

SEQ ID NO: 1719984 - RNA, 19 nt, Artificial Sequence
  Description of Artificial Sequence: Synthetic oligonucleotide
  Antisense strand to SEQ ID NO: 1719983
uaaacaggcgaaugcugga

SEQ ID NO: 1719985 - RNA, 19 nt, Artificial Sequence
  Description of Artificial Sequence: Synthetic oligonucleotide
  Sense strand starting at position 401 of SEQ ID NO: 1562073
gccuguuuacauguacgua

SEQ ID NO: 1719986 - RNA, 19 nt, Artificial Sequence
  Description of Artificial Sequence: Synthetic oligonucleotide
  Antisense strand to SEQ ID NO: 1719985
uacguacauguaaacaggc

SEQ ID NO: 1719987 - RNA, 19 nt, Artificial Sequence
  Description of Artificial Sequence: Synthetic oligonucleotide
  Sense strand starting at position 491 of SEQ ID NO: 1562073
uauuauguggcugacacau

SEQ ID NO: 1719988 - RNA, 19 nt, Artificial Sequence
  Description of Artificial Sequence: Synthetic oligonucleotide
  Antisense strand to SEQ ID NO: 1719987
augugucagccacauaaua

SEQ ID NO: 1719989 - RNA, 19 nt, Artificial Sequence
  Description of Artificial Sequence: Synthetic oligonucleotide
  Sense strand starting at position 543 of SEQ ID NO: 1562073
ccugucuacgugggaaaga

SEQ ID NO: 1719990 - RNA, 19 nt, Artificial Sequence
  Description of Artificial Sequence: Synthetic oligonucleotide
  Antisense strand to SEQ ID NO: 1719989
ucuuucccacguagacagg

SEQ ID NO: 1719991 - RNA, 19 nt, Artificial Sequence
  Description of Artificial Sequence: Synthetic oligonucleotide
  Sense strand starting at position 692 of SEQ ID NO: 1562073
gugacaaucucagugaaga

SEQ ID NO: 1719992 - RNA, 19 nt, Artificial Sequence
  Description of Artificial Sequence: Synthetic oligonucleotide
  Antisense strand to SEQ ID NO: 1719991
ucuucacugagauugucac

SEQ ID NO: 1719993 - RNA, 19 nt, Artificial Sequence
  Description of Artificial Sequence: Synthetic oligonucleotide
  Sense strand starting at position 747 of SEQ ID NO: 1562073
gaacaagaggccuguuuag

SEQ ID NO: 1719994 - RNA, 19 nt, Artificial Sequence
  Description of Artificial Sequence: Synthetic oligonucleotide
  Antisense strand to SEQ ID NO: 1719993
cuaaacaggccucuuguuc

SEQ ID NO: 1719995 - RNA, 19 nt, Artificial Sequence
  Description of Artificial Sequence: Synthetic oligonucleotide
  Sense strand starting at position 757 of SEQ ID NO: 1562073
ccuguuuagcuagaacagu

SEQ ID NO: 1719996 - RNA, 19 nt, Artificial Sequence
  Description of Artificial Sequence: Synthetic oligonucleotide
  Antisense strand to SEQ ID NO: 1719995
acuguucuagcuaaacagg

SEQ ID NO: 1719997 - RNA, 19 nt, Artificial Sequence
  Description of Artificial Sequence: Synthetic oligonucleotide
  Sense strand starting at position 765 of SEQ ID NO: 1562073
gcuagaacaguaugaaaga

SEQ ID NO: 1719998 - RNA, 19 nt, Artificial Sequence
  Description of Artificial Sequence: Synthetic oligonucleotide
  Antisense strand to SEQ ID NO: 1719997
ucuuucauacuguucuagc

SEQ ID NO: 1719999 - RNA, 19 nt, Artificial Sequence
  Description of Artificial Sequence: Synthetic oligonucleotide
  Sense strand starting at position 1185 of SEQ ID NO: 1562073
uugugagaucagggauuau

SEQ ID NO: 1720000 - RNA, 19 nt, Artificial Sequence
  Description of Artificial Sequence: Synthetic oligonucleotide
  Antisense strand to SEQ ID NO: 1719999
auaaucccugaucucacaa

SEQ ID NO: 1720001 - RNA, 19 nt, Artificial Sequence
  Description of Artificial Sequence: Synthetic oligonucleotide
  Sense strand starting at position 1277 of SEQ ID NO: 1562073
cucugcuaucaggaacuua

SEQ ID NO: 1720002 - RNA, 19 nt, Artificial Sequence
  Description of Artificial Sequence: Synthetic oligonucleotide
  Antisense strand to SEQ ID NO: 1720001
uaaguuccugauagcagag

SEQ ID NO: 1720003 - RNA, 19 nt, Artificial Sequence
  Description of Artificial Sequence: Synthetic oligonucleotide
  Sense strand starting at position 1394 of SEQ ID NO: 1562073
ggcuucucugagcaaauga

SEQ ID NO: 1720004 - RNA, 19 nt, Artificial Sequence
  Description of Artificial Sequence: Synthetic oligonucleotide
  Antisense strand to SEQ ID NO: 1720003
ucauuugcucagagaagcc

SEQ ID NO: 1720005 - RNA, 19 nt, Artificial Sequence
  Description of Artificial Sequence: Synthetic oligonucleotide
  Sense strand starting at position 1430 of SEQ ID NO: 1562073
cucaguauacacuagguau

SEQ ID NO: 1720006 - RNA, 19 nt, Artificial Sequence
  Description of Artificial Sequence: Synthetic oligonucleotide
  Antisense strand to SEQ ID NO: 1720005
auaccuaguguauacugag

SEQ ID NO: 1720007 - RNA, 19 nt, Artificial Sequence
  Description of Artificial Sequence: Synthetic oligonucleotide
  Sense strand starting at position 1611 of SEQ ID NO: 1562073
uaagauuacuguccaguga

SEQ ID NO: 1720008 - RNA, 19 nt, Artificial Sequence
  Description of Artificial Sequence: Synthetic oligonucleotide
  Antisense strand to SEQ ID NO: 1720007
ucacuggacaguaaucuua

SEQ ID NO: 1720009 - RNA, 19 nt, Artificial Sequence
  Description of Artificial Sequence: Synthetic oligonucleotide
  Sense strand starting at position 1684 of SEQ ID NO: 1562073
gaguccucugaauggaaua

SEQ ID NO: 1720010 - RNA, 19 nt, Artificial Sequence
  Description of Artificial Sequence: Synthetic oligonucleotide
  Antisense strand to SEQ ID NO: 1720009
uauuccauucagaggacuc

SEQ ID NO: 1720011 - RNA, 19 nt, Artificial Sequence
  Description of Artificial Sequence: Synthetic oligonucleotide
  Sense strand starting at position 2314 of SEQ ID NO: 1562073
uguuucugcgauuaaggau

SEQ ID NO: 1720012 - RNA, 19 nt, Artificial Sequence
  Description of Artificial Sequence: Synthetic oligonucleotide
  Antisense strand to SEQ ID NO: 1720011
auccuuaaucgcagaaaca

SEQ ID NO: 1720013 - RNA, 19 nt, Artificial Sequence
  Description of Artificial Sequence: Synthetic oligonucleotide
  Sense strand starting at position 2323 of SEQ ID NO: 1562073
gauuaaggaugccuaugaa

SEQ ID NO: 1720014 - RNA, 19 nt, Artificial Sequence
  Description of Artificial Sequence: Synthetic oligonucleotide
  Antisense strand to SEQ ID NO: 1720013
uucauaggcauccuuaauc

SEQ ID NO: 1720015 - RNA, 19 nt, Artificial Sequence
  Description of Artificial Sequence: Synthetic oligonucleotide
  Sense strand starting at position 2342 of SEQ ID NO: 1562073
cggaaucugcuguaucaau

SEQ ID NO: 1720016 - RNA, 19 nt, Artificial Sequence
  Description of Artificial Sequence: Synthetic oligonucleotide
  Antisense strand to SEQ ID NO: 1720015
auugauacagcagauuccg

SEQ ID NO: 1720017 - RNA, 19 nt, Artificial Sequence
  Description of Artificial Sequence: Synthetic oligonucleotide
  Sense strand starting at position 2382 of SEQ ID NO: 1562073
gagaacgcaucuuucuuga

SEQ ID NO: 1720018 - RNA, 19 nt, Artificial Sequence
  Description of Artificial Sequence: Synthetic oligonucleotide
  Antisense strand to SEQ ID NO: 1720017
ucaagaaagaugcguucuc

SEQ ID NO: 1720019 - RNA, 19 nt, Artificial Sequence
  Description of Artificial Sequence: Synthetic oligonucleotide
  Sense strand starting at position 2804 of SEQ ID NO: 1562073
augggaaagugccuauaau

SEQ ID NO: 1720020 - RNA, 19 nt, Artificial Sequence
  Description of Artificial Sequence: Synthetic oligonucleotide
  Antisense strand to SEQ ID NO: 1720019
auuauaggcacuuucccau

SEQ ID NO: 1720021 - RNA, 19 nt, Artificial Sequence
  Description of Artificial Sequence: Synthetic oligonucleotide
  Sense strand starting at position 2805 of SEQ ID NO: 1562073
ugggaaagugccuauaauc

SEQ ID NO: 1720022 - RNA, 19 nt, Artificial Sequence
  Description of Artificial Sequence: Synthetic oligonucleotide
  Antisense strand to SEQ ID NO: 1720021
gauuauaggcacuuuccca

SEQ ID NO: 1720023 - RNA, 19 nt, Artificial Sequence
  Description of Artificial Sequence: Synthetic oligonucleotide
  Sense strand starting at position 2932 of SEQ ID NO: 1562073
aggcguugugguaagcuuu

SEQ ID NO: 1720024 - RNA, 19 nt, Artificial Sequence
  Description of Artificial Sequence: Synthetic oligonucleotide
  Antisense strand to SEQ ID NO: 1720023
aaagcuuaccacaacgccu

SEQ ID NO: 1720025 - RNA, 19 nt, Artificial Sequence
  Description of Artificial Sequence: Synthetic oligonucleotide
  Sense strand starting at position 3149 of SEQ ID NO: 1562073
gaaggcagaucuuuaugau

SEQ ID NO: 1720026 - RNA, 19 nt, Artificial Sequence
  Description of Artificial Sequence: Synthetic oligonucleotide
  Antisense strand to SEQ ID NO: 1720025
aucauaaagaucugccuuc

SEQ ID NO: 1720027 - RNA, 19 nt, Artificial Sequence
  Description of Artificial Sequence: Synthetic oligonucleotide
  Sense strand starting at position 3156 of SEQ ID NO: 1562073
gaucuuuaugauuggauau

SEQ ID NO: 1720028 - RNA, 19 nt, Artificial Sequence
  Description of Artificial Sequence: Synthetic oligonucleotide
  Antisense strand to SEQ ID NO: 1720027
auauccaaucauaaagauc

SEQ ID NO: 1720029 - RNA, 19 nt, Artificial Sequence
  Description of Artificial Sequence: Synthetic oligonucleotide
  Sense strand starting at position 3178 of SEQ ID NO: 1562073
ccuauugaccuacgugaaa

SEQ ID NO: 1720030 - RNA, 19 nt, Artificial Sequence
  Description of Artificial Sequence: Synthetic oligonucleotide
  Antisense strand to SEQ ID NO: 1720029
uuucacguaggucaauagg

SEQ ID NO: 1720031 - RNA, 19 nt, Artificial Sequence
  Description of Artificial Sequence: Synthetic oligonucleotide
  Sense strand starting at position 3225 of SEQ ID NO: 1562073
ugggaagaguugcccagaa

SEQ ID NO: 1720032 - RNA, 19 nt, Artificial Sequence
  Description of Artificial Sequence: Synthetic oligonucleotide
  Antisense strand to SEQ ID NO: 1720031
uucugggcaacucuuccca

SEQ ID NO: 1720033 - RNA, 19 nt, Artificial Sequence
  Description of Artificial Sequence: Synthetic oligonucleotide
  Sense strand starting at position 3292 of SEQ ID NO: 1562073
uuguuacugugauuaauga

SEQ ID NO: 1720034 - RNA, 19 nt, Artificial Sequence
  Description of Artificial Sequence: Synthetic oligonucleotide
  Antisense strand to SEQ ID NO: 1720033
ucauuaaucacaguaacaa

SEQ ID NO: 1720035 - RNA, 19 nt, Artificial Sequence
  Description of Artificial Sequence: Synthetic oligonucleotide
  Sense strand starting at position 3332 of SEQ ID NO: 1562073
uuaauuaguuggucucuga

SEQ ID NO: 1720036 - RNA, 19 nt, Artificial Sequence
  Description of Artificial Sequence: Synthetic oligonucleotide
  Antisense strand to SEQ ID NO: 1720035
ucagagaccaacuaauuaa

SEQ ID NO: 1720037 - RNA, 19 nt, Artificial Sequence
  Description of Artificial Sequence: Synthetic oligonucleotide
  Sense strand starting at position 3507 of SEQ ID NO: 1562073
ccaggaucaaagcgauucu

SEQ ID NO: 1720038 - RNA, 19 nt, Artificial Sequence
  Description of Artificial Sequence: Synthetic oligonucleotide
  Antisense strand to SEQ ID NO: 1720037
agaaucgcuuugauccugg

SEQ ID NO: 1720039 - RNA, 19 nt, Artificial Sequence
  Description of Artificial Sequence: Synthetic oligonucleotide
  Sense strand starting at position 3738 of SEQ ID NO: 1562073
aucaucagugccuagaaga

SEQ ID NO: 1720040 - RNA, 19 nt, Artificial Sequence
  Description of Artificial Sequence: Synthetic oligonucleotide
  Antisense strand to SEQ ID NO: 1720039
ucuucuaggcacugaugau

SEQ ID NO: 1720041 - RNA, 19 nt, Artificial Sequence
  Description of Artificial Sequence: Synthetic oligonucleotide
  Sense strand starting at position 3755 of SEQ ID NO: 1562073
gagucuuuggcacacucaa

SEQ ID NO: 1720042 - RNA, 19 nt, Artificial Sequence
  Description of Artificial Sequence: Synthetic oligonucleotide
  Antisense strand to SEQ ID NO: 1720041
uugagugugccaaagacuc

SEQ ID NO: 1720043 - RNA, 19 nt, Artificial Sequence
  Description of Artificial Sequence: Synthetic oligonucleotide
  Sense strand starting at position 3937 of SEQ ID NO: 1562073
ucacauaggcagugagaga

SEQ ID NO: 1720044 - RNA, 19 nt, Artificial Sequence
  Description of Artificial Sequence: Synthetic oligonucleotide
  Antisense strand to SEQ ID NO: 1720043
ucucucacugccuauguga

SEQ ID NO: 1720045 - RNA, 19 nt, Artificial Sequence
  Description of Artificial Sequence: Synthetic oligonucleotide
  Sense strand starting at position 3946 of SEQ ID NO: 1562073
cagugagagacccgggaau

SEQ ID NO: 1720046 - RNA, 19 nt, Artificial Sequence
  Description of Artificial Sequence: Synthetic oligonucleotide
  Antisense strand to SEQ ID NO: 1720045
auucccgggucucucacug

SEQ ID NO: 1720047 - RNA, 19 nt, Artificial Sequence
  Description of Artificial Sequence: Synthetic oligonucleotide
  Sense strand starting at position 3961 of SEQ ID NO: 1562073
gaaugagugcuaggauuag

SEQ ID NO: 1720048 - RNA, 19 nt, Artificial Sequence
  Description of Artificial Sequence: Synthetic oligonucleotide
  Antisense strand to SEQ ID NO: 1720047
cuaauccuagcacucauuc

SEQ ID NO: 1720049 - RNA, 19 nt, Artificial Sequence
  Description of Artificial Sequence: Synthetic oligonucleotide
  Sense strand starting at position 3972 of SEQ ID NO: 1562073
aggauuaguucuuucucac

SEQ ID NO: 1720050 - RNA, 19 nt, Artificial Sequence
  Description of Artificial Sequence: Synthetic oligonucleotide
  Antisense strand to SEQ ID NO: 1720049
gugagaaagaacuaauccu

SEQ ID NO: 1720051 - RNA, 19 nt, Artificial Sequence
  Description of Artificial Sequence: Synthetic oligonucleotide
  Sense strand starting at position 376 of SEQ ID NO: 1562074
gggaauucuauugacguau

SEQ ID NO: 1720052 - RNA, 19 nt, Artificial Sequence
  Description of Artificial Sequence: Synthetic oligonucleotide
  Antisense strand to SEQ ID NO: 1720051
auacgucaauagaauuccc

SEQ ID NO: 1720053 - RNA, 19 nt, Artificial Sequence
  Description of Artificial Sequence: Synthetic oligonucleotide
  Sense strand starting at position 485 of SEQ ID NO: 1562074
ccggguaucagagaugguc

SEQ ID NO: 1720054 - RNA, 19 nt, Artificial Sequence
  Description of Artificial Sequence: Synthetic oligonucleotide
  Antisense strand to SEQ ID NO: 1720053
gaccaucucugauacccgg

SEQ ID NO: 1720055 - RNA, 19 nt, Artificial Sequence
  Description of Artificial Sequence: Synthetic oligonucleotide
  Sense strand starting at position 494 of SEQ ID NO: 1562074
agagauggucucugagagu

SEQ ID NO: 1720056 - RNA, 19 nt, Artificial Sequence
  Description of Artificial Sequence: Synthetic oligonucleotide
  Antisense strand to SEQ ID NO: 1720055
acucucagagaccaucucu

SEQ ID NO: 1720057 - RNA, 19 nt, Artificial Sequence
  Description of Artificial Sequence: Synthetic oligonucleotide
  Sense strand starting at position 537 of SEQ ID NO: 1562074
gucugcugcagggaaauua

SEQ ID NO: 1720058 - RNA, 19 nt, Artificial Sequence
  Description of Artificial Sequence: Synthetic oligonucleotide
  Antisense strand to SEQ ID NO: 1720057
uaauuucccugcagcagac

SEQ ID NO: 1720059 - RNA, 19 nt, Artificial Sequence
  Description of Artificial Sequence: Synthetic oligonucleotide
  Sense strand starting at position 1955 of SEQ ID NO: 1562074
auuccuggaguugggaaau

SEQ ID NO: 1720060 - RNA, 19 nt, Artificial Sequence
  Description of Artificial Sequence: Synthetic oligonucleotide
  Antisense strand to SEQ ID NO: 1720059
auuucccaacuccaggaau

SEQ ID NO: 1720061 - RNA, 19 nt, Artificial Sequence
  Description of Artificial Sequence: Synthetic oligonucleotide
  Sense strand starting at position 1995 of SEQ ID NO: 1562074
gcgcaugucccaguaauua

SEQ ID NO: 1720062 - RNA, 19 nt, Artificial Sequence
  Description of Artificial Sequence: Synthetic oligonucleotide
  Antisense strand to SEQ ID NO: 1720061
uaauuacugggacaugcgc

SEQ ID NO: 1720063 - RNA, 19 nt, Artificial Sequence
  Description of Artificial Sequence: Synthetic oligonucleotide
  Sense strand starting at position 2258 of SEQ ID NO: 1562074
cuaucucaguccuuggaga

SEQ ID NO: 1720064 - RNA, 19 nt, Artificial Sequence
  Description of Artificial Sequence: Synthetic oligonucleotide
  Antisense strand to SEQ ID NO: 1720063
ucuccaaggacugagauag

SEQ ID NO: 1720065 - RNA, 19 nt, Artificial Sequence
  Description of Artificial Sequence: Synthetic oligonucleotide
  Sense strand starting at position 2290 of SEQ ID NO: 1562074
gggagaaaugcguacucau

SEQ ID NO: 1720066 - RNA, 19 nt, Artificial Sequence
  Description of Artificial Sequence: Synthetic oligonucleotide
  Antisense strand to SEQ ID NO: 1720065
augaguacgcauuucuccc

SEQ ID NO: 1720067 - RNA, 19 nt, Artificial Sequence
  Description of Artificial Sequence: Synthetic oligonucleotide
  Sense strand starting at position 2293 of SEQ ID NO: 1562074
agaaaugcguacucauuaa

SEQ ID NO: 1720068 - RNA, 19 nt, Artificial Sequence
  Description of Artificial Sequence: Synthetic oligonucleotide
  Antisense strand to SEQ ID NO: 1720067
uuaaugaguacgcauuucu

SEQ ID NO: 1720069 - RNA, 19 nt, Artificial Sequence
  Description of Artificial Sequence: Synthetic oligonucleotide
  Sense strand starting at position 2318 of SEQ ID NO: 1562074
ggagcuuacguagaaguuu

SEQ ID NO: 1720070 - RNA, 19 nt, Artificial Sequence
  Description of Artificial Sequence: Synthetic oligonucleotide
  Antisense strand to SEQ ID NO: 1720069
aaacuucuacguaagcucc

SEQ ID NO: 1720071 - RNA, 19 nt, Artificial Sequence
  Description of Artificial Sequence: Synthetic oligonucleotide
  Sense strand starting at position 2342 of SEQ ID NO: 1562074
cggcuuuauuugguaguua

SEQ ID NO: 1720072 - RNA, 19 nt, Artificial Sequence
  Description of Artificial Sequence: Synthetic oligonucleotide
  Antisense strand to SEQ ID NO: 1720071
uaacuaccaaauaaagccg

SEQ ID NO: 1720073 - RNA, 19 nt, Artificial Sequence
  Description of Artificial Sequence: Synthetic oligonucleotide
  Sense strand starting at position 2356 of SEQ ID NO: 1562074
aguuacuugcuccaaagau

SEQ ID NO: 1720074 - RNA, 19 nt, Artificial Sequence
  Description of Artificial Sequence: Synthetic oligonucleotide
  Antisense strand to SEQ ID NO: 1720073
aucuuuggagcaaguaacu

SEQ ID NO: 1720075 - RNA, 19 nt, Artificial Sequence
  Description of Artificial Sequence: Synthetic oligonucleotide
  Sense strand starting at position 2366 of SEQ ID NO: 1562074
uccaaagauuacuugguaa

SEQ ID NO: 1720076 - RNA, 19 nt, Artificial Sequence
  Description of Artificial Sequence: Synthetic oligonucleotide
  Antisense strand to SEQ ID NO: 1720075
uuaccaaguaaucuuugga

SEQ ID NO: 1720077 - RNA, 19 nt, Artificial Sequence
  Description of Artificial Sequence: Synthetic oligonucleotide
  Sense strand starting at position 2369 of SEQ ID NO: 1562074
aaagauuacuugguaaggu

SEQ ID NO: 1720078 - RNA, 19 nt, Artificial Sequence
  Description of Artificial Sequence: Synthetic oligonucleotide
  Antisense strand to SEQ ID NO: 1720077
accuuaccaaguaaucuuu

SEQ ID NO: 1720079 - RNA, 19 nt, Artificial Sequence
  Description of Artificial Sequence: Synthetic oligonucleotide
  Sense strand starting at position 2668 of SEQ ID NO: 1562074
auuaauagccuccaggauu

SEQ ID NO: 1720080 - RNA, 19 nt, Artificial Sequence
  Description of Artificial Sequence: Synthetic oligonucleotide
  Antisense strand to SEQ ID NO: 1720079
aauccuggaggcuauuaau

SEQ ID NO: 1720081 - RNA, 19 nt, Artificial Sequence
  Description of Artificial Sequence: Synthetic oligonucleotide
  Sense strand starting at position 2701 of SEQ ID NO: 1562074
cugguuugugguuacaaug

SEQ ID NO: 1720082 - RNA, 19 nt, Artificial Sequence
  Description of Artificial Sequence: Synthetic oligonucleotide
  Antisense strand to SEQ ID NO: 1720081
cauuguaaccacaaaccag

SEQ ID NO: 1720083 - RNA, 19 nt, Artificial Sequence
  Description of Artificial Sequence: Synthetic oligonucleotide
  Sense strand starting at position 2783 of SEQ ID NO: 1562074
aagcaagcauagucagaga

SEQ ID NO: 1720084 - RNA, 19 nt, Artificial Sequence
  Description of Artificial Sequence: Synthetic oligonucleotide
  Antisense strand to SEQ ID NO: 1720083
ucucugacuaugcuugcuu

SEQ ID NO: 1720085 - RNA, 19 nt, Artificial Sequence
  Description of Artificial Sequence: Synthetic oligonucleotide
  Sense strand starting at position 2842 of SEQ ID NO: 1562074
agccauaaaugccugauaa

SEQ ID NO: 1720086 - RNA, 19 nt, Artificial Sequence
  Description of Artificial Sequence: Synthetic oligonucleotide
  Antisense strand to SEQ ID NO: 1720085
uuaucaggcauuuauggcu

SEQ ID NO: 1720087 - RNA, 19 nt, Artificial Sequence
  Description of Artificial Sequence: Synthetic oligonucleotide
  Sense strand starting at position 2843 of SEQ ID NO: 1562074
gccauaaaugccugauaac

SEQ ID NO: 1720088 - RNA, 19 nt, Artificial Sequence
  Description of Artificial Sequence: Synthetic oligonucleotide
  Antisense strand to SEQ ID NO: 1720087
guuaucaggcauuuauggc

SEQ ID NO: 1720089 - RNA, 19 nt, Artificial Sequence
  Description of Artificial Sequence: Synthetic oligonucleotide
  Sense strand starting at position 2890 of SEQ ID NO: 1562074
uugcaucucccauggaaug

SEQ ID NO: 1720090 - RNA, 19 nt, Artificial Sequence
  Description of Artificial Sequence: Synthetic oligonucleotide
  Antisense strand to SEQ ID NO: 1720089
cauuccaugggagaugcaa

SEQ ID NO: 1720091 - RNA, 19 nt, Artificial Sequence
  Description of Artificial Sequence: Synthetic oligonucleotide
  Sense strand starting at position 2934 of SEQ ID NO: 1562074
gguuguuacuaaucacuau

SEQ ID NO: 1720092 - RNA, 19 nt, Artificial Sequence
  Description of Artificial Sequence: Synthetic oligonucleotide
  Antisense strand to SEQ ID NO: 1720091
auagugauuaguaacaacc

SEQ ID NO: 1720093 - RNA, 19 nt, Artificial Sequence
  Description of Artificial Sequence: Synthetic oligonucleotide
  Sense strand starting at position 3007 of SEQ ID NO: 1562074
gugauuguaucauugacac

SEQ ID NO: 1720094 - RNA, 19 nt, Artificial Sequence
  Description of Artificial Sequence: Synthetic oligonucleotide
  Antisense strand to SEQ ID NO: 1720093
gugucaaugauacaaucac

SEQ ID NO: 1720095 - RNA, 19 nt, Artificial Sequence
  Description of Artificial Sequence: Synthetic oligonucleotide
  Sense strand starting at position 3021 of SEQ ID NO: 1562074
gacacaugaugccuggaau

SEQ ID NO: 1720096 - RNA, 19 nt, Artificial Sequence
  Description of Artificial Sequence: Synthetic oligonucleotide
  Antisense strand to SEQ ID NO: 1720095
auuccaggcaucauguguc

SEQ ID NO: 1720097 - RNA, 19 nt, Artificial Sequence
  Description of Artificial Sequence: Synthetic oligonucleotide
  Sense strand starting at position 3022 of SEQ ID NO: 1562074
acacaugaugccuggaauu

SEQ ID NO: 1720098 - RNA, 19 nt, Artificial Sequence
  Description of Artificial Sequence: Synthetic oligonucleotide
  Antisense strand to SEQ ID NO: 1720097
aauuccaggcaucaugugu

SEQ ID NO: 1720099 - RNA, 19 nt, Artificial Sequence
  Description of Artificial Sequence: Synthetic oligonucleotide
  Sense strand starting at position 3123 of SEQ ID NO: 1562074
ggcuaacugcuuuacacaa

SEQ ID NO: 1720100 - RNA, 19 nt, Artificial Sequence
  Description of Artificial Sequence: Synthetic oligonucleotide
  Antisense strand to SEQ ID NO: 1720099
uuguguaaagcaguuagcc

SEQ ID NO: 1720101 - RNA, 19 nt, Artificial Sequence
  Description of Artificial Sequence: Synthetic oligonucleotide
  Sense strand starting at position 3196 of SEQ ID NO: 1562074
uuugauuggucuuuccaua

SEQ ID NO: 1720102 - RNA, 19 nt, Artificial Sequence
  Description of Artificial Sequence: Synthetic oligonucleotide
  Antisense strand to SEQ ID NO: 1720101
uauggaaagaccaaucaaa

SEQ ID NO: 1720103 - RNA, 19 nt, Artificial Sequence
  Description of Artificial Sequence: Synthetic oligonucleotide
  Sense strand starting at position 3222 of SEQ ID NO: 1562074
ugggcaugcgucuuuguuu

SEQ ID NO: 1720104 - RNA, 19 nt, Artificial Sequence
  Description of Artificial Sequence: Synthetic oligonucleotide
  Antisense strand to SEQ ID NO: 1720103
aaacaaagacgcaugccca

SEQ ID NO: 1720105 - RNA, 19 nt, Artificial Sequence
  Description of Artificial Sequence: Synthetic oligonucleotide
  Sense strand starting at position 3230 of SEQ ID NO: 1562074
cgucuuuguuuggcauuua

SEQ ID NO: 1720106 - RNA, 19 nt, Artificial Sequence
  Description of Artificial Sequence: Synthetic oligonucleotide
  Antisense strand to SEQ ID NO: 1720105
uaaaugccaaacaaagacg

SEQ ID NO: 1720107 - RNA, 19 nt, Artificial Sequence
  Description of Artificial Sequence: Synthetic oligonucleotide
  Sense strand starting at position 3300 of SEQ ID NO: 1562074
uugcauucucuugauuagu

SEQ ID NO: 1720108 - RNA, 19 nt, Artificial Sequence
  Description of Artificial Sequence: Synthetic oligonucleotide
  Antisense strand to SEQ ID NO: 1720107
acuaaucaagagaaugcaa

SEQ ID NO: 1720109 - RNA, 19 nt, Artificial Sequence
  Description of Artificial Sequence: Synthetic oligonucleotide
  Sense strand starting at position 3337 of SEQ ID NO: 1562074
cuuguaaacucaucaggaa

SEQ ID NO: 1720110 - RNA, 19 nt, Artificial Sequence
  Description of Artificial Sequence: Synthetic oligonucleotide
  Antisense strand to SEQ ID NO: 1720109
uuccugaugaguuuacaag

SEQ ID NO: 1720111 - RNA, 19 nt, Artificial Sequence
  Description of Artificial Sequence: Synthetic oligonucleotide
  Sense strand starting at position 3365 of SEQ ID NO: 1562074
aauggaaugcugggcucau

SEQ ID NO: 1720112 - RNA, 19 nt, Artificial Sequence
  Description of Artificial Sequence: Synthetic oligonucleotide
  Antisense strand to SEQ ID NO: 1720111
augagcccagcauuccauu

SEQ ID NO: 1720113 - RNA, 19 nt, Artificial Sequence
  Description of Artificial Sequence: Synthetic oligonucleotide
  Sense strand starting at position 3369 of SEQ ID NO: 1562074
gaaugcugggcucaucaau

SEQ ID NO: 1720114 - RNA, 19 nt, Artificial Sequence
  Description of Artificial Sequence: Synthetic oligonucleotide
  Antisense strand to SEQ ID NO: 1720113
auugaugagcccagcauuc

SEQ ID NO: 1720115 - RNA, 19 nt, Artificial Sequence
  Description of Artificial Sequence: Synthetic oligonucleotide
  Sense strand starting at position 3452 of SEQ ID NO: 1562074
auucguggccaucaguaaa

SEQ ID NO: 1720116 - RNA, 19 nt, Artificial Sequence
  Description of Artificial Sequence: Synthetic oligonucleotide
  Antisense strand to SEQ ID NO: 1720115
uuuacugauggccacgaau

SEQ ID NO: 1720117 - RNA, 19 nt, Artificial Sequence
  Description of Artificial Sequence: Synthetic oligonucleotide
  Sense strand starting at position 3663 of SEQ ID NO: 1562074
ugccuugcugacuaaucua

SEQ ID NO: 1720118 - RNA, 19 nt, Artificial Sequence
  Description of Artificial Sequence: Synthetic oligonucleotide
  Antisense strand to SEQ ID NO: 1720117
uagauuagucagcaaggca

SEQ ID NO: 1720119 - RNA, 19 nt, Artificial Sequence
  Description of Artificial Sequence: Synthetic oligonucleotide
  Sense strand starting at position 3829 of SEQ ID NO: 1562074
aguagaugauaguuguaac

SEQ ID NO: 1720120 - RNA, 19 nt, Artificial Sequence
  Description of Artificial Sequence: Synthetic oligonucleotide
  Antisense strand to SEQ ID NO: 1720119
guuacaacuaucaucuacu

SEQ ID NO: 1720121 - RNA, 19 nt, Artificial Sequence
  Description of Artificial Sequence: Synthetic oligonucleotide
  Sense strand starting at position 3830 of SEQ ID NO: 1562074
guagaugauaguuguaaca

SEQ ID NO: 1720122 - RNA, 19 nt, Artificial Sequence
  Description of Artificial Sequence: Synthetic oligonucleotide
  Antisense strand to SEQ ID NO: 1720121
uguuacaacuaucaucuac

SEQ ID NO: 1720123 - RNA, 19 nt, Artificial Sequence
  Description of Artificial Sequence: Synthetic oligonucleotide
  Sense strand starting at position 3851 of SEQ ID NO: 1562074
uuagccuuacuacgagaca

SEQ ID NO: 1720124 - RNA, 19 nt, Artificial Sequence
  Description of Artificial Sequence: Synthetic oligonucleotide
  Antisense strand to SEQ ID NO: 1720123
ugucucguaguaaggcuaa

SEQ ID NO: 1720125 - RNA, 19 nt, Artificial Sequence
  Description of Artificial Sequence: Synthetic oligonucleotide
  Sense strand starting at position 3933 of SEQ ID NO: 1562074
ugccacagacugcauuaaa

SEQ ID NO: 1720126 - RNA, 19 nt, Artificial Sequence
  Description of Artificial Sequence: Synthetic oligonucleotide
  Antisense strand to SEQ ID NO: 1720125
uuuaaugcagucuguggca

SEQ ID NO: 1720127 - RNA, 19 nt, Artificial Sequence
  Description of Artificial Sequence: Synthetic oligonucleotide
  Sense strand starting at position 3971 of SEQ ID NO: 1562074
uuuaucuucccauggaggu

SEQ ID NO: 1720128 - RNA, 19 nt, Artificial Sequence
  Description of Artificial Sequence: Synthetic oligonucleotide
  Antisense strand to SEQ ID NO: 1720127
accuccaugggaagauaaa

SEQ ID NO: 1720129 - RNA, 19 nt, Artificial Sequence
  Description of Artificial Sequence: Synthetic oligonucleotide
  Sense strand starting at position 3972 of SEQ ID NO: 1562074
uuaucuucccauggagguu

SEQ ID NO: 1720130 - RNA, 19 nt, Artificial Sequence
  Description of Artificial Sequence: Synthetic oligonucleotide
  Antisense strand to SEQ ID NO: 1720129
aaccuccaugggaagauaa

SEQ ID NO: 1720131 - RNA, 19 nt, Artificial Sequence
  Description of Artificial Sequence: Synthetic oligonucleotide
  Sense strand starting at position 16 of SEQ ID NO: 1562075
gauggauucuuagaucaga

SEQ ID NO: 1720132 - RNA, 19 nt, Artificial Sequence
  Description of Artificial Sequence: Synthetic oligonucleotide
  Antisense strand to SEQ ID NO: 1720131
ucugaucuaagaauccauc

SEQ ID NO: 1720133 - RNA, 19 nt, Artificial Sequence
  Description of Artificial Sequence: Synthetic oligonucleotide
  Sense strand starting at position 21 of SEQ ID NO: 1562075
auucuuagaucagaggaug

SEQ ID NO: 1720134 - RNA, 19 nt, Artificial Sequence
  Description of Artificial Sequence: Synthetic oligonucleotide
  Antisense strand to SEQ ID NO: 1720133
cauccucugaucuaagaau

SEQ ID NO: 1720135 - RNA, 19 nt, Artificial Sequence
  Description of Artificial Sequence: Synthetic oligonucleotide
  Sense strand starting at position 35 of SEQ ID NO: 1562075
ggaugugcccucuagggaa

SEQ ID NO: 1720136 - RNA, 19 nt, Artificial Sequence
  Description of Artificial Sequence: Synthetic oligonucleotide
  Antisense strand to SEQ ID NO: 1720135
uucccuagagggcacaucc

SEQ ID NO: 1720137 - RNA, 19 nt, Artificial Sequence
  Description of Artificial Sequence: Synthetic oligonucleotide
  Sense strand starting at position 52 of SEQ ID NO: 1562075
aagggaaccugagacauau

SEQ ID NO: 1720138 - RNA, 19 nt, Artificial Sequence
  Description of Artificial Sequence: Synthetic oligonucleotide
  Antisense strand to SEQ ID NO: 1720137
auaugucucagguucccuu

SEQ ID NO: 1720139 - RNA, 19 nt, Artificial Sequence
  Description of Artificial Sequence: Synthetic oligonucleotide
  Sense strand starting at position 446 of SEQ ID NO: 1562075
guggguacccauuggauau

SEQ ID NO: 1720140 - RNA, 19 nt, Artificial Sequence
  Description of Artificial Sequence: Synthetic oligonucleotide
  Antisense strand to SEQ ID NO: 1720139
auauccaauggguacccac

SEQ ID NO: 1720141 - RNA, 19 nt, Artificial Sequence
  Description of Artificial Sequence: Synthetic oligonucleotide
  Sense strand starting at position 565 of SEQ ID NO: 1562075
aucugagcuuugucaucau

SEQ ID NO: 1720142 - RNA, 19 nt, Artificial Sequence
  Description of Artificial Sequence: Synthetic oligonucleotide
  Antisense strand to SEQ ID NO: 1720141
augaugacaaagcucagau

SEQ ID NO: 1720143 - RNA, 19 nt, Artificial Sequence
  Description of Artificial Sequence: Synthetic oligonucleotide
  Sense strand starting at position 568 of SEQ ID NO: 1562075
ugagcuuugucaucaucuc

SEQ ID NO: 1720144 - RNA, 19 nt, Artificial Sequence
  Description of Artificial Sequence: Synthetic oligonucleotide
  Antisense strand to SEQ ID NO: 1720143
gagaugaugacaaagcuca

SEQ ID NO: 1720145 - RNA, 19 nt, Artificial Sequence
  Description of Artificial Sequence: Synthetic oligonucleotide
  Sense strand starting at position 692 of SEQ ID NO: 1562075
cuguaugguaucugcaagu

SEQ ID NO: 1720146 - RNA, 19 nt, Artificial Sequence
  Description of Artificial Sequence: Synthetic oligonucleotide
  Antisense strand to SEQ ID NO: 1720145
acuugcagauaccauacag

SEQ ID NO: 1720147 - RNA, 19 nt, Artificial Sequence
  Description of Artificial Sequence: Synthetic oligonucleotide
  Sense strand starting at position 699 of SEQ ID NO: 1562075
guaucugcaagugaacaga

SEQ ID NO: 1720148 - RNA, 19 nt, Artificial Sequence
  Description of Artificial Sequence: Synthetic oligonucleotide
  Antisense strand to SEQ ID NO: 1720147
ucuguucacuugcagauac

SEQ ID NO: 1720149 - RNA, 19 nt, Artificial Sequence
  Description of Artificial Sequence: Synthetic oligonucleotide
  Sense strand starting at position 900 of SEQ ID NO: 1562075
ggaugugucuaggaggucu

SEQ ID NO: 1720150 - RNA, 19 nt, Artificial Sequence
  Description of Artificial Sequence: Synthetic oligonucleotide
  Antisense strand to SEQ ID NO: 1720149
agaccuccuagacacaucc

SEQ ID NO: 1720151 - RNA, 19 nt, Artificial Sequence
  Description of Artificial Sequence: Synthetic oligonucleotide
  Sense strand starting at position 902 of SEQ ID NO: 1562075
augugucuaggaggucuaa

SEQ ID NO: 1720152 - RNA, 19 nt, Artificial Sequence
  Description of Artificial Sequence: Synthetic oligonucleotide
  Antisense strand to SEQ ID NO: 1720151
uuagaccuccuagacacau

SEQ ID NO: 1720153 - RNA, 19 nt, Artificial Sequence
  Description of Artificial Sequence: Synthetic oligonucleotide
  Sense strand starting at position 914 of SEQ ID NO: 1562075
ggucuaaguaucggugaaa

SEQ ID NO: 1720154 - RNA, 19 nt, Artificial Sequence
  Description of Artificial Sequence: Synthetic oligonucleotide
  Antisense strand to SEQ ID NO: 1720153
uuucaccgauacuuagacc

SEQ ID NO: 1720155 - RNA, 19 nt, Artificial Sequence
  Description of Artificial Sequence: Synthetic oligonucleotide
  Sense strand starting at position 963 of SEQ ID NO: 1562075
cuguaagacuuaggagaca

SEQ ID NO: 1720156 - RNA, 19 nt, Artificial Sequence
  Description of Artificial Sequence: Synthetic oligonucleotide
  Antisense strand to SEQ ID NO: 1720155
ugucuccuaagucuuacag

SEQ ID NO: 1720157 - RNA, 19 nt, Artificial Sequence
  Description of Artificial Sequence: Synthetic oligonucleotide
  Sense strand starting at position 1606 of SEQ ID NO: 1562075
cgagacauccgccgaauac

SEQ ID NO: 1720158 - RNA, 19 nt, Artificial Sequence
  Description of Artificial Sequence: Synthetic oligonucleotide
  Antisense strand to SEQ ID NO: 1720157
guauucggcggaugucucg

SEQ ID NO: 1720159 - RNA, 19 nt, Artificial Sequence
  Description of Artificial Sequence: Synthetic oligonucleotide
  Sense strand starting at position 1807 of SEQ ID NO: 1562075
accucagcucggugaacau

SEQ ID NO: 1720160 - RNA, 19 nt, Artificial Sequence
  Description of Artificial Sequence: Synthetic oligonucleotide
  Antisense strand to SEQ ID NO: 1720159
auguucaccgagcugaggu

SEQ ID NO: 1720161 - RNA, 19 nt, Artificial Sequence
  Description of Artificial Sequence: Synthetic oligonucleotide
  Sense strand starting at position 2415 of SEQ ID NO: 1562075
gcgguacagugcucuguaa

SEQ ID NO: 1720162 - RNA, 19 nt, Artificial Sequence
  Description of Artificial Sequence: Synthetic oligonucleotide
  Antisense strand to SEQ ID NO: 1720161
uuacagagcacuguaccgc

SEQ ID NO: 1720163 - RNA, 19 nt, Artificial Sequence
  Description of Artificial Sequence: Synthetic oligonucleotide
  Sense strand starting at position 2417 of SEQ ID NO: 1562075
gguacagugcucuguaacu

SEQ ID NO: 1720164 - RNA, 19 nt, Artificial Sequence
  Description of Artificial Sequence: Synthetic oligonucleotide
  Antisense strand to SEQ ID NO: 1720163
aguuacagagcacuguacc

SEQ ID NO: 1720165 - RNA, 19 nt, Artificial Sequence
  Description of Artificial Sequence: Synthetic oligonucleotide
  Sense strand starting at position 2419 of SEQ ID NO: 1562075
uacagugcucuguaacuga

SEQ ID NO: 1720166 - RNA, 19 nt, Artificial Sequence
  Description of Artificial Sequence: Synthetic oligonucleotide
  Antisense strand to SEQ ID NO: 1720165
ucaguuacagagcacugua

SEQ ID NO: 1720167 - RNA, 19 nt, Artificial Sequence
  Description of Artificial Sequence: Synthetic oligonucleotide
  Sense strand starting at position 2503 of SEQ ID NO: 1562075
cgguguguuugcuccagga

SEQ ID NO: 1720168 - RNA, 19 nt, Artificial Sequence
  Description of Artificial Sequence: Synthetic oligonucleotide
  Antisense strand to SEQ ID NO: 1720167
uccuggagcaaacacaccg

SEQ ID NO: 1720169 - RNA, 19 nt, Artificial Sequence
  Description of Artificial Sequence: Synthetic oligonucleotide
  Sense strand starting at position 2505 of SEQ ID NO: 1562075
guguguuugcuccaggacu

SEQ ID NO: 1720170 - RNA, 19 nt, Artificial Sequence
  Description of Artificial Sequence: Synthetic oligonucleotide
  Antisense strand to SEQ ID NO: 1720169
aguccuggagcaaacacac

SEQ ID NO: 1720171 - RNA, 19 nt, Artificial Sequence
  Description of Artificial Sequence: Synthetic oligonucleotide
  Sense strand starting at position 2632 of SEQ ID NO: 1562075
ggugcucucccugggugua

SEQ ID NO: 1720172 - RNA, 19 nt, Artificial Sequence
  Description of Artificial Sequence: Synthetic oligonucleotide
  Antisense strand to SEQ ID NO: 1720171
uacacccagggagagcacc

SEQ ID NO: 1720173 - RNA, 19 nt, Artificial Sequence
  Description of Artificial Sequence: Synthetic oligonucleotide
  Sense strand starting at position 2657 of SEQ ID NO: 1562075
ggcucuggaggaugucuua

SEQ ID NO: 1720174 - RNA, 19 nt, Artificial Sequence
  Description of Artificial Sequence: Synthetic oligonucleotide
  Antisense strand to SEQ ID NO: 1720173
uaagacauccuccagagcc

SEQ ID NO: 1720175 - RNA, 19 nt, Artificial Sequence
  Description of Artificial Sequence: Synthetic oligonucleotide
  Sense strand starting at position 2838 of SEQ ID NO: 1562075
ugacguguucccgacagcu

SEQ ID NO: 1720176 - RNA, 19 nt, Artificial Sequence
  Description of Artificial Sequence: Synthetic oligonucleotide
  Antisense strand to SEQ ID NO: 1720175
agcugucgggaacacguca

SEQ ID NO: 1720177 - RNA, 19 nt, Artificial Sequence
  Description of Artificial Sequence: Synthetic oligonucleotide
  Sense strand starting at position 2840 of SEQ ID NO: 1562075
acguguucccgacagcuca

SEQ ID NO: 1720178 - RNA, 19 nt, Artificial Sequence
  Description of Artificial Sequence: Synthetic oligonucleotide
  Antisense strand to SEQ ID NO: 1720177
ugagcugucgggaacacgu

SEQ ID NO: 1720179 - RNA, 19 nt, Artificial Sequence
  Description of Artificial Sequence: Synthetic oligonucleotide
  Sense strand starting at position 2855 of SEQ ID NO: 1562075
cucagcugcgguuauuuau

SEQ ID NO: 1720180 - RNA, 19 nt, Artificial Sequence
  Description of Artificial Sequence: Synthetic oligonucleotide
  Antisense strand to SEQ ID NO: 1720179
auaaauaaccgcagcugag

SEQ ID NO: 1720181 - RNA, 19 nt, Artificial Sequence
  Description of Artificial Sequence: Synthetic oligonucleotide
  Sense strand starting at position 2864 of SEQ ID NO: 1562075
gguuauuuauuucgucaau

SEQ ID NO: 1720182 - RNA, 19 nt, Artificial Sequence
  Description of Artificial Sequence: Synthetic oligonucleotide
  Antisense strand to SEQ ID NO: 1720181
auugacgaaauaaauaacc

SEQ ID NO: 1720183 - RNA, 19 nt, Artificial Sequence
  Description of Artificial Sequence: Synthetic oligonucleotide
  Sense strand starting at position 2881 of SEQ ID NO: 1562075
auuagcucuccaggagcua

SEQ ID NO: 1720184 - RNA, 19 nt, Artificial Sequence
  Description of Artificial Sequence: Synthetic oligonucleotide
  Antisense strand to SEQ ID NO: 1720183
uagcuccuggagagcuaau

SEQ ID NO: 1720185 - RNA, 19 nt, Artificial Sequence
  Description of Artificial Sequence: Synthetic oligonucleotide
  Sense strand starting at position 2882 of SEQ ID NO: 1562075
uuagcucuccaggagcuaa

SEQ ID NO: 1720186 - RNA, 19 nt, Artificial Sequence
  Description of Artificial Sequence: Synthetic oligonucleotide
  Antisense strand to SEQ ID NO: 1720185
uuagcuccuggagagcuaa

SEQ ID NO: 1720187 - RNA, 19 nt, Artificial Sequence
  Description of Artificial Sequence: Synthetic oligonucleotide
  Sense strand starting at position 2993 of SEQ ID NO: 1562075
ucaagaauaugagugcuaa

SEQ ID NO: 1720188 - RNA, 19 nt, Artificial Sequence
  Description of Artificial Sequence: Synthetic oligonucleotide
  Antisense strand to SEQ ID NO: 1720187
uuagcacucauauucuuga

SEQ ID NO: 1720189 - RNA, 19 nt, Artificial Sequence
  Description of Artificial Sequence: Synthetic oligonucleotide
  Sense strand starting at position 3383 of SEQ ID NO: 1562075
gccggaagucgucgaacca

SEQ ID NO: 1720190 - RNA, 19 nt, Artificial Sequence
  Description of Artificial Sequence: Synthetic oligonucleotide
  Antisense strand to SEQ ID NO: 1720189
ugguucgacgacuuccggc

SEQ ID NO: 1720191 - RNA, 19 nt, Artificial Sequence
  Description of Artificial Sequence: Synthetic oligonucleotide
  Sense strand starting at position 3781 of SEQ ID NO: 1562075
cuugguggaucggcuuaau

SEQ ID NO: 1720192 - RNA, 19 nt, Artificial Sequence
  Description of Artificial Sequence: Synthetic oligonucleotide
  Antisense strand to SEQ ID NO: 1720191
auuaagccgauccaccaag

SEQ ID NO: 1720193 - RNA, 19 nt, Artificial Sequence
  Description of Artificial Sequence: Synthetic oligonucleotide
  Sense strand starting at position 3791 of SEQ ID NO: 1562075
cggcuuaaucccugcagga

SEQ ID NO: 1720194 - RNA, 19 nt, Artificial Sequence
  Description of Artificial Sequence: Synthetic oligonucleotide
  Antisense strand to SEQ ID NO: 1720193
uccugcagggauuaagccg

SEQ ID NO: 1720195 - RNA, 19 nt, Artificial Sequence
  Description of Artificial Sequence: Synthetic oligonucleotide
  Sense strand starting at position 3793 of SEQ ID NO: 1562075
gcuuaaucccugcaggaag

SEQ ID NO: 1720196 - RNA, 19 nt, Artificial Sequence
  Description of Artificial Sequence: Synthetic oligonucleotide
  Antisense strand to SEQ ID NO: 1720195
cuuccugcagggauuaagc

SEQ ID NO: 1720197 - RNA, 19 nt, Artificial Sequence
  Description of Artificial Sequence: Synthetic oligonucleotide
  Sense strand starting at position 3897 of SEQ ID NO: 1562075
uggucuguaagauggguaa

SEQ ID NO: 1720198 - RNA, 19 nt, Artificial Sequence
  Description of Artificial Sequence: Synthetic oligonucleotide
  Antisense strand to SEQ ID NO: 1720197
uuacccaucuuacagacca

SEQ ID NO: 1720199 - RNA, 19 nt, Artificial Sequence
  Description of Artificial Sequence: Synthetic oligonucleotide
  Sense strand starting at position 3899 of SEQ ID NO: 1562075
gucuguaagauggguaaug

SEQ ID NO: 1720200 - RNA, 19 nt, Artificial Sequence
  Description of Artificial Sequence: Synthetic oligonucleotide
  Antisense strand to SEQ ID NO: 1720199
cauuacccaucuuacagac

SEQ ID NO: 1720201 - RNA, 19 nt, Artificial Sequence
  Description of Artificial Sequence: Synthetic oligonucleotide
  Sense strand starting at position 3901 of SEQ ID NO: 1562075
cuguaagauggguaaugcu

SEQ ID NO: 1720202 - RNA, 19 nt, Artificial Sequence
  Description of Artificial Sequence: Synthetic oligonucleotide
  Antisense strand to SEQ ID NO: 1720201
agcauuacccaucuuacag

SEQ ID NO: 1720203 - RNA, 19 nt, Artificial Sequence
  Description of Artificial Sequence: Synthetic oligonucleotide
  Sense strand starting at position 3910 of SEQ ID NO: 1562075
ggguaaugcuguauacggu

SEQ ID NO: 1720204 - RNA, 19 nt, Artificial Sequence
  Description of Artificial Sequence: Synthetic oligonucleotide
  Antisense strand to SEQ ID NO: 1720203
accguauacagcauuaccc

SEQ ID NO: 1720205 - RNA, 19 nt, Artificial Sequence
  Description of Artificial Sequence: Synthetic oligonucleotide
  Sense strand starting at position 3917 of SEQ ID NO: 1562075
gcuguauacggucugcagu

SEQ ID NO: 1720206 - RNA, 19 nt, Artificial Sequence
  Description of Artificial Sequence: Synthetic oligonucleotide
  Antisense strand to SEQ ID NO: 1720205
acugcagaccguauacagc

SEQ ID NO: 1720207 - RNA, 19 nt, Artificial Sequence
  Description of Artificial Sequence: Synthetic oligonucleotide
  Sense strand starting at position 3945 of SEQ ID NO: 1562075
aggaaucugacguguagug

SEQ ID NO: 1720208 - RNA, 19 nt, Artificial Sequence
  Description of Artificial Sequence: Synthetic oligonucleotide
  Antisense strand to SEQ ID NO: 1720207
cacuacacgucagauuccu

SEQ ID NO: 1720209 - RNA, 19 nt, Artificial Sequence
  Description of Artificial Sequence: Synthetic oligonucleotide
  Sense strand starting at position 3947 of SEQ ID NO: 1562075
gaaucugacguguagugga

SEQ ID NO: 1720210 - RNA, 19 nt, Artificial Sequence
  Description of Artificial Sequence: Synthetic oligonucleotide
  Antisense strand to SEQ ID NO: 1720209
uccacuacacgucagauuc

SEQ ID NO: 1720211 - RNA, 19 nt, Artificial Sequence
  Description of Artificial Sequence: Synthetic oligonucleotide
  Sense strand starting at position 107 of SEQ ID NO: 1562076
ggcauauuccacugcuuua

SEQ ID NO: 1720212 - RNA, 19 nt, Artificial Sequence
  Description of Artificial Sequence: Synthetic oligonucleotide
  Antisense strand to SEQ ID NO: 1720211
uaaagcaguggaauaugcc

SEQ ID NO: 1720213 - RNA, 19 nt, Artificial Sequence
  Description of Artificial Sequence: Synthetic oligonucleotide
  Sense strand starting at position 192 of SEQ ID NO: 1562076
gaauaaaguuuggucaaga

SEQ ID NO: 1720214 - RNA, 19 nt, Artificial Sequence
  Description of Artificial Sequence: Synthetic oligonucleotide
  Antisense strand to SEQ ID NO: 1720213
ucuugaccaaacuuuauuc

SEQ ID NO: 1720215 - RNA, 19 nt, Artificial Sequence
  Description of Artificial Sequence: Synthetic oligonucleotide
  Sense strand starting at position 239 of SEQ ID NO: 1562076
gggaacaguuggucaguuu

SEQ ID NO: 1720216 - RNA, 19 nt, Artificial Sequence
  Description of Artificial Sequence: Synthetic oligonucleotide
  Antisense strand to SEQ ID NO: 1720215
aaacugaccaacuguuccc

SEQ ID NO: 1720217 - RNA, 19 nt, Artificial Sequence
  Description of Artificial Sequence: Synthetic oligonucleotide
  Sense strand starting at position 270 of SEQ ID NO: 1562076
agcacauagugucuuugau

SEQ ID NO: 1720218 - RNA, 19 nt, Artificial Sequence
  Description of Artificial Sequence: Synthetic oligonucleotide
  Antisense strand to SEQ ID NO: 1720217
aucaaagacacuaugugcu

SEQ ID NO: 1720219 - RNA, 19 nt, Artificial Sequence
  Description of Artificial Sequence: Synthetic oligonucleotide
  Sense strand starting at position 272 of SEQ ID NO: 1562076
cacauagugucuuugauag

SEQ ID NO: 1720220 - RNA, 19 nt, Artificial Sequence
  Description of Artificial Sequence: Synthetic oligonucleotide
  Antisense strand to SEQ ID NO: 1720219
cuaucaaagacacuaugug

SEQ ID NO: 1720221 - RNA, 19 nt, Artificial Sequence
  Description of Artificial Sequence: Synthetic oligonucleotide
  Sense strand starting at position 329 of SEQ ID NO: 1562076
aggguaacgaguuaaucua

SEQ ID NO: 1720222 - RNA, 19 nt, Artificial Sequence
  Description of Artificial Sequence: Synthetic oligonucleotide
  Antisense strand to SEQ ID NO: 1720221
uagauuaacucguuacccu

SEQ ID NO: 1720223 - RNA, 19 nt, Artificial Sequence
  Description of Artificial Sequence: Synthetic oligonucleotide
  Sense strand starting at position 411 of SEQ ID NO: 1562076
acuuguugcuagucaaaga

SEQ ID NO: 1720224 - RNA, 19 nt, Artificial Sequence
  Description of Artificial Sequence: Synthetic oligonucleotide
  Antisense strand to SEQ ID NO: 1720223
ucuuugacuagcaacaagu

SEQ ID NO: 1720225 - RNA, 19 nt, Artificial Sequence
  Description of Artificial Sequence: Synthetic oligonucleotide
  Sense strand starting at position 675 of SEQ ID NO: 1562076
ggauauaaggcaggaguca

SEQ ID NO: 1720226 - RNA, 19 nt, Artificial Sequence
  Description of Artificial Sequence: Synthetic oligonucleotide
  Antisense strand to SEQ ID NO: 1720225
ugacuccugccuuauaucc

SEQ ID NO: 1720227 - RNA, 19 nt, Artificial Sequence
  Description of Artificial Sequence: Synthetic oligonucleotide
  Sense strand starting at position 735 of SEQ ID NO: 1562076
gauggaugcuuggauacga

SEQ ID NO: 1720228 - RNA, 19 nt, Artificial Sequence
  Description of Artificial Sequence: Synthetic oligonucleotide
  Antisense strand to SEQ ID NO: 1720227
ucguauccaagcauccauc

SEQ ID NO: 1720229 - RNA, 19 nt, Artificial Sequence
  Description of Artificial Sequence: Synthetic oligonucleotide
  Sense strand starting at position 824 of SEQ ID NO: 1562076
gggauucaguggucaacug

SEQ ID NO: 1720230 - RNA, 19 nt, Artificial Sequence
  Description of Artificial Sequence: Synthetic oligonucleotide
  Antisense strand to SEQ ID NO: 1720229
caguugaccacugaauccc

SEQ ID NO: 1720231 - RNA, 19 nt, Artificial Sequence
  Description of Artificial Sequence: Synthetic oligonucleotide
  Sense strand starting at position 825 of SEQ ID NO: 1562076
ggauucaguggucaacuga

SEQ ID NO: 1720232 - RNA, 19 nt, Artificial Sequence
  Description of Artificial Sequence: Synthetic oligonucleotide
  Antisense strand to SEQ ID NO: 1720231
ucaguugaccacugaaucc

SEQ ID NO: 1720233 - RNA, 19 nt, Artificial Sequence
  Description of Artificial Sequence: Synthetic oligonucleotide
  Sense strand starting at position 1069 of SEQ ID NO: 1562076
uguggcaaguguucaagga

SEQ ID NO: 1720234 - RNA, 19 nt, Artificial Sequence
  Description of Artificial Sequence: Synthetic oligonucleotide
  Antisense strand to SEQ ID NO: 1720233
uccuugaacacuugccaca

SEQ ID NO: 1720235 - RNA, 19 nt, Artificial Sequence
  Description of Artificial Sequence: Synthetic oligonucleotide
  Sense strand starting at position 1667 of SEQ ID NO: 1562076
caugucuuguagucgggau

SEQ ID NO: 1720236 - RNA, 19 nt, Artificial Sequence
  Description of Artificial Sequence: Synthetic oligonucleotide
  Antisense strand to SEQ ID NO: 1720235
aucccgacuacaagacaug

SEQ ID NO: 1720237 - RNA, 19 nt, Artificial Sequence
  Description of Artificial Sequence: Synthetic oligonucleotide
  Sense strand starting at position 2006 of SEQ ID NO: 1562076
uccagucguccucaaauca

SEQ ID NO: 1720238 - RNA, 19 nt, Artificial Sequence
  Description of Artificial Sequence: Synthetic oligonucleotide
  Antisense strand to SEQ ID NO: 1720237
ugauuugaggacgacugga

SEQ ID NO: 1720239 - RNA, 19 nt, Artificial Sequence
  Description of Artificial Sequence: Synthetic oligonucleotide
  Sense strand starting at position 2161 of SEQ ID NO: 1562076
gguauucuccuucgaauga

SEQ ID NO: 1720240 - RNA, 19 nt, Artificial Sequence
  Description of Artificial Sequence: Synthetic oligonucleotide
  Antisense strand to SEQ ID NO: 1720239
ucauucgaaggagaauacc

SEQ ID NO: 1720241 - RNA, 19 nt, Artificial Sequence
  Description of Artificial Sequence: Synthetic oligonucleotide
  Sense strand starting at position 2162 of SEQ ID NO: 1562076
guauucuccuucgaaugag

SEQ ID NO: 1720242 - RNA, 19 nt, Artificial Sequence
  Description of Artificial Sequence: Synthetic oligonucleotide
  Antisense strand to SEQ ID NO: 1720241
cucauucgaaggagaauac

SEQ ID NO: 1720243 - RNA, 19 nt, Artificial Sequence
  Description of Artificial Sequence: Synthetic oligonucleotide
  Sense strand starting at position 2258 of SEQ ID NO: 1562076
gcaccuucccagugaagag

SEQ ID NO: 1720244 - RNA, 19 nt, Artificial Sequence
  Description of Artificial Sequence: Synthetic oligonucleotide
  Antisense strand to SEQ ID NO: 1720243
cucuucacugggaaggugc

SEQ ID NO: 1720245 - RNA, 19 nt, Artificial Sequence
  Description of Artificial Sequence: Synthetic oligonucleotide
  Sense strand starting at position 2319 of SEQ ID NO: 1562076
ucaaaugugacuugagggu

SEQ ID NO: 1720246 - RNA, 19 nt, Artificial Sequence
  Description of Artificial Sequence: Synthetic oligonucleotide
  Antisense strand to SEQ ID NO: 1720245
acccucaagucacauuuga

SEQ ID NO: 1720247 - RNA, 19 nt, Artificial Sequence
  Description of Artificial Sequence: Synthetic oligonucleotide
  Sense strand starting at position 2348 of SEQ ID NO: 1562076
cacaguauugcuggucaac

SEQ ID NO: 1720248 - RNA, 19 nt, Artificial Sequence
  Description of Artificial Sequence: Synthetic oligonucleotide
  Antisense strand to SEQ ID NO: 1720247
guugaccagcaauacugug

SEQ ID NO: 1720249 - RNA, 19 nt, Artificial Sequence
  Description of Artificial Sequence: Synthetic oligonucleotide
  Sense strand starting at position 2350 of SEQ ID NO: 1562076
caguauugcuggucaacua

SEQ ID NO: 1720250 - RNA, 19 nt, Artificial Sequence
  Description of Artificial Sequence: Synthetic oligonucleotide
  Antisense strand to SEQ ID NO: 1720249
uaguugaccagcaauacug

SEQ ID NO: 1720251 - RNA, 19 nt, Artificial Sequence
  Description of Artificial Sequence: Synthetic oligonucleotide
  Sense strand starting at position 2365 of SEQ ID NO: 1562076
acuagagggcccugggaua

SEQ ID NO: 1720252 - RNA, 19 nt, Artificial Sequence
  Description of Artificial Sequence: Synthetic oligonucleotide
  Antisense strand to SEQ ID NO: 1720251
uaucccagggcccucuagu

SEQ ID NO: 1720253 - RNA, 19 nt, Artificial Sequence
  Description of Artificial Sequence: Synthetic oligonucleotide
  Sense strand starting at position 2480 of SEQ ID NO: 1562076
uggccagucugauuacuua

SEQ ID NO: 1720254 - RNA, 19 nt, Artificial Sequence
  Description of Artificial Sequence: Synthetic oligonucleotide
  Antisense strand to SEQ ID NO: 1720253
uaaguaaucagacuggcca

SEQ ID NO: 1720255 - RNA, 19 nt, Artificial Sequence
  Description of Artificial Sequence: Synthetic oligonucleotide
  Sense strand starting at position 2502 of SEQ ID NO: 1562076
uuuaacuucugaggacuuu

SEQ ID NO: 1720256 - RNA, 19 nt, Artificial Sequence
  Description of Artificial Sequence: Synthetic oligonucleotide
  Antisense strand to SEQ ID NO: 1720255
aaaguccucagaaguuaaa

SEQ ID NO: 1720257 - RNA, 19 nt, Artificial Sequence
  Description of Artificial Sequence: Synthetic oligonucleotide
  Sense strand starting at position 2530 of SEQ ID NO: 1562076
guuguaacagcaugugaaa

SEQ ID NO: 1720258 - RNA, 19 nt, Artificial Sequence
  Description of Artificial Sequence: Synthetic oligonucleotide
  Antisense strand to SEQ ID NO: 1720257
uuucacaugcuguuacaac

SEQ ID NO: 1720259 - RNA, 19 nt, Artificial Sequence
  Description of Artificial Sequence: Synthetic oligonucleotide
  Sense strand starting at position 2617 of SEQ ID NO: 1562076
caugcaauugccugguaaa

SEQ ID NO: 1720260 - RNA, 19 nt, Artificial Sequence
  Description of Artificial Sequence: Synthetic oligonucleotide
  Antisense strand to SEQ ID NO: 1720259
uuuaccaggcaauugcaug

SEQ ID NO: 1720261 - RNA, 19 nt, Artificial Sequence
  Description of Artificial Sequence: Synthetic oligonucleotide
  Sense strand starting at position 2714 of SEQ ID NO: 1562076
ggacgaaugaggcggaaua

SEQ ID NO: 1720262 - RNA, 19 nt, Artificial Sequence
  Description of Artificial Sequence: Synthetic oligonucleotide
  Antisense strand to SEQ ID NO: 1720261
uauuccgccucauucgucc

SEQ ID NO: 1720263 - RNA, 19 nt, Artificial Sequence
  Description of Artificial Sequence: Synthetic oligonucleotide
  Sense strand starting at position 2724 of SEQ ID NO: 1562076
ggcggaauagcuuaucauc

SEQ ID NO: 1720264 - RNA, 19 nt, Artificial Sequence
  Description of Artificial Sequence: Synthetic oligonucleotide
  Antisense strand to SEQ ID NO: 1720263
gaugauaagcuauuccgcc

SEQ ID NO: 1720265 - RNA, 19 nt, Artificial Sequence
  Description of Artificial Sequence: Synthetic oligonucleotide
  Sense strand starting at position 2726 of SEQ ID NO: 1562076
cggaauagcuuaucaucaa

SEQ ID NO: 1720266 - RNA, 19 nt, Artificial Sequence
  Description of Artificial Sequence: Synthetic oligonucleotide
  Antisense strand to SEQ ID NO: 1720265
uugaugauaagcuauuccg

SEQ ID NO: 1720267 - RNA, 19 nt, Artificial Sequence
  Description of Artificial Sequence: Synthetic oligonucleotide
  Sense strand starting at position 2727 of SEQ ID NO: 1562076
ggaauagcuuaucaucaag

SEQ ID NO: 1720268 - RNA, 19 nt, Artificial Sequence
  Description of Artificial Sequence: Synthetic oligonucleotide
  Antisense strand to SEQ ID NO: 1720267
cuugaugauaagcuauucc

SEQ ID NO: 1720269 - RNA, 19 nt, Artificial Sequence
  Description of Artificial Sequence: Synthetic oligonucleotide
  Sense strand starting at position 2748 of SEQ ID NO: 1562076
guaugaacuaguggucuac

SEQ ID NO: 1720270 - RNA, 19 nt, Artificial Sequence
  Description of Artificial Sequence: Synthetic oligonucleotide
  Antisense strand to SEQ ID NO: 1720269
guagaccacuaguucauac

SEQ ID NO: 1720271 - RNA, 19 nt, Artificial Sequence
  Description of Artificial Sequence: Synthetic oligonucleotide
  Sense strand starting at position 2794 of SEQ ID NO: 1562076
agagcuuuacugugugcca

SEQ ID NO: 1720272 - RNA, 19 nt, Artificial Sequence
  Description of Artificial Sequence: Synthetic oligonucleotide
  Antisense strand to SEQ ID NO: 1720271
uggcacacaguaaagcucu

SEQ ID NO: 1720273 - RNA, 19 nt, Artificial Sequence
  Description of Artificial Sequence: Synthetic oligonucleotide
  Sense strand starting at position 2952 of SEQ ID NO: 1562076
uucuaagggcucuacacau

SEQ ID NO: 1720274 - RNA, 19 nt, Artificial Sequence
  Description of Artificial Sequence: Synthetic oligonucleotide
  Antisense strand to SEQ ID NO: 1720273
auguguagagcccuuagaa

SEQ ID NO: 1720275 - RNA, 19 nt, Artificial Sequence
  Description of Artificial Sequence: Synthetic oligonucleotide
  Sense strand starting at position 2990 of SEQ ID NO: 1562076
acaauuaccuuaggaugua

SEQ ID NO: 1720276 - RNA, 19 nt, Artificial Sequence
  Description of Artificial Sequence: Synthetic oligonucleotide
  Antisense strand to SEQ ID NO: 1720275
uacauccuaagguaauugu

SEQ ID NO: 1720277 - RNA, 19 nt, Artificial Sequence
  Description of Artificial Sequence: Synthetic oligonucleotide
  Sense strand starting at position 3264 of SEQ ID NO: 1562076
aggugauucccacaccuca

SEQ ID NO: 1720278 - RNA, 19 nt, Artificial Sequence
  Description of Artificial Sequence: Synthetic oligonucleotide
  Antisense strand to SEQ ID NO: 1720277
ugaggugugggaaucaccu

SEQ ID NO: 1720279 - RNA, 19 nt, Artificial Sequence
  Description of Artificial Sequence: Synthetic oligonucleotide
  Sense strand starting at position 3329 of SEQ ID NO: 1562076
gucuuacagcuaggaaaug

SEQ ID NO: 1720280 - RNA, 19 nt, Artificial Sequence
  Description of Artificial Sequence: Synthetic oligonucleotide
  Antisense strand to SEQ ID NO: 1720279
cauuuccuagcuguaagac

SEQ ID NO: 1720281 - RNA, 19 nt, Artificial Sequence
  Description of Artificial Sequence: Synthetic oligonucleotide
  Sense strand starting at position 3344 of SEQ ID NO: 1562076
aaugaugaagccuguauuc

SEQ ID NO: 1720282 - RNA, 19 nt, Artificial Sequence
  Description of Artificial Sequence: Synthetic oligonucleotide
  Antisense strand to SEQ ID NO: 1720281
gaauacaggcuucaucauu

SEQ ID NO: 1720283 - RNA, 19 nt, Artificial Sequence
  Description of Artificial Sequence: Synthetic oligonucleotide
  Sense strand starting at position 3372 of SEQ ID NO: 1562076
agauguaacuugguuccaa

SEQ ID NO: 1720284 - RNA, 19 nt, Artificial Sequence
  Description of Artificial Sequence: Synthetic oligonucleotide
  Antisense strand to SEQ ID NO: 1720283
uuggaaccaaguuacaucu

SEQ ID NO: 1720285 - RNA, 19 nt, Artificial Sequence
  Description of Artificial Sequence: Synthetic oligonucleotide
  Sense strand starting at position 3373 of SEQ ID NO: 1562076
gauguaacuugguuccaaa

SEQ ID NO: 1720286 - RNA, 19 nt, Artificial Sequence
  Description of Artificial Sequence: Synthetic oligonucleotide
  Antisense strand to SEQ ID NO: 1720285
uuuggaaccaaguuacauc

SEQ ID NO: 1720287 - RNA, 19 nt, Artificial Sequence
  Description of Artificial Sequence: Synthetic oligonucleotide
  Sense strand starting at position 3392 of SEQ ID NO: 1562076
guccauggucuugauaacu

SEQ ID NO: 1720288 - RNA, 19 nt, Artificial Sequence
  Description of Artificial Sequence: Synthetic oligonucleotide
  Antisense strand to SEQ ID NO: 1720287
aguuaucaagaccauggac

SEQ ID NO: 1720289 - RNA, 19 nt, Artificial Sequence
  Description of Artificial Sequence: Synthetic oligonucleotide
  Sense strand starting at position 3662 of SEQ ID NO: 1562076
gagccaagaucuucccguu

SEQ ID NO: 1720290 - RNA, 19 nt, Artificial Sequence
  Description of Artificial Sequence: Synthetic oligonucleotide
  Antisense strand to SEQ ID NO: 1720289
aacgggaagaucuuggcuc

SEQ ID NO: 1720291 - RNA, 19 nt, Artificial Sequence
  Description of Artificial Sequence: Synthetic oligonucleotide
  Sense strand starting at position 84 of SEQ ID NO: 1562077
ccaugugugguagagggau

SEQ ID NO: 1720292 - RNA, 19 nt, Artificial Sequence
  Description of Artificial Sequence: Synthetic oligonucleotide
  Antisense strand to SEQ ID NO: 1720291
aucccucuaccacacaugg

SEQ ID NO: 1720293 - RNA, 19 nt, Artificial Sequence
  Description of Artificial Sequence: Synthetic oligonucleotide
  Sense strand starting at position 86 of SEQ ID NO: 1562077
augugugguagagggauaa

SEQ ID NO: 1720294 - RNA, 19 nt, Artificial Sequence
  Description of Artificial Sequence: Synthetic oligonucleotide
  Antisense strand to SEQ ID NO: 1720293
uuaucccucuaccacacau

SEQ ID NO: 1720295 - RNA, 19 nt, Artificial Sequence
  Description of Artificial Sequence: Synthetic oligonucleotide
  Sense strand starting at position 98 of SEQ ID NO: 1562077
gggauaaccuagguucagu

SEQ ID NO: 1720296 - RNA, 19 nt, Artificial Sequence
  Description of Artificial Sequence: Synthetic oligonucleotide
  Antisense strand to SEQ ID NO: 1720295
acugaaccuagguuauccc

SEQ ID NO: 1720297 - RNA, 19 nt, Artificial Sequence
  Description of Artificial Sequence: Synthetic oligonucleotide
  Sense strand starting at position 142 of SEQ ID NO: 1562077
caacgaaggccuuauuguu

SEQ ID NO: 1720298 - RNA, 19 nt, Artificial Sequence
  Description of Artificial Sequence: Synthetic oligonucleotide
  Antisense strand to SEQ ID NO: 1720297
aacaauaaggccuucguug

SEQ ID NO: 1720299 - RNA, 19 nt, Artificial Sequence
  Description of Artificial Sequence: Synthetic oligonucleotide
  Sense strand starting at position 203 of SEQ ID NO: 1562077
aggaaacaggcuugguaaa

SEQ ID NO: 1720300 - RNA, 19 nt, Artificial Sequence
  Description of Artificial Sequence: Synthetic oligonucleotide
  Antisense strand to SEQ ID NO: 1720299
uuuaccaagccuguuuccu

SEQ ID NO: 1720301 - RNA, 19 nt, Artificial Sequence
  Description of Artificial Sequence: Synthetic oligonucleotide
  Sense strand starting at position 1329 of SEQ ID NO: 1562077
gagccugaauguuuggaga

SEQ ID NO: 1720302 - RNA, 19 nt, Artificial Sequence
  Description of Artificial Sequence: Synthetic oligonucleotide
  Antisense strand to SEQ ID NO: 1720301
ucuccaaacauucaggcuc

SEQ ID NO: 1720303 - RNA, 19 nt, Artificial Sequence
  Description of Artificial Sequence: Synthetic oligonucleotide
  Sense strand starting at position 1420 of SEQ ID NO: 1562077
ucugauugacccugaugag

SEQ ID NO: 1720304 - RNA, 19 nt, Artificial Sequence
  Description of Artificial Sequence: Synthetic oligonucleotide
  Antisense strand to SEQ ID NO: 1720303
cucaucagggucaaucaga

SEQ ID NO: 1720305 - RNA, 19 nt, Artificial Sequence
  Description of Artificial Sequence: Synthetic oligonucleotide
  Sense strand starting at position 1663 of SEQ ID NO: 1562077
gaaggagaugcucgagaac

SEQ ID NO: 1720306 - RNA, 19 nt, Artificial Sequence
  Description of Artificial Sequence: Synthetic oligonucleotide
  Antisense strand to SEQ ID NO: 1720305
guucucgagcaucuccuuc

SEQ ID NO: 1720307 - RNA, 19 nt, Artificial Sequence
  Description of Artificial Sequence: Synthetic oligonucleotide
  Sense strand starting at position 1737 of SEQ ID NO: 1562077
guggguucuguuaacguca

SEQ ID NO: 1720308 - RNA, 19 nt, Artificial Sequence
  Description of Artificial Sequence: Synthetic oligonucleotide
  Antisense strand to SEQ ID NO: 1720307
ugacguuaacagaacccac

SEQ ID NO: 1720309 - RNA, 19 nt, Artificial Sequence
  Description of Artificial Sequence: Synthetic oligonucleotide
  Sense strand starting at position 1744 of SEQ ID NO: 1562077
cuguuaacgucagcauuua

SEQ ID NO: 1720310 - RNA, 19 nt, Artificial Sequence
  Description of Artificial Sequence: Synthetic oligonucleotide
  Antisense strand to SEQ ID NO: 1720309
uaaaugcugacguuaacag

SEQ ID NO: 1720311 - RNA, 19 nt, Artificial Sequence
  Description of Artificial Sequence: Synthetic oligonucleotide
  Sense strand starting at position 1841 of SEQ ID NO: 1562077
guugauaacccucgaaaua

SEQ ID NO: 1720312 - RNA, 19 nt, Artificial Sequence
  Description of Artificial Sequence: Synthetic oligonucleotide
  Antisense strand to SEQ ID NO: 1720311
uauuucgaggguuaucaac

SEQ ID NO: 1720313 - RNA, 19 nt, Artificial Sequence
  Description of Artificial Sequence: Synthetic oligonucleotide
  Sense strand starting at position 1852 of SEQ ID NO: 1562077
ucgaaauauagcgaauuga

SEQ ID NO: 1720314 - RNA, 19 nt, Artificial Sequence
  Description of Artificial Sequence: Synthetic oligonucleotide
  Antisense strand to SEQ ID NO: 1720313
ucaauucgcuauauuucga

SEQ ID NO: 1720315 - RNA, 19 nt, Artificial Sequence
  Description of Artificial Sequence: Synthetic oligonucleotide
  Sense strand starting at position 2101 of SEQ ID NO: 1562077
gaguguuggagugaggcua

SEQ ID NO: 1720316 - RNA, 19 nt, Artificial Sequence
  Description of Artificial Sequence: Synthetic oligonucleotide
  Antisense strand to SEQ ID NO: 1720315
uagccucacuccaacacuc

SEQ ID NO: 1720317 - RNA, 19 nt, Artificial Sequence
  Description of Artificial Sequence: Synthetic oligonucleotide
  Sense strand starting at position 2113 of SEQ ID NO: 1562077
gaggcuaccuugguggaau

SEQ ID NO: 1720318 - RNA, 19 nt, Artificial Sequence
  Description of Artificial Sequence: Synthetic oligonucleotide
  Antisense strand to SEQ ID NO: 1720317
auuccaccaagguagccuc

SEQ ID NO: 1720319 - RNA, 19 nt, Artificial Sequence
  Description of Artificial Sequence: Synthetic oligonucleotide
  Sense strand starting at position 2176 of SEQ ID NO: 1562077
aaauuaagccguuggagag

SEQ ID NO: 1720320 - RNA, 19 nt, Artificial Sequence
  Description of Artificial Sequence: Synthetic oligonucleotide
  Antisense strand to SEQ ID NO: 1720319
cucuccaacggcuuaauuu

SEQ ID NO: 1720321 - RNA, 19 nt, Artificial Sequence
  Description of Artificial Sequence: Synthetic oligonucleotide
  Sense strand starting at position 2177 of SEQ ID NO: 1562077
aauuaagccguuggagaga

SEQ ID NO: 1720322 - RNA, 19 nt, Artificial Sequence
  Description of Artificial Sequence: Synthetic oligonucleotide
  Antisense strand to SEQ ID NO: 1720321
ucucuccaacggcuuaauu

SEQ ID NO: 1720323 - RNA, 19 nt, Artificial Sequence
  Description of Artificial Sequence: Synthetic oligonucleotide
  Sense strand starting at position 2807 of SEQ ID NO: 1562077
gccauuagcccugauauaa

SEQ ID NO: 1720324 - RNA, 19 nt, Artificial Sequence
  Description of Artificial Sequence: Synthetic oligonucleotide
  Antisense strand to SEQ ID NO: 1720323
uuauaucagggcuaauggc

SEQ ID NO: 1720325 - RNA, 19 nt, Artificial Sequence
  Description of Artificial Sequence: Synthetic oligonucleotide
  Sense strand starting at position 2840 of SEQ ID NO: 1562077
auaggauguuuccuuugga

SEQ ID NO: 1720326 - RNA, 19 nt, Artificial Sequence
  Description of Artificial Sequence: Synthetic oligonucleotide
  Antisense strand to SEQ ID NO: 1720325
uccaaaggaaacauccuau

SEQ ID NO: 1720327 - RNA, 19 nt, Artificial Sequence
  Description of Artificial Sequence: Synthetic oligonucleotide
  Sense strand starting at position 2841 of SEQ ID NO: 1562077
uaggauguuuccuuuggau

SEQ ID NO: 1720328 - RNA, 19 nt, Artificial Sequence
  Description of Artificial Sequence: Synthetic oligonucleotide
  Antisense strand to SEQ ID NO: 1720327
auccaaaggaaacauccua

SEQ ID NO: 1720329 - RNA, 19 nt, Artificial Sequence
  Description of Artificial Sequence: Synthetic oligonucleotide
  Sense strand starting at position 2849 of SEQ ID NO: 1562077
uuccuuuggauggguagaa

SEQ ID NO: 1720330 - RNA, 19 nt, Artificial Sequence
  Description of Artificial Sequence: Synthetic oligonucleotide
  Antisense strand to SEQ ID NO: 1720329
uucuacccauccaaaggaa

SEQ ID NO: 1720331 - RNA, 19 nt, Artificial Sequence
  Description of Artificial Sequence: Synthetic oligonucleotide
  Sense strand starting at position 3036 of SEQ ID NO: 1562077
auuccugcuggucaacaau

SEQ ID NO: 1720332 - RNA, 19 nt, Artificial Sequence
  Description of Artificial Sequence: Synthetic oligonucleotide
  Antisense strand to SEQ ID NO: 1720331
auuguugaccagcaggaau

SEQ ID NO: 1720333 - RNA, 19 nt, Artificial Sequence
  Description of Artificial Sequence: Synthetic oligonucleotide
  Sense strand starting at position 3070 of SEQ ID NO: 1562077
agagacgacuuccuuuaga

SEQ ID NO: 1720334 - RNA, 19 nt, Artificial Sequence
  Description of Artificial Sequence: Synthetic oligonucleotide
  Antisense strand to SEQ ID NO: 1720333
ucuaaaggaagucgucucu

SEQ ID NO: 1720335 - RNA, 19 nt, Artificial Sequence
  Description of Artificial Sequence: Synthetic oligonucleotide
  Sense strand starting at position 3099 of SEQ ID NO: 1562077
ugucccauuuggucucaau

SEQ ID NO: 1720336 - RNA, 19 nt, Artificial Sequence
  Description of Artificial Sequence: Synthetic oligonucleotide
  Antisense strand to SEQ ID NO: 1720335
auugagaccaaaugggaca

SEQ ID NO: 1720337 - RNA, 19 nt, Artificial Sequence
  Description of Artificial Sequence: Synthetic oligonucleotide
  Sense strand starting at position 3127 of SEQ ID NO: 1562077
ucccuaugguucucugaaa

SEQ ID NO: 1720338 - RNA, 19 nt, Artificial Sequence
  Description of Artificial Sequence: Synthetic oligonucleotide
  Antisense strand to SEQ ID NO: 1720337
uuucagagaaccauaggga

SEQ ID NO: 1720339 - RNA, 19 nt, Artificial Sequence
  Description of Artificial Sequence: Synthetic oligonucleotide
  Sense strand starting at position 3128 of SEQ ID NO: 1562077
cccuaugguucucugaaau

SEQ ID NO: 1720340 - RNA, 19 nt, Artificial Sequence
  Description of Artificial Sequence: Synthetic oligonucleotide
  Antisense strand to SEQ ID NO: 1720339
auuucagagaaccauaggg

SEQ ID NO: 1720341 - RNA, 19 nt, Artificial Sequence
  Description of Artificial Sequence: Synthetic oligonucleotide
  Sense strand starting at position 3139 of SEQ ID NO: 1562077
ucugaaauagaauguuguu

SEQ ID NO: 1720342 - RNA, 19 nt, Artificial Sequence
  Description of Artificial Sequence: Synthetic oligonucleotide
  Antisense strand to SEQ ID NO: 1720341
aacaacauucuauuucaga

SEQ ID NO: 1720343 - RNA, 19 nt, Artificial Sequence
  Description of Artificial Sequence: Synthetic oligonucleotide
  Sense strand starting at position 3146 of SEQ ID NO: 1562077
uagaauguuguuugcauuu

SEQ ID NO: 1720344 - RNA, 19 nt, Artificial Sequence
  Description of Artificial Sequence: Synthetic oligonucleotide
  Antisense strand to SEQ ID NO: 1720343
aaaugcaaacaacauucua

SEQ ID NO: 1720345 - RNA, 19 nt, Artificial Sequence
  Description of Artificial Sequence: Synthetic oligonucleotide
  Sense strand starting at position 3175 of SEQ ID NO: 1562077
ucagguuguugcuuuauuu

SEQ ID NO: 1720346 - RNA, 19 nt, Artificial Sequence
  Description of Artificial Sequence: Synthetic oligonucleotide
  Antisense strand to SEQ ID NO: 1720345
aaauaaagcaacaaccuga

SEQ ID NO: 1720347 - RNA, 19 nt, Artificial Sequence
  Description of Artificial Sequence: Synthetic oligonucleotide
  Sense strand starting at position 3179 of SEQ ID NO: 1562077
guuguugcuuuauuuagag

SEQ ID NO: 1720348 - RNA, 19 nt, Artificial Sequence
  Description of Artificial Sequence: Synthetic oligonucleotide
  Antisense strand to SEQ ID NO: 1720347
cucuaaauaaagcaacaac

SEQ ID NO: 1720349 - RNA, 19 nt, Artificial Sequence
  Description of Artificial Sequence: Synthetic oligonucleotide
  Sense strand starting at position 3228 of SEQ ID NO: 1562077
gugagaaagcagggucuua

SEQ ID NO: 1720350 - RNA, 19 nt, Artificial Sequence
  Description of Artificial Sequence: Synthetic oligonucleotide
  Antisense strand to SEQ ID NO: 1720349
uaagacccugcuuucucac

SEQ ID NO: 1720351 - RNA, 19 nt, Artificial Sequence
  Description of Artificial Sequence: Synthetic oligonucleotide
  Sense strand starting at position 3330 of SEQ ID NO: 1562077
gugcuauucccuguguggu

SEQ ID NO: 1720352 - RNA, 19 nt, Artificial Sequence
  Description of Artificial Sequence: Synthetic oligonucleotide
  Antisense strand to SEQ ID NO: 1720351
accacacagggaauagcac

SEQ ID NO: 1720353 - RNA, 19 nt, Artificial Sequence
  Description of Artificial Sequence: Synthetic oligonucleotide
  Sense strand starting at position 3360 of SEQ ID NO: 1562077
aguuucuaggccuaaggga

SEQ ID NO: 1720354 - RNA, 19 nt, Artificial Sequence
  Description of Artificial Sequence: Synthetic oligonucleotide
  Antisense strand to SEQ ID NO: 1720353
ucccuuaggccuagaaacu

SEQ ID NO: 1720355 - RNA, 19 nt, Artificial Sequence
  Description of Artificial Sequence: Synthetic oligonucleotide
  Sense strand starting at position 3562 of SEQ ID NO: 1562077
gugguugggaucuggagaa

SEQ ID NO: 1720356 - RNA, 19 nt, Artificial Sequence
  Description of Artificial Sequence: Synthetic oligonucleotide
  Antisense strand to SEQ ID NO: 1720355
uucuccagaucccaaccac

SEQ ID NO: 1720357 - RNA, 19 nt, Artificial Sequence
  Description of Artificial Sequence: Synthetic oligonucleotide
  Sense strand starting at position 3704 of SEQ ID NO: 1562077
augagauguuauguuagau

SEQ ID NO: 1720358 - RNA, 19 nt, Artificial Sequence
  Description of Artificial Sequence: Synthetic oligonucleotide
  Antisense strand to SEQ ID NO: 1720357
aucuaacauaacaucucau

SEQ ID NO: 1720359 - RNA, 19 nt, Artificial Sequence
  Description of Artificial Sequence: Synthetic oligonucleotide
  Sense strand starting at position 3714 of SEQ ID NO: 1562077
auguuagaucucuagucua

SEQ ID NO: 1720360 - RNA, 19 nt, Artificial Sequence
  Description of Artificial Sequence: Synthetic oligonucleotide
  Antisense strand to SEQ ID NO: 1720359
uagacuagagaucuaacau

SEQ ID NO: 1720361 - RNA, 19 nt, Artificial Sequence
  Description of Artificial Sequence: Synthetic oligonucleotide
  Sense strand starting at position 3752 of SEQ ID NO: 1562077
aaucgugaauuauuagaga

SEQ ID NO: 1720362 - RNA, 19 nt, Artificial Sequence
  Description of Artificial Sequence: Synthetic oligonucleotide
  Antisense strand to SEQ ID NO: 1720361
ucucuaauaauucacgauu

SEQ ID NO: 1720363 - RNA, 19 nt, Artificial Sequence
  Description of Artificial Sequence: Synthetic oligonucleotide
  Sense strand starting at position 3864 of SEQ ID NO: 1562077
gccgguaagccugcuuuaa

SEQ ID NO: 1720364 - RNA, 19 nt, Artificial Sequence
  Description of Artificial Sequence: Synthetic oligonucleotide
  Antisense strand to SEQ ID NO: 1720363
uuaaagcaggcuuaccggc

SEQ ID NO: 1720365 - RNA, 19 nt, Artificial Sequence
  Description of Artificial Sequence: Synthetic oligonucleotide
  Sense strand starting at position 3923 of SEQ ID NO: 1562077
gaaacaagauuggcucagu

SEQ ID NO: 1720366 - RNA, 19 nt, Artificial Sequence
  Description of Artificial Sequence: Synthetic oligonucleotide
  Antisense strand to SEQ ID NO: 1720365
acugagccaaucuuguuuc

SEQ ID NO: 1720367 - RNA, 19 nt, Artificial Sequence
  Description of Artificial Sequence: Synthetic oligonucleotide
  Sense strand starting at position 3924 of SEQ ID NO: 1562077
aaacaagauuggcucagua

SEQ ID NO: 1720368 - RNA, 19 nt, Artificial Sequence
  Description of Artificial Sequence: Synthetic oligonucleotide
  Antisense strand to SEQ ID NO: 1720367
uacugagccaaucuuguuu

SEQ ID NO: 1720369 - RNA, 19 nt, Artificial Sequence
  Description of Artificial Sequence: Synthetic oligonucleotide
  Sense strand starting at position 3926 of SEQ ID NO: 1562077
acaagauuggcucaguagu

SEQ ID NO: 1720370 - RNA, 19 nt, Artificial Sequence
  Description of Artificial Sequence: Synthetic oligonucleotide
  Antisense strand to SEQ ID NO: 1720369
acuacugagccaaucuugu

SEQ ID NO: 1720371 - RNA, 19 nt, Artificial Sequence
  Description of Artificial Sequence: Synthetic oligonucleotide
  Sense strand starting at position 114 of SEQ ID NO: 1562078
ucucaauuugucugucuuu

SEQ ID NO: 1720372 - RNA, 19 nt, Artificial Sequence
  Description of Artificial Sequence: Synthetic oligonucleotide
  Antisense strand to SEQ ID NO: 1720371
aaagacagacaaauugaga

SEQ ID NO: 1720373 - RNA, 19 nt, Artificial Sequence
  Description of Artificial Sequence: Synthetic oligonucleotide
  Sense strand starting at position 115 of SEQ ID NO: 1562078
cucaauuugucugucuuua

SEQ ID NO: 1720374 - RNA, 19 nt, Artificial Sequence
  Description of Artificial Sequence: Synthetic oligonucleotide
  Antisense strand to SEQ ID NO: 1720373
uaaagacagacaaauugag

SEQ ID NO: 1720375 - RNA, 19 nt, Artificial Sequence
  Description of Artificial Sequence: Synthetic oligonucleotide
  Sense strand starting at position 345 of SEQ ID NO: 1562078
ggcagaagccucuggaaac

SEQ ID NO: 1720376 - RNA, 19 nt, Artificial Sequence
  Description of Artificial Sequence: Synthetic oligonucleotide
  Antisense strand to SEQ ID NO: 1720375
guuuccagaggcuucugcc

SEQ ID NO: 1720377 - RNA, 19 nt, Artificial Sequence
  Description of Artificial Sequence: Synthetic oligonucleotide
  Sense strand starting at position 389 of SEQ ID NO: 1562078
gguccucauuauuugccaa

SEQ ID NO: 1720378 - RNA, 19 nt, Artificial Sequence
  Description of Artificial Sequence: Synthetic oligonucleotide
  Antisense strand to SEQ ID NO: 1720377
uuggcaaauaaugaggacc

SEQ ID NO: 1720379 - RNA, 19 nt, Artificial Sequence
  Description of Artificial Sequence: Synthetic oligonucleotide
  Sense strand starting at position 421 of SEQ ID NO: 1562078
uuuguaaacgauuaugcua

SEQ ID NO: 1720380 - RNA, 19 nt, Artificial Sequence
  Description of Artificial Sequence: Synthetic oligonucleotide
  Antisense strand to SEQ ID NO: 1720379
uagcauaaucguuuacaaa

SEQ ID NO: 1720381 - RNA, 19 nt, Artificial Sequence
  Description of Artificial Sequence: Synthetic oligonucleotide
  Sense strand starting at position 617 of SEQ ID NO: 1562078
ugugaaggugugcaguaaa

SEQ ID NO: 1720382 - RNA, 19 nt, Artificial Sequence
  Description of Artificial Sequence: Synthetic oligonucleotide
  Antisense strand to SEQ ID NO: 1720381
uuuacugcacaccuucaca

SEQ ID NO: 1720383 - RNA, 19 nt, Artificial Sequence
  Description of Artificial Sequence: Synthetic oligonucleotide
  Sense strand starting at position 652 of SEQ ID NO: 1562078
ggcccaguaacuuggacau

SEQ ID NO: 1720384 - RNA, 19 nt, Artificial Sequence
  Description of Artificial Sequence: Synthetic oligonucleotide
  Antisense strand to SEQ ID NO: 1720383
auguccaaguuacugggcc

SEQ ID NO: 1720385 - RNA, 19 nt, Artificial Sequence
  Description of Artificial Sequence: Synthetic oligonucleotide
  Sense strand starting at position 654 of SEQ ID NO: 1562078
cccaguaacuuggacauuu

SEQ ID NO: 1720386 - RNA, 19 nt, Artificial Sequence
  Description of Artificial Sequence: Synthetic oligonucleotide
  Antisense strand to SEQ ID NO: 1720385
aaauguccaaguuacuggg

SEQ ID NO: 1720387 - RNA, 19 nt, Artificial Sequence
  Description of Artificial Sequence: Synthetic oligonucleotide
  Sense strand starting at position 711 of SEQ ID NO: 1562078
cccauauugguauagaggu

SEQ ID NO: 1720388 - RNA, 19 nt, Artificial Sequence
  Description of Artificial Sequence: Synthetic oligonucleotide
  Antisense strand to SEQ ID NO: 1720387
accucuauaccaauauggg

SEQ ID NO: 1720389 - RNA, 19 nt, Artificial Sequence
  Description of Artificial Sequence: Synthetic oligonucleotide
  Sense strand starting at position 725 of SEQ ID NO: 1562078
gagguagccaguuaaguga

SEQ ID NO: 1720390 - RNA, 19 nt, Artificial Sequence
  Description of Artificial Sequence: Synthetic oligonucleotide
  Antisense strand to SEQ ID NO: 1720389
ucacuuaacuggcuaccuc

SEQ ID NO: 1720391 - RNA, 19 nt, Artificial Sequence
  Description of Artificial Sequence: Synthetic oligonucleotide
  Sense strand starting at position 817 of SEQ ID NO: 1562078
ccaugugugguagagggau

SEQ ID NO: 1720392 - RNA, 19 nt, Artificial Sequence
  Description of Artificial Sequence: Synthetic oligonucleotide
  Antisense strand to SEQ ID NO: 1720391
aucccucuaccacacaugg

SEQ ID NO: 1720393 - RNA, 19 nt, Artificial Sequence
  Description of Artificial Sequence: Synthetic oligonucleotide
  Sense strand starting at position 819 of SEQ ID NO: 1562078
augugugguagagggauaa

SEQ ID NO: 1720394 - RNA, 19 nt, Artificial Sequence
  Description of Artificial Sequence: Synthetic oligonucleotide
  Antisense strand to SEQ ID NO: 1720393
uuaucccucuaccacacau

SEQ ID NO: 1720395 - RNA, 19 nt, Artificial Sequence
  Description of Artificial Sequence: Synthetic oligonucleotide
  Sense strand starting at position 831 of SEQ ID NO: 1562078
gggauaaccuagguucagu

SEQ ID NO: 1720396 - RNA, 19 nt, Artificial Sequence
  Description of Artificial Sequence: Synthetic oligonucleotide
  Antisense strand to SEQ ID NO: 1720395
acugaaccuagguuauccc

SEQ ID NO: 1720397 - RNA, 19 nt, Artificial Sequence
  Description of Artificial Sequence: Synthetic oligonucleotide
  Sense strand starting at position 875 of SEQ ID NO: 1562078
caacgaaggccuuauuguu

SEQ ID NO: 1720398 - RNA, 19 nt, Artificial Sequence
  Description of Artificial Sequence: Synthetic oligonucleotide
  Antisense strand to SEQ ID NO: 1720397
aacaauaaggccuucguug

SEQ ID NO: 1720399 - RNA, 19 nt, Artificial Sequence
  Description of Artificial Sequence: Synthetic oligonucleotide
  Sense strand starting at position 936 of SEQ ID NO: 1562078
aggaaacaggcuugguaaa

SEQ ID NO: 1720400 - RNA, 19 nt, Artificial Sequence
  Description of Artificial Sequence: Synthetic oligonucleotide
  Antisense strand to SEQ ID NO: 1720399
uuuaccaagccuguuuccu

SEQ ID NO: 1720401 - RNA, 19 nt, Artificial Sequence
  Description of Artificial Sequence: Synthetic oligonucleotide
  Sense strand starting at position 2062 of SEQ ID NO: 1562078
gagccugaauguuuggaga

SEQ ID NO: 1720402 - RNA, 19 nt, Artificial Sequence
  Description of Artificial Sequence: Synthetic oligonucleotide
  Antisense strand to SEQ ID NO: 1720401
ucuccaaacauucaggcuc

SEQ ID NO: 1720403 - RNA, 19 nt, Artificial Sequence
  Description of Artificial Sequence: Synthetic oligonucleotide
  Sense strand starting at position 2153 of SEQ ID NO: 1562078
ucugauugacccugaugag

SEQ ID NO: 1720404 - RNA, 19 nt, Artificial Sequence
  Description of Artificial Sequence: Synthetic oligonucleotide
  Antisense strand to SEQ ID NO: 1720403
cucaucagggucaaucaga

SEQ ID NO: 1720405 - RNA, 19 nt, Artificial Sequence
  Description of Artificial Sequence: Synthetic oligonucleotide
  Sense strand starting at position 2396 of SEQ ID NO: 1562078
gaaggagaugcucgagaac

SEQ ID NO: 1720406 - RNA, 19 nt, Artificial Sequence
  Description of Artificial Sequence: Synthetic oligonucleotide
  Antisense strand to SEQ ID NO: 1720405
guucucgagcaucuccuuc

SEQ ID NO: 1720407 - RNA, 19 nt, Artificial Sequence
  Description of Artificial Sequence: Synthetic oligonucleotide
  Sense strand starting at position 2470 of SEQ ID NO: 1562078
guggguucuguuaacguca

SEQ ID NO: 1720408 - RNA, 19 nt, Artificial Sequence
  Description of Artificial Sequence: Synthetic oligonucleotide
  Antisense strand to SEQ ID NO: 1720407
ugacguuaacagaacccac

SEQ ID NO: 1720409 - RNA, 19 nt, Artificial Sequence
  Description of Artificial Sequence: Synthetic oligonucleotide
  Sense strand starting at position 2477 of SEQ ID NO: 1562078
cuguuaacgucagcauuua

SEQ ID NO: 1720410 - RNA, 19 nt, Artificial Sequence
  Description of Artificial Sequence: Synthetic oligonucleotide
  Antisense strand to SEQ ID NO: 1720409
uaaaugcugacguuaacag

SEQ ID NO: 1720411 - RNA, 19 nt, Artificial Sequence
  Description of Artificial Sequence: Synthetic oligonucleotide
  Sense strand starting at position 2574 of SEQ ID NO: 1562078
guugauaacccucgaaaua

SEQ ID NO: 1720412 - RNA, 19 nt, Artificial Sequence
  Description of Artificial Sequence: Synthetic oligonucleotide
  Antisense strand to SEQ ID NO: 1720411
uauuucgaggguuaucaac

SEQ ID NO: 1720413 - RNA, 19 nt, Artificial Sequence
  Description of Artificial Sequence: Synthetic oligonucleotide
  Sense strand starting at position 2585 of SEQ ID NO: 1562078
ucgaaauauagcgaauuga

SEQ ID NO: 1720414 - RNA, 19 nt, Artificial Sequence
  Description of Artificial Sequence: Synthetic oligonucleotide
  Antisense strand to SEQ ID NO: 1720413
ucaauucgcuauauuucga

SEQ ID NO: 1720415 - RNA, 19 nt, Artificial Sequence
  Description of Artificial Sequence: Synthetic oligonucleotide
  Sense strand starting at position 2834 of SEQ ID NO: 1562078
gaguguuggagugaggcua

SEQ ID NO: 1720416 - RNA, 19 nt, Artificial Sequence
  Description of Artificial Sequence: Synthetic oligonucleotide
  Antisense strand to SEQ ID NO: 1720415
uagccucacuccaacacuc

SEQ ID NO: 1720417 - RNA, 19 nt, Artificial Sequence
  Description of Artificial Sequence: Synthetic oligonucleotide
  Sense strand starting at position 2846 of SEQ ID NO: 1562078
gaggcuaccuugguggaau

SEQ ID NO: 1720418 - RNA, 19 nt, Artificial Sequence
  Description of Artificial Sequence: Synthetic oligonucleotide
  Antisense strand to SEQ ID NO: 1720417
auuccaccaagguagccuc

SEQ ID NO: 1720419 - RNA, 19 nt, Artificial Sequence
  Description of Artificial Sequence: Synthetic oligonucleotide
  Sense strand starting at position 2909 of SEQ ID NO: 1562078
aaauuaagccguuggagag

SEQ ID NO: 1720420 - RNA, 19 nt, Artificial Sequence
  Description of Artificial Sequence: Synthetic oligonucleotide
  Antisense strand to SEQ ID NO: 1720419
cucuccaacggcuuaauuu

SEQ ID NO: 1720421 - RNA, 19 nt, Artificial Sequence
  Description of Artificial Sequence: Synthetic oligonucleotide
  Sense strand starting at position 2910 of SEQ ID NO: 1562078
aauuaagccguuggagaga

SEQ ID NO: 1720422 - RNA, 19 nt, Artificial Sequence
  Description of Artificial Sequence: Synthetic oligonucleotide
  Antisense strand to SEQ ID NO: 1720421
ucucuccaacggcuuaauu

SEQ ID NO: 1720423 - RNA, 19 nt, Artificial Sequence
  Description of Artificial Sequence: Synthetic oligonucleotide
  Sense strand starting at position 3540 of SEQ ID NO: 1562078
gccauuagcccugauauaa

SEQ ID NO: 1720424 - RNA, 19 nt, Artificial Sequence
  Description of Artificial Sequence: Synthetic oligonucleotide
  Antisense strand to SEQ ID NO: 1720423
uuauaucagggcuaauggc

SEQ ID NO: 1720425 - RNA, 19 nt, Artificial Sequence
  Description of Artificial Sequence: Synthetic oligonucleotide
  Sense strand starting at position 3573 of SEQ ID NO: 1562078
auaggauguuuccuuugga

SEQ ID NO: 1720426 - RNA, 19 nt, Artificial Sequence
  Description of Artificial Sequence: Synthetic oligonucleotide
  Antisense strand to SEQ ID NO: 1720425
uccaaaggaaacauccuau

SEQ ID NO: 1720427 - RNA, 19 nt, Artificial Sequence
  Description of Artificial Sequence: Synthetic oligonucleotide
  Sense strand starting at position 3574 of SEQ ID NO: 1562078
uaggauguuuccuuuggau

SEQ ID NO: 1720428 - RNA, 19 nt, Artificial Sequence
  Description of Artificial Sequence: Synthetic oligonucleotide
  Antisense strand to SEQ ID NO: 1720427
auccaaaggaaacauccua

SEQ ID NO: 1720429 - RNA, 19 nt, Artificial Sequence
  Description of Artificial Sequence: Synthetic oligonucleotide
  Sense strand starting at position 3582 of SEQ ID NO: 1562078
uuccuuuggauggguagaa

SEQ ID NO: 1720430 - RNA, 19 nt, Artificial Sequence
  Description of Artificial Sequence: Synthetic oligonucleotide
  Antisense strand to SEQ ID NO: 1720429
uucuacccauccaaaggaa

SEQ ID NO: 1720431 - RNA, 19 nt, Artificial Sequence
  Description of Artificial Sequence: Synthetic oligonucleotide
  Sense strand starting at position 3769 of SEQ ID NO: 1562078
auuccugcuggucaacaau

SEQ ID NO: 1720432 - RNA, 19 nt, Artificial Sequence
  Description of Artificial Sequence: Synthetic oligonucleotide
  Antisense strand to SEQ ID NO: 1720431
auuguugaccagcaggaau

SEQ ID NO: 1720433 - RNA, 19 nt, Artificial Sequence
  Description of Artificial Sequence: Synthetic oligonucleotide
  Sense strand starting at position 3803 of SEQ ID NO: 1562078
agagacgacuuccuuuaga

SEQ ID NO: 1720434 - RNA, 19 nt, Artificial Sequence
  Description of Artificial Sequence: Synthetic oligonucleotide
  Antisense strand to SEQ ID NO: 1720433
ucuaaaggaagucgucucu

SEQ ID NO: 1720435 - RNA, 19 nt, Artificial Sequence
  Description of Artificial Sequence: Synthetic oligonucleotide
  Sense strand starting at position 3832 of SEQ ID NO: 1562078
ugucccauuuggucucaau

SEQ ID NO: 1720436 - RNA, 19 nt, Artificial Sequence
  Description of Artificial Sequence: Synthetic oligonucleotide
  Antisense strand to SEQ ID NO: 1720435
auugagaccaaaugggaca

SEQ ID NO: 1720437 - RNA, 19 nt, Artificial Sequence
  Description of Artificial Sequence: Synthetic oligonucleotide
  Sense strand starting at position 3860 of SEQ ID NO: 1562078
ucccuaugguucucugaaa

SEQ ID NO: 1720438 - RNA, 19 nt, Artificial Sequence
  Description of Artificial Sequence: Synthetic oligonucleotide
  Antisense strand to SEQ ID NO: 1720437
uuucagagaaccauaggga

SEQ ID NO: 1720439 - RNA, 19 nt, Artificial Sequence
  Description of Artificial Sequence: Synthetic oligonucleotide
  Sense strand starting at position 3861 of SEQ ID NO: 1562078
cccuaugguucucugaaau

SEQ ID NO: 1720440 - RNA, 19 nt, Artificial Sequence
  Description of Artificial Sequence: Synthetic oligonucleotide
  Antisense strand to SEQ ID NO: 1720439
auuucagagaaccauaggg

SEQ ID NO: 1720441 - RNA, 19 nt, Artificial Sequence
  Description of Artificial Sequence: Synthetic oligonucleotide
  Sense strand starting at position 3872 of SEQ ID NO: 1562078
ucugaaauagaauguuguu

SEQ ID NO: 1720442 - RNA, 19 nt, Artificial Sequence
  Description of Artificial Sequence: Synthetic oligonucleotide
  Antisense strand to SEQ ID NO: 1720441
aacaacauucuauuucaga

SEQ ID NO: 1720443 - RNA, 19 nt, Artificial Sequence
  Description of Artificial Sequence: Synthetic oligonucleotide
  Sense strand starting at position 3879 of SEQ ID NO: 1562078
uagaauguuguuugcauuu

SEQ ID NO: 1720444 - RNA, 19 nt, Artificial Sequence
  Description of Artificial Sequence: Synthetic oligonucleotide
  Antisense strand to SEQ ID NO: 1720443
aaaugcaaacaacauucua

SEQ ID NO: 1720445 - RNA, 19 nt, Artificial Sequence
  Description of Artificial Sequence: Synthetic oligonucleotide
  Sense strand starting at position 3908 of SEQ ID NO: 1562078
ucagguuguugcuuuauuu

SEQ ID NO: 1720446 - RNA, 19 nt, Artificial Sequence
  Description of Artificial Sequence: Synthetic oligonucleotide
  Antisense strand to SEQ ID NO: 1720445
aaauaaagcaacaaccuga

SEQ ID NO: 1720447 - RNA, 19 nt, Artificial Sequence
  Description of Artificial Sequence: Synthetic oligonucleotide
  Sense strand starting at position 3912 of SEQ ID NO: 1562078
guuguugcuuuauuuagag

SEQ ID NO: 1720448 - RNA, 19 nt, Artificial Sequence
  Description of Artificial Sequence: Synthetic oligonucleotide
  Antisense strand to SEQ ID NO: 1720447
cucuaaauaaagcaacaac

SEQ ID NO: 1720449 - RNA, 19 nt, Artificial Sequence
  Description of Artificial Sequence: Synthetic oligonucleotide
  Sense strand starting at position 3961 of SEQ ID NO: 1562078
gugagaaagcagggucuua

SEQ ID NO: 1720450 - RNA, 19 nt, Artificial Sequence
  Description of Artificial Sequence: Synthetic oligonucleotide
  Antisense strand to SEQ ID NO: 1720449
uaagacccugcuuucucac

SEQ ID NO: 1720451 - RNA, 19 nt, Artificial Sequence
  Description of Artificial Sequence: Synthetic oligonucleotide
  Sense strand starting at position 115 of SEQ ID NO: 1562079
augcaugcgaguguuuauu

SEQ ID NO: 1720452 - RNA, 19 nt, Artificial Sequence
  Description of Artificial Sequence: Synthetic oligonucleotide
  Antisense strand to SEQ ID NO: 1720451
aauaaacacucgcaugcau

SEQ ID NO: 1720453 - RNA, 19 nt, Artificial Sequence
  Description of Artificial Sequence: Synthetic oligonucleotide
  Sense strand starting at position 199 of SEQ ID NO: 1562079
uugguaggcguguauuuga

SEQ ID NO: 1720454 - RNA, 19 nt, Artificial Sequence
  Description of Artificial Sequence: Synthetic oligonucleotide
  Antisense strand to SEQ ID NO: 1720453
ucaaauacacgccuaccaa

SEQ ID NO: 1720455 - RNA, 19 nt, Artificial Sequence
  Description of Artificial Sequence: Synthetic oligonucleotide
  Sense strand starting at position 207 of SEQ ID NO: 1562079
cguguauuugagcauggca

SEQ ID NO: 1720456 - RNA, 19 nt, Artificial Sequence
  Description of Artificial Sequence: Synthetic oligonucleotide
  Antisense strand to SEQ ID NO: 1720455
ugccaugcucaaauacacg

SEQ ID NO: 1720457 - RNA, 19 nt, Artificial Sequence
  Description of Artificial Sequence: Synthetic oligonucleotide
  Sense strand starting at position 209 of SEQ ID NO: 1562079
uguauuugagcauggcagu

SEQ ID NO: 1720458 - RNA, 19 nt, Artificial Sequence
  Description of Artificial Sequence: Synthetic oligonucleotide
  Antisense strand to SEQ ID NO: 1720457
acugccaugcucaaauaca

SEQ ID NO: 1720459 - RNA, 19 nt, Artificial Sequence
  Description of Artificial Sequence: Synthetic oligonucleotide
  Sense strand starting at position 210 of SEQ ID NO: 1562079
guauuugagcauggcaguu

SEQ ID NO: 1720460 - RNA, 19 nt, Artificial Sequence
  Description of Artificial Sequence: Synthetic oligonucleotide
  Antisense strand to SEQ ID NO: 1720459
aacugccaugcucaaauac

SEQ ID NO: 1720461 - RNA, 19 nt, Artificial Sequence
  Description of Artificial Sequence: Synthetic oligonucleotide
  Sense strand starting at position 286 of SEQ ID NO: 1562079
ggcaguugugaugaaacuu

SEQ ID NO: 1720462 - RNA, 19 nt, Artificial Sequence
  Description of Artificial Sequence: Synthetic oligonucleotide
  Antisense strand to SEQ ID NO: 1720461
aaguuucaucacaacugcc

SEQ ID NO: 1720463 - RNA, 19 nt, Artificial Sequence
  Description of Artificial Sequence: Synthetic oligonucleotide
  Sense strand starting at position 294 of SEQ ID NO: 1562079
ugaugaaacuuuccucuag

SEQ ID NO: 1720464 - RNA, 19 nt, Artificial Sequence
  Description of Artificial Sequence: Synthetic oligonucleotide
  Antisense strand to SEQ ID NO: 1720463
cuagaggaaaguuucauca

SEQ ID NO: 1720465 - RNA, 19 nt, Artificial Sequence
  Description of Artificial Sequence: Synthetic oligonucleotide
  Sense strand starting at position 296 of SEQ ID NO: 1562079
augaaacuuuccucuaggu

SEQ ID NO: 1720466 - RNA, 19 nt, Artificial Sequence
  Description of Artificial Sequence: Synthetic oligonucleotide
  Antisense strand to SEQ ID NO: 1720465
accuagaggaaaguuucau

SEQ ID NO: 1720467 - RNA, 19 nt, Artificial Sequence
  Description of Artificial Sequence: Synthetic oligonucleotide
  Sense strand starting at position 465 of SEQ ID NO: 1562079
gagcuuccggaagggaaau

SEQ ID NO: 1720468 - RNA, 19 nt, Artificial Sequence
  Description of Artificial Sequence: Synthetic oligonucleotide
  Antisense strand to SEQ ID NO: 1720467
auuucccuuccggaagcuc

SEQ ID NO: 1720469 - RNA, 19 nt, Artificial Sequence
  Description of Artificial Sequence: Synthetic oligonucleotide
  Sense strand starting at position 609 of SEQ ID NO: 1562079
ccaucucauuggccuagaa

SEQ ID NO: 1720470 - RNA, 19 nt, Artificial Sequence
  Description of Artificial Sequence: Synthetic oligonucleotide
  Antisense strand to SEQ ID NO: 1720469
uucuaggccaaugagaugg

SEQ ID NO: 1720471 - RNA, 19 nt, Artificial Sequence
  Description of Artificial Sequence: Synthetic oligonucleotide
  Sense strand starting at position 611 of SEQ ID NO: 1562079
aucucauuggccuagaaua

SEQ ID NO: 1720472 - RNA, 19 nt, Artificial Sequence
  Description of Artificial Sequence: Synthetic oligonucleotide
  Antisense strand to SEQ ID NO: 1720471
uauucuaggccaaugagau

SEQ ID NO: 1720473 - RNA, 19 nt, Artificial Sequence
  Description of Artificial Sequence: Synthetic oligonucleotide
  Sense strand starting at position 648 of SEQ ID NO: 1562079
cugagagcuuuggcaugaa

SEQ ID NO: 1720474 - RNA, 19 nt, Artificial Sequence
  Description of Artificial Sequence: Synthetic oligonucleotide
  Antisense strand to SEQ ID NO: 1720473
uucaugccaaagcucucag

SEQ ID NO: 1720475 - RNA, 19 nt, Artificial Sequence
  Description of Artificial Sequence: Synthetic oligonucleotide
  Sense strand starting at position 677 of SEQ ID NO: 1562079
gcuggaauucucuaagggu

SEQ ID NO: 1720476 - RNA, 19 nt, Artificial Sequence
  Description of Artificial Sequence: Synthetic oligonucleotide
  Antisense strand to SEQ ID NO: 1720475
acccuuagagaauuccagc

SEQ ID NO: 1720477 - RNA, 19 nt, Artificial Sequence
  Description of Artificial Sequence: Synthetic oligonucleotide
  Sense strand starting at position 723 of SEQ ID NO: 1562079
guuagaaaugugcauucuc

SEQ ID NO: 1720478 - RNA, 19 nt, Artificial Sequence
  Description of Artificial Sequence: Synthetic oligonucleotide
  Antisense strand to SEQ ID NO: 1720477
gagaaugcacauuucuaac

SEQ ID NO: 1720479 - RNA, 19 nt, Artificial Sequence
  Description of Artificial Sequence: Synthetic oligonucleotide
  Sense strand starting at position 992 of SEQ ID NO: 1562079
auaguaaaguuuccucaug

SEQ ID NO: 1720480 - RNA, 19 nt, Artificial Sequence
  Description of Artificial Sequence: Synthetic oligonucleotide
  Antisense strand to SEQ ID NO: 1720479
caugaggaaacuuuacuau

SEQ ID NO: 1720481 - RNA, 19 nt, Artificial Sequence
  Description of Artificial Sequence: Synthetic oligonucleotide
  Sense strand starting at position 994 of SEQ ID NO: 1562079
aguaaaguuuccucaugga

SEQ ID NO: 1720482 - RNA, 19 nt, Artificial Sequence
  Description of Artificial Sequence: Synthetic oligonucleotide
  Antisense strand to SEQ ID NO: 1720481
uccaugaggaaacuuuacu

SEQ ID NO: 1720483 - RNA, 19 nt, Artificial Sequence
  Description of Artificial Sequence: Synthetic oligonucleotide
  Sense strand starting at position 1041 of SEQ ID NO: 1562079
gcacaaugauaguuaucac

SEQ ID NO: 1720484 - RNA, 19 nt, Artificial Sequence
  Description of Artificial Sequence: Synthetic oligonucleotide
  Antisense strand to SEQ ID NO: 1720483
gugauaacuaucauugugc

SEQ ID NO: 1720485 - RNA, 19 nt, Artificial Sequence
  Description of Artificial Sequence: Synthetic oligonucleotide
  Sense strand starting at position 2030 of SEQ ID NO: 1562079
gugugugcuacagucuuau

SEQ ID NO: 1720486 - RNA, 19 nt, Artificial Sequence
  Description of Artificial Sequence: Synthetic oligonucleotide
  Antisense strand to SEQ ID NO: 1720485
auaagacuguagcacacac

SEQ ID NO: 1720487 - RNA, 19 nt, Artificial Sequence
  Description of Artificial Sequence: Synthetic oligonucleotide
  Sense strand starting at position 2041 of SEQ ID NO: 1562079
agucuuauuggccaaacaa

SEQ ID NO: 1720488 - RNA, 19 nt, Artificial Sequence
  Description of Artificial Sequence: Synthetic oligonucleotide
  Antisense strand to SEQ ID NO: 1720487
uuguuuggccaauaagacu

SEQ ID NO: 1720489 - RNA, 19 nt, Artificial Sequence
  Description of Artificial Sequence: Synthetic oligonucleotide
  Sense strand starting at position 2062 of SEQ ID NO: 1562079
gauaacgugugaccucaga

SEQ ID NO: 1720490 - RNA, 19 nt, Artificial Sequence
  Description of Artificial Sequence: Synthetic oligonucleotide
  Antisense strand to SEQ ID NO: 1720489
ucugaggucacacguuauc

SEQ ID NO: 1720491 - RNA, 19 nt, Artificial Sequence
  Description of Artificial Sequence: Synthetic oligonucleotide
  Sense strand starting at position 2207 of SEQ ID NO: 1562079
ccagaagcuucuuuaguga

SEQ ID NO: 1720492 - RNA, 19 nt, Artificial Sequence
  Description of Artificial Sequence: Synthetic oligonucleotide
  Antisense strand to SEQ ID NO: 1720491
ucacuaaagaagcuucugg

SEQ ID NO: 1720493 - RNA, 19 nt, Artificial Sequence
  Description of Artificial Sequence: Synthetic oligonucleotide
  Sense strand starting at position 2247 of SEQ ID NO: 1562079
gcagacaucuccucaguga

SEQ ID NO: 1720494 - RNA, 19 nt, Artificial Sequence
  Description of Artificial Sequence: Synthetic oligonucleotide
  Antisense strand to SEQ ID NO: 1720493
ucacugaggagaugucugc

SEQ ID NO: 1720495 - RNA, 19 nt, Artificial Sequence
  Description of Artificial Sequence: Synthetic oligonucleotide
  Sense strand starting at position 2322 of SEQ ID NO: 1562079
ucccauuaaguggguaaua

SEQ ID NO: 1720496 - RNA, 19 nt, Artificial Sequence
  Description of Artificial Sequence: Synthetic oligonucleotide
  Antisense strand to SEQ ID NO: 1720495
uauuacccacuuaauggga

SEQ ID NO: 1720497 - RNA, 19 nt, Artificial Sequence
  Description of Artificial Sequence: Synthetic oligonucleotide
  Sense strand starting at position 2324 of SEQ ID NO: 1562079
ccauuaaguggguaauacu

SEQ ID NO: 1720498 - RNA, 19 nt, Artificial Sequence
  Description of Artificial Sequence: Synthetic oligonucleotide
  Antisense strand to SEQ ID NO: 1720497
aguauuacccacuuaaugg

SEQ ID NO: 1720499 - RNA, 19 nt, Artificial Sequence
  Description of Artificial Sequence: Synthetic oligonucleotide
  Sense strand starting at position 2331 of SEQ ID NO: 1562079
guggguaauacuuaaguua

SEQ ID NO: 1720500 - RNA, 19 nt, Artificial Sequence
  Description of Artificial Sequence: Synthetic oligonucleotide
  Antisense strand to SEQ ID NO: 1720499
uaacuuaaguauuacccac

SEQ ID NO: 1720501 - RNA, 19 nt, Artificial Sequence
  Description of Artificial Sequence: Synthetic oligonucleotide
  Sense strand starting at position 2366 of SEQ ID NO: 1562079
ugcugaauuuggcuuuauc

SEQ ID NO: 1720502 - RNA, 19 nt, Artificial Sequence
  Description of Artificial Sequence: Synthetic oligonucleotide
  Antisense strand to SEQ ID NO: 1720501
gauaaagccaaauucagca

SEQ ID NO: 1720503 - RNA, 19 nt, Artificial Sequence
  Description of Artificial Sequence: Synthetic oligonucleotide
  Sense strand starting at position 2498 of SEQ ID NO: 1562079
gagauuaaaugucccuaag

SEQ ID NO: 1720504 - RNA, 19 nt, Artificial Sequence
  Description of Artificial Sequence: Synthetic oligonucleotide
  Antisense strand to SEQ ID NO: 1720503
cuuagggacauuuaaucuc

SEQ ID NO: 1720505 - RNA, 19 nt, Artificial Sequence
  Description of Artificial Sequence: Synthetic oligonucleotide
  Sense strand starting at position 2910 of SEQ ID NO: 1562079
cggccucccagauagguau

SEQ ID NO: 1720506 - RNA, 19 nt, Artificial Sequence
  Description of Artificial Sequence: Synthetic oligonucleotide
  Antisense strand to SEQ ID NO: 1720505
auaccuaucugggaggccg

SEQ ID NO: 1720507 - RNA, 19 nt, Artificial Sequence
  Description of Artificial Sequence: Synthetic oligonucleotide
  Sense strand starting at position 2996 of SEQ ID NO: 1562079
acaguuaguaaguagugua

SEQ ID NO: 1720508 - RNA, 19 nt, Artificial Sequence
  Description of Artificial Sequence: Synthetic oligonucleotide
  Antisense strand to SEQ ID NO: 1720507
uacacuacuuacuaacugu

SEQ ID NO: 1720509 - RNA, 19 nt, Artificial Sequence
  Description of Artificial Sequence: Synthetic oligonucleotide
  Sense strand starting at position 3032 of SEQ ID NO: 1562079
gcagaaugacuccaaaguc

SEQ ID NO: 1720510 - RNA, 19 nt, Artificial Sequence
  Description of Artificial Sequence: Synthetic oligonucleotide
  Antisense strand to SEQ ID NO: 1720509
gacuuuggagucauucugc

SEQ ID NO: 1720511 - RNA, 19 nt, Artificial Sequence
  Description of Artificial Sequence: Synthetic oligonucleotide
  Sense strand starting at position 3167 of SEQ ID NO: 1562079
aucacaguacagugaucua

SEQ ID NO: 1720512 - RNA, 19 nt, Artificial Sequence
  Description of Artificial Sequence: Synthetic oligonucleotide
  Antisense strand to SEQ ID NO: 1720511
uagaucacuguacugugau

SEQ ID NO: 1720513 - RNA, 19 nt, Artificial Sequence
  Description of Artificial Sequence: Synthetic oligonucleotide
  Sense strand starting at position 3170 of SEQ ID NO: 1562079
acaguacagugaucuaauc

SEQ ID NO: 1720514 - RNA, 19 nt, Artificial Sequence
  Description of Artificial Sequence: Synthetic oligonucleotide
  Antisense strand to SEQ ID NO: 1720513
gauuagaucacuguacugu

SEQ ID NO: 1720515 - RNA, 19 nt, Artificial Sequence
  Description of Artificial Sequence: Synthetic oligonucleotide
  Sense strand starting at position 3364 of SEQ ID NO: 1562079
ugaggacugccugaugcuu

SEQ ID NO: 1720516 - RNA, 19 nt, Artificial Sequence
  Description of Artificial Sequence: Synthetic oligonucleotide
  Antisense strand to SEQ ID NO: 1720515
aagcaucaggcaguccuca

SEQ ID NO: 1720517 - RNA, 19 nt, Artificial Sequence
  Description of Artificial Sequence: Synthetic oligonucleotide
  Sense strand starting at position 3495 of SEQ ID NO: 1562079
gauguuguccuugaucacu

SEQ ID NO: 1720518 - RNA, 19 nt, Artificial Sequence
  Description of Artificial Sequence: Synthetic oligonucleotide
  Antisense strand to SEQ ID NO: 1720517
agugaucaaggacaacauc

SEQ ID NO: 1720519 - RNA, 19 nt, Artificial Sequence
  Description of Artificial Sequence: Synthetic oligonucleotide
  Sense strand starting at position 3739 of SEQ ID NO: 1562079
cuggaauucugcucuaagg

SEQ ID NO: 1720520 - RNA, 19 nt, Artificial Sequence
  Description of Artificial Sequence: Synthetic oligonucleotide
  Antisense strand to SEQ ID NO: 1720519
ccuuagagcagaauuccag

SEQ ID NO: 1720521 - RNA, 19 nt, Artificial Sequence
  Description of Artificial Sequence: Synthetic oligonucleotide
  Sense strand starting at position 3819 of SEQ ID NO: 1562079
acuuguggguauuuguuua

SEQ ID NO: 1720522 - RNA, 19 nt, Artificial Sequence
  Description of Artificial Sequence: Synthetic oligonucleotide
  Antisense strand to SEQ ID NO: 1720521
uaaacaaauacccacaagu

SEQ ID NO: 1720523 - RNA, 19 nt, Artificial Sequence
  Description of Artificial Sequence: Synthetic oligonucleotide
  Sense strand starting at position 3823 of SEQ ID NO: 1562079
guggguauuuguuuauucu

SEQ ID NO: 1720524 - RNA, 19 nt, Artificial Sequence
  Description of Artificial Sequence: Synthetic oligonucleotide
  Antisense strand to SEQ ID NO: 1720523
agaauaaacaaauacccac

SEQ ID NO: 1720525 - RNA, 19 nt, Artificial Sequence
  Description of Artificial Sequence: Synthetic oligonucleotide
  Sense strand starting at position 3836 of SEQ ID NO: 1562079
uauucugugggucauaauc

SEQ ID NO: 1720526 - RNA, 19 nt, Artificial Sequence
  Description of Artificial Sequence: Synthetic oligonucleotide
  Antisense strand to SEQ ID NO: 1720525
gauuaugacccacagaaua

SEQ ID NO: 1720527 - RNA, 19 nt, Artificial Sequence
  Description of Artificial Sequence: Synthetic oligonucleotide
  Sense strand starting at position 3865 of SEQ ID NO: 1562079
auuguuuauuuccuugcua

SEQ ID NO: 1720528 - RNA, 19 nt, Artificial Sequence
  Description of Artificial Sequence: Synthetic oligonucleotide
  Antisense strand to SEQ ID NO: 1720527
uagcaaggaaauaaacaau

SEQ ID NO: 1720529 - RNA, 19 nt, Artificial Sequence
  Description of Artificial Sequence: Synthetic oligonucleotide
  Sense strand starting at position 3980 of SEQ ID NO: 1562079
uauggaguugcuggaaacu

SEQ ID NO: 1720530 - RNA, 19 nt, Artificial Sequence
  Description of Artificial Sequence: Synthetic oligonucleotide
  Antisense strand to SEQ ID NO: 1720529
aguuuccagcaacuccaua

SEQ ID NO: 1720531 - RNA, 19 nt, Artificial Sequence
  Description of Artificial Sequence: Synthetic oligonucleotide
  Sense strand starting at position 27 of SEQ ID NO: 1562080
ccugguguggcagagugau

SEQ ID NO: 1720532 - RNA, 19 nt, Artificial Sequence
  Description of Artificial Sequence: Synthetic oligonucleotide
  Antisense strand to SEQ ID NO: 1720531
aucacucugccacaccagg

SEQ ID NO: 1720533 - RNA, 19 nt, Artificial Sequence
  Description of Artificial Sequence: Synthetic oligonucleotide
  Sense strand starting at position 43 of SEQ ID NO: 1562080
gauggaaugugggugaagu

SEQ ID NO: 1720534 - RNA, 19 nt, Artificial Sequence
  Description of Artificial Sequence: Synthetic oligonucleotide
  Antisense strand to SEQ ID NO: 1720533
acuucacccacauuccauc

SEQ ID NO: 1720535 - RNA, 19 nt, Artificial Sequence
  Description of Artificial Sequence: Synthetic oligonucleotide
  Sense strand starting at position 53 of SEQ ID NO: 1562080
gggugaagugcuuggaaau

SEQ ID NO: 1720536 - RNA, 19 nt, Artificial Sequence
  Description of Artificial Sequence: Synthetic oligonucleotide
  Antisense strand to SEQ ID NO: 1720535
auuuccaagcacuucaccc

SEQ ID NO: 1720537 - RNA, 19 nt, Artificial Sequence
  Description of Artificial Sequence: Synthetic oligonucleotide
  Sense strand starting at position 54 of SEQ ID NO: 1562080
ggugaagugcuuggaaauc

SEQ ID NO: 1720538 - RNA, 19 nt, Artificial Sequence
  Description of Artificial Sequence: Synthetic oligonucleotide
  Antisense strand to SEQ ID NO: 1720537
gauuuccaagcacuucacc

SEQ ID NO: 1720539 - RNA, 19 nt, Artificial Sequence
  Description of Artificial Sequence: Synthetic oligonucleotide
  Sense strand starting at position 445 of SEQ ID NO: 1562080
cugaaugacuucucuuguu

SEQ ID NO: 1720540 - RNA, 19 nt, Artificial Sequence
  Description of Artificial Sequence: Synthetic oligonucleotide
  Antisense strand to SEQ ID NO: 1720539
aacaagagaagucauucag

SEQ ID NO: 1720541 - RNA, 19 nt, Artificial Sequence
  Description of Artificial Sequence: Synthetic oligonucleotide
  Sense strand starting at position 450 of SEQ ID NO: 1562080
ugacuucucuuguuccuca

SEQ ID NO: 1720542 - RNA, 19 nt, Artificial Sequence
  Description of Artificial Sequence: Synthetic oligonucleotide
  Antisense strand to SEQ ID NO: 1720541
ugaggaacaagagaaguca

SEQ ID NO: 1720543 - RNA, 19 nt, Artificial Sequence
  Description of Artificial Sequence: Synthetic oligonucleotide
  Sense strand starting at position 482 of SEQ ID NO: 1562080
gcaggaacuuguucugaga

SEQ ID NO: 1720544 - RNA, 19 nt, Artificial Sequence
  Description of Artificial Sequence: Synthetic oligonucleotide
  Antisense strand to SEQ ID NO: 1720543
ucucagaacaaguuccugc

SEQ ID NO: 1720545 - RNA, 19 nt, Artificial Sequence
  Description of Artificial Sequence: Synthetic oligonucleotide
  Sense strand starting at position 484 of SEQ ID NO: 1562080
aggaacuuguucugagaag

SEQ ID NO: 1720546 - RNA, 19 nt, Artificial Sequence
  Description of Artificial Sequence: Synthetic oligonucleotide
  Antisense strand to SEQ ID NO: 1720545
cuucucagaacaaguuccu

SEQ ID NO: 1720547 - RNA, 19 nt, Artificial Sequence
  Description of Artificial Sequence: Synthetic oligonucleotide
  Sense strand starting at position 485 of SEQ ID NO: 1562080
ggaacuuguucugagaaga

SEQ ID NO: 1720548 - RNA, 19 nt, Artificial Sequence
  Description of Artificial Sequence: Synthetic oligonucleotide
  Antisense strand to SEQ ID NO: 1720547
ucuucucagaacaaguucc

SEQ ID NO: 1720549 - RNA, 19 nt, Artificial Sequence
  Description of Artificial Sequence: Synthetic oligonucleotide
  Sense strand starting at position 772 of SEQ ID NO: 1562080
gagagcacuugugugacau

SEQ ID NO: 1720550 - RNA, 19 nt, Artificial Sequence
  Description of Artificial Sequence: Synthetic oligonucleotide
  Antisense strand to SEQ ID NO: 1720549
augucacacaagugcucuc

SEQ ID NO: 1720551 - RNA, 19 nt, Artificial Sequence
  Description of Artificial Sequence: Synthetic oligonucleotide
  Sense strand starting at position 773 of SEQ ID NO: 1562080
agagcacuugugugacauc

SEQ ID NO: 1720552 - RNA, 19 nt, Artificial Sequence
  Description of Artificial Sequence: Synthetic oligonucleotide
  Antisense strand to SEQ ID NO: 1720551
gaugucacacaagugcucu

SEQ ID NO: 1720553 - RNA, 19 nt, Artificial Sequence
  Description of Artificial Sequence: Synthetic oligonucleotide
  Sense strand starting at position 1093 of SEQ ID NO: 1562080
cgacuuucccuuuguacga

SEQ ID NO: 1720554 - RNA, 19 nt, Artificial Sequence
  Description of Artificial Sequence: Synthetic oligonucleotide
  Antisense strand to SEQ ID NO: 1720553
ucguacaaagggaaagucg

SEQ ID NO: 1720555 - RNA, 19 nt, Artificial Sequence
  Description of Artificial Sequence: Synthetic oligonucleotide
  Sense strand starting at position 1392 of SEQ ID NO: 1562080
ugaucuucuuuaccaggaa

SEQ ID NO: 1720556 - RNA, 19 nt, Artificial Sequence
  Description of Artificial Sequence: Synthetic oligonucleotide
  Antisense strand to SEQ ID NO: 1720555
uuccugguaaagaagauca

SEQ ID NO: 1720557 - RNA, 19 nt, Artificial Sequence
  Description of Artificial Sequence: Synthetic oligonucleotide
  Sense strand starting at position 1395 of SEQ ID NO: 1562080
ucuucuuuaccaggaagga

SEQ ID NO: 1720558 - RNA, 19 nt, Artificial Sequence
  Description of Artificial Sequence: Synthetic oligonucleotide
  Antisense strand to SEQ ID NO: 1720557
uccuuccugguaaagaaga

SEQ ID NO: 1720559 - RNA, 19 nt, Artificial Sequence
  Description of Artificial Sequence: Synthetic oligonucleotide
  Sense strand starting at position 1920 of SEQ ID NO: 1562080
cgcugagagagguagaaau

SEQ ID NO: 1720560 - RNA, 19 nt, Artificial Sequence
  Description of Artificial Sequence: Synthetic oligonucleotide
  Antisense strand to SEQ ID NO: 1720559
auuucuaccucucucagcg

SEQ ID NO: 1720561 - RNA, 19 nt, Artificial Sequence
  Description of Artificial Sequence: Synthetic oligonucleotide
  Sense strand starting at position 2540 of SEQ ID NO: 1562080
ggcagugucuuucccugaa

SEQ ID NO: 1720562 - RNA, 19 nt, Artificial Sequence
  Description of Artificial Sequence: Synthetic oligonucleotide
  Antisense strand to SEQ ID NO: 1720561
uucagggaaagacacugcc

SEQ ID NO: 1720563 - RNA, 19 nt, Artificial Sequence
  Description of Artificial Sequence: Synthetic oligonucleotide
  Sense strand starting at position 2630 of SEQ ID NO: 1562080
gcuggaacucuuugcaggu

SEQ ID NO: 1720564 - RNA, 19 nt, Artificial Sequence
  Description of Artificial Sequence: Synthetic oligonucleotide
  Antisense strand to SEQ ID NO: 1720563
accugcaaagaguuccagc

SEQ ID NO: 1720565 - RNA, 19 nt, Artificial Sequence
  Description of Artificial Sequence: Synthetic oligonucleotide
  Sense strand starting at position 2802 of SEQ ID NO: 1562080
ugcuuuagcaaguguggga

SEQ ID NO: 1720566 - RNA, 19 nt, Artificial Sequence
  Description of Artificial Sequence: Synthetic oligonucleotide
  Antisense strand to SEQ ID NO: 1720565
ucccacacuugcuaaagca

SEQ ID NO: 1720567 - RNA, 19 nt, Artificial Sequence
  Description of Artificial Sequence: Synthetic oligonucleotide
  Sense strand starting at position 2868 of SEQ ID NO: 1562080
ucucgcugucaauggaauu

SEQ ID NO: 1720568 - RNA, 19 nt, Artificial Sequence
  Description of Artificial Sequence: Synthetic oligonucleotide
  Antisense strand to SEQ ID NO: 1720567
aauuccauugacagcgaga

SEQ ID NO: 1720569 - RNA, 19 nt, Artificial Sequence
  Description of Artificial Sequence: Synthetic oligonucleotide
  Sense strand starting at position 2879 of SEQ ID NO: 1562080
auggaauucugguuaugag

SEQ ID NO: 1720570 - RNA, 19 nt, Artificial Sequence
  Description of Artificial Sequence: Synthetic oligonucleotide
  Antisense strand to SEQ ID NO: 1720569
cucauaaccagaauuccau

SEQ ID NO: 1720571 - RNA, 19 nt, Artificial Sequence
  Description of Artificial Sequence: Synthetic oligonucleotide
  Sense strand starting at position 2930 of SEQ ID NO: 1562080
gggacugggucauccaaua

SEQ ID NO: 1720572 - RNA, 19 nt, Artificial Sequence
  Description of Artificial Sequence: Synthetic oligonucleotide
  Antisense strand to SEQ ID NO: 1720571
uauuggaugacccaguccc

SEQ ID NO: 1720573 - RNA, 19 nt, Artificial Sequence
  Description of Artificial Sequence: Synthetic oligonucleotide
  Sense strand starting at position 2935 of SEQ ID NO: 1562080
ugggucauccaauaccagu

SEQ ID NO: 1720574 - RNA, 19 nt, Artificial Sequence
  Description of Artificial Sequence: Synthetic oligonucleotide
  Antisense strand to SEQ ID NO: 1720573
acugguauuggaugaccca

SEQ ID NO: 1720575 - RNA, 19 nt, Artificial Sequence
  Description of Artificial Sequence: Synthetic oligonucleotide
  Sense strand starting at position 2991 of SEQ ID NO: 1562080
gaggucaugcagugaguca

SEQ ID NO: 1720576 - RNA, 19 nt, Artificial Sequence
  Description of Artificial Sequence: Synthetic oligonucleotide
  Antisense strand to SEQ ID NO: 1720575
ugacucacugcaugaccuc

SEQ ID NO: 1720577 - RNA, 19 nt, Artificial Sequence
  Description of Artificial Sequence: Synthetic oligonucleotide
  Sense strand starting at position 3058 of SEQ ID NO: 1562080
ggccuaucaugguccuuga

SEQ ID NO: 1720578 - RNA, 19 nt, Artificial Sequence
  Description of Artificial Sequence: Synthetic oligonucleotide
  Antisense strand to SEQ ID NO: 1720577
ucaaggaccaugauaggcc

SEQ ID NO: 1720579 - RNA, 19 nt, Artificial Sequence
  Description of Artificial Sequence: Synthetic oligonucleotide
  Sense strand starting at position 3061 of SEQ ID NO: 1562080
cuaucaugguccuugaggu

SEQ ID NO: 1720580 - RNA, 19 nt, Artificial Sequence
  Description of Artificial Sequence: Synthetic oligonucleotide
  Antisense strand to SEQ ID NO: 1720579
accucaaggaccaugauag

SEQ ID NO: 1720581 - RNA, 19 nt, Artificial Sequence
  Description of Artificial Sequence: Synthetic oligonucleotide
  Sense strand starting at position 3074 of SEQ ID NO: 1562080
ugagguguagcccagaagu

SEQ ID NO: 1720582 - RNA, 19 nt, Artificial Sequence
  Description of Artificial Sequence: Synthetic oligonucleotide
  Antisense strand to SEQ ID NO: 1720581
acuucugggcuacaccuca

SEQ ID NO: 1720583 - RNA, 19 nt, Artificial Sequence
  Description of Artificial Sequence: Synthetic oligonucleotide
  Sense strand starting at position 3076 of SEQ ID NO: 1562080
agguguagcccagaagucu

SEQ ID NO: 1720584 - RNA, 19 nt, Artificial Sequence
  Description of Artificial Sequence: Synthetic oligonucleotide
  Antisense strand to SEQ ID NO: 1720583
agacuucugggcuacaccu

SEQ ID NO: 1720585 - RNA, 19 nt, Artificial Sequence
  Description of Artificial Sequence: Synthetic oligonucleotide
  Sense strand starting at position 3085 of SEQ ID NO: 1562080
ccagaagucucagaauaaa

SEQ ID NO: 1720586 - RNA, 19 nt, Artificial Sequence
  Description of Artificial Sequence: Synthetic oligonucleotide
  Antisense strand to SEQ ID NO: 1720585
uuuauucugagacuucugg

SEQ ID NO: 1720587 - RNA, 19 nt, Artificial Sequence
  Description of Artificial Sequence: Synthetic oligonucleotide
  Sense strand starting at position 3365 of SEQ ID NO: 1562080
cgcuccagccuggaugaaa

SEQ ID NO: 1720588 - RNA, 19 nt, Artificial Sequence
  Description of Artificial Sequence: Synthetic oligonucleotide
  Antisense strand to SEQ ID NO: 1720587
uuucauccaggcuggagcg

SEQ ID NO: 1720589 - RNA, 19 nt, Artificial Sequence
  Description of Artificial Sequence: Synthetic oligonucleotide
  Sense strand starting at position 3429 of SEQ ID NO: 1562080
uagaguuuccaaugcagga

SEQ ID NO: 1720590 - RNA, 19 nt, Artificial Sequence
  Description of Artificial Sequence: Synthetic oligonucleotide
  Antisense strand to SEQ ID NO: 1720589
uccugcauuggaaacucua

SEQ ID NO: 1720591 - RNA, 19 nt, Artificial Sequence
  Description of Artificial Sequence: Synthetic oligonucleotide
  Sense strand starting at position 3444 of SEQ ID NO: 1562080
aggaucuguuggccuugaa

SEQ ID NO: 1720592 - RNA, 19 nt, Artificial Sequence
  Description of Artificial Sequence: Synthetic oligonucleotide
  Antisense strand to SEQ ID NO: 1720591
uucaaggccaacagauccu

SEQ ID NO: 1720593 - RNA, 19 nt, Artificial Sequence
  Description of Artificial Sequence: Synthetic oligonucleotide
  Sense strand starting at position 3447 of SEQ ID NO: 1562080
aucuguuggccuugaauau

SEQ ID NO: 1720594 - RNA, 19 nt, Artificial Sequence
  Description of Artificial Sequence: Synthetic oligonucleotide
  Antisense strand to SEQ ID NO: 1720593
auauucaaggccaacagau

SEQ ID NO: 1720595 - RNA, 19 nt, Artificial Sequence
  Description of Artificial Sequence: Synthetic oligonucleotide
  Sense strand starting at position 3448 of SEQ ID NO: 1562080
ucuguuggccuugaauauu

SEQ ID NO: 1720596 - RNA, 19 nt, Artificial Sequence
  Description of Artificial Sequence: Synthetic oligonucleotide
  Antisense strand to SEQ ID NO: 1720595
aauauucaaggccaacaga

SEQ ID NO: 1720597 - RNA, 19 nt, Artificial Sequence
  Description of Artificial Sequence: Synthetic oligonucleotide
  Sense strand starting at position 3499 of SEQ ID NO: 1562080
gcagaagguuugccauuga

SEQ ID NO: 1720598 - RNA, 19 nt, Artificial Sequence
  Description of Artificial Sequence: Synthetic oligonucleotide
  Antisense strand to SEQ ID NO: 1720597
ucaauggcaaaccuucugc

SEQ ID NO: 1720599 - RNA, 19 nt, Artificial Sequence
  Description of Artificial Sequence: Synthetic oligonucleotide
  Sense strand starting at position 3680 of SEQ ID NO: 1562080
ccuguugcauugccucaua

SEQ ID NO: 1720600 - RNA, 19 nt, Artificial Sequence
  Description of Artificial Sequence: Synthetic oligonucleotide
  Antisense strand to SEQ ID NO: 1720599
uaugaggcaaugcaacagg

SEQ ID NO: 1720601 - RNA, 19 nt, Artificial Sequence
  Description of Artificial Sequence: Synthetic oligonucleotide
  Sense strand starting at position 3683 of SEQ ID NO: 1562080
guugcauugccucauaucu

SEQ ID NO: 1720602 - RNA, 19 nt, Artificial Sequence
  Description of Artificial Sequence: Synthetic oligonucleotide
  Antisense strand to SEQ ID NO: 1720601
agauaugaggcaaugcaac

SEQ ID NO: 1720603 - RNA, 19 nt, Artificial Sequence
  Description of Artificial Sequence: Synthetic oligonucleotide
  Sense strand starting at position 3694 of SEQ ID NO: 1562080
ucauaucuugcccauggga

SEQ ID NO: 1720604 - RNA, 19 nt, Artificial Sequence
  Description of Artificial Sequence: Synthetic oligonucleotide
  Antisense strand to SEQ ID NO: 1720603
ucccaugggcaagauauga

SEQ ID NO: 1720605 - RNA, 19 nt, Artificial Sequence
  Description of Artificial Sequence: Synthetic oligonucleotide
  Sense strand starting at position 3696 of SEQ ID NO: 1562080
auaucuugcccaugggaau

SEQ ID NO: 1720606 - RNA, 19 nt, Artificial Sequence
  Description of Artificial Sequence: Synthetic oligonucleotide
  Antisense strand to SEQ ID NO: 1720605
auucccaugggcaagauau

SEQ ID NO: 1720607 - RNA, 19 nt, Artificial Sequence
  Description of Artificial Sequence: Synthetic oligonucleotide
  Sense strand starting at position 3909 of SEQ ID NO: 1562080
ccauguugcccaugggacu

SEQ ID NO: 1720608 - RNA, 19 nt, Artificial Sequence
  Description of Artificial Sequence: Synthetic oligonucleotide
  Antisense strand to SEQ ID NO: 1720607
agucccaugggcaacaugg

SEQ ID NO: 1720609 - RNA, 19 nt, Artificial Sequence
  Description of Artificial Sequence: Synthetic oligonucleotide
  Sense strand starting at position 3934 of SEQ ID NO: 1562080
aaccucugucacugagagu

SEQ ID NO: 1720610 - RNA, 19 nt, Artificial Sequence
  Description of Artificial Sequence: Synthetic oligonucleotide
  Antisense strand to SEQ ID NO: 1720609
acucucagugacagagguu

SEQ ID NO: 1720611 - RNA, 19 nt, Artificial Sequence
  Description of Artificial Sequence: Synthetic oligonucleotide
  Sense strand starting at position 214 of SEQ ID NO: 1562081
guugcuugacccgacacau

SEQ ID NO: 1720612 - RNA, 19 nt, Artificial Sequence
  Description of Artificial Sequence: Synthetic oligonucleotide
  Antisense strand to SEQ ID NO: 1720611
augugucgggucaagcaac

SEQ ID NO: 1720613 - RNA, 19 nt, Artificial Sequence
  Description of Artificial Sequence: Synthetic oligonucleotide
  Sense strand starting at position 314 of SEQ ID NO: 1562081
uuugguuuagguuaaguca

SEQ ID NO: 1720614 - RNA, 19 nt, Artificial Sequence
  Description of Artificial Sequence: Synthetic oligonucleotide
  Antisense strand to SEQ ID NO: 1720613
ugacuuaaccuaaaccaaa

SEQ ID NO: 1720615 - RNA, 19 nt, Artificial Sequence
  Description of Artificial Sequence: Synthetic oligonucleotide
  Sense strand starting at position 317 of SEQ ID NO: 1562081
gguuuagguuaagucauca

SEQ ID NO: 1720616 - RNA, 19 nt, Artificial Sequence
  Description of Artificial Sequence: Synthetic oligonucleotide
  Antisense strand to SEQ ID NO: 1720615
ugaugacuuaaccuaaacc

SEQ ID NO: 1720617 - RNA, 19 nt, Artificial Sequence
  Description of Artificial Sequence: Synthetic oligonucleotide
  Sense strand starting at position 322 of SEQ ID NO: 1562081
agguuaagucaucaccuca

SEQ ID NO: 1720618 - RNA, 19 nt, Artificial Sequence
  Description of Artificial Sequence: Synthetic oligonucleotide
  Antisense strand to SEQ ID NO: 1720617
ugaggugaugacuuaaccu

SEQ ID NO: 1720619 - RNA, 19 nt, Artificial Sequence
  Description of Artificial Sequence: Synthetic oligonucleotide
  Sense strand starting at position 601 of SEQ ID NO: 1562081
guaagauuguuguuggaau

SEQ ID NO: 1720620 - RNA, 19 nt, Artificial Sequence
  Description of Artificial Sequence: Synthetic oligonucleotide
  Antisense strand to SEQ ID NO: 1720619
auuccaacaacaaucuuac

SEQ ID NO: 1720621 - RNA, 19 nt, Artificial Sequence
  Description of Artificial Sequence: Synthetic oligonucleotide
  Sense strand starting at position 603 of SEQ ID NO: 1562081
aagauuguuguuggaauua

SEQ ID NO: 1720622 - RNA, 19 nt, Artificial Sequence
  Description of Artificial Sequence: Synthetic oligonucleotide
  Antisense strand to SEQ ID NO: 1720621
uaauuccaacaacaaucuu

SEQ ID NO: 1720623 - RNA, 19 nt, Artificial Sequence
  Description of Artificial Sequence: Synthetic oligonucleotide
  Sense strand starting at position 645 of SEQ ID NO: 1562081
aaguuauuagagcaauguc

SEQ ID NO: 1720624 - RNA, 19 nt, Artificial Sequence
  Description of Artificial Sequence: Synthetic oligonucleotide
  Antisense strand to SEQ ID NO: 1720623
gacauugcucuaauaacuu

SEQ ID NO: 1720625 - RNA, 19 nt, Artificial Sequence
  Description of Artificial Sequence: Synthetic oligonucleotide
  Sense strand starting at position 689 of SEQ ID NO: 1562081
guuugcaaucaucauggca

SEQ ID NO: 1720626 - RNA, 19 nt, Artificial Sequence
  Description of Artificial Sequence: Synthetic oligonucleotide
  Antisense strand to SEQ ID NO: 1720625
ugccaugaugauugcaaac

SEQ ID NO: 1720627 - RNA, 19 nt, Artificial Sequence
  Description of Artificial Sequence: Synthetic oligonucleotide
  Sense strand starting at position 702 of SEQ ID NO: 1562081
auggcaugccuggaauugu

SEQ ID NO: 1720628 - RNA, 19 nt, Artificial Sequence
  Description of Artificial Sequence: Synthetic oligonucleotide
  Antisense strand to SEQ ID NO: 1720627
acaauuccaggcaugccau

SEQ ID NO: 1720629 - RNA, 19 nt, Artificial Sequence
  Description of Artificial Sequence: Synthetic oligonucleotide
  Sense strand starting at position 713 of SEQ ID NO: 1562081
ggaauugugcuggaaguau

SEQ ID NO: 1720630 - RNA, 19 nt, Artificial Sequence
  Description of Artificial Sequence: Synthetic oligonucleotide
  Antisense strand to SEQ ID NO: 1720629
auacuuccagcacaauucc

SEQ ID NO: 1720631 - RNA, 19 nt, Artificial Sequence
  Description of Artificial Sequence: Synthetic oligonucleotide
  Sense strand starting at position 724 of SEQ ID NO: 1562081
ggaaguauugccuaggguc

SEQ ID NO: 1720632 - RNA, 19 nt, Artificial Sequence
  Description of Artificial Sequence: Synthetic oligonucleotide
  Antisense strand to SEQ ID NO: 1720631
gacccuaggcaauacuucc

SEQ ID NO: 1720633 - RNA, 19 nt, Artificial Sequence
  Description of Artificial Sequence: Synthetic oligonucleotide
  Sense strand starting at position 777 of SEQ ID NO: 1562081
ucaaccuuccgcuaaguaa

SEQ ID NO: 1720634 - RNA, 19 nt, Artificial Sequence
  Description of Artificial Sequence: Synthetic oligonucleotide
  Antisense strand to SEQ ID NO: 1720633
uuacuuagcggaagguuga

SEQ ID NO: 1720635 - RNA, 19 nt, Artificial Sequence
  Description of Artificial Sequence: Synthetic oligonucleotide
  Sense strand starting at position 1068 of SEQ ID NO: 1562081
aaagguuucccugggcuga

SEQ ID NO: 1720636 - RNA, 19 nt, Artificial Sequence
  Description of Artificial Sequence: Synthetic oligonucleotide
  Antisense strand to SEQ ID NO: 1720635
ucagcccagggaaaccuuu

SEQ ID NO: 1720637 - RNA, 19 nt, Artificial Sequence
  Description of Artificial Sequence: Synthetic oligonucleotide
  Sense strand starting at position 1168 of SEQ ID NO: 1562081
ugaacacacuucuugcaga

SEQ ID NO: 1720638 - RNA, 19 nt, Artificial Sequence
  Description of Artificial Sequence: Synthetic oligonucleotide
  Antisense strand to SEQ ID NO: 1720637
ucugcaagaaguguguuca

SEQ ID NO: 1720639 - RNA, 19 nt, Artificial Sequence
  Description of Artificial Sequence: Synthetic oligonucleotide
  Sense strand starting at position 1173 of SEQ ID NO: 1562081
acacuucuugcagaaagca

SEQ ID NO: 1720640 - RNA, 19 nt, Artificial Sequence
  Description of Artificial Sequence: Synthetic oligonucleotide
  Antisense strand to SEQ ID NO: 1720639
ugcuuucugcaagaagugu

SEQ ID NO: 1720641 - RNA, 19 nt, Artificial Sequence
  Description of Artificial Sequence: Synthetic oligonucleotide
  Sense strand starting at position 1210 of SEQ ID NO: 1562081
aaguguugagucuaaacca

SEQ ID NO: 1720642 - RNA, 19 nt, Artificial Sequence
  Description of Artificial Sequence: Synthetic oligonucleotide
  Antisense strand to SEQ ID NO: 1720641
ugguuuagacucaacacuu

SEQ ID NO: 1720643 - RNA, 19 nt, Artificial Sequence
  Description of Artificial Sequence: Synthetic oligonucleotide
  Sense strand starting at position 1352 of SEQ ID NO: 1562081
aggacuuugcccuaaguca

SEQ ID NO: 1720644 - RNA, 19 nt, Artificial Sequence
  Description of Artificial Sequence: Synthetic oligonucleotide
  Antisense strand to SEQ ID NO: 1720643
ugacuuagggcaaaguccu

SEQ ID NO: 1720645 - RNA, 19 nt, Artificial Sequence
  Description of Artificial Sequence: Synthetic oligonucleotide
  Sense strand starting at position 1367 of SEQ ID NO: 1562081
gucacaagucaaugacaga

SEQ ID NO: 1720646 - RNA, 19 nt, Artificial Sequence
  Description of Artificial Sequence: Synthetic oligonucleotide
  Antisense strand to SEQ ID NO: 1720645
ucugucauugacuugugac

SEQ ID NO: 1720647 - RNA, 19 nt, Artificial Sequence
  Description of Artificial Sequence: Synthetic oligonucleotide
  Sense strand starting at position 1612 of SEQ ID NO: 1562081
aagaguugacaccggcuua

SEQ ID NO: 1720648 - RNA, 19 nt, Artificial Sequence
  Description of Artificial Sequence: Synthetic oligonucleotide
  Antisense strand to SEQ ID NO: 1720647
uaagccggugucaacucuu

SEQ ID NO: 1720649 - RNA, 19 nt, Artificial Sequence
  Description of Artificial Sequence: Synthetic oligonucleotide
  Sense strand starting at position 2013 of SEQ ID NO: 1562081
gcgcgccacccaucuuaua

SEQ ID NO: 1720650 - RNA, 19 nt, Artificial Sequence
  Description of Artificial Sequence: Synthetic oligonucleotide
  Antisense strand to SEQ ID NO: 1720649
uauaagauggguggcgcgc

SEQ ID NO: 1720651 - RNA, 19 nt, Artificial Sequence
  Description of Artificial Sequence: Synthetic oligonucleotide
  Sense strand starting at position 2330 of SEQ ID NO: 1562081
ggguguugaguuuagacca

SEQ ID NO: 1720652 - RNA, 19 nt, Artificial Sequence
  Description of Artificial Sequence: Synthetic oligonucleotide
  Antisense strand to SEQ ID NO: 1720651
uggucuaaacucaacaccc

SEQ ID NO: 1720653 - RNA, 19 nt, Artificial Sequence
  Description of Artificial Sequence: Synthetic oligonucleotide
  Sense strand starting at position 2437 of SEQ ID NO: 1562081
ucuguaaagggcuaaauau

SEQ ID NO: 1720654 - RNA, 19 nt, Artificial Sequence
  Description of Artificial Sequence: Synthetic oligonucleotide
  Antisense strand to SEQ ID NO: 1720653
auauuuagcccuuuacaga

SEQ ID NO: 1720655 - RNA, 19 nt, Artificial Sequence
  Description of Artificial Sequence: Synthetic oligonucleotide
  Sense strand starting at position 2894 of SEQ ID NO: 1562081
gaaaguugcagugagccau

SEQ ID NO: 1720656 - RNA, 19 nt, Artificial Sequence
  Description of Artificial Sequence: Synthetic oligonucleotide
  Antisense strand to SEQ ID NO: 1720655
auggcucacugcaacuuuc

SEQ ID NO: 1720657 - RNA, 19 nt, Artificial Sequence
  Description of Artificial Sequence: Synthetic oligonucleotide
  Sense strand starting at position 3469 of SEQ ID NO: 1562081
guuugaucucucugagaac

SEQ ID NO: 1720658 - RNA, 19 nt, Artificial Sequence
  Description of Artificial Sequence: Synthetic oligonucleotide
  Antisense strand to SEQ ID NO: 1720657
guucucagagagaucaaac

SEQ ID NO: 1720659 - RNA, 19 nt, Artificial Sequence
  Description of Artificial Sequence: Synthetic oligonucleotide
  Sense strand starting at position 3483 of SEQ ID NO: 1562081
agaacuggucugcaaguuu

SEQ ID NO: 1720660 - RNA, 19 nt, Artificial Sequence
  Description of Artificial Sequence: Synthetic oligonucleotide
  Antisense strand to SEQ ID NO: 1720659
aaacuugcagaccaguucu

SEQ ID NO: 1720661 - RNA, 19 nt, Artificial Sequence
  Description of Artificial Sequence: Synthetic oligonucleotide
  Sense strand starting at position 3506 of SEQ ID NO: 1562081
ccauucuuaggguaagcuu

SEQ ID NO: 1720662 - RNA, 19 nt, Artificial Sequence
  Description of Artificial Sequence: Synthetic oligonucleotide
  Antisense strand to SEQ ID NO: 1720661
aagcuuacccuaagaaugg

SEQ ID NO: 1720663 - RNA, 19 nt, Artificial Sequence
  Description of Artificial Sequence: Synthetic oligonucleotide
  Sense strand starting at position 3620 of SEQ ID NO: 1562081
gugcuauauggagacugua

SEQ ID NO: 1720664 - RNA, 19 nt, Artificial Sequence
  Description of Artificial Sequence: Synthetic oligonucleotide
  Antisense strand to SEQ ID NO: 1720663
uacagucuccauauagcac

SEQ ID NO: 1720665 - RNA, 19 nt, Artificial Sequence
  Description of Artificial Sequence: Synthetic oligonucleotide
  Sense strand starting at position 3660 of SEQ ID NO: 1562081
acacguacuguuggaauua

SEQ ID NO: 1720666 - RNA, 19 nt, Artificial Sequence
  Description of Artificial Sequence: Synthetic oligonucleotide
  Antisense strand to SEQ ID NO: 1720665
uaauuccaacaguacgugu

SEQ ID NO: 1720667 - RNA, 19 nt, Artificial Sequence
  Description of Artificial Sequence: Synthetic oligonucleotide
  Sense strand starting at position 3673 of SEQ ID NO: 1562081
gaauuauugcaggguguga

SEQ ID NO: 1720668 - RNA, 19 nt, Artificial Sequence
  Description of Artificial Sequence: Synthetic oligonucleotide
  Antisense strand to SEQ ID NO: 1720667
ucacacccugcaauaauuc

SEQ ID NO: 1720669 - RNA, 19 nt, Artificial Sequence
  Description of Artificial Sequence: Synthetic oligonucleotide
  Sense strand starting at position 3698 of SEQ ID NO: 1562081
gcauucuacgaugaucgaa

SEQ ID NO: 1720670 - RNA, 19 nt, Artificial Sequence
  Description of Artificial Sequence: Synthetic oligonucleotide
  Antisense strand to SEQ ID NO: 1720669
uucgaucaucguagaaugc

SEQ ID NO: 1720671 - RNA, 19 nt, Artificial Sequence
  Description of Artificial Sequence: Synthetic oligonucleotide
  Sense strand starting at position 3736 of SEQ ID NO: 1562081
cugucucucccugacuuau

SEQ ID NO: 1720672 - RNA, 19 nt, Artificial Sequence
  Description of Artificial Sequence: Synthetic oligonucleotide
  Antisense strand to SEQ ID NO: 1720671
auaagucagggagagacag

SEQ ID NO: 1720673 - RNA, 19 nt, Artificial Sequence
  Description of Artificial Sequence: Synthetic oligonucleotide
  Sense strand starting at position 3762 of SEQ ID NO: 1562081
ucuuucuaaggguguaaca

SEQ ID NO: 1720674 - RNA, 19 nt, Artificial Sequence
  Description of Artificial Sequence: Synthetic oligonucleotide
  Antisense strand to SEQ ID NO: 1720673
uguuacacccuuagaaaga

SEQ ID NO: 1720675 - RNA, 19 nt, Artificial Sequence
  Description of Artificial Sequence: Synthetic oligonucleotide
  Sense strand starting at position 3764 of SEQ ID NO: 1562081
uuucuaaggguguaacaua

SEQ ID NO: 1720676 - RNA, 19 nt, Artificial Sequence
  Description of Artificial Sequence: Synthetic oligonucleotide
  Antisense strand to SEQ ID NO: 1720675
uauguuacacccuuagaaa

SEQ ID NO: 1720677 - RNA, 19 nt, Artificial Sequence
  Description of Artificial Sequence: Synthetic oligonucleotide
  Sense strand starting at position 3772 of SEQ ID NO: 1562081
gguguaacauagccuuaga

SEQ ID NO: 1720678 - RNA, 19 nt, Artificial Sequence
  Description of Artificial Sequence: Synthetic oligonucleotide
  Antisense strand to SEQ ID NO: 1720677
ucuaaggcuauguuacacc

SEQ ID NO: 1720679 - RNA, 19 nt, Artificial Sequence
  Description of Artificial Sequence: Synthetic oligonucleotide
  Sense strand starting at position 3775 of SEQ ID NO: 1562081
guaacauagccuuagaagu

SEQ ID NO: 1720680 - RNA, 19 nt, Artificial Sequence
  Description of Artificial Sequence: Synthetic oligonucleotide
  Antisense strand to SEQ ID NO: 1720679
acuucuaaggcuauguuac

SEQ ID NO: 1720681 - RNA, 19 nt, Artificial Sequence
  Description of Artificial Sequence: Synthetic oligonucleotide
  Sense strand starting at position 3783 of SEQ ID NO: 1562081
gccuuagaaguaggacauu

SEQ ID NO: 1720682 - RNA, 19 nt, Artificial Sequence
  Description of Artificial Sequence: Synthetic oligonucleotide
  Antisense strand to SEQ ID NO: 1720681
aauguccuacuucuaaggc

SEQ ID NO: 1720683 - RNA, 19 nt, Artificial Sequence
  Description of Artificial Sequence: Synthetic oligonucleotide
  Sense strand starting at position 3833 of SEQ ID NO: 1562081
uacuuuguggaguggagaa

SEQ ID NO: 1720684 - RNA, 19 nt, Artificial Sequence
  Description of Artificial Sequence: Synthetic oligonucleotide
  Antisense strand to SEQ ID NO: 1720683
uucuccacuccacaaagua

SEQ ID NO: 1720685 - RNA, 19 nt, Artificial Sequence
  Description of Artificial Sequence: Synthetic oligonucleotide
  Sense strand starting at position 3835 of SEQ ID NO: 1562081
cuuuguggaguggagaauu

SEQ ID NO: 1720686 - RNA, 19 nt, Artificial Sequence
  Description of Artificial Sequence: Synthetic oligonucleotide
  Antisense strand to SEQ ID NO: 1720685
aauucuccacuccacaaag

SEQ ID NO: 1720687 - RNA, 19 nt, Artificial Sequence
  Description of Artificial Sequence: Synthetic oligonucleotide
  Sense strand starting at position 3914 of SEQ ID NO: 1562081
cagagaaccuuggcaguaa

SEQ ID NO: 1720688 - RNA, 19 nt, Artificial Sequence
  Description of Artificial Sequence: Synthetic oligonucleotide
  Antisense strand to SEQ ID NO: 1720687
uuacugccaagguucucug

SEQ ID NO: 1720689 - RNA, 19 nt, Artificial Sequence
  Description of Artificial Sequence: Synthetic oligonucleotide
  Sense strand starting at position 3918 of SEQ ID NO: 1562081
gaaccuuggcaguaaagca

SEQ ID NO: 1720690 - RNA, 19 nt, Artificial Sequence
  Description of Artificial Sequence: Synthetic oligonucleotide
  Antisense strand to SEQ ID NO: 1720689
ugcuuuacugccaagguuc

SEQ ID NO: 1720691 - RNA, 19 nt, Artificial Sequence
  Description of Artificial Sequence: Synthetic oligonucleotide
  Sense strand starting at position 343 of SEQ ID NO: 1562082
ugugauuaauaucugggua

SEQ ID NO: 1720692 - RNA, 19 nt, Artificial Sequence
  Description of Artificial Sequence: Synthetic oligonucleotide
  Antisense strand to SEQ ID NO: 1720691
uacccagauauuaaucaca

SEQ ID NO: 1720693 - RNA, 19 nt, Artificial Sequence
  Description of Artificial Sequence: Synthetic oligonucleotide
  Sense strand starting at position 344 of SEQ ID NO: 1562082
gugauuaauaucuggguau

SEQ ID NO: 1720694 - RNA, 19 nt, Artificial Sequence
  Description of Artificial Sequence: Synthetic oligonucleotide
  Antisense strand to SEQ ID NO: 1720693
auacccagauauuaaucac

SEQ ID NO: 1720695 - RNA, 19 nt, Artificial Sequence
  Description of Artificial Sequence: Synthetic oligonucleotide
  Sense strand starting at position 473 of SEQ ID NO: 1562082
cugaauaaaucagugguuu

SEQ ID NO: 1720696 - RNA, 19 nt, Artificial Sequence
  Description of Artificial Sequence: Synthetic oligonucleotide
  Antisense strand to SEQ ID NO: 1720695
aaaccacugauuuauucag

SEQ ID NO: 1720697 - RNA, 19 nt, Artificial Sequence
  Description of Artificial Sequence: Synthetic oligonucleotide
  Sense strand starting at position 595 of SEQ ID NO: 1562082
uccuguaauggaugggaca

SEQ ID NO: 1720698 - RNA, 19 nt, Artificial Sequence
  Description of Artificial Sequence: Synthetic oligonucleotide
  Antisense strand to SEQ ID NO: 1720697
ugucccauccauuacagga

SEQ ID NO: 1720699 - RNA, 19 nt, Artificial Sequence
  Description of Artificial Sequence: Synthetic oligonucleotide
  Sense strand starting at position 597 of SEQ ID NO: 1562082
cuguaauggaugggacagu

SEQ ID NO: 1720700 - RNA, 19 nt, Artificial Sequence
  Description of Artificial Sequence: Synthetic oligonucleotide
  Antisense strand to SEQ ID NO: 1720699
acugucccauccauuacag

SEQ ID NO: 1720701 - RNA, 19 nt, Artificial Sequence
  Description of Artificial Sequence: Synthetic oligonucleotide
  Sense strand starting at position 751 of SEQ ID NO: 1562082
acacuagacugucuggaaa

SEQ ID NO: 1720702 - RNA, 19 nt, Artificial Sequence
  Description of Artificial Sequence: Synthetic oligonucleotide
  Antisense strand to SEQ ID NO: 1720701
uuuccagacagucuagugu

SEQ ID NO: 1720703 - RNA, 19 nt, Artificial Sequence
  Description of Artificial Sequence: Synthetic oligonucleotide
  Sense strand starting at position 847 of SEQ ID NO: 1562082
gggugagucacccgaacag

SEQ ID NO: 1720704 - RNA, 19 nt, Artificial Sequence
  Description of Artificial Sequence: Synthetic oligonucleotide
  Antisense strand to SEQ ID NO: 1720703
cuguucgggugacucaccc

SEQ ID NO: 1720705 - RNA, 19 nt, Artificial Sequence
  Description of Artificial Sequence: Synthetic oligonucleotide
  Sense strand starting at position 975 of SEQ ID NO: 1562082
agcugaauauugucuucua

SEQ ID NO: 1720706 - RNA, 19 nt, Artificial Sequence
  Description of Artificial Sequence: Synthetic oligonucleotide
  Antisense strand to SEQ ID NO: 1720705
uagaagacaauauucagcu

SEQ ID NO: 1720707 - RNA, 19 nt, Artificial Sequence
  Description of Artificial Sequence: Synthetic oligonucleotide
  Sense strand starting at position 976 of SEQ ID NO: 1562082
gcugaauauugucuucuag

SEQ ID NO: 1720708 - RNA, 19 nt, Artificial Sequence
  Description of Artificial Sequence: Synthetic oligonucleotide
  Antisense strand to SEQ ID NO: 1720707
cuagaagacaauauucagc

SEQ ID NO: 1720709 - RNA, 19 nt, Artificial Sequence
  Description of Artificial Sequence: Synthetic oligonucleotide
  Sense strand starting at position 978 of SEQ ID NO: 1562082
ugaauauugucuucuagua

SEQ ID NO: 1720710 - RNA, 19 nt, Artificial Sequence
  Description of Artificial Sequence: Synthetic oligonucleotide
  Antisense strand to SEQ ID NO: 1720709
uacuagaagacaauauuca

SEQ ID NO: 1720711 - RNA, 19 nt, Artificial Sequence
  Description of Artificial Sequence: Synthetic oligonucleotide
  Sense strand starting at position 1000 of SEQ ID NO: 1562082
cuaagcugauuccuaaguu

SEQ ID NO: 1720712 - RNA, 19 nt, Artificial Sequence
  Description of Artificial Sequence: Synthetic oligonucleotide
  Antisense strand to SEQ ID NO: 1720711
aacuuaggaaucagcuuag

SEQ ID NO: 1720713 - RNA, 19 nt, Artificial Sequence
  Description of Artificial Sequence: Synthetic oligonucleotide
  Sense strand starting at position 2142 of SEQ ID NO: 1562082
gccuguuaugagggacuca

SEQ ID NO: 1720714 - RNA, 19 nt, Artificial Sequence
  Description of Artificial Sequence: Synthetic oligonucleotide
  Antisense strand to SEQ ID NO: 1720713
ugagucccucauaacaggc

SEQ ID NO: 1720715 - RNA, 19 nt, Artificial Sequence
  Description of Artificial Sequence: Synthetic oligonucleotide
  Sense strand starting at position 2334 of SEQ ID NO: 1562082
guuuaccucgcagauuauc

SEQ ID NO: 1720716 - RNA, 19 nt, Artificial Sequence
  Description of Artificial Sequence: Synthetic oligonucleotide
  Antisense strand to SEQ ID NO: 1720715
gauaaucugcgagguaaac

SEQ ID NO: 1720717 - RNA, 19 nt, Artificial Sequence
  Description of Artificial Sequence: Synthetic oligonucleotide
  Sense strand starting at position 2352 of SEQ ID NO: 1562082
ccaaacuggacucgugauu

SEQ ID NO: 1720718 - RNA, 19 nt, Artificial Sequence
  Description of Artificial Sequence: Synthetic oligonucleotide
  Antisense strand to SEQ ID NO: 1720717
aaucacgaguccaguuugg

SEQ ID NO: 1720719 - RNA, 19 nt, Artificial Sequence
  Description of Artificial Sequence: Synthetic oligonucleotide
  Sense strand starting at position 2414 of SEQ ID NO: 1562082
acccaugggcuaugucaga

SEQ ID NO: 1720720 - RNA, 19 nt, Artificial Sequence
  Description of Artificial Sequence: Synthetic oligonucleotide
  Antisense strand to SEQ ID NO: 1720719
ucugacauagcccaugggu

SEQ ID NO: 1720721 - RNA, 19 nt, Artificial Sequence
  Description of Artificial Sequence: Synthetic oligonucleotide
  Sense strand starting at position 2425 of SEQ ID NO: 1562082
augucagaaaucugggagu

SEQ ID NO: 1720722 - RNA, 19 nt, Artificial Sequence
  Description of Artificial Sequence: Synthetic oligonucleotide
  Antisense strand to SEQ ID NO: 1720721
acucccagauuucugacau

SEQ ID NO: 1720723 - RNA, 19 nt, Artificial Sequence
  Description of Artificial Sequence: Synthetic oligonucleotide
  Sense strand starting at position 2493 of SEQ ID NO: 1562082
cucaaaucucugugaccug

SEQ ID NO: 1720724 - RNA, 19 nt, Artificial Sequence
  Description of Artificial Sequence: Synthetic oligonucleotide
  Antisense strand to SEQ ID NO: 1720723
caggucacagagauuugag

SEQ ID NO: 1720725 - RNA, 19 nt, Artificial Sequence
  Description of Artificial Sequence: Synthetic oligonucleotide
  Sense strand starting at position 2581 of SEQ ID NO: 1562082
agacuacuuuagguugagu

SEQ ID NO: 1720726 - RNA, 19 nt, Artificial Sequence
  Description of Artificial Sequence: Synthetic oligonucleotide
  Antisense strand to SEQ ID NO: 1720725
acucaaccuaaaguagucu

SEQ ID NO: 1720727 - RNA, 19 nt, Artificial Sequence
  Description of Artificial Sequence: Synthetic oligonucleotide
  Sense strand starting at position 2586 of SEQ ID NO: 1562082
acuuuagguugaguccuaa

SEQ ID NO: 1720728 - RNA, 19 nt, Artificial Sequence
  Description of Artificial Sequence: Synthetic oligonucleotide
  Antisense strand to SEQ ID NO: 1720727
uuaggacucaaccuaaagu

SEQ ID NO: 1720729 - RNA, 19 nt, Artificial Sequence
  Description of Artificial Sequence: Synthetic oligonucleotide
  Sense strand starting at position 2643 of SEQ ID NO: 1562082
gugcuauucccucugucuu

SEQ ID NO: 1720730 - RNA, 19 nt, Artificial Sequence
  Description of Artificial Sequence: Synthetic oligonucleotide
  Antisense strand to SEQ ID NO: 1720729
aagacagagggaauagcac

SEQ ID NO: 1720731 - RNA, 19 nt, Artificial Sequence
  Description of Artificial Sequence: Synthetic oligonucleotide
  Sense strand starting at position 2771 of SEQ ID NO: 1562082
acgacagcauuucuuguau

SEQ ID NO: 1720732 - RNA, 19 nt, Artificial Sequence
  Description of Artificial Sequence: Synthetic oligonucleotide
  Antisense strand to SEQ ID NO: 1720731
auacaagaaaugcugucgu

SEQ ID NO: 1720733 - RNA, 19 nt, Artificial Sequence
  Description of Artificial Sequence: Synthetic oligonucleotide
  Sense strand starting at position 2902 of SEQ ID NO: 1562082
cucacuggucaggaaaugu

SEQ ID NO: 1720734 - RNA, 19 nt, Artificial Sequence
  Description of Artificial Sequence: Synthetic oligonucleotide
  Antisense strand to SEQ ID NO: 1720733
acauuuccugaccagugag

SEQ ID NO: 1720735 - RNA, 19 nt, Artificial Sequence
  Description of Artificial Sequence: Synthetic oligonucleotide
  Sense strand starting at position 2978 of SEQ ID NO: 1562082
auuacuauuucugaaagga

SEQ ID NO: 1720736 - RNA, 19 nt, Artificial Sequence
  Description of Artificial Sequence: Synthetic oligonucleotide
  Antisense strand to SEQ ID NO: 1720735
uccuuucagaaauaguaau

SEQ ID NO: 1720737 - RNA, 19 nt, Artificial Sequence
  Description of Artificial Sequence: Synthetic oligonucleotide
  Sense strand starting at position 3069 of SEQ ID NO: 1562082
uguguuugcagucaauaag

SEQ ID NO: 1720738 - RNA, 19 nt, Artificial Sequence
  Description of Artificial Sequence: Synthetic oligonucleotide
  Antisense strand to SEQ ID NO: 1720737
cuuauugacugcaaacaca

SEQ ID NO: 1720739 - RNA, 19 nt, Artificial Sequence
  Description of Artificial Sequence: Synthetic oligonucleotide
  Sense strand starting at position 3075 of SEQ ID NO: 1562082
ugcagucaauaaguagaaa

SEQ ID NO: 1720740 - RNA, 19 nt, Artificial Sequence
  Description of Artificial Sequence: Synthetic oligonucleotide
  Antisense strand to SEQ ID NO: 1720739
uuucuacuuauugacugca

SEQ ID NO: 1720741 - RNA, 19 nt, Artificial Sequence
  Description of Artificial Sequence: Synthetic oligonucleotide
  Sense strand starting at position 3086 of SEQ ID NO: 1562082
aguagaaagucuuucgaag

SEQ ID NO: 1720742 - RNA, 19 nt, Artificial Sequence
  Description of Artificial Sequence: Synthetic oligonucleotide
  Antisense strand to SEQ ID NO: 1720741
cuucgaaagacuuucuacu

SEQ ID NO: 1720743 - RNA, 19 nt, Artificial Sequence
  Description of Artificial Sequence: Synthetic oligonucleotide
  Sense strand starting at position 3176 of SEQ ID NO: 1562082
auaaucugacaguggaagu

SEQ ID NO: 1720744 - RNA, 19 nt, Artificial Sequence
  Description of Artificial Sequence: Synthetic oligonucleotide
  Antisense strand to SEQ ID NO: 1720743
acuuccacugucagauuau

SEQ ID NO: 1720745 - RNA, 19 nt, Artificial Sequence
  Description of Artificial Sequence: Synthetic oligonucleotide
  Sense strand starting at position 3212 of SEQ ID NO: 1562082
gauggcuucccacaaguaa

SEQ ID NO: 1720746 - RNA, 19 nt, Artificial Sequence
  Description of Artificial Sequence: Synthetic oligonucleotide
  Antisense strand to SEQ ID NO: 1720745
uuacuugugggaagccauc

SEQ ID NO: 1720747 - RNA, 19 nt, Artificial Sequence
  Description of Artificial Sequence: Synthetic oligonucleotide
  Sense strand starting at position 3226 of SEQ ID NO: 1562082
aguaauugguuccuccgaa

SEQ ID NO: 1720748 - RNA, 19 nt, Artificial Sequence
  Description of Artificial Sequence: Synthetic oligonucleotide
  Antisense strand to SEQ ID NO: 1720747
uucggaggaaccaauuacu

SEQ ID NO: 1720749 - RNA, 19 nt, Artificial Sequence
  Description of Artificial Sequence: Synthetic oligonucleotide
  Sense strand starting at position 3227 of SEQ ID NO: 1562082
guaauugguuccuccgaaa

SEQ ID NO: 1720750 - RNA, 19 nt, Artificial Sequence
  Description of Artificial Sequence: Synthetic oligonucleotide
  Antisense strand to SEQ ID NO: 1720749
uuucggaggaaccaauuac

SEQ ID NO: 1720751 - RNA, 19 nt, Artificial Sequence
  Description of Artificial Sequence: Synthetic oligonucleotide
  Sense strand starting at position 3450 of SEQ ID NO: 1562082
uggaacacuuuguuccaaa

SEQ ID NO: 1720752 - RNA, 19 nt, Artificial Sequence
  Description of Artificial Sequence: Synthetic oligonucleotide
  Antisense strand to SEQ ID NO: 1720751
uuuggaacaaaguguucca

SEQ ID NO: 1720753 - RNA, 19 nt, Artificial Sequence
  Description of Artificial Sequence: Synthetic oligonucleotide
  Sense strand starting at position 3451 of SEQ ID NO: 1562082
ggaacacuuuguuccaaag

SEQ ID NO: 1720754 - RNA, 19 nt, Artificial Sequence
  Description of Artificial Sequence: Synthetic oligonucleotide
  Antisense strand to SEQ ID NO: 1720753
cuuuggaacaaaguguucc

SEQ ID NO: 1720755 - RNA, 19 nt, Artificial Sequence
  Description of Artificial Sequence: Synthetic oligonucleotide
  Sense strand starting at position 3510 of SEQ ID NO: 1562082
ucauccguccuuuacaaga

SEQ ID NO: 1720756 - RNA, 19 nt, Artificial Sequence
  Description of Artificial Sequence: Synthetic oligonucleotide
  Antisense strand to SEQ ID NO: 1720755
ucuuguaaaggacggauga

SEQ ID NO: 1720757 - RNA, 19 nt, Artificial Sequence
  Description of Artificial Sequence: Synthetic oligonucleotide
  Sense strand starting at position 3539 of SEQ ID NO: 1562082
gagggaagcguggguuaga

SEQ ID NO: 1720758 - RNA, 19 nt, Artificial Sequence
  Description of Artificial Sequence: Synthetic oligonucleotide
  Antisense strand to SEQ ID NO: 1720757
ucuaacccacgcuucccuc

SEQ ID NO: 1720759 - RNA, 19 nt, Artificial Sequence
  Description of Artificial Sequence: Synthetic oligonucleotide
  Sense strand starting at position 3554 of SEQ ID NO: 1562082
uagagugucagaggaauag

SEQ ID NO: 1720760 - RNA, 19 nt, Artificial Sequence
  Description of Artificial Sequence: Synthetic oligonucleotide
  Antisense strand to SEQ ID NO: 1720759
cuauuccucugacacucua

SEQ ID NO: 1720761 - RNA, 19 nt, Artificial Sequence
  Description of Artificial Sequence: Synthetic oligonucleotide
  Sense strand starting at position 3583 of SEQ ID NO: 1562082
gccaaauuagcccagggau

SEQ ID NO: 1720762 - RNA, 19 nt, Artificial Sequence
  Description of Artificial Sequence: Synthetic oligonucleotide
  Antisense strand to SEQ ID NO: 1720761
aucccugggcuaauuuggc

SEQ ID NO: 1720763 - RNA, 19 nt, Artificial Sequence
  Description of Artificial Sequence: Synthetic oligonucleotide
  Sense strand starting at position 3585 of SEQ ID NO: 1562082
caaauuagcccagggaugu

SEQ ID NO: 1720764 - RNA, 19 nt, Artificial Sequence
  Description of Artificial Sequence: Synthetic oligonucleotide
  Antisense strand to SEQ ID NO: 1720763
acaucccugggcuaauuug

SEQ ID NO: 1720765 - RNA, 19 nt, Artificial Sequence
  Description of Artificial Sequence: Synthetic oligonucleotide
  Sense strand starting at position 3753 of SEQ ID NO: 1562082
gacugcuucugacuuguga

SEQ ID NO: 1720766 - RNA, 19 nt, Artificial Sequence
  Description of Artificial Sequence: Synthetic oligonucleotide
  Antisense strand to SEQ ID NO: 1720765
ucacaagucagaagcaguc

SEQ ID NO: 1720767 - RNA, 19 nt, Artificial Sequence
  Description of Artificial Sequence: Synthetic oligonucleotide
  Sense strand starting at position 3809 of SEQ ID NO: 1562082
cuuccuuuguaaucuggau

SEQ ID NO: 1720768 - RNA, 19 nt, Artificial Sequence
  Description of Artificial Sequence: Synthetic oligonucleotide
  Antisense strand to SEQ ID NO: 1720767
auccagauuacaaaggaag

SEQ ID NO: 1720769 - RNA, 19 nt, Artificial Sequence
  Description of Artificial Sequence: Synthetic oligonucleotide
  Sense strand starting at position 3877 of SEQ ID NO: 1562082
aguuaagguguauauggaa

SEQ ID NO: 1720770 - RNA, 19 nt, Artificial Sequence
  Description of Artificial Sequence: Synthetic oligonucleotide
  Antisense strand to SEQ ID NO: 1720769
uuccauauacaccuuaacu

SEQ ID NO: 1720771 - RNA, 19 nt, Artificial Sequence
  Description of Artificial Sequence: Synthetic oligonucleotide
  Sense strand starting at position 157 of SEQ ID NO: 1562083
agcaauagcuauuauguau

SEQ ID NO: 1720772 - RNA, 19 nt, Artificial Sequence
  Description of Artificial Sequence: Synthetic oligonucleotide
  Antisense strand to SEQ ID NO: 1720771
auacauaauagcuauugcu

SEQ ID NO: 1720773 - RNA, 19 nt, Artificial Sequence
  Description of Artificial Sequence: Synthetic oligonucleotide
  Sense strand starting at position 164 of SEQ ID NO: 1562083
gcuauuauguauuaagcac

SEQ ID NO: 1720774 - RNA, 19 nt, Artificial Sequence
  Description of Artificial Sequence: Synthetic oligonucleotide
  Antisense strand to SEQ ID NO: 1720773
gugcuuaauacauaauagc

SEQ ID NO: 1720775 - RNA, 19 nt, Artificial Sequence
  Description of Artificial Sequence: Synthetic oligonucleotide
  Sense strand starting at position 442 of SEQ ID NO: 1562083
ucucgugcuccuggacuua

SEQ ID NO: 1720776 - RNA, 19 nt, Artificial Sequence
  Description of Artificial Sequence: Synthetic oligonucleotide
  Antisense strand to SEQ ID NO: 1720775
uaaguccaggagcacgaga

SEQ ID NO: 1720777 - RNA, 19 nt, Artificial Sequence
  Description of Artificial Sequence: Synthetic oligonucleotide
  Sense strand starting at position 528 of SEQ ID NO: 1562083
cgaacaccgucuuacugaa

SEQ ID NO: 1720778 - RNA, 19 nt, Artificial Sequence
  Description of Artificial Sequence: Synthetic oligonucleotide
  Antisense strand to SEQ ID NO: 1720777
uucaguaagacgguguucg

SEQ ID NO: 1720779 - RNA, 19 nt, Artificial Sequence
  Description of Artificial Sequence: Synthetic oligonucleotide
  Sense strand starting at position 795 of SEQ ID NO: 1562083
ccaugcuguccuugugcau

SEQ ID NO: 1720780 - RNA, 19 nt, Artificial Sequence
  Description of Artificial Sequence: Synthetic oligonucleotide
  Antisense strand to SEQ ID NO: 1720779
augcacaaggacagcaugg

SEQ ID NO: 1720781 - RNA, 19 nt, Artificial Sequence
  Description of Artificial Sequence: Synthetic oligonucleotide
  Sense strand starting at position 930 of SEQ ID NO: 1562083
cgacaaucuuaucgccuga

SEQ ID NO: 1720782 - RNA, 19 nt, Artificial Sequence
  Description of Artificial Sequence: Synthetic oligonucleotide
  Antisense strand to SEQ ID NO: 1720781
ucaggcgauaagauugucg

SEQ ID NO: 1720783 - RNA, 19 nt, Artificial Sequence
  Description of Artificial Sequence: Synthetic oligonucleotide
  Sense strand starting at position 969 of SEQ ID NO: 1562083
gggcuuugugcgagcucca

SEQ ID NO: 1720784 - RNA, 19 nt, Artificial Sequence
  Description of Artificial Sequence: Synthetic oligonucleotide
  Antisense strand to SEQ ID NO: 1720783
uggagcucgcacaaagccc

SEQ ID NO: 1720785 - RNA, 19 nt, Artificial Sequence
  Description of Artificial Sequence: Synthetic oligonucleotide
  Sense strand starting at position 1056 of SEQ ID NO: 1562083
ggguguuggccuggaccaa

SEQ ID NO: 1720786 - RNA, 19 nt, Artificial Sequence
  Description of Artificial Sequence: Synthetic oligonucleotide
  Antisense strand to SEQ ID NO: 1720785
uugguccaggccaacaccc

SEQ ID NO: 1720787 - RNA, 19 nt, Artificial Sequence
  Description of Artificial Sequence: Synthetic oligonucleotide
  Sense strand starting at position 1262 of SEQ ID NO: 1562083
gccucauaguuaggaagca

SEQ ID NO: 1720788 - RNA, 19 nt, Artificial Sequence
  Description of Artificial Sequence: Synthetic oligonucleotide
  Antisense strand to SEQ ID NO: 1720787
ugcuuccuaacuaugaggc

SEQ ID NO: 1720789 - RNA, 19 nt, Artificial Sequence
  Description of Artificial Sequence: Synthetic oligonucleotide
  Sense strand starting at position 2147 of SEQ ID NO: 1562083
cacaguaaauagugagcaa

SEQ ID NO: 1720790 - RNA, 19 nt, Artificial Sequence
  Description of Artificial Sequence: Synthetic oligonucleotide
  Antisense strand to SEQ ID NO: 1720789
uugcucacuauuuacugug

SEQ ID NO: 1720791 - RNA, 19 nt, Artificial Sequence
  Description of Artificial Sequence: Synthetic oligonucleotide
  Sense strand starting at position 2266 of SEQ ID NO: 1562083
uaaagaugguacuggaaga

SEQ ID NO: 1720792 - RNA, 19 nt, Artificial Sequence
  Description of Artificial Sequence: Synthetic oligonucleotide
  Antisense strand to SEQ ID NO: 1720791
ucuuccaguaccaucuuua

SEQ ID NO: 1720793 - RNA, 19 nt, Artificial Sequence
  Description of Artificial Sequence: Synthetic oligonucleotide
  Sense strand starting at position 2433 of SEQ ID NO: 1562083
uuagcaagguccugggaua

SEQ ID NO: 1720794 - RNA, 19 nt, Artificial Sequence
  Description of Artificial Sequence: Synthetic oligonucleotide
  Antisense strand to SEQ ID NO: 1720793
uaucccaggaccuugcuaa

SEQ ID NO: 1720795 - RNA, 19 nt, Artificial Sequence
  Description of Artificial Sequence: Synthetic oligonucleotide
  Sense strand starting at position 2474 of SEQ ID NO: 1562083
auuguacuucuguauacua

SEQ ID NO: 1720796 - RNA, 19 nt, Artificial Sequence
  Description of Artificial Sequence: Synthetic oligonucleotide
  Antisense strand to SEQ ID NO: 1720795
uaguauacagaaguacaau

SEQ ID NO: 1720797 - RNA, 19 nt, Artificial Sequence
  Description of Artificial Sequence: Synthetic oligonucleotide
  Sense strand starting at position 3106 of SEQ ID NO: 1562083
aagaaauacguguaaaucu

SEQ ID NO: 1720798 - RNA, 19 nt, Artificial Sequence
  Description of Artificial Sequence: Synthetic oligonucleotide
  Antisense strand to SEQ ID NO: 1720797
agauuuacacguauuucuu

SEQ ID NO: 1720799 - RNA, 19 nt, Artificial Sequence
  Description of Artificial Sequence: Synthetic oligonucleotide
  Sense strand starting at position 3199 of SEQ ID NO: 1562083
aauggaagauucucuguau

SEQ ID NO: 1720800 - RNA, 19 nt, Artificial Sequence
  Description of Artificial Sequence: Synthetic oligonucleotide
  Antisense strand to SEQ ID NO: 1720799
auacagagaaucuuccauu

SEQ ID NO: 1720801 - RNA, 19 nt, Artificial Sequence
  Description of Artificial Sequence: Synthetic oligonucleotide
  Sense strand starting at position 3200 of SEQ ID NO: 1562083
auggaagauucucuguauu

SEQ ID NO: 1720802 - RNA, 19 nt, Artificial Sequence
  Description of Artificial Sequence: Synthetic oligonucleotide
  Antisense strand to SEQ ID NO: 1720801
aauacagagaaucuuccau

SEQ ID NO: 1720803 - RNA, 19 nt, Artificial Sequence
  Description of Artificial Sequence: Synthetic oligonucleotide
  Sense strand starting at position 3214 of SEQ ID NO: 1562083
guauucacguguugaaaga

SEQ ID NO: 1720804 - RNA, 19 nt, Artificial Sequence
  Description of Artificial Sequence: Synthetic oligonucleotide
  Antisense strand to SEQ ID NO: 1720803
ucuuucaacacgugaauac

SEQ ID NO: 1720805 - RNA, 19 nt, Artificial Sequence
  Description of Artificial Sequence: Synthetic oligonucleotide
  Sense strand starting at position 3242 of SEQ ID NO: 1562083
gcugucaauugccaccaaa

SEQ ID NO: 1720806 - RNA, 19 nt, Artificial Sequence
  Description of Artificial Sequence: Synthetic oligonucleotide
  Antisense strand to SEQ ID NO: 1720805
uuugguggcaauugacagc

SEQ ID NO: 1720807 - RNA, 19 nt, Artificial Sequence
  Description of Artificial Sequence: Synthetic oligonucleotide
  Sense strand starting at position 3311 of SEQ ID NO: 1562083
ugcagauccagggaagguu

SEQ ID NO: 1720808 - RNA, 19 nt, Artificial Sequence
  Description of Artificial Sequence: Synthetic oligonucleotide
  Antisense strand to SEQ ID NO: 1720807
aaccuucccuggaucugca

SEQ ID NO: 1720809 - RNA, 19 nt, Artificial Sequence
  Description of Artificial Sequence: Synthetic oligonucleotide
  Sense strand starting at position 3319 of SEQ ID NO: 1562083
cagggaagguuagucuaaa

SEQ ID NO: 1720810 - RNA, 19 nt, Artificial Sequence
  Description of Artificial Sequence: Synthetic oligonucleotide
  Antisense strand to SEQ ID NO: 1720809
uuuagacuaaccuucccug

SEQ ID NO: 1720811 - RNA, 19 nt, Artificial Sequence
  Description of Artificial Sequence: Synthetic oligonucleotide
  Sense strand starting at position 3320 of SEQ ID NO: 1562083
agggaagguuagucuaaac

SEQ ID NO: 1720812 - RNA, 19 nt, Artificial Sequence
  Description of Artificial Sequence: Synthetic oligonucleotide
  Antisense strand to SEQ ID NO: 1720811
guuuagacuaaccuucccu

SEQ ID NO: 1720813 - RNA, 19 nt, Artificial Sequence
  Description of Artificial Sequence: Synthetic oligonucleotide
  Sense strand starting at position 3460 of SEQ ID NO: 1562083
ugguacuggugaagggaua

SEQ ID NO: 1720814 - RNA, 19 nt, Artificial Sequence
  Description of Artificial Sequence: Synthetic oligonucleotide
  Antisense strand to SEQ ID NO: 1720813
uaucccuucaccaguacca

SEQ ID NO: 1720815 - RNA, 19 nt, Artificial Sequence
  Description of Artificial Sequence: Synthetic oligonucleotide
  Sense strand starting at position 3478 of SEQ ID NO: 1562083
agacaaguaucaguggaac

SEQ ID NO: 1720816 - RNA, 19 nt, Artificial Sequence
  Description of Artificial Sequence: Synthetic oligonucleotide
  Antisense strand to SEQ ID NO: 1720815
guuccacugauacuugucu

SEQ ID NO: 1720817 - RNA, 19 nt, Artificial Sequence
  Description of Artificial Sequence: Synthetic oligonucleotide
  Sense strand starting at position 84 of SEQ ID NO: 1562084
uggaacacuuuguuccaaa

SEQ ID NO: 1720818 - RNA, 19 nt, Artificial Sequence
  Description of Artificial Sequence: Synthetic oligonucleotide
  Antisense strand to SEQ ID NO: 1720817
uuuggaacaaaguguucca

SEQ ID NO: 1720819 - RNA, 19 nt, Artificial Sequence
  Description of Artificial Sequence: Synthetic oligonucleotide
  Sense strand starting at position 85 of SEQ ID NO: 1562084
ggaacacuuuguuccaaag

SEQ ID NO: 1720820 - RNA, 19 nt, Artificial Sequence
  Description of Artificial Sequence: Synthetic oligonucleotide
  Antisense strand to SEQ ID NO: 1720819
cuuuggaacaaaguguucc

SEQ ID NO: 1720821 - RNA, 19 nt, Artificial Sequence
  Description of Artificial Sequence: Synthetic oligonucleotide
  Sense strand starting at position 144 of SEQ ID NO: 1562084
ucauccguccuuuacaaga

SEQ ID NO: 1720822 - RNA, 19 nt, Artificial Sequence
  Description of Artificial Sequence: Synthetic oligonucleotide
  Antisense strand to SEQ ID NO: 1720821
ucuuguaaaggacggauga

SEQ ID NO: 1720823 - RNA, 19 nt, Artificial Sequence
  Description of Artificial Sequence: Synthetic oligonucleotide
  Sense strand starting at position 188 of SEQ ID NO: 1562084
uagagugucagaggaauag

SEQ ID NO: 1720824 - RNA, 19 nt, Artificial Sequence
  Description of Artificial Sequence: Synthetic oligonucleotide
  Antisense strand to SEQ ID NO: 1720823
cuauuccucugacacucua

SEQ ID NO: 1720825 - RNA, 19 nt, Artificial Sequence
  Description of Artificial Sequence: Synthetic oligonucleotide
  Sense strand starting at position 217 of SEQ ID NO: 1562084
gccaaauuagcccagggau

SEQ ID NO: 1720826 - RNA, 19 nt, Artificial Sequence
  Description of Artificial Sequence: Synthetic oligonucleotide
  Antisense strand to SEQ ID NO: 1720825
aucccugggcuaauuuggc

SEQ ID NO: 1720827 - RNA, 19 nt, Artificial Sequence
  Description of Artificial Sequence: Synthetic oligonucleotide
  Sense strand starting at position 219 of SEQ ID NO: 1562084
caaauuagcccagggaugu

SEQ ID NO: 1720828 - RNA, 19 nt, Artificial Sequence
  Description of Artificial Sequence: Synthetic oligonucleotide
  Antisense strand to SEQ ID NO: 1720827
acaucccugggcuaauuug

SEQ ID NO: 1720829 - RNA, 19 nt, Artificial Sequence
  Description of Artificial Sequence: Synthetic oligonucleotide
  Sense strand starting at position 511 of SEQ ID NO: 1562084
aguuaagguguauauggaa

SEQ ID NO: 1720830 - RNA, 19 nt, Artificial Sequence
  Description of Artificial Sequence: Synthetic oligonucleotide
  Antisense strand to SEQ ID NO: 1720829
uuccauauacaccuuaacu

SEQ ID NO: 1720831 - RNA, 19 nt, Artificial Sequence
  Description of Artificial Sequence: Synthetic oligonucleotide
  Sense strand starting at position 640 of SEQ ID NO: 1562084
agguaucagcagugaagga

SEQ ID NO: 1720832 - RNA, 19 nt, Artificial Sequence
  Description of Artificial Sequence: Synthetic oligonucleotide
  Antisense strand to SEQ ID NO: 1720831
uccuucacugcugauaccu

SEQ ID NO: 1720833 - RNA, 19 nt, Artificial Sequence
  Description of Artificial Sequence: Synthetic oligonucleotide
  Sense strand starting at position 641 of SEQ ID NO: 1562084
gguaucagcagugaaggaa

SEQ ID NO: 1720834 - RNA, 19 nt, Artificial Sequence
  Description of Artificial Sequence: Synthetic oligonucleotide
  Antisense strand to SEQ ID NO: 1720833
uuccuucacugcugauacc

SEQ ID NO: 1720835 - RNA, 19 nt, Artificial Sequence
  Description of Artificial Sequence: Synthetic oligonucleotide
  Sense strand starting at position 705 of SEQ ID NO: 1562084
auaaauaggcuuugugacu

SEQ ID NO: 1720836 - RNA, 19 nt, Artificial Sequence
  Description of Artificial Sequence: Synthetic oligonucleotide
  Antisense strand to SEQ ID NO: 1720835
agucacaaagccuauuuau

SEQ ID NO: 1720837 - RNA, 19 nt, Artificial Sequence
  Description of Artificial Sequence: Synthetic oligonucleotide
  Sense strand starting at position 724 of SEQ ID NO: 1562084
cugugugcuguguuagaug

SEQ ID NO: 1720838 - RNA, 19 nt, Artificial Sequence
  Description of Artificial Sequence: Synthetic oligonucleotide
  Antisense strand to SEQ ID NO: 1720837
caucuaacacagcacacag

SEQ ID NO: 1720839 - RNA, 19 nt, Artificial Sequence
  Description of Artificial Sequence: Synthetic oligonucleotide
  Sense strand starting at position 887 of SEQ ID NO: 1562084
uuguguuuagaggacaucu

SEQ ID NO: 1720840 - RNA, 19 nt, Artificial Sequence
  Description of Artificial Sequence: Synthetic oligonucleotide
  Antisense strand to SEQ ID NO: 1720839
agauguccucuaaacacaa

SEQ ID NO: 1720841 - RNA, 19 nt, Artificial Sequence
  Description of Artificial Sequence: Synthetic oligonucleotide
  Sense strand starting at position 899 of SEQ ID NO: 1562084
gacaucugccagugagaag

SEQ ID NO: 1720842 - RNA, 19 nt, Artificial Sequence
  Description of Artificial Sequence: Synthetic oligonucleotide
  Antisense strand to SEQ ID NO: 1720841
cuucucacuggcagauguc

SEQ ID NO: 1720843 - RNA, 19 nt, Artificial Sequence
  Description of Artificial Sequence: Synthetic oligonucleotide
  Sense strand starting at position 1368 of SEQ ID NO: 1562084
aguucuuagaaaggugaag

SEQ ID NO: 1720844 - RNA, 19 nt, Artificial Sequence
  Description of Artificial Sequence: Synthetic oligonucleotide
  Antisense strand to SEQ ID NO: 1720843
cuucaccuuucuaagaacu

SEQ ID NO: 1720845 - RNA, 19 nt, Artificial Sequence
  Description of Artificial Sequence: Synthetic oligonucleotide
  Sense strand starting at position 1553 of SEQ ID NO: 1562084
gagcaaaguguggaucuca

SEQ ID NO: 1720846 - RNA, 19 nt, Artificial Sequence
  Description of Artificial Sequence: Synthetic oligonucleotide
  Antisense strand to SEQ ID NO: 1720845
ugagauccacacuuugcuc

SEQ ID NO: 1720847 - RNA, 19 nt, Artificial Sequence
  Description of Artificial Sequence: Synthetic oligonucleotide
  Sense strand starting at position 1618 of SEQ ID NO: 1562084
caugaugucugggugaaga

SEQ ID NO: 1720848 - RNA, 19 nt, Artificial Sequence
  Description of Artificial Sequence: Synthetic oligonucleotide
  Antisense strand to SEQ ID NO: 1720847
ucuucacccagacaucaug

SEQ ID NO: 1720849 - RNA, 19 nt, Artificial Sequence
  Description of Artificial Sequence: Synthetic oligonucleotide
  Sense strand starting at position 2113 of SEQ ID NO: 1562084
uguucagacgguuaugaac

SEQ ID NO: 1720850 - RNA, 19 nt, Artificial Sequence
  Description of Artificial Sequence: Synthetic oligonucleotide
  Antisense strand to SEQ ID NO: 1720849
guucauaaccgucugaaca

SEQ ID NO: 1720851 - RNA, 19 nt, Artificial Sequence
  Description of Artificial Sequence: Synthetic oligonucleotide
  Sense strand starting at position 2214 of SEQ ID NO: 1562084
gcgguuugugauagguauc

SEQ ID NO: 1720852 - RNA, 19 nt, Artificial Sequence
  Description of Artificial Sequence: Synthetic oligonucleotide
  Antisense strand to SEQ ID NO: 1720851
gauaccuaucacaaaccgc

SEQ ID NO: 1720853 - RNA, 19 nt, Artificial Sequence
  Description of Artificial Sequence: Synthetic oligonucleotide
  Sense strand starting at position 2217 of SEQ ID NO: 1562084
guuugugauagguaucuag

SEQ ID NO: 1720854 - RNA, 19 nt, Artificial Sequence
  Description of Artificial Sequence: Synthetic oligonucleotide
  Antisense strand to SEQ ID NO: 1720853
cuagauaccuaucacaaac

SEQ ID NO: 1720855 - RNA, 19 nt, Artificial Sequence
  Description of Artificial Sequence: Synthetic oligonucleotide
  Sense strand starting at position 2236 of SEQ ID NO: 1562084
gggucuaggccaggauauu

SEQ ID NO: 1720856 - RNA, 19 nt, Artificial Sequence
  Description of Artificial Sequence: Synthetic oligonucleotide
  Antisense strand to SEQ ID NO: 1720855
aauauccuggccuagaccc

SEQ ID NO: 1720857 - RNA, 19 nt, Artificial Sequence
  Description of Artificial Sequence: Synthetic oligonucleotide
  Sense strand starting at position 2237 of SEQ ID NO: 1562084
ggucuaggccaggauauua

SEQ ID NO: 1720858 - RNA, 19 nt, Artificial Sequence
  Description of Artificial Sequence: Synthetic oligonucleotide
  Antisense strand to SEQ ID NO: 1720857
uaauauccuggccuagacc

SEQ ID NO: 1720859 - RNA, 19 nt, Artificial Sequence
  Description of Artificial Sequence: Synthetic oligonucleotide
  Sense strand starting at position 2292 of SEQ ID NO: 1562084
aggaauuuguuacagugga

SEQ ID NO: 1720860 - RNA, 19 nt, Artificial Sequence
  Description of Artificial Sequence: Synthetic oligonucleotide
  Antisense strand to SEQ ID NO: 1720859
uccacuguaacaaauuccu

SEQ ID NO: 1720861 - RNA, 19 nt, Artificial Sequence
  Description of Artificial Sequence: Synthetic oligonucleotide
  Sense strand starting at position 2378 of SEQ ID NO: 1562084
uguggucugcuugaauaaa

SEQ ID NO: 1720862 - RNA, 19 nt, Artificial Sequence
  Description of Artificial Sequence: Synthetic oligonucleotide
  Antisense strand to SEQ ID NO: 1720861
uuuauucaagcagaccaca

SEQ ID NO: 1720863 - RNA, 19 nt, Artificial Sequence
  Description of Artificial Sequence: Synthetic oligonucleotide
  Sense strand starting at position 2389 of SEQ ID NO: 1562084
ugaauaaaucauugucugu

SEQ ID NO: 1720864 - RNA, 19 nt, Artificial Sequence
  Description of Artificial Sequence: Synthetic oligonucleotide
  Antisense strand to SEQ ID NO: 1720863
acagacaaugauuuauuca

SEQ ID NO: 1720865 - RNA, 19 nt, Artificial Sequence
  Description of Artificial Sequence: Synthetic oligonucleotide
  Sense strand starting at position 2393 of SEQ ID NO: 1562084
uaaaucauugucuguggaa

SEQ ID NO: 1720866 - RNA, 19 nt, Artificial Sequence
  Description of Artificial Sequence: Synthetic oligonucleotide
  Antisense strand to SEQ ID NO: 1720865
uuccacagacaaugauuua

SEQ ID NO: 1720867 - RNA, 19 nt, Artificial Sequence
  Description of Artificial Sequence: Synthetic oligonucleotide
  Sense strand starting at position 2394 of SEQ ID NO: 1562084
aaaucauugucuguggaag

SEQ ID NO: 1720868 - RNA, 19 nt, Artificial Sequence
  Description of Artificial Sequence: Synthetic oligonucleotide
  Antisense strand to SEQ ID NO: 1720867
cuuccacagacaaugauuu

SEQ ID NO: 1720869 - RNA, 19 nt, Artificial Sequence
  Description of Artificial Sequence: Synthetic oligonucleotide
  Sense strand starting at position 2395 of SEQ ID NO: 1562084
aaucauugucuguggaaga

SEQ ID NO: 1720870 - RNA, 19 nt, Artificial Sequence
  Description of Artificial Sequence: Synthetic oligonucleotide
  Antisense strand to SEQ ID NO: 1720869
ucuuccacagacaaugauu

SEQ ID NO: 1720871 - RNA, 19 nt, Artificial Sequence
  Description of Artificial Sequence: Synthetic oligonucleotide
  Sense strand starting at position 2452 of SEQ ID NO: 1562084
aggaaacauuucugagauu

SEQ ID NO: 1720872 - RNA, 19 nt, Artificial Sequence
  Description of Artificial Sequence: Synthetic oligonucleotide
  Antisense strand to SEQ ID NO: 1720871
aaucucagaaauguuuccu

SEQ ID NO: 1720873 - RNA, 19 nt, Artificial Sequence
  Description of Artificial Sequence: Synthetic oligonucleotide
  Sense strand starting at position 2453 of SEQ ID NO: 1562084
ggaaacauuucugagauuc

SEQ ID NO: 1720874 - RNA, 19 nt, Artificial Sequence
  Description of Artificial Sequence: Synthetic oligonucleotide
  Antisense strand to SEQ ID NO: 1720873
gaaucucagaaauguuucc

SEQ ID NO: 1720875 - RNA, 19 nt, Artificial Sequence
  Description of Artificial Sequence: Synthetic oligonucleotide
  Sense strand starting at position 2464 of SEQ ID NO: 1562084
ugagauucuagugagaugu

SEQ ID NO: 1720876 - RNA, 19 nt, Artificial Sequence
  Description of Artificial Sequence: Synthetic oligonucleotide
  Antisense strand to SEQ ID NO: 1720875
acaucucacuagaaucuca

SEQ ID NO: 1720877 - RNA, 19 nt, Artificial Sequence
  Description of Artificial Sequence: Synthetic oligonucleotide
  Sense strand starting at position 2468 of SEQ ID NO: 1562084
auucuagugagauguugaa

SEQ ID NO: 1720878 - RNA, 19 nt, Artificial Sequence
  Description of Artificial Sequence: Synthetic oligonucleotide
  Antisense strand to SEQ ID NO: 1720877
uucaacaucucacuagaau

SEQ ID NO: 1720879 - RNA, 19 nt, Artificial Sequence
  Description of Artificial Sequence: Synthetic oligonucleotide
  Sense strand starting at position 2553 of SEQ ID NO: 1562084
agcagucuaggaggacaua

SEQ ID NO: 1720880 - RNA, 19 nt, Artificial Sequence
  Description of Artificial Sequence: Synthetic oligonucleotide
  Antisense strand to SEQ ID NO: 1720879
uauguccuccuagacugcu

SEQ ID NO: 1720881 - RNA, 19 nt, Artificial Sequence
  Description of Artificial Sequence: Synthetic oligonucleotide
  Sense strand starting at position 2578 of SEQ ID NO: 1562084
aaugcugaguaucucugaa

SEQ ID NO: 1720882 - RNA, 19 nt, Artificial Sequence
  Description of Artificial Sequence: Synthetic oligonucleotide
  Antisense strand to SEQ ID NO: 1720881
uucagagauacucagcauu

SEQ ID NO: 1720883 - RNA, 19 nt, Artificial Sequence
  Description of Artificial Sequence: Synthetic oligonucleotide
  Sense strand starting at position 2633 of SEQ ID NO: 1562084
uuguguguuccaagguggu

SEQ ID NO: 1720884 - RNA, 19 nt, Artificial Sequence
  Description of Artificial Sequence: Synthetic oligonucleotide
  Antisense strand to SEQ ID NO: 1720883
accaccuuggaacacacaa

SEQ ID NO: 1720885 - RNA, 19 nt, Artificial Sequence
  Description of Artificial Sequence: Synthetic oligonucleotide
  Sense strand starting at position 2705 of SEQ ID NO: 1562084
ggaagcaauuaaguuugau

SEQ ID NO: 1720886 - RNA, 19 nt, Artificial Sequence
  Description of Artificial Sequence: Synthetic oligonucleotide
  Antisense strand to SEQ ID NO: 1720885
aucaaacuuaauugcuucc

SEQ ID NO: 1720887 - RNA, 19 nt, Artificial Sequence
  Description of Artificial Sequence: Synthetic oligonucleotide
  Sense strand starting at position 2983 of SEQ ID NO: 1562084
ugggcagucccaugaggau

SEQ ID NO: 1720888 - RNA, 19 nt, Artificial Sequence
  Description of Artificial Sequence: Synthetic oligonucleotide
  Antisense strand to SEQ ID NO: 1720887
auccucaugggacugccca

SEQ ID NO: 1720889 - RNA, 19 nt, Artificial Sequence
  Description of Artificial Sequence: Synthetic oligonucleotide
  Sense strand starting at position 3359 of SEQ ID NO: 1562084
cucucaaguuagcuggaaa

SEQ ID NO: 1720890 - RNA, 19 nt, Artificial Sequence
  Description of Artificial Sequence: Synthetic oligonucleotide
  Antisense strand to SEQ ID NO: 1720889
uuuccagcuaacuugagag

SEQ ID NO: 1720891 - RNA, 19 nt, Artificial Sequence
  Description of Artificial Sequence: Synthetic oligonucleotide
  Sense strand starting at position 3360 of SEQ ID NO: 1562084
ucucaaguuagcuggaaag

SEQ ID NO: 1720892 - RNA, 19 nt, Artificial Sequence
  Description of Artificial Sequence: Synthetic oligonucleotide
  Antisense strand to SEQ ID NO: 1720891
cuuuccagcuaacuugaga

SEQ ID NO: 1720893 - RNA, 19 nt, Artificial Sequence
  Description of Artificial Sequence: Synthetic oligonucleotide
  Sense strand starting at position 3394 of SEQ ID NO: 1562084
ucuucucuucuaugggaca

SEQ ID NO: 1720894 - RNA, 19 nt, Artificial Sequence
  Description of Artificial Sequence: Synthetic oligonucleotide
  Antisense strand to SEQ ID NO: 1720893
ugucccauagaagagaaga

SEQ ID NO: 1720895 - RNA, 19 nt, Artificial Sequence
  Description of Artificial Sequence: Synthetic oligonucleotide
  Sense strand starting at position 3584 of SEQ ID NO: 1562084
ucagucaugaccugaaagg

SEQ ID NO: 1720896 - RNA, 19 nt, Artificial Sequence
  Description of Artificial Sequence: Synthetic oligonucleotide
  Antisense strand to SEQ ID NO: 1720895
ccuuucaggucaugacuga

SEQ ID NO: 1720897 - RNA, 19 nt, Artificial Sequence
  Description of Artificial Sequence: Synthetic oligonucleotide
  Sense strand starting at position 8 of SEQ ID NO: 1562085
ugcugagucucaccagaac

SEQ ID NO: 1720898 - RNA, 19 nt, Artificial Sequence
  Description of Artificial Sequence: Synthetic oligonucleotide
  Antisense strand to SEQ ID NO: 1720897
guucuggugagacucagca

SEQ ID NO: 1720899 - RNA, 19 nt, Artificial Sequence
  Description of Artificial Sequence: Synthetic oligonucleotide
  Sense strand starting at position 366 of SEQ ID NO: 1562085
ugaagacuguggucaguaa

SEQ ID NO: 1720900 - RNA, 19 nt, Artificial Sequence
  Description of Artificial Sequence: Synthetic oligonucleotide
  Antisense strand to SEQ ID NO: 1720899
uuacugaccacagucuuca

SEQ ID NO: 1720901 - RNA, 19 nt, Artificial Sequence
  Description of Artificial Sequence: Synthetic oligonucleotide
  Sense strand starting at position 367 of SEQ ID NO: 1562085
gaagacuguggucaguaaa

SEQ ID NO: 1720902 - RNA, 19 nt, Artificial Sequence
  Description of Artificial Sequence: Synthetic oligonucleotide
  Antisense strand to SEQ ID NO: 1720901
uuuacugaccacagucuuc

SEQ ID NO: 1720903 - RNA, 19 nt, Artificial Sequence
  Description of Artificial Sequence: Synthetic oligonucleotide
  Sense strand starting at position 573 of SEQ ID NO: 1562085
cgcccacuuccugaauaug

SEQ ID NO: 1720904 - RNA, 19 nt, Artificial Sequence
  Description of Artificial Sequence: Synthetic oligonucleotide
  Antisense strand to SEQ ID NO: 1720903
cauauucaggaagugggcg

SEQ ID NO: 1720905 - RNA, 19 nt, Artificial Sequence
  Description of Artificial Sequence: Synthetic oligonucleotide
  Sense strand starting at position 593 of SEQ ID NO: 1562085
auaacaacugucuguuauu

SEQ ID NO: 1720906 - RNA, 19 nt, Artificial Sequence
  Description of Artificial Sequence: Synthetic oligonucleotide
  Antisense strand to SEQ ID NO: 1720905
aauaacagacaguuguuau

SEQ ID NO: 1720907 - RNA, 19 nt, Artificial Sequence
  Description of Artificial Sequence: Synthetic oligonucleotide
  Sense strand starting at position 651 of SEQ ID NO: 1562085
auaauauugcauggcuaga

SEQ ID NO: 1720908 - RNA, 19 nt, Artificial Sequence
  Description of Artificial Sequence: Synthetic oligonucleotide
  Antisense strand to SEQ ID NO: 1720907
ucuagccaugcaauauuau

SEQ ID NO: 1720909 - RNA, 19 nt, Artificial Sequence
  Description of Artificial Sequence: Synthetic oligonucleotide
  Sense strand starting at position 748 of SEQ ID NO: 1562085
aucuguuuauuucuggcaa

SEQ ID NO: 1720910 - RNA, 19 nt, Artificial Sequence
  Description of Artificial Sequence: Synthetic oligonucleotide
  Antisense strand to SEQ ID NO: 1720909
uugccagaaauaaacagau

SEQ ID NO: 1720911 - RNA, 19 nt, Artificial Sequence
  Description of Artificial Sequence: Synthetic oligonucleotide
  Sense strand starting at position 830 of SEQ ID NO: 1562085
auaacuaaagucggaauga

SEQ ID NO: 1720912 - RNA, 19 nt, Artificial Sequence
  Description of Artificial Sequence: Synthetic oligonucleotide
  Antisense strand to SEQ ID NO: 1720911
ucauuccgacuuuaguuau

SEQ ID NO: 1720913 - RNA, 19 nt, Artificial Sequence
  Description of Artificial Sequence: Synthetic oligonucleotide
  Sense strand starting at position 1405 of SEQ ID NO: 1562085
aaguuaugcgcaugaggga

SEQ ID NO: 1720914 - RNA, 19 nt, Artificial Sequence
  Description of Artificial Sequence: Synthetic oligonucleotide
  Antisense strand to SEQ ID NO: 1720913
ucccucaugcgcauaacuu

SEQ ID NO: 1720915 - RNA, 19 nt, Artificial Sequence
  Description of Artificial Sequence: Synthetic oligonucleotide
  Sense strand starting at position 1440 of SEQ ID NO: 1562085
gggagauggguccauagcu

SEQ ID NO: 1720916 - RNA, 19 nt, Artificial Sequence
  Description of Artificial Sequence: Synthetic oligonucleotide
  Antisense strand to SEQ ID NO: 1720915
agcuauggacccaucuccc

SEQ ID NO: 1720917 - RNA, 19 nt, Artificial Sequence
  Description of Artificial Sequence: Synthetic oligonucleotide
  Sense strand starting at position 1479 of SEQ ID NO: 1562085
gguaucugaagagguaaau

SEQ ID NO: 1720918 - RNA, 19 nt, Artificial Sequence
  Description of Artificial Sequence: Synthetic oligonucleotide
  Antisense strand to SEQ ID NO: 1720917
auuuaccucuucagauacc

SEQ ID NO: 1720919 - RNA, 19 nt, Artificial Sequence
  Description of Artificial Sequence: Synthetic oligonucleotide
  Sense strand starting at position 1608 of SEQ ID NO: 1562085
cagugaccauguguaugua

SEQ ID NO: 1720920 - RNA, 19 nt, Artificial Sequence
  Description of Artificial Sequence: Synthetic oligonucleotide
  Antisense strand to SEQ ID NO: 1720919
uacauacacauggucacug

SEQ ID NO: 1720921 - RNA, 19 nt, Artificial Sequence
  Description of Artificial Sequence: Synthetic oligonucleotide
  Sense strand starting at position 1609 of SEQ ID NO: 1562085
agugaccauguguauguaa

SEQ ID NO: 1720922 - RNA, 19 nt, Artificial Sequence
  Description of Artificial Sequence: Synthetic oligonucleotide
  Antisense strand to SEQ ID NO: 1720921
uuacauacacauggucacu

SEQ ID NO: 1720923 - RNA, 19 nt, Artificial Sequence
  Description of Artificial Sequence: Synthetic oligonucleotide
  Sense strand starting at position 1611 of SEQ ID NO: 1562085
ugaccauguguauguaaga

SEQ ID NO: 1720924 - RNA, 19 nt, Artificial Sequence
  Description of Artificial Sequence: Synthetic oligonucleotide
  Antisense strand to SEQ ID NO: 1720923
ucuuacauacacaugguca

SEQ ID NO: 1720925 - RNA, 19 nt, Artificial Sequence
  Description of Artificial Sequence: Synthetic oligonucleotide
  Sense strand starting at position 1612 of SEQ ID NO: 1562085
gaccauguguauguaagaa

SEQ ID NO: 1720926 - RNA, 19 nt, Artificial Sequence
  Description of Artificial Sequence: Synthetic oligonucleotide
  Antisense strand to SEQ ID NO: 1720925
uucuuacauacacaugguc

SEQ ID NO: 1720927 - RNA, 19 nt, Artificial Sequence
  Description of Artificial Sequence: Synthetic oligonucleotide
  Sense strand starting at position 1624 of SEQ ID NO: 1562085
guaagaauaagugagguuu

SEQ ID NO: 1720928 - RNA, 19 nt, Artificial Sequence
  Description of Artificial Sequence: Synthetic oligonucleotide
  Antisense strand to SEQ ID NO: 1720927
aaaccucacuuauucuuac

SEQ ID NO: 1720929 - RNA, 19 nt, Artificial Sequence
  Description of Artificial Sequence: Synthetic oligonucleotide
  Sense strand starting at position 1630 of SEQ ID NO: 1562085
auaagugagguuuaauccu

SEQ ID NO: 1720930 - RNA, 19 nt, Artificial Sequence
  Description of Artificial Sequence: Synthetic oligonucleotide
  Antisense strand to SEQ ID NO: 1720929
aggauuaaaccucacuuau

SEQ ID NO: 1720931 - RNA, 19 nt, Artificial Sequence
  Description of Artificial Sequence: Synthetic oligonucleotide
  Sense strand starting at position 1636 of SEQ ID NO: 1562085
gagguuuaauccuugaagg

SEQ ID NO: 1720932 - RNA, 19 nt, Artificial Sequence
  Description of Artificial Sequence: Synthetic oligonucleotide
  Antisense strand to SEQ ID NO: 1720931
ccuucaaggauuaaaccuc

SEQ ID NO: 1720933 - RNA, 19 nt, Artificial Sequence
  Description of Artificial Sequence: Synthetic oligonucleotide
  Sense strand starting at position 1637 of SEQ ID NO: 1562085
agguuuaauccuugaaggg

SEQ ID NO: 1720934 - RNA, 19 nt, Artificial Sequence
  Description of Artificial Sequence: Synthetic oligonucleotide
  Antisense strand to SEQ ID NO: 1720933
cccuucaaggauuaaaccu

SEQ ID NO: 1720935 - RNA, 19 nt, Artificial Sequence
  Description of Artificial Sequence: Synthetic oligonucleotide
  Sense strand starting at position 2433 of SEQ ID NO: 1562085
gcugcacugguuggaagaa

SEQ ID NO: 1720936 - RNA, 19 nt, Artificial Sequence
  Description of Artificial Sequence: Synthetic oligonucleotide
  Antisense strand to SEQ ID NO: 1720935
uucuuccaaccagugcagc

SEQ ID NO: 1720937 - RNA, 19 nt, Artificial Sequence
  Description of Artificial Sequence: Synthetic oligonucleotide
  Sense strand starting at position 2469 of SEQ ID NO: 1562085
aaggcauuagcaugcggaa

SEQ ID NO: 1720938 - RNA, 19 nt, Artificial Sequence
  Description of Artificial Sequence: Synthetic oligonucleotide
  Antisense strand to SEQ ID NO: 1720937
uuccgcaugcuaaugccuu

SEQ ID NO: 1720939 - RNA, 19 nt, Artificial Sequence
  Description of Artificial Sequence: Synthetic oligonucleotide
  Sense strand starting at position 2542 of SEQ ID NO: 1562085
ucggucucugugguuaagu

SEQ ID NO: 1720940 - RNA, 19 nt, Artificial Sequence
  Description of Artificial Sequence: Synthetic oligonucleotide
  Antisense strand to SEQ ID NO: 1720939
acuuaaccacagagaccga

SEQ ID NO: 1720941 - RNA, 19 nt, Artificial Sequence
  Description of Artificial Sequence: Synthetic oligonucleotide
  Sense strand starting at position 2544 of SEQ ID NO: 1562085
ggucucugugguuaaguuu

SEQ ID NO: 1720942 - RNA, 19 nt, Artificial Sequence
  Description of Artificial Sequence: Synthetic oligonucleotide
  Antisense strand to SEQ ID NO: 1720941
aaacuuaaccacagagacc

SEQ ID NO: 1720943 - RNA, 19 nt, Artificial Sequence
  Description of Artificial Sequence: Synthetic oligonucleotide
  Sense strand starting at position 2547 of SEQ ID NO: 1562085
cucugugguuaaguuugaa

SEQ ID NO: 1720944 - RNA, 19 nt, Artificial Sequence
  Description of Artificial Sequence: Synthetic oligonucleotide
  Antisense strand to SEQ ID NO: 1720943
uucaaacuuaaccacagag

SEQ ID NO: 1720945 - RNA, 19 nt, Artificial Sequence
  Description of Artificial Sequence: Synthetic oligonucleotide
  Sense strand starting at position 2550 of SEQ ID NO: 1562085
ugugguuaaguuugaagua

SEQ ID NO: 1720946 - RNA, 19 nt, Artificial Sequence
  Description of Artificial Sequence: Synthetic oligonucleotide
  Antisense strand to SEQ ID NO: 1720945
uacuucaaacuuaaccaca

SEQ ID NO: 1720947 - RNA, 19 nt, Artificial Sequence
  Description of Artificial Sequence: Synthetic oligonucleotide
  Sense strand starting at position 2671 of SEQ ID NO: 1562085
auccuucuacauggagaua

SEQ ID NO: 1720948 - RNA, 19 nt, Artificial Sequence
  Description of Artificial Sequence: Synthetic oligonucleotide
  Antisense strand to SEQ ID NO: 1720947
uaucuccauguagaaggau

SEQ ID NO: 1720949 - RNA, 19 nt, Artificial Sequence
  Description of Artificial Sequence: Synthetic oligonucleotide
  Sense strand starting at position 2803 of SEQ ID NO: 1562085
cguauuuguuaccuggcua

SEQ ID NO: 1720950 - RNA, 19 nt, Artificial Sequence
  Description of Artificial Sequence: Synthetic oligonucleotide
  Antisense strand to SEQ ID NO: 1720949
uagccagguaacaaauacg

SEQ ID NO: 1720951 - RNA, 19 nt, Artificial Sequence
  Description of Artificial Sequence: Synthetic oligonucleotide
  Sense strand starting at position 2824 of SEQ ID NO: 1562085
agguuucgaauucgaauga

SEQ ID NO: 1720952 - RNA, 19 nt, Artificial Sequence
  Description of Artificial Sequence: Synthetic oligonucleotide
  Antisense strand to SEQ ID NO: 1720951
ucauucgaauucgaaaccu

SEQ ID NO: 1720953 - RNA, 19 nt, Artificial Sequence
  Description of Artificial Sequence: Synthetic oligonucleotide
  Sense strand starting at position 2926 of SEQ ID NO: 1562085
cuauuaaugucaccuuugu

SEQ ID NO: 1720954 - RNA, 19 nt, Artificial Sequence
  Description of Artificial Sequence: Synthetic oligonucleotide
  Antisense strand to SEQ ID NO: 1720953
acaaaggugacauuaauag

SEQ ID NO: 1720955 - RNA, 19 nt, Artificial Sequence
  Description of Artificial Sequence: Synthetic oligonucleotide
  Sense strand starting at position 3002 of SEQ ID NO: 1562085
ucugcuucugcguuaauuc

SEQ ID NO: 1720956 - RNA, 19 nt, Artificial Sequence
  Description of Artificial Sequence: Synthetic oligonucleotide
  Antisense strand to SEQ ID NO: 1720955
gaauuaacgcagaagcaga

SEQ ID NO: 1720957 - RNA, 19 nt, Artificial Sequence
  Description of Artificial Sequence: Synthetic oligonucleotide
  Sense strand starting at position 3148 of SEQ ID NO: 1562085
gugacucagaguuguaguc

SEQ ID NO: 1720958 - RNA, 19 nt, Artificial Sequence
  Description of Artificial Sequence: Synthetic oligonucleotide
  Antisense strand to SEQ ID NO: 1720957
gacuacaacucugagucac

SEQ ID NO: 1720959 - RNA, 19 nt, Artificial Sequence
  Description of Artificial Sequence: Synthetic oligonucleotide
  Sense strand starting at position 3213 of SEQ ID NO: 1562085
gcaagaacauaucuaggca

SEQ ID NO: 1720960 - RNA, 19 nt, Artificial Sequence
  Description of Artificial Sequence: Synthetic oligonucleotide
  Antisense strand to SEQ ID NO: 1720959
ugccuagauauguucuugc

SEQ ID NO: 1720961 - RNA, 19 nt, Artificial Sequence
  Description of Artificial Sequence: Synthetic oligonucleotide
  Sense strand starting at position 3225 of SEQ ID NO: 1562085
cuaggcauccaagaaguau

SEQ ID NO: 1720962 - RNA, 19 nt, Artificial Sequence
  Description of Artificial Sequence: Synthetic oligonucleotide
  Antisense strand to SEQ ID NO: 1720961
auacuucuuggaugccuag

SEQ ID NO: 1720963 - RNA, 19 nt, Artificial Sequence
  Description of Artificial Sequence: Synthetic oligonucleotide
  Sense strand starting at position 3449 of SEQ ID NO: 1562085
cagauuaauuauucucggu

SEQ ID NO: 1720964 - RNA, 19 nt, Artificial Sequence
  Description of Artificial Sequence: Synthetic oligonucleotide
  Antisense strand to SEQ ID NO: 1720963
accgagaauaauuaaucug

SEQ ID NO: 1720965 - RNA, 19 nt, Artificial Sequence
  Description of Artificial Sequence: Synthetic oligonucleotide
  Sense strand starting at position 3451 of SEQ ID NO: 1562085
gauuaauuauucucgguaa

SEQ ID NO: 1720966 - RNA, 19 nt, Artificial Sequence
  Description of Artificial Sequence: Synthetic oligonucleotide
  Antisense strand to SEQ ID NO: 1720965
uuaccgagaauaauuaauc

SEQ ID NO: 1720967 - RNA, 19 nt, Artificial Sequence
  Description of Artificial Sequence: Synthetic oligonucleotide
  Sense strand starting at position 3453 of SEQ ID NO: 1562085
uuaauuauucucgguaagg

SEQ ID NO: 1720968 - RNA, 19 nt, Artificial Sequence
  Description of Artificial Sequence: Synthetic oligonucleotide
  Antisense strand to SEQ ID NO: 1720967
ccuuaccgagaauaauuaa

SEQ ID NO: 1720969 - RNA, 19 nt, Artificial Sequence
  Description of Artificial Sequence: Synthetic oligonucleotide
  Sense strand starting at position 3454 of SEQ ID NO: 1562085
uaauuauucucgguaagga

SEQ ID NO: 1720970 - RNA, 19 nt, Artificial Sequence
  Description of Artificial Sequence: Synthetic oligonucleotide
  Antisense strand to SEQ ID NO: 1720969
uccuuaccgagaauaauua

SEQ ID NO: 1720971 - RNA, 19 nt, Artificial Sequence
  Description of Artificial Sequence: Synthetic oligonucleotide
  Sense strand starting at position 3549 of SEQ ID NO: 1562085
uuaauauuauucgccaaag

SEQ ID NO: 1720972 - RNA, 19 nt, Artificial Sequence
  Description of Artificial Sequence: Synthetic oligonucleotide
  Antisense strand to SEQ ID NO: 1720971
cuuuggcgaauaauauuaa

SEQ ID NO: 1720973 - RNA, 19 nt, Artificial Sequence
  Description of Artificial Sequence: Synthetic oligonucleotide
  Sense strand starting at position 3619 of SEQ ID NO: 1562085
aagaaagauuguuauagga

SEQ ID NO: 1720974 - RNA, 19 nt, Artificial Sequence
  Description of Artificial Sequence: Synthetic oligonucleotide
  Antisense strand to SEQ ID NO: 1720973
uccuauaacaaucuuucuu

SEQ ID NO: 1720975 - RNA, 19 nt, Artificial Sequence
  Description of Artificial Sequence: Synthetic oligonucleotide
  Sense strand starting at position 3654 of SEQ ID NO: 1562085
uccauugugcgguaacaga

SEQ ID NO: 1720976 - RNA, 19 nt, Artificial Sequence
  Description of Artificial Sequence: Synthetic oligonucleotide
  Antisense strand to SEQ ID NO: 1720975
ucuguuaccgcacaaugga

SEQ ID NO: 1720977 - RNA, 19 nt, Artificial Sequence
  Description of Artificial Sequence: Synthetic oligonucleotide
  Sense strand starting at position 176 of SEQ ID NO: 1562086
cgcccacuuccugaauaug

SEQ ID NO: 1720978 - RNA, 19 nt, Artificial Sequence
  Description of Artificial Sequence: Synthetic oligonucleotide
  Antisense strand to SEQ ID NO: 1720977
cauauucaggaagugggcg

SEQ ID NO: 1720979 - RNA, 19 nt, Artificial Sequence
  Description of Artificial Sequence: Synthetic oligonucleotide
  Sense strand starting at position 196 of SEQ ID NO: 1562086
auaacaacugucuguuauu

SEQ ID NO: 1720980 - RNA, 19 nt, Artificial Sequence
  Description of Artificial Sequence: Synthetic oligonucleotide
  Antisense strand to SEQ ID NO: 1720979
aauaacagacaguuguuau

SEQ ID NO: 1720981 - RNA, 19 nt, Artificial Sequence
  Description of Artificial Sequence: Synthetic oligonucleotide
  Sense strand starting at position 254 of SEQ ID NO: 1562086
auaauauugcauggcuaga

SEQ ID NO: 1720982 - RNA, 19 nt, Artificial Sequence
  Description of Artificial Sequence: Synthetic oligonucleotide
  Antisense strand to SEQ ID NO: 1720981
ucuagccaugcaauauuau

SEQ ID NO: 1720983 - RNA, 19 nt, Artificial Sequence
  Description of Artificial Sequence: Synthetic oligonucleotide
  Sense strand starting at position 351 of SEQ ID NO: 1562086
aucuguuuauuucuggcaa

SEQ ID NO: 1720984 - RNA, 19 nt, Artificial Sequence
  Description of Artificial Sequence: Synthetic oligonucleotide
  Antisense strand to SEQ ID NO: 1720983
uugccagaaauaaacagau

SEQ ID NO: 1720985 - RNA, 19 nt, Artificial Sequence
  Description of Artificial Sequence: Synthetic oligonucleotide
  Sense strand starting at position 433 of SEQ ID NO: 1562086
auaacuaaagucggaauga

SEQ ID NO: 1720986 - RNA, 19 nt, Artificial Sequence
  Description of Artificial Sequence: Synthetic oligonucleotide
  Antisense strand to SEQ ID NO: 1720985
ucauuccgacuuuaguuau

SEQ ID NO: 1720987 - RNA, 19 nt, Artificial Sequence
  Description of Artificial Sequence: Synthetic oligonucleotide
  Sense strand starting at position 1008 of SEQ ID NO: 1562086
aaguuaugcgcaugaggga

SEQ ID NO: 1720988 - RNA, 19 nt, Artificial Sequence
  Description of Artificial Sequence: Synthetic oligonucleotide
  Antisense strand to SEQ ID NO: 1720987
ucccucaugcgcauaacuu

SEQ ID NO: 1720989 - RNA, 19 nt, Artificial Sequence
  Description of Artificial Sequence: Synthetic oligonucleotide
  Sense strand starting at position 1043 of SEQ ID NO: 1562086
gggagauggguccauagcu

SEQ ID NO: 1720990 - RNA, 19 nt, Artificial Sequence
  Description of Artificial Sequence: Synthetic oligonucleotide
  Antisense strand to SEQ ID NO: 1720989
agcuauggacccaucuccc

SEQ ID NO: 1720991 - RNA, 19 nt, Artificial Sequence
  Description of Artificial Sequence: Synthetic oligonucleotide
  Sense strand starting at position 1082 of SEQ ID NO: 1562086
gguaucugaagagguaaau

SEQ ID NO: 1720992 - RNA, 19 nt, Artificial Sequence
  Description of Artificial Sequence: Synthetic oligonucleotide
  Antisense strand to SEQ ID NO: 1720991
auuuaccucuucagauacc

SEQ ID NO: 1720993 - RNA, 19 nt, Artificial Sequence
  Description of Artificial Sequence: Synthetic oligonucleotide
  Sense strand starting at position 1212 of SEQ ID NO: 1562086
agugaccauguguauguaa

SEQ ID NO: 1720994 - RNA, 19 nt, Artificial Sequence
  Description of Artificial Sequence: Synthetic oligonucleotide
  Antisense strand to SEQ ID NO: 1720993
uuacauacacauggucacu

SEQ ID NO: 1720995 - RNA, 19 nt, Artificial Sequence
  Description of Artificial Sequence: Synthetic oligonucleotide
  Sense strand starting at position 1214 of SEQ ID NO: 1562086
ugaccauguguauguaaga

SEQ ID NO: 1720996 - RNA, 19 nt, Artificial Sequence
  Description of Artificial Sequence: Synthetic oligonucleotide
  Antisense strand to SEQ ID NO: 1720995
ucuuacauacacaugguca

SEQ ID NO: 1720997 - RNA, 19 nt, Artificial Sequence
  Description of Artificial Sequence: Synthetic oligonucleotide
  Sense strand starting at position 1215 of SEQ ID NO: 1562086
gaccauguguauguaagaa

SEQ ID NO: 1720998 - RNA, 19 nt, Artificial Sequence
  Description of Artificial Sequence: Synthetic oligonucleotide
  Antisense strand to SEQ ID NO: 1720997
uucuuacauacacaugguc

SEQ ID NO: 1720999 - RNA, 19 nt, Artificial Sequence
  Description of Artificial Sequence: Synthetic oligonucleotide
  Sense strand starting at position 1227 of SEQ ID NO: 1562086
guaagaauaagugagguuu

SEQ ID NO: 1721000 - RNA, 19 nt, Artificial Sequence
  Description of Artificial Sequence: Synthetic oligonucleotide
  Antisense strand to SEQ ID NO: 1720999
aaaccucacuuauucuuac

SEQ ID NO: 1721001 - RNA, 19 nt, Artificial Sequence
  Description of Artificial Sequence: Synthetic oligonucleotide
  Sense strand starting at position 1233 of SEQ ID NO: 1562086
auaagugagguuuaauccu

SEQ ID NO: 1721002 - RNA, 19 nt, Artificial Sequence
  Description of Artificial Sequence: Synthetic oligonucleotide
  Antisense strand to SEQ ID NO: 1721001
aggauuaaaccucacuuau

SEQ ID NO: 1721003 - RNA, 19 nt, Artificial Sequence
  Description of Artificial Sequence: Synthetic oligonucleotide
  Sense strand starting at position 1239 of SEQ ID NO: 1562086
gagguuuaauccuugaagg

SEQ ID NO: 1721004 - RNA, 19 nt, Artificial Sequence
  Description of Artificial Sequence: Synthetic oligonucleotide
  Antisense strand to SEQ ID NO: 1721003
ccuucaaggauuaaaccuc

SEQ ID NO: 1721005 - RNA, 19 nt, Artificial Sequence
  Description of Artificial Sequence: Synthetic oligonucleotide
  Sense strand starting at position 1240 of SEQ ID NO: 1562086
agguuuaauccuugaaggg

SEQ ID NO: 1721006 - RNA, 19 nt, Artificial Sequence
  Description of Artificial Sequence: Synthetic oligonucleotide
  Antisense strand to SEQ ID NO: 1721005
cccuucaaggauuaaaccu

SEQ ID NO: 1721007 - RNA, 19 nt, Artificial Sequence
  Description of Artificial Sequence: Synthetic oligonucleotide
  Sense strand starting at position 2036 of SEQ ID NO: 1562086
gcugcacugguuggaagaa

SEQ ID NO: 1721008 - RNA, 19 nt, Artificial Sequence
  Description of Artificial Sequence: Synthetic oligonucleotide
  Antisense strand to SEQ ID NO: 1721007
uucuuccaaccagugcagc

SEQ ID NO: 1721009 - RNA, 19 nt, Artificial Sequence
  Description of Artificial Sequence: Synthetic oligonucleotide
  Sense strand starting at position 2145 of SEQ ID NO: 1562086
ucggucucugugguuaagu

SEQ ID NO: 1721010 - RNA, 19 nt, Artificial Sequence
  Description of Artificial Sequence: Synthetic oligonucleotide
  Antisense strand to SEQ ID NO: 1721009
acuuaaccacagagaccga

SEQ ID NO: 1721011 - RNA, 19 nt, Artificial Sequence
  Description of Artificial Sequence: Synthetic oligonucleotide
  Sense strand starting at position 2150 of SEQ ID NO: 1562086
cucugugguuaaguuugaa

SEQ ID NO: 1721012 - RNA, 19 nt, Artificial Sequence
  Description of Artificial Sequence: Synthetic oligonucleotide
  Antisense strand to SEQ ID NO: 1721011
uucaaacuuaaccacagag

SEQ ID NO: 1721013 - RNA, 19 nt, Artificial Sequence
  Description of Artificial Sequence: Synthetic oligonucleotide
  Sense strand starting at position 2153 of SEQ ID NO: 1562086
ugugguuaaguuugaagua

SEQ ID NO: 1721014 - RNA, 19 nt, Artificial Sequence
  Description of Artificial Sequence: Synthetic oligonucleotide
  Antisense strand to SEQ ID NO: 1721013
uacuucaaacuuaaccaca

SEQ ID NO: 1721015 - RNA, 19 nt, Artificial Sequence
  Description of Artificial Sequence: Synthetic oligonucleotide
  Sense strand starting at position 2274 of SEQ ID NO: 1562086
auccuucuacauggagaua

SEQ ID NO: 1721016 - RNA, 19 nt, Artificial Sequence
  Description of Artificial Sequence: Synthetic oligonucleotide
  Antisense strand to SEQ ID NO: 1721015
uaucuccauguagaaggau

SEQ ID NO: 1721017 - RNA, 19 nt, Artificial Sequence
  Description of Artificial Sequence: Synthetic oligonucleotide
  Sense strand starting at position 2406 of SEQ ID NO: 1562086
cguauuuguuaccuggcua

SEQ ID NO: 1721018 - RNA, 19 nt, Artificial Sequence
  Description of Artificial Sequence: Synthetic oligonucleotide
  Antisense strand to SEQ ID NO: 1721017
uagccagguaacaaauacg

SEQ ID NO: 1721019 - RNA, 19 nt, Artificial Sequence
  Description of Artificial Sequence: Synthetic oligonucleotide
  Sense strand starting at position 2427 of SEQ ID NO: 1562086
agguuucgaauucgaauga

SEQ ID NO: 1721020 - RNA, 19 nt, Artificial Sequence
  Description of Artificial Sequence: Synthetic oligonucleotide
  Antisense strand to SEQ ID NO: 1721019
ucauucgaauucgaaaccu

SEQ ID NO: 1721021 - RNA, 19 nt, Artificial Sequence
  Description of Artificial Sequence: Synthetic oligonucleotide
  Sense strand starting at position 2529 of SEQ ID NO: 1562086
cuauuaaugucaccuuugu

SEQ ID NO: 1721022 - RNA, 19 nt, Artificial Sequence
  Description of Artificial Sequence: Synthetic oligonucleotide
  Antisense strand to SEQ ID NO: 1721021
acaaaggugacauuaauag

SEQ ID NO: 1721023 - RNA, 19 nt, Artificial Sequence
  Description of Artificial Sequence: Synthetic oligonucleotide
  Sense strand starting at position 2605 of SEQ ID NO: 1562086
ucugcuucugcguuaauuc

SEQ ID NO: 1721024 - RNA, 19 nt, Artificial Sequence
  Description of Artificial Sequence: Synthetic oligonucleotide
  Antisense strand to SEQ ID NO: 1721023
gaauuaacgcagaagcaga

SEQ ID NO: 1721025 - RNA, 19 nt, Artificial Sequence
  Description of Artificial Sequence: Synthetic oligonucleotide
  Sense strand starting at position 2816 of SEQ ID NO: 1562086
gcaagaacauaucuaggca

SEQ ID NO: 1721026 - RNA, 19 nt, Artificial Sequence
  Description of Artificial Sequence: Synthetic oligonucleotide
  Antisense strand to SEQ ID NO: 1721025
ugccuagauauguucuugc

SEQ ID NO: 1721027 - RNA, 19 nt, Artificial Sequence
  Description of Artificial Sequence: Synthetic oligonucleotide
  Sense strand starting at position 2828 of SEQ ID NO: 1562086
cuaggcauccaagaaguau

SEQ ID NO: 1721028 - RNA, 19 nt, Artificial Sequence
  Description of Artificial Sequence: Synthetic oligonucleotide
  Antisense strand to SEQ ID NO: 1721027
auacuucuuggaugccuag

SEQ ID NO: 1721029 - RNA, 19 nt, Artificial Sequence
  Description of Artificial Sequence: Synthetic oligonucleotide
  Sense strand starting at position 3052 of SEQ ID NO: 1562086
cagauuaauuauucucggu

SEQ ID NO: 1721030 - RNA, 19 nt, Artificial Sequence
  Description of Artificial Sequence: Synthetic oligonucleotide
  Antisense strand to SEQ ID NO: 1721029
accgagaauaauuaaucug

SEQ ID NO: 1721031 - RNA, 19 nt, Artificial Sequence
  Description of Artificial Sequence: Synthetic oligonucleotide
  Sense strand starting at position 3054 of SEQ ID NO: 1562086
gauuaauuauucucgguaa

SEQ ID NO: 1721032 - RNA, 19 nt, Artificial Sequence
  Description of Artificial Sequence: Synthetic oligonucleotide
  Antisense strand to SEQ ID NO: 1721031
uuaccgagaauaauuaauc

SEQ ID NO: 1721033 - RNA, 19 nt, Artificial Sequence
  Description of Artificial Sequence: Synthetic oligonucleotide
  Sense strand starting at position 3056 of SEQ ID NO: 1562086
uuaauuauucucgguaagg

SEQ ID NO: 1721034 - RNA, 19 nt, Artificial Sequence
  Description of Artificial Sequence: Synthetic oligonucleotide
  Antisense strand to SEQ ID NO: 1721033
ccuuaccgagaauaauuaa

SEQ ID NO: 1721035 - RNA, 19 nt, Artificial Sequence
  Description of Artificial Sequence: Synthetic oligonucleotide
  Sense strand starting at position 3057 of SEQ ID NO: 1562086
uaauuauucucgguaagga

SEQ ID NO: 1721036 - RNA, 19 nt, Artificial Sequence
  Description of Artificial Sequence: Synthetic oligonucleotide
  Antisense strand to SEQ ID NO: 1721035
uccuuaccgagaauaauua

SEQ ID NO: 1721037 - RNA, 19 nt, Artificial Sequence
  Description of Artificial Sequence: Synthetic oligonucleotide
  Sense strand starting at position 3152 of SEQ ID NO: 1562086
uuaauauuauucgccaaag

SEQ ID NO: 1721038 - RNA, 19 nt, Artificial Sequence
  Description of Artificial Sequence: Synthetic oligonucleotide
  Antisense strand to SEQ ID NO: 1721037
cuuuggcgaauaauauuaa

SEQ ID NO: 1721039 - RNA, 19 nt, Artificial Sequence
  Description of Artificial Sequence: Synthetic oligonucleotide
  Sense strand starting at position 3222 of SEQ ID NO: 1562086
aagaaagauuguuauagga

SEQ ID NO: 1721040 - RNA, 19 nt, Artificial Sequence
  Description of Artificial Sequence: Synthetic oligonucleotide
  Antisense strand to SEQ ID NO: 1721039
uccuauaacaaucuuucuu

SEQ ID NO: 1721041 - RNA, 19 nt, Artificial Sequence
  Description of Artificial Sequence: Synthetic oligonucleotide
  Sense strand starting at position 3257 of SEQ ID NO: 1562086
uccauugugcgguaacaga

SEQ ID NO: 1721042 - RNA, 19 nt, Artificial Sequence
  Description of Artificial Sequence: Synthetic oligonucleotide
  Antisense strand to SEQ ID NO: 1721041
ucuguuaccgcacaaugga

SEQ ID NO: 1721043 - RNA, 19 nt, Artificial Sequence
  Description of Artificial Sequence: Synthetic oligonucleotide
  Sense strand starting at position 3727 of SEQ ID NO: 1562086
uaagcaauuccuggguaca

SEQ ID NO: 1721044 - RNA, 19 nt, Artificial Sequence
  Description of Artificial Sequence: Synthetic oligonucleotide
  Antisense strand to SEQ ID NO: 1721043
uguacccaggaauugcuua

SEQ ID NO: 1721045 - RNA, 19 nt, Artificial Sequence
  Description of Artificial Sequence: Synthetic oligonucleotide
  Sense strand starting at position 3729 of SEQ ID NO: 1562086
agcaauuccuggguacaaa

SEQ ID NO: 1721046 - RNA, 19 nt, Artificial Sequence
  Description of Artificial Sequence: Synthetic oligonucleotide
  Antisense strand to SEQ ID NO: 1721045
uuuguacccaggaauugcu

SEQ ID NO: 1721047 - RNA, 19 nt, Artificial Sequence
  Description of Artificial Sequence: Synthetic oligonucleotide
  Sense strand starting at position 3750 of SEQ ID NO: 1562086
gcuagugucagagauucug

SEQ ID NO: 1721048 - RNA, 19 nt, Artificial Sequence
  Description of Artificial Sequence: Synthetic oligonucleotide
  Antisense strand to SEQ ID NO: 1721047
cagaaucucugacacuagc

SEQ ID NO: 1721049 - RNA, 19 nt, Artificial Sequence
  Description of Artificial Sequence: Synthetic oligonucleotide
  Sense strand starting at position 3756 of SEQ ID NO: 1562086
gucagagauucuguggaua

SEQ ID NO: 1721050 - RNA, 19 nt, Artificial Sequence
  Description of Artificial Sequence: Synthetic oligonucleotide
  Antisense strand to SEQ ID NO: 1721049
uauccacagaaucucugac

SEQ ID NO: 1721051 - RNA, 19 nt, Artificial Sequence
  Description of Artificial Sequence: Synthetic oligonucleotide
  Sense strand starting at position 3785 of SEQ ID NO: 1562086
gggaguaggugaucagugu

SEQ ID NO: 1721052 - RNA, 19 nt, Artificial Sequence
  Description of Artificial Sequence: Synthetic oligonucleotide
  Antisense strand to SEQ ID NO: 1721051
acacugaucaccuacuccc

SEQ ID NO: 1721053 - RNA, 19 nt, Artificial Sequence
  Description of Artificial Sequence: Synthetic oligonucleotide
  Sense strand starting at position 3866 of SEQ ID NO: 1562086
cuggucagugccuaacuaa

SEQ ID NO: 1721054 - RNA, 19 nt, Artificial Sequence
  Description of Artificial Sequence: Synthetic oligonucleotide
  Antisense strand to SEQ ID NO: 1721053
uuaguuaggcacugaccag

SEQ ID NO: 1721055 - RNA, 19 nt, Artificial Sequence
  Description of Artificial Sequence: Synthetic oligonucleotide
  Sense strand starting at position 3889 of SEQ ID NO: 1562086
ccuaaaggcuggcuuguaa

SEQ ID NO: 1721056 - RNA, 19 nt, Artificial Sequence
  Description of Artificial Sequence: Synthetic oligonucleotide
  Antisense strand to SEQ ID NO: 1721055
uuacaagccagccuuuagg

SEQ ID NO: 1721057 - RNA, 19 nt, Artificial Sequence
  Description of Artificial Sequence: Synthetic oligonucleotide
  Sense strand starting at position 154 of SEQ ID NO: 1562087
cgcccacuuccugaauaug

SEQ ID NO: 1721058 - RNA, 19 nt, Artificial Sequence
  Description of Artificial Sequence: Synthetic oligonucleotide
  Antisense strand to SEQ ID NO: 1721057
cauauucaggaagugggcg

SEQ ID NO: 1721059 - RNA, 19 nt, Artificial Sequence
  Description of Artificial Sequence: Synthetic oligonucleotide
  Sense strand starting at position 174 of SEQ ID NO: 1562087
auaacaacugucuguuauu

SEQ ID NO: 1721060 - RNA, 19 nt, Artificial Sequence
  Description of Artificial Sequence: Synthetic oligonucleotide
  Antisense strand to SEQ ID NO: 1721059
aauaacagacaguuguuau

SEQ ID NO: 1721061 - RNA, 19 nt, Artificial Sequence
  Description of Artificial Sequence: Synthetic oligonucleotide
  Sense strand starting at position 232 of SEQ ID NO: 1562087
auaauauugcauggcuaga

SEQ ID NO: 1721062 - RNA, 19 nt, Artificial Sequence
  Description of Artificial Sequence: Synthetic oligonucleotide
  Antisense strand to SEQ ID NO: 1721061
ucuagccaugcaauauuau

SEQ ID NO: 1721063 - RNA, 19 nt, Artificial Sequence
  Description of Artificial Sequence: Synthetic oligonucleotide
  Sense strand starting at position 329 of SEQ ID NO: 1562087
aucuguuuauuucuggcaa

SEQ ID NO: 1721064 - RNA, 19 nt, Artificial Sequence
  Description of Artificial Sequence: Synthetic oligonucleotide
  Antisense strand to SEQ ID NO: 1721063
uugccagaaauaaacagau

SEQ ID NO: 1721065 - RNA, 19 nt, Artificial Sequence
  Description of Artificial Sequence: Synthetic oligonucleotide
  Sense strand starting at position 411 of SEQ ID NO: 1562087
auaacuaaagucggaauga

SEQ ID NO: 1721066 - RNA, 19 nt, Artificial Sequence
  Description of Artificial Sequence: Synthetic oligonucleotide
  Antisense strand to SEQ ID NO: 1721065
ucauuccgacuuuaguuau

SEQ ID NO: 1721067 - RNA, 19 nt, Artificial Sequence
  Description of Artificial Sequence: Synthetic oligonucleotide
  Sense strand starting at position 986 of SEQ ID NO: 1562087
aaguuaugcgcaugaggga

SEQ ID NO: 1721068 - RNA, 19 nt, Artificial Sequence
  Description of Artificial Sequence: Synthetic oligonucleotide
  Antisense strand to SEQ ID NO: 1721067
ucccucaugcgcauaacuu

SEQ ID NO: 1721069 - RNA, 19 nt, Artificial Sequence
  Description of Artificial Sequence: Synthetic oligonucleotide
  Sense strand starting at position 1021 of SEQ ID NO: 1562087
gggagauggguccauagcu

SEQ ID NO: 1721070 - RNA, 19 nt, Artificial Sequence
  Description of Artificial Sequence: Synthetic oligonucleotide
  Antisense strand to SEQ ID NO: 1721069
agcuauggacccaucuccc

SEQ ID NO: 1721071 - RNA, 19 nt, Artificial Sequence
  Description of Artificial Sequence: Synthetic oligonucleotide
  Sense strand starting at position 1060 of SEQ ID NO: 1562087
gguaucugaagagguaaau

SEQ ID NO: 1721072 - RNA, 19 nt, Artificial Sequence
  Description of Artificial Sequence: Synthetic oligonucleotide
  Antisense strand to SEQ ID NO: 1721071
auuuaccucuucagauacc

SEQ ID NO: 1721073 - RNA, 19 nt, Artificial Sequence
  Description of Artificial Sequence: Synthetic oligonucleotide
  Sense strand starting at position 1190 of SEQ ID NO: 1562087
agugaccauguguauguaa

SEQ ID NO: 1721074 - RNA, 19 nt, Artificial Sequence
  Description of Artificial Sequence: Synthetic oligonucleotide
  Antisense strand to SEQ ID NO: 1721073
uuacauacacauggucacu

SEQ ID NO: 1721075 - RNA, 19 nt, Artificial Sequence
  Description of Artificial Sequence: Synthetic oligonucleotide
  Sense strand starting at position 1192 of SEQ ID NO: 1562087
ugaccauguguauguaaga

SEQ ID NO: 1721076 - RNA, 19 nt, Artificial Sequence
  Description of Artificial Sequence: Synthetic oligonucleotide
  Antisense strand to SEQ ID NO: 1721075
ucuuacauacacaugguca

SEQ ID NO: 1721077 - RNA, 19 nt, Artificial Sequence
  Description of Artificial Sequence: Synthetic oligonucleotide
  Sense strand starting at position 1193 of SEQ ID NO: 1562087
gaccauguguauguaagaa

SEQ ID NO: 1721078 - RNA, 19 nt, Artificial Sequence
  Description of Artificial Sequence: Synthetic oligonucleotide
  Antisense strand to SEQ ID NO: 1721077
uucuuacauacacaugguc

SEQ ID NO: 1721079 - RNA, 19 nt, Artificial Sequence
  Description of Artificial Sequence: Synthetic oligonucleotide
  Sense strand starting at position 1205 of SEQ ID NO: 1562087
guaagaauaagugagguuu

SEQ ID NO: 1721080 - RNA, 19 nt, Artificial Sequence
  Description of Artificial Sequence: Synthetic oligonucleotide
  Antisense strand to SEQ ID NO: 1721079
aaaccucacuuauucuuac

SEQ ID NO: 1721081 - RNA, 19 nt, Artificial Sequence
  Description of Artificial Sequence: Synthetic oligonucleotide
  Sense strand starting at position 1211 of SEQ ID NO: 1562087
auaagugagguuuaauccu

SEQ ID NO: 1721082 - RNA, 19 nt, Artificial Sequence
  Description of Artificial Sequence: Synthetic oligonucleotide
  Antisense strand to SEQ ID NO: 1721081
aggauuaaaccucacuuau

SEQ ID NO: 1721083 - RNA, 19 nt, Artificial Sequence
  Description of Artificial Sequence: Synthetic oligonucleotide
  Sense strand starting at position 1217 of SEQ ID NO: 1562087
gagguuuaauccuugaagg

SEQ ID NO: 1721084 - RNA, 19 nt, Artificial Sequence
  Description of Artificial Sequence: Synthetic oligonucleotide
  Antisense strand to SEQ ID NO: 1721083
ccuucaaggauuaaaccuc

SEQ ID NO: 1721085 - RNA, 19 nt, Artificial Sequence
  Description of Artificial Sequence: Synthetic oligonucleotide
  Sense strand starting at position 1218 of SEQ ID NO: 1562087
agguuuaauccuugaaggg

SEQ ID NO: 1721086 - RNA, 19 nt, Artificial Sequence
  Description of Artificial Sequence: Synthetic oligonucleotide
  Antisense strand to SEQ ID NO: 1721085
cccuucaaggauuaaaccu

SEQ ID NO: 1721087 - RNA, 19 nt, Artificial Sequence
  Description of Artificial Sequence: Synthetic oligonucleotide
  Sense strand starting at position 2014 of SEQ ID NO: 1562087
gcugcacugguuggaagaa

SEQ ID NO: 1721088 - RNA, 19 nt, Artificial Sequence
  Description of Artificial Sequence: Synthetic oligonucleotide
  Antisense strand to SEQ ID NO: 1721087
uucuuccaaccagugcagc

SEQ ID NO: 1721089 - RNA, 19 nt, Artificial Sequence
  Description of Artificial Sequence: Synthetic oligonucleotide
  Sense strand starting at position 2123 of SEQ ID NO: 1562087
ucggucucugugguuaagu

SEQ ID NO: 1721090 - RNA, 19 nt, Artificial Sequence
  Description of Artificial Sequence: Synthetic oligonucleotide
  Antisense strand to SEQ ID NO: 1721089
acuuaaccacagagaccga

SEQ ID NO: 1721091 - RNA, 19 nt, Artificial Sequence
  Description of Artificial Sequence: Synthetic oligonucleotide
  Sense strand starting at position 2128 of SEQ ID NO: 1562087
cucugugguuaaguuugaa

SEQ ID NO: 1721092 - RNA, 19 nt, Artificial Sequence
  Description of Artificial Sequence: Synthetic oligonucleotide
  Antisense strand to SEQ ID NO: 1721091
uucaaacuuaaccacagag

SEQ ID NO: 1721093 - RNA, 19 nt, Artificial Sequence
  Description of Artificial Sequence: Synthetic oligonucleotide
  Sense strand starting at position 2252 of SEQ ID NO: 1562087
auccuucuacauggagaua

SEQ ID NO: 1721094 - RNA, 19 nt, Artificial Sequence
  Description of Artificial Sequence: Synthetic oligonucleotide
  Antisense strand to SEQ ID NO: 1721093
uaucuccauguagaaggau

SEQ ID NO: 1721095 - RNA, 19 nt, Artificial Sequence
  Description of Artificial Sequence: Synthetic oligonucleotide
  Sense strand starting at position 2384 of SEQ ID NO: 1562087
cguauuuguuaccuggcua

SEQ ID NO: 1721096 - RNA, 19 nt, Artificial Sequence
  Description of Artificial Sequence: Synthetic oligonucleotide
  Antisense strand to SEQ ID NO: 1721095
uagccagguaacaaauacg

SEQ ID NO: 1721097 - RNA, 19 nt, Artificial Sequence
  Description of Artificial Sequence: Synthetic oligonucleotide
  Sense strand starting at position 2405 of SEQ ID NO: 1562087
agguuucgaauucgaauga

SEQ ID NO: 1721098 - RNA, 19 nt, Artificial Sequence
  Description of Artificial Sequence: Synthetic oligonucleotide
  Antisense strand to SEQ ID NO: 1721097
ucauucgaauucgaaaccu

SEQ ID NO: 1721099 - RNA, 19 nt, Artificial Sequence
  Description of Artificial Sequence: Synthetic oligonucleotide
  Sense strand starting at position 2507 of SEQ ID NO: 1562087
cuauuaaugucaccuuugu

SEQ ID NO: 1721100 - RNA, 19 nt, Artificial Sequence
  Description of Artificial Sequence: Synthetic oligonucleotide
  Antisense strand to SEQ ID NO: 1721099
acaaaggugacauuaauag

SEQ ID NO: 1721101 - RNA, 19 nt, Artificial Sequence
  Description of Artificial Sequence: Synthetic oligonucleotide
  Sense strand starting at position 2583 of SEQ ID NO: 1562087
ucugcuucugcguuaauuc

SEQ ID NO: 1721102 - RNA, 19 nt, Artificial Sequence
  Description of Artificial Sequence: Synthetic oligonucleotide
  Antisense strand to SEQ ID NO: 1721101
gaauuaacgcagaagcaga

SEQ ID NO: 1721103 - RNA, 19 nt, Artificial Sequence
  Description of Artificial Sequence: Synthetic oligonucleotide
  Sense strand starting at position 2794 of SEQ ID NO: 1562087
gcaagaacauaucuaggca

SEQ ID NO: 1721104 - RNA, 19 nt, Artificial Sequence
  Description of Artificial Sequence: Synthetic oligonucleotide
  Antisense strand to SEQ ID NO: 1721103
ugccuagauauguucuugc

SEQ ID NO: 1721105 - RNA, 19 nt, Artificial Sequence
  Description of Artificial Sequence: Synthetic oligonucleotide
  Sense strand starting at position 2806 of SEQ ID NO: 1562087
cuaggcauccaagaaguau

SEQ ID NO: 1721106 - RNA, 19 nt, Artificial Sequence
  Description of Artificial Sequence: Synthetic oligonucleotide
  Antisense strand to SEQ ID NO: 1721105
auacuucuuggaugccuag

SEQ ID NO: 1721107 - RNA, 19 nt, Artificial Sequence
  Description of Artificial Sequence: Synthetic oligonucleotide
  Sense strand starting at position 3030 of SEQ ID NO: 1562087
cagauuaauuauucucggu

SEQ ID NO: 1721108 - RNA, 19 nt, Artificial Sequence
  Description of Artificial Sequence: Synthetic oligonucleotide
  Antisense strand to SEQ ID NO: 1721107
accgagaauaauuaaucug

SEQ ID NO: 1721109 - RNA, 19 nt, Artificial Sequence
  Description of Artificial Sequence: Synthetic oligonucleotide
  Sense strand starting at position 3032 of SEQ ID NO: 1562087
gauuaauuauucucgguaa

SEQ ID NO: 1721110 - RNA, 19 nt, Artificial Sequence
  Description of Artificial Sequence: Synthetic oligonucleotide
  Antisense strand to SEQ ID NO: 1721109
uuaccgagaauaauuaauc

SEQ ID NO: 1721111 - RNA, 19 nt, Artificial Sequence
  Description of Artificial Sequence: Synthetic oligonucleotide
  Sense strand starting at position 3034 of SEQ ID NO: 1562087
uuaauuauucucgguaagg

SEQ ID NO: 1721112 - RNA, 19 nt, Artificial Sequence
  Description of Artificial Sequence: Synthetic oligonucleotide
  Antisense strand to SEQ ID NO: 1721111
ccuuaccgagaauaauuaa

SEQ ID NO: 1721113 - RNA, 19 nt, Artificial Sequence
  Description of Artificial Sequence: Synthetic oligonucleotide
  Sense strand starting at position 3035 of SEQ ID NO: 1562087
uaauuauucucgguaagga

SEQ ID NO: 1721114 - RNA, 19 nt, Artificial Sequence
  Description of Artificial Sequence: Synthetic oligonucleotide
  Antisense strand to SEQ ID NO: 1721113
uccuuaccgagaauaauua

SEQ ID NO: 1721115 - RNA, 19 nt, Artificial Sequence
  Description of Artificial Sequence: Synthetic oligonucleotide
  Sense strand starting at position 3130 of SEQ ID NO: 1562087
uuaauauuauucgccaaag

SEQ ID NO: 1721116 - RNA, 19 nt, Artificial Sequence
  Description of Artificial Sequence: Synthetic oligonucleotide
  Antisense strand to SEQ ID NO: 1721115
cuuuggcgaauaauauuaa

SEQ ID NO: 1721117 - RNA, 19 nt, Artificial Sequence
  Description of Artificial Sequence: Synthetic oligonucleotide
  Sense strand starting at position 3200 of SEQ ID NO: 1562087
aagaaagauuguuauagga

SEQ ID NO: 1721118 - RNA, 19 nt, Artificial Sequence
  Description of Artificial Sequence: Synthetic oligonucleotide
  Antisense strand to SEQ ID NO: 1721117
uccuauaacaaucuuucuu

SEQ ID NO: 1721119 - RNA, 19 nt, Artificial Sequence
  Description of Artificial Sequence: Synthetic oligonucleotide
  Sense strand starting at position 3235 of SEQ ID NO: 1562087
uccauugugcgguaacaga

SEQ ID NO: 1721120 - RNA, 19 nt, Artificial Sequence
  Description of Artificial Sequence: Synthetic oligonucleotide
  Antisense strand to SEQ ID NO: 1721119
ucuguuaccgcacaaugga

SEQ ID NO: 1721121 - RNA, 19 nt, Artificial Sequence
  Description of Artificial Sequence: Synthetic oligonucleotide
  Sense strand starting at position 3705 of SEQ ID NO: 1562087
uaagcaauuccuggguaca

SEQ ID NO: 1721122 - RNA, 19 nt, Artificial Sequence
  Description of Artificial Sequence: Synthetic oligonucleotide
  Antisense strand to SEQ ID NO: 1721121
uguacccaggaauugcuua

SEQ ID NO: 1721123 - RNA, 19 nt, Artificial Sequence
  Description of Artificial Sequence: Synthetic oligonucleotide
  Sense strand starting at position 3707 of SEQ ID NO: 1562087
agcaauuccuggguacaaa

SEQ ID NO: 1721124 - RNA, 19 nt, Artificial Sequence
  Description of Artificial Sequence: Synthetic oligonucleotide
  Antisense strand to SEQ ID NO: 1721123
uuuguacccaggaauugcu

SEQ ID NO: 1721125 - RNA, 19 nt, Artificial Sequence
  Description of Artificial Sequence: Synthetic oligonucleotide
  Sense strand starting at position 3728 of SEQ ID NO: 1562087
gcuagugucagagauucug

SEQ ID NO: 1721126 - RNA, 19 nt, Artificial Sequence
  Description of Artificial Sequence: Synthetic oligonucleotide
  Antisense strand to SEQ ID NO: 1721125
cagaaucucugacacuagc

SEQ ID NO: 1721127 - RNA, 19 nt, Artificial Sequence
  Description of Artificial Sequence: Synthetic oligonucleotide
  Sense strand starting at position 3734 of SEQ ID NO: 1562087
gucagagauucuguggaua

SEQ ID NO: 1721128 - RNA, 19 nt, Artificial Sequence
  Description of Artificial Sequence: Synthetic oligonucleotide
  Antisense strand to SEQ ID NO: 1721127
uauccacagaaucucugac

SEQ ID NO: 1721129 - RNA, 19 nt, Artificial Sequence
  Description of Artificial Sequence: Synthetic oligonucleotide
  Sense strand starting at position 3763 of SEQ ID NO: 1562087
gggaguaggugaucagugu

SEQ ID NO: 1721130 - RNA, 19 nt, Artificial Sequence
  Description of Artificial Sequence: Synthetic oligonucleotide
  Antisense strand to SEQ ID NO: 1721129
acacugaucaccuacuccc

SEQ ID NO: 1721131 - RNA, 19 nt, Artificial Sequence
  Description of Artificial Sequence: Synthetic oligonucleotide
  Sense strand starting at position 3844 of SEQ ID NO: 1562087
cuggucagugccuaacuaa

SEQ ID NO: 1721132 - RNA, 19 nt, Artificial Sequence
  Description of Artificial Sequence: Synthetic oligonucleotide
  Antisense strand to SEQ ID NO: 1721131
uuaguuaggcacugaccag

SEQ ID NO: 1721133 - RNA, 19 nt, Artificial Sequence
  Description of Artificial Sequence: Synthetic oligonucleotide
  Sense strand starting at position 3978 of SEQ ID NO: 1562087
uugauuuacauguguuugu

SEQ ID NO: 1721134 - RNA, 19 nt, Artificial Sequence
  Description of Artificial Sequence: Synthetic oligonucleotide
  Antisense strand to SEQ ID NO: 1721133
acaaacacauguaaaucaa

SEQ ID NO: 1721135 - RNA, 19 nt, Artificial Sequence
  Description of Artificial Sequence: Synthetic oligonucleotide
  Sense strand starting at position 3979 of SEQ ID NO: 1562087
ugauuuacauguguuuguu

SEQ ID NO: 1721136 - RNA, 19 nt, Artificial Sequence
  Description of Artificial Sequence: Synthetic oligonucleotide
  Antisense strand to SEQ ID NO: 1721135
aacaaacacauguaaauca

SEQ ID NO: 1721137 - RNA, 19 nt, Artificial Sequence
  Description of Artificial Sequence: Synthetic oligonucleotide
  Sense strand starting at position 92 of SEQ ID NO: 1562088
gauaaagauuguguugaag

SEQ ID NO: 1721138 - RNA, 19 nt, Artificial Sequence
  Description of Artificial Sequence: Synthetic oligonucleotide
  Antisense strand to SEQ ID NO: 1721137
cuucaacacaaucuuuauc

SEQ ID NO: 1721139 - RNA, 19 nt, Artificial Sequence
  Description of Artificial Sequence: Synthetic oligonucleotide
  Sense strand starting at position 261 of SEQ ID NO: 1562088
ggcagacgacuguaauuca

SEQ ID NO: 1721140 - RNA, 19 nt, Artificial Sequence
  Description of Artificial Sequence: Synthetic oligonucleotide
  Antisense strand to SEQ ID NO: 1721139
ugaauuacagucgucugcc

SEQ ID NO: 1721141 - RNA, 19 nt, Artificial Sequence
  Description of Artificial Sequence: Synthetic oligonucleotide
  Sense strand starting at position 779 of SEQ ID NO: 1562088
ucaugucuucugugaauac

SEQ ID NO: 1721142 - RNA, 19 nt, Artificial Sequence
  Description of Artificial Sequence: Synthetic oligonucleotide
  Antisense strand to SEQ ID NO: 1721141
guauucacagaagacauga

SEQ ID NO: 1721143 - RNA, 19 nt, Artificial Sequence
  Description of Artificial Sequence: Synthetic oligonucleotide
  Sense strand starting at position 783 of SEQ ID NO: 1562088
gucuucugugaauacagau

SEQ ID NO: 1721144 - RNA, 19 nt, Artificial Sequence
  Description of Artificial Sequence: Synthetic oligonucleotide
  Antisense strand to SEQ ID NO: 1721143
aucuguauucacagaagac

SEQ ID NO: 1721145 - RNA, 19 nt, Artificial Sequence
  Description of Artificial Sequence: Synthetic oligonucleotide
  Sense strand starting at position 927 of SEQ ID NO: 1562088
ugauguuagggaugaagca

SEQ ID NO: 1721146 - RNA, 19 nt, Artificial Sequence
  Description of Artificial Sequence: Synthetic oligonucleotide
  Antisense strand to SEQ ID NO: 1721145
ugcuucaucccuaacauca

SEQ ID NO: 1721147 - RNA, 19 nt, Artificial Sequence
  Description of Artificial Sequence: Synthetic oligonucleotide
  Sense strand starting at position 936 of SEQ ID NO: 1562088
ggaugaagcagucagucuu

SEQ ID NO: 1721148 - RNA, 19 nt, Artificial Sequence
  Description of Artificial Sequence: Synthetic oligonucleotide
  Antisense strand to SEQ ID NO: 1721147
aagacugacugcuucaucc

SEQ ID NO: 1721149 - RNA, 19 nt, Artificial Sequence
  Description of Artificial Sequence: Synthetic oligonucleotide
  Sense strand starting at position 991 of SEQ ID NO: 1562088
cuucuaucagguugauaaa

SEQ ID NO: 1721150 - RNA, 19 nt, Artificial Sequence
  Description of Artificial Sequence: Synthetic oligonucleotide
  Antisense strand to SEQ ID NO: 1721149
uuuaucaaccugauagaag

SEQ ID NO: 1721151 - RNA, 19 nt, Artificial Sequence
  Description of Artificial Sequence: Synthetic oligonucleotide
  Sense strand starting at position 1020 of SEQ ID NO: 1562088
auucuuaguuugucacaca

SEQ ID NO: 1721152 - RNA, 19 nt, Artificial Sequence
  Description of Artificial Sequence: Synthetic oligonucleotide
  Antisense strand to SEQ ID NO: 1721151
ugugugacaaacuaagaau

SEQ ID NO: 1721153 - RNA, 19 nt, Artificial Sequence
  Description of Artificial Sequence: Synthetic oligonucleotide
  Sense strand starting at position 1140 of SEQ ID NO: 1562088
auuuaugggugguaaacca

SEQ ID NO: 1721154 - RNA, 19 nt, Artificial Sequence
  Description of Artificial Sequence: Synthetic oligonucleotide
  Antisense strand to SEQ ID NO: 1721153
ugguuuaccacccauaaau

SEQ ID NO: 1721155 - RNA, 19 nt, Artificial Sequence
  Description of Artificial Sequence: Synthetic oligonucleotide
  Sense strand starting at position 1247 of SEQ ID NO: 1562088
gcugaauucuaaccacuag

SEQ ID NO: 1721156 - RNA, 19 nt, Artificial Sequence
  Description of Artificial Sequence: Synthetic oligonucleotide
  Antisense strand to SEQ ID NO: 1721155
cuagugguuagaauucagc

SEQ ID NO: 1721157 - RNA, 19 nt, Artificial Sequence
  Description of Artificial Sequence: Synthetic oligonucleotide
  Sense strand starting at position 1395 of SEQ ID NO: 1562088
guaacuauuuaggaaacau

SEQ ID NO: 1721158 - RNA, 19 nt, Artificial Sequence
  Description of Artificial Sequence: Synthetic oligonucleotide
  Antisense strand to SEQ ID NO: 1721157
auguuuccuaaauaguuac

SEQ ID NO: 1721159 - RNA, 19 nt, Artificial Sequence
  Description of Artificial Sequence: Synthetic oligonucleotide
  Sense strand starting at position 1504 of SEQ ID NO: 1562088
cuuuaaagucuuggaacua

SEQ ID NO: 1721160 - RNA, 19 nt, Artificial Sequence
  Description of Artificial Sequence: Synthetic oligonucleotide
  Antisense strand to SEQ ID NO: 1721159
uaguuccaagacuuuaaag

SEQ ID NO: 1721161 - RNA, 19 nt, Artificial Sequence
  Description of Artificial Sequence: Synthetic oligonucleotide
  Sense strand starting at position 1678 of SEQ ID NO: 1562088
gugagacuaucauuaucau

SEQ ID NO: 1721162 - RNA, 19 nt, Artificial Sequence
  Description of Artificial Sequence: Synthetic oligonucleotide
  Antisense strand to SEQ ID NO: 1721161
augauaaugauagucucac

SEQ ID NO: 1721163 - RNA, 19 nt, Artificial Sequence
  Description of Artificial Sequence: Synthetic oligonucleotide
  Sense strand starting at position 1958 of SEQ ID NO: 1562088
cuaggugauuggcccaaga

SEQ ID NO: 1721164 - RNA, 19 nt, Artificial Sequence
  Description of Artificial Sequence: Synthetic oligonucleotide
  Antisense strand to SEQ ID NO: 1721163
ucuugggccaaucaccuag

SEQ ID NO: 1721165 - RNA, 19 nt, Artificial Sequence
  Description of Artificial Sequence: Synthetic oligonucleotide
  Sense strand starting at position 2097 of SEQ ID NO: 1562088
gagaauguaggcuguggaa

SEQ ID NO: 1721166 - RNA, 19 nt, Artificial Sequence
  Description of Artificial Sequence: Synthetic oligonucleotide
  Antisense strand to SEQ ID NO: 1721165
uuccacagccuacauucuc

SEQ ID NO: 1721167 - RNA, 19 nt, Artificial Sequence
  Description of Artificial Sequence: Synthetic oligonucleotide
  Sense strand starting at position 2127 of SEQ ID NO: 1562088
cuauuccucuggcugaaga

SEQ ID NO: 1721168 - RNA, 19 nt, Artificial Sequence
  Description of Artificial Sequence: Synthetic oligonucleotide
  Antisense strand to SEQ ID NO: 1721167
ucuucagccagaggaauag

SEQ ID NO: 1721169 - RNA, 19 nt, Artificial Sequence
  Description of Artificial Sequence: Synthetic oligonucleotide
  Sense strand starting at position 2129 of SEQ ID NO: 1562088
auuccucuggcugaagaua

SEQ ID NO: 1721170 - RNA, 19 nt, Artificial Sequence
  Description of Artificial Sequence: Synthetic oligonucleotide
  Antisense strand to SEQ ID NO: 1721169
uaucuucagccagaggaau

SEQ ID NO: 1721171 - RNA, 19 nt, Artificial Sequence
  Description of Artificial Sequence: Synthetic oligonucleotide
  Sense strand starting at position 2263 of SEQ ID NO: 1562088
uuauguugccucuagaggu

SEQ ID NO: 1721172 - RNA, 19 nt, Artificial Sequence
  Description of Artificial Sequence: Synthetic oligonucleotide
  Antisense strand to SEQ ID NO: 1721171
accucuagaggcaacauaa

SEQ ID NO: 1721173 - RNA, 19 nt, Artificial Sequence
  Description of Artificial Sequence: Synthetic oligonucleotide
  Sense strand starting at position 2438 of SEQ ID NO: 1562088
agaaacugcugaggauuua

SEQ ID NO: 1721174 - RNA, 19 nt, Artificial Sequence
  Description of Artificial Sequence: Synthetic oligonucleotide
  Antisense strand to SEQ ID NO: 1721173
uaaauccucagcaguuucu

SEQ ID NO: 1721175 - RNA, 19 nt, Artificial Sequence
  Description of Artificial Sequence: Synthetic oligonucleotide
  Sense strand starting at position 2468 of SEQ ID NO: 1562088
gcaaacaaagacuguuuaa

SEQ ID NO: 1721176 - RNA, 19 nt, Artificial Sequence
  Description of Artificial Sequence: Synthetic oligonucleotide
  Antisense strand to SEQ ID NO: 1721175
uuaaacagucuuuguuugc

SEQ ID NO: 1721177 - RNA, 19 nt, Artificial Sequence
  Description of Artificial Sequence: Synthetic oligonucleotide
  Sense strand starting at position 2478 of SEQ ID NO: 1562088
acuguuuaacaaugucuuu

SEQ ID NO: 1721178 - RNA, 19 nt, Artificial Sequence
  Description of Artificial Sequence: Synthetic oligonucleotide
  Antisense strand to SEQ ID NO: 1721177
aaagacauuguuaaacagu

SEQ ID NO: 1721179 - RNA, 19 nt, Artificial Sequence
  Description of Artificial Sequence: Synthetic oligonucleotide
  Sense strand starting at position 2481 of SEQ ID NO: 1562088
guuuaacaaugucuuuaca

SEQ ID NO: 1721180 - RNA, 19 nt, Artificial Sequence
  Description of Artificial Sequence: Synthetic oligonucleotide
  Antisense strand to SEQ ID NO: 1721179
uguaaagacauuguuaaac

SEQ ID NO: 1721181 - RNA, 19 nt, Artificial Sequence
  Description of Artificial Sequence: Synthetic oligonucleotide
  Sense strand starting at position 2491 of SEQ ID NO: 1562088
gucuuuacauaccucagau

SEQ ID NO: 1721182 - RNA, 19 nt, Artificial Sequence
  Description of Artificial Sequence: Synthetic oligonucleotide
  Antisense strand to SEQ ID NO: 1721181
aucugagguauguaaagac

SEQ ID NO: 1721183 - RNA, 19 nt, Artificial Sequence
  Description of Artificial Sequence: Synthetic oligonucleotide
  Sense strand starting at position 2613 of SEQ ID NO: 1562088
uugagaaauuaugccuaca

SEQ ID NO: 1721184 - RNA, 19 nt, Artificial Sequence
  Description of Artificial Sequence: Synthetic oligonucleotide
  Antisense strand to SEQ ID NO: 1721183
uguaggcauaauuucucaa

SEQ ID NO: 1721185 - RNA, 19 nt, Artificial Sequence
  Description of Artificial Sequence: Synthetic oligonucleotide
  Sense strand starting at position 2655 of SEQ ID NO: 1562088
uguccaggucauuacuuua

SEQ ID NO: 1721186 - RNA, 19 nt, Artificial Sequence
  Description of Artificial Sequence: Synthetic oligonucleotide
  Antisense strand to SEQ ID NO: 1721185
uaaaguaaugaccuggaca

SEQ ID NO: 1721187 - RNA, 19 nt, Artificial Sequence
  Description of Artificial Sequence: Synthetic oligonucleotide
  Sense strand starting at position 2658 of SEQ ID NO: 1562088
ccaggucauuacuuuagaa

SEQ ID NO: 1721188 - RNA, 19 nt, Artificial Sequence
  Description of Artificial Sequence: Synthetic oligonucleotide
  Antisense strand to SEQ ID NO: 1721187
uucuaaaguaaugaccugg

SEQ ID NO: 1721189 - RNA, 19 nt, Artificial Sequence
  Description of Artificial Sequence: Synthetic oligonucleotide
  Sense strand starting at position 2752 of SEQ ID NO: 1562088
acaaacguaauggguuaaa

SEQ ID NO: 1721190 - RNA, 19 nt, Artificial Sequence
  Description of Artificial Sequence: Synthetic oligonucleotide
  Antisense strand to SEQ ID NO: 1721189
uuuaacccauuacguuugu

SEQ ID NO: 1721191 - RNA, 19 nt, Artificial Sequence
  Description of Artificial Sequence: Synthetic oligonucleotide
  Sense strand starting at position 2819 of SEQ ID NO: 1562088
ccauucuuacagggcuaaa

SEQ ID NO: 1721192 - RNA, 19 nt, Artificial Sequence
  Description of Artificial Sequence: Synthetic oligonucleotide
  Antisense strand to SEQ ID NO: 1721191
uuuagcccuguaagaaugg

SEQ ID NO: 1721193 - RNA, 19 nt, Artificial Sequence
  Description of Artificial Sequence: Synthetic oligonucleotide
  Sense strand starting at position 2880 of SEQ ID NO: 1562088
auccauucuuggccuggaa

SEQ ID NO: 1721194 - RNA, 19 nt, Artificial Sequence
  Description of Artificial Sequence: Synthetic oligonucleotide
  Antisense strand to SEQ ID NO: 1721193
uuccaggccaagaauggau

SEQ ID NO: 1721195 - RNA, 19 nt, Artificial Sequence
  Description of Artificial Sequence: Synthetic oligonucleotide
  Sense strand starting at position 2882 of SEQ ID NO: 1562088
ccauucuuggccuggaauu

SEQ ID NO: 1721196 - RNA, 19 nt, Artificial Sequence
  Description of Artificial Sequence: Synthetic oligonucleotide
  Antisense strand to SEQ ID NO: 1721195
aauuccaggccaagaaugg

SEQ ID NO: 1721197 - RNA, 19 nt, Artificial Sequence
  Description of Artificial Sequence: Synthetic oligonucleotide
  Sense strand starting at position 3016 of SEQ ID NO: 1562088
agauacuugugauuacauu

SEQ ID NO: 1721198 - RNA, 19 nt, Artificial Sequence
  Description of Artificial Sequence: Synthetic oligonucleotide
  Antisense strand to SEQ ID NO: 1721197
aauguaaucacaaguaucu

SEQ ID NO: 1721199 - RNA, 19 nt, Artificial Sequence
  Description of Artificial Sequence: Synthetic oligonucleotide
  Sense strand starting at position 3245 of SEQ ID NO: 1562088
gcgccuguaguuucaggua

SEQ ID NO: 1721200 - RNA, 19 nt, Artificial Sequence
  Description of Artificial Sequence: Synthetic oligonucleotide
  Antisense strand to SEQ ID NO: 1721199
uaccugaaacuacaggcgc

SEQ ID NO: 1721201 - RNA, 19 nt, Artificial Sequence
  Description of Artificial Sequence: Synthetic oligonucleotide
  Sense strand starting at position 3281 of SEQ ID NO: 1562088
ugagaagugcuugaauccu

SEQ ID NO: 1721202 - RNA, 19 nt, Artificial Sequence
  Description of Artificial Sequence: Synthetic oligonucleotide
  Antisense strand to SEQ ID NO: 1721201
aggauucaagcacuucuca

SEQ ID NO: 1721203 - RNA, 19 nt, Artificial Sequence
  Description of Artificial Sequence: Synthetic oligonucleotide
  Sense strand starting at position 3496 of SEQ ID NO: 1562088
ggcuuugcuagggagugau

SEQ ID NO: 1721204 - RNA, 19 nt, Artificial Sequence
  Description of Artificial Sequence: Synthetic oligonucleotide
  Antisense strand to SEQ ID NO: 1721203
aucacucccuagcaaagcc

SEQ ID NO: 1721205 - RNA, 19 nt, Artificial Sequence
  Description of Artificial Sequence: Synthetic oligonucleotide
  Sense strand starting at position 3536 of SEQ ID NO: 1562088
acgagagugagucagcuaa

SEQ ID NO: 1721206 - RNA, 19 nt, Artificial Sequence
  Description of Artificial Sequence: Synthetic oligonucleotide
  Antisense strand to SEQ ID NO: 1721205
uuagcugacucacucucgu

SEQ ID NO: 1721207 - RNA, 19 nt, Artificial Sequence
  Description of Artificial Sequence: Synthetic oligonucleotide
  Sense strand starting at position 3538 of SEQ ID NO: 1562088
gagagugagucagcuaaac

SEQ ID NO: 1721208 - RNA, 19 nt, Artificial Sequence
  Description of Artificial Sequence: Synthetic oligonucleotide
  Antisense strand to SEQ ID NO: 1721207
guuuagcugacucacucuc

SEQ ID NO: 1721209 - RNA, 19 nt, Artificial Sequence
  Description of Artificial Sequence: Synthetic oligonucleotide
  Sense strand starting at position 3572 of SEQ ID NO: 1562088
uguugcaaugaacauguua

SEQ ID NO: 1721210 - RNA, 19 nt, Artificial Sequence
  Description of Artificial Sequence: Synthetic oligonucleotide
  Antisense strand to SEQ ID NO: 1721209
uaacauguucauugcaaca

SEQ ID NO: 1721211 - RNA, 19 nt, Artificial Sequence
  Description of Artificial Sequence: Synthetic oligonucleotide
  Sense strand starting at position 3903 of SEQ ID NO: 1562088
uaugguguuccagaacaug

SEQ ID NO: 1721212 - RNA, 19 nt, Artificial Sequence
  Description of Artificial Sequence: Synthetic oligonucleotide
  Antisense strand to SEQ ID NO: 1721211
cauguucuggaacaccaua

SEQ ID NO: 1721213 - RNA, 19 nt, Artificial Sequence
  Description of Artificial Sequence: Synthetic oligonucleotide
  Sense strand starting at position 3964 of SEQ ID NO: 1562088
ggugguauggagcauagua

SEQ ID NO: 1721214 - RNA, 19 nt, Artificial Sequence
  Description of Artificial Sequence: Synthetic oligonucleotide
  Antisense strand to SEQ ID NO: 1721213
uacuaugcuccauaccacc

SEQ ID NO: 1721215 - RNA, 19 nt, Artificial Sequence
  Description of Artificial Sequence: Synthetic oligonucleotide
  Sense strand starting at position 3966 of SEQ ID NO: 1562088
ugguauggagcauaguaua

SEQ ID NO: 1721216 - RNA, 19 nt, Artificial Sequence
  Description of Artificial Sequence: Synthetic oligonucleotide
  Antisense strand to SEQ ID NO: 1721215
uauacuaugcuccauacca

SEQ ID NO: 1721217 - RNA, 19 nt, Artificial Sequence
  Description of Artificial Sequence: Synthetic oligonucleotide
  Sense strand starting at position 169 of SEQ ID NO: 1562089
ugcgaacaaugguuaucaa

SEQ ID NO: 1721218 - RNA, 19 nt, Artificial Sequence
  Description of Artificial Sequence: Synthetic oligonucleotide
  Antisense strand to SEQ ID NO: 1721217
uugauaaccauuguucgca

SEQ ID NO: 1721219 - RNA, 19 nt, Artificial Sequence
  Description of Artificial Sequence: Synthetic oligonucleotide
  Sense strand starting at position 170 of SEQ ID NO: 1562089
gcgaacaaugguuaucaau

SEQ ID NO: 1721220 - RNA, 19 nt, Artificial Sequence
  Description of Artificial Sequence: Synthetic oligonucleotide
  Antisense strand to SEQ ID NO: 1721219
auugauaaccauuguucgc

SEQ ID NO: 1721221 - RNA, 19 nt, Artificial Sequence
  Description of Artificial Sequence: Synthetic oligonucleotide
  Sense strand starting at position 1627 of SEQ ID NO: 1562089
gguaauugauaauaagaag

SEQ ID NO: 1721222 - RNA, 19 nt, Artificial Sequence
  Description of Artificial Sequence: Synthetic oligonucleotide
  Antisense strand to SEQ ID NO: 1721221
cuucuuauuaucaauuacc

SEQ ID NO: 1721223 - RNA, 19 nt, Artificial Sequence
  Description of Artificial Sequence: Synthetic oligonucleotide
  Sense strand starting at position 1731 of SEQ ID NO: 1562089
ugaagcuuuggguggagaa

SEQ ID NO: 1721224 - RNA, 19 nt, Artificial Sequence
  Description of Artificial Sequence: Synthetic oligonucleotide
  Antisense strand to SEQ ID NO: 1721223
uucuccacccaaagcuuca

SEQ ID NO: 1721225 - RNA, 19 nt, Artificial Sequence
  Description of Artificial Sequence: Synthetic oligonucleotide
  Sense strand starting at position 1732 of SEQ ID NO: 1562089
gaagcuuuggguggagaaa

SEQ ID NO: 1721226 - RNA, 19 nt, Artificial Sequence
  Description of Artificial Sequence: Synthetic oligonucleotide
  Antisense strand to SEQ ID NO: 1721225
uuucuccacccaaagcuuc

SEQ ID NO: 1721227 - RNA, 19 nt, Artificial Sequence
  Description of Artificial Sequence: Synthetic oligonucleotide
  Sense strand starting at position 1766 of SEQ ID NO: 1562089
agagaagaaucugugccua

SEQ ID NO: 1721228 - RNA, 19 nt, Artificial Sequence
  Description of Artificial Sequence: Synthetic oligonucleotide
  Antisense strand to SEQ ID NO: 1721227
uaggcacagauucuucucu

SEQ ID NO: 1721229 - RNA, 19 nt, Artificial Sequence
  Description of Artificial Sequence: Synthetic oligonucleotide
  Sense strand starting at position 1768 of SEQ ID NO: 1562089
agaagaaucugugccuaaa

SEQ ID NO: 1721230 - RNA, 19 nt, Artificial Sequence
  Description of Artificial Sequence: Synthetic oligonucleotide
  Antisense strand to SEQ ID NO: 1721229
uuuaggcacagauucuucu

SEQ ID NO: 1721231 - RNA, 19 nt, Artificial Sequence
  Description of Artificial Sequence: Synthetic oligonucleotide
  Sense strand starting at position 1988 of SEQ ID NO: 1562089
uuuauaucuuccuugagug

SEQ ID NO: 1721232 - RNA, 19 nt, Artificial Sequence
  Description of Artificial Sequence: Synthetic oligonucleotide
  Antisense strand to SEQ ID NO: 1721231
cacucaaggaagauauaaa

SEQ ID NO: 1721233 - RNA, 19 nt, Artificial Sequence
  Description of Artificial Sequence: Synthetic oligonucleotide
  Sense strand starting at position 1989 of SEQ ID NO: 1562089
uuauaucuuccuugaguga

SEQ ID NO: 1721234 - RNA, 19 nt, Artificial Sequence
  Description of Artificial Sequence: Synthetic oligonucleotide
  Antisense strand to SEQ ID NO: 1721233
ucacucaaggaagauauaa

SEQ ID NO: 1721235 - RNA, 19 nt, Artificial Sequence
  Description of Artificial Sequence: Synthetic oligonucleotide
  Sense strand starting at position 1990 of SEQ ID NO: 1562089
uauaucuuccuugagugag

SEQ ID NO: 1721236 - RNA, 19 nt, Artificial Sequence
  Description of Artificial Sequence: Synthetic oligonucleotide
  Antisense strand to SEQ ID NO: 1721235
cucacucaaggaagauaua

SEQ ID NO: 1721237 - RNA, 19 nt, Artificial Sequence
  Description of Artificial Sequence: Synthetic oligonucleotide
  Sense strand starting at position 2052 of SEQ ID NO: 1562089
cuuagcuuaucaguaaaug

SEQ ID NO: 1721238 - RNA, 19 nt, Artificial Sequence
  Description of Artificial Sequence: Synthetic oligonucleotide
  Antisense strand to SEQ ID NO: 1721237
cauuuacugauaagcuaag

SEQ ID NO: 1721239 - RNA, 19 nt, Artificial Sequence
  Description of Artificial Sequence: Synthetic oligonucleotide
  Sense strand starting at position 2260 of SEQ ID NO: 1562089
agcaauugguuucugagaa

SEQ ID NO: 1721240 - RNA, 19 nt, Artificial Sequence
  Description of Artificial Sequence: Synthetic oligonucleotide
  Antisense strand to SEQ ID NO: 1721239
uucucagaaaccaauugcu

SEQ ID NO: 1721241 - RNA, 19 nt, Artificial Sequence
  Description of Artificial Sequence: Synthetic oligonucleotide
  Sense strand starting at position 2270 of SEQ ID NO: 1562089
uucugagaaugccuuuaua

SEQ ID NO: 1721242 - RNA, 19 nt, Artificial Sequence
  Description of Artificial Sequence: Synthetic oligonucleotide
  Antisense strand to SEQ ID NO: 1721241
uauaaaggcauucucagaa

SEQ ID NO: 1721243 - RNA, 19 nt, Artificial Sequence
  Description of Artificial Sequence: Synthetic oligonucleotide
  Sense strand starting at position 2273 of SEQ ID NO: 1562089
ugagaaugccuuuauauuc

SEQ ID NO: 1721244 - RNA, 19 nt, Artificial Sequence
  Description of Artificial Sequence: Synthetic oligonucleotide
  Antisense strand to SEQ ID NO: 1721243
gaauauaaaggcauucuca

SEQ ID NO: 1721245 - RNA, 19 nt, Artificial Sequence
  Description of Artificial Sequence: Synthetic oligonucleotide
  Sense strand starting at position 2500 of SEQ ID NO: 1562089
ugucaaauaugucugucaa

SEQ ID NO: 1721246 - RNA, 19 nt, Artificial Sequence
  Description of Artificial Sequence: Synthetic oligonucleotide
  Antisense strand to SEQ ID NO: 1721245
uugacagacauauuugaca

SEQ ID NO: 1721247 - RNA, 19 nt, Artificial Sequence
  Description of Artificial Sequence: Synthetic oligonucleotide
  Sense strand starting at position 2501 of SEQ ID NO: 1562089
gucaaauaugucugucaag

SEQ ID NO: 1721248 - RNA, 19 nt, Artificial Sequence
  Description of Artificial Sequence: Synthetic oligonucleotide
  Antisense strand to SEQ ID NO: 1721247
cuugacagacauauuugac

SEQ ID NO: 1721249 - RNA, 19 nt, Artificial Sequence
  Description of Artificial Sequence: Synthetic oligonucleotide
  Sense strand starting at position 2502 of SEQ ID NO: 1562089
ucaaauaugucugucaagu

SEQ ID NO: 1721250 - RNA, 19 nt, Artificial Sequence
  Description of Artificial Sequence: Synthetic oligonucleotide
  Antisense strand to SEQ ID NO: 1721249
acuugacagacauauuuga

SEQ ID NO: 1721251 - RNA, 19 nt, Artificial Sequence
  Description of Artificial Sequence: Synthetic oligonucleotide
  Sense strand starting at position 2535 of SEQ ID NO: 1562089
acugacauguauccaaagu

SEQ ID NO: 1721252 - RNA, 19 nt, Artificial Sequence
  Description of Artificial Sequence: Synthetic oligonucleotide
  Antisense strand to SEQ ID NO: 1721251
acuuuggauacaugucagu

SEQ ID NO: 1721253 - RNA, 19 nt, Artificial Sequence
  Description of Artificial Sequence: Synthetic oligonucleotide
  Sense strand starting at position 2632 of SEQ ID NO: 1562089
gcugcaaccuucucaggaa

SEQ ID NO: 1721254 - RNA, 19 nt, Artificial Sequence
  Description of Artificial Sequence: Synthetic oligonucleotide
  Antisense strand to SEQ ID NO: 1721253
uuccugagaagguugcagc

SEQ ID NO: 1721255 - RNA, 19 nt, Artificial Sequence
  Description of Artificial Sequence: Synthetic oligonucleotide
  Sense strand starting at position 2651 of SEQ ID NO: 1562089
gucugaauucaugguggag

SEQ ID NO: 1721256 - RNA, 19 nt, Artificial Sequence
  Description of Artificial Sequence: Synthetic oligonucleotide
  Antisense strand to SEQ ID NO: 1721255
cuccaccaugaauucagac

SEQ ID NO: 1721257 - RNA, 19 nt, Artificial Sequence
  Description of Artificial Sequence: Synthetic oligonucleotide
  Sense strand starting at position 2654 of SEQ ID NO: 1562089
ugaauucaugguggaguga

SEQ ID NO: 1721258 - RNA, 19 nt, Artificial Sequence
  Description of Artificial Sequence: Synthetic oligonucleotide
  Antisense strand to SEQ ID NO: 1721257
ucacuccaccaugaauuca

SEQ ID NO: 1721259 - RNA, 19 nt, Artificial Sequence
  Description of Artificial Sequence: Synthetic oligonucleotide
  Sense strand starting at position 2698 of SEQ ID NO: 1562089
agguaaguuccagaugugu

SEQ ID NO: 1721260 - RNA, 19 nt, Artificial Sequence
  Description of Artificial Sequence: Synthetic oligonucleotide
  Antisense strand to SEQ ID NO: 1721259
acacaucuggaacuuaccu

SEQ ID NO: 1721261 - RNA, 19 nt, Artificial Sequence
  Description of Artificial Sequence: Synthetic oligonucleotide
  Sense strand starting at position 2743 of SEQ ID NO: 1562089
ugcuuucauggugauagga

SEQ ID NO: 1721262 - RNA, 19 nt, Artificial Sequence
  Description of Artificial Sequence: Synthetic oligonucleotide
  Antisense strand to SEQ ID NO: 1721261
uccuaucaccaugaaagca

SEQ ID NO: 1721263 - RNA, 19 nt, Artificial Sequence
  Description of Artificial Sequence: Synthetic oligonucleotide
  Sense strand starting at position 2784 of SEQ ID NO: 1562089
aaaugcugguuucuagauu

SEQ ID NO: 1721264 - RNA, 19 nt, Artificial Sequence
  Description of Artificial Sequence: Synthetic oligonucleotide
  Antisense strand to SEQ ID NO: 1721263
aaucuagaaaccagcauuu

SEQ ID NO: 1721265 - RNA, 19 nt, Artificial Sequence
  Description of Artificial Sequence: Synthetic oligonucleotide
  Sense strand starting at position 2890 of SEQ ID NO: 1562089
ccaaacaggcugugagaaa

SEQ ID NO: 1721266 - RNA, 19 nt, Artificial Sequence
  Description of Artificial Sequence: Synthetic oligonucleotide
  Antisense strand to SEQ ID NO: 1721265
uuucucacagccuguuugg

SEQ ID NO: 1721267 - RNA, 19 nt, Artificial Sequence
  Description of Artificial Sequence: Synthetic oligonucleotide
  Sense strand starting at position 2935 of SEQ ID NO: 1562089
aauguauugugaguggaca

SEQ ID NO: 1721268 - RNA, 19 nt, Artificial Sequence
  Description of Artificial Sequence: Synthetic oligonucleotide
  Antisense strand to SEQ ID NO: 1721267
uguccacucacaauacauu

SEQ ID NO: 1721269 - RNA, 19 nt, Artificial Sequence
  Description of Artificial Sequence: Synthetic oligonucleotide
  Sense strand starting at position 2936 of SEQ ID NO: 1562089
auguauugugaguggacau

SEQ ID NO: 1721270 - RNA, 19 nt, Artificial Sequence
  Description of Artificial Sequence: Synthetic oligonucleotide
  Antisense strand to SEQ ID NO: 1721269
auguccacucacaauacau

SEQ ID NO: 1721271 - RNA, 19 nt, Artificial Sequence
  Description of Artificial Sequence: Synthetic oligonucleotide
  Sense strand starting at position 2968 of SEQ ID NO: 1562089
ccaccuuugguagaagcau

SEQ ID NO: 1721272 - RNA, 19 nt, Artificial Sequence
  Description of Artificial Sequence: Synthetic oligonucleotide
  Antisense strand to SEQ ID NO: 1721271
augcuucuaccaaaggugg

SEQ ID NO: 1721273 - RNA, 19 nt, Artificial Sequence
  Description of Artificial Sequence: Synthetic oligonucleotide
  Sense strand starting at position 3030 of SEQ ID NO: 1562089
cuuucuuuacuuugaguca

SEQ ID NO: 1721274 - RNA, 19 nt, Artificial Sequence
  Description of Artificial Sequence: Synthetic oligonucleotide
  Antisense strand to SEQ ID NO: 1721273
ugacucaaaguaaagaaag

SEQ ID NO: 1721275 - RNA, 19 nt, Artificial Sequence
  Description of Artificial Sequence: Synthetic oligonucleotide
  Sense strand starting at position 3046 of SEQ ID NO: 1562089
ucauaaagacuucguuaug

SEQ ID NO: 1721276 - RNA, 19 nt, Artificial Sequence
  Description of Artificial Sequence: Synthetic oligonucleotide
  Antisense strand to SEQ ID NO: 1721275
cauaacgaagucuuuauga

SEQ ID NO: 1721277 - RNA, 19 nt, Artificial Sequence
  Description of Artificial Sequence: Synthetic oligonucleotide
  Sense strand starting at position 3047 of SEQ ID NO: 1562089
cauaaagacuucguuauga

SEQ ID NO: 1721278 - RNA, 19 nt, Artificial Sequence
  Description of Artificial Sequence: Synthetic oligonucleotide
  Antisense strand to SEQ ID NO: 1721277
ucauaacgaagucuuuaug

SEQ ID NO: 1721279 - RNA, 19 nt, Artificial Sequence
  Description of Artificial Sequence: Synthetic oligonucleotide
  Sense strand starting at position 3049 of SEQ ID NO: 1562089
uaaagacuucguuaugagc

SEQ ID NO: 1721280 - RNA, 19 nt, Artificial Sequence
  Description of Artificial Sequence: Synthetic oligonucleotide
  Antisense strand to SEQ ID NO: 1721279
gcucauaacgaagucuuua

SEQ ID NO: 1721281 - RNA, 19 nt, Artificial Sequence
  Description of Artificial Sequence: Synthetic oligonucleotide
  Sense strand starting at position 3057 of SEQ ID NO: 1562089
ucguuaugagcagaccaca

SEQ ID NO: 1721282 - RNA, 19 nt, Artificial Sequence
  Description of Artificial Sequence: Synthetic oligonucleotide
  Antisense strand to SEQ ID NO: 1721281
uguggucugcucauaacga

SEQ ID NO: 1721283 - RNA, 19 nt, Artificial Sequence
  Description of Artificial Sequence: Synthetic oligonucleotide
  Sense strand starting at position 3191 of SEQ ID NO: 1562089
uuaaccuuccuguaggcaa

SEQ ID NO: 1721284 - RNA, 19 nt, Artificial Sequence
  Description of Artificial Sequence: Synthetic oligonucleotide
  Antisense strand to SEQ ID NO: 1721283
uugccuacaggaagguuaa

SEQ ID NO: 1721285 - RNA, 19 nt, Artificial Sequence
  Description of Artificial Sequence: Synthetic oligonucleotide
  Sense strand starting at position 3203 of SEQ ID NO: 1562089
uaggcaaugcucuauggaa

SEQ ID NO: 1721286 - RNA, 19 nt, Artificial Sequence
  Description of Artificial Sequence: Synthetic oligonucleotide
  Antisense strand to SEQ ID NO: 1721285
uuccauagagcauugccua

SEQ ID NO: 1721287 - RNA, 19 nt, Artificial Sequence
  Description of Artificial Sequence: Synthetic oligonucleotide
  Sense strand starting at position 3290 of SEQ ID NO: 1562089
augguuucucuaugagcca

SEQ ID NO: 1721288 - RNA, 19 nt, Artificial Sequence
  Description of Artificial Sequence: Synthetic oligonucleotide
  Antisense strand to SEQ ID NO: 1721287
uggcucauagagaaaccau

SEQ ID NO: 1721289 - RNA, 19 nt, Artificial Sequence
  Description of Artificial Sequence: Synthetic oligonucleotide
  Sense strand starting at position 3387 of SEQ ID NO: 1562089
aggugauauuguucugaac

SEQ ID NO: 1721290 - RNA, 19 nt, Artificial Sequence
  Description of Artificial Sequence: Synthetic oligonucleotide
  Antisense strand to SEQ ID NO: 1721289
guucagaacaauaucaccu

SEQ ID NO: 1721291 - RNA, 19 nt, Artificial Sequence
  Description of Artificial Sequence: Synthetic oligonucleotide
  Sense strand starting at position 3470 of SEQ ID NO: 1562089
agaaacuguucuguuccaa

SEQ ID NO: 1721292 - RNA, 19 nt, Artificial Sequence
  Description of Artificial Sequence: Synthetic oligonucleotide
  Antisense strand to SEQ ID NO: 1721291
uuggaacagaacaguuucu

SEQ ID NO: 1721293 - RNA, 19 nt, Artificial Sequence
  Description of Artificial Sequence: Synthetic oligonucleotide
  Sense strand starting at position 3740 of SEQ ID NO: 1562089
aucagugauuuggaaagca

SEQ ID NO: 1721294 - RNA, 19 nt, Artificial Sequence
  Description of Artificial Sequence: Synthetic oligonucleotide
  Antisense strand to SEQ ID NO: 1721293
ugcuuuccaaaucacugau

SEQ ID NO: 1721295 - RNA, 19 nt, Artificial Sequence
  Description of Artificial Sequence: Synthetic oligonucleotide
  Sense strand starting at position 3950 of SEQ ID NO: 1562089
ugcucaauucuaugggaaa

SEQ ID NO: 1721296 - RNA, 19 nt, Artificial Sequence
  Description of Artificial Sequence: Synthetic oligonucleotide
  Antisense strand to SEQ ID NO: 1721295
uuucccauagaauugagca

SEQ ID NO: 1721297 - RNA, 19 nt, Artificial Sequence
  Description of Artificial Sequence: Synthetic oligonucleotide
  Sense strand starting at position 1661 of SEQ ID NO: 1562090
ccugguaauugauaauaga

SEQ ID NO: 1721298 - RNA, 19 nt, Artificial Sequence
  Description of Artificial Sequence: Synthetic oligonucleotide
  Antisense strand to SEQ ID NO: 1721297
ucuauuaucaauuaccagg

SEQ ID NO: 1721299 - RNA, 19 nt, Artificial Sequence
  Description of Artificial Sequence: Synthetic oligonucleotide
  Sense strand starting at position 1767 of SEQ ID NO: 1562090
acagcguuggguggagaaa

SEQ ID NO: 1721300 - RNA, 19 nt, Artificial Sequence
  Description of Artificial Sequence: Synthetic oligonucleotide
  Antisense strand to SEQ ID NO: 1721299
uuucuccacccaacgcugu

SEQ ID NO: 1721301 - RNA, 19 nt, Artificial Sequence
  Description of Artificial Sequence: Synthetic oligonucleotide
  Sense strand starting at position 1804 of SEQ ID NO: 1562090
agaagaaucugugccugaa

SEQ ID NO: 1721302 - RNA, 19 nt, Artificial Sequence
  Description of Artificial Sequence: Synthetic oligonucleotide
  Antisense strand to SEQ ID NO: 1721301
uucaggcacagauucuucu

SEQ ID NO: 1721303 - RNA, 19 nt, Artificial Sequence
  Description of Artificial Sequence: Synthetic oligonucleotide
  Sense strand starting at position 1830 of SEQ ID NO: 1562090
cuguuugcacccugaauau

SEQ ID NO: 1721304 - RNA, 19 nt, Artificial Sequence
  Description of Artificial Sequence: Synthetic oligonucleotide
  Antisense strand to SEQ ID NO: 1721303
auauucagggugcaaacag

SEQ ID NO: 1721305 - RNA, 19 nt, Artificial Sequence
  Description of Artificial Sequence: Synthetic oligonucleotide
  Sense strand starting at position 1839 of SEQ ID NO: 1562090
cccugaauauccuuagagg

SEQ ID NO: 1721306 - RNA, 19 nt, Artificial Sequence
  Description of Artificial Sequence: Synthetic oligonucleotide
  Antisense strand to SEQ ID NO: 1721305
ccucuaaggauauucaggg

SEQ ID NO: 1721307 - RNA, 19 nt, Artificial Sequence
  Description of Artificial Sequence: Synthetic oligonucleotide
  Sense strand starting at position 1992 of SEQ ID NO: 1562090
aaucuugucugagaacuga

SEQ ID NO: 1721308 - RNA, 19 nt, Artificial Sequence
  Description of Artificial Sequence: Synthetic oligonucleotide
  Antisense strand to SEQ ID NO: 1721307
ucaguucucagacaagauu

SEQ ID NO: 1721309 - RNA, 19 nt, Artificial Sequence
  Description of Artificial Sequence: Synthetic oligonucleotide
  Sense strand starting at position 2024 of SEQ ID NO: 1562090
uuuauauguuccuugagug

SEQ ID NO: 1721310 - RNA, 19 nt, Artificial Sequence
  Description of Artificial Sequence: Synthetic oligonucleotide
  Antisense strand to SEQ ID NO: 1721309
cacucaaggaacauauaaa

SEQ ID NO: 1721311 - RNA, 19 nt, Artificial Sequence
  Description of Artificial Sequence: Synthetic oligonucleotide
  Sense strand starting at position 2219 of SEQ ID NO: 1562090
uuuaucggucuuuguauau

SEQ ID NO: 1721312 - RNA, 19 nt, Artificial Sequence
  Description of Artificial Sequence: Synthetic oligonucleotide
  Antisense strand to SEQ ID NO: 1721311
auauacaaagaccgauaaa

SEQ ID NO: 1721313 - RNA, 19 nt, Artificial Sequence
  Description of Artificial Sequence: Synthetic oligonucleotide
  Sense strand starting at position 2291 of SEQ ID NO: 1562090
ggagacuagcuucagguua

SEQ ID NO: 1721314 - RNA, 19 nt, Artificial Sequence
  Description of Artificial Sequence: Synthetic oligonucleotide
  Antisense strand to SEQ ID NO: 1721313
uaaccugaagcuagucucc

SEQ ID NO: 1721315 - RNA, 19 nt, Artificial Sequence
  Description of Artificial Sequence: Synthetic oligonucleotide
  Sense strand starting at position 2314 of SEQ ID NO: 1562090
aguaauugguggcugacaa

SEQ ID NO: 1721316 - RNA, 19 nt, Artificial Sequence
  Description of Artificial Sequence: Synthetic oligonucleotide
  Antisense strand to SEQ ID NO: 1721315
uugucagccaccaauuacu

SEQ ID NO: 1721317 - RNA, 19 nt, Artificial Sequence
  Description of Artificial Sequence: Synthetic oligonucleotide
  Sense strand starting at position 2315 of SEQ ID NO: 1562090
guaauugguggcugacaau

SEQ ID NO: 1721318 - RNA, 19 nt, Artificial Sequence
  Description of Artificial Sequence: Synthetic oligonucleotide
  Antisense strand to SEQ ID NO: 1721317
auugucagccaccaauuac

SEQ ID NO: 1721319 - RNA, 19 nt, Artificial Sequence
  Description of Artificial Sequence: Synthetic oligonucleotide
  Sense strand starting at position 2349 of SEQ ID NO: 1562090
augcgaguuuccuuucuga

SEQ ID NO: 1721320 - RNA, 19 nt, Artificial Sequence
  Description of Artificial Sequence: Synthetic oligonucleotide
  Antisense strand to SEQ ID NO: 1721319
ucagaaaggaaacucgcau

SEQ ID NO: 1721321 - RNA, 19 nt, Artificial Sequence
  Description of Artificial Sequence: Synthetic oligonucleotide
  Sense strand starting at position 2394 of SEQ ID NO: 1562090
gguauaacucuauacuuug

SEQ ID NO: 1721322 - RNA, 19 nt, Artificial Sequence
  Description of Artificial Sequence: Synthetic oligonucleotide
  Antisense strand to SEQ ID NO: 1721321
caaaguauagaguuauacc

SEQ ID NO: 1721323 - RNA, 19 nt, Artificial Sequence
  Description of Artificial Sequence: Synthetic oligonucleotide
  Sense strand starting at position 2402 of SEQ ID NO: 1562090
ucuauacuuugucuuguuu

SEQ ID NO: 1721324 - RNA, 19 nt, Artificial Sequence
  Description of Artificial Sequence: Synthetic oligonucleotide
  Antisense strand to SEQ ID NO: 1721323
aaacaagacaaaguauaga

SEQ ID NO: 1721325 - RNA, 19 nt, Artificial Sequence
  Description of Artificial Sequence: Synthetic oligonucleotide
  Sense strand starting at position 2459 of SEQ ID NO: 1562090
ggagcagucauagaaguag

SEQ ID NO: 1721326 - RNA, 19 nt, Artificial Sequence
  Description of Artificial Sequence: Synthetic oligonucleotide
  Antisense strand to SEQ ID NO: 1721325
cuacuucuaugacugcucc

SEQ ID NO: 1721327 - RNA, 19 nt, Artificial Sequence
  Description of Artificial Sequence: Synthetic oligonucleotide
  Sense strand starting at position 2471 of SEQ ID NO: 1562090
gaaguagaaugauacagaa

SEQ ID NO: 1721328 - RNA, 19 nt, Artificial Sequence
  Description of Artificial Sequence: Synthetic oligonucleotide
  Antisense strand to SEQ ID NO: 1721327
uucuguaucauucuacuuc

SEQ ID NO: 1721329 - RNA, 19 nt, Artificial Sequence
  Description of Artificial Sequence: Synthetic oligonucleotide
  Sense strand starting at position 2539 of SEQ ID NO: 1562090
gaggcauaccaaugucaaa

SEQ ID NO: 1721330 - RNA, 19 nt, Artificial Sequence
  Description of Artificial Sequence: Synthetic oligonucleotide
  Antisense strand to SEQ ID NO: 1721329
uuugacauugguaugccuc

SEQ ID NO: 1721331 - RNA, 19 nt, Artificial Sequence
  Description of Artificial Sequence: Synthetic oligonucleotide
  Sense strand starting at position 2551 of SEQ ID NO: 1562090
ugucaaauguaucugugaa

SEQ ID NO: 1721332 - RNA, 19 nt, Artificial Sequence
  Description of Artificial Sequence: Synthetic oligonucleotide
  Antisense strand to SEQ ID NO: 1721331
uucacagauacauuugaca

SEQ ID NO: 1721333 - RNA, 19 nt, Artificial Sequence
  Description of Artificial Sequence: Synthetic oligonucleotide
  Sense strand starting at position 2552 of SEQ ID NO: 1562090
gucaaauguaucugugaag

SEQ ID NO: 1721334 - RNA, 19 nt, Artificial Sequence
  Description of Artificial Sequence: Synthetic oligonucleotide
  Antisense strand to SEQ ID NO: 1721333
cuucacagauacauuugac

SEQ ID NO: 1721335 - RNA, 19 nt, Artificial Sequence
  Description of Artificial Sequence: Synthetic oligonucleotide
  Sense strand starting at position 2553 of SEQ ID NO: 1562090
ucaaauguaucugugaagu

SEQ ID NO: 1721336 - RNA, 19 nt, Artificial Sequence
  Description of Artificial Sequence: Synthetic oligonucleotide
  Antisense strand to SEQ ID NO: 1721335
acuucacagauacauuuga

SEQ ID NO: 1721337 - RNA, 19 nt, Artificial Sequence
  Description of Artificial Sequence: Synthetic oligonucleotide
  Sense strand starting at position 2610 of SEQ ID NO: 1562090
gauguuacucacugcuagu

SEQ ID NO: 1721338 - RNA, 19 nt, Artificial Sequence
  Description of Artificial Sequence: Synthetic oligonucleotide
  Antisense strand to SEQ ID NO: 1721337
acuagcagugaguaacauc

SEQ ID NO: 1721339 - RNA, 19 nt, Artificial Sequence
  Description of Artificial Sequence: Synthetic oligonucleotide
  Sense strand starting at position 2642 of SEQ ID NO: 1562090
gaugaauacaguuguguug

SEQ ID NO: 1721340 - RNA, 19 nt, Artificial Sequence
  Description of Artificial Sequence: Synthetic oligonucleotide
  Antisense strand to SEQ ID NO: 1721339
caacacaacuguauucauc

SEQ ID NO: 1721341 - RNA, 19 nt, Artificial Sequence
  Description of Artificial Sequence: Synthetic oligonucleotide
  Sense strand starting at position 2708 of SEQ ID NO: 1562090
cugauuucaugguggaaug

SEQ ID NO: 1721342 - RNA, 19 nt, Artificial Sequence
  Description of Artificial Sequence: Synthetic oligonucleotide
  Antisense strand to SEQ ID NO: 1721341
cauuccaccaugaaaucag

SEQ ID NO: 1721343 - RNA, 19 nt, Artificial Sequence
  Description of Artificial Sequence: Synthetic oligonucleotide
  Sense strand starting at position 2836 of SEQ ID NO: 1562090
guaagaauguugguuucca

SEQ ID NO: 1721344 - RNA, 19 nt, Artificial Sequence
  Description of Artificial Sequence: Synthetic oligonucleotide
  Antisense strand to SEQ ID NO: 1721343
uggaaaccaacauucuuac

SEQ ID NO: 1721345 - RNA, 19 nt, Artificial Sequence
  Description of Artificial Sequence: Synthetic oligonucleotide
  Sense strand starting at position 2837 of SEQ ID NO: 1562090
uaagaauguugguuuccaa

SEQ ID NO: 1721346 - RNA, 19 nt, Artificial Sequence
  Description of Artificial Sequence: Synthetic oligonucleotide
  Antisense strand to SEQ ID NO: 1721345
uuggaaaccaacauucuua

SEQ ID NO: 1721347 - RNA, 19 nt, Artificial Sequence
  Description of Artificial Sequence: Synthetic oligonucleotide
  Sense strand starting at position 2840 of SEQ ID NO: 1562090
gaauguugguuuccaaauu

SEQ ID NO: 1721348 - RNA, 19 nt, Artificial Sequence
  Description of Artificial Sequence: Synthetic oligonucleotide
  Antisense strand to SEQ ID NO: 1721347
aauuuggaaaccaacauuc

SEQ ID NO: 1721349 - RNA, 19 nt, Artificial Sequence
  Description of Artificial Sequence: Synthetic oligonucleotide
  Sense strand starting at position 2958 of SEQ ID NO: 1562090
ccaacaggcugugaggaau

SEQ ID NO: 1721350 - RNA, 19 nt, Artificial Sequence
  Description of Artificial Sequence: Synthetic oligonucleotide
  Antisense strand to SEQ ID NO: 1721349
auuccucacagccuguugg

SEQ ID NO: 1721351 - RNA, 19 nt, Artificial Sequence
  Description of Artificial Sequence: Synthetic oligonucleotide
  Sense strand starting at position 2971 of SEQ ID NO: 1562090
aggaauauuugccaacuuc

SEQ ID NO: 1721352 - RNA, 19 nt, Artificial Sequence
  Description of Artificial Sequence: Synthetic oligonucleotide
  Antisense strand to SEQ ID NO: 1721351
gaaguuggcaaauauuccu

SEQ ID NO: 1721353 - RNA, 19 nt, Artificial Sequence
  Description of Artificial Sequence: Synthetic oligonucleotide
  Sense strand starting at position 3004 of SEQ ID NO: 1562090
uguauugagaguggaccua

SEQ ID NO: 1721354 - RNA, 19 nt, Artificial Sequence
  Description of Artificial Sequence: Synthetic oligonucleotide
  Antisense strand to SEQ ID NO: 1721353
uagguccacucucaauaca

SEQ ID NO: 1721355 - RNA, 19 nt, Artificial Sequence
  Description of Artificial Sequence: Synthetic oligonucleotide
  Sense strand starting at position 3474 of SEQ ID NO: 1562090
cggccaguuucuuuacuuu

SEQ ID NO: 1721356 - RNA, 19 nt, Artificial Sequence
  Description of Artificial Sequence: Synthetic oligonucleotide
  Antisense strand to SEQ ID NO: 1721355
aaaguaaagaaacuggccg

SEQ ID NO: 1721357 - RNA, 19 nt, Artificial Sequence
  Description of Artificial Sequence: Synthetic oligonucleotide
  Sense strand starting at position 3480 of SEQ ID NO: 1562090
guuucuuuacuuugacuga

SEQ ID NO: 1721358 - RNA, 19 nt, Artificial Sequence
  Description of Artificial Sequence: Synthetic oligonucleotide
  Antisense strand to SEQ ID NO: 1721357
ucagucaaaguaaagaaac

SEQ ID NO: 1721359 - RNA, 19 nt, Artificial Sequence
  Description of Artificial Sequence: Synthetic oligonucleotide
  Sense strand starting at position 3502 of SEQ ID NO: 1562090
aguccuuguuaugagaaga

SEQ ID NO: 1721360 - RNA, 19 nt, Artificial Sequence
  Description of Artificial Sequence: Synthetic oligonucleotide
  Antisense strand to SEQ ID NO: 1721359
ucuucucauaacaaggacu

SEQ ID NO: 1721361 - RNA, 19 nt, Artificial Sequence
  Description of Artificial Sequence: Synthetic oligonucleotide
  Sense strand starting at position 3647 of SEQ ID NO: 1562090
uccuguaagcaaugcuaua

SEQ ID NO: 1721362 - RNA, 19 nt, Artificial Sequence
  Description of Artificial Sequence: Synthetic oligonucleotide
  Antisense strand to SEQ ID NO: 1721361
uauagcauugcuuacagga

SEQ ID NO: 1721363 - RNA, 19 nt, Artificial Sequence
  Description of Artificial Sequence: Synthetic oligonucleotide
  Sense strand starting at position 3722 of SEQ ID NO: 1562090
acuugaagcaugugagcua

SEQ ID NO: 1721364 - RNA, 19 nt, Artificial Sequence
  Description of Artificial Sequence: Synthetic oligonucleotide
  Antisense strand to SEQ ID NO: 1721363
uagcucacaugcuucaagu

SEQ ID NO: 1721365 - RNA, 19 nt, Artificial Sequence
  Description of Artificial Sequence: Synthetic oligonucleotide
  Sense strand starting at position 3729 of SEQ ID NO: 1562090
gcaugugagcuaugugguu

SEQ ID NO: 1721366 - RNA, 19 nt, Artificial Sequence
  Description of Artificial Sequence: Synthetic oligonucleotide
  Antisense strand to SEQ ID NO: 1721365
aaccacauagcucacaugc

SEQ ID NO: 1721367 - RNA, 19 nt, Artificial Sequence
  Description of Artificial Sequence: Synthetic oligonucleotide
  Sense strand starting at position 3738 of SEQ ID NO: 1562090
cuaugugguuucucuauga

SEQ ID NO: 1721368 - RNA, 19 nt, Artificial Sequence
  Description of Artificial Sequence: Synthetic oligonucleotide
  Antisense strand to SEQ ID NO: 1721367
ucauagagaaaccacauag

SEQ ID NO: 1721369 - RNA, 19 nt, Artificial Sequence
  Description of Artificial Sequence: Synthetic oligonucleotide
  Sense strand starting at position 3742 of SEQ ID NO: 1562090
gugguuucucuaugagcca

SEQ ID NO: 1721370 - RNA, 19 nt, Artificial Sequence
  Description of Artificial Sequence: Synthetic oligonucleotide
  Antisense strand to SEQ ID NO: 1721369
uggcucauagagaaaccac

SEQ ID NO: 1721371 - RNA, 19 nt, Artificial Sequence
  Description of Artificial Sequence: Synthetic oligonucleotide
  Sense strand starting at position 3791 of SEQ ID NO: 1562090
cccuaagggcaguaaguau

SEQ ID NO: 1721372 - RNA, 19 nt, Artificial Sequence
  Description of Artificial Sequence: Synthetic oligonucleotide
  Antisense strand to SEQ ID NO: 1721371
auacuuacugcccuuaggg

SEQ ID NO: 1721373 - RNA, 19 nt, Artificial Sequence
  Description of Artificial Sequence: Synthetic oligonucleotide
  Sense strand starting at position 3798 of SEQ ID NO: 1562090
ggcaguaaguauuuccuua

SEQ ID NO: 1721374 - RNA, 19 nt, Artificial Sequence
  Description of Artificial Sequence: Synthetic oligonucleotide
  Antisense strand to SEQ ID NO: 1721373
uaaggaaauacuuacugcc

SEQ ID NO: 1721375 - RNA, 19 nt, Artificial Sequence
  Description of Artificial Sequence: Synthetic oligonucleotide
  Sense strand starting at position 3922 of SEQ ID NO: 1562090
aggaacuguuguguuccaa

SEQ ID NO: 1721376 - RNA, 19 nt, Artificial Sequence
  Description of Artificial Sequence: Synthetic oligonucleotide
  Antisense strand to SEQ ID NO: 1721375
uuggaacacaacaguuccu

SEQ ID NO: 1721377 - RNA, 19 nt, Artificial Sequence
  Description of Artificial Sequence: Synthetic oligonucleotide
  Sense strand starting at position 112 of SEQ ID NO: 1562091
gaaaucccgucuuuauuga

SEQ ID NO: 1721378 - RNA, 19 nt, Artificial Sequence
  Description of Artificial Sequence: Synthetic oligonucleotide
  Antisense strand to SEQ ID NO: 1721377
ucaauaaagacgggauuuc

SEQ ID NO: 1721379 - RNA, 19 nt, Artificial Sequence
  Description of Artificial Sequence: Synthetic oligonucleotide
  Sense strand starting at position 197 of SEQ ID NO: 1562091
augagaaucccuuggaggu

SEQ ID NO: 1721380 - RNA, 19 nt, Artificial Sequence
  Description of Artificial Sequence: Synthetic oligonucleotide
  Antisense strand to SEQ ID NO: 1721379
accuccaagggauucucau

SEQ ID NO: 1721381 - RNA, 19 nt, Artificial Sequence
  Description of Artificial Sequence: Synthetic oligonucleotide
  Sense strand starting at position 198 of SEQ ID NO: 1562091
ugagaaucccuuggagguu

SEQ ID NO: 1721382 - RNA, 19 nt, Artificial Sequence
  Description of Artificial Sequence: Synthetic oligonucleotide
  Antisense strand to SEQ ID NO: 1721381
aaccuccaagggauucuca

SEQ ID NO: 1721383 - RNA, 19 nt, Artificial Sequence
  Description of Artificial Sequence: Synthetic oligonucleotide
  Sense strand starting at position 908 of SEQ ID NO: 1562091
aguagagagcuucggaauu

SEQ ID NO: 1721384 - RNA, 19 nt, Artificial Sequence
  Description of Artificial Sequence: Synthetic oligonucleotide
  Antisense strand to SEQ ID NO: 1721383
aauuccgaagcucucuacu

SEQ ID NO: 1721385 - RNA, 19 nt, Artificial Sequence
  Description of Artificial Sequence: Synthetic oligonucleotide
  Sense strand starting at position 1042 of SEQ ID NO: 1562091
ggagaaacugagugugcuu

SEQ ID NO: 1721386 - RNA, 19 nt, Artificial Sequence
  Description of Artificial Sequence: Synthetic oligonucleotide
  Antisense strand to SEQ ID NO: 1721385
aagcacacucaguuucucc

SEQ ID NO: 1721387 - RNA, 19 nt, Artificial Sequence
  Description of Artificial Sequence: Synthetic oligonucleotide
  Sense strand starting at position 1079 of SEQ ID NO: 1562091
auuaaaucagcuggagaau

SEQ ID NO: 1721388 - RNA, 19 nt, Artificial Sequence
  Description of Artificial Sequence: Synthetic oligonucleotide
  Antisense strand to SEQ ID NO: 1721387
auucuccagcugauuuaau

SEQ ID NO: 1721389 - RNA, 19 nt, Artificial Sequence
  Description of Artificial Sequence: Synthetic oligonucleotide
  Sense strand starting at position 1118 of SEQ ID NO: 1562091
uccucugaaguggguaaau

SEQ ID NO: 1721390 - RNA, 19 nt, Artificial Sequence
  Description of Artificial Sequence: Synthetic oligonucleotide
  Antisense strand to SEQ ID NO: 1721389
auuuacccacuucagagga

SEQ ID NO: 1721391 - RNA, 19 nt, Artificial Sequence
  Description of Artificial Sequence: Synthetic oligonucleotide
  Sense strand starting at position 1139 of SEQ ID NO: 1562091
gggaacucagcauauucuu

SEQ ID NO: 1721392 - RNA, 19 nt, Artificial Sequence
  Description of Artificial Sequence: Synthetic oligonucleotide
  Antisense strand to SEQ ID NO: 1721391
aagaauaugcugaguuccc

SEQ ID NO: 1721393 - RNA, 19 nt, Artificial Sequence
  Description of Artificial Sequence: Synthetic oligonucleotide
  Sense strand starting at position 1191 of SEQ ID NO: 1562091
uacaguuuacaaggugauu

SEQ ID NO: 1721394 - RNA, 19 nt, Artificial Sequence
  Description of Artificial Sequence: Synthetic oligonucleotide
  Antisense strand to SEQ ID NO: 1721393
aaucaccuuguaaacugua

SEQ ID NO: 1721395 - RNA, 19 nt, Artificial Sequence
  Description of Artificial Sequence: Synthetic oligonucleotide
  Sense strand starting at position 1229 of SEQ ID NO: 1562091
acaaucguucucgaagaga

SEQ ID NO: 1721396 - RNA, 19 nt, Artificial Sequence
  Description of Artificial Sequence: Synthetic oligonucleotide
  Antisense strand to SEQ ID NO: 1721395
ucucuucgagaacgauugu

SEQ ID NO: 1721397 - RNA, 19 nt, Artificial Sequence
  Description of Artificial Sequence: Synthetic oligonucleotide
  Sense strand starting at position 1257 of SEQ ID NO: 1562091
gggugauuauccucggaua

SEQ ID NO: 1721398 - RNA, 19 nt, Artificial Sequence
  Description of Artificial Sequence: Synthetic oligonucleotide
  Antisense strand to SEQ ID NO: 1721397
uauccgaggauaaucaccc

SEQ ID NO: 1721399 - RNA, 19 nt, Artificial Sequence
  Description of Artificial Sequence: Synthetic oligonucleotide
  Sense strand starting at position 1258 of SEQ ID NO: 1562091
ggugauuauccucggauaa

SEQ ID NO: 1721400 - RNA, 19 nt, Artificial Sequence
  Description of Artificial Sequence: Synthetic oligonucleotide
  Antisense strand to SEQ ID NO: 1721399
uuauccgaggauaaucacc

SEQ ID NO: 1721401 - RNA, 19 nt, Artificial Sequence
  Description of Artificial Sequence: Synthetic oligonucleotide
  Sense strand starting at position 1259 of SEQ ID NO: 1562091
gugauuauccucggauaaa

SEQ ID NO: 1721402 - RNA, 19 nt, Artificial Sequence
  Description of Artificial Sequence: Synthetic oligonucleotide
  Antisense strand to SEQ ID NO: 1721401
uuuauccgaggauaaucac

SEQ ID NO: 1721403 - RNA, 19 nt, Artificial Sequence
  Description of Artificial Sequence: Synthetic oligonucleotide
  Sense strand starting at position 2145 of SEQ ID NO: 1562091
ugugcaaagaucuggaagu

SEQ ID NO: 1721404 - RNA, 19 nt, Artificial Sequence
  Description of Artificial Sequence: Synthetic oligonucleotide
  Antisense strand to SEQ ID NO: 1721403
acuuccagaucuuugcaca

SEQ ID NO: 1721405 - RNA, 19 nt, Artificial Sequence
  Description of Artificial Sequence: Synthetic oligonucleotide
  Sense strand starting at position 2251 of SEQ ID NO: 1562091
auguaaugaauacgaugaa

SEQ ID NO: 1721406 - RNA, 19 nt, Artificial Sequence
  Description of Artificial Sequence: Synthetic oligonucleotide
  Antisense strand to SEQ ID NO: 1721405
uucaucguauucauuacau

SEQ ID NO: 1721407 - RNA, 19 nt, Artificial Sequence
  Description of Artificial Sequence: Synthetic oligonucleotide
  Sense strand starting at position 2254 of SEQ ID NO: 1562091
uaaugaauacgaugaagua

SEQ ID NO: 1721408 - RNA, 19 nt, Artificial Sequence
  Description of Artificial Sequence: Synthetic oligonucleotide
  Antisense strand to SEQ ID NO: 1721407
uacuucaucguauucauua

SEQ ID NO: 1721409 - RNA, 19 nt, Artificial Sequence
  Description of Artificial Sequence: Synthetic oligonucleotide
  Sense strand starting at position 2301 of SEQ ID NO: 1562091
uguauuuagugccuccuau

SEQ ID NO: 1721410 - RNA, 19 nt, Artificial Sequence
  Description of Artificial Sequence: Synthetic oligonucleotide
  Antisense strand to SEQ ID NO: 1721409
auaggaggcacuaaauaca

SEQ ID NO: 1721411 - RNA, 19 nt, Artificial Sequence
  Description of Artificial Sequence: Synthetic oligonucleotide
  Sense strand starting at position 2331 of SEQ ID NO: 1562091
aguaauuuagcugggcagu

SEQ ID NO: 1721412 - RNA, 19 nt, Artificial Sequence
  Description of Artificial Sequence: Synthetic oligonucleotide
  Antisense strand to SEQ ID NO: 1721411
acugcccagcuaaauuacu

SEQ ID NO: 1721413 - RNA, 19 nt, Artificial Sequence
  Description of Artificial Sequence: Synthetic oligonucleotide
  Sense strand starting at position 2332 of SEQ ID NO: 1562091
guaauuuagcugggcagua

SEQ ID NO: 1721414 - RNA, 19 nt, Artificial Sequence
  Description of Artificial Sequence: Synthetic oligonucleotide
  Antisense strand to SEQ ID NO: 1721413
uacugcccagcuaaauuac

SEQ ID NO: 1721415 - RNA, 19 nt, Artificial Sequence
  Description of Artificial Sequence: Synthetic oligonucleotide
  Sense strand starting at position 2495 of SEQ ID NO: 1562091
gaaggacauuaagcgauau

SEQ ID NO: 1721416 - RNA, 19 nt, Artificial Sequence
  Description of Artificial Sequence: Synthetic oligonucleotide
  Antisense strand to SEQ ID NO: 1721415
auaucgcuuaauguccuuc

SEQ ID NO: 1721417 - RNA, 19 nt, Artificial Sequence
  Description of Artificial Sequence: Synthetic oligonucleotide
  Sense strand starting at position 2560 of SEQ ID NO: 1562091
guuugaggccaguauggua

SEQ ID NO: 1721418 - RNA, 19 nt, Artificial Sequence
  Description of Artificial Sequence: Synthetic oligonucleotide
  Antisense strand to SEQ ID NO: 1721417
uaccauacuggccucaaac

SEQ ID NO: 1721419 - RNA, 19 nt, Artificial Sequence
  Description of Artificial Sequence: Synthetic oligonucleotide
  Sense strand starting at position 2716 of SEQ ID NO: 1562091
auuucuuccgagcaaugcu

SEQ ID NO: 1721420 - RNA, 19 nt, Artificial Sequence
  Description of Artificial Sequence: Synthetic oligonucleotide
  Antisense strand to SEQ ID NO: 1721419
agcauugcucggaagaaau

SEQ ID NO: 1721421 - RNA, 19 nt, Artificial Sequence
  Description of Artificial Sequence: Synthetic oligonucleotide
  Sense strand starting at position 2837 of SEQ ID NO: 1562091
auaauaguuuagguggaau

SEQ ID NO: 1721422 - RNA, 19 nt, Artificial Sequence
  Description of Artificial Sequence: Synthetic oligonucleotide
  Antisense strand to SEQ ID NO: 1721421
auuccaccuaaacuauuau

SEQ ID NO: 1721423 - RNA, 19 nt, Artificial Sequence
  Description of Artificial Sequence: Synthetic oligonucleotide
  Sense strand starting at position 2839 of SEQ ID NO: 1562091
aauaguuuagguggaaugu

SEQ ID NO: 1721424 - RNA, 19 nt, Artificial Sequence
  Description of Artificial Sequence: Synthetic oligonucleotide
  Antisense strand to SEQ ID NO: 1721423
acauuccaccuaaacuauu

SEQ ID NO: 1721425 - RNA, 19 nt, Artificial Sequence
  Description of Artificial Sequence: Synthetic oligonucleotide
  Sense strand starting at position 2864 of SEQ ID NO: 1562091
caaugaugauguccggaca

SEQ ID NO: 1721426 - RNA, 19 nt, Artificial Sequence
  Description of Artificial Sequence: Synthetic oligonucleotide
  Antisense strand to SEQ ID NO: 1721425
uguccggacaucaucauug

SEQ ID NO: 1721427 - RNA, 19 nt, Artificial Sequence
  Description of Artificial Sequence: Synthetic oligonucleotide
  Sense strand starting at position 2865 of SEQ ID NO: 1562091
aaugaugauguccggacaa

SEQ ID NO: 1721428 - RNA, 19 nt, Artificial Sequence
  Description of Artificial Sequence: Synthetic oligonucleotide
  Antisense strand to SEQ ID NO: 1721427
uuguccggacaucaucauu

SEQ ID NO: 1721429 - RNA, 19 nt, Artificial Sequence
  Description of Artificial Sequence: Synthetic oligonucleotide
  Sense strand starting at position 2919 of SEQ ID NO: 1562091
uguuaaucuucccugauag

SEQ ID NO: 1721430 - RNA, 19 nt, Artificial Sequence
  Description of Artificial Sequence: Synthetic oligonucleotide
  Antisense strand to SEQ ID NO: 1721429
cuaucagggaagauuaaca

SEQ ID NO: 1721431 - RNA, 19 nt, Artificial Sequence
  Description of Artificial Sequence: Synthetic oligonucleotide
  Sense strand starting at position 2920 of SEQ ID NO: 1562091
guuaaucuucccugauaga

SEQ ID NO: 1721432 - RNA, 19 nt, Artificial Sequence
  Description of Artificial Sequence: Synthetic oligonucleotide
  Antisense strand to SEQ ID NO: 1721431
ucuaucagggaagauuaac

SEQ ID NO: 1721433 - RNA, 19 nt, Artificial Sequence
  Description of Artificial Sequence: Synthetic oligonucleotide
  Sense strand starting at position 2986 of SEQ ID NO: 1562091
cagccuuuagucugauaag

SEQ ID NO: 1721434 - RNA, 19 nt, Artificial Sequence
  Description of Artificial Sequence: Synthetic oligonucleotide
  Antisense strand to SEQ ID NO: 1721433
cuuaucagacuaaaggcug

SEQ ID NO: 1721435 - RNA, 19 nt, Artificial Sequence
  Description of Artificial Sequence: Synthetic oligonucleotide
  Sense strand starting at position 3301 of SEQ ID NO: 1562091
ccagguaguccuuaacauu

SEQ ID NO: 1721436 - RNA, 19 nt, Artificial Sequence
  Description of Artificial Sequence: Synthetic oligonucleotide
  Antisense strand to SEQ ID NO: 1721435
aauguuaaggacuaccugg

SEQ ID NO: 1721437 - RNA, 19 nt, Artificial Sequence
  Description of Artificial Sequence: Synthetic oligonucleotide
  Sense strand starting at position 3341 of SEQ ID NO: 1562091
auugcuggucuggacuuaa

SEQ ID NO: 1721438 - RNA, 19 nt, Artificial Sequence
  Description of Artificial Sequence: Synthetic oligonucleotide
  Antisense strand to SEQ ID NO: 1721437
uuaaguccagaccagcaau

SEQ ID NO: 1721439 - RNA, 19 nt, Artificial Sequence
  Description of Artificial Sequence: Synthetic oligonucleotide
  Sense strand starting at position 3358 of SEQ ID NO: 1562091
aagagagcugacugugaua

SEQ ID NO: 1721440 - RNA, 19 nt, Artificial Sequence
  Description of Artificial Sequence: Synthetic oligonucleotide
  Antisense strand to SEQ ID NO: 1721439
uaucacagucagcucucuu

SEQ ID NO: 1721441 - RNA, 19 nt, Artificial Sequence
  Description of Artificial Sequence: Synthetic oligonucleotide
  Sense strand starting at position 3360 of SEQ ID NO: 1562091
gagagcugacugugauaaa

SEQ ID NO: 1721442 - RNA, 19 nt, Artificial Sequence
  Description of Artificial Sequence: Synthetic oligonucleotide
  Antisense strand to SEQ ID NO: 1721441
uuuaucacagucagcucuc

SEQ ID NO: 1721443 - RNA, 19 nt, Artificial Sequence
  Description of Artificial Sequence: Synthetic oligonucleotide
  Sense strand starting at position 3398 of SEQ ID NO: 1562091
ccagaaacauaccuguagu

SEQ ID NO: 1721444 - RNA, 19 nt, Artificial Sequence
  Description of Artificial Sequence: Synthetic oligonucleotide
  Antisense strand to SEQ ID NO: 1721443
acuacagguauguuucugg

SEQ ID NO: 1721445 - RNA, 19 nt, Artificial Sequence
  Description of Artificial Sequence: Synthetic oligonucleotide
  Sense strand starting at position 3473 of SEQ ID NO: 1562091
aauauaaggugucuuggua

SEQ ID NO: 1721446 - RNA, 19 nt, Artificial Sequence
  Description of Artificial Sequence: Synthetic oligonucleotide
  Antisense strand to SEQ ID NO: 1721445
uaccaagacaccuuauauu

SEQ ID NO: 1721447 - RNA, 19 nt, Artificial Sequence
  Description of Artificial Sequence: Synthetic oligonucleotide
  Sense strand starting at position 3477 of SEQ ID NO: 1562091
uaaggugucuugguaagag

SEQ ID NO: 1721448 - RNA, 19 nt, Artificial Sequence
  Description of Artificial Sequence: Synthetic oligonucleotide
  Antisense strand to SEQ ID NO: 1721447
cucuuaccaagacaccuua

SEQ ID NO: 1721449 - RNA, 19 nt, Artificial Sequence
  Description of Artificial Sequence: Synthetic oligonucleotide
  Sense strand starting at position 3527 of SEQ ID NO: 1562091
guuuaugcuggguaacuaa

SEQ ID NO: 1721450 - RNA, 19 nt, Artificial Sequence
  Description of Artificial Sequence: Synthetic oligonucleotide
  Antisense strand to SEQ ID NO: 1721449
uuaguuacccagcauaaac

SEQ ID NO: 1721451 - RNA, 19 nt, Artificial Sequence
  Description of Artificial Sequence: Synthetic oligonucleotide
  Sense strand starting at position 3616 of SEQ ID NO: 1562091
gugauuagguaucuuacaa

SEQ ID NO: 1721452 - RNA, 19 nt, Artificial Sequence
  Description of Artificial Sequence: Synthetic oligonucleotide
  Antisense strand to SEQ ID NO: 1721451
uuguaagauaccuaaucac

SEQ ID NO: 1721453 - RNA, 19 nt, Artificial Sequence
  Description of Artificial Sequence: Synthetic oligonucleotide
  Sense strand starting at position 3670 of SEQ ID NO: 1562091
cuagauuaguccuuggaaa

SEQ ID NO: 1721454 - RNA, 19 nt, Artificial Sequence
  Description of Artificial Sequence: Synthetic oligonucleotide
  Antisense strand to SEQ ID NO: 1721453
uuuccaaggacuaaucuag

SEQ ID NO: 1721455 - RNA, 19 nt, Artificial Sequence
  Description of Artificial Sequence: Synthetic oligonucleotide
  Sense strand starting at position 3705 of SEQ ID NO: 1562091
uugucuuaaccugaauuga

SEQ ID NO: 1721456 - RNA, 19 nt, Artificial Sequence
  Description of Artificial Sequence: Synthetic oligonucleotide
  Antisense strand to SEQ ID NO: 1721455
ucaauucagguuaagacaa

SEQ ID NO: 1721457 - RNA, 19 nt, Artificial Sequence
  Description of Artificial Sequence: Synthetic oligonucleotide
  Sense strand starting at position 62 of SEQ ID NO: 1562092
ugauuaugaucagcagauc

SEQ ID NO: 1721458 - RNA, 19 nt, Artificial Sequence
  Description of Artificial Sequence: Synthetic oligonucleotide
  Antisense strand to SEQ ID NO: 1721457
gaucugcugaucauaauca

SEQ ID NO: 1721459 - RNA, 19 nt, Artificial Sequence
  Description of Artificial Sequence: Synthetic oligonucleotide
  Sense strand starting at position 294 of SEQ ID NO: 1562092
gugcuaauugaauaggcga

SEQ ID NO: 1721460 - RNA, 19 nt, Artificial Sequence
  Description of Artificial Sequence: Synthetic oligonucleotide
  Antisense strand to SEQ ID NO: 1721459
ucgccuauucaauuagcac

SEQ ID NO: 1721461 - RNA, 19 nt, Artificial Sequence
  Description of Artificial Sequence: Synthetic oligonucleotide
  Sense strand starting at position 377 of SEQ ID NO: 1562092
aggugucuccaugacaaau

SEQ ID NO: 1721462 - RNA, 19 nt, Artificial Sequence
  Description of Artificial Sequence: Synthetic oligonucleotide
  Antisense strand to SEQ ID NO: 1721461
auuugucauggagacaccu

SEQ ID NO: 1721463 - RNA, 19 nt, Artificial Sequence
  Description of Artificial Sequence: Synthetic oligonucleotide
  Sense strand starting at position 455 of SEQ ID NO: 1562092
gcaaguggcucauuucuau

SEQ ID NO: 1721464 - RNA, 19 nt, Artificial Sequence
  Description of Artificial Sequence: Synthetic oligonucleotide
  Antisense strand to SEQ ID NO: 1721463
auagaaaugagccacuugc

SEQ ID NO: 1721465 - RNA, 19 nt, Artificial Sequence
  Description of Artificial Sequence: Synthetic oligonucleotide
  Sense strand starting at position 461 of SEQ ID NO: 1562092
ggcucauuucuaugugcuc

SEQ ID NO: 1721466 - RNA, 19 nt, Artificial Sequence
  Description of Artificial Sequence: Synthetic oligonucleotide
  Antisense strand to SEQ ID NO: 1721465
gagcacauagaaaugagcc

SEQ ID NO: 1721467 - RNA, 19 nt, Artificial Sequence
  Description of Artificial Sequence: Synthetic oligonucleotide
  Sense strand starting at position 468 of SEQ ID NO: 1562092
uucuaugugcucgcaguaa

SEQ ID NO: 1721468 - RNA, 19 nt, Artificial Sequence
  Description of Artificial Sequence: Synthetic oligonucleotide
  Antisense strand to SEQ ID NO: 1721467
uuacugcgagcacauagaa

SEQ ID NO: 1721469 - RNA, 19 nt, Artificial Sequence
  Description of Artificial Sequence: Synthetic oligonucleotide
  Sense strand starting at position 500 of SEQ ID NO: 1562092
ugacauugucugggaccca

SEQ ID NO: 1721470 - RNA, 19 nt, Artificial Sequence
  Description of Artificial Sequence: Synthetic oligonucleotide
  Antisense strand to SEQ ID NO: 1721469
ugggucccagacaauguca

SEQ ID NO: 1721471 - RNA, 19 nt, Artificial Sequence
  Description of Artificial Sequence: Synthetic oligonucleotide
  Sense strand starting at position 524 of SEQ ID NO: 1562092
uuccuuagccucgggaaga

SEQ ID NO: 1721472 - RNA, 19 nt, Artificial Sequence
  Description of Artificial Sequence: Synthetic oligonucleotide
  Antisense strand to SEQ ID NO: 1721471
ucuucccgaggcuaaggaa

SEQ ID NO: 1721473 - RNA, 19 nt, Artificial Sequence
  Description of Artificial Sequence: Synthetic oligonucleotide
  Sense strand starting at position 1198 of SEQ ID NO: 1562092
ugcccaaugccucaggaaa

SEQ ID NO: 1721474 - RNA, 19 nt, Artificial Sequence
  Description of Artificial Sequence: Synthetic oligonucleotide
  Antisense strand to SEQ ID NO: 1721473
uuuccugaggcauugggca

SEQ ID NO: 1721475 - RNA, 19 nt, Artificial Sequence
  Description of Artificial Sequence: Synthetic oligonucleotide
  Sense strand starting at position 1300 of SEQ ID NO: 1562092
gugugaccagcugaucuau

SEQ ID NO: 1721476 - RNA, 19 nt, Artificial Sequence
  Description of Artificial Sequence: Synthetic oligonucleotide
  Antisense strand to SEQ ID NO: 1721475
auagaucagcuggucacac

SEQ ID NO: 1721477 - RNA, 19 nt, Artificial Sequence
  Description of Artificial Sequence: Synthetic oligonucleotide
  Sense strand starting at position 1311 of SEQ ID NO: 1562092
ugaucuauguggccaggaa

SEQ ID NO: 1721478 - RNA, 19 nt, Artificial Sequence
  Description of Artificial Sequence: Synthetic oligonucleotide
  Antisense strand to SEQ ID NO: 1721477
uuccuggccacauagauca

SEQ ID NO: 1721479 - RNA, 19 nt, Artificial Sequence
  Description of Artificial Sequence: Synthetic oligonucleotide
  Sense strand starting at position 1312 of SEQ ID NO: 1562092
gaucuauguggccaggaau

SEQ ID NO: 1721480 - RNA, 19 nt, Artificial Sequence
  Description of Artificial Sequence: Synthetic oligonucleotide
  Antisense strand to SEQ ID NO: 1721479
auuccuggccacauagauc

SEQ ID NO: 1721481 - RNA, 19 nt, Artificial Sequence
  Description of Artificial Sequence: Synthetic oligonucleotide
  Sense strand starting at position 1315 of SEQ ID NO: 1562092
cuauguggccaggaauagu

SEQ ID NO: 1721482 - RNA, 19 nt, Artificial Sequence
  Description of Artificial Sequence: Synthetic oligonucleotide
  Antisense strand to SEQ ID NO: 1721481
acuauuccuggccacauag

SEQ ID NO: 1721483 - RNA, 19 nt, Artificial Sequence
  Description of Artificial Sequence: Synthetic oligonucleotide
  Sense strand starting at position 1522 of SEQ ID NO: 1562092
cagccucucugaguagaga

SEQ ID NO: 1721484 - RNA, 19 nt, Artificial Sequence
  Description of Artificial Sequence: Synthetic oligonucleotide
  Antisense strand to SEQ ID NO: 1721483
ucucuacucagagaggcug

SEQ ID NO: 1721485 - RNA, 19 nt, Artificial Sequence
  Description of Artificial Sequence: Synthetic oligonucleotide
  Sense strand starting at position 1523 of SEQ ID NO: 1562092
agccucucugaguagagau

SEQ ID NO: 1721486 - RNA, 19 nt, Artificial Sequence
  Description of Artificial Sequence: Synthetic oligonucleotide
  Antisense strand to SEQ ID NO: 1721485
aucucuacucagagaggcu

SEQ ID NO: 1721487 - RNA, 19 nt, Artificial Sequence
  Description of Artificial Sequence: Synthetic oligonucleotide
  Sense strand starting at position 1728 of SEQ ID NO: 1562092
acgugugugcuccugcaaa

SEQ ID NO: 1721488 - RNA, 19 nt, Artificial Sequence
  Description of Artificial Sequence: Synthetic oligonucleotide
  Antisense strand to SEQ ID NO: 1721487
uuugcaggagcacacacgu

SEQ ID NO: 1721489 - RNA, 19 nt, Artificial Sequence
  Description of Artificial Sequence: Synthetic oligonucleotide
  Sense strand starting at position 2010 of SEQ ID NO: 1562092
gcgggauccggcagagcuu

SEQ ID NO: 1721490 - RNA, 19 nt, Artificial Sequence
  Description of Artificial Sequence: Synthetic oligonucleotide
  Antisense strand to SEQ ID NO: 1721489
aagcucugccggaucccgc

SEQ ID NO: 1721491 - RNA, 19 nt, Artificial Sequence
  Description of Artificial Sequence: Synthetic oligonucleotide
  Sense strand starting at position 2126 of SEQ ID NO: 1562092
acccucagggcuuguuaga

SEQ ID NO: 1721492 - RNA, 19 nt, Artificial Sequence
  Description of Artificial Sequence: Synthetic oligonucleotide
  Antisense strand to SEQ ID NO: 1721491
ucuaacaagcccugagggu

SEQ ID NO: 1721493 - RNA, 19 nt, Artificial Sequence
  Description of Artificial Sequence: Synthetic oligonucleotide
  Sense strand starting at position 2143 of SEQ ID NO: 1562092
gacuguuugggucagggua

SEQ ID NO: 1721494 - RNA, 19 nt, Artificial Sequence
  Description of Artificial Sequence: Synthetic oligonucleotide
  Antisense strand to SEQ ID NO: 1721493
uacccugacccaaacaguc

SEQ ID NO: 1721495 - RNA, 19 nt, Artificial Sequence
  Description of Artificial Sequence: Synthetic oligonucleotide
  Sense strand starting at position 2175 of SEQ ID NO: 1562092
guguacugugugaguguuu

SEQ ID NO: 1721496 - RNA, 19 nt, Artificial Sequence
  Description of Artificial Sequence: Synthetic oligonucleotide
  Antisense strand to SEQ ID NO: 1721495
aaacacucacacaguacac

SEQ ID NO: 1721497 - RNA, 19 nt, Artificial Sequence
  Description of Artificial Sequence: Synthetic oligonucleotide
  Sense strand starting at position 2239 of SEQ ID NO: 1562092
ucagguauuugugucgguu

SEQ ID NO: 1721498 - RNA, 19 nt, Artificial Sequence
  Description of Artificial Sequence: Synthetic oligonucleotide
  Antisense strand to SEQ ID NO: 1721497
aaccgacacaaauaccuga

SEQ ID NO: 1721499 - RNA, 19 nt, Artificial Sequence
  Description of Artificial Sequence: Synthetic oligonucleotide
  Sense strand starting at position 2255 of SEQ ID NO: 1562092
guuucuaugagucugcgua

SEQ ID NO: 1721500 - RNA, 19 nt, Artificial Sequence
  Description of Artificial Sequence: Synthetic oligonucleotide
  Antisense strand to SEQ ID NO: 1721499
uacgcagacucauagaaac

SEQ ID NO: 1721501 - RNA, 19 nt, Artificial Sequence
  Description of Artificial Sequence: Synthetic oligonucleotide
  Sense strand starting at position 2404 of SEQ ID NO: 1562092
cucugugugguacauauca

SEQ ID NO: 1721502 - RNA, 19 nt, Artificial Sequence
  Description of Artificial Sequence: Synthetic oligonucleotide
  Antisense strand to SEQ ID NO: 1721501
ugauauguaccacacagag

SEQ ID NO: 1721503 - RNA, 19 nt, Artificial Sequence
  Description of Artificial Sequence: Synthetic oligonucleotide
  Sense strand starting at position 2516 of SEQ ID NO: 1562092
caguaugggugucuauuaa

SEQ ID NO: 1721504 - RNA, 19 nt, Artificial Sequence
  Description of Artificial Sequence: Synthetic oligonucleotide
  Antisense strand to SEQ ID NO: 1721503
uuaauagacacccauacug

SEQ ID NO: 1721505 - RNA, 19 nt, Artificial Sequence
  Description of Artificial Sequence: Synthetic oligonucleotide
  Sense strand starting at position 2531 of SEQ ID NO: 1562092
uuaauauguguguauaggu

SEQ ID NO: 1721506 - RNA, 19 nt, Artificial Sequence
  Description of Artificial Sequence: Synthetic oligonucleotide
  Antisense strand to SEQ ID NO: 1721505
accuauacacacauauuaa

SEQ ID NO: 1721507 - RNA, 19 nt, Artificial Sequence
  Description of Artificial Sequence: Synthetic oligonucleotide
  Sense strand starting at position 2567 of SEQ ID NO: 1562092
cauagugguguauaucagu

SEQ ID NO: 1721508 - RNA, 19 nt, Artificial Sequence
  Description of Artificial Sequence: Synthetic oligonucleotide
  Antisense strand to SEQ ID NO: 1721507
acugauauacaccacuaug

SEQ ID NO: 1721509 - RNA, 19 nt, Artificial Sequence
  Description of Artificial Sequence: Synthetic oligonucleotide
  Sense strand starting at position 2572 of SEQ ID NO: 1562092
ugguguauaucagugaauu

SEQ ID NO: 1721510 - RNA, 19 nt, Artificial Sequence
  Description of Artificial Sequence: Synthetic oligonucleotide
  Antisense strand to SEQ ID NO: 1721509
aauucacugauauacacca

SEQ ID NO: 1721511 - RNA, 19 nt, Artificial Sequence
  Description of Artificial Sequence: Synthetic oligonucleotide
  Sense strand starting at position 3137 of SEQ ID NO: 1562092
ccagaaaguuggucaggga

SEQ ID NO: 1721512 - RNA, 19 nt, Artificial Sequence
  Description of Artificial Sequence: Synthetic oligonucleotide
  Antisense strand to SEQ ID NO: 1721511
ucccugaccaacuuucugg

SEQ ID NO: 1721513 - RNA, 19 nt, Artificial Sequence
  Description of Artificial Sequence: Synthetic oligonucleotide
  Sense strand starting at position 3211 of SEQ ID NO: 1562092
ucuggaaguguugaccaga

SEQ ID NO: 1721514 - RNA, 19 nt, Artificial Sequence
  Description of Artificial Sequence: Synthetic oligonucleotide
  Antisense strand to SEQ ID NO: 1721513
ucuggucaacacuuccaga

SEQ ID NO: 1721515 - RNA, 19 nt, Artificial Sequence
  Description of Artificial Sequence: Synthetic oligonucleotide
  Sense strand starting at position 3236 of SEQ ID NO: 1562092
cugagugcacaguaucaaa

SEQ ID NO: 1721516 - RNA, 19 nt, Artificial Sequence
  Description of Artificial Sequence: Synthetic oligonucleotide
  Antisense strand to SEQ ID NO: 1721515
uuugauacugugcacucag

SEQ ID NO: 1721517 - RNA, 19 nt, Artificial Sequence
  Description of Artificial Sequence: Synthetic oligonucleotide
  Sense strand starting at position 3492 of SEQ ID NO: 1562092
auauaccguguccagauau

SEQ ID NO: 1721518 - RNA, 19 nt, Artificial Sequence
  Description of Artificial Sequence: Synthetic oligonucleotide
  Antisense strand to SEQ ID NO: 1721517
auaucuggacacgguauau

SEQ ID NO: 1721519 - RNA, 19 nt, Artificial Sequence
  Description of Artificial Sequence: Synthetic oligonucleotide
  Sense strand starting at position 3548 of SEQ ID NO: 1562092
uugaaagaguugucuggac

SEQ ID NO: 1721520 - RNA, 19 nt, Artificial Sequence
  Description of Artificial Sequence: Synthetic oligonucleotide
  Antisense strand to SEQ ID NO: 1721519
guccagacaacucuuucaa

SEQ ID NO: 1721521 - RNA, 19 nt, Artificial Sequence
  Description of Artificial Sequence: Synthetic oligonucleotide
  Sense strand starting at position 3550 of SEQ ID NO: 1562092
gaaagaguugucuggacuc

SEQ ID NO: 1721522 - RNA, 19 nt, Artificial Sequence
  Description of Artificial Sequence: Synthetic oligonucleotide
  Antisense strand to SEQ ID NO: 1721521
gaguccagacaacucuuuc

SEQ ID NO: 1721523 - RNA, 19 nt, Artificial Sequence
  Description of Artificial Sequence: Synthetic oligonucleotide
  Sense strand starting at position 3552 of SEQ ID NO: 1562092
aagaguugucuggacuccu

SEQ ID NO: 1721524 - RNA, 19 nt, Artificial Sequence
  Description of Artificial Sequence: Synthetic oligonucleotide
  Antisense strand to SEQ ID NO: 1721523
aggaguccagacaacucuu

SEQ ID NO: 1721525 - RNA, 19 nt, Artificial Sequence
  Description of Artificial Sequence: Synthetic oligonucleotide
  Sense strand starting at position 3666 of SEQ ID NO: 1562092
gccaaagccagugaugagu

SEQ ID NO: 1721526 - RNA, 19 nt, Artificial Sequence
  Description of Artificial Sequence: Synthetic oligonucleotide
  Antisense strand to SEQ ID NO: 1721525
acucaucacuggcuuuggc

SEQ ID NO: 1721527 - RNA, 19 nt, Artificial Sequence
  Description of Artificial Sequence: Synthetic oligonucleotide
  Sense strand starting at position 3677 of SEQ ID NO: 1562092
ugaugaguuccucauccuc

SEQ ID NO: 1721528 - RNA, 19 nt, Artificial Sequence
  Description of Artificial Sequence: Synthetic oligonucleotide
  Antisense strand to SEQ ID NO: 1721527
gaggaugaggaacucauca

SEQ ID NO: 1721529 - RNA, 19 nt, Artificial Sequence
  Description of Artificial Sequence: Synthetic oligonucleotide
  Sense strand starting at position 3679 of SEQ ID NO: 1562092
augaguuccucauccucau

SEQ ID NO: 1721530 - RNA, 19 nt, Artificial Sequence
  Description of Artificial Sequence: Synthetic oligonucleotide
  Antisense strand to SEQ ID NO: 1721529
augaggaugaggaacucau

SEQ ID NO: 1721531 - RNA, 19 nt, Artificial Sequence
  Description of Artificial Sequence: Synthetic oligonucleotide
  Sense strand starting at position 3890 of SEQ ID NO: 1562092
uuuaguugaucacuaccau

SEQ ID NO: 1721532 - RNA, 19 nt, Artificial Sequence
  Description of Artificial Sequence: Synthetic oligonucleotide
  Antisense strand to SEQ ID NO: 1721531
augguagugaucaacuaaa

SEQ ID NO: 1721533 - RNA, 19 nt, Artificial Sequence
  Description of Artificial Sequence: Synthetic oligonucleotide
  Sense strand starting at position 3891 of SEQ ID NO: 1562092
uuaguugaucacuaccauu

SEQ ID NO: 1721534 - RNA, 19 nt, Artificial Sequence
  Description of Artificial Sequence: Synthetic oligonucleotide
  Antisense strand to SEQ ID NO: 1721533
aaugguagugaucaacuaa

SEQ ID NO: 1721535 - RNA, 19 nt, Artificial Sequence
  Description of Artificial Sequence: Synthetic oligonucleotide
  Sense strand starting at position 3930 of SEQ ID NO: 1562092
acuugucaguucccaaauc

SEQ ID NO: 1721536 - RNA, 19 nt, Artificial Sequence
  Description of Artificial Sequence: Synthetic oligonucleotide
  Antisense strand to SEQ ID NO: 1721535
gauuugggaacugacaagu

SEQ ID NO: 1721537 - RNA, 19 nt, Artificial Sequence
  Description of Artificial Sequence: Synthetic oligonucleotide
  Sense strand starting at position 466 of SEQ ID NO: 1562093
uugcaaugucuggaaaccu

SEQ ID NO: 1721538 - RNA, 19 nt, Artificial Sequence
  Description of Artificial Sequence: Synthetic oligonucleotide
  Antisense strand to SEQ ID NO: 1721537
agguuuccagacauugcaa

SEQ ID NO: 1721539 - RNA, 19 nt, Artificial Sequence
  Description of Artificial Sequence: Synthetic oligonucleotide
  Sense strand starting at position 478 of SEQ ID NO: 1562093
gaaaccuggugccugagaa

SEQ ID NO: 1721540 - RNA, 19 nt, Artificial Sequence
  Description of Artificial Sequence: Synthetic oligonucleotide
  Antisense strand to SEQ ID NO: 1721539
uucucaggcaccagguuuc

SEQ ID NO: 1721541 - RNA, 19 nt, Artificial Sequence
  Description of Artificial Sequence: Synthetic oligonucleotide
  Sense strand starting at position 657 of SEQ ID NO: 1562093
ggcagaggguagagauaaa

SEQ ID NO: 1721542 - RNA, 19 nt, Artificial Sequence
  Description of Artificial Sequence: Synthetic oligonucleotide
  Antisense strand to SEQ ID NO: 1721541
uuuaucucuacccucugcc

SEQ ID NO: 1721543 - RNA, 19 nt, Artificial Sequence
  Description of Artificial Sequence: Synthetic oligonucleotide
  Sense strand starting at position 823 of SEQ ID NO: 1562093
gggaauuugugggagauag

SEQ ID NO: 1721544 - RNA, 19 nt, Artificial Sequence
  Description of Artificial Sequence: Synthetic oligonucleotide
  Antisense strand to SEQ ID NO: 1721543
cuaucucccacaaauuccc

SEQ ID NO: 1721545 - RNA, 19 nt, Artificial Sequence
  Description of Artificial Sequence: Synthetic oligonucleotide
  Sense strand starting at position 873 of SEQ ID NO: 1562093
gacagucuugaaugcuaga

SEQ ID NO: 1721546 - RNA, 19 nt, Artificial Sequence
  Description of Artificial Sequence: Synthetic oligonucleotide
  Antisense strand to SEQ ID NO: 1721545
ucuagcauucaagacuguc

SEQ ID NO: 1721547 - RNA, 19 nt, Artificial Sequence
  Description of Artificial Sequence: Synthetic oligonucleotide
  Sense strand starting at position 1044 of SEQ ID NO: 1562093
ugauuaugaucagcagauc

SEQ ID NO: 1721548 - RNA, 19 nt, Artificial Sequence
  Description of Artificial Sequence: Synthetic oligonucleotide
  Antisense strand to SEQ ID NO: 1721547
gaucugcugaucauaauca

SEQ ID NO: 1721549 - RNA, 19 nt, Artificial Sequence
  Description of Artificial Sequence: Synthetic oligonucleotide
  Sense strand starting at position 1272 of SEQ ID NO: 1562093
uguugugcuaauugaauag

SEQ ID NO: 1721550 - RNA, 19 nt, Artificial Sequence
  Description of Artificial Sequence: Synthetic oligonucleotide
  Antisense strand to SEQ ID NO: 1721549
cuauucaauuagcacaaca

SEQ ID NO: 1721551 - RNA, 19 nt, Artificial Sequence
  Description of Artificial Sequence: Synthetic oligonucleotide
  Sense strand starting at position 1276 of SEQ ID NO: 1562093
gugcuaauugaauaggcga

SEQ ID NO: 1721552 - RNA, 19 nt, Artificial Sequence
  Description of Artificial Sequence: Synthetic oligonucleotide
  Antisense strand to SEQ ID NO: 1721551
ucgccuauucaauuagcac

SEQ ID NO: 1721553 - RNA, 19 nt, Artificial Sequence
  Description of Artificial Sequence: Synthetic oligonucleotide
  Sense strand starting at position 1359 of SEQ ID NO: 1562093
aggugucuccaugacaaau

SEQ ID NO: 1721554 - RNA, 19 nt, Artificial Sequence
  Description of Artificial Sequence: Synthetic oligonucleotide
  Antisense strand to SEQ ID NO: 1721553
auuugucauggagacaccu

SEQ ID NO: 1721555 - RNA, 19 nt, Artificial Sequence
  Description of Artificial Sequence: Synthetic oligonucleotide
  Sense strand starting at position 1437 of SEQ ID NO: 1562093
gcaaguggcucauuucuau

SEQ ID NO: 1721556 - RNA, 19 nt, Artificial Sequence
  Description of Artificial Sequence: Synthetic oligonucleotide
  Antisense strand to SEQ ID NO: 1721555
auagaaaugagccacuugc

SEQ ID NO: 1721557 - RNA, 19 nt, Artificial Sequence
  Description of Artificial Sequence: Synthetic oligonucleotide
  Sense strand starting at position 1443 of SEQ ID NO: 1562093
ggcucauuucuaugugcuc

SEQ ID NO: 1721558 - RNA, 19 nt, Artificial Sequence
  Description of Artificial Sequence: Synthetic oligonucleotide
  Antisense strand to SEQ ID NO: 1721557
gagcacauagaaaugagcc

SEQ ID NO: 1721559 - RNA, 19 nt, Artificial Sequence
  Description of Artificial Sequence: Synthetic oligonucleotide
  Sense strand starting at position 1450 of SEQ ID NO: 1562093
uucuaugugcucgcaguaa

SEQ ID NO: 1721560 - RNA, 19 nt, Artificial Sequence
  Description of Artificial Sequence: Synthetic oligonucleotide
  Antisense strand to SEQ ID NO: 1721559
uuacugcgagcacauagaa

SEQ ID NO: 1721561 - RNA, 19 nt, Artificial Sequence
  Description of Artificial Sequence: Synthetic oligonucleotide
  Sense strand starting at position 1482 of SEQ ID NO: 1562093
ugacauugucugggaccca

SEQ ID NO: 1721562 - RNA, 19 nt, Artificial Sequence
  Description of Artificial Sequence: Synthetic oligonucleotide
  Antisense strand to SEQ ID NO: 1721561
ugggucccagacaauguca

SEQ ID NO: 1721563 - RNA, 19 nt, Artificial Sequence
  Description of Artificial Sequence: Synthetic oligonucleotide
  Sense strand starting at position 1506 of SEQ ID NO: 1562093
uuccuuagccucgggaaga

SEQ ID NO: 1721564 - RNA, 19 nt, Artificial Sequence
  Description of Artificial Sequence: Synthetic oligonucleotide
  Antisense strand to SEQ ID NO: 1721563
ucuucccgaggcuaaggaa

SEQ ID NO: 1721565 - RNA, 19 nt, Artificial Sequence
  Description of Artificial Sequence: Synthetic oligonucleotide
  Sense strand starting at position 2180 of SEQ ID NO: 1562093
ugcccaaugccucaggaaa

SEQ ID NO: 1721566 - RNA, 19 nt, Artificial Sequence
  Description of Artificial Sequence: Synthetic oligonucleotide
  Antisense strand to SEQ ID NO: 1721565
uuuccugaggcauugggca

SEQ ID NO: 1721567 - RNA, 19 nt, Artificial Sequence
  Description of Artificial Sequence: Synthetic oligonucleotide
  Sense strand starting at position 2282 of SEQ ID NO: 1562093
gugugaccagcugaucuau

SEQ ID NO: 1721568 - RNA, 19 nt, Artificial Sequence
  Description of Artificial Sequence: Synthetic oligonucleotide
  Antisense strand to SEQ ID NO: 1721567
auagaucagcuggucacac

SEQ ID NO: 1721569 - RNA, 19 nt, Artificial Sequence
  Description of Artificial Sequence: Synthetic oligonucleotide
  Sense strand starting at position 2293 of SEQ ID NO: 1562093
ugaucuauguggccaggaa

SEQ ID NO: 1721570 - RNA, 19 nt, Artificial Sequence
  Description of Artificial Sequence: Synthetic oligonucleotide
  Antisense strand to SEQ ID NO: 1721569
uuccuggccacauagauca

SEQ ID NO: 1721571 - RNA, 19 nt, Artificial Sequence
  Description of Artificial Sequence: Synthetic oligonucleotide
  Sense strand starting at position 2294 of SEQ ID NO: 1562093
gaucuauguggccaggaau

SEQ ID NO: 1721572 - RNA, 19 nt, Artificial Sequence
  Description of Artificial Sequence: Synthetic oligonucleotide
  Antisense strand to SEQ ID NO: 1721571
auuccuggccacauagauc

SEQ ID NO: 1721573 - RNA, 19 nt, Artificial Sequence
  Description of Artificial Sequence: Synthetic oligonucleotide
  Sense strand starting at position 2297 of SEQ ID NO: 1562093
cuauguggccaggaauagu

SEQ ID NO: 1721574 - RNA, 19 nt, Artificial Sequence
  Description of Artificial Sequence: Synthetic oligonucleotide
  Antisense strand to SEQ ID NO: 1721573
acuauuccuggccacauag

SEQ ID NO: 1721575 - RNA, 19 nt, Artificial Sequence
  Description of Artificial Sequence: Synthetic oligonucleotide
  Sense strand starting at position 2504 of SEQ ID NO: 1562093
cagccucucugaguagaga

SEQ ID NO: 1721576 - RNA, 19 nt, Artificial Sequence
  Description of Artificial Sequence: Synthetic oligonucleotide
  Antisense strand to SEQ ID NO: 1721575
ucucuacucagagaggcug

SEQ ID NO: 1721577 - RNA, 19 nt, Artificial Sequence
  Description of Artificial Sequence: Synthetic oligonucleotide
  Sense strand starting at position 2505 of SEQ ID NO: 1562093
agccucucugaguagagau

SEQ ID NO: 1721578 - RNA, 19 nt, Artificial Sequence
  Description of Artificial Sequence: Synthetic oligonucleotide
  Antisense strand to SEQ ID NO: 1721577
aucucuacucagagaggcu

SEQ ID NO: 1721579 - RNA, 19 nt, Artificial Sequence
  Description of Artificial Sequence: Synthetic oligonucleotide
  Sense strand starting at position 2710 of SEQ ID NO: 1562093
acgugugugcuccugcaaa

SEQ ID NO: 1721580 - RNA, 19 nt, Artificial Sequence
  Description of Artificial Sequence: Synthetic oligonucleotide
  Antisense strand to SEQ ID NO: 1721579
uuugcaggagcacacacgu

SEQ ID NO: 1721581 - RNA, 19 nt, Artificial Sequence
  Description of Artificial Sequence: Synthetic oligonucleotide
  Sense strand starting at position 2992 of SEQ ID NO: 1562093
gcgggauccggcagagcuu

SEQ ID NO: 1721582 - RNA, 19 nt, Artificial Sequence
  Description of Artificial Sequence: Synthetic oligonucleotide
  Antisense strand to SEQ ID NO: 1721581
aagcucugccggaucccgc

SEQ ID NO: 1721583 - RNA, 19 nt, Artificial Sequence
  Description of Artificial Sequence: Synthetic oligonucleotide
  Sense strand starting at position 3108 of SEQ ID NO: 1562093
acccucagggcuuguuaga

SEQ ID NO: 1721584 - RNA, 19 nt, Artificial Sequence
  Description of Artificial Sequence: Synthetic oligonucleotide
  Antisense strand to SEQ ID NO: 1721583
ucuaacaagcccugagggu

SEQ ID NO: 1721585 - RNA, 19 nt, Artificial Sequence
  Description of Artificial Sequence: Synthetic oligonucleotide
  Sense strand starting at position 3125 of SEQ ID NO: 1562093
gacuguuugggucagggua

SEQ ID NO: 1721586 - RNA, 19 nt, Artificial Sequence
  Description of Artificial Sequence: Synthetic oligonucleotide
  Antisense strand to SEQ ID NO: 1721585
uacccugacccaaacaguc

SEQ ID NO: 1721587 - RNA, 19 nt, Artificial Sequence
  Description of Artificial Sequence: Synthetic oligonucleotide
  Sense strand starting at position 3157 of SEQ ID NO: 1562093
guguacugugugaguguuu

SEQ ID NO: 1721588 - RNA, 19 nt, Artificial Sequence
  Description of Artificial Sequence: Synthetic oligonucleotide
  Antisense strand to SEQ ID NO: 1721587
aaacacucacacaguacac

SEQ ID NO: 1721589 - RNA, 19 nt, Artificial Sequence
  Description of Artificial Sequence: Synthetic oligonucleotide
  Sense strand starting at position 3221 of SEQ ID NO: 1562093
ucagguauuugugucgguu

SEQ ID NO: 1721590 - RNA, 19 nt, Artificial Sequence
  Description of Artificial Sequence: Synthetic oligonucleotide
  Antisense strand to SEQ ID NO: 1721589
aaccgacacaaauaccuga

SEQ ID NO: 1721591 - RNA, 19 nt, Artificial Sequence
  Description of Artificial Sequence: Synthetic oligonucleotide
  Sense strand starting at position 3224 of SEQ ID NO: 1562093
gguauuugugucgguuucu

SEQ ID NO: 1721592 - RNA, 19 nt, Artificial Sequence
  Description of Artificial Sequence: Synthetic oligonucleotide
  Antisense strand to SEQ ID NO: 1721591
agaaaccgacacaaauacc

SEQ ID NO: 1721593 - RNA, 19 nt, Artificial Sequence
  Description of Artificial Sequence: Synthetic oligonucleotide
  Sense strand starting at position 3225 of SEQ ID NO: 1562093
guauuugugucgguuucua

SEQ ID NO: 1721594 - RNA, 19 nt, Artificial Sequence
  Description of Artificial Sequence: Synthetic oligonucleotide
  Antisense strand to SEQ ID NO: 1721593
uagaaaccgacacaaauac

SEQ ID NO: 1721595 - RNA, 19 nt, Artificial Sequence
  Description of Artificial Sequence: Synthetic oligonucleotide
  Sense strand starting at position 3237 of SEQ ID NO: 1562093
guuucuaugagucugcgua

SEQ ID NO: 1721596 - RNA, 19 nt, Artificial Sequence
  Description of Artificial Sequence: Synthetic oligonucleotide
  Antisense strand to SEQ ID NO: 1721595
uacgcagacucauagaaac

SEQ ID NO: 1721597 - RNA, 19 nt, Artificial Sequence
  Description of Artificial Sequence: Synthetic oligonucleotide
  Sense strand starting at position 3244 of SEQ ID NO: 1562093
ugagucugcguagaugauu

SEQ ID NO: 1721598 - RNA, 19 nt, Artificial Sequence
  Description of Artificial Sequence: Synthetic oligonucleotide
  Antisense strand to SEQ ID NO: 1721597
aaucaucuacgcagacuca

SEQ ID NO: 1721599 - RNA, 19 nt, Artificial Sequence
  Description of Artificial Sequence: Synthetic oligonucleotide
  Sense strand starting at position 3256 of SEQ ID NO: 1562093
gaugauugcauguaugugu

SEQ ID NO: 1721600 - RNA, 19 nt, Artificial Sequence
  Description of Artificial Sequence: Synthetic oligonucleotide
  Antisense strand to SEQ ID NO: 1721599
acacauacaugcaaucauc

SEQ ID NO: 1721601 - RNA, 19 nt, Artificial Sequence
  Description of Artificial Sequence: Synthetic oligonucleotide
  Sense strand starting at position 3386 of SEQ ID NO: 1562093
cucugugugguacauauca

SEQ ID NO: 1721602 - RNA, 19 nt, Artificial Sequence
  Description of Artificial Sequence: Synthetic oligonucleotide
  Antisense strand to SEQ ID NO: 1721601
ugauauguaccacacagag

SEQ ID NO: 1721603 - RNA, 19 nt, Artificial Sequence
  Description of Artificial Sequence: Synthetic oligonucleotide
  Sense strand starting at position 3388 of SEQ ID NO: 1562093
cugugugguacauaucagu

SEQ ID NO: 1721604 - RNA, 19 nt, Artificial Sequence
  Description of Artificial Sequence: Synthetic oligonucleotide
  Antisense strand to SEQ ID NO: 1721603
acugauauguaccacacag

SEQ ID NO: 1721605 - RNA, 19 nt, Artificial Sequence
  Description of Artificial Sequence: Synthetic oligonucleotide
  Sense strand starting at position 3409 of SEQ ID NO: 1562093
guaucuuuguaugugaaua

SEQ ID NO: 1721606 - RNA, 19 nt, Artificial Sequence
  Description of Artificial Sequence: Synthetic oligonucleotide
  Antisense strand to SEQ ID NO: 1721605
uauucacauacaaagauac

SEQ ID NO: 1721607 - RNA, 19 nt, Artificial Sequence
  Description of Artificial Sequence: Synthetic oligonucleotide
  Sense strand starting at position 3486 of SEQ ID NO: 1562093
guguguuaagagcaguaug

SEQ ID NO: 1721608 - RNA, 19 nt, Artificial Sequence
  Description of Artificial Sequence: Synthetic oligonucleotide
  Antisense strand to SEQ ID NO: 1721607
cauacugcucuuaacacac

SEQ ID NO: 1721609 - RNA, 19 nt, Artificial Sequence
  Description of Artificial Sequence: Synthetic oligonucleotide
  Sense strand starting at position 3498 of SEQ ID NO: 1562093
caguaugggugucuauuaa

SEQ ID NO: 1721610 - RNA, 19 nt, Artificial Sequence
  Description of Artificial Sequence: Synthetic oligonucleotide
  Antisense strand to SEQ ID NO: 1721609
uuaauagacacccauacug

SEQ ID NO: 1721611 - RNA, 19 nt, Artificial Sequence
  Description of Artificial Sequence: Synthetic oligonucleotide
  Sense strand starting at position 3513 of SEQ ID NO: 1562093
uuaauauguguguauaggu

SEQ ID NO: 1721612 - RNA, 19 nt, Artificial Sequence
  Description of Artificial Sequence: Synthetic oligonucleotide
  Antisense strand to SEQ ID NO: 1721611
accuauacacacauauuaa

SEQ ID NO: 1721613 - RNA, 19 nt, Artificial Sequence
  Description of Artificial Sequence: Synthetic oligonucleotide
  Sense strand starting at position 3549 of SEQ ID NO: 1562093
cauagugguguauaucagu

SEQ ID NO: 1721614 - RNA, 19 nt, Artificial Sequence
  Description of Artificial Sequence: Synthetic oligonucleotide
  Antisense strand to SEQ ID NO: 1721613
acugauauacaccacuaug

SEQ ID NO: 1721615 - RNA, 19 nt, Artificial Sequence
  Description of Artificial Sequence: Synthetic oligonucleotide
  Sense strand starting at position 3554 of SEQ ID NO: 1562093
ugguguauaucagugaauu

SEQ ID NO: 1721616 - RNA, 19 nt, Artificial Sequence
  Description of Artificial Sequence: Synthetic oligonucleotide
  Antisense strand to SEQ ID NO: 1721615
aauucacugauauacacca

SEQ ID NO: 1721617 - RNA, 19 nt, Artificial Sequence
  Description of Artificial Sequence: Synthetic oligonucleotide
  Sense strand starting at position 41 of SEQ ID NO: 1562094
acugaugccuuaucacgua

SEQ ID NO: 1721618 - RNA, 19 nt, Artificial Sequence
  Description of Artificial Sequence: Synthetic oligonucleotide
  Antisense strand to SEQ ID NO: 1721617
uacgugauaaggcaucagu

SEQ ID NO: 1721619 - RNA, 19 nt, Artificial Sequence
  Description of Artificial Sequence: Synthetic oligonucleotide
  Sense strand starting at position 131 of SEQ ID NO: 1562094
auugaauccucagcacuga

SEQ ID NO: 1721620 - RNA, 19 nt, Artificial Sequence
  Description of Artificial Sequence: Synthetic oligonucleotide
  Antisense strand to SEQ ID NO: 1721619
ucagugcugaggauucaau

SEQ ID NO: 1721621 - RNA, 19 nt, Artificial Sequence
  Description of Artificial Sequence: Synthetic oligonucleotide
  Sense strand starting at position 169 of SEQ ID NO: 1562094
guagaugcccaguacaauu

SEQ ID NO: 1721622 - RNA, 19 nt, Artificial Sequence
  Description of Artificial Sequence: Synthetic oligonucleotide
  Antisense strand to SEQ ID NO: 1721621
aauuguacugggcaucuac

SEQ ID NO: 1721623 - RNA, 19 nt, Artificial Sequence
  Description of Artificial Sequence: Synthetic oligonucleotide
  Sense strand starting at position 211 of SEQ ID NO: 1562094
uugauaaauguugguacau

SEQ ID NO: 1721624 - RNA, 19 nt, Artificial Sequence
  Description of Artificial Sequence: Synthetic oligonucleotide
  Antisense strand to SEQ ID NO: 1721623
auguaccaacauuuaucaa

SEQ ID NO: 1721625 - RNA, 19 nt, Artificial Sequence
  Description of Artificial Sequence: Synthetic oligonucleotide
  Sense strand starting at position 377 of SEQ ID NO: 1562094
aaagacaugucugcacgua

SEQ ID NO: 1721626 - RNA, 19 nt, Artificial Sequence
  Description of Artificial Sequence: Synthetic oligonucleotide
  Antisense strand to SEQ ID NO: 1721625
uacgugcagacaugucuuu

SEQ ID NO: 1721627 - RNA, 19 nt, Artificial Sequence
  Description of Artificial Sequence: Synthetic oligonucleotide
  Sense strand starting at position 393 of SEQ ID NO: 1562094
guacacauuugugagcaca

SEQ ID NO: 1721628 - RNA, 19 nt, Artificial Sequence
  Description of Artificial Sequence: Synthetic oligonucleotide
  Antisense strand to SEQ ID NO: 1721627
ugugcucacaaauguguac

SEQ ID NO: 1721629 - RNA, 19 nt, Artificial Sequence
  Description of Artificial Sequence: Synthetic oligonucleotide
  Sense strand starting at position 455 of SEQ ID NO: 1562094
ggguucuuagguuagguua

SEQ ID NO: 1721630 - RNA, 19 nt, Artificial Sequence
  Description of Artificial Sequence: Synthetic oligonucleotide
  Antisense strand to SEQ ID NO: 1721629
uaaccuaaccuaagaaccc

SEQ ID NO: 1721631 - RNA, 19 nt, Artificial Sequence
  Description of Artificial Sequence: Synthetic oligonucleotide
  Sense strand starting at position 801 of SEQ ID NO: 1562094
uguacuauuguguaaagcu

SEQ ID NO: 1721632 - RNA, 19 nt, Artificial Sequence
  Description of Artificial Sequence: Synthetic oligonucleotide
  Antisense strand to SEQ ID NO: 1721631
agcuuuacacaauaguaca

SEQ ID NO: 1721633 - RNA, 19 nt, Artificial Sequence
  Description of Artificial Sequence: Synthetic oligonucleotide
  Sense strand starting at position 810 of SEQ ID NO: 1562094
guguaaagcuucucaagau

SEQ ID NO: 1721634 - RNA, 19 nt, Artificial Sequence
  Description of Artificial Sequence: Synthetic oligonucleotide
  Antisense strand to SEQ ID NO: 1721633
aucuugagaagcuuuacac

SEQ ID NO: 1721635 - RNA, 19 nt, Artificial Sequence
  Description of Artificial Sequence: Synthetic oligonucleotide
  Sense strand starting at position 826 of SEQ ID NO: 1562094
gauauugcuguugaguuaa

SEQ ID NO: 1721636 - RNA, 19 nt, Artificial Sequence
  Description of Artificial Sequence: Synthetic oligonucleotide
  Antisense strand to SEQ ID NO: 1721635
uuaacucaacagcaauauc

SEQ ID NO: 1721637 - RNA, 19 nt, Artificial Sequence
  Description of Artificial Sequence: Synthetic oligonucleotide
  Sense strand starting at position 828 of SEQ ID NO: 1562094
uauugcuguugaguuaaua

SEQ ID NO: 1721638 - RNA, 19 nt, Artificial Sequence
  Description of Artificial Sequence: Synthetic oligonucleotide
  Antisense strand to SEQ ID NO: 1721637
uauuaacucaacagcaaua

SEQ ID NO: 1721639 - RNA, 19 nt, Artificial Sequence
  Description of Artificial Sequence: Synthetic oligonucleotide
  Sense strand starting at position 853 of SEQ ID NO: 1562094
uacugaguuccugguggga

SEQ ID NO: 1721640 - RNA, 19 nt, Artificial Sequence
  Description of Artificial Sequence: Synthetic oligonucleotide
  Antisense strand to SEQ ID NO: 1721639
ucccaccaggaacucagua

SEQ ID NO: 1721641 - RNA, 19 nt, Artificial Sequence
  Description of Artificial Sequence: Synthetic oligonucleotide
  Sense strand starting at position 1001 of SEQ ID NO: 1562094
gcuggacaucaauauauuc

SEQ ID NO: 1721642 - RNA, 19 nt, Artificial Sequence
  Description of Artificial Sequence: Synthetic oligonucleotide
  Antisense strand to SEQ ID NO: 1721641
gaauauauugauguccagc

SEQ ID NO: 1721643 - RNA, 19 nt, Artificial Sequence
  Description of Artificial Sequence: Synthetic oligonucleotide
  Sense strand starting at position 1370 of SEQ ID NO: 1562094
gugccaacuugaucuuauu

SEQ ID NO: 1721644 - RNA, 19 nt, Artificial Sequence
  Description of Artificial Sequence: Synthetic oligonucleotide
  Antisense strand to SEQ ID NO: 1721643
aauaagaucaaguuggcac

SEQ ID NO: 1721645 - RNA, 19 nt, Artificial Sequence
  Description of Artificial Sequence: Synthetic oligonucleotide
  Sense strand starting at position 1414 of SEQ ID NO: 1562094
gaacuaucaucgucccugu

SEQ ID NO: 1721646 - RNA, 19 nt, Artificial Sequence
  Description of Artificial Sequence: Synthetic oligonucleotide
  Antisense strand to SEQ ID NO: 1721645
acagggacgaugauaguuc

SEQ ID NO: 1721647 - RNA, 19 nt, Artificial Sequence
  Description of Artificial Sequence: Synthetic oligonucleotide
  Sense strand starting at position 1610 of SEQ ID NO: 1562094
ggauguaaguugguuaguu

SEQ ID NO: 1721648 - RNA, 19 nt, Artificial Sequence
  Description of Artificial Sequence: Synthetic oligonucleotide
  Antisense strand to SEQ ID NO: 1721647
aacuaaccaacuuacaucc

SEQ ID NO: 1721649 - RNA, 19 nt, Artificial Sequence
  Description of Artificial Sequence: Synthetic oligonucleotide
  Sense strand starting at position 1611 of SEQ ID NO: 1562094
gauguaaguugguuaguua

SEQ ID NO: 1721650 - RNA, 19 nt, Artificial Sequence
  Description of Artificial Sequence: Synthetic oligonucleotide
  Antisense strand to SEQ ID NO: 1721649
uaacuaaccaacuuacauc

SEQ ID NO: 1721651 - RNA, 19 nt, Artificial Sequence
  Description of Artificial Sequence: Synthetic oligonucleotide
  Sense strand starting at position 1612 of SEQ ID NO: 1562094
auguaaguugguuaguuaa

SEQ ID NO: 1721652 - RNA, 19 nt, Artificial Sequence
  Description of Artificial Sequence: Synthetic oligonucleotide
  Antisense strand to SEQ ID NO: 1721651
uuaacuaaccaacuuacau

SEQ ID NO: 1721653 - RNA, 19 nt, Artificial Sequence
  Description of Artificial Sequence: Synthetic oligonucleotide
  Sense strand starting at position 1615 of SEQ ID NO: 1562094
uaaguugguuaguuaagga

SEQ ID NO: 1721654 - RNA, 19 nt, Artificial Sequence
  Description of Artificial Sequence: Synthetic oligonucleotide
  Antisense strand to SEQ ID NO: 1721653
uccuuaacuaaccaacuua

SEQ ID NO: 1721655 - RNA, 19 nt, Artificial Sequence
  Description of Artificial Sequence: Synthetic oligonucleotide
  Sense strand starting at position 1618 of SEQ ID NO: 1562094
guugguuaguuaaggagga

SEQ ID NO: 1721656 - RNA, 19 nt, Artificial Sequence
  Description of Artificial Sequence: Synthetic oligonucleotide
  Antisense strand to SEQ ID NO: 1721655
uccuccuuaacuaaccaac

SEQ ID NO: 1721657 - RNA, 19 nt, Artificial Sequence
  Description of Artificial Sequence: Synthetic oligonucleotide
  Sense strand starting at position 1706 of SEQ ID NO: 1562094
agaagucgccaaggaagaa

SEQ ID NO: 1721658 - RNA, 19 nt, Artificial Sequence
  Description of Artificial Sequence: Synthetic oligonucleotide
  Antisense strand to SEQ ID NO: 1721657
uucuuccuuggcgacuucu

SEQ ID NO: 1721659 - RNA, 19 nt, Artificial Sequence
  Description of Artificial Sequence: Synthetic oligonucleotide
  Sense strand starting at position 1754 of SEQ ID NO: 1562094
gaaagauguuagcuaggua

SEQ ID NO: 1721660 - RNA, 19 nt, Artificial Sequence
  Description of Artificial Sequence: Synthetic oligonucleotide
  Antisense strand to SEQ ID NO: 1721659
uaccuagcuaacaucuuuc

SEQ ID NO: 1721661 - RNA, 19 nt, Artificial Sequence
  Description of Artificial Sequence: Synthetic oligonucleotide
  Sense strand starting at position 1757 of SEQ ID NO: 1562094
agauguuagcuagguaacu

SEQ ID NO: 1721662 - RNA, 19 nt, Artificial Sequence
  Description of Artificial Sequence: Synthetic oligonucleotide
  Antisense strand to SEQ ID NO: 1721661
aguuaccuagcuaacaucu

SEQ ID NO: 1721663 - RNA, 19 nt, Artificial Sequence
  Description of Artificial Sequence: Synthetic oligonucleotide
  Sense strand starting at position 1758 of SEQ ID NO: 1562094
gauguuagcuagguaacua

SEQ ID NO: 1721664 - RNA, 19 nt, Artificial Sequence
  Description of Artificial Sequence: Synthetic oligonucleotide
  Antisense strand to SEQ ID NO: 1721663
uaguuaccuagcuaacauc

SEQ ID NO: 1721665 - RNA, 19 nt, Artificial Sequence
  Description of Artificial Sequence: Synthetic oligonucleotide
  Sense strand starting at position 1766 of SEQ ID NO: 1562094
cuagguaacuagucaaucu

SEQ ID NO: 1721666 - RNA, 19 nt, Artificial Sequence
  Description of Artificial Sequence: Synthetic oligonucleotide
  Antisense strand to SEQ ID NO: 1721665
agauugacuaguuaccuag

SEQ ID NO: 1721667 - RNA, 19 nt, Artificial Sequence
  Description of Artificial Sequence: Synthetic oligonucleotide
  Sense strand starting at position 1824 of SEQ ID NO: 1562094
gugagccucucaccugaaa

SEQ ID NO: 1721668 - RNA, 19 nt, Artificial Sequence
  Description of Artificial Sequence: Synthetic oligonucleotide
  Antisense strand to SEQ ID NO: 1721667
uuucaggugagaggcucac

SEQ ID NO: 1721669 - RNA, 19 nt, Artificial Sequence
  Description of Artificial Sequence: Synthetic oligonucleotide
  Sense strand starting at position 2206 of SEQ ID NO: 1562094
augugaauuggugacggau

SEQ ID NO: 1721670 - RNA, 19 nt, Artificial Sequence
  Description of Artificial Sequence: Synthetic oligonucleotide
  Antisense strand to SEQ ID NO: 1721669
auccgucaccaauucacau

SEQ ID NO: 1721671 - RNA, 19 nt, Artificial Sequence
  Description of Artificial Sequence: Synthetic oligonucleotide
  Sense strand starting at position 2239 of SEQ ID NO: 1562094
gagggacgguuucugaagu

SEQ ID NO: 1721672 - RNA, 19 nt, Artificial Sequence
  Description of Artificial Sequence: Synthetic oligonucleotide
  Antisense strand to SEQ ID NO: 1721671
acuucagaaaccgucccuc

SEQ ID NO: 1721673 - RNA, 19 nt, Artificial Sequence
  Description of Artificial Sequence: Synthetic oligonucleotide
  Sense strand starting at position 2358 of SEQ ID NO: 1562094
ucgcuuggaaccuagugaa

SEQ ID NO: 1721674 - RNA, 19 nt, Artificial Sequence
  Description of Artificial Sequence: Synthetic oligonucleotide
  Antisense strand to SEQ ID NO: 1721673
uucacuagguuccaagcga

SEQ ID NO: 1721675 - RNA, 19 nt, Artificial Sequence
  Description of Artificial Sequence: Synthetic oligonucleotide
  Sense strand starting at position 2382 of SEQ ID NO: 1562094
aacugaaagguuggucuca

SEQ ID NO: 1721676 - RNA, 19 nt, Artificial Sequence
  Description of Artificial Sequence: Synthetic oligonucleotide
  Antisense strand to SEQ ID NO: 1721675
ugagaccaaccuuucaguu

SEQ ID NO: 1721677 - RNA, 19 nt, Artificial Sequence
  Description of Artificial Sequence: Synthetic oligonucleotide
  Sense strand starting at position 2384 of SEQ ID NO: 1562094
cugaaagguuggucucaca

SEQ ID NO: 1721678 - RNA, 19 nt, Artificial Sequence
  Description of Artificial Sequence: Synthetic oligonucleotide
  Antisense strand to SEQ ID NO: 1721677
ugugagaccaaccuuucag

SEQ ID NO: 1721679 - RNA, 19 nt, Artificial Sequence
  Description of Artificial Sequence: Synthetic oligonucleotide
  Sense strand starting at position 2513 of SEQ ID NO: 1562094
gcaauuucuuguguuaagc

SEQ ID NO: 1721680 - RNA, 19 nt, Artificial Sequence
  Description of Artificial Sequence: Synthetic oligonucleotide
  Antisense strand to SEQ ID NO: 1721679
gcuuaacacaagaaauugc

SEQ ID NO: 1721681 - RNA, 19 nt, Artificial Sequence
  Description of Artificial Sequence: Synthetic oligonucleotide
  Sense strand starting at position 2521 of SEQ ID NO: 1562094
uuguguuaagccgaagacu

SEQ ID NO: 1721682 - RNA, 19 nt, Artificial Sequence
  Description of Artificial Sequence: Synthetic oligonucleotide
  Antisense strand to SEQ ID NO: 1721681
agucuucggcuuaacacaa

SEQ ID NO: 1721683 - RNA, 19 nt, Artificial Sequence
  Description of Artificial Sequence: Synthetic oligonucleotide
  Sense strand starting at position 2574 of SEQ ID NO: 1562094
ggcaccguucugggagaau

SEQ ID NO: 1721684 - RNA, 19 nt, Artificial Sequence
  Description of Artificial Sequence: Synthetic oligonucleotide
  Antisense strand to SEQ ID NO: 1721683
auucucccagaacggugcc

SEQ ID NO: 1721685 - RNA, 19 nt, Artificial Sequence
  Description of Artificial Sequence: Synthetic oligonucleotide
  Sense strand starting at position 2590 of SEQ ID NO: 1562094
aaucacagcugaguugaaa

SEQ ID NO: 1721686 - RNA, 19 nt, Artificial Sequence
  Description of Artificial Sequence: Synthetic oligonucleotide
  Antisense strand to SEQ ID NO: 1721685
uuucaacucagcugugauu

SEQ ID NO: 1721687 - RNA, 19 nt, Artificial Sequence
  Description of Artificial Sequence: Synthetic oligonucleotide
  Sense strand starting at position 3153 of SEQ ID NO: 1562094
gucaacaacuuucugguaa

SEQ ID NO: 1721688 - RNA, 19 nt, Artificial Sequence
  Description of Artificial Sequence: Synthetic oligonucleotide
  Antisense strand to SEQ ID NO: 1721687
uuaccagaaaguuguugac

SEQ ID NO: 1721689 - RNA, 19 nt, Artificial Sequence
  Description of Artificial Sequence: Synthetic oligonucleotide
  Sense strand starting at position 3440 of SEQ ID NO: 1562094
acugguauugguugcauaa

SEQ ID NO: 1721690 - RNA, 19 nt, Artificial Sequence
  Description of Artificial Sequence: Synthetic oligonucleotide
  Antisense strand to SEQ ID NO: 1721689
uuaugcaaccaauaccagu

SEQ ID NO: 1721691 - RNA, 19 nt, Artificial Sequence
  Description of Artificial Sequence: Synthetic oligonucleotide
  Sense strand starting at position 3449 of SEQ ID NO: 1562094
gguugcauaaaguguauca

SEQ ID NO: 1721692 - RNA, 19 nt, Artificial Sequence
  Description of Artificial Sequence: Synthetic oligonucleotide
  Antisense strand to SEQ ID NO: 1721691
ugauacacuuuaugcaacc

SEQ ID NO: 1721693 - RNA, 19 nt, Artificial Sequence
  Description of Artificial Sequence: Synthetic oligonucleotide
  Sense strand starting at position 3451 of SEQ ID NO: 1562094
uugcauaaaguguaucaaa

SEQ ID NO: 1721694 - RNA, 19 nt, Artificial Sequence
  Description of Artificial Sequence: Synthetic oligonucleotide
  Antisense strand to SEQ ID NO: 1721693
uuugauacacuuuaugcaa

SEQ ID NO: 1721695 - RNA, 19 nt, Artificial Sequence
  Description of Artificial Sequence: Synthetic oligonucleotide
  Sense strand starting at position 3876 of SEQ ID NO: 1562094
gggugacaauccuuccaga

SEQ ID NO: 1721696 - RNA, 19 nt, Artificial Sequence
  Description of Artificial Sequence: Synthetic oligonucleotide
  Antisense strand to SEQ ID NO: 1721695
ucuggaaggauugucaccc

SEQ ID NO: 1721697 - RNA, 19 nt, Artificial Sequence
  Description of Artificial Sequence: Synthetic oligonucleotide
  Sense strand starting at position 164 of SEQ ID NO: 1562095
cggcccaucuccuuuaauu

SEQ ID NO: 1721698 - RNA, 19 nt, Artificial Sequence
  Description of Artificial Sequence: Synthetic oligonucleotide
  Antisense strand to SEQ ID NO: 1721697
aauuaaaggagaugggccg

SEQ ID NO: 1721699 - RNA, 19 nt, Artificial Sequence
  Description of Artificial Sequence: Synthetic oligonucleotide
  Sense strand starting at position 189 of SEQ ID NO: 1562095
auaaaucugugagacagga

SEQ ID NO: 1721700 - RNA, 19 nt, Artificial Sequence
  Description of Artificial Sequence: Synthetic oligonucleotide
  Antisense strand to SEQ ID NO: 1721699
uccugucucacagauuuau

SEQ ID NO: 1721701 - RNA, 19 nt, Artificial Sequence
  Description of Artificial Sequence: Synthetic oligonucleotide
  Sense strand starting at position 217 of SEQ ID NO: 1562095
uguuaucuucgucauagac

SEQ ID NO: 1721702 - RNA, 19 nt, Artificial Sequence
  Description of Artificial Sequence: Synthetic oligonucleotide
  Antisense strand to SEQ ID NO: 1721701
gucuaugacgaagauaaca

SEQ ID NO: 1721703 - RNA, 19 nt, Artificial Sequence
  Description of Artificial Sequence: Synthetic oligonucleotide
  Sense strand starting at position 224 of SEQ ID NO: 1562095
uucgucauagacugagaaa

SEQ ID NO: 1721704 - RNA, 19 nt, Artificial Sequence
  Description of Artificial Sequence: Synthetic oligonucleotide
  Antisense strand to SEQ ID NO: 1721703
uuucucagucuaugacgaa

SEQ ID NO: 1721705 - RNA, 19 nt, Artificial Sequence
  Description of Artificial Sequence: Synthetic oligonucleotide
  Sense strand starting at position 627 of SEQ ID NO: 1562095
aggugaaucucgcucugag

SEQ ID NO: 1721706 - RNA, 19 nt, Artificial Sequence
  Description of Artificial Sequence: Synthetic oligonucleotide
  Antisense strand to SEQ ID NO: 1721705
cucagagcgagauucaccu

SEQ ID NO: 1721707 - RNA, 19 nt, Artificial Sequence
  Description of Artificial Sequence: Synthetic oligonucleotide
  Sense strand starting at position 748 of SEQ ID NO: 1562095
caaacuucuggcuguugaa

SEQ ID NO: 1721708 - RNA, 19 nt, Artificial Sequence
  Description of Artificial Sequence: Synthetic oligonucleotide
  Antisense strand to SEQ ID NO: 1721707
uucaacagccagaaguuug

SEQ ID NO: 1721709 - RNA, 19 nt, Artificial Sequence
  Description of Artificial Sequence: Synthetic oligonucleotide
  Sense strand starting at position 757 of SEQ ID NO: 1562095
ggcuguugaaggugacaga

SEQ ID NO: 1721710 - RNA, 19 nt, Artificial Sequence
  Description of Artificial Sequence: Synthetic oligonucleotide
  Antisense strand to SEQ ID NO: 1721709
ucugucaccuucaacagcc

SEQ ID NO: 1721711 - RNA, 19 nt, Artificial Sequence
  Description of Artificial Sequence: Synthetic oligonucleotide
  Sense strand starting at position 1120 of SEQ ID NO: 1562095
ggguuagauucaggacaag

SEQ ID NO: 1721712 - RNA, 19 nt, Artificial Sequence
  Description of Artificial Sequence: Synthetic oligonucleotide
  Antisense strand to SEQ ID NO: 1721711
cuuguccugaaucuaaccc

SEQ ID NO: 1721713 - RNA, 19 nt, Artificial Sequence
  Description of Artificial Sequence: Synthetic oligonucleotide
  Sense strand starting at position 1255 of SEQ ID NO: 1562095
agcgguugaccucacugau

SEQ ID NO: 1721714 - RNA, 19 nt, Artificial Sequence
  Description of Artificial Sequence: Synthetic oligonucleotide
  Antisense strand to SEQ ID NO: 1721713
aucagugaggucaaccgcu

SEQ ID NO: 1721715 - RNA, 19 nt, Artificial Sequence
  Description of Artificial Sequence: Synthetic oligonucleotide
  Sense strand starting at position 1261 of SEQ ID NO: 1562095
ugaccucacugaucucgaa

SEQ ID NO: 1721716 - RNA, 19 nt, Artificial Sequence
  Description of Artificial Sequence: Synthetic oligonucleotide
  Antisense strand to SEQ ID NO: 1721715
uucgagaucagugagguca

SEQ ID NO: 1721717 - RNA, 19 nt, Artificial Sequence
  Description of Artificial Sequence: Synthetic oligonucleotide
  Sense strand starting at position 1435 of SEQ ID NO: 1562095
ccgaguagucguaguacca

SEQ ID NO: 1721718 - RNA, 19 nt, Artificial Sequence
  Description of Artificial Sequence: Synthetic oligonucleotide
  Antisense strand to SEQ ID NO: 1721717
ugguacuacgacuacucgg

SEQ ID NO: 1721719 - RNA, 19 nt, Artificial Sequence
  Description of Artificial Sequence: Synthetic oligonucleotide
  Sense strand starting at position 1874 of SEQ ID NO: 1562095
ggcauagucuaaucugcca

SEQ ID NO: 1721720 - RNA, 19 nt, Artificial Sequence
  Description of Artificial Sequence: Synthetic oligonucleotide
  Antisense strand to SEQ ID NO: 1721719
uggcagauuagacuaugcc

SEQ ID NO: 1721721 - RNA, 19 nt, Artificial Sequence
  Description of Artificial Sequence: Synthetic oligonucleotide
  Sense strand starting at position 1947 of SEQ ID NO: 1562095
cuuaccugcugggaagaau

SEQ ID NO: 1721722 - RNA, 19 nt, Artificial Sequence
  Description of Artificial Sequence: Synthetic oligonucleotide
  Antisense strand to SEQ ID NO: 1721721
auucuucccagcagguaag

SEQ ID NO: 1721723 - RNA, 19 nt, Artificial Sequence
  Description of Artificial Sequence: Synthetic oligonucleotide
  Sense strand starting at position 1976 of SEQ ID NO: 1562095
ggagaagcuugggcaagaa

SEQ ID NO: 1721724 - RNA, 19 nt, Artificial Sequence
  Description of Artificial Sequence: Synthetic oligonucleotide
  Antisense strand to SEQ ID NO: 1721723
uucuugcccaagcuucucc

SEQ ID NO: 1721725 - RNA, 19 nt, Artificial Sequence
  Description of Artificial Sequence: Synthetic oligonucleotide
  Sense strand starting at position 2172 of SEQ ID NO: 1562095
cuuaaagaccucugaguca

SEQ ID NO: 1721726 - RNA, 19 nt, Artificial Sequence
  Description of Artificial Sequence: Synthetic oligonucleotide
  Antisense strand to SEQ ID NO: 1721725
ugacucagaggucuuuaag

SEQ ID NO: 1721727 - RNA, 19 nt, Artificial Sequence
  Description of Artificial Sequence: Synthetic oligonucleotide
  Sense strand starting at position 2227 of SEQ ID NO: 1562095
ucaggcugugcccaggaau

SEQ ID NO: 1721728 - RNA, 19 nt, Artificial Sequence
  Description of Artificial Sequence: Synthetic oligonucleotide
  Antisense strand to SEQ ID NO: 1721727
auuccugggcacagccuga

SEQ ID NO: 1721729 - RNA, 19 nt, Artificial Sequence
  Description of Artificial Sequence: Synthetic oligonucleotide
  Sense strand starting at position 2454 of SEQ ID NO: 1562095
cuagaaugaugguuucuuc

SEQ ID NO: 1721730 - RNA, 19 nt, Artificial Sequence
  Description of Artificial Sequence: Synthetic oligonucleotide
  Antisense strand to SEQ ID NO: 1721729
gaagaaaccaucauucuag

SEQ ID NO: 1721731 - RNA, 19 nt, Artificial Sequence
  Description of Artificial Sequence: Synthetic oligonucleotide
  Sense strand starting at position 2457 of SEQ ID NO: 1562095
gaaugaugguuucuuccug

SEQ ID NO: 1721732 - RNA, 19 nt, Artificial Sequence
  Description of Artificial Sequence: Synthetic oligonucleotide
  Antisense strand to SEQ ID NO: 1721731
caggaagaaaccaucauuc

SEQ ID NO: 1721733 - RNA, 19 nt, Artificial Sequence
  Description of Artificial Sequence: Synthetic oligonucleotide
  Sense strand starting at position 2458 of SEQ ID NO: 1562095
aaugaugguuucuuccuga

SEQ ID NO: 1721734 - RNA, 19 nt, Artificial Sequence
  Description of Artificial Sequence: Synthetic oligonucleotide
  Antisense strand to SEQ ID NO: 1721733
ucaggaagaaaccaucauu

SEQ ID NO: 1721735 - RNA, 19 nt, Artificial Sequence
  Description of Artificial Sequence: Synthetic oligonucleotide
  Sense strand starting at position 2471 of SEQ ID NO: 1562095
uccugaggcuugucuccua

SEQ ID NO: 1721736 - RNA, 19 nt, Artificial Sequence
  Description of Artificial Sequence: Synthetic oligonucleotide
  Antisense strand to SEQ ID NO: 1721735
uaggagacaagccucagga

SEQ ID NO: 1721737 - RNA, 19 nt, Artificial Sequence
  Description of Artificial Sequence: Synthetic oligonucleotide
  Sense strand starting at position 2536 of SEQ ID NO: 1562095
ugccgaagugcugccuuua

SEQ ID NO: 1721738 - RNA, 19 nt, Artificial Sequence
  Description of Artificial Sequence: Synthetic oligonucleotide
  Antisense strand to SEQ ID NO: 1721737
uaaaggcagcacuucggca

SEQ ID NO: 1721739 - RNA, 19 nt, Artificial Sequence
  Description of Artificial Sequence: Synthetic oligonucleotide
  Sense strand starting at position 2537 of SEQ ID NO: 1562095
gccgaagugcugccuuuaa

SEQ ID NO: 1721740 - RNA, 19 nt, Artificial Sequence
  Description of Artificial Sequence: Synthetic oligonucleotide
  Antisense strand to SEQ ID NO: 1721739
uuaaaggcagcacuucggc

SEQ ID NO: 1721741 - RNA, 19 nt, Artificial Sequence
  Description of Artificial Sequence: Synthetic oligonucleotide
  Sense strand starting at position 2541 of SEQ ID NO: 1562095
aagugcugccuuuaacagu

SEQ ID NO: 1721742 - RNA, 19 nt, Artificial Sequence
  Description of Artificial Sequence: Synthetic oligonucleotide
  Antisense strand to SEQ ID NO: 1721741
acuguuaaaggcagcacuu

SEQ ID NO: 1721743 - RNA, 19 nt, Artificial Sequence
  Description of Artificial Sequence: Synthetic oligonucleotide
  Sense strand starting at position 2591 of SEQ ID NO: 1562095
cccauugcccgugagaugu

SEQ ID NO: 1721744 - RNA, 19 nt, Artificial Sequence
  Description of Artificial Sequence: Synthetic oligonucleotide
  Antisense strand to SEQ ID NO: 1721743
acaucucacgggcaauggg

SEQ ID NO: 1721745 - RNA, 19 nt, Artificial Sequence
  Description of Artificial Sequence: Synthetic oligonucleotide
  Sense strand starting at position 2595 of SEQ ID NO: 1562095
uugcccgugagaugugaaa

SEQ ID NO: 1721746 - RNA, 19 nt, Artificial Sequence
  Description of Artificial Sequence: Synthetic oligonucleotide
  Antisense strand to SEQ ID NO: 1721745
uuucacaucucacgggcaa

SEQ ID NO: 1721747 - RNA, 19 nt, Artificial Sequence
  Description of Artificial Sequence: Synthetic oligonucleotide
  Sense strand starting at position 2676 of SEQ ID NO: 1562095
ggcaguucugucugcucaa

SEQ ID NO: 1721748 - RNA, 19 nt, Artificial Sequence
  Description of Artificial Sequence: Synthetic oligonucleotide
  Antisense strand to SEQ ID NO: 1721747
uugagcagacagaacugcc

SEQ ID NO: 1721749 - RNA, 19 nt, Artificial Sequence
  Description of Artificial Sequence: Synthetic oligonucleotide
  Sense strand starting at position 2677 of SEQ ID NO: 1562095
gcaguucugucugcucaag

SEQ ID NO: 1721750 - RNA, 19 nt, Artificial Sequence
  Description of Artificial Sequence: Synthetic oligonucleotide
  Antisense strand to SEQ ID NO: 1721749
cuugagcagacagaacugc

SEQ ID NO: 1721751 - RNA, 19 nt, Artificial Sequence
  Description of Artificial Sequence: Synthetic oligonucleotide
  Sense strand starting at position 2792 of SEQ ID NO: 1562095
gcuggaacuucuccuuuga

SEQ ID NO: 1721752 - RNA, 19 nt, Artificial Sequence
  Description of Artificial Sequence: Synthetic oligonucleotide
  Antisense strand to SEQ ID NO: 1721751
ucaaaggagaaguuccagc

SEQ ID NO: 1721753 - RNA, 19 nt, Artificial Sequence
  Description of Artificial Sequence: Synthetic oligonucleotide
  Sense strand starting at position 2796 of SEQ ID NO: 1562095
gaacuucuccuuugagguu

SEQ ID NO: 1721754 - RNA, 19 nt, Artificial Sequence
  Description of Artificial Sequence: Synthetic oligonucleotide
  Antisense strand to SEQ ID NO: 1721753
aaccucaaaggagaaguuc

SEQ ID NO: 1721755 - RNA, 19 nt, Artificial Sequence
  Description of Artificial Sequence: Synthetic oligonucleotide
  Sense strand starting at position 2875 of SEQ ID NO: 1562095
gcccauuucucaggaccua

SEQ ID NO: 1721756 - RNA, 19 nt, Artificial Sequence
  Description of Artificial Sequence: Synthetic oligonucleotide
  Antisense strand to SEQ ID NO: 1721755
uagguccugagaaaugggc

SEQ ID NO: 1721757 - RNA, 19 nt, Artificial Sequence
  Description of Artificial Sequence: Synthetic oligonucleotide
  Sense strand starting at position 3024 of SEQ ID NO: 1562095
aaggcaagucuagguuuga

SEQ ID NO: 1721758 - RNA, 19 nt, Artificial Sequence
  Description of Artificial Sequence: Synthetic oligonucleotide
  Antisense strand to SEQ ID NO: 1721757
ucaaaccuagacuugccuu

SEQ ID NO: 1721759 - RNA, 19 nt, Artificial Sequence
  Description of Artificial Sequence: Synthetic oligonucleotide
  Sense strand starting at position 3025 of SEQ ID NO: 1562095
aggcaagucuagguuugaa

SEQ ID NO: 1721760 - RNA, 19 nt, Artificial Sequence
  Description of Artificial Sequence: Synthetic oligonucleotide
  Antisense strand to SEQ ID NO: 1721759
uucaaaccuagacuugccu

SEQ ID NO: 1721761 - RNA, 19 nt, Artificial Sequence
  Description of Artificial Sequence: Synthetic oligonucleotide
  Sense strand starting at position 3033 of SEQ ID NO: 1562095
cuagguuugaaagguagca

SEQ ID NO: 1721762 - RNA, 19 nt, Artificial Sequence
  Description of Artificial Sequence: Synthetic oligonucleotide
  Antisense strand to SEQ ID NO: 1721761
ugcuaccuuucaaaccuag

SEQ ID NO: 1721763 - RNA, 19 nt, Artificial Sequence
  Description of Artificial Sequence: Synthetic oligonucleotide
  Sense strand starting at position 3038 of SEQ ID NO: 1562095
uuugaaagguagcaugaga

SEQ ID NO: 1721764 - RNA, 19 nt, Artificial Sequence
  Description of Artificial Sequence: Synthetic oligonucleotide
  Antisense strand to SEQ ID NO: 1721763
ucucaugcuaccuuucaaa

SEQ ID NO: 1721765 - RNA, 19 nt, Artificial Sequence
  Description of Artificial Sequence: Synthetic oligonucleotide
  Sense strand starting at position 3049 of SEQ ID NO: 1562095
gcaugagagcgcuguggaa

SEQ ID NO: 1721766 - RNA, 19 nt, Artificial Sequence
  Description of Artificial Sequence: Synthetic oligonucleotide
  Antisense strand to SEQ ID NO: 1721765
uuccacagcgcucucaugc

SEQ ID NO: 1721767 - RNA, 19 nt, Artificial Sequence
  Description of Artificial Sequence: Synthetic oligonucleotide
  Sense strand starting at position 3079 of SEQ ID NO: 1562095
caaauaugagcucaaugug

SEQ ID NO: 1721768 - RNA, 19 nt, Artificial Sequence
  Description of Artificial Sequence: Synthetic oligonucleotide
  Antisense strand to SEQ ID NO: 1721767
cacauugagcucauauuug

SEQ ID NO: 1721769 - RNA, 19 nt, Artificial Sequence
  Description of Artificial Sequence: Synthetic oligonucleotide
  Sense strand starting at position 3100 of SEQ ID NO: 1562095
cggaguguaccauauccaa

SEQ ID NO: 1721770 - RNA, 19 nt, Artificial Sequence
  Description of Artificial Sequence: Synthetic oligonucleotide
  Antisense strand to SEQ ID NO: 1721769
uuggauaugguacacuccg

SEQ ID NO: 1721771 - RNA, 19 nt, Artificial Sequence
  Description of Artificial Sequence: Synthetic oligonucleotide
  Sense strand starting at position 3275 of SEQ ID NO: 1562095
aggcaaugcuuucuuaagu

SEQ ID NO: 1721772 - RNA, 19 nt, Artificial Sequence
  Description of Artificial Sequence: Synthetic oligonucleotide
  Antisense strand to SEQ ID NO: 1721771
acuuaagaaagcauugccu

SEQ ID NO: 1721773 - RNA, 19 nt, Artificial Sequence
  Description of Artificial Sequence: Synthetic oligonucleotide
  Sense strand starting at position 3276 of SEQ ID NO: 1562095
ggcaaugcuuucuuaagua

SEQ ID NO: 1721774 - RNA, 19 nt, Artificial Sequence
  Description of Artificial Sequence: Synthetic oligonucleotide
  Antisense strand to SEQ ID NO: 1721773
uacuuaagaaagcauugcc

SEQ ID NO: 1721775 - RNA, 19 nt, Artificial Sequence
  Description of Artificial Sequence: Synthetic oligonucleotide
  Sense strand starting at position 3280 of SEQ ID NO: 1562095
augcuuucuuaaguaugaa

SEQ ID NO: 1721776 - RNA, 19 nt, Artificial Sequence
  Description of Artificial Sequence: Synthetic oligonucleotide
  Antisense strand to SEQ ID NO: 1721775
uucauacuuaagaaagcau

SEQ ID NO: 1721777 - RNA, 19 nt, Artificial Sequence
  Description of Artificial Sequence: Synthetic oligonucleotide
  Sense strand starting at position 15 of SEQ ID NO: 1562096
gggacaauccaccguguuu

SEQ ID NO: 1721778 - RNA, 19 nt, Artificial Sequence
  Description of Artificial Sequence: Synthetic oligonucleotide
  Antisense strand to SEQ ID NO: 1721777
aaacacgguggauuguccc

SEQ ID NO: 1721779 - RNA, 19 nt, Artificial Sequence
  Description of Artificial Sequence: Synthetic oligonucleotide
  Sense strand starting at position 122 of SEQ ID NO: 1562096
guuuacucugcgcaccaga

SEQ ID NO: 1721780 - RNA, 19 nt, Artificial Sequence
  Description of Artificial Sequence: Synthetic oligonucleotide
  Antisense strand to SEQ ID NO: 1721779
ucuggugcgcagaguaaac

SEQ ID NO: 1721781 - RNA, 19 nt, Artificial Sequence
  Description of Artificial Sequence: Synthetic oligonucleotide
  Sense strand starting at position 238 of SEQ ID NO: 1562096
ugaagucaaacauguggaa

SEQ ID NO: 1721782 - RNA, 19 nt, Artificial Sequence
  Description of Artificial Sequence: Synthetic oligonucleotide
  Antisense strand to SEQ ID NO: 1721781
uuccacauguuugacuuca

SEQ ID NO: 1721783 - RNA, 19 nt, Artificial Sequence
  Description of Artificial Sequence: Synthetic oligonucleotide
  Sense strand starting at position 252 of SEQ ID NO: 1562096
uggaaagucguauguccau

SEQ ID NO: 1721784 - RNA, 19 nt, Artificial Sequence
  Description of Artificial Sequence: Synthetic oligonucleotide
  Antisense strand to SEQ ID NO: 1721783
auggacauacgacuuucca

SEQ ID NO: 1721785 - RNA, 19 nt, Artificial Sequence
  Description of Artificial Sequence: Synthetic oligonucleotide
  Sense strand starting at position 305 of SEQ ID NO: 1562096
ucugaaagccacugucagu

SEQ ID NO: 1721786 - RNA, 19 nt, Artificial Sequence
  Description of Artificial Sequence: Synthetic oligonucleotide
  Antisense strand to SEQ ID NO: 1721785
acugacaguggcuuucaga

SEQ ID NO: 1721787 - RNA, 19 nt, Artificial Sequence
  Description of Artificial Sequence: Synthetic oligonucleotide
  Sense strand starting at position 540 of SEQ ID NO: 1562096
cuauuacugcucggcauua

SEQ ID NO: 1721788 - RNA, 19 nt, Artificial Sequence
  Description of Artificial Sequence: Synthetic oligonucleotide
  Antisense strand to SEQ ID NO: 1721787
uaaugccgagcaguaauag

SEQ ID NO: 1721789 - RNA, 19 nt, Artificial Sequence
  Description of Artificial Sequence: Synthetic oligonucleotide
  Sense strand starting at position 2639 of SEQ ID NO: 1562096
agggaauagguuugcuuaa

SEQ ID NO: 1721790 - RNA, 19 nt, Artificial Sequence
  Description of Artificial Sequence: Synthetic oligonucleotide
  Antisense strand to SEQ ID NO: 1721789
uuaagcaaaccuauucccu

SEQ ID NO: 1721791 - RNA, 19 nt, Artificial Sequence
  Description of Artificial Sequence: Synthetic oligonucleotide
  Sense strand starting at position 2640 of SEQ ID NO: 1562096
gggaauagguuugcuuaag

SEQ ID NO: 1721792 - RNA, 19 nt, Artificial Sequence
  Description of Artificial Sequence: Synthetic oligonucleotide
  Antisense strand to SEQ ID NO: 1721791
cuuaagcaaaccuauuccc

SEQ ID NO: 1721793 - RNA, 19 nt, Artificial Sequence
  Description of Artificial Sequence: Synthetic oligonucleotide
  Sense strand starting at position 2698 of SEQ ID NO: 1562096
uccugauucccagguuaaa

SEQ ID NO: 1721794 - RNA, 19 nt, Artificial Sequence
  Description of Artificial Sequence: Synthetic oligonucleotide
  Antisense strand to SEQ ID NO: 1721793
uuuaaccugggaaucagga

SEQ ID NO: 1721795 - RNA, 19 nt, Artificial Sequence
  Description of Artificial Sequence: Synthetic oligonucleotide
  Sense strand starting at position 2709 of SEQ ID NO: 1562096
agguuaaagaccugugcaa

SEQ ID NO: 1721796 - RNA, 19 nt, Artificial Sequence
  Description of Artificial Sequence: Synthetic oligonucleotide
  Antisense strand to SEQ ID NO: 1721795
uugcacaggucuuuaaccu

SEQ ID NO: 1721797 - RNA, 19 nt, Artificial Sequence
  Description of Artificial Sequence: Synthetic oligonucleotide
  Sense strand starting at position 2711 of SEQ ID NO: 1562096
guuaaagaccugugcaaag

SEQ ID NO: 1721798 - RNA, 19 nt, Artificial Sequence
  Description of Artificial Sequence: Synthetic oligonucleotide
  Antisense strand to SEQ ID NO: 1721797
cuuugcacaggucuuuaac

SEQ ID NO: 1721799 - RNA, 19 nt, Artificial Sequence
  Description of Artificial Sequence: Synthetic oligonucleotide
  Sense strand starting at position 2713 of SEQ ID NO: 1562096
uaaagaccugugcaaagua

SEQ ID NO: 1721800 - RNA, 19 nt, Artificial Sequence
  Description of Artificial Sequence: Synthetic oligonucleotide
  Antisense strand to SEQ ID NO: 1721799
uacuuugcacaggucuuua

SEQ ID NO: 1721801 - RNA, 19 nt, Artificial Sequence
  Description of Artificial Sequence: Synthetic oligonucleotide
  Sense strand starting at position 2831 of SEQ ID NO: 1562096
ugaacuccguggguucaaa

SEQ ID NO: 1721802 - RNA, 19 nt, Artificial Sequence
  Description of Artificial Sequence: Synthetic oligonucleotide
  Antisense strand to SEQ ID NO: 1721801
uuugaacccacggaguuca

SEQ ID NO: 1721803 - RNA, 19 nt, Artificial Sequence
  Description of Artificial Sequence: Synthetic oligonucleotide
  Sense strand starting at position 2931 of SEQ ID NO: 1562096
gccagcgugagucucaauu

SEQ ID NO: 1721804 - RNA, 19 nt, Artificial Sequence
  Description of Artificial Sequence: Synthetic oligonucleotide
  Antisense strand to SEQ ID NO: 1721803
aauugagacucacgcuggc

SEQ ID NO: 1721805 - RNA, 19 nt, Artificial Sequence
  Description of Artificial Sequence: Synthetic oligonucleotide
  Sense strand starting at position 2942 of SEQ ID NO: 1562096
ucucaauugugaggauuug

SEQ ID NO: 1721806 - RNA, 19 nt, Artificial Sequence
  Description of Artificial Sequence: Synthetic oligonucleotide
  Antisense strand to SEQ ID NO: 1721805
caaauccucacaauugaga

SEQ ID NO: 1721807 - RNA, 19 nt, Artificial Sequence
  Description of Artificial Sequence: Synthetic oligonucleotide
  Sense strand starting at position 3034 of SEQ ID NO: 1562096
aagugaaguguuugacaac

SEQ ID NO: 1721808 - RNA, 19 nt, Artificial Sequence
  Description of Artificial Sequence: Synthetic oligonucleotide
  Antisense strand to SEQ ID NO: 1721807
guugucaaacacuucacuu

SEQ ID NO: 1721809 - RNA, 19 nt, Artificial Sequence
  Description of Artificial Sequence: Synthetic oligonucleotide
  Sense strand starting at position 3046 of SEQ ID NO: 1562096
ugacaacaguccuugagaa

SEQ ID NO: 1721810 - RNA, 19 nt, Artificial Sequence
  Description of Artificial Sequence: Synthetic oligonucleotide
  Antisense strand to SEQ ID NO: 1721809
uucucaaggacuguuguca

SEQ ID NO: 1721811 - RNA, 19 nt, Artificial Sequence
  Description of Artificial Sequence: Synthetic oligonucleotide
  Sense strand starting at position 3047 of SEQ ID NO: 1562096
gacaacaguccuugagaac

SEQ ID NO: 1721812 - RNA, 19 nt, Artificial Sequence
  Description of Artificial Sequence: Synthetic oligonucleotide
  Antisense strand to SEQ ID NO: 1721811
guucucaaggacuguuguc

SEQ ID NO: 1721813 - RNA, 19 nt, Artificial Sequence
  Description of Artificial Sequence: Synthetic oligonucleotide
  Sense strand starting at position 3086 of SEQ ID NO: 1562096
uuugaagugcaagggaauu

SEQ ID NO: 1721814 - RNA, 19 nt, Artificial Sequence
  Description of Artificial Sequence: Synthetic oligonucleotide
  Antisense strand to SEQ ID NO: 1721813
aauucccuugcacuucaaa

SEQ ID NO: 1721815 - RNA, 19 nt, Artificial Sequence
  Description of Artificial Sequence: Synthetic oligonucleotide
  Sense strand starting at position 3134 of SEQ ID NO: 1562096
ggucccuguccaugaggaa

SEQ ID NO: 1721816 - RNA, 19 nt, Artificial Sequence
  Description of Artificial Sequence: Synthetic oligonucleotide
  Antisense strand to SEQ ID NO: 1721815
uuccucauggacagggacc

SEQ ID NO: 1721817 - RNA, 19 nt, Artificial Sequence
  Description of Artificial Sequence: Synthetic oligonucleotide
  Sense strand starting at position 3135 of SEQ ID NO: 1562096
gucccuguccaugaggaau

SEQ ID NO: 1721818 - RNA, 19 nt, Artificial Sequence
  Description of Artificial Sequence: Synthetic oligonucleotide
  Antisense strand to SEQ ID NO: 1721817
auuccucauggacagggac

SEQ ID NO: 1721819 - RNA, 19 nt, Artificial Sequence
  Description of Artificial Sequence: Synthetic oligonucleotide
  Sense strand starting at position 3137 of SEQ ID NO: 1562096
cccuguccaugaggaauuu

SEQ ID NO: 1721820 - RNA, 19 nt, Artificial Sequence
  Description of Artificial Sequence: Synthetic oligonucleotide
  Antisense strand to SEQ ID NO: 1721819
aaauuccucauggacaggg

SEQ ID NO: 1721821 - RNA, 19 nt, Artificial Sequence
  Description of Artificial Sequence: Synthetic oligonucleotide
  Sense strand starting at position 3237 of SEQ ID NO: 1562096
gggugagcguauuuagaua

SEQ ID NO: 1721822 - RNA, 19 nt, Artificial Sequence
  Description of Artificial Sequence: Synthetic oligonucleotide
  Antisense strand to SEQ ID NO: 1721821
uaucuaaauacgcucaccc

SEQ ID NO: 1721823 - RNA, 19 nt, Artificial Sequence
  Description of Artificial Sequence: Synthetic oligonucleotide
  Sense strand starting at position 3265 of SEQ ID NO: 1562096
guaagaccucccugagaca

SEQ ID NO: 1721824 - RNA, 19 nt, Artificial Sequence
  Description of Artificial Sequence: Synthetic oligonucleotide
  Antisense strand to SEQ ID NO: 1721823
ugucucagggaggucuuac

SEQ ID NO: 1721825 - RNA, 19 nt, Artificial Sequence
  Description of Artificial Sequence: Synthetic oligonucleotide
  Sense strand starting at position 3277 of SEQ ID NO: 1562096
ugagacauggguugcugaa

SEQ ID NO: 1721826 - RNA, 19 nt, Artificial Sequence
  Description of Artificial Sequence: Synthetic oligonucleotide
  Antisense strand to SEQ ID NO: 1721825
uucagcaacccaugucuca

SEQ ID NO: 1721827 - RNA, 19 nt, Artificial Sequence
  Description of Artificial Sequence: Synthetic oligonucleotide
  Sense strand starting at position 3328 of SEQ ID NO: 1562096
ggagaaagguguuccagga

SEQ ID NO: 1721828 - RNA, 19 nt, Artificial Sequence
  Description of Artificial Sequence: Synthetic oligonucleotide
  Antisense strand to SEQ ID NO: 1721827
uccuggaacaccuuucucc

SEQ ID NO: 1721829 - RNA, 19 nt, Artificial Sequence
  Description of Artificial Sequence: Synthetic oligonucleotide
  Sense strand starting at position 3332 of SEQ ID NO: 1562096
aaagguguuccaggaagag

SEQ ID NO: 1721830 - RNA, 19 nt, Artificial Sequence
  Description of Artificial Sequence: Synthetic oligonucleotide
  Antisense strand to SEQ ID NO: 1721829
cucuuccuggaacaccuuu

SEQ ID NO: 1721831 - RNA, 19 nt, Artificial Sequence
  Description of Artificial Sequence: Synthetic oligonucleotide
  Sense strand starting at position 3427 of SEQ ID NO: 1562096
gugggauggucuccaagac

SEQ ID NO: 1721832 - RNA, 19 nt, Artificial Sequence
  Description of Artificial Sequence: Synthetic oligonucleotide
  Antisense strand to SEQ ID NO: 1721831
gucuuggagaccaucccac

SEQ ID NO: 1721833 - RNA, 19 nt, Artificial Sequence
  Description of Artificial Sequence: Synthetic oligonucleotide
  Sense strand starting at position 3435 of SEQ ID NO: 1562096
gucuccaagaccuggguaa

SEQ ID NO: 1721834 - RNA, 19 nt, Artificial Sequence
  Description of Artificial Sequence: Synthetic oligonucleotide
  Antisense strand to SEQ ID NO: 1721833
uuacccaggucuuggagac

SEQ ID NO: 1721835 - RNA, 19 nt, Artificial Sequence
  Description of Artificial Sequence: Synthetic oligonucleotide
  Sense strand starting at position 3436 of SEQ ID NO: 1562096
ucuccaagaccuggguaaa

SEQ ID NO: 1721836 - RNA, 19 nt, Artificial Sequence
  Description of Artificial Sequence: Synthetic oligonucleotide
  Antisense strand to SEQ ID NO: 1721835
uuuacccaggucuuggaga

SEQ ID NO: 1721837 - RNA, 19 nt, Artificial Sequence
  Description of Artificial Sequence: Synthetic oligonucleotide
  Sense strand starting at position 3451 of SEQ ID NO: 1562096
uaaagagccugcguuuauu

SEQ ID NO: 1721838 - RNA, 19 nt, Artificial Sequence
  Description of Artificial Sequence: Synthetic oligonucleotide
  Antisense strand to SEQ ID NO: 1721837
aauaaacgcaggcucuuua

SEQ ID NO: 1721839 - RNA, 19 nt, Artificial Sequence
  Description of Artificial Sequence: Synthetic oligonucleotide
  Sense strand starting at position 3465 of SEQ ID NO: 1562096
uuauucugcaguugggaga

SEQ ID NO: 1721840 - RNA, 19 nt, Artificial Sequence
  Description of Artificial Sequence: Synthetic oligonucleotide
  Antisense strand to SEQ ID NO: 1721839
ucucccaacugcagaauaa

SEQ ID NO: 1721841 - RNA, 19 nt, Artificial Sequence
  Description of Artificial Sequence: Synthetic oligonucleotide
  Sense strand starting at position 3508 of SEQ ID NO: 1562096
agggccaugucugauuuau

SEQ ID NO: 1721842 - RNA, 19 nt, Artificial Sequence
  Description of Artificial Sequence: Synthetic oligonucleotide
  Antisense strand to SEQ ID NO: 1721841
auaaaucagacauggcccu

SEQ ID NO: 1721843 - RNA, 19 nt, Artificial Sequence
  Description of Artificial Sequence: Synthetic oligonucleotide
  Sense strand starting at position 3510 of SEQ ID NO: 1562096
ggccaugucugauuuaugu

SEQ ID NO: 1721844 - RNA, 19 nt, Artificial Sequence
  Description of Artificial Sequence: Synthetic oligonucleotide
  Antisense strand to SEQ ID NO: 1721843
acauaaaucagacauggcc

SEQ ID NO: 1721845 - RNA, 19 nt, Artificial Sequence
  Description of Artificial Sequence: Synthetic oligonucleotide
  Sense strand starting at position 3516 of SEQ ID NO: 1562096
gucugauuuaugugucuaa

SEQ ID NO: 1721846 - RNA, 19 nt, Artificial Sequence
  Description of Artificial Sequence: Synthetic oligonucleotide
  Antisense strand to SEQ ID NO: 1721845
uuagacacauaaaucagac

SEQ ID NO: 1721847 - RNA, 19 nt, Artificial Sequence
  Description of Artificial Sequence: Synthetic oligonucleotide
  Sense strand starting at position 3567 of SEQ ID NO: 1562096
gagagaggagcguggaauu

SEQ ID NO: 1721848 - RNA, 19 nt, Artificial Sequence
  Description of Artificial Sequence: Synthetic oligonucleotide
  Antisense strand to SEQ ID NO: 1721847
aauuccacgcuccucucuc

SEQ ID NO: 1721849 - RNA, 19 nt, Artificial Sequence
  Description of Artificial Sequence: Synthetic oligonucleotide
  Sense strand starting at position 3577 of SEQ ID NO: 1562096
cguggaauugggcaccaau

SEQ ID NO: 1721850 - RNA, 19 nt, Artificial Sequence
  Description of Artificial Sequence: Synthetic oligonucleotide
  Antisense strand to SEQ ID NO: 1721849
auuggugcccaauuccacg

SEQ ID NO: 1721851 - RNA, 19 nt, Artificial Sequence
  Description of Artificial Sequence: Synthetic oligonucleotide
  Sense strand starting at position 3671 of SEQ ID NO: 1562096
gggucuagaccaugaaggu

SEQ ID NO: 1721852 - RNA, 19 nt, Artificial Sequence
  Description of Artificial Sequence: Synthetic oligonucleotide
  Antisense strand to SEQ ID NO: 1721851
accuucauggucuagaccc

SEQ ID NO: 1721853 - RNA, 19 nt, Artificial Sequence
  Description of Artificial Sequence: Synthetic oligonucleotide
  Sense strand starting at position 3798 of SEQ ID NO: 1562096
uccagaaggcucugcuguu

SEQ ID NO: 1721854 - RNA, 19 nt, Artificial Sequence
  Description of Artificial Sequence: Synthetic oligonucleotide
  Antisense strand to SEQ ID NO: 1721853
aacagcagagccuucugga

SEQ ID NO: 1721855 - RNA, 19 nt, Artificial Sequence
  Description of Artificial Sequence: Synthetic oligonucleotide
  Sense strand starting at position 3983 of SEQ ID NO: 1562096
cuuguucucuguccacaua

SEQ ID NO: 1721856 - RNA, 19 nt, Artificial Sequence
  Description of Artificial Sequence: Synthetic oligonucleotide
  Antisense strand to SEQ ID NO: 1721855
uauguggacagagaacaag

SEQ ID NO: 1721857 - RNA, 19 nt, Artificial Sequence
  Description of Artificial Sequence: Synthetic oligonucleotide
  Sense strand starting at position 9 of SEQ ID NO: 1562097
caagaaagguguugguguu

SEQ ID NO: 1721858 - RNA, 19 nt, Artificial Sequence
  Description of Artificial Sequence: Synthetic oligonucleotide
  Antisense strand to SEQ ID NO: 1721857
aacaccaacaccuuucuug

SEQ ID NO: 1721859 - RNA, 19 nt, Artificial Sequence
  Description of Artificial Sequence: Synthetic oligonucleotide
  Sense strand starting at position 125 of SEQ ID NO: 1562097
cggagaagggucuggaaua

SEQ ID NO: 1721860 - RNA, 19 nt, Artificial Sequence
  Description of Artificial Sequence: Synthetic oligonucleotide
  Antisense strand to SEQ ID NO: 1721859
uauuccagacccuucuccg

SEQ ID NO: 1721861 - RNA, 19 nt, Artificial Sequence
  Description of Artificial Sequence: Synthetic oligonucleotide
  Sense strand starting at position 152 of SEQ ID NO: 1562097
gaaauuaacucgggcccaa

SEQ ID NO: 1721862 - RNA, 19 nt, Artificial Sequence
  Description of Artificial Sequence: Synthetic oligonucleotide
  Antisense strand to SEQ ID NO: 1721861
uugggcccgaguuaauuuc

SEQ ID NO: 1721863 - RNA, 19 nt, Artificial Sequence
  Description of Artificial Sequence: Synthetic oligonucleotide
  Sense strand starting at position 192 of SEQ ID NO: 1562097
agcacuugugagugacacu

SEQ ID NO: 1721864 - RNA, 19 nt, Artificial Sequence
  Description of Artificial Sequence: Synthetic oligonucleotide
  Antisense strand to SEQ ID NO: 1721863
agugucacucacaagugcu

SEQ ID NO: 1721865 - RNA, 19 nt, Artificial Sequence
  Description of Artificial Sequence: Synthetic oligonucleotide
  Sense strand starting at position 193 of SEQ ID NO: 1562097
gcacuugugagugacacuu

SEQ ID NO: 1721866 - RNA, 19 nt, Artificial Sequence
  Description of Artificial Sequence: Synthetic oligonucleotide
  Antisense strand to SEQ ID NO: 1721865
aagugucacucacaagugc

SEQ ID NO: 1721867 - RNA, 19 nt, Artificial Sequence
  Description of Artificial Sequence: Synthetic oligonucleotide
  Sense strand starting at position 199 of SEQ ID NO: 1562097
gugagugacacuugugcau

SEQ ID NO: 1721868 - RNA, 19 nt, Artificial Sequence
  Description of Artificial Sequence: Synthetic oligonucleotide
  Antisense strand to SEQ ID NO: 1721867
augcacaagugucacucac

SEQ ID NO: 1721869 - RNA, 19 nt, Artificial Sequence
  Description of Artificial Sequence: Synthetic oligonucleotide
  Sense strand starting at position 201 of SEQ ID NO: 1562097
gagugacacuugugcauuu

SEQ ID NO: 1721870 - RNA, 19 nt, Artificial Sequence
  Description of Artificial Sequence: Synthetic oligonucleotide
  Antisense strand to SEQ ID NO: 1721869
aaaugcacaagugucacuc

SEQ ID NO: 1721871 - RNA, 19 nt, Artificial Sequence
  Description of Artificial Sequence: Synthetic oligonucleotide
  Sense strand starting at position 319 of SEQ ID NO: 1562097
agagacgugaacuguauca

SEQ ID NO: 1721872 - RNA, 19 nt, Artificial Sequence
  Description of Artificial Sequence: Synthetic oligonucleotide
  Antisense strand to SEQ ID NO: 1721871
ugauacaguucacgucucu

SEQ ID NO: 1721873 - RNA, 19 nt, Artificial Sequence
  Description of Artificial Sequence: Synthetic oligonucleotide
  Sense strand starting at position 321 of SEQ ID NO: 1562097
agacgugaacuguaucagu

SEQ ID NO: 1721874 - RNA, 19 nt, Artificial Sequence
  Description of Artificial Sequence: Synthetic oligonucleotide
  Antisense strand to SEQ ID NO: 1721873
acugauacaguucacgucu

SEQ ID NO: 1721875 - RNA, 19 nt, Artificial Sequence
  Description of Artificial Sequence: Synthetic oligonucleotide
  Sense strand starting at position 418 of SEQ ID NO: 1562097
cuaugugaauuccuggguu

SEQ ID NO: 1721876 - RNA, 19 nt, Artificial Sequence
  Description of Artificial Sequence: Synthetic oligonucleotide
  Antisense strand to SEQ ID NO: 1721875
aacccaggaauucacauag

SEQ ID NO: 1721877 - RNA, 19 nt, Artificial Sequence
  Description of Artificial Sequence: Synthetic oligonucleotide
  Sense strand starting at position 420 of SEQ ID NO: 1562097
augugaauuccuggguuuc

SEQ ID NO: 1721878 - RNA, 19 nt, Artificial Sequence
  Description of Artificial Sequence: Synthetic oligonucleotide
  Antisense strand to SEQ ID NO: 1721877
gaaacccaggaauucacau

SEQ ID NO: 1721879 - RNA, 19 nt, Artificial Sequence
  Description of Artificial Sequence: Synthetic oligonucleotide
  Sense strand starting at position 422 of SEQ ID NO: 1562097
gugaauuccuggguuucag

SEQ ID NO: 1721880 - RNA, 19 nt, Artificial Sequence
  Description of Artificial Sequence: Synthetic oligonucleotide
  Antisense strand to SEQ ID NO: 1721879
cugaaacccaggaauucac

SEQ ID NO: 1721881 - RNA, 19 nt, Artificial Sequence
  Description of Artificial Sequence: Synthetic oligonucleotide
  Sense strand starting at position 527 of SEQ ID NO: 1562097
gcuaucagaugguuaccau

SEQ ID NO: 1721882 - RNA, 19 nt, Artificial Sequence
  Description of Artificial Sequence: Synthetic oligonucleotide
  Antisense strand to SEQ ID NO: 1721881
augguaaccaucugauagc

SEQ ID NO: 1721883 - RNA, 19 nt, Artificial Sequence
  Description of Artificial Sequence: Synthetic oligonucleotide
  Sense strand starting at position 537 of SEQ ID NO: 1562097
gguuaccaucucuagucaa

SEQ ID NO: 1721884 - RNA, 19 nt, Artificial Sequence
  Description of Artificial Sequence: Synthetic oligonucleotide
  Antisense strand to SEQ ID NO: 1721883
uugacuagagaugguaacc

SEQ ID NO: 1721885 - RNA, 19 nt, Artificial Sequence
  Description of Artificial Sequence: Synthetic oligonucleotide
  Sense strand starting at position 573 of SEQ ID NO: 1562097
ggacacugagcucaucuuu

SEQ ID NO: 1721886 - RNA, 19 nt, Artificial Sequence
  Description of Artificial Sequence: Synthetic oligonucleotide
  Antisense strand to SEQ ID NO: 1721885
aaagaugagcucagugucc

SEQ ID NO: 1721887 - RNA, 19 nt, Artificial Sequence
  Description of Artificial Sequence: Synthetic oligonucleotide
  Sense strand starting at position 798 of SEQ ID NO: 1562097
gaccucacccuuuggugaa

SEQ ID NO: 1721888 - RNA, 19 nt, Artificial Sequence
  Description of Artificial Sequence: Synthetic oligonucleotide
  Antisense strand to SEQ ID NO: 1721887
uucaccaaagggugagguc

SEQ ID NO: 1721889 - RNA, 19 nt, Artificial Sequence
  Description of Artificial Sequence: Synthetic oligonucleotide
  Sense strand starting at position 1028 of SEQ ID NO: 1562097
gggacaauccaccguguuu

SEQ ID NO: 1721890 - RNA, 19 nt, Artificial Sequence
  Description of Artificial Sequence: Synthetic oligonucleotide
  Antisense strand to SEQ ID NO: 1721889
aaacacgguggauuguccc

SEQ ID NO: 1721891 - RNA, 19 nt, Artificial Sequence
  Description of Artificial Sequence: Synthetic oligonucleotide
  Sense strand starting at position 1135 of SEQ ID NO: 1562097
guuuacucugcgcaccaga

SEQ ID NO: 1721892 - RNA, 19 nt, Artificial Sequence
  Description of Artificial Sequence: Synthetic oligonucleotide
  Antisense strand to SEQ ID NO: 1721891
ucuggugcgcagaguaaac

SEQ ID NO: 1721893 - RNA, 19 nt, Artificial Sequence
  Description of Artificial Sequence: Synthetic oligonucleotide
  Sense strand starting at position 1251 of SEQ ID NO: 1562097
ugaagucaaacauguggaa

SEQ ID NO: 1721894 - RNA, 19 nt, Artificial Sequence
  Description of Artificial Sequence: Synthetic oligonucleotide
  Antisense strand to SEQ ID NO: 1721893
uuccacauguuugacuuca

SEQ ID NO: 1721895 - RNA, 19 nt, Artificial Sequence
  Description of Artificial Sequence: Synthetic oligonucleotide
  Sense strand starting at position 1254 of SEQ ID NO: 1562097
agucaaacauguggaaagu

SEQ ID NO: 1721896 - RNA, 19 nt, Artificial Sequence
  Description of Artificial Sequence: Synthetic oligonucleotide
  Antisense strand to SEQ ID NO: 1721895
acuuuccacauguuugacu

SEQ ID NO: 1721897 - RNA, 19 nt, Artificial Sequence
  Description of Artificial Sequence: Synthetic oligonucleotide
  Sense strand starting at position 1265 of SEQ ID NO: 1562097
uggaaagucguauguccau

SEQ ID NO: 1721898 - RNA, 19 nt, Artificial Sequence
  Description of Artificial Sequence: Synthetic oligonucleotide
  Antisense strand to SEQ ID NO: 1721897
auggacauacgacuuucca

SEQ ID NO: 1721899 - RNA, 19 nt, Artificial Sequence
  Description of Artificial Sequence: Synthetic oligonucleotide
  Sense strand starting at position 1318 of SEQ ID NO: 1562097
ucugaaagccacugucagu

SEQ ID NO: 1721900 - RNA, 19 nt, Artificial Sequence
  Description of Artificial Sequence: Synthetic oligonucleotide
  Antisense strand to SEQ ID NO: 1721899
acugacaguggcuuucaga

SEQ ID NO: 1721901 - RNA, 19 nt, Artificial Sequence
  Description of Artificial Sequence: Synthetic oligonucleotide
  Sense strand starting at position 1551 of SEQ ID NO: 1562097
cccuauuacugcucggcau

SEQ ID NO: 1721902 - RNA, 19 nt, Artificial Sequence
  Description of Artificial Sequence: Synthetic oligonucleotide
  Antisense strand to SEQ ID NO: 1721901
augccgagcaguaauaggg

SEQ ID NO: 1721903 - RNA, 19 nt, Artificial Sequence
  Description of Artificial Sequence: Synthetic oligonucleotide
  Sense strand starting at position 1552 of SEQ ID NO: 1562097
ccuauuacugcucggcauu

SEQ ID NO: 1721904 - RNA, 19 nt, Artificial Sequence
  Description of Artificial Sequence: Synthetic oligonucleotide
  Antisense strand to SEQ ID NO: 1721903
aaugccgagcaguaauagg

SEQ ID NO: 1721905 - RNA, 19 nt, Artificial Sequence
  Description of Artificial Sequence: Synthetic oligonucleotide
  Sense strand starting at position 1553 of SEQ ID NO: 1562097
cuauuacugcucggcauua

SEQ ID NO: 1721906 - RNA, 19 nt, Artificial Sequence
  Description of Artificial Sequence: Synthetic oligonucleotide
  Antisense strand to SEQ ID NO: 1721905
uaaugccgagcaguaauag

SEQ ID NO: 1721907 - RNA, 19 nt, Artificial Sequence
  Description of Artificial Sequence: Synthetic oligonucleotide
  Sense strand starting at position 2381 of SEQ ID NO: 1562097
gcaccuucucugcgagcga

SEQ ID NO: 1721908 - RNA, 19 nt, Artificial Sequence
  Description of Artificial Sequence: Synthetic oligonucleotide
  Antisense strand to SEQ ID NO: 1721907
ucgcucgcagagaaggugc

SEQ ID NO: 1721909 - RNA, 19 nt, Artificial Sequence
  Description of Artificial Sequence: Synthetic oligonucleotide
  Sense strand starting at position 3436 of SEQ ID NO: 1562097
gaacgccguuccuguagua

SEQ ID NO: 1721910 - RNA, 19 nt, Artificial Sequence
  Description of Artificial Sequence: Synthetic oligonucleotide
  Antisense strand to SEQ ID NO: 1721909
uacuacaggaacggcguuc

SEQ ID NO: 1721911 - RNA, 19 nt, Artificial Sequence
  Description of Artificial Sequence: Synthetic oligonucleotide
  Sense strand starting at position 3652 of SEQ ID NO: 1562097
agggaauagguuugcuuaa

SEQ ID NO: 1721912 - RNA, 19 nt, Artificial Sequence
  Description of Artificial Sequence: Synthetic oligonucleotide
  Antisense strand to SEQ ID NO: 1721911
uuaagcaaaccuauucccu

SEQ ID NO: 1721913 - RNA, 19 nt, Artificial Sequence
  Description of Artificial Sequence: Synthetic oligonucleotide
  Sense strand starting at position 3653 of SEQ ID NO: 1562097
gggaauagguuugcuuaag

SEQ ID NO: 1721914 - RNA, 19 nt, Artificial Sequence
  Description of Artificial Sequence: Synthetic oligonucleotide
  Antisense strand to SEQ ID NO: 1721913
cuuaagcaaaccuauuccc

SEQ ID NO: 1721915 - RNA, 19 nt, Artificial Sequence
  Description of Artificial Sequence: Synthetic oligonucleotide
  Sense strand starting at position 3709 of SEQ ID NO: 1562097
auuccugauucccagguua

SEQ ID NO: 1721916 - RNA, 19 nt, Artificial Sequence
  Description of Artificial Sequence: Synthetic oligonucleotide
  Antisense strand to SEQ ID NO: 1721915
uaaccugggaaucaggaau

SEQ ID NO: 1721917 - RNA, 19 nt, Artificial Sequence
  Description of Artificial Sequence: Synthetic oligonucleotide
  Sense strand starting at position 3711 of SEQ ID NO: 1562097
uccugauucccagguuaaa

SEQ ID NO: 1721918 - RNA, 19 nt, Artificial Sequence
  Description of Artificial Sequence: Synthetic oligonucleotide
  Antisense strand to SEQ ID NO: 1721917
uuuaaccugggaaucagga

SEQ ID NO: 1721919 - RNA, 19 nt, Artificial Sequence
  Description of Artificial Sequence: Synthetic oligonucleotide
  Sense strand starting at position 3722 of SEQ ID NO: 1562097
agguuaaagaccugugcaa

SEQ ID NO: 1721920 - RNA, 19 nt, Artificial Sequence
  Description of Artificial Sequence: Synthetic oligonucleotide
  Antisense strand to SEQ ID NO: 1721919
uugcacaggucuuuaaccu

SEQ ID NO: 1721921 - RNA, 19 nt, Artificial Sequence
  Description of Artificial Sequence: Synthetic oligonucleotide
  Sense strand starting at position 3724 of SEQ ID NO: 1562097
guuaaagaccugugcaaag

SEQ ID NO: 1721922 - RNA, 19 nt, Artificial Sequence
  Description of Artificial Sequence: Synthetic oligonucleotide
  Antisense strand to SEQ ID NO: 1721921
cuuugcacaggucuuuaac

SEQ ID NO: 1721923 - RNA, 19 nt, Artificial Sequence
  Description of Artificial Sequence: Synthetic oligonucleotide
  Sense strand starting at position 3726 of SEQ ID NO: 1562097
uaaagaccugugcaaagua

SEQ ID NO: 1721924 - RNA, 19 nt, Artificial Sequence
  Description of Artificial Sequence: Synthetic oligonucleotide
  Antisense strand to SEQ ID NO: 1721923
uacuuugcacaggucuuua

SEQ ID NO: 1721925 - RNA, 19 nt, Artificial Sequence
  Description of Artificial Sequence: Synthetic oligonucleotide
  Sense strand starting at position 3844 of SEQ ID NO: 1562097
ugaacuccguggguucaaa

SEQ ID NO: 1721926 - RNA, 19 nt, Artificial Sequence
  Description of Artificial Sequence: Synthetic oligonucleotide
  Antisense strand to SEQ ID NO: 1721925
uuugaacccacggaguuca

SEQ ID NO: 1721927 - RNA, 19 nt, Artificial Sequence
  Description of Artificial Sequence: Synthetic oligonucleotide
  Sense strand starting at position 3944 of SEQ ID NO: 1562097
gccagcgugagucucaauu

SEQ ID NO: 1721928 - RNA, 19 nt, Artificial Sequence
  Description of Artificial Sequence: Synthetic oligonucleotide
  Antisense strand to SEQ ID NO: 1721927
aauugagacucacgcuggc

SEQ ID NO: 1721929 - RNA, 19 nt, Artificial Sequence
  Description of Artificial Sequence: Synthetic oligonucleotide
  Sense strand starting at position 3946 of SEQ ID NO: 1562097
cagcgugagucucaauugu

SEQ ID NO: 1721930 - RNA, 19 nt, Artificial Sequence
  Description of Artificial Sequence: Synthetic oligonucleotide
  Antisense strand to SEQ ID NO: 1721929
acaauugagacucacgcug

SEQ ID NO: 1721931 - RNA, 19 nt, Artificial Sequence
  Description of Artificial Sequence: Synthetic oligonucleotide
  Sense strand starting at position 3952 of SEQ ID NO: 1562097
gagucucaauugugaggau

SEQ ID NO: 1721932 - RNA, 19 nt, Artificial Sequence
  Description of Artificial Sequence: Synthetic oligonucleotide
  Antisense strand to SEQ ID NO: 1721931
auccucacaauugagacuc

SEQ ID NO: 1721933 - RNA, 19 nt, Artificial Sequence
  Description of Artificial Sequence: Synthetic oligonucleotide
  Sense strand starting at position 3955 of SEQ ID NO: 1562097
ucucaauugugaggauuug

SEQ ID NO: 1721934 - RNA, 19 nt, Artificial Sequence
  Description of Artificial Sequence: Synthetic oligonucleotide
  Antisense strand to SEQ ID NO: 1721933
caaauccucacaauugaga

SEQ ID NO: 1721935 - RNA, 19 nt, Artificial Sequence
  Description of Artificial Sequence: Synthetic oligonucleotide
  Sense strand starting at position 17 of SEQ ID NO: 1562098
cuaugugaauuccuggguu

SEQ ID NO: 1721936 - RNA, 19 nt, Artificial Sequence
  Description of Artificial Sequence: Synthetic oligonucleotide
  Antisense strand to SEQ ID NO: 1721935
aacccaggaauucacauag

SEQ ID NO: 1721937 - RNA, 19 nt, Artificial Sequence
  Description of Artificial Sequence: Synthetic oligonucleotide
  Sense strand starting at position 19 of SEQ ID NO: 1562098
augugaauuccuggguuuc

SEQ ID NO: 1721938 - RNA, 19 nt, Artificial Sequence
  Description of Artificial Sequence: Synthetic oligonucleotide
  Antisense strand to SEQ ID NO: 1721937
gaaacccaggaauucacau

SEQ ID NO: 1721939 - RNA, 19 nt, Artificial Sequence
  Description of Artificial Sequence: Synthetic oligonucleotide
  Sense strand starting at position 21 of SEQ ID NO: 1562098
gugaauuccuggguuucag

SEQ ID NO: 1721940 - RNA, 19 nt, Artificial Sequence
  Description of Artificial Sequence: Synthetic oligonucleotide
  Antisense strand to SEQ ID NO: 1721939
cugaaacccaggaauucac

SEQ ID NO: 1721941 - RNA, 19 nt, Artificial Sequence
  Description of Artificial Sequence: Synthetic oligonucleotide
  Sense strand starting at position 126 of SEQ ID NO: 1562098
gcuaucagaugguuaccau

SEQ ID NO: 1721942 - RNA, 19 nt, Artificial Sequence
  Description of Artificial Sequence: Synthetic oligonucleotide
  Antisense strand to SEQ ID NO: 1721941
augguaaccaucugauagc

SEQ ID NO: 1721943 - RNA, 19 nt, Artificial Sequence
  Description of Artificial Sequence: Synthetic oligonucleotide
  Sense strand starting at position 136 of SEQ ID NO: 1562098
gguuaccaucucuagucaa

SEQ ID NO: 1721944 - RNA, 19 nt, Artificial Sequence
  Description of Artificial Sequence: Synthetic oligonucleotide
  Antisense strand to SEQ ID NO: 1721943
uugacuagagaugguaacc

SEQ ID NO: 1721945 - RNA, 19 nt, Artificial Sequence
  Description of Artificial Sequence: Synthetic oligonucleotide
  Sense strand starting at position 172 of SEQ ID NO: 1562098
ggacacugagcucaucuuu

SEQ ID NO: 1721946 - RNA, 19 nt, Artificial Sequence
  Description of Artificial Sequence: Synthetic oligonucleotide
  Antisense strand to SEQ ID NO: 1721945
aaagaugagcucagugucc

SEQ ID NO: 1721947 - RNA, 19 nt, Artificial Sequence
  Description of Artificial Sequence: Synthetic oligonucleotide
  Sense strand starting at position 397 of SEQ ID NO: 1562098
gaccucacccuuuggugaa

SEQ ID NO: 1721948 - RNA, 19 nt, Artificial Sequence
  Description of Artificial Sequence: Synthetic oligonucleotide
  Antisense strand to SEQ ID NO: 1721947
uucaccaaagggugagguc

SEQ ID NO: 1721949 - RNA, 19 nt, Artificial Sequence
  Description of Artificial Sequence: Synthetic oligonucleotide
  Sense strand starting at position 627 of SEQ ID NO: 1562098
gggacaauccaccguguuu

SEQ ID NO: 1721950 - RNA, 19 nt, Artificial Sequence
  Description of Artificial Sequence: Synthetic oligonucleotide
  Antisense strand to SEQ ID NO: 1721949
aaacacgguggauuguccc

SEQ ID NO: 1721951 - RNA, 19 nt, Artificial Sequence
  Description of Artificial Sequence: Synthetic oligonucleotide
  Sense strand starting at position 734 of SEQ ID NO: 1562098
guuuacucugcgcaccaga

SEQ ID NO: 1721952 - RNA, 19 nt, Artificial Sequence
  Description of Artificial Sequence: Synthetic oligonucleotide
  Antisense strand to SEQ ID NO: 1721951
ucuggugcgcagaguaaac

SEQ ID NO: 1721953 - RNA, 19 nt, Artificial Sequence
  Description of Artificial Sequence: Synthetic oligonucleotide
  Sense strand starting at position 850 of SEQ ID NO: 1562098
ugaagucaaacauguggaa

SEQ ID NO: 1721954 - RNA, 19 nt, Artificial Sequence
  Description of Artificial Sequence: Synthetic oligonucleotide
  Antisense strand to SEQ ID NO: 1721953
uuccacauguuugacuuca

SEQ ID NO: 1721955 - RNA, 19 nt, Artificial Sequence
  Description of Artificial Sequence: Synthetic oligonucleotide
  Sense strand starting at position 864 of SEQ ID NO: 1562098
uggaaagucguauguccau

SEQ ID NO: 1721956 - RNA, 19 nt, Artificial Sequence
  Description of Artificial Sequence: Synthetic oligonucleotide
  Antisense strand to SEQ ID NO: 1721955
auggacauacgacuuucca

SEQ ID NO: 1721957 - RNA, 19 nt, Artificial Sequence
  Description of Artificial Sequence: Synthetic oligonucleotide
  Sense strand starting at position 917 of SEQ ID NO: 1562098
ucugaaagccacugucagu

SEQ ID NO: 1721958 - RNA, 19 nt, Artificial Sequence
  Description of Artificial Sequence: Synthetic oligonucleotide
  Antisense strand to SEQ ID NO: 1721957
acugacaguggcuuucaga

SEQ ID NO: 1721959 - RNA, 19 nt, Artificial Sequence
  Description of Artificial Sequence: Synthetic oligonucleotide
  Sense strand starting at position 1150 of SEQ ID NO: 1562098
cccuauuacugcucggcau

SEQ ID NO: 1721960 - RNA, 19 nt, Artificial Sequence
  Description of Artificial Sequence: Synthetic oligonucleotide
  Antisense strand to SEQ ID NO: 1721959
augccgagcaguaauaggg

SEQ ID NO: 1721961 - RNA, 19 nt, Artificial Sequence
  Description of Artificial Sequence: Synthetic oligonucleotide
  Sense strand starting at position 1151 of SEQ ID NO: 1562098
ccuauuacugcucggcauu

SEQ ID NO: 1721962 - RNA, 19 nt, Artificial Sequence
  Description of Artificial Sequence: Synthetic oligonucleotide
  Antisense strand to SEQ ID NO: 1721961
aaugccgagcaguaauagg

SEQ ID NO: 1721963 - RNA, 19 nt, Artificial Sequence
  Description of Artificial Sequence: Synthetic oligonucleotide
  Sense strand starting at position 1152 of SEQ ID NO: 1562098
cuauuacugcucggcauua

SEQ ID NO: 1721964 - RNA, 19 nt, Artificial Sequence
  Description of Artificial Sequence: Synthetic oligonucleotide
  Antisense strand to SEQ ID NO: 1721963
uaaugccgagcaguaauag

SEQ ID NO: 1721965 - RNA, 19 nt, Artificial Sequence
  Description of Artificial Sequence: Synthetic oligonucleotide
  Sense strand starting at position 1980 of SEQ ID NO: 1562098
gcaccuucucugcgagcga

SEQ ID NO: 1721966 - RNA, 19 nt, Artificial Sequence
  Description of Artificial Sequence: Synthetic oligonucleotide
  Antisense strand to SEQ ID NO: 1721965
ucgcucgcagagaaggugc

SEQ ID NO: 1721967 - RNA, 19 nt, Artificial Sequence
  Description of Artificial Sequence: Synthetic oligonucleotide
  Sense strand starting at position 3251 of SEQ ID NO: 1562098
agggaauagguuugcuuaa

SEQ ID NO: 1721968 - RNA, 19 nt, Artificial Sequence
  Description of Artificial Sequence: Synthetic oligonucleotide
  Antisense strand to SEQ ID NO: 1721967
uuaagcaaaccuauucccu

SEQ ID NO: 1721969 - RNA, 19 nt, Artificial Sequence
  Description of Artificial Sequence: Synthetic oligonucleotide
  Sense strand starting at position 3252 of SEQ ID NO: 1562098
gggaauagguuugcuuaag

SEQ ID NO: 1721970 - RNA, 19 nt, Artificial Sequence
  Description of Artificial Sequence: Synthetic oligonucleotide
  Antisense strand to SEQ ID NO: 1721969
cuuaagcaaaccuauuccc

SEQ ID NO: 1721971 - RNA, 19 nt, Artificial Sequence
  Description of Artificial Sequence: Synthetic oligonucleotide
  Sense strand starting at position 3308 of SEQ ID NO: 1562098
auuccugauucccagguua

SEQ ID NO: 1721972 - RNA, 19 nt, Artificial Sequence
  Description of Artificial Sequence: Synthetic oligonucleotide
  Antisense strand to SEQ ID NO: 1721971
uaaccugggaaucaggaau

SEQ ID NO: 1721973 - RNA, 19 nt, Artificial Sequence
  Description of Artificial Sequence: Synthetic oligonucleotide
  Sense strand starting at position 3310 of SEQ ID NO: 1562098
uccugauucccagguuaaa

SEQ ID NO: 1721974 - RNA, 19 nt, Artificial Sequence
  Description of Artificial Sequence: Synthetic oligonucleotide
  Antisense strand to SEQ ID NO: 1721973
uuuaaccugggaaucagga

SEQ ID NO: 1721975 - RNA, 19 nt, Artificial Sequence
  Description of Artificial Sequence: Synthetic oligonucleotide
  Sense strand starting at position 3321 of SEQ ID NO: 1562098
agguuaaagaccugugcaa

SEQ ID NO: 1721976 - RNA, 19 nt, Artificial Sequence
  Description of Artificial Sequence: Synthetic oligonucleotide
  Antisense strand to SEQ ID NO: 1721975
uugcacaggucuuuaaccu

SEQ ID NO: 1721977 - RNA, 19 nt, Artificial Sequence
  Description of Artificial Sequence: Synthetic oligonucleotide
  Sense strand starting at position 3323 of SEQ ID NO: 1562098
guuaaagaccugugcaaag

SEQ ID NO: 1721978 - RNA, 19 nt, Artificial Sequence
  Description of Artificial Sequence: Synthetic oligonucleotide
  Antisense strand to SEQ ID NO: 1721977
cuuugcacaggucuuuaac

SEQ ID NO: 1721979 - RNA, 19 nt, Artificial Sequence
  Description of Artificial Sequence: Synthetic oligonucleotide
  Sense strand starting at position 3325 of SEQ ID NO: 1562098
uaaagaccugugcaaagua

SEQ ID NO: 1721980 - RNA, 19 nt, Artificial Sequence
  Description of Artificial Sequence: Synthetic oligonucleotide
  Antisense strand to SEQ ID NO: 1721979
uacuuugcacaggucuuua

SEQ ID NO: 1721981 - RNA, 19 nt, Artificial Sequence
  Description of Artificial Sequence: Synthetic oligonucleotide
  Sense strand starting at position 3443 of SEQ ID NO: 1562098
ugaacuccguggguucaaa

SEQ ID NO: 1721982 - RNA, 19 nt, Artificial Sequence
  Description of Artificial Sequence: Synthetic oligonucleotide
  Antisense strand to SEQ ID NO: 1721981
uuugaacccacggaguuca

SEQ ID NO: 1721983 - RNA, 19 nt, Artificial Sequence
  Description of Artificial Sequence: Synthetic oligonucleotide
  Sense strand starting at position 3543 of SEQ ID NO: 1562098
gccagcgugagucucaauu

SEQ ID NO: 1721984 - RNA, 19 nt, Artificial Sequence
  Description of Artificial Sequence: Synthetic oligonucleotide
  Antisense strand to SEQ ID NO: 1721983
aauugagacucacgcuggc

SEQ ID NO: 1721985 - RNA, 19 nt, Artificial Sequence
  Description of Artificial Sequence: Synthetic oligonucleotide
  Sense strand starting at position 3554 of SEQ ID NO: 1562098
ucucaauugugaggauuug

SEQ ID NO: 1721986 - RNA, 19 nt, Artificial Sequence
  Description of Artificial Sequence: Synthetic oligonucleotide
  Antisense strand to SEQ ID NO: 1721985
caaauccucacaauugaga

SEQ ID NO: 1721987 - RNA, 19 nt, Artificial Sequence
  Description of Artificial Sequence: Synthetic oligonucleotide
  Sense strand starting at position 3646 of SEQ ID NO: 1562098
aagugaaguguuugacaac

SEQ ID NO: 1721988 - RNA, 19 nt, Artificial Sequence
  Description of Artificial Sequence: Synthetic oligonucleotide
  Antisense strand to SEQ ID NO: 1721987
guugucaaacacuucacuu

SEQ ID NO: 1721989 - RNA, 19 nt, Artificial Sequence
  Description of Artificial Sequence: Synthetic oligonucleotide
  Sense strand starting at position 3649 of SEQ ID NO: 1562098
ugaaguguuugacaacagu

SEQ ID NO: 1721990 - RNA, 19 nt, Artificial Sequence
  Description of Artificial Sequence: Synthetic oligonucleotide
  Antisense strand to SEQ ID NO: 1721989
acuguugucaaacacuuca

SEQ ID NO: 1721991 - RNA, 19 nt, Artificial Sequence
  Description of Artificial Sequence: Synthetic oligonucleotide
  Sense strand starting at position 3658 of SEQ ID NO: 1562098
ugacaacaguccuugagaa

SEQ ID NO: 1721992 - RNA, 19 nt, Artificial Sequence
  Description of Artificial Sequence: Synthetic oligonucleotide
  Antisense strand to SEQ ID NO: 1721991
uucucaaggacuguuguca

SEQ ID NO: 1721993 - RNA, 19 nt, Artificial Sequence
  Description of Artificial Sequence: Synthetic oligonucleotide
  Sense strand starting at position 3659 of SEQ ID NO: 1562098
gacaacaguccuugagaac

SEQ ID NO: 1721994 - RNA, 19 nt, Artificial Sequence
  Description of Artificial Sequence: Synthetic oligonucleotide
  Antisense strand to SEQ ID NO: 1721993
guucucaaggacuguuguc

SEQ ID NO: 1721995 - RNA, 19 nt, Artificial Sequence
  Description of Artificial Sequence: Synthetic oligonucleotide
  Sense strand starting at position 3698 of SEQ ID NO: 1562098
uuugaagugcaagggaauu

SEQ ID NO: 1721996 - RNA, 19 nt, Artificial Sequence
  Description of Artificial Sequence: Synthetic oligonucleotide
  Antisense strand to SEQ ID NO: 1721995
aauucccuugcacuucaaa

SEQ ID NO: 1721997 - RNA, 19 nt, Artificial Sequence
  Description of Artificial Sequence: Synthetic oligonucleotide
  Sense strand starting at position 3740 of SEQ ID NO: 1562098
gcacgaggucccuguccau

SEQ ID NO: 1721998 - RNA, 19 nt, Artificial Sequence
  Description of Artificial Sequence: Synthetic oligonucleotide
  Antisense strand to SEQ ID NO: 1721997
auggacagggaccucgugc

SEQ ID NO: 1721999 - RNA, 19 nt, Artificial Sequence
  Description of Artificial Sequence: Synthetic oligonucleotide
  Sense strand starting at position 3746 of SEQ ID NO: 1562098
ggucccuguccaugaggaa

SEQ ID NO: 1722000 - RNA, 19 nt, Artificial Sequence
  Description of Artificial Sequence: Synthetic oligonucleotide
  Antisense strand to SEQ ID NO: 1721999
uuccucauggacagggacc

SEQ ID NO: 1722001 - RNA, 19 nt, Artificial Sequence
  Description of Artificial Sequence: Synthetic oligonucleotide
  Sense strand starting at position 3747 of SEQ ID NO: 1562098
gucccuguccaugaggaau

SEQ ID NO: 1722002 - RNA, 19 nt, Artificial Sequence
  Description of Artificial Sequence: Synthetic oligonucleotide
  Antisense strand to SEQ ID NO: 1722001
auuccucauggacagggac

SEQ ID NO: 1722003 - RNA, 19 nt, Artificial Sequence
  Description of Artificial Sequence: Synthetic oligonucleotide
  Sense strand starting at position 3749 of SEQ ID NO: 1562098
cccuguccaugaggaauuu

SEQ ID NO: 1722004 - RNA, 19 nt, Artificial Sequence
  Description of Artificial Sequence: Synthetic oligonucleotide
  Antisense strand to SEQ ID NO: 1722003
aaauuccucauggacaggg

SEQ ID NO: 1722005 - RNA, 19 nt, Artificial Sequence
  Description of Artificial Sequence: Synthetic oligonucleotide
  Sense strand starting at position 3849 of SEQ ID NO: 1562098
gggugagcguauuuagaua

SEQ ID NO: 1722006 - RNA, 19 nt, Artificial Sequence
  Description of Artificial Sequence: Synthetic oligonucleotide
  Antisense strand to SEQ ID NO: 1722005
uaucuaaauacgcucaccc

SEQ ID NO: 1722007 - RNA, 19 nt, Artificial Sequence
  Description of Artificial Sequence: Synthetic oligonucleotide
  Sense strand starting at position 3877 of SEQ ID NO: 1562098
guaagaccucccugagaca

SEQ ID NO: 1722008 - RNA, 19 nt, Artificial Sequence
  Description of Artificial Sequence: Synthetic oligonucleotide
  Antisense strand to SEQ ID NO: 1722007
ugucucagggaggucuuac

SEQ ID NO: 1722009 - RNA, 19 nt, Artificial Sequence
  Description of Artificial Sequence: Synthetic oligonucleotide
  Sense strand starting at position 3889 of SEQ ID NO: 1562098
ugagacauggguugcugaa

SEQ ID NO: 1722010 - RNA, 19 nt, Artificial Sequence
  Description of Artificial Sequence: Synthetic oligonucleotide
  Antisense strand to SEQ ID NO: 1722009
uucagcaacccaugucuca

SEQ ID NO: 1722011 - RNA, 19 nt, Artificial Sequence
  Description of Artificial Sequence: Synthetic oligonucleotide
  Sense strand starting at position 3940 of SEQ ID NO: 1562098
ggagaaagguguuccagga

SEQ ID NO: 1722012 - RNA, 19 nt, Artificial Sequence
  Description of Artificial Sequence: Synthetic oligonucleotide
  Antisense strand to SEQ ID NO: 1722011
uccuggaacaccuuucucc

SEQ ID NO: 1722013 - RNA, 19 nt, Artificial Sequence
  Description of Artificial Sequence: Synthetic oligonucleotide
  Sense strand starting at position 3944 of SEQ ID NO: 1562098
aaagguguuccaggaagag

SEQ ID NO: 1722014 - RNA, 19 nt, Artificial Sequence
  Description of Artificial Sequence: Synthetic oligonucleotide
  Antisense strand to SEQ ID NO: 1722013
cucuuccuggaacaccuuu

SEQ ID NO: 1722015 - RNA, 19 nt, Artificial Sequence
  Description of Artificial Sequence: Synthetic oligonucleotide
  Sense strand starting at position 205 of SEQ ID NO: 1562099
aagugugguaggcaauaau

SEQ ID NO: 1722016 - RNA, 19 nt, Artificial Sequence
  Description of Artificial Sequence: Synthetic oligonucleotide
  Antisense strand to SEQ ID NO: 1722015
auuauugccuaccacacuu

SEQ ID NO: 1722017 - RNA, 19 nt, Artificial Sequence
  Description of Artificial Sequence: Synthetic oligonucleotide
  Sense strand starting at position 208 of SEQ ID NO: 1562099
ugugguaggcaauaauuaa

SEQ ID NO: 1722018 - RNA, 19 nt, Artificial Sequence
  Description of Artificial Sequence: Synthetic oligonucleotide
  Antisense strand to SEQ ID NO: 1722017
uuaauuauugccuaccaca

SEQ ID NO: 1722019 - RNA, 19 nt, Artificial Sequence
  Description of Artificial Sequence: Synthetic oligonucleotide
  Sense strand starting at position 232 of SEQ ID NO: 1562099
uguuuacuucccugcauuu

SEQ ID NO: 1722020 - RNA, 19 nt, Artificial Sequence
  Description of Artificial Sequence: Synthetic oligonucleotide
  Antisense strand to SEQ ID NO: 1722019
aaaugcagggaaguaaaca

SEQ ID NO: 1722021 - RNA, 19 nt, Artificial Sequence
  Description of Artificial Sequence: Synthetic oligonucleotide
  Sense strand starting at position 267 of SEQ ID NO: 1562099
guagcauaacacgacuaaa

SEQ ID NO: 1722022 - RNA, 19 nt, Artificial Sequence
  Description of Artificial Sequence: Synthetic oligonucleotide
  Antisense strand to SEQ ID NO: 1722021
uuuagucguguuaugcuac

SEQ ID NO: 1722023 - RNA, 19 nt, Artificial Sequence
  Description of Artificial Sequence: Synthetic oligonucleotide
  Sense strand starting at position 381 of SEQ ID NO: 1562099
cugagucuuuguuuggaaa

SEQ ID NO: 1722024 - RNA, 19 nt, Artificial Sequence
  Description of Artificial Sequence: Synthetic oligonucleotide
  Antisense strand to SEQ ID NO: 1722023
uuuccaaacaaagacucag

SEQ ID NO: 1722025 - RNA, 19 nt, Artificial Sequence
  Description of Artificial Sequence: Synthetic oligonucleotide
  Sense strand starting at position 490 of SEQ ID NO: 1562099
guaggaagagcucaauugu

SEQ ID NO: 1722026 - RNA, 19 nt, Artificial Sequence
  Description of Artificial Sequence: Synthetic oligonucleotide
  Antisense strand to SEQ ID NO: 1722025
acaauugagcucuuccuac

SEQ ID NO: 1722027 - RNA, 19 nt, Artificial Sequence
  Description of Artificial Sequence: Synthetic oligonucleotide
  Sense strand starting at position 496 of SEQ ID NO: 1562099
agagcucaauuguuaaacu

SEQ ID NO: 1722028 - RNA, 19 nt, Artificial Sequence
  Description of Artificial Sequence: Synthetic oligonucleotide
  Antisense strand to SEQ ID NO: 1722027
aguuuaacaauugagcucu

SEQ ID NO: 1722029 - RNA, 19 nt, Artificial Sequence
  Description of Artificial Sequence: Synthetic oligonucleotide
  Sense strand starting at position 692 of SEQ ID NO: 1562099
acagguaacuugucuggga

SEQ ID NO: 1722030 - RNA, 19 nt, Artificial Sequence
  Description of Artificial Sequence: Synthetic oligonucleotide
  Antisense strand to SEQ ID NO: 1722029
ucccagacaaguuaccugu

SEQ ID NO: 1722031 - RNA, 19 nt, Artificial Sequence
  Description of Artificial Sequence: Synthetic oligonucleotide
  Sense strand starting at position 1022 of SEQ ID NO: 1562099
ggaagaucauguguuuaag

SEQ ID NO: 1722032 - RNA, 19 nt, Artificial Sequence
  Description of Artificial Sequence: Synthetic oligonucleotide
  Antisense strand to SEQ ID NO: 1722031
cuuaaacacaugaucuucc

SEQ ID NO: 1722033 - RNA, 19 nt, Artificial Sequence
  Description of Artificial Sequence: Synthetic oligonucleotide
  Sense strand starting at position 1024 of SEQ ID NO: 1562099
aagaucauguguuuaagac

SEQ ID NO: 1722034 - RNA, 19 nt, Artificial Sequence
  Description of Artificial Sequence: Synthetic oligonucleotide
  Antisense strand to SEQ ID NO: 1722033
gucuuaaacacaugaucuu

SEQ ID NO: 1722035 - RNA, 19 nt, Artificial Sequence
  Description of Artificial Sequence: Synthetic oligonucleotide
  Sense strand starting at position 1061 of SEQ ID NO: 1562099
uguauaagccaaggagaga

SEQ ID NO: 1722036 - RNA, 19 nt, Artificial Sequence
  Description of Artificial Sequence: Synthetic oligonucleotide
  Antisense strand to SEQ ID NO: 1722035
ucucuccuuggcuuauaca

SEQ ID NO: 1722037 - RNA, 19 nt, Artificial Sequence
  Description of Artificial Sequence: Synthetic oligonucleotide
  Sense strand starting at position 1143 of SEQ ID NO: 1562099
ggaaguaaauaucuguagu

SEQ ID NO: 1722038 - RNA, 19 nt, Artificial Sequence
  Description of Artificial Sequence: Synthetic oligonucleotide
  Antisense strand to SEQ ID NO: 1722037
acuacagauauuuacuucc

SEQ ID NO: 1722039 - RNA, 19 nt, Artificial Sequence
  Description of Artificial Sequence: Synthetic oligonucleotide
  Sense strand starting at position 1274 of SEQ ID NO: 1562099
ggugguaagaaucagguca

SEQ ID NO: 1722040 - RNA, 19 nt, Artificial Sequence
  Description of Artificial Sequence: Synthetic oligonucleotide
  Antisense strand to SEQ ID NO: 1722039
ugaccugauucuuaccacc

SEQ ID NO: 1722041 - RNA, 19 nt, Artificial Sequence
  Description of Artificial Sequence: Synthetic oligonucleotide
  Sense strand starting at position 1395 of SEQ ID NO: 1562099
ucaagugagcacuauuaca

SEQ ID NO: 1722042 - RNA, 19 nt, Artificial Sequence
  Description of Artificial Sequence: Synthetic oligonucleotide
  Antisense strand to SEQ ID NO: 1722041
uguaauagugcucacuuga

SEQ ID NO: 1722043 - RNA, 19 nt, Artificial Sequence
  Description of Artificial Sequence: Synthetic oligonucleotide
  Sense strand starting at position 1422 of SEQ ID NO: 1562099
auccucaguuuggugaaga

SEQ ID NO: 1722044 - RNA, 19 nt, Artificial Sequence
  Description of Artificial Sequence: Synthetic oligonucleotide
  Antisense strand to SEQ ID NO: 1722043
ucuucaccaaacugaggau

SEQ ID NO: 1722045 - RNA, 19 nt, Artificial Sequence
  Description of Artificial Sequence: Synthetic oligonucleotide
  Sense strand starting at position 1543 of SEQ ID NO: 1562099
ggauuuagauaaugauucu

SEQ ID NO: 1722046 - RNA, 19 nt, Artificial Sequence
  Description of Artificial Sequence: Synthetic oligonucleotide
  Antisense strand to SEQ ID NO: 1722045
agaaucauuaucuaaaucc

SEQ ID NO: 1722047 - RNA, 19 nt, Artificial Sequence
  Description of Artificial Sequence: Synthetic oligonucleotide
  Sense strand starting at position 1674 of SEQ ID NO: 1562099
gugcucagcucccugauuu

SEQ ID NO: 1722048 - RNA, 19 nt, Artificial Sequence
  Description of Artificial Sequence: Synthetic oligonucleotide
  Antisense strand to SEQ ID NO: 1722047
aaaucagggagcugagcac

SEQ ID NO: 1722049 - RNA, 19 nt, Artificial Sequence
  Description of Artificial Sequence: Synthetic oligonucleotide
  Sense strand starting at position 1747 of SEQ ID NO: 1562099
uccggaaucccugaaaguc

SEQ ID NO: 1722050 - RNA, 19 nt, Artificial Sequence
  Description of Artificial Sequence: Synthetic oligonucleotide
  Antisense strand to SEQ ID NO: 1722049
gacuuucagggauuccgga

SEQ ID NO: 1722051 - RNA, 19 nt, Artificial Sequence
  Description of Artificial Sequence: Synthetic oligonucleotide
  Sense strand starting at position 1845 of SEQ ID NO: 1562099
uagcgucaucagcaggaaa

SEQ ID NO: 1722052 - RNA, 19 nt, Artificial Sequence
  Description of Artificial Sequence: Synthetic oligonucleotide
  Antisense strand to SEQ ID NO: 1722051
uuuccugcugaugacgcua

SEQ ID NO: 1722053 - RNA, 19 nt, Artificial Sequence
  Description of Artificial Sequence: Synthetic oligonucleotide
  Sense strand starting at position 1896 of SEQ ID NO: 1562099
gggcauucuggagaccuua

SEQ ID NO: 1722054 - RNA, 19 nt, Artificial Sequence
  Description of Artificial Sequence: Synthetic oligonucleotide
  Antisense strand to SEQ ID NO: 1722053
uaaggucuccagaaugccc

SEQ ID NO: 1722055 - RNA, 19 nt, Artificial Sequence
  Description of Artificial Sequence: Synthetic oligonucleotide
  Sense strand starting at position 2159 of SEQ ID NO: 1562099
ggucuuaacuccuuccaug

SEQ ID NO: 1722056 - RNA, 19 nt, Artificial Sequence
  Description of Artificial Sequence: Synthetic oligonucleotide
  Antisense strand to SEQ ID NO: 1722055
cauggaaggaguuaagacc

SEQ ID NO: 1722057 - RNA, 19 nt, Artificial Sequence
  Description of Artificial Sequence: Synthetic oligonucleotide
  Sense strand starting at position 2195 of SEQ ID NO: 1562099
uaugucuucuuggugauuu

SEQ ID NO: 1722058 - RNA, 19 nt, Artificial Sequence
  Description of Artificial Sequence: Synthetic oligonucleotide
  Antisense strand to SEQ ID NO: 1722057
aaaucaccaagaagacaua

SEQ ID NO: 1722059 - RNA, 19 nt, Artificial Sequence
  Description of Artificial Sequence: Synthetic oligonucleotide
  Sense strand starting at position 2214 of SEQ ID NO: 1562099
gccauuuggugcucuuaag

SEQ ID NO: 1722060 - RNA, 19 nt, Artificial Sequence
  Description of Artificial Sequence: Synthetic oligonucleotide
  Antisense strand to SEQ ID NO: 1722059
cuuaagagcaccaaauggc

SEQ ID NO: 1722061 - RNA, 19 nt, Artificial Sequence
  Description of Artificial Sequence: Synthetic oligonucleotide
  Sense strand starting at position 2224 of SEQ ID NO: 1562099
gcucuuaagccaggaagga

SEQ ID NO: 1722062 - RNA, 19 nt, Artificial Sequence
  Description of Artificial Sequence: Synthetic oligonucleotide
  Antisense strand to SEQ ID NO: 1722061
uccuuccuggcuuaagagc

SEQ ID NO: 1722063 - RNA, 19 nt, Artificial Sequence
  Description of Artificial Sequence: Synthetic oligonucleotide
  Sense strand starting at position 2238 of SEQ ID NO: 1562099
aaggaccugugguuaugaa

SEQ ID NO: 1722064 - RNA, 19 nt, Artificial Sequence
  Description of Artificial Sequence: Synthetic oligonucleotide
  Antisense strand to SEQ ID NO: 1722063
uucauaaccacagguccuu

SEQ ID NO: 1722065 - RNA, 19 nt, Artificial Sequence
  Description of Artificial Sequence: Synthetic oligonucleotide
  Sense strand starting at position 2404 of SEQ ID NO: 1562099
uugaaaugguucccuauuc

SEQ ID NO: 1722066 - RNA, 19 nt, Artificial Sequence
  Description of Artificial Sequence: Synthetic oligonucleotide
  Antisense strand to SEQ ID NO: 1722065
gaauagggaaccauuucaa

SEQ ID NO: 1722067 - RNA, 19 nt, Artificial Sequence
  Description of Artificial Sequence: Synthetic oligonucleotide
  Sense strand starting at position 2556 of SEQ ID NO: 1562099
guaauaaggaucugcuuug

SEQ ID NO: 1722068 - RNA, 19 nt, Artificial Sequence
  Description of Artificial Sequence: Synthetic oligonucleotide
  Antisense strand to SEQ ID NO: 1722067
caaagcagauccuuauuac

SEQ ID NO: 1722069 - RNA, 19 nt, Artificial Sequence
  Description of Artificial Sequence: Synthetic oligonucleotide
  Sense strand starting at position 2640 of SEQ ID NO: 1562099
ggcagauuccuggagcagu

SEQ ID NO: 1722070 - RNA, 19 nt, Artificial Sequence
  Description of Artificial Sequence: Synthetic oligonucleotide
  Antisense strand to SEQ ID NO: 1722069
acugcuccaggaaucugcc

SEQ ID NO: 1722071 - RNA, 19 nt, Artificial Sequence
  Description of Artificial Sequence: Synthetic oligonucleotide
  Sense strand starting at position 2677 of SEQ ID NO: 1562099
cuuugcucugcacauagaa

SEQ ID NO: 1722072 - RNA, 19 nt, Artificial Sequence
  Description of Artificial Sequence: Synthetic oligonucleotide
  Antisense strand to SEQ ID NO: 1722071
uucuaugugcagagcaaag

SEQ ID NO: 1722073 - RNA, 19 nt, Artificial Sequence
  Description of Artificial Sequence: Synthetic oligonucleotide
  Sense strand starting at position 2814 of SEQ ID NO: 1562099
gccuucuaaccuugggaua

SEQ ID NO: 1722074 - RNA, 19 nt, Artificial Sequence
  Description of Artificial Sequence: Synthetic oligonucleotide
  Antisense strand to SEQ ID NO: 1722073
uaucccaagguuagaaggc

SEQ ID NO: 1722075 - RNA, 19 nt, Artificial Sequence
  Description of Artificial Sequence: Synthetic oligonucleotide
  Sense strand starting at position 2815 of SEQ ID NO: 1562099
ccuucuaaccuugggauaa

SEQ ID NO: 1722076 - RNA, 19 nt, Artificial Sequence
  Description of Artificial Sequence: Synthetic oligonucleotide
  Antisense strand to SEQ ID NO: 1722075
uuaucccaagguuagaagg

SEQ ID NO: 1722077 - RNA, 19 nt, Artificial Sequence
  Description of Artificial Sequence: Synthetic oligonucleotide
  Sense strand starting at position 3047 of SEQ ID NO: 1562099
uuggucuaccucugacacu

SEQ ID NO: 1722078 - RNA, 19 nt, Artificial Sequence
  Description of Artificial Sequence: Synthetic oligonucleotide
  Antisense strand to SEQ ID NO: 1722077
agugucagagguagaccaa

SEQ ID NO: 1722079 - RNA, 19 nt, Artificial Sequence
  Description of Artificial Sequence: Synthetic oligonucleotide
  Sense strand starting at position 3107 of SEQ ID NO: 1562099
uuugucaaucuguagauga

SEQ ID NO: 1722080 - RNA, 19 nt, Artificial Sequence
  Description of Artificial Sequence: Synthetic oligonucleotide
  Antisense strand to SEQ ID NO: 1722079
ucaucuacagauugacaaa

SEQ ID NO: 1722081 - RNA, 19 nt, Artificial Sequence
  Description of Artificial Sequence: Synthetic oligonucleotide
  Sense strand starting at position 3109 of SEQ ID NO: 1562099
ugucaaucuguagaugaau

SEQ ID NO: 1722082 - RNA, 19 nt, Artificial Sequence
  Description of Artificial Sequence: Synthetic oligonucleotide
  Antisense strand to SEQ ID NO: 1722081
auucaucuacagauugaca

SEQ ID NO: 1722083 - RNA, 19 nt, Artificial Sequence
  Description of Artificial Sequence: Synthetic oligonucleotide
  Sense strand starting at position 3227 of SEQ ID NO: 1562099
cuuguagugauaugguaag

SEQ ID NO: 1722084 - RNA, 19 nt, Artificial Sequence
  Description of Artificial Sequence: Synthetic oligonucleotide
  Antisense strand to SEQ ID NO: 1722083
cuuaccauaucacuacaag

SEQ ID NO: 1722085 - RNA, 19 nt, Artificial Sequence
  Description of Artificial Sequence: Synthetic oligonucleotide
  Sense strand starting at position 3348 of SEQ ID NO: 1562099
acauacuugugcuuuagaa

SEQ ID NO: 1722086 - RNA, 19 nt, Artificial Sequence
  Description of Artificial Sequence: Synthetic oligonucleotide
  Antisense strand to SEQ ID NO: 1722085
uucuaaagcacaaguaugu

SEQ ID NO: 1722087 - RNA, 19 nt, Artificial Sequence
  Description of Artificial Sequence: Synthetic oligonucleotide
  Sense strand starting at position 3367 of SEQ ID NO: 1562099
aaauuuccuugguaggaga

SEQ ID NO: 1722088 - RNA, 19 nt, Artificial Sequence
  Description of Artificial Sequence: Synthetic oligonucleotide
  Antisense strand to SEQ ID NO: 1722087
ucuccuaccaaggaaauuu

SEQ ID NO: 1722089 - RNA, 19 nt, Artificial Sequence
  Description of Artificial Sequence: Synthetic oligonucleotide
  Sense strand starting at position 3467 of SEQ ID NO: 1562099
accuaucaugaguaauugu

SEQ ID NO: 1722090 - RNA, 19 nt, Artificial Sequence
  Description of Artificial Sequence: Synthetic oligonucleotide
  Antisense strand to SEQ ID NO: 1722089
acaauuacucaugauaggu

SEQ ID NO: 1722091 - RNA, 19 nt, Artificial Sequence
  Description of Artificial Sequence: Synthetic oligonucleotide
  Sense strand starting at position 3646 of SEQ ID NO: 1562099
agaaacuagucucuauaug

SEQ ID NO: 1722092 - RNA, 19 nt, Artificial Sequence
  Description of Artificial Sequence: Synthetic oligonucleotide
  Antisense strand to SEQ ID NO: 1722091
cauauagagacuaguuucu

SEQ ID NO: 1722093 - RNA, 19 nt, Artificial Sequence
  Description of Artificial Sequence: Synthetic oligonucleotide
  Sense strand starting at position 3674 of SEQ ID NO: 1562099
guaguagcugcuguguuua

SEQ ID NO: 1722094 - RNA, 19 nt, Artificial Sequence
  Description of Artificial Sequence: Synthetic oligonucleotide
  Antisense strand to SEQ ID NO: 1722093
uaaacacagcagcuacuac

SEQ ID NO: 1722095 - RNA, 19 nt, Artificial Sequence
  Description of Artificial Sequence: Synthetic oligonucleotide
  Sense strand starting at position 15 of SEQ ID NO: 1562100
ggagguguccuaggagguu

SEQ ID NO: 1722096 - RNA, 19 nt, Artificial Sequence
  Description of Artificial Sequence: Synthetic oligonucleotide
  Antisense strand to SEQ ID NO: 1722095
aaccuccuaggacaccucc

SEQ ID NO: 1722097 - RNA, 19 nt, Artificial Sequence
  Description of Artificial Sequence: Synthetic oligonucleotide
  Sense strand starting at position 399 of SEQ ID NO: 1562100
ccugacucagcuugagaug

SEQ ID NO: 1722098 - RNA, 19 nt, Artificial Sequence
  Description of Artificial Sequence: Synthetic oligonucleotide
  Antisense strand to SEQ ID NO: 1722097
caucucaagcugagucagg

SEQ ID NO: 1722099 - RNA, 19 nt, Artificial Sequence
  Description of Artificial Sequence: Synthetic oligonucleotide
  Sense strand starting at position 433 of SEQ ID NO: 1562100
auuccaacugacugguuua

SEQ ID NO: 1722100 - RNA, 19 nt, Artificial Sequence
  Description of Artificial Sequence: Synthetic oligonucleotide
  Antisense strand to SEQ ID NO: 1722099
uaaaccagucaguuggaau

SEQ ID NO: 1722101 - RNA, 19 nt, Artificial Sequence
  Description of Artificial Sequence: Synthetic oligonucleotide
  Sense strand starting at position 482 of SEQ ID NO: 1562100
uugcaacaaucauugggaa

SEQ ID NO: 1722102 - RNA, 19 nt, Artificial Sequence
  Description of Artificial Sequence: Synthetic oligonucleotide
  Antisense strand to SEQ ID NO: 1722101
uucccaaugauuguugcaa

SEQ ID NO: 1722103 - RNA, 19 nt, Artificial Sequence
  Description of Artificial Sequence: Synthetic oligonucleotide
  Sense strand starting at position 483 of SEQ ID NO: 1562100
ugcaacaaucauugggaau

SEQ ID NO: 1722104 - RNA, 19 nt, Artificial Sequence
  Description of Artificial Sequence: Synthetic oligonucleotide
  Antisense strand to SEQ ID NO: 1722103
auucccaaugauuguugca

SEQ ID NO: 1722105 - RNA, 19 nt, Artificial Sequence
  Description of Artificial Sequence: Synthetic oligonucleotide
  Sense strand starting at position 508 of SEQ ID NO: 1562100
uauucugaguaguuuagau

SEQ ID NO: 1722106 - RNA, 19 nt, Artificial Sequence
  Description of Artificial Sequence: Synthetic oligonucleotide
  Antisense strand to SEQ ID NO: 1722105
aucuaaacuacucagaaua

SEQ ID NO: 1722107 - RNA, 19 nt, Artificial Sequence
  Description of Artificial Sequence: Synthetic oligonucleotide
  Sense strand starting at position 518 of SEQ ID NO: 1562100
aguuuagauuucugauuuc

SEQ ID NO: 1722108 - RNA, 19 nt, Artificial Sequence
  Description of Artificial Sequence: Synthetic oligonucleotide
  Antisense strand to SEQ ID NO: 1722107
gaaaucagaaaucuaaacu

SEQ ID NO: 1722109 - RNA, 19 nt, Artificial Sequence
  Description of Artificial Sequence: Synthetic oligonucleotide
  Sense strand starting at position 629 of SEQ ID NO: 1562100
agcuuagagaauugaagug

SEQ ID NO: 1722110 - RNA, 19 nt, Artificial Sequence
  Description of Artificial Sequence: Synthetic oligonucleotide
  Antisense strand to SEQ ID NO: 1722109
cacuucaauucucuaagcu

SEQ ID NO: 1722111 - RNA, 19 nt, Artificial Sequence
  Description of Artificial Sequence: Synthetic oligonucleotide
  Sense strand starting at position 635 of SEQ ID NO: 1562100
gagaauugaaguggugucu

SEQ ID NO: 1722112 - RNA, 19 nt, Artificial Sequence
  Description of Artificial Sequence: Synthetic oligonucleotide
  Antisense strand to SEQ ID NO: 1722111
agacaccacuucaauucuc

SEQ ID NO: 1722113 - RNA, 19 nt, Artificial Sequence
  Description of Artificial Sequence: Synthetic oligonucleotide
  Sense strand starting at position 655 of SEQ ID NO: 1562100
gagucauacggccaaugag

SEQ ID NO: 1722114 - RNA, 19 nt, Artificial Sequence
  Description of Artificial Sequence: Synthetic oligonucleotide
  Antisense strand to SEQ ID NO: 1722113
cucauuggccguaugacuc

SEQ ID NO: 1722115 - RNA, 19 nt, Artificial Sequence
  Description of Artificial Sequence: Synthetic oligonucleotide
  Sense strand starting at position 873 of SEQ ID NO: 1562100
cucagaggcugagcuauau

SEQ ID NO: 1722116 - RNA, 19 nt, Artificial Sequence
  Description of Artificial Sequence: Synthetic oligonucleotide
  Antisense strand to SEQ ID NO: 1722115
auauagcucagccucugag

SEQ ID NO: 1722117 - RNA, 19 nt, Artificial Sequence
  Description of Artificial Sequence: Synthetic oligonucleotide
  Sense strand starting at position 877 of SEQ ID NO: 1562100
gaggcugagcuauauauuc

SEQ ID NO: 1722118 - RNA, 19 nt, Artificial Sequence
  Description of Artificial Sequence: Synthetic oligonucleotide
  Antisense strand to SEQ ID NO: 1722117
gaauauauagcucagccuc

SEQ ID NO: 1722119 - RNA, 19 nt, Artificial Sequence
  Description of Artificial Sequence: Synthetic oligonucleotide
  Sense strand starting at position 941 of SEQ ID NO: 1562100
gaggaaacaugggaaugau

SEQ ID NO: 1722120 - RNA, 19 nt, Artificial Sequence
  Description of Artificial Sequence: Synthetic oligonucleotide
  Antisense strand to SEQ ID NO: 1722119
aucauucccauguuuccuc

SEQ ID NO: 1722121 - RNA, 19 nt, Artificial Sequence
  Description of Artificial Sequence: Synthetic oligonucleotide
  Sense strand starting at position 999 of SEQ ID NO: 1562100
aggcacuuauggguauuau

SEQ ID NO: 1722122 - RNA, 19 nt, Artificial Sequence
  Description of Artificial Sequence: Synthetic oligonucleotide
  Antisense strand to SEQ ID NO: 1722121
auaauacccauaagugccu

SEQ ID NO: 1722123 - RNA, 19 nt, Artificial Sequence
  Description of Artificial Sequence: Synthetic oligonucleotide
  Sense strand starting at position 1000 of SEQ ID NO: 1562100
ggcacuuauggguauuauc

SEQ ID NO: 1722124 - RNA, 19 nt, Artificial Sequence
  Description of Artificial Sequence: Synthetic oligonucleotide
  Antisense strand to SEQ ID NO: 1722123
gauaauacccauaagugcc

SEQ ID NO: 1722125 - RNA, 19 nt, Artificial Sequence
  Description of Artificial Sequence: Synthetic oligonucleotide
  Sense strand starting at position 2067 of SEQ ID NO: 1562100
uccagaaucggguggaauu

SEQ ID NO: 1722126 - RNA, 19 nt, Artificial Sequence
  Description of Artificial Sequence: Synthetic oligonucleotide
  Antisense strand to SEQ ID NO: 1722125
aauuccacccgauucugga

SEQ ID NO: 1722127 - RNA, 19 nt, Artificial Sequence
  Description of Artificial Sequence: Synthetic oligonucleotide
  Sense strand starting at position 2087 of SEQ ID NO: 1562100
ggagcaaacauuggaucuu

SEQ ID NO: 1722128 - RNA, 19 nt, Artificial Sequence
  Description of Artificial Sequence: Synthetic oligonucleotide
  Antisense strand to SEQ ID NO: 1722127
aagauccaauguuugcucc

SEQ ID NO: 1722129 - RNA, 19 nt, Artificial Sequence
  Description of Artificial Sequence: Synthetic oligonucleotide
  Sense strand starting at position 2239 of SEQ ID NO: 1562100
ggcacagaacaauguaaau

SEQ ID NO: 1722130 - RNA, 19 nt, Artificial Sequence
  Description of Artificial Sequence: Synthetic oligonucleotide
  Antisense strand to SEQ ID NO: 1722129
auuuacauuguucugugcc

SEQ ID NO: 1722131 - RNA, 19 nt, Artificial Sequence
  Description of Artificial Sequence: Synthetic oligonucleotide
  Sense strand starting at position 2305 of SEQ ID NO: 1562100
aggugacauugcuuaagaa

SEQ ID NO: 1722132 - RNA, 19 nt, Artificial Sequence
  Description of Artificial Sequence: Synthetic oligonucleotide
  Antisense strand to SEQ ID NO: 1722131
uucuuaagcaaugucaccu

SEQ ID NO: 1722133 - RNA, 19 nt, Artificial Sequence
  Description of Artificial Sequence: Synthetic oligonucleotide
  Sense strand starting at position 2453 of SEQ ID NO: 1562100
acauacucagauugugcaa

SEQ ID NO: 1722134 - RNA, 19 nt, Artificial Sequence
  Description of Artificial Sequence: Synthetic oligonucleotide
  Antisense strand to SEQ ID NO: 1722133
uugcacaaucugaguaugu

SEQ ID NO: 1722135 - RNA, 19 nt, Artificial Sequence
  Description of Artificial Sequence: Synthetic oligonucleotide
  Sense strand starting at position 2480 of SEQ ID NO: 1562100
guuuguggcaucuuuguuu

SEQ ID NO: 1722136 - RNA, 19 nt, Artificial Sequence
  Description of Artificial Sequence: Synthetic oligonucleotide
  Antisense strand to SEQ ID NO: 1722135
aaacaaagaugccacaaac

SEQ ID NO: 1722137 - RNA, 19 nt, Artificial Sequence
  Description of Artificial Sequence: Synthetic oligonucleotide
  Sense strand starting at position 2498 of SEQ ID NO: 1562100
uccuguaagugaucugaac

SEQ ID NO: 1722138 - RNA, 19 nt, Artificial Sequence
  Description of Artificial Sequence: Synthetic oligonucleotide
  Antisense strand to SEQ ID NO: 1722137
guucagaucacuuacagga

SEQ ID NO: 1722139 - RNA, 19 nt, Artificial Sequence
  Description of Artificial Sequence: Synthetic oligonucleotide
  Sense strand starting at position 2654 of SEQ ID NO: 1562100
ggacaaucauuugaccacu

SEQ ID NO: 1722140 - RNA, 19 nt, Artificial Sequence
  Description of Artificial Sequence: Synthetic oligonucleotide
  Antisense strand to SEQ ID NO: 1722139
aguggucaaaugauugucc

SEQ ID NO: 1722141 - RNA, 19 nt, Artificial Sequence
  Description of Artificial Sequence: Synthetic oligonucleotide
  Sense strand starting at position 2877 of SEQ ID NO: 1562100
agcugaagauucuccagca

SEQ ID NO: 1722142 - RNA, 19 nt, Artificial Sequence
  Description of Artificial Sequence: Synthetic oligonucleotide
  Antisense strand to SEQ ID NO: 1722141
ugcuggagaaucuucagcu

SEQ ID NO: 1722143 - RNA, 19 nt, Artificial Sequence
  Description of Artificial Sequence: Synthetic oligonucleotide
  Sense strand starting at position 2878 of SEQ ID NO: 1562100
gcugaagauucuccagcaa

SEQ ID NO: 1722144 - RNA, 19 nt, Artificial Sequence
  Description of Artificial Sequence: Synthetic oligonucleotide
  Antisense strand to SEQ ID NO: 1722143
uugcuggagaaucuucagc

SEQ ID NO: 1722145 - RNA, 19 nt, Artificial Sequence
  Description of Artificial Sequence: Synthetic oligonucleotide
  Sense strand starting at position 2906 of SEQ ID NO: 1562100
aggccuuggaucugaguau

SEQ ID NO: 1722146 - RNA, 19 nt, Artificial Sequence
  Description of Artificial Sequence: Synthetic oligonucleotide
  Antisense strand to SEQ ID NO: 1722145
auacucagauccaaggccu

SEQ ID NO: 1722147 - RNA, 19 nt, Artificial Sequence
  Description of Artificial Sequence: Synthetic oligonucleotide
  Sense strand starting at position 2950 of SEQ ID NO: 1562100
gucuacuaugaggagguua

SEQ ID NO: 1722148 - RNA, 19 nt, Artificial Sequence
  Description of Artificial Sequence: Synthetic oligonucleotide
  Antisense strand to SEQ ID NO: 1722147
uaaccuccucauaguagac

SEQ ID NO: 1722149 - RNA, 19 nt, Artificial Sequence
  Description of Artificial Sequence: Synthetic oligonucleotide
  Sense strand starting at position 2952 of SEQ ID NO: 1562100
cuacuaugaggagguuagu

SEQ ID NO: 1722150 - RNA, 19 nt, Artificial Sequence
  Description of Artificial Sequence: Synthetic oligonucleotide
  Antisense strand to SEQ ID NO: 1722149
acuaaccuccucauaguag

SEQ ID NO: 1722151 - RNA, 19 nt, Artificial Sequence
  Description of Artificial Sequence: Synthetic oligonucleotide
  Sense strand starting at position 3078 of SEQ ID NO: 1562100
uucuccugucaaugagauc

SEQ ID NO: 1722152 - RNA, 19 nt, Artificial Sequence
  Description of Artificial Sequence: Synthetic oligonucleotide
  Antisense strand to SEQ ID NO: 1722151
gaucucauugacaggagaa

SEQ ID NO: 1722153 - RNA, 19 nt, Artificial Sequence
  Description of Artificial Sequence: Synthetic oligonucleotide
  Sense strand starting at position 3102 of SEQ ID NO: 1562100
agugaaacuucuuugaaag

SEQ ID NO: 1722154 - RNA, 19 nt, Artificial Sequence
  Description of Artificial Sequence: Synthetic oligonucleotide
  Antisense strand to SEQ ID NO: 1722153
cuuucaaagaaguuucacu

SEQ ID NO: 1722155 - RNA, 19 nt, Artificial Sequence
  Description of Artificial Sequence: Synthetic oligonucleotide
  Sense strand starting at position 3103 of SEQ ID NO: 1562100
gugaaacuucuuugaaagg

SEQ ID NO: 1722156 - RNA, 19 nt, Artificial Sequence
  Description of Artificial Sequence: Synthetic oligonucleotide
  Antisense strand to SEQ ID NO: 1722155
ccuuucaaagaaguuucac

SEQ ID NO: 1722157 - RNA, 19 nt, Artificial Sequence
  Description of Artificial Sequence: Synthetic oligonucleotide
  Sense strand starting at position 3122 of SEQ ID NO: 1562100
gccacaagccuagaugauu

SEQ ID NO: 1722158 - RNA, 19 nt, Artificial Sequence
  Description of Artificial Sequence: Synthetic oligonucleotide
  Antisense strand to SEQ ID NO: 1722157
aaucaucuaggcuuguggc

SEQ ID NO: 1722159 - RNA, 19 nt, Artificial Sequence
  Description of Artificial Sequence: Synthetic oligonucleotide
  Sense strand starting at position 3166 of SEQ ID NO: 1562100
gucauucuuacacgggaau

SEQ ID NO: 1722160 - RNA, 19 nt, Artificial Sequence
  Description of Artificial Sequence: Synthetic oligonucleotide
  Antisense strand to SEQ ID NO: 1722159
auucccguguaagaaugac

SEQ ID NO: 1722161 - RNA, 19 nt, Artificial Sequence
  Description of Artificial Sequence: Synthetic oligonucleotide
  Sense strand starting at position 3167 of SEQ ID NO: 1562100
ucauucuuacacgggaauu

SEQ ID NO: 1722162 - RNA, 19 nt, Artificial Sequence
  Description of Artificial Sequence: Synthetic oligonucleotide
  Antisense strand to SEQ ID NO: 1722161
aauucccguguaagaauga

SEQ ID NO: 1722163 - RNA, 19 nt, Artificial Sequence
  Description of Artificial Sequence: Synthetic oligonucleotide
  Sense strand starting at position 3177 of SEQ ID NO: 1562100
acgggaauuucugaaucac

SEQ ID NO: 1722164 - RNA, 19 nt, Artificial Sequence
  Description of Artificial Sequence: Synthetic oligonucleotide
  Antisense strand to SEQ ID NO: 1722163
gugauucagaaauucccgu

SEQ ID NO: 1722165 - RNA, 19 nt, Artificial Sequence
  Description of Artificial Sequence: Synthetic oligonucleotide
  Sense strand starting at position 3208 of SEQ ID NO: 1562100
gcagauuucuuucucagcu

SEQ ID NO: 1722166 - RNA, 19 nt, Artificial Sequence
  Description of Artificial Sequence: Synthetic oligonucleotide
  Antisense strand to SEQ ID NO: 1722165
agcugagaaagaaaucugc

SEQ ID NO: 1722167 - RNA, 19 nt, Artificial Sequence
  Description of Artificial Sequence: Synthetic oligonucleotide
  Sense strand starting at position 3772 of SEQ ID NO: 1562100
auuuaucugccaugggcau

SEQ ID NO: 1722168 - RNA, 19 nt, Artificial Sequence
  Description of Artificial Sequence: Synthetic oligonucleotide
  Antisense strand to SEQ ID NO: 1722167
augcccauggcagauaaau

SEQ ID NO: 1722169 - RNA, 19 nt, Artificial Sequence
  Description of Artificial Sequence: Synthetic oligonucleotide
  Sense strand starting at position 3842 of SEQ ID NO: 1562100
acauuacuuuccuuagggu

SEQ ID NO: 1722170 - RNA, 19 nt, Artificial Sequence
  Description of Artificial Sequence: Synthetic oligonucleotide
  Antisense strand to SEQ ID NO: 1722169
acccuaaggaaaguaaugu

SEQ ID NO: 1722171 - RNA, 19 nt, Artificial Sequence
  Description of Artificial Sequence: Synthetic oligonucleotide
  Sense strand starting at position 3908 of SEQ ID NO: 1562100
cugaucuagugcucagaag

SEQ ID NO: 1722172 - RNA, 19 nt, Artificial Sequence
  Description of Artificial Sequence: Synthetic oligonucleotide
  Antisense strand to SEQ ID NO: 1722171
cuucugagcacuagaucag

SEQ ID NO: 1722173 - RNA, 19 nt, Artificial Sequence
  Description of Artificial Sequence: Synthetic oligonucleotide
  Sense strand starting at position 3934 of SEQ ID NO: 1562100
gaauaugguuucuuuguga

SEQ ID NO: 1722174 - RNA, 19 nt, Artificial Sequence
  Description of Artificial Sequence: Synthetic oligonucleotide
  Antisense strand to SEQ ID NO: 1722173
ucacaaagaaaccauauuc

SEQ ID NO: 1722175 - RNA, 19 nt, Artificial Sequence
  Description of Artificial Sequence: Synthetic oligonucleotide
  Sense strand starting at position 376 of SEQ ID NO: 1562101
cuucuuuaaggccagaagu

SEQ ID NO: 1722176 - RNA, 19 nt, Artificial Sequence
  Description of Artificial Sequence: Synthetic oligonucleotide
  Antisense strand to SEQ ID NO: 1722175
acuucuggccuuaaagaag

SEQ ID NO: 1722177 - RNA, 19 nt, Artificial Sequence
  Description of Artificial Sequence: Synthetic oligonucleotide
  Sense strand starting at position 479 of SEQ ID NO: 1562101
cagauagaagcaugucaca

SEQ ID NO: 1722178 - RNA, 19 nt, Artificial Sequence
  Description of Artificial Sequence: Synthetic oligonucleotide
  Antisense strand to SEQ ID NO: 1722177
ugugacaugcuucuaucug

SEQ ID NO: 1722179 - RNA, 19 nt, Artificial Sequence
  Description of Artificial Sequence: Synthetic oligonucleotide
  Sense strand starting at position 547 of SEQ ID NO: 1562101
cuguguaccucacccaaua

SEQ ID NO: 1722180 - RNA, 19 nt, Artificial Sequence
  Description of Artificial Sequence: Synthetic oligonucleotide
  Antisense strand to SEQ ID NO: 1722179
uauugggugagguacacag

SEQ ID NO: 1722181 - RNA, 19 nt, Artificial Sequence
  Description of Artificial Sequence: Synthetic oligonucleotide
  Sense strand starting at position 773 of SEQ ID NO: 1562101
aggcuauuaugaguugaau

SEQ ID NO: 1722182 - RNA, 19 nt, Artificial Sequence
  Description of Artificial Sequence: Synthetic oligonucleotide
  Antisense strand to SEQ ID NO: 1722181
auucaacucauaauagccu

SEQ ID NO: 1722183 - RNA, 19 nt, Artificial Sequence
  Description of Artificial Sequence: Synthetic oligonucleotide
  Sense strand starting at position 775 of SEQ ID NO: 1562101
gcuauuaugaguugaauug

SEQ ID NO: 1722184 - RNA, 19 nt, Artificial Sequence
  Description of Artificial Sequence: Synthetic oligonucleotide
  Antisense strand to SEQ ID NO: 1722183
caauucaacucauaauagc

SEQ ID NO: 1722185 - RNA, 19 nt, Artificial Sequence
  Description of Artificial Sequence: Synthetic oligonucleotide
  Sense strand starting at position 800 of SEQ ID NO: 1562101
uccgaaauauauguugaag

SEQ ID NO: 1722186 - RNA, 19 nt, Artificial Sequence
  Description of Artificial Sequence: Synthetic oligonucleotide
  Antisense strand to SEQ ID NO: 1722185
cuucaacauauauuucgga

SEQ ID NO: 1722187 - RNA, 19 nt, Artificial Sequence
  Description of Artificial Sequence: Synthetic oligonucleotide
  Sense strand starting at position 856 of SEQ ID NO: 1562101
gaaauagaguuacagagga

SEQ ID NO: 1722188 - RNA, 19 nt, Artificial Sequence
  Description of Artificial Sequence: Synthetic oligonucleotide
  Antisense strand to SEQ ID NO: 1722187
uccucuguaacucuauuuc

SEQ ID NO: 1722189 - RNA, 19 nt, Artificial Sequence
  Description of Artificial Sequence: Synthetic oligonucleotide
  Sense strand starting at position 905 of SEQ ID NO: 1562101
gugcuaauccaauauggug

SEQ ID NO: 1722190 - RNA, 19 nt, Artificial Sequence
  Description of Artificial Sequence: Synthetic oligonucleotide
  Antisense strand to SEQ ID NO: 1722189
caccauauuggauuagcac

SEQ ID NO: 1722191 - RNA, 19 nt, Artificial Sequence
  Description of Artificial Sequence: Synthetic oligonucleotide
  Sense strand starting at position 1330 of SEQ ID NO: 1562101
uggaacucuugagcucaua

SEQ ID NO: 1722192 - RNA, 19 nt, Artificial Sequence
  Description of Artificial Sequence: Synthetic oligonucleotide
  Antisense strand to SEQ ID NO: 1722191
uaugagcucaagaguucca

SEQ ID NO: 1722193 - RNA, 19 nt, Artificial Sequence
  Description of Artificial Sequence: Synthetic oligonucleotide
  Sense strand starting at position 1614 of SEQ ID NO: 1562101
gggugagagcugugaugga

SEQ ID NO: 1722194 - RNA, 19 nt, Artificial Sequence
  Description of Artificial Sequence: Synthetic oligonucleotide
  Antisense strand to SEQ ID NO: 1722193
uccaucacagcucucaccc

SEQ ID NO: 1722195 - RNA, 19 nt, Artificial Sequence
  Description of Artificial Sequence: Synthetic oligonucleotide
  Sense strand starting at position 1652 of SEQ ID NO: 1562101
accauaggugugagucguu

SEQ ID NO: 1722196 - RNA, 19 nt, Artificial Sequence
  Description of Artificial Sequence: Synthetic oligonucleotide
  Antisense strand to SEQ ID NO: 1722195
aacgacucacaccuauggu

SEQ ID NO: 1722197 - RNA, 19 nt, Artificial Sequence
  Description of Artificial Sequence: Synthetic oligonucleotide
  Sense strand starting at position 1664 of SEQ ID NO: 1562101
agucguuuaccugagcaaa

SEQ ID NO: 1722198 - RNA, 19 nt, Artificial Sequence
  Description of Artificial Sequence: Synthetic oligonucleotide
  Antisense strand to SEQ ID NO: 1722197
uuugcucagguaaacgacu

SEQ ID NO: 1722199 - RNA, 19 nt, Artificial Sequence
  Description of Artificial Sequence: Synthetic oligonucleotide
  Sense strand starting at position 1706 of SEQ ID NO: 1562101
ccgggagacuuugucagaa

SEQ ID NO: 1722200 - RNA, 19 nt, Artificial Sequence
  Description of Artificial Sequence: Synthetic oligonucleotide
  Antisense strand to SEQ ID NO: 1722199
uucugacaaagucucccgg

SEQ ID NO: 1722201 - RNA, 19 nt, Artificial Sequence
  Description of Artificial Sequence: Synthetic oligonucleotide
  Sense strand starting at position 1951 of SEQ ID NO: 1562101
gggcauuguggugaaaccu

SEQ ID NO: 1722202 - RNA, 19 nt, Artificial Sequence
  Description of Artificial Sequence: Synthetic oligonucleotide
  Antisense strand to SEQ ID NO: 1722201
agguuucaccacaaugccc

SEQ ID NO: 1722203 - RNA, 19 nt, Artificial Sequence
  Description of Artificial Sequence: Synthetic oligonucleotide
  Sense strand starting at position 1998 of SEQ ID NO: 1562101
uggagaugcccucgacuca

SEQ ID NO: 1722204 - RNA, 19 nt, Artificial Sequence
  Description of Artificial Sequence: Synthetic oligonucleotide
  Antisense strand to SEQ ID NO: 1722203
ugagucgagggcaucucca

SEQ ID NO: 1722205 - RNA, 19 nt, Artificial Sequence
  Description of Artificial Sequence: Synthetic oligonucleotide
  Sense strand starting at position 2015 of SEQ ID NO: 1562101
cagugcuccgagcagagaa

SEQ ID NO: 1722206 - RNA, 19 nt, Artificial Sequence
  Description of Artificial Sequence: Synthetic oligonucleotide
  Antisense strand to SEQ ID NO: 1722205
uucucugcucggagcacug

SEQ ID NO: 1722207 - RNA, 19 nt, Artificial Sequence
  Description of Artificial Sequence: Synthetic oligonucleotide
  Sense strand starting at position 2167 of SEQ ID NO: 1562101
ggaaguauuuagcuuugcu

SEQ ID NO: 1722208 - RNA, 19 nt, Artificial Sequence
  Description of Artificial Sequence: Synthetic oligonucleotide
  Antisense strand to SEQ ID NO: 1722207
agcaaagcuaaauacuucc

SEQ ID NO: 1722209 - RNA, 19 nt, Artificial Sequence
  Description of Artificial Sequence: Synthetic oligonucleotide
  Sense strand starting at position 2214 of SEQ ID NO: 1562101
uuauacuccuuccugaguu

SEQ ID NO: 1722210 - RNA, 19 nt, Artificial Sequence
  Description of Artificial Sequence: Synthetic oligonucleotide
  Antisense strand to SEQ ID NO: 1722209
aacucaggaaggaguauaa

SEQ ID NO: 1722211 - RNA, 19 nt, Artificial Sequence
  Description of Artificial Sequence: Synthetic oligonucleotide
  Sense strand starting at position 2457 of SEQ ID NO: 1562101
uuucuugcacuccagagua

SEQ ID NO: 1722212 - RNA, 19 nt, Artificial Sequence
  Description of Artificial Sequence: Synthetic oligonucleotide
  Antisense strand to SEQ ID NO: 1722211
uacucuggagugcaagaaa

SEQ ID NO: 1722213 - RNA, 19 nt, Artificial Sequence
  Description of Artificial Sequence: Synthetic oligonucleotide
  Sense strand starting at position 2459 of SEQ ID NO: 1562101
ucuugcacuccagaguagu

SEQ ID NO: 1722214 - RNA, 19 nt, Artificial Sequence
  Description of Artificial Sequence: Synthetic oligonucleotide
  Antisense strand to SEQ ID NO: 1722213
acuacucuggagugcaaga

SEQ ID NO: 1722215 - RNA, 19 nt, Artificial Sequence
  Description of Artificial Sequence: Synthetic oligonucleotide
  Sense strand starting at position 2563 of SEQ ID NO: 1562101
uuccuuccugcagaggaau

SEQ ID NO: 1722216 - RNA, 19 nt, Artificial Sequence
  Description of Artificial Sequence: Synthetic oligonucleotide
  Antisense strand to SEQ ID NO: 1722215
auuccucugcaggaaggaa

SEQ ID NO: 1722217 - RNA, 19 nt, Artificial Sequence
  Description of Artificial Sequence: Synthetic oligonucleotide
  Sense strand starting at position 2593 of SEQ ID NO: 1562101
gagaaagacauucgaguug

SEQ ID NO: 1722218 - RNA, 19 nt, Artificial Sequence
  Description of Artificial Sequence: Synthetic oligonucleotide
  Antisense strand to SEQ ID NO: 1722217
caacucgaaugucuuucuc

SEQ ID NO: 1722219 - RNA, 19 nt, Artificial Sequence
  Description of Artificial Sequence: Synthetic oligonucleotide
  Sense strand starting at position 2628 of SEQ ID NO: 1562101
uugugcuuuagaggaugga

SEQ ID NO: 1722220 - RNA, 19 nt, Artificial Sequence
  Description of Artificial Sequence: Synthetic oligonucleotide
  Antisense strand to SEQ ID NO: 1722219
uccauccucuaaagcacaa

SEQ ID NO: 1722221 - RNA, 19 nt, Artificial Sequence
  Description of Artificial Sequence: Synthetic oligonucleotide
  Sense strand starting at position 2695 of SEQ ID NO: 1562101
agaguaacaugccuacaaa

SEQ ID NO: 1722222 - RNA, 19 nt, Artificial Sequence
  Description of Artificial Sequence: Synthetic oligonucleotide
  Antisense strand to SEQ ID NO: 1722221
uuuguaggcauguuacucu

SEQ ID NO: 1722223 - RNA, 19 nt, Artificial Sequence
  Description of Artificial Sequence: Synthetic oligonucleotide
  Sense strand starting at position 2764 of SEQ ID NO: 1562101
agcucucagagaugggauu

SEQ ID NO: 1722224 - RNA, 19 nt, Artificial Sequence
  Description of Artificial Sequence: Synthetic oligonucleotide
  Antisense strand to SEQ ID NO: 1722223
aaucccaucucugagagcu

SEQ ID NO: 1722225 - RNA, 19 nt, Artificial Sequence
  Description of Artificial Sequence: Synthetic oligonucleotide
  Sense strand starting at position 2852 of SEQ ID NO: 1562101
uggaauggguucuuccuaa

SEQ ID NO: 1722226 - RNA, 19 nt, Artificial Sequence
  Description of Artificial Sequence: Synthetic oligonucleotide
  Antisense strand to SEQ ID NO: 1722225
uuaggaagaacccauucca

SEQ ID NO: 1722227 - RNA, 19 nt, Artificial Sequence
  Description of Artificial Sequence: Synthetic oligonucleotide
  Sense strand starting at position 2859 of SEQ ID NO: 1562101
gguucuuccuaagcacaaa

SEQ ID NO: 1722228 - RNA, 19 nt, Artificial Sequence
  Description of Artificial Sequence: Synthetic oligonucleotide
  Antisense strand to SEQ ID NO: 1722227
uuugugcuuaggaagaacc

SEQ ID NO: 1722229 - RNA, 19 nt, Artificial Sequence
  Description of Artificial Sequence: Synthetic oligonucleotide
  Sense strand starting at position 3134 of SEQ ID NO: 1562101
guuguucugaaaugaugaa

SEQ ID NO: 1722230 - RNA, 19 nt, Artificial Sequence
  Description of Artificial Sequence: Synthetic oligonucleotide
  Antisense strand to SEQ ID NO: 1722229
uucaucauuucagaacaac

SEQ ID NO: 1722231 - RNA, 19 nt, Artificial Sequence
  Description of Artificial Sequence: Synthetic oligonucleotide
  Sense strand starting at position 3242 of SEQ ID NO: 1562101
ugaggaaucuucucaccuu

SEQ ID NO: 1722232 - RNA, 19 nt, Artificial Sequence
  Description of Artificial Sequence: Synthetic oligonucleotide
  Antisense strand to SEQ ID NO: 1722231
aaggugagaagauuccuca

SEQ ID NO: 1722233 - RNA, 19 nt, Artificial Sequence
  Description of Artificial Sequence: Synthetic oligonucleotide
  Sense strand starting at position 3268 of SEQ ID NO: 1562101
acucuaaguuccuuggaga

SEQ ID NO: 1722234 - RNA, 19 nt, Artificial Sequence
  Description of Artificial Sequence: Synthetic oligonucleotide
  Antisense strand to SEQ ID NO: 1722233
ucuccaaggaacuuagagu

SEQ ID NO: 1722235 - RNA, 19 nt, Artificial Sequence
  Description of Artificial Sequence: Synthetic oligonucleotide
  Sense strand starting at position 3269 of SEQ ID NO: 1562101
cucuaaguuccuuggagag

SEQ ID NO: 1722236 - RNA, 19 nt, Artificial Sequence
  Description of Artificial Sequence: Synthetic oligonucleotide
  Antisense strand to SEQ ID NO: 1722235
cucuccaaggaacuuagag

SEQ ID NO: 1722237 - RNA, 19 nt, Artificial Sequence
  Description of Artificial Sequence: Synthetic oligonucleotide
  Sense strand starting at position 3279 of SEQ ID NO: 1562101
cuuggagagucaguacuca

SEQ ID NO: 1722238 - RNA, 19 nt, Artificial Sequence
  Description of Artificial Sequence: Synthetic oligonucleotide
  Antisense strand to SEQ ID NO: 1722237
ugaguacugacucuccaag

SEQ ID NO: 1722239 - RNA, 19 nt, Artificial Sequence
  Description of Artificial Sequence: Synthetic oligonucleotide
  Sense strand starting at position 3298 of SEQ ID NO: 1562101
cgggucaguauccaagagu

SEQ ID NO: 1722240 - RNA, 19 nt, Artificial Sequence
  Description of Artificial Sequence: Synthetic oligonucleotide
  Antisense strand to SEQ ID NO: 1722239
acucuuggauacugacccg

SEQ ID NO: 1722241 - RNA, 19 nt, Artificial Sequence
  Description of Artificial Sequence: Synthetic oligonucleotide
  Sense strand starting at position 3332 of SEQ ID NO: 1562101
agauauaaucuaggcuaga

SEQ ID NO: 1722242 - RNA, 19 nt, Artificial Sequence
  Description of Artificial Sequence: Synthetic oligonucleotide
  Antisense strand to SEQ ID NO: 1722241
ucuagccuagauuauaucu

SEQ ID NO: 1722243 - RNA, 19 nt, Artificial Sequence
  Description of Artificial Sequence: Synthetic oligonucleotide
  Sense strand starting at position 3364 of SEQ ID NO: 1562101
cuccuaagagcugaguaau

SEQ ID NO: 1722244 - RNA, 19 nt, Artificial Sequence
  Description of Artificial Sequence: Synthetic oligonucleotide
  Antisense strand to SEQ ID NO: 1722243
auuacucagcucuuaggag

SEQ ID NO: 1722245 - RNA, 19 nt, Artificial Sequence
  Description of Artificial Sequence: Synthetic oligonucleotide
  Sense strand starting at position 3367 of SEQ ID NO: 1562101
cuaagagcugaguaaucuu

SEQ ID NO: 1722246 - RNA, 19 nt, Artificial Sequence
  Description of Artificial Sequence: Synthetic oligonucleotide
  Antisense strand to SEQ ID NO: 1722245
aagauuacucagcucuuag

SEQ ID NO: 1722247 - RNA, 19 nt, Artificial Sequence
  Description of Artificial Sequence: Synthetic oligonucleotide
  Sense strand starting at position 3374 of SEQ ID NO: 1562101
cugaguaaucuugggccca

SEQ ID NO: 1722248 - RNA, 19 nt, Artificial Sequence
  Description of Artificial Sequence: Synthetic oligonucleotide
  Antisense strand to SEQ ID NO: 1722247
ugggcccaagauuacucag

SEQ ID NO: 1722249 - RNA, 19 nt, Artificial Sequence
  Description of Artificial Sequence: Synthetic oligonucleotide
  Sense strand starting at position 3376 of SEQ ID NO: 1562101
gaguaaucuugggcccaug

SEQ ID NO: 1722250 - RNA, 19 nt, Artificial Sequence
  Description of Artificial Sequence: Synthetic oligonucleotide
  Antisense strand to SEQ ID NO: 1722249
caugggcccaagauuacuc

SEQ ID NO: 1722251 - RNA, 19 nt, Artificial Sequence
  Description of Artificial Sequence: Synthetic oligonucleotide
  Sense strand starting at position 3399 of SEQ ID NO: 1562101
agaccuguauauucugcaa

SEQ ID NO: 1722252 - RNA, 19 nt, Artificial Sequence
  Description of Artificial Sequence: Synthetic oligonucleotide
  Antisense strand to SEQ ID NO: 1722251
uugcagaauauacaggucu

SEQ ID NO: 1722253 - RNA, 19 nt, Artificial Sequence
  Description of Artificial Sequence: Synthetic oligonucleotide
  Sense strand starting at position 3749 of SEQ ID NO: 1562101
ggccucuuuguauaccuua

SEQ ID NO: 1722254 - RNA, 19 nt, Artificial Sequence
  Description of Artificial Sequence: Synthetic oligonucleotide
  Antisense strand to SEQ ID NO: 1722253
uaagguauacaaagaggcc

SEQ ID NO: 1722255 - RNA, 19 nt, Artificial Sequence
  Description of Artificial Sequence: Synthetic oligonucleotide
  Sense strand starting at position 362 of SEQ ID NO: 1562102
ugugaugggugauuauuaa

SEQ ID NO: 1722256 - RNA, 19 nt, Artificial Sequence
  Description of Artificial Sequence: Synthetic oligonucleotide
  Antisense strand to SEQ ID NO: 1722255
uuaauaaucacccaucaca

SEQ ID NO: 1722257 - RNA, 19 nt, Artificial Sequence
  Description of Artificial Sequence: Synthetic oligonucleotide
  Sense strand starting at position 369 of SEQ ID NO: 1562102
ggugauuauuaaucuaaug

SEQ ID NO: 1722258 - RNA, 19 nt, Artificial Sequence
  Description of Artificial Sequence: Synthetic oligonucleotide
  Antisense strand to SEQ ID NO: 1722257
cauuagauuaauaaucacc

SEQ ID NO: 1722259 - RNA, 19 nt, Artificial Sequence
  Description of Artificial Sequence: Synthetic oligonucleotide
  Sense strand starting at position 421 of SEQ ID NO: 1562102
auagcauaacaugguuaaa

SEQ ID NO: 1722260 - RNA, 19 nt, Artificial Sequence
  Description of Artificial Sequence: Synthetic oligonucleotide
  Antisense strand to SEQ ID NO: 1722259
uuuaaccauguuaugcuau

SEQ ID NO: 1722261 - RNA, 19 nt, Artificial Sequence
  Description of Artificial Sequence: Synthetic oligonucleotide
  Sense strand starting at position 442 of SEQ ID NO: 1562102
ggugauaaacucuggaacu

SEQ ID NO: 1722262 - RNA, 19 nt, Artificial Sequence
  Description of Artificial Sequence: Synthetic oligonucleotide
  Antisense strand to SEQ ID NO: 1722261
aguuccagaguuuaucacc

SEQ ID NO: 1722263 - RNA, 19 nt, Artificial Sequence
  Description of Artificial Sequence: Synthetic oligonucleotide
  Sense strand starting at position 587 of SEQ ID NO: 1562102
cugugaggauuaguugacu

SEQ ID NO: 1722264 - RNA, 19 nt, Artificial Sequence
  Description of Artificial Sequence: Synthetic oligonucleotide
  Antisense strand to SEQ ID NO: 1722263
agucaacuaauccucacag

SEQ ID NO: 1722265 - RNA, 19 nt, Artificial Sequence
  Description of Artificial Sequence: Synthetic oligonucleotide
  Sense strand starting at position 592 of SEQ ID NO: 1562102
aggauuaguugacuuaaua

SEQ ID NO: 1722266 - RNA, 19 nt, Artificial Sequence
  Description of Artificial Sequence: Synthetic oligonucleotide
  Antisense strand to SEQ ID NO: 1722265
uauuaagucaacuaauccu

SEQ ID NO: 1722267 - RNA, 19 nt, Artificial Sequence
  Description of Artificial Sequence: Synthetic oligonucleotide
  Sense strand starting at position 650 of SEQ ID NO: 1562102
agagcaauugcugaacuau

SEQ ID NO: 1722268 - RNA, 19 nt, Artificial Sequence
  Description of Artificial Sequence: Synthetic oligonucleotide
  Antisense strand to SEQ ID NO: 1722267
auaguucagcaauugcucu

SEQ ID NO: 1722269 - RNA, 19 nt, Artificial Sequence
  Description of Artificial Sequence: Synthetic oligonucleotide
  Sense strand starting at position 732 of SEQ ID NO: 1562102
cucuaagaccugugagaug

SEQ ID NO: 1722270 - RNA, 19 nt, Artificial Sequence
  Description of Artificial Sequence: Synthetic oligonucleotide
  Antisense strand to SEQ ID NO: 1722269
caucucacaggucuuagag

SEQ ID NO: 1722271 - RNA, 19 nt, Artificial Sequence
  Description of Artificial Sequence: Synthetic oligonucleotide
  Sense strand starting at position 1037 of SEQ ID NO: 1562102
gccuuagaauuugaccaua

SEQ ID NO: 1722272 - RNA, 19 nt, Artificial Sequence
  Description of Artificial Sequence: Synthetic oligonucleotide
  Antisense strand to SEQ ID NO: 1722271
uauggucaaauucuaaggc

SEQ ID NO: 1722273 - RNA, 19 nt, Artificial Sequence
  Description of Artificial Sequence: Synthetic oligonucleotide
  Sense strand starting at position 1186 of SEQ ID NO: 1562102
cggagcacuaggcauaaau

SEQ ID NO: 1722274 - RNA, 19 nt, Artificial Sequence
  Description of Artificial Sequence: Synthetic oligonucleotide
  Antisense strand to SEQ ID NO: 1722273
auuuaugccuagugcuccg

SEQ ID NO: 1722275 - RNA, 19 nt, Artificial Sequence
  Description of Artificial Sequence: Synthetic oligonucleotide
  Sense strand starting at position 1196 of SEQ ID NO: 1562102
ggcauaaaugggugaagca

SEQ ID NO: 1722276 - RNA, 19 nt, Artificial Sequence
  Description of Artificial Sequence: Synthetic oligonucleotide
  Antisense strand to SEQ ID NO: 1722275
ugcuucacccauuuaugcc

SEQ ID NO: 1722277 - RNA, 19 nt, Artificial Sequence
  Description of Artificial Sequence: Synthetic oligonucleotide
  Sense strand starting at position 1197 of SEQ ID NO: 1562102
gcauaaaugggugaagcaa

SEQ ID NO: 1722278 - RNA, 19 nt, Artificial Sequence
  Description of Artificial Sequence: Synthetic oligonucleotide
  Antisense strand to SEQ ID NO: 1722277
uugcuucacccauuuaugc

SEQ ID NO: 1722279 - RNA, 19 nt, Artificial Sequence
  Description of Artificial Sequence: Synthetic oligonucleotide
  Sense strand starting at position 1250 of SEQ ID NO: 1562102
auccaauauggcugauguu

SEQ ID NO: 1722280 - RNA, 19 nt, Artificial Sequence
  Description of Artificial Sequence: Synthetic oligonucleotide
  Antisense strand to SEQ ID NO: 1722279
aacaucagccauauuggau

SEQ ID NO: 1722281 - RNA, 19 nt, Artificial Sequence
  Description of Artificial Sequence: Synthetic oligonucleotide
  Sense strand starting at position 1302 of SEQ ID NO: 1562102
agaggaagaccauguguca

SEQ ID NO: 1722282 - RNA, 19 nt, Artificial Sequence
  Description of Artificial Sequence: Synthetic oligonucleotide
  Antisense strand to SEQ ID NO: 1722281
ugacacauggucuuccucu

SEQ ID NO: 1722283 - RNA, 19 nt, Artificial Sequence
  Description of Artificial Sequence: Synthetic oligonucleotide
  Sense strand starting at position 1305 of SEQ ID NO: 1562102
ggaagaccaugugucaaga

SEQ ID NO: 1722284 - RNA, 19 nt, Artificial Sequence
  Description of Artificial Sequence: Synthetic oligonucleotide
  Antisense strand to SEQ ID NO: 1722283
ucuugacacauggucuucc

SEQ ID NO: 1722285 - RNA, 19 nt, Artificial Sequence
  Description of Artificial Sequence: Synthetic oligonucleotide
  Sense strand starting at position 1429 of SEQ ID NO: 1562102
gaaaguaaaugucuauugu

SEQ ID NO: 1722286 - RNA, 19 nt, Artificial Sequence
  Description of Artificial Sequence: Synthetic oligonucleotide
  Antisense strand to SEQ ID NO: 1722285
acaauagacauuuacuuuc

SEQ ID NO: 1722287 - RNA, 19 nt, Artificial Sequence
  Description of Artificial Sequence: Synthetic oligonucleotide
  Sense strand starting at position 1502 of SEQ ID NO: 1562102
ggacgcuguaagcaugaaa

SEQ ID NO: 1722288 - RNA, 19 nt, Artificial Sequence
  Description of Artificial Sequence: Synthetic oligonucleotide
  Antisense strand to SEQ ID NO: 1722287
uuucaugcuuacagcgucc

SEQ ID NO: 1722289 - RNA, 19 nt, Artificial Sequence
  Description of Artificial Sequence: Synthetic oligonucleotide
  Sense strand starting at position 1509 of SEQ ID NO: 1562102
guaagcaugaaauguggaa

SEQ ID NO: 1722290 - RNA, 19 nt, Artificial Sequence
  Description of Artificial Sequence: Synthetic oligonucleotide
  Antisense strand to SEQ ID NO: 1722289
uuccacauuucaugcuuac

SEQ ID NO: 1722291 - RNA, 19 nt, Artificial Sequence
  Description of Artificial Sequence: Synthetic oligonucleotide
  Sense strand starting at position 1513 of SEQ ID NO: 1562102
gcaugaaauguggaacuuc

SEQ ID NO: 1722292 - RNA, 19 nt, Artificial Sequence
  Description of Artificial Sequence: Synthetic oligonucleotide
  Antisense strand to SEQ ID NO: 1722291
gaaguuccacauuucaugc

SEQ ID NO: 1722293 - RNA, 19 nt, Artificial Sequence
  Description of Artificial Sequence: Synthetic oligonucleotide
  Sense strand starting at position 1640 of SEQ ID NO: 1562102
aauugugaugguggcagaa

SEQ ID NO: 1722294 - RNA, 19 nt, Artificial Sequence
  Description of Artificial Sequence: Synthetic oligonucleotide
  Antisense strand to SEQ ID NO: 1722293
uucugccaccaucacaauu

SEQ ID NO: 1722295 - RNA, 19 nt, Artificial Sequence
  Description of Artificial Sequence: Synthetic oligonucleotide
  Sense strand starting at position 2075 of SEQ ID NO: 1562102
ucuagauugugacuuacaa

SEQ ID NO: 1722296 - RNA, 19 nt, Artificial Sequence
  Description of Artificial Sequence: Synthetic oligonucleotide
  Antisense strand to SEQ ID NO: 1722295
uuguaagucacaaucuaga

SEQ ID NO: 1722297 - RNA, 19 nt, Artificial Sequence
  Description of Artificial Sequence: Synthetic oligonucleotide
  Sense strand starting at position 2111 of SEQ ID NO: 1562102
gcuacaaagcaaggaguua

SEQ ID NO: 1722298 - RNA, 19 nt, Artificial Sequence
  Description of Artificial Sequence: Synthetic oligonucleotide
  Antisense strand to SEQ ID NO: 1722297
uaacuccuugcuuuguagc

SEQ ID NO: 1722299 - RNA, 19 nt, Artificial Sequence
  Description of Artificial Sequence: Synthetic oligonucleotide
  Sense strand starting at position 2125 of SEQ ID NO: 1562102
aguuaaucgugcuccauuu

SEQ ID NO: 1722300 - RNA, 19 nt, Artificial Sequence
  Description of Artificial Sequence: Synthetic oligonucleotide
  Antisense strand to SEQ ID NO: 1722299
aaauggagcacgauuaacu

SEQ ID NO: 1722301 - RNA, 19 nt, Artificial Sequence
  Description of Artificial Sequence: Synthetic oligonucleotide
  Sense strand starting at position 2270 of SEQ ID NO: 1562102
caagaaagaucuguuguua

SEQ ID NO: 1722302 - RNA, 19 nt, Artificial Sequence
  Description of Artificial Sequence: Synthetic oligonucleotide
  Antisense strand to SEQ ID NO: 1722301
uaacaacagaucuuucuug

SEQ ID NO: 1722303 - RNA, 19 nt, Artificial Sequence
  Description of Artificial Sequence: Synthetic oligonucleotide
  Sense strand starting at position 2274 of SEQ ID NO: 1562102
aaagaucuguuguuaggua

SEQ ID NO: 1722304 - RNA, 19 nt, Artificial Sequence
  Description of Artificial Sequence: Synthetic oligonucleotide
  Antisense strand to SEQ ID NO: 1722303
uaccuaacaacagaucuuu

SEQ ID NO: 1722305 - RNA, 19 nt, Artificial Sequence
  Description of Artificial Sequence: Synthetic oligonucleotide
  Sense strand starting at position 2572 of SEQ ID NO: 1562102
agaaacuggguuugaggua

SEQ ID NO: 1722306 - RNA, 19 nt, Artificial Sequence
  Description of Artificial Sequence: Synthetic oligonucleotide
  Antisense strand to SEQ ID NO: 1722305
uaccucaaacccaguuucu

SEQ ID NO: 1722307 - RNA, 19 nt, Artificial Sequence
  Description of Artificial Sequence: Synthetic oligonucleotide
  Sense strand starting at position 2747 of SEQ ID NO: 1562102
cugaguucggaugggaaau

SEQ ID NO: 1722308 - RNA, 19 nt, Artificial Sequence
  Description of Artificial Sequence: Synthetic oligonucleotide
  Antisense strand to SEQ ID NO: 1722307
auuucccauccgaacucag

SEQ ID NO: 1722309 - RNA, 19 nt, Artificial Sequence
  Description of Artificial Sequence: Synthetic oligonucleotide
  Sense strand starting at position 2917 of SEQ ID NO: 1562102
agcauaucaugccugaaac

SEQ ID NO: 1722310 - RNA, 19 nt, Artificial Sequence
  Description of Artificial Sequence: Synthetic oligonucleotide
  Antisense strand to SEQ ID NO: 1722309
guuucaggcaugauaugcu

SEQ ID NO: 1722311 - RNA, 19 nt, Artificial Sequence
  Description of Artificial Sequence: Synthetic oligonucleotide
  Sense strand starting at position 3180 of SEQ ID NO: 1562102
aauuuccagcugugugauu

SEQ ID NO: 1722312 - RNA, 19 nt, Artificial Sequence
  Description of Artificial Sequence: Synthetic oligonucleotide
  Antisense strand to SEQ ID NO: 1722311
aaucacacagcuggaaauu

SEQ ID NO: 1722313 - RNA, 19 nt, Artificial Sequence
  Description of Artificial Sequence: Synthetic oligonucleotide
  Sense strand starting at position 3270 of SEQ ID NO: 1562102
agagcuaugguaggaauaa

SEQ ID NO: 1722314 - RNA, 19 nt, Artificial Sequence
  Description of Artificial Sequence: Synthetic oligonucleotide
  Antisense strand to SEQ ID NO: 1722313
uuauuccuaccauagcucu

SEQ ID NO: 1722315 - RNA, 19 nt, Artificial Sequence
  Description of Artificial Sequence: Synthetic oligonucleotide
  Sense strand starting at position 3300 of SEQ ID NO: 1562102
cugaaugcuugacucauaa

SEQ ID NO: 1722316 - RNA, 19 nt, Artificial Sequence
  Description of Artificial Sequence: Synthetic oligonucleotide
  Antisense strand to SEQ ID NO: 1722315
uuaugagucaagcauucag

SEQ ID NO: 1722317 - RNA, 19 nt, Artificial Sequence
  Description of Artificial Sequence: Synthetic oligonucleotide
  Sense strand starting at position 3354 of SEQ ID NO: 1562102
uucuguguacaggaagagu

SEQ ID NO: 1722318 - RNA, 19 nt, Artificial Sequence
  Description of Artificial Sequence: Synthetic oligonucleotide
  Antisense strand to SEQ ID NO: 1722317
acucuuccuguacacagaa

SEQ ID NO: 1722319 - RNA, 19 nt, Artificial Sequence
  Description of Artificial Sequence: Synthetic oligonucleotide
  Sense strand starting at position 3365 of SEQ ID NO: 1562102
ggaagaguccacugguucu

SEQ ID NO: 1722320 - RNA, 19 nt, Artificial Sequence
  Description of Artificial Sequence: Synthetic oligonucleotide
  Antisense strand to SEQ ID NO: 1722319
agaaccaguggacucuucc

SEQ ID NO: 1722321 - RNA, 19 nt, Artificial Sequence
  Description of Artificial Sequence: Synthetic oligonucleotide
  Sense strand starting at position 3497 of SEQ ID NO: 1562102
gguucuuaaucugucauga

SEQ ID NO: 1722322 - RNA, 19 nt, Artificial Sequence
  Description of Artificial Sequence: Synthetic oligonucleotide
  Antisense strand to SEQ ID NO: 1722321
ucaugacagauuaagaacc

SEQ ID NO: 1722323 - RNA, 19 nt, Artificial Sequence
  Description of Artificial Sequence: Synthetic oligonucleotide
  Sense strand starting at position 3505 of SEQ ID NO: 1562102
aucugucaugaauaauugu

SEQ ID NO: 1722324 - RNA, 19 nt, Artificial Sequence
  Description of Artificial Sequence: Synthetic oligonucleotide
  Antisense strand to SEQ ID NO: 1722323
acaauuauucaugacagau

SEQ ID NO: 1722325 - RNA, 19 nt, Artificial Sequence
  Description of Artificial Sequence: Synthetic oligonucleotide
  Sense strand starting at position 3508 of SEQ ID NO: 1562102
ugucaugaauaauugucaa

SEQ ID NO: 1722326 - RNA, 19 nt, Artificial Sequence
  Description of Artificial Sequence: Synthetic oligonucleotide
  Antisense strand to SEQ ID NO: 1722325
uugacaauuauucaugaca

SEQ ID NO: 1722327 - RNA, 19 nt, Artificial Sequence
  Description of Artificial Sequence: Synthetic oligonucleotide
  Sense strand starting at position 3741 of SEQ ID NO: 1562102
uuuccugugcuccagauau

SEQ ID NO: 1722328 - RNA, 19 nt, Artificial Sequence
  Description of Artificial Sequence: Synthetic oligonucleotide
  Antisense strand to SEQ ID NO: 1722327
auaucuggagcacaggaaa

SEQ ID NO: 1722329 - RNA, 19 nt, Artificial Sequence
  Description of Artificial Sequence: Synthetic oligonucleotide
  Sense strand starting at position 3779 of SEQ ID NO: 1562102
uugguaaugucauuaaauc

SEQ ID NO: 1722330 - RNA, 19 nt, Artificial Sequence
  Description of Artificial Sequence: Synthetic oligonucleotide
  Antisense strand to SEQ ID NO: 1722329
gauuuaaugacauuaccaa

SEQ ID NO: 1722331 - RNA, 19 nt, Artificial Sequence
  Description of Artificial Sequence: Synthetic oligonucleotide
  Sense strand starting at position 3780 of SEQ ID NO: 1562102
ugguaaugucauuaaauca

SEQ ID NO: 1722332 - RNA, 19 nt, Artificial Sequence
  Description of Artificial Sequence: Synthetic oligonucleotide
  Antisense strand to SEQ ID NO: 1722331
ugauuuaaugacauuacca

SEQ ID NO: 1722333 - RNA, 19 nt, Artificial Sequence
  Description of Artificial Sequence: Synthetic oligonucleotide
  Sense strand starting at position 3865 of SEQ ID NO: 1562102
cauggagaguaaugaauuu

SEQ ID NO: 1722334 - RNA, 19 nt, Artificial Sequence
  Description of Artificial Sequence: Synthetic oligonucleotide
  Antisense strand to SEQ ID NO: 1722333
aaauucauuacucuccaug

SEQ ID NO: 1722335 - RNA, 19 nt, Artificial Sequence
  Description of Artificial Sequence: Synthetic oligonucleotide
  Sense strand starting at position 488 of SEQ ID NO: 1562103
gaguauuagccgcacauuu

SEQ ID NO: 1722336 - RNA, 19 nt, Artificial Sequence
  Description of Artificial Sequence: Synthetic oligonucleotide
  Antisense strand to SEQ ID NO: 1722335
aaaugugcggcuaauacuc

SEQ ID NO: 1722337 - RNA, 19 nt, Artificial Sequence
  Description of Artificial Sequence: Synthetic oligonucleotide
  Sense strand starting at position 505 of SEQ ID NO: 1562103
uuuguaagacagcaucaaa

SEQ ID NO: 1722338 - RNA, 19 nt, Artificial Sequence
  Description of Artificial Sequence: Synthetic oligonucleotide
  Antisense strand to SEQ ID NO: 1722337
uuugaugcugucuuacaaa

SEQ ID NO: 1722339 - RNA, 19 nt, Artificial Sequence
  Description of Artificial Sequence: Synthetic oligonucleotide
  Sense strand starting at position 564 of SEQ ID NO: 1562103
aggcacuuuccggaggaca

SEQ ID NO: 1722340 - RNA, 19 nt, Artificial Sequence
  Description of Artificial Sequence: Synthetic oligonucleotide
  Antisense strand to SEQ ID NO: 1722339
uguccuccggaaagugccu

SEQ ID NO: 1722341 - RNA, 19 nt, Artificial Sequence
  Description of Artificial Sequence: Synthetic oligonucleotide
  Sense strand starting at position 566 of SEQ ID NO: 1562103
gcacuuuccggaggacaug

SEQ ID NO: 1722342 - RNA, 19 nt, Artificial Sequence
  Description of Artificial Sequence: Synthetic oligonucleotide
  Antisense strand to SEQ ID NO: 1722341
cauguccuccggaaagugc

SEQ ID NO: 1722343 - RNA, 19 nt, Artificial Sequence
  Description of Artificial Sequence: Synthetic oligonucleotide
  Sense strand starting at position 580 of SEQ ID NO: 1562103
acaugaggcaucgggugaa

SEQ ID NO: 1722344 - RNA, 19 nt, Artificial Sequence
  Description of Artificial Sequence: Synthetic oligonucleotide
  Antisense strand to SEQ ID NO: 1722343
uucacccgaugccucaugu

SEQ ID NO: 1722345 - RNA, 19 nt, Artificial Sequence
  Description of Artificial Sequence: Synthetic oligonucleotide
  Sense strand starting at position 772 of SEQ ID NO: 1562103
gccugccaucauguguauu

SEQ ID NO: 1722346 - RNA, 19 nt, Artificial Sequence
  Description of Artificial Sequence: Synthetic oligonucleotide
  Antisense strand to SEQ ID NO: 1722345
aauacacaugauggcaggc

SEQ ID NO: 1722347 - RNA, 19 nt, Artificial Sequence
  Description of Artificial Sequence: Synthetic oligonucleotide
  Sense strand starting at position 792 of SEQ ID NO: 1562103
ugugcuucugaagaucauu

SEQ ID NO: 1722348 - RNA, 19 nt, Artificial Sequence
  Description of Artificial Sequence: Synthetic oligonucleotide
  Antisense strand to SEQ ID NO: 1722347
aaugaucuucagaagcaca

SEQ ID NO: 1722349 - RNA, 19 nt, Artificial Sequence
  Description of Artificial Sequence: Synthetic oligonucleotide
  Sense strand starting at position 1082 of SEQ ID NO: 1562103
ucaagucuauaguuaguca

SEQ ID NO: 1722350 - RNA, 19 nt, Artificial Sequence
  Description of Artificial Sequence: Synthetic oligonucleotide
  Antisense strand to SEQ ID NO: 1722349
ugacuaacuauagacuuga

SEQ ID NO: 1722351 - RNA, 19 nt, Artificial Sequence
  Description of Artificial Sequence: Synthetic oligonucleotide
  Sense strand starting at position 1085 of SEQ ID NO: 1562103
agucuauaguuagucauaa

SEQ ID NO: 1722352 - RNA, 19 nt, Artificial Sequence
  Description of Artificial Sequence: Synthetic oligonucleotide
  Antisense strand to SEQ ID NO: 1722351
uuaugacuaacuauagacu

SEQ ID NO: 1722353 - RNA, 19 nt, Artificial Sequence
  Description of Artificial Sequence: Synthetic oligonucleotide
  Sense strand starting at position 1086 of SEQ ID NO: 1562103
gucuauaguuagucauaau

SEQ ID NO: 1722354 - RNA, 19 nt, Artificial Sequence
  Description of Artificial Sequence: Synthetic oligonucleotide
  Antisense strand to SEQ ID NO: 1722353
auuaugacuaacuauagac

SEQ ID NO: 1722355 - RNA, 19 nt, Artificial Sequence
  Description of Artificial Sequence: Synthetic oligonucleotide
  Sense strand starting at position 1246 of SEQ ID NO: 1562103
ggcucuacagcugaaaugu

SEQ ID NO: 1722356 - RNA, 19 nt, Artificial Sequence
  Description of Artificial Sequence: Synthetic oligonucleotide
  Antisense strand to SEQ ID NO: 1722355
acauuucagcuguagagcc

SEQ ID NO: 1722357 - RNA, 19 nt, Artificial Sequence
  Description of Artificial Sequence: Synthetic oligonucleotide
  Sense strand starting at position 2129 of SEQ ID NO: 1562103
cuuagucuuguccaaggaa

SEQ ID NO: 1722358 - RNA, 19 nt, Artificial Sequence
  Description of Artificial Sequence: Synthetic oligonucleotide
  Antisense strand to SEQ ID NO: 1722357
uuccuuggacaagacuaag

SEQ ID NO: 1722359 - RNA, 19 nt, Artificial Sequence
  Description of Artificial Sequence: Synthetic oligonucleotide
  Sense strand starting at position 2132 of SEQ ID NO: 1562103
agucuuguccaaggaacac

SEQ ID NO: 1722360 - RNA, 19 nt, Artificial Sequence
  Description of Artificial Sequence: Synthetic oligonucleotide
  Antisense strand to SEQ ID NO: 1722359
guguuccuuggacaagacu

SEQ ID NO: 1722361 - RNA, 19 nt, Artificial Sequence
  Description of Artificial Sequence: Synthetic oligonucleotide
  Sense strand starting at position 2183 of SEQ ID NO: 1562103
cuggccugaccauaauaau

SEQ ID NO: 1722362 - RNA, 19 nt, Artificial Sequence
  Description of Artificial Sequence: Synthetic oligonucleotide
  Antisense strand to SEQ ID NO: 1722361
auuauuauggucaggccag

SEQ ID NO: 1722363 - RNA, 19 nt, Artificial Sequence
  Description of Artificial Sequence: Synthetic oligonucleotide
  Sense strand starting at position 2301 of SEQ ID NO: 1562103
gcaggagauucccuugacu

SEQ ID NO: 1722364 - RNA, 19 nt, Artificial Sequence
  Description of Artificial Sequence: Synthetic oligonucleotide
  Antisense strand to SEQ ID NO: 1722363
agucaagggaaucuccugc

SEQ ID NO: 1722365 - RNA, 19 nt, Artificial Sequence
  Description of Artificial Sequence: Synthetic oligonucleotide
  Sense strand starting at position 2348 of SEQ ID NO: 1562103
gccuuuaauguguauagga

SEQ ID NO: 1722366 - RNA, 19 nt, Artificial Sequence
  Description of Artificial Sequence: Synthetic oligonucleotide
  Antisense strand to SEQ ID NO: 1722365
uccuauacacauuaaaggc

SEQ ID NO: 1722367 - RNA, 19 nt, Artificial Sequence
  Description of Artificial Sequence: Synthetic oligonucleotide
  Sense strand starting at position 2509 of SEQ ID NO: 1562103
gacaguggucuccaaguau

SEQ ID NO: 1722368 - RNA, 19 nt, Artificial Sequence
  Description of Artificial Sequence: Synthetic oligonucleotide
  Antisense strand to SEQ ID NO: 1722367
auacuuggagaccacuguc

SEQ ID NO: 1722369 - RNA, 19 nt, Artificial Sequence
  Description of Artificial Sequence: Synthetic oligonucleotide
  Sense strand starting at position 2599 of SEQ ID NO: 1562103
ggaaucauacucuggaggu

SEQ ID NO: 1722370 - RNA, 19 nt, Artificial Sequence
  Description of Artificial Sequence: Synthetic oligonucleotide
  Antisense strand to SEQ ID NO: 1722369
accuccagaguaugauucc

SEQ ID NO: 1722371 - RNA, 19 nt, Artificial Sequence
  Description of Artificial Sequence: Synthetic oligonucleotide
  Sense strand starting at position 2991 of SEQ ID NO: 1562103
aucacuggucuaggauaaa

SEQ ID NO: 1722372 - RNA, 19 nt, Artificial Sequence
  Description of Artificial Sequence: Synthetic oligonucleotide
  Antisense strand to SEQ ID NO: 1722371
uuuauccuagaccagugau

SEQ ID NO: 1722373 - RNA, 19 nt, Artificial Sequence
  Description of Artificial Sequence: Synthetic oligonucleotide
  Sense strand starting at position 3012 of SEQ ID NO: 1562103
aucugacucuggcugaauu

SEQ ID NO: 1722374 - RNA, 19 nt, Artificial Sequence
  Description of Artificial Sequence: Synthetic oligonucleotide
  Antisense strand to SEQ ID NO: 1722373
aauucagccagagucagau

SEQ ID NO: 1722375 - RNA, 19 nt, Artificial Sequence
  Description of Artificial Sequence: Synthetic oligonucleotide
  Sense strand starting at position 3024 of SEQ ID NO: 1562103
cugaauugucuuugaucag

SEQ ID NO: 1722376 - RNA, 19 nt, Artificial Sequence
  Description of Artificial Sequence: Synthetic oligonucleotide
  Antisense strand to SEQ ID NO: 1722375
cugaucaaagacaauucag

SEQ ID NO: 1722377 - RNA, 19 nt, Artificial Sequence
  Description of Artificial Sequence: Synthetic oligonucleotide
  Sense strand starting at position 3112 of SEQ ID NO: 1562103
auuaguacucuuggagaca

SEQ ID NO: 1722378 - RNA, 19 nt, Artificial Sequence
  Description of Artificial Sequence: Synthetic oligonucleotide
  Antisense strand to SEQ ID NO: 1722377
ugucuccaagaguacuaau

SEQ ID NO: 1722379 - RNA, 19 nt, Artificial Sequence
  Description of Artificial Sequence: Synthetic oligonucleotide
  Sense strand starting at position 3145 of SEQ ID NO: 1562103
cugaaaugauuccugacuc

SEQ ID NO: 1722380 - RNA, 19 nt, Artificial Sequence
  Description of Artificial Sequence: Synthetic oligonucleotide
  Antisense strand to SEQ ID NO: 1722379
gagucaggaaucauuucag

SEQ ID NO: 1722381 - RNA, 19 nt, Artificial Sequence
  Description of Artificial Sequence: Synthetic oligonucleotide
  Sense strand starting at position 3237 of SEQ ID NO: 1562103
agggaaggcugguuugauu

SEQ ID NO: 1722382 - RNA, 19 nt, Artificial Sequence
  Description of Artificial Sequence: Synthetic oligonucleotide
  Antisense strand to SEQ ID NO: 1722381
aaucaaaccagccuucccu

SEQ ID NO: 1722383 - RNA, 19 nt, Artificial Sequence
  Description of Artificial Sequence: Synthetic oligonucleotide
  Sense strand starting at position 3305 of SEQ ID NO: 1562103
ggcacacuucugcaagaga

SEQ ID NO: 1722384 - RNA, 19 nt, Artificial Sequence
  Description of Artificial Sequence: Synthetic oligonucleotide
  Antisense strand to SEQ ID NO: 1722383
ucucuugcagaagugugcc

SEQ ID NO: 1722385 - RNA, 19 nt, Artificial Sequence
  Description of Artificial Sequence: Synthetic oligonucleotide
  Sense strand starting at position 3308 of SEQ ID NO: 1562103
acacuucugcaagagaguu

SEQ ID NO: 1722386 - RNA, 19 nt, Artificial Sequence
  Description of Artificial Sequence: Synthetic oligonucleotide
  Antisense strand to SEQ ID NO: 1722385
aacucucuugcagaagugu

SEQ ID NO: 1722387 - RNA, 19 nt, Artificial Sequence
  Description of Artificial Sequence: Synthetic oligonucleotide
  Sense strand starting at position 3323 of SEQ ID NO: 1562103
aguucuaaucaggacguua

SEQ ID NO: 1722388 - RNA, 19 nt, Artificial Sequence
  Description of Artificial Sequence: Synthetic oligonucleotide
  Antisense strand to SEQ ID NO: 1722387
uaacguccugauuagaacu

SEQ ID NO: 1722389 - RNA, 19 nt, Artificial Sequence
  Description of Artificial Sequence: Synthetic oligonucleotide
  Sense strand starting at position 3325 of SEQ ID NO: 1562103
uucuaaucaggacguuaga

SEQ ID NO: 1722390 - RNA, 19 nt, Artificial Sequence
  Description of Artificial Sequence: Synthetic oligonucleotide
  Antisense strand to SEQ ID NO: 1722389
ucuaacguccugauuagaa

SEQ ID NO: 1722391 - RNA, 19 nt, Artificial Sequence
  Description of Artificial Sequence: Synthetic oligonucleotide
  Sense strand starting at position 3335 of SEQ ID NO: 1562103
gacguuagaaugggugaca

SEQ ID NO: 1722392 - RNA, 19 nt, Artificial Sequence
  Description of Artificial Sequence: Synthetic oligonucleotide
  Antisense strand to SEQ ID NO: 1722391
ugucacccauucuaacguc

SEQ ID NO: 1722393 - RNA, 19 nt, Artificial Sequence
  Description of Artificial Sequence: Synthetic oligonucleotide
  Sense strand starting at position 3429 of SEQ ID NO: 1562103
cuguaaugcccgucuucuu

SEQ ID NO: 1722394 - RNA, 19 nt, Artificial Sequence
  Description of Artificial Sequence: Synthetic oligonucleotide
  Antisense strand to SEQ ID NO: 1722393
aagaagacgggcauuacag

SEQ ID NO: 1722395 - RNA, 19 nt, Artificial Sequence
  Description of Artificial Sequence: Synthetic oligonucleotide
  Sense strand starting at position 3615 of SEQ ID NO: 1562103
agaaauaugcacugguguu

SEQ ID NO: 1722396 - RNA, 19 nt, Artificial Sequence
  Description of Artificial Sequence: Synthetic oligonucleotide
  Antisense strand to SEQ ID NO: 1722395
aacaccagugcauauuucu

SEQ ID NO: 1722397 - RNA, 19 nt, Artificial Sequence
  Description of Artificial Sequence: Synthetic oligonucleotide
  Sense strand starting at position 3667 of SEQ ID NO: 1562103
cuucuaauuuccucgguga

SEQ ID NO: 1722398 - RNA, 19 nt, Artificial Sequence
  Description of Artificial Sequence: Synthetic oligonucleotide
  Antisense strand to SEQ ID NO: 1722397
ucaccgaggaaauuagaag

SEQ ID NO: 1722399 - RNA, 19 nt, Artificial Sequence
  Description of Artificial Sequence: Synthetic oligonucleotide
  Sense strand starting at position 3668 of SEQ ID NO: 1562103
uucuaauuuccucggugac

SEQ ID NO: 1722400 - RNA, 19 nt, Artificial Sequence
  Description of Artificial Sequence: Synthetic oligonucleotide
  Antisense strand to SEQ ID NO: 1722399
gucaccgaggaaauuagaa

SEQ ID NO: 1722401 - RNA, 19 nt, Artificial Sequence
  Description of Artificial Sequence: Synthetic oligonucleotide
  Sense strand starting at position 3810 of SEQ ID NO: 1562103
gggagaggagcucgagauu

SEQ ID NO: 1722402 - RNA, 19 nt, Artificial Sequence
  Description of Artificial Sequence: Synthetic oligonucleotide
  Antisense strand to SEQ ID NO: 1722401
aaucucgagcuccucuccc

SEQ ID NO: 1722403 - RNA, 19 nt, Artificial Sequence
  Description of Artificial Sequence: Synthetic oligonucleotide
  Sense strand starting at position 3816 of SEQ ID NO: 1562103
ggagcucgagauugaguua

SEQ ID NO: 1722404 - RNA, 19 nt, Artificial Sequence
  Description of Artificial Sequence: Synthetic oligonucleotide
  Antisense strand to SEQ ID NO: 1722403
uaacucaaucucgagcucc

SEQ ID NO: 1722405 - RNA, 19 nt, Artificial Sequence
  Description of Artificial Sequence: Synthetic oligonucleotide
  Sense strand starting at position 3817 of SEQ ID NO: 1562103
gagcucgagauugaguuaa

SEQ ID NO: 1722406 - RNA, 19 nt, Artificial Sequence
  Description of Artificial Sequence: Synthetic oligonucleotide
  Antisense strand to SEQ ID NO: 1722405
uuaacucaaucucgagcuc

SEQ ID NO: 1722407 - RNA, 19 nt, Artificial Sequence
  Description of Artificial Sequence: Synthetic oligonucleotide
  Sense strand starting at position 3819 of SEQ ID NO: 1562103
gcucgagauugaguuaaua

SEQ ID NO: 1722408 - RNA, 19 nt, Artificial Sequence
  Description of Artificial Sequence: Synthetic oligonucleotide
  Antisense strand to SEQ ID NO: 1722407
uauuaacucaaucucgagc

SEQ ID NO: 1722409 - RNA, 19 nt, Artificial Sequence
  Description of Artificial Sequence: Synthetic oligonucleotide
  Sense strand starting at position 3838 of SEQ ID NO: 1562103
auugauaaugcuuauguga

SEQ ID NO: 1722410 - RNA, 19 nt, Artificial Sequence
  Description of Artificial Sequence: Synthetic oligonucleotide
  Antisense strand to SEQ ID NO: 1722409
ucacauaagcauuaucaau

SEQ ID NO: 1722411 - RNA, 19 nt, Artificial Sequence
  Description of Artificial Sequence: Synthetic oligonucleotide
  Sense strand starting at position 3841 of SEQ ID NO: 1562103
gauaaugcuuaugugauga

SEQ ID NO: 1722412 - RNA, 19 nt, Artificial Sequence
  Description of Artificial Sequence: Synthetic oligonucleotide
  Antisense strand to SEQ ID NO: 1722411
ucaucacauaagcauuauc

SEQ ID NO: 1722413 - RNA, 19 nt, Artificial Sequence
  Description of Artificial Sequence: Synthetic oligonucleotide
  Sense strand starting at position 3846 of SEQ ID NO: 1562103
ugcuuaugugaugaagcuu

SEQ ID NO: 1722414 - RNA, 19 nt, Artificial Sequence
  Description of Artificial Sequence: Synthetic oligonucleotide
  Antisense strand to SEQ ID NO: 1722413
aagcuucaucacauaagca

SEQ ID NO: 1722415 - RNA, 19 nt, Artificial Sequence
  Description of Artificial Sequence: Synthetic oligonucleotide
  Sense strand starting at position 93 of SEQ ID NO: 1562104
gaaagagaaugacagacuu

SEQ ID NO: 1722416 - RNA, 19 nt, Artificial Sequence
  Description of Artificial Sequence: Synthetic oligonucleotide
  Antisense strand to SEQ ID NO: 1722415
aagucugucauucucuuuc

SEQ ID NO: 1722417 - RNA, 19 nt, Artificial Sequence
  Description of Artificial Sequence: Synthetic oligonucleotide
  Sense strand starting at position 273 of SEQ ID NO: 1562104
ggauaaguuucagagguga

SEQ ID NO: 1722418 - RNA, 19 nt, Artificial Sequence
  Description of Artificial Sequence: Synthetic oligonucleotide
  Antisense strand to SEQ ID NO: 1722417
ucaccucugaaacuuaucc

SEQ ID NO: 1722419 - RNA, 19 nt, Artificial Sequence
  Description of Artificial Sequence: Synthetic oligonucleotide
  Sense strand starting at position 342 of SEQ ID NO: 1562104
gguugagaauggcuccaga

SEQ ID NO: 1722420 - RNA, 19 nt, Artificial Sequence
  Description of Artificial Sequence: Synthetic oligonucleotide
  Antisense strand to SEQ ID NO: 1722419
ucuggagccauucucaacc

SEQ ID NO: 1722421 - RNA, 19 nt, Artificial Sequence
  Description of Artificial Sequence: Synthetic oligonucleotide
  Sense strand starting at position 414 of SEQ ID NO: 1562104
aagagauuaugagaaagau

SEQ ID NO: 1722422 - RNA, 19 nt, Artificial Sequence
  Description of Artificial Sequence: Synthetic oligonucleotide
  Antisense strand to SEQ ID NO: 1722421
aucuuucucauaaucucuu

SEQ ID NO: 1722423 - RNA, 19 nt, Artificial Sequence
  Description of Artificial Sequence: Synthetic oligonucleotide
  Sense strand starting at position 1507 of SEQ ID NO: 1562104
cggccuuuccaucaccaga

SEQ ID NO: 1722424 - RNA, 19 nt, Artificial Sequence
  Description of Artificial Sequence: Synthetic oligonucleotide
  Antisense strand to SEQ ID NO: 1722423
ucuggugauggaaaggccg

SEQ ID NO: 1722425 - RNA, 19 nt, Artificial Sequence
  Description of Artificial Sequence: Synthetic oligonucleotide
  Sense strand starting at position 2081 of SEQ ID NO: 1562104
ugcgaaggguuccugaauc

SEQ ID NO: 1722426 - RNA, 19 nt, Artificial Sequence
  Description of Artificial Sequence: Synthetic oligonucleotide
  Antisense strand to SEQ ID NO: 1722425
gauucaggaacccuucgca

SEQ ID NO: 1722427 - RNA, 19 nt, Artificial Sequence
  Description of Artificial Sequence: Synthetic oligonucleotide
  Sense strand starting at position 2155 of SEQ ID NO: 1562104
aggccaucugcaggugaga

SEQ ID NO: 1722428 - RNA, 19 nt, Artificial Sequence
  Description of Artificial Sequence: Synthetic oligonucleotide
  Antisense strand to SEQ ID NO: 1722427
ucucaccugcagauggccu

SEQ ID NO: 1722429 - RNA, 19 nt, Artificial Sequence
  Description of Artificial Sequence: Synthetic oligonucleotide
  Sense strand starting at position 2198 of SEQ ID NO: 1562104
cuguuagggucuccuaaac

SEQ ID NO: 1722430 - RNA, 19 nt, Artificial Sequence
  Description of Artificial Sequence: Synthetic oligonucleotide
  Antisense strand to SEQ ID NO: 1722429
guuuaggagacccuaacag

SEQ ID NO: 1722431 - RNA, 19 nt, Artificial Sequence
  Description of Artificial Sequence: Synthetic oligonucleotide
  Sense strand starting at position 2270 of SEQ ID NO: 1562104
uccuguguuucggucaaug

SEQ ID NO: 1722432 - RNA, 19 nt, Artificial Sequence
  Description of Artificial Sequence: Synthetic oligonucleotide
  Antisense strand to SEQ ID NO: 1722431
cauugaccgaaacacagga

SEQ ID NO: 1722433 - RNA, 19 nt, Artificial Sequence
  Description of Artificial Sequence: Synthetic oligonucleotide
  Sense strand starting at position 2272 of SEQ ID NO: 1562104
cuguguuucggucaauggu

SEQ ID NO: 1722434 - RNA, 19 nt, Artificial Sequence
  Description of Artificial Sequence: Synthetic oligonucleotide
  Antisense strand to SEQ ID NO: 1722433
accauugaccgaaacacag

SEQ ID NO: 1722435 - RNA, 19 nt, Artificial Sequence
  Description of Artificial Sequence: Synthetic oligonucleotide
  Sense strand starting at position 2281 of SEQ ID NO: 1562104
ggucaauggugcgagggau

SEQ ID NO: 1722436 - RNA, 19 nt, Artificial Sequence
  Description of Artificial Sequence: Synthetic oligonucleotide
  Antisense strand to SEQ ID NO: 1722435
aucccucgcaccauugacc

SEQ ID NO: 1722437 - RNA, 19 nt, Artificial Sequence
  Description of Artificial Sequence: Synthetic oligonucleotide
  Sense strand starting at position 2293 of SEQ ID NO: 1562104
gagggauacgucgguggau

SEQ ID NO: 1722438 - RNA, 19 nt, Artificial Sequence
  Description of Artificial Sequence: Synthetic oligonucleotide
  Antisense strand to SEQ ID NO: 1722437
auccaccgacguaucccuc

SEQ ID NO: 1722439 - RNA, 19 nt, Artificial Sequence
  Description of Artificial Sequence: Synthetic oligonucleotide
  Sense strand starting at position 2295 of SEQ ID NO: 1562104
gggauacgucgguggauga

SEQ ID NO: 1722440 - RNA, 19 nt, Artificial Sequence
  Description of Artificial Sequence: Synthetic oligonucleotide
  Antisense strand to SEQ ID NO: 1722439
ucauccaccgacguauccc

SEQ ID NO: 1722441 - RNA, 19 nt, Artificial Sequence
  Description of Artificial Sequence: Synthetic oligonucleotide
  Sense strand starting at position 2330 of SEQ ID NO: 1562104
gcccucaaguggcuuaaau

SEQ ID NO: 1722442 - RNA, 19 nt, Artificial Sequence
  Description of Artificial Sequence: Synthetic oligonucleotide
  Antisense strand to SEQ ID NO: 1722441
auuuaagccacuugagggc

SEQ ID NO: 1722443 - RNA, 19 nt, Artificial Sequence
  Description of Artificial Sequence: Synthetic oligonucleotide
  Sense strand starting at position 2339 of SEQ ID NO: 1562104
uggcuuaaauucuaauaag

SEQ ID NO: 1722444 - RNA, 19 nt, Artificial Sequence
  Description of Artificial Sequence: Synthetic oligonucleotide
  Antisense strand to SEQ ID NO: 1722443
cuuauuagaauuuaagcca

SEQ ID NO: 1722445 - RNA, 19 nt, Artificial Sequence
  Description of Artificial Sequence: Synthetic oligonucleotide
  Sense strand starting at position 2342 of SEQ ID NO: 1562104
cuuaaauucuaauaaggag

SEQ ID NO: 1722446 - RNA, 19 nt, Artificial Sequence
  Description of Artificial Sequence: Synthetic oligonucleotide
  Antisense strand to SEQ ID NO: 1722445
cuccuuauuagaauuuaag

SEQ ID NO: 1722447 - RNA, 19 nt, Artificial Sequence
  Description of Artificial Sequence: Synthetic oligonucleotide
  Sense strand starting at position 2366 of SEQ ID NO: 1562104
gauuauaagugagcaaaug

SEQ ID NO: 1722448 - RNA, 19 nt, Artificial Sequence
  Description of Artificial Sequence: Synthetic oligonucleotide
  Antisense strand to SEQ ID NO: 1722447
cauuugcucacuuauaauc

SEQ ID NO: 1722449 - RNA, 19 nt, Artificial Sequence
  Description of Artificial Sequence: Synthetic oligonucleotide
  Sense strand starting at position 2382 of SEQ ID NO: 1562104
augcauagaugagaucauu

SEQ ID NO: 1722450 - RNA, 19 nt, Artificial Sequence
  Description of Artificial Sequence: Synthetic oligonucleotide
  Antisense strand to SEQ ID NO: 1722449
aaugaucucaucuaugcau

SEQ ID NO: 1722451 - RNA, 19 nt, Artificial Sequence
  Description of Artificial Sequence: Synthetic oligonucleotide
  Sense strand starting at position 2390 of SEQ ID NO: 1562104
augagaucauuugagauug

SEQ ID NO: 1722452 - RNA, 19 nt, Artificial Sequence
  Description of Artificial Sequence: Synthetic oligonucleotide
  Antisense strand to SEQ ID NO: 1722451
caaucucaaaugaucucau

SEQ ID NO: 1722453 - RNA, 19 nt, Artificial Sequence
  Description of Artificial Sequence: Synthetic oligonucleotide
  Sense strand starting at position 2392 of SEQ ID NO: 1562104
gagaucauuugagauugga

SEQ ID NO: 1722454 - RNA, 19 nt, Artificial Sequence
  Description of Artificial Sequence: Synthetic oligonucleotide
  Antisense strand to SEQ ID NO: 1722453
uccaaucucaaaugaucuc

SEQ ID NO: 1722455 - RNA, 19 nt, Artificial Sequence
  Description of Artificial Sequence: Synthetic oligonucleotide
  Sense strand starting at position 2482 of SEQ ID NO: 1562104
ccuccuagaagauguggua

SEQ ID NO: 1722456 - RNA, 19 nt, Artificial Sequence
  Description of Artificial Sequence: Synthetic oligonucleotide
  Antisense strand to SEQ ID NO: 1722455
uaccacaucuucuaggagg

SEQ ID NO: 1722457 - RNA, 19 nt, Artificial Sequence
  Description of Artificial Sequence: Synthetic oligonucleotide
  Sense strand starting at position 2510 of SEQ ID NO: 1562104
agaccucacugaugagaag

SEQ ID NO: 1722458 - RNA, 19 nt, Artificial Sequence
  Description of Artificial Sequence: Synthetic oligonucleotide
  Antisense strand to SEQ ID NO: 1722457
cuucucaucagugaggucu

SEQ ID NO: 1722459 - RNA, 19 nt, Artificial Sequence
  Description of Artificial Sequence: Synthetic oligonucleotide
  Sense strand starting at position 2528 of SEQ ID NO: 1562104
gggccagcuaugcaaagau

SEQ ID NO: 1722460 - RNA, 19 nt, Artificial Sequence
  Description of Artificial Sequence: Synthetic oligonucleotide
  Antisense strand to SEQ ID NO: 1722459
aucuuugcauagcuggccc

SEQ ID NO: 1722461 - RNA, 19 nt, Artificial Sequence
  Description of Artificial Sequence: Synthetic oligonucleotide
  Sense strand starting at position 2633 of SEQ ID NO: 1562104
ggccauugugucuggaaga

SEQ ID NO: 1722462 - RNA, 19 nt, Artificial Sequence
  Description of Artificial Sequence: Synthetic oligonucleotide
  Antisense strand to SEQ ID NO: 1722461
ucuuccagacacaauggcc

SEQ ID NO: 1722463 - RNA, 19 nt, Artificial Sequence
  Description of Artificial Sequence: Synthetic oligonucleotide
  Sense strand starting at position 2909 of SEQ ID NO: 1562104
gcaguugucugauuccagu

SEQ ID NO: 1722464 - RNA, 19 nt, Artificial Sequence
  Description of Artificial Sequence: Synthetic oligonucleotide
  Antisense strand to SEQ ID NO: 1722463
acuggaaucagacaacugc

SEQ ID NO: 1722465 - RNA, 19 nt, Artificial Sequence
  Description of Artificial Sequence: Synthetic oligonucleotide
  Sense strand starting at position 2969 of SEQ ID NO: 1562104
ggaugugacacgugaccau

SEQ ID NO: 1722466 - RNA, 19 nt, Artificial Sequence
  Description of Artificial Sequence: Synthetic oligonucleotide
  Antisense strand to SEQ ID NO: 1722465
auggucacgugucacaucc

SEQ ID NO: 1722467 - RNA, 19 nt, Artificial Sequence
  Description of Artificial Sequence: Synthetic oligonucleotide
  Sense strand starting at position 2973 of SEQ ID NO: 1562104
gugacacgugaccauaaga

SEQ ID NO: 1722468 - RNA, 19 nt, Artificial Sequence
  Description of Artificial Sequence: Synthetic oligonucleotide
  Antisense strand to SEQ ID NO: 1722467
ucuuauggucacgugucac

SEQ ID NO: 1722469 - RNA, 19 nt, Artificial Sequence
  Description of Artificial Sequence: Synthetic oligonucleotide
  Sense strand starting at position 3001 of SEQ ID NO: 1562104
aggagaaauccuggcaauu

SEQ ID NO: 1722470 - RNA, 19 nt, Artificial Sequence
  Description of Artificial Sequence: Synthetic oligonucleotide
  Antisense strand to SEQ ID NO: 1722469
aauugccaggauuucuccu

SEQ ID NO: 1722471 - RNA, 19 nt, Artificial Sequence
  Description of Artificial Sequence: Synthetic oligonucleotide
  Sense strand starting at position 3062 of SEQ ID NO: 1562104
gggaaacuauuuggaaaca

SEQ ID NO: 1722472 - RNA, 19 nt, Artificial Sequence
  Description of Artificial Sequence: Synthetic oligonucleotide
  Antisense strand to SEQ ID NO: 1722471
uguuuccaaauaguuuccc

SEQ ID NO: 1722473 - RNA, 19 nt, Artificial Sequence
  Description of Artificial Sequence: Synthetic oligonucleotide
  Sense strand starting at position 3074 of SEQ ID NO: 1562104
ggaaacaucuacugaaggu

SEQ ID NO: 1722474 - RNA, 19 nt, Artificial Sequence
  Description of Artificial Sequence: Synthetic oligonucleotide
  Antisense strand to SEQ ID NO: 1722473
accuucaguagauguuucc

SEQ ID NO: 1722475 - RNA, 19 nt, Artificial Sequence
  Description of Artificial Sequence: Synthetic oligonucleotide
  Sense strand starting at position 3147 of SEQ ID NO: 1562104
agaaaugacuacuugugau

SEQ ID NO: 1722476 - RNA, 19 nt, Artificial Sequence
  Description of Artificial Sequence: Synthetic oligonucleotide
  Antisense strand to SEQ ID NO: 1722475
aucacaaguagucauuucu

SEQ ID NO: 1722477 - RNA, 19 nt, Artificial Sequence
  Description of Artificial Sequence: Synthetic oligonucleotide
  Sense strand starting at position 3232 of SEQ ID NO: 1562104
accaaaugcuugucaacag

SEQ ID NO: 1722478 - RNA, 19 nt, Artificial Sequence
  Description of Artificial Sequence: Synthetic oligonucleotide
  Antisense strand to SEQ ID NO: 1722477
cuguugacaagcauuuggu

SEQ ID NO: 1722479 - RNA, 19 nt, Artificial Sequence
  Description of Artificial Sequence: Synthetic oligonucleotide
  Sense strand starting at position 3233 of SEQ ID NO: 1562104
ccaaaugcuugucaacagu

SEQ ID NO: 1722480 - RNA, 19 nt, Artificial Sequence
  Description of Artificial Sequence: Synthetic oligonucleotide
  Antisense strand to SEQ ID NO: 1722479
acuguugacaagcauuugg

SEQ ID NO: 1722481 - RNA, 19 nt, Artificial Sequence
  Description of Artificial Sequence: Synthetic oligonucleotide
  Sense strand starting at position 3257 of SEQ ID NO: 1562104
agagaaauaagucguagua

SEQ ID NO: 1722482 - RNA, 19 nt, Artificial Sequence
  Description of Artificial Sequence: Synthetic oligonucleotide
  Antisense strand to SEQ ID NO: 1722481
uacuacgacuuauuucucu

SEQ ID NO: 1722483 - RNA, 19 nt, Artificial Sequence
  Description of Artificial Sequence: Synthetic oligonucleotide
  Sense strand starting at position 3319 of SEQ ID NO: 1562104
ggaugaaucucacaaauag

SEQ ID NO: 1722484 - RNA, 19 nt, Artificial Sequence
  Description of Artificial Sequence: Synthetic oligonucleotide
  Antisense strand to SEQ ID NO: 1722483
cuauuugugagauucaucc

SEQ ID NO: 1722485 - RNA, 19 nt, Artificial Sequence
  Description of Artificial Sequence: Synthetic oligonucleotide
  Sense strand starting at position 3411 of SEQ ID NO: 1562104
gucaaagucuaucuaagcu

SEQ ID NO: 1722486 - RNA, 19 nt, Artificial Sequence
  Description of Artificial Sequence: Synthetic oligonucleotide
  Antisense strand to SEQ ID NO: 1722485
agcuuagauagacuuugac

SEQ ID NO: 1722487 - RNA, 19 nt, Artificial Sequence
  Description of Artificial Sequence: Synthetic oligonucleotide
  Sense strand starting at position 3420 of SEQ ID NO: 1562104
uaucuaagcuguuagaagu

SEQ ID NO: 1722488 - RNA, 19 nt, Artificial Sequence
  Description of Artificial Sequence: Synthetic oligonucleotide
  Antisense strand to SEQ ID NO: 1722487
acuucuaacagcuuagaua

SEQ ID NO: 1722489 - RNA, 19 nt, Artificial Sequence
  Description of Artificial Sequence: Synthetic oligonucleotide
  Sense strand starting at position 3426 of SEQ ID NO: 1562104
agcuguuagaaguaaugau

SEQ ID NO: 1722490 - RNA, 19 nt, Artificial Sequence
  Description of Artificial Sequence: Synthetic oligonucleotide
  Antisense strand to SEQ ID NO: 1722489
aucauuacuucuaacagcu

SEQ ID NO: 1722491 - RNA, 19 nt, Artificial Sequence
  Description of Artificial Sequence: Synthetic oligonucleotide
  Sense strand starting at position 3826 of SEQ ID NO: 1562104
uuugucucuugagacagaa

SEQ ID NO: 1722492 - RNA, 19 nt, Artificial Sequence
  Description of Artificial Sequence: Synthetic oligonucleotide
  Antisense strand to SEQ ID NO: 1722491
uucugucucaagagacaaa

SEQ ID NO: 1722493 - RNA, 19 nt, Artificial Sequence
  Description of Artificial Sequence: Synthetic oligonucleotide
  Sense strand starting at position 3863 of SEQ ID NO: 1562104
gccagaguacagugucaug

SEQ ID NO: 1722494 - RNA, 19 nt, Artificial Sequence
  Description of Artificial Sequence: Synthetic oligonucleotide
  Antisense strand to SEQ ID NO: 1722493
caugacacuguacucuggc

SEQ ID NO: 1722495 - RNA, 19 nt, Artificial Sequence
  Description of Artificial Sequence: Synthetic oligonucleotide
  Sense strand starting at position 29 of SEQ ID NO: 1562105
ggugaaaccuuggcagaga

SEQ ID NO: 1722496 - RNA, 19 nt, Artificial Sequence
  Description of Artificial Sequence: Synthetic oligonucleotide
  Antisense strand to SEQ ID NO: 1722495
ucucugccaagguuucacc

SEQ ID NO: 1722497 - RNA, 19 nt, Artificial Sequence
  Description of Artificial Sequence: Synthetic oligonucleotide
  Sense strand starting at position 30 of SEQ ID NO: 1562105
gugaaaccuuggcagagaa

SEQ ID NO: 1722498 - RNA, 19 nt, Artificial Sequence
  Description of Artificial Sequence: Synthetic oligonucleotide
  Antisense strand to SEQ ID NO: 1722497
uucucugccaagguuucac

SEQ ID NO: 1722499 - RNA, 19 nt, Artificial Sequence
  Description of Artificial Sequence: Synthetic oligonucleotide
  Sense strand starting at position 94 of SEQ ID NO: 1562105
gagagaugcucuccaucug

SEQ ID NO: 1722500 - RNA, 19 nt, Artificial Sequence
  Description of Artificial Sequence: Synthetic oligonucleotide
  Antisense strand to SEQ ID NO: 1722499
cagauggagagcaucucuc

SEQ ID NO: 1722501 - RNA, 19 nt, Artificial Sequence
  Description of Artificial Sequence: Synthetic oligonucleotide
  Sense strand starting at position 95 of SEQ ID NO: 1562105
agagaugcucuccaucuga

SEQ ID NO: 1722502 - RNA, 19 nt, Artificial Sequence
  Description of Artificial Sequence: Synthetic oligonucleotide
  Antisense strand to SEQ ID NO: 1722501
ucagauggagagcaucucu

SEQ ID NO: 1722503 - RNA, 19 nt, Artificial Sequence
  Description of Artificial Sequence: Synthetic oligonucleotide
  Sense strand starting at position 261 of SEQ ID NO: 1562105
aggugaucccagggucacu

SEQ ID NO: 1722504 - RNA, 19 nt, Artificial Sequence
  Description of Artificial Sequence: Synthetic oligonucleotide
  Antisense strand to SEQ ID NO: 1722503
agugacccugggaucaccu

SEQ ID NO: 1722505 - RNA, 19 nt, Artificial Sequence
  Description of Artificial Sequence: Synthetic oligonucleotide
  Sense strand starting at position 430 of SEQ ID NO: 1562105
gccacuuggcccugagauc

SEQ ID NO: 1722506 - RNA, 19 nt, Artificial Sequence
  Description of Artificial Sequence: Synthetic oligonucleotide
  Antisense strand to SEQ ID NO: 1722505
gaucucagggccaaguggc

SEQ ID NO: 1722507 - RNA, 19 nt, Artificial Sequence
  Description of Artificial Sequence: Synthetic oligonucleotide
  Sense strand starting at position 466 of SEQ ID NO: 1562105
cagagucaagguugccaau

SEQ ID NO: 1722508 - RNA, 19 nt, Artificial Sequence
  Description of Artificial Sequence: Synthetic oligonucleotide
  Antisense strand to SEQ ID NO: 1722507
auuggcaaccuugacucug

SEQ ID NO: 1722509 - RNA, 19 nt, Artificial Sequence
  Description of Artificial Sequence: Synthetic oligonucleotide
  Sense strand starting at position 476 of SEQ ID NO: 1562105
guugccaaucccuagaaga

SEQ ID NO: 1722510 - RNA, 19 nt, Artificial Sequence
  Description of Artificial Sequence: Synthetic oligonucleotide
  Antisense strand to SEQ ID NO: 1722509
ucuucuagggauuggcaac

SEQ ID NO: 1722511 - RNA, 19 nt, Artificial Sequence
  Description of Artificial Sequence: Synthetic oligonucleotide
  Sense strand starting at position 528 of SEQ ID NO: 1562105
gagggaucugcgggagucu

SEQ ID NO: 1722512 - RNA, 19 nt, Artificial Sequence
  Description of Artificial Sequence: Synthetic oligonucleotide
  Antisense strand to SEQ ID NO: 1722511
agacucccgcagaucccuc

SEQ ID NO: 1722513 - RNA, 19 nt, Artificial Sequence
  Description of Artificial Sequence: Synthetic oligonucleotide
  Sense strand starting at position 537 of SEQ ID NO: 1562105
gcgggagucuaggcucaua

SEQ ID NO: 1722514 - RNA, 19 nt, Artificial Sequence
  Description of Artificial Sequence: Synthetic oligonucleotide
  Antisense strand to SEQ ID NO: 1722513
uaugagccuagacucccgc

SEQ ID NO: 1722515 - RNA, 19 nt, Artificial Sequence
  Description of Artificial Sequence: Synthetic oligonucleotide
  Sense strand starting at position 670 of SEQ ID NO: 1562105
gcugacagccgugauggau

SEQ ID NO: 1722516 - RNA, 19 nt, Artificial Sequence
  Description of Artificial Sequence: Synthetic oligonucleotide
  Antisense strand to SEQ ID NO: 1722515
auccaucacggcugucagc

SEQ ID NO: 1722517 - RNA, 19 nt, Artificial Sequence
  Description of Artificial Sequence: Synthetic oligonucleotide
  Sense strand starting at position 797 of SEQ ID NO: 1562105
agcgaaaggacuuguccca

SEQ ID NO: 1722518 - RNA, 19 nt, Artificial Sequence
  Description of Artificial Sequence: Synthetic oligonucleotide
  Antisense strand to SEQ ID NO: 1722517
ugggacaaguccuuucgcu

SEQ ID NO: 1722519 - RNA, 19 nt, Artificial Sequence
  Description of Artificial Sequence: Synthetic oligonucleotide
  Sense strand starting at position 1019 of SEQ ID NO: 1562105
gggugaucuugcuucccgu

SEQ ID NO: 1722520 - RNA, 19 nt, Artificial Sequence
  Description of Artificial Sequence: Synthetic oligonucleotide
  Antisense strand to SEQ ID NO: 1722519
acgggaagcaagaucaccc

SEQ ID NO: 1722521 - RNA, 19 nt, Artificial Sequence
  Description of Artificial Sequence: Synthetic oligonucleotide
  Sense strand starting at position 1171 of SEQ ID NO: 1562105
gggacaaucugggugucuu

SEQ ID NO: 1722522 - RNA, 19 nt, Artificial Sequence
  Description of Artificial Sequence: Synthetic oligonucleotide
  Antisense strand to SEQ ID NO: 1722521
aagacacccagauuguccc

SEQ ID NO: 1722523 - RNA, 19 nt, Artificial Sequence
  Description of Artificial Sequence: Synthetic oligonucleotide
  Sense strand starting at position 1172 of SEQ ID NO: 1562105
ggacaaucugggugucuua

SEQ ID NO: 1722524 - RNA, 19 nt, Artificial Sequence
  Description of Artificial Sequence: Synthetic oligonucleotide
  Antisense strand to SEQ ID NO: 1722523
uaagacacccagauugucc

SEQ ID NO: 1722525 - RNA, 19 nt, Artificial Sequence
  Description of Artificial Sequence: Synthetic oligonucleotide
  Sense strand starting at position 1217 of SEQ ID NO: 1562105
gcugucauauggcuccaaa

SEQ ID NO: 1722526 - RNA, 19 nt, Artificial Sequence
  Description of Artificial Sequence: Synthetic oligonucleotide
  Antisense strand to SEQ ID NO: 1722525
uuuggagccauaugacagc

SEQ ID NO: 1722527 - RNA, 19 nt, Artificial Sequence
  Description of Artificial Sequence: Synthetic oligonucleotide
  Sense strand starting at position 1623 of SEQ ID NO: 1562105
ggagcauuccaauggagcu

SEQ ID NO: 1722528 - RNA, 19 nt, Artificial Sequence
  Description of Artificial Sequence: Synthetic oligonucleotide
  Antisense strand to SEQ ID NO: 1722527
agcuccauuggaaugcucc

SEQ ID NO: 1722529 - RNA, 19 nt, Artificial Sequence
  Description of Artificial Sequence: Synthetic oligonucleotide
  Sense strand starting at position 2564 of SEQ ID NO: 1562105
gcccauaauuaagcaaugu

SEQ ID NO: 1722530 - RNA, 19 nt, Artificial Sequence
  Description of Artificial Sequence: Synthetic oligonucleotide
  Antisense strand to SEQ ID NO: 1722529
acauugcuuaauuaugggc

SEQ ID NO: 1722531 - RNA, 19 nt, Artificial Sequence
  Description of Artificial Sequence: Synthetic oligonucleotide
  Sense strand starting at position 2568 of SEQ ID NO: 1562105
auaauuaagcaaugugcua

SEQ ID NO: 1722532 - RNA, 19 nt, Artificial Sequence
  Description of Artificial Sequence: Synthetic oligonucleotide
  Antisense strand to SEQ ID NO: 1722531
uagcacauugcuuaauuau

SEQ ID NO: 1722533 - RNA, 19 nt, Artificial Sequence
  Description of Artificial Sequence: Synthetic oligonucleotide
  Sense strand starting at position 2671 of SEQ ID NO: 1562105
cucucucauugugcuuaga

SEQ ID NO: 1722534 - RNA, 19 nt, Artificial Sequence
  Description of Artificial Sequence: Synthetic oligonucleotide
  Antisense strand to SEQ ID NO: 1722533
ucuaagcacaaugagagag

SEQ ID NO: 1722535 - RNA, 19 nt, Artificial Sequence
  Description of Artificial Sequence: Synthetic oligonucleotide
  Sense strand starting at position 2673 of SEQ ID NO: 1562105
cucucauugugcuuagacu

SEQ ID NO: 1722536 - RNA, 19 nt, Artificial Sequence
  Description of Artificial Sequence: Synthetic oligonucleotide
  Antisense strand to SEQ ID NO: 1722535
agucuaagcacaaugagag

SEQ ID NO: 1722537 - RNA, 19 nt, Artificial Sequence
  Description of Artificial Sequence: Synthetic oligonucleotide
  Sense strand starting at position 2680 of SEQ ID NO: 1562105
ugugcuuagacugacaaga

SEQ ID NO: 1722538 - RNA, 19 nt, Artificial Sequence
  Description of Artificial Sequence: Synthetic oligonucleotide
  Antisense strand to SEQ ID NO: 1722537
ucuugucagucuaagcaca

SEQ ID NO: 1722539 - RNA, 19 nt, Artificial Sequence
  Description of Artificial Sequence: Synthetic oligonucleotide
  Sense strand starting at position 2682 of SEQ ID NO: 1562105
ugcuuagacugacaagagu

SEQ ID NO: 1722540 - RNA, 19 nt, Artificial Sequence
  Description of Artificial Sequence: Synthetic oligonucleotide
  Antisense strand to SEQ ID NO: 1722539
acucuugucagucuaagca

SEQ ID NO: 1722541 - RNA, 19 nt, Artificial Sequence
  Description of Artificial Sequence: Synthetic oligonucleotide
  Sense strand starting at position 2758 of SEQ ID NO: 1562105
ugcggacugaucuagagau

SEQ ID NO: 1722542 - RNA, 19 nt, Artificial Sequence
  Description of Artificial Sequence: Synthetic oligonucleotide
  Antisense strand to SEQ ID NO: 1722541
aucucuagaucaguccgca

SEQ ID NO: 1722543 - RNA, 19 nt, Artificial Sequence
  Description of Artificial Sequence: Synthetic oligonucleotide
  Sense strand starting at position 2810 of SEQ ID NO: 1562105
gugaguuuccagggagcac

SEQ ID NO: 1722544 - RNA, 19 nt, Artificial Sequence
  Description of Artificial Sequence: Synthetic oligonucleotide
  Antisense strand to SEQ ID NO: 1722543
gugcucccuggaaacucac

SEQ ID NO: 1722545 - RNA, 19 nt, Artificial Sequence
  Description of Artificial Sequence: Synthetic oligonucleotide
  Sense strand starting at position 2811 of SEQ ID NO: 1562105
ugaguuuccagggagcacu

SEQ ID NO: 1722546 - RNA, 19 nt, Artificial Sequence
  Description of Artificial Sequence: Synthetic oligonucleotide
  Antisense strand to SEQ ID NO: 1722545
agugcucccuggaaacuca

SEQ ID NO: 1722547 - RNA, 19 nt, Artificial Sequence
  Description of Artificial Sequence: Synthetic oligonucleotide
  Sense strand starting at position 2918 of SEQ ID NO: 1562105
gccgccugucgguuugaga

SEQ ID NO: 1722548 - RNA, 19 nt, Artificial Sequence
  Description of Artificial Sequence: Synthetic oligonucleotide
  Antisense strand to SEQ ID NO: 1722547
ucucaaaccgacaggcggc

SEQ ID NO: 1722549 - RNA, 19 nt, Artificial Sequence
  Description of Artificial Sequence: Synthetic oligonucleotide
  Sense strand starting at position 3128 of SEQ ID NO: 1562105
aguggcaucagagguuuga

SEQ ID NO: 1722550 - RNA, 19 nt, Artificial Sequence
  Description of Artificial Sequence: Synthetic oligonucleotide
  Antisense strand to SEQ ID NO: 1722549
ucaaaccucugaugccacu

SEQ ID NO: 1722551 - RNA, 19 nt, Artificial Sequence
  Description of Artificial Sequence: Synthetic oligonucleotide
  Sense strand starting at position 3141 of SEQ ID NO: 1562105
guuugaaagcuuugagucu

SEQ ID NO: 1722552 - RNA, 19 nt, Artificial Sequence
  Description of Artificial Sequence: Synthetic oligonucleotide
  Antisense strand to SEQ ID NO: 1722551
agacucaaagcuuucaaac

SEQ ID NO: 1722553 - RNA, 19 nt, Artificial Sequence
  Description of Artificial Sequence: Synthetic oligonucleotide
  Sense strand starting at position 3148 of SEQ ID NO: 1562105
agcuuugagucucuagaag

SEQ ID NO: 1722554 - RNA, 19 nt, Artificial Sequence
  Description of Artificial Sequence: Synthetic oligonucleotide
  Antisense strand to SEQ ID NO: 1722553
cuucuagagacucaaagcu

SEQ ID NO: 1722555 - RNA, 19 nt, Artificial Sequence
  Description of Artificial Sequence: Synthetic oligonucleotide
  Sense strand starting at position 3254 of SEQ ID NO: 1562105
aaguucuucgguugggaaa

SEQ ID NO: 1722556 - RNA, 19 nt, Artificial Sequence
  Description of Artificial Sequence: Synthetic oligonucleotide
  Antisense strand to SEQ ID NO: 1722555
uuucccaaccgaagaacuu

SEQ ID NO: 1722557 - RNA, 19 nt, Artificial Sequence
  Description of Artificial Sequence: Synthetic oligonucleotide
  Sense strand starting at position 3398 of SEQ ID NO: 1562105
uuugcuuuacuccaguuua

SEQ ID NO: 1722558 - RNA, 19 nt, Artificial Sequence
  Description of Artificial Sequence: Synthetic oligonucleotide
  Antisense strand to SEQ ID NO: 1722557
uaaacuggaguaaagcaaa

SEQ ID NO: 1722559 - RNA, 19 nt, Artificial Sequence
  Description of Artificial Sequence: Synthetic oligonucleotide
  Sense strand starting at position 3448 of SEQ ID NO: 1562105
ucgucuugccuccauagaa

SEQ ID NO: 1722560 - RNA, 19 nt, Artificial Sequence
  Description of Artificial Sequence: Synthetic oligonucleotide
  Antisense strand to SEQ ID NO: 1722559
uucuauggaggcaagacga

SEQ ID NO: 1722561 - RNA, 19 nt, Artificial Sequence
  Description of Artificial Sequence: Synthetic oligonucleotide
  Sense strand starting at position 3496 of SEQ ID NO: 1562105
cucagcagccucugauuau

SEQ ID NO: 1722562 - RNA, 19 nt, Artificial Sequence
  Description of Artificial Sequence: Synthetic oligonucleotide
  Antisense strand to SEQ ID NO: 1722561
auaaucagaggcugcugag

SEQ ID NO: 1722563 - RNA, 19 nt, Artificial Sequence
  Description of Artificial Sequence: Synthetic oligonucleotide
  Sense strand starting at position 3506 of SEQ ID NO: 1562105
ucugauuauuagcuccuga

SEQ ID NO: 1722564 - RNA, 19 nt, Artificial Sequence
  Description of Artificial Sequence: Synthetic oligonucleotide
  Antisense strand to SEQ ID NO: 1722563
ucaggagcuaauaaucaga

SEQ ID NO: 1722565 - RNA, 19 nt, Artificial Sequence
  Description of Artificial Sequence: Synthetic oligonucleotide
  Sense strand starting at position 3566 of SEQ ID NO: 1562105
ugagaugugcuuuauuccu

SEQ ID NO: 1722566 - RNA, 19 nt, Artificial Sequence
  Description of Artificial Sequence: Synthetic oligonucleotide
  Antisense strand to SEQ ID NO: 1722565
aggaauaaagcacaucuca

SEQ ID NO: 1722567 - RNA, 19 nt, Artificial Sequence
  Description of Artificial Sequence: Synthetic oligonucleotide
  Sense strand starting at position 3623 of SEQ ID NO: 1562105
ggacucuuggcuugcaacu

SEQ ID NO: 1722568 - RNA, 19 nt, Artificial Sequence
  Description of Artificial Sequence: Synthetic oligonucleotide
  Antisense strand to SEQ ID NO: 1722567
aguugcaagccaagagucc

SEQ ID NO: 1722569 - RNA, 19 nt, Artificial Sequence
  Description of Artificial Sequence: Synthetic oligonucleotide
  Sense strand starting at position 3749 of SEQ ID NO: 1562105
ggcucagcuuuacuuguau

SEQ ID NO: 1722570 - RNA, 19 nt, Artificial Sequence
  Description of Artificial Sequence: Synthetic oligonucleotide
  Antisense strand to SEQ ID NO: 1722569
auacaaguaaagcugagcc

SEQ ID NO: 1722571 - RNA, 19 nt, Artificial Sequence
  Description of Artificial Sequence: Synthetic oligonucleotide
  Sense strand starting at position 3771 of SEQ ID NO: 1562105
uacaauuugucaguggcuu

SEQ ID NO: 1722572 - RNA, 19 nt, Artificial Sequence
  Description of Artificial Sequence: Synthetic oligonucleotide
  Antisense strand to SEQ ID NO: 1722571
aagccacugacaaauugua

SEQ ID NO: 1722573 - RNA, 19 nt, Artificial Sequence
  Description of Artificial Sequence: Synthetic oligonucleotide
  Sense strand starting at position 3980 of SEQ ID NO: 1562105
gugagaugaguuugaauug

SEQ ID NO: 1722574 - RNA, 19 nt, Artificial Sequence
  Description of Artificial Sequence: Synthetic oligonucleotide
  Antisense strand to SEQ ID NO: 1722573
caauucaaacucaucucac

SEQ ID NO: 1722575 - RNA, 19 nt, Artificial Sequence
  Description of Artificial Sequence: Synthetic oligonucleotide
  Sense strand starting at position 11 of SEQ ID NO: 1562106
uuaaauguuccaggaaugu

SEQ ID NO: 1722576 - RNA, 19 nt, Artificial Sequence
  Description of Artificial Sequence: Synthetic oligonucleotide
  Antisense strand to SEQ ID NO: 1722575
acauuccuggaacauuuaa

SEQ ID NO: 1722577 - RNA, 19 nt, Artificial Sequence
  Description of Artificial Sequence: Synthetic oligonucleotide
  Sense strand starting at position 50 of SEQ ID NO: 1562106
ucgcaucucggugucauau

SEQ ID NO: 1722578 - RNA, 19 nt, Artificial Sequence
  Description of Artificial Sequence: Synthetic oligonucleotide
  Antisense strand to SEQ ID NO: 1722577
auaugacaccgagaugcga

SEQ ID NO: 1722579 - RNA, 19 nt, Artificial Sequence
  Description of Artificial Sequence: Synthetic oligonucleotide
  Sense strand starting at position 126 of SEQ ID NO: 1562106
cucugugucucauuugcuu

SEQ ID NO: 1722580 - RNA, 19 nt, Artificial Sequence
  Description of Artificial Sequence: Synthetic oligonucleotide
  Antisense strand to SEQ ID NO: 1722579
aagcaaaugagacacagag

SEQ ID NO: 1722581 - RNA, 19 nt, Artificial Sequence
  Description of Artificial Sequence: Synthetic oligonucleotide
  Sense strand starting at position 134 of SEQ ID NO: 1562106
cucauuugcuucuucugua

SEQ ID NO: 1722582 - RNA, 19 nt, Artificial Sequence
  Description of Artificial Sequence: Synthetic oligonucleotide
  Antisense strand to SEQ ID NO: 1722581
uacagaagaagcaaaugag

SEQ ID NO: 1722583 - RNA, 19 nt, Artificial Sequence
  Description of Artificial Sequence: Synthetic oligonucleotide
  Sense strand starting at position 156 of SEQ ID NO: 1562106
uggguuaaugcauggaaag

SEQ ID NO: 1722584 - RNA, 19 nt, Artificial Sequence
  Description of Artificial Sequence: Synthetic oligonucleotide
  Antisense strand to SEQ ID NO: 1722583
cuuuccaugcauuaaccca

SEQ ID NO: 1722585 - RNA, 19 nt, Artificial Sequence
  Description of Artificial Sequence: Synthetic oligonucleotide
  Sense strand starting at position 157 of SEQ ID NO: 1562106
ggguuaaugcauggaaaga

SEQ ID NO: 1722586 - RNA, 19 nt, Artificial Sequence
  Description of Artificial Sequence: Synthetic oligonucleotide
  Antisense strand to SEQ ID NO: 1722585
ucuuuccaugcauuaaccc

SEQ ID NO: 1722587 - RNA, 19 nt, Artificial Sequence
  Description of Artificial Sequence: Synthetic oligonucleotide
  Sense strand starting at position 397 of SEQ ID NO: 1562106
cgucaagggaucugaaagu

SEQ ID NO: 1722588 - RNA, 19 nt, Artificial Sequence
  Description of Artificial Sequence: Synthetic oligonucleotide
  Antisense strand to SEQ ID NO: 1722587
acuuucagaucccuugacg

SEQ ID NO: 1722589 - RNA, 19 nt, Artificial Sequence
  Description of Artificial Sequence: Synthetic oligonucleotide
  Sense strand starting at position 432 of SEQ ID NO: 1562106
cccuuugugagaggaacua

SEQ ID NO: 1722590 - RNA, 19 nt, Artificial Sequence
  Description of Artificial Sequence: Synthetic oligonucleotide
  Antisense strand to SEQ ID NO: 1722589
uaguuccucucacaaaggg

SEQ ID NO: 1722591 - RNA, 19 nt, Artificial Sequence
  Description of Artificial Sequence: Synthetic oligonucleotide
  Sense strand starting at position 657 of SEQ ID NO: 1562106
gccacugauaccggagaua

SEQ ID NO: 1722592 - RNA, 19 nt, Artificial Sequence
  Description of Artificial Sequence: Synthetic oligonucleotide
  Antisense strand to SEQ ID NO: 1722591
uaucuccgguaucaguggc

SEQ ID NO: 1722593 - RNA, 19 nt, Artificial Sequence
  Description of Artificial Sequence: Synthetic oligonucleotide
  Sense strand starting at position 964 of SEQ ID NO: 1562106
agagaacucgccugcauaa

SEQ ID NO: 1722594 - RNA, 19 nt, Artificial Sequence
  Description of Artificial Sequence: Synthetic oligonucleotide
  Antisense strand to SEQ ID NO: 1722593
uuaugcaggcgaguucucu

SEQ ID NO: 1722595 - RNA, 19 nt, Artificial Sequence
  Description of Artificial Sequence: Synthetic oligonucleotide
  Sense strand starting at position 966 of SEQ ID NO: 1562106
agaacucgccugcauaaua

SEQ ID NO: 1722596 - RNA, 19 nt, Artificial Sequence
  Description of Artificial Sequence: Synthetic oligonucleotide
  Antisense strand to SEQ ID NO: 1722595
uauuaugcaggcgaguucu

SEQ ID NO: 1722597 - RNA, 19 nt, Artificial Sequence
  Description of Artificial Sequence: Synthetic oligonucleotide
  Sense strand starting at position 1164 of SEQ ID NO: 1562106
agcgcuauucucuuucuuu

SEQ ID NO: 1722598 - RNA, 19 nt, Artificial Sequence
  Description of Artificial Sequence: Synthetic oligonucleotide
  Antisense strand to SEQ ID NO: 1722597
aaagaaagagaauagcgcu

SEQ ID NO: 1722599 - RNA, 19 nt, Artificial Sequence
  Description of Artificial Sequence: Synthetic oligonucleotide
  Sense strand starting at position 1237 of SEQ ID NO: 1562106
cuccgugaccaugagacaa

SEQ ID NO: 1722600 - RNA, 19 nt, Artificial Sequence
  Description of Artificial Sequence: Synthetic oligonucleotide
  Antisense strand to SEQ ID NO: 1722599
uugucucauggucacggag

SEQ ID NO: 1722601 - RNA, 19 nt, Artificial Sequence
  Description of Artificial Sequence: Synthetic oligonucleotide
  Sense strand starting at position 1672 of SEQ ID NO: 1562106
acagccugccugggauaua

SEQ ID NO: 1722602 - RNA, 19 nt, Artificial Sequence
  Description of Artificial Sequence: Synthetic oligonucleotide
  Antisense strand to SEQ ID NO: 1722601
uauaucccaggcaggcugu

SEQ ID NO: 1722603 - RNA, 19 nt, Artificial Sequence
  Description of Artificial Sequence: Synthetic oligonucleotide
  Sense strand starting at position 1811 of SEQ ID NO: 1562106
cggcgcauagugaguacua

SEQ ID NO: 1722604 - RNA, 19 nt, Artificial Sequence
  Description of Artificial Sequence: Synthetic oligonucleotide
  Antisense strand to SEQ ID NO: 1722603
uaguacucacuaugcgccg

SEQ ID NO: 1722605 - RNA, 19 nt, Artificial Sequence
  Description of Artificial Sequence: Synthetic oligonucleotide
  Sense strand starting at position 2245 of SEQ ID NO: 1562106
agguacuagccuuauagua

SEQ ID NO: 1722606 - RNA, 19 nt, Artificial Sequence
  Description of Artificial Sequence: Synthetic oligonucleotide
  Antisense strand to SEQ ID NO: 1722605
uacuauaaggcuaguaccu

SEQ ID NO: 1722607 - RNA, 19 nt, Artificial Sequence
  Description of Artificial Sequence: Synthetic oligonucleotide
  Sense strand starting at position 2364 of SEQ ID NO: 1562106
guuauacgccaauacuuau

SEQ ID NO: 1722608 - RNA, 19 nt, Artificial Sequence
  Description of Artificial Sequence: Synthetic oligonucleotide
  Antisense strand to SEQ ID NO: 1722607
auaaguauuggcguauaac

SEQ ID NO: 1722609 - RNA, 19 nt, Artificial Sequence
  Description of Artificial Sequence: Synthetic oligonucleotide
  Sense strand starting at position 2474 of SEQ ID NO: 1562106
cugugacgucuuggacaag

SEQ ID NO: 1722610 - RNA, 19 nt, Artificial Sequence
  Description of Artificial Sequence: Synthetic oligonucleotide
  Antisense strand to SEQ ID NO: 1722609
cuuguccaagacgucacag

SEQ ID NO: 1722611 - RNA, 19 nt, Artificial Sequence
  Description of Artificial Sequence: Synthetic oligonucleotide
  Sense strand starting at position 2599 of SEQ ID NO: 1562106
gcaguaagcaggcaauuau

SEQ ID NO: 1722612 - RNA, 19 nt, Artificial Sequence
  Description of Artificial Sequence: Synthetic oligonucleotide
  Antisense strand to SEQ ID NO: 1722611
auaauugccugcuuacugc

SEQ ID NO: 1722613 - RNA, 19 nt, Artificial Sequence
  Description of Artificial Sequence: Synthetic oligonucleotide
  Sense strand starting at position 2710 of SEQ ID NO: 1562106
gcugacuguggugaaugaa

SEQ ID NO: 1722614 - RNA, 19 nt, Artificial Sequence
  Description of Artificial Sequence: Synthetic oligonucleotide
  Antisense strand to SEQ ID NO: 1722613
uucauucaccacagucagc

SEQ ID NO: 1722615 - RNA, 19 nt, Artificial Sequence
  Description of Artificial Sequence: Synthetic oligonucleotide
  Sense strand starting at position 2713 of SEQ ID NO: 1562106
gacuguggugaaugaaaca

SEQ ID NO: 1722616 - RNA, 19 nt, Artificial Sequence
  Description of Artificial Sequence: Synthetic oligonucleotide
  Antisense strand to SEQ ID NO: 1722615
uguuucauucaccacaguc

SEQ ID NO: 1722617 - RNA, 19 nt, Artificial Sequence
  Description of Artificial Sequence: Synthetic oligonucleotide
  Sense strand starting at position 2784 of SEQ ID NO: 1562106
cugacuguaucaucucuga

SEQ ID NO: 1722618 - RNA, 19 nt, Artificial Sequence
  Description of Artificial Sequence: Synthetic oligonucleotide
  Antisense strand to SEQ ID NO: 1722617
ucagagaugauacagucag

SEQ ID NO: 1722619 - RNA, 19 nt, Artificial Sequence
  Description of Artificial Sequence: Synthetic oligonucleotide
  Sense strand starting at position 2808 of SEQ ID NO: 1562106
auggaaugaagcuggcaau

SEQ ID NO: 1722620 - RNA, 19 nt, Artificial Sequence
  Description of Artificial Sequence: Synthetic oligonucleotide
  Antisense strand to SEQ ID NO: 1722619
auugccagcuucauuccau

SEQ ID NO: 1722621 - RNA, 19 nt, Artificial Sequence
  Description of Artificial Sequence: Synthetic oligonucleotide
  Sense strand starting at position 2809 of SEQ ID NO: 1562106
uggaaugaagcuggcaaua

SEQ ID NO: 1722622 - RNA, 19 nt, Artificial Sequence
  Description of Artificial Sequence: Synthetic oligonucleotide
  Antisense strand to SEQ ID NO: 1722621
uauugccagcuucauucca

SEQ ID NO: 1722623 - RNA, 19 nt, Artificial Sequence
  Description of Artificial Sequence: Synthetic oligonucleotide
  Sense strand starting at position 2858 of SEQ ID NO: 1562106
uguggaaauuaacagauuu

SEQ ID NO: 1722624 - RNA, 19 nt, Artificial Sequence
  Description of Artificial Sequence: Synthetic oligonucleotide
  Antisense strand to SEQ ID NO: 1722623
aaaucuguuaauuuccaca

SEQ ID NO: 1722625 - RNA, 19 nt, Artificial Sequence
  Description of Artificial Sequence: Synthetic oligonucleotide
  Sense strand starting at position 3009 of SEQ ID NO: 1562106
gcugcaaauguccauauua

SEQ ID NO: 1722626 - RNA, 19 nt, Artificial Sequence
  Description of Artificial Sequence: Synthetic oligonucleotide
  Antisense strand to SEQ ID NO: 1722625
uaauauggacauuugcagc

SEQ ID NO: 1722627 - RNA, 19 nt, Artificial Sequence
  Description of Artificial Sequence: Synthetic oligonucleotide
  Sense strand starting at position 3011 of SEQ ID NO: 1562106
ugcaaauguccauauuaag

SEQ ID NO: 1722628 - RNA, 19 nt, Artificial Sequence
  Description of Artificial Sequence: Synthetic oligonucleotide
  Antisense strand to SEQ ID NO: 1722627
cuuaauauggacauuugca

SEQ ID NO: 1722629 - RNA, 19 nt, Artificial Sequence
  Description of Artificial Sequence: Synthetic oligonucleotide
  Sense strand starting at position 3048 of SEQ ID NO: 1562106
gugaggugauggguguuaa

SEQ ID NO: 1722630 - RNA, 19 nt, Artificial Sequence
  Description of Artificial Sequence: Synthetic oligonucleotide
  Antisense strand to SEQ ID NO: 1722629
uuaacacccaucaccucac

SEQ ID NO: 1722631 - RNA, 19 nt, Artificial Sequence
  Description of Artificial Sequence: Synthetic oligonucleotide
  Sense strand starting at position 3049 of SEQ ID NO: 1562106
ugaggugauggguguuaau

SEQ ID NO: 1722632 - RNA, 19 nt, Artificial Sequence
  Description of Artificial Sequence: Synthetic oligonucleotide
  Antisense strand to SEQ ID NO: 1722631
auuaacacccaucaccuca

SEQ ID NO: 1722633 - RNA, 19 nt, Artificial Sequence
  Description of Artificial Sequence: Synthetic oligonucleotide
  Sense strand starting at position 3266 of SEQ ID NO: 1562106
uauguuuguugauuggagu

SEQ ID NO: 1722634 - RNA, 19 nt, Artificial Sequence
  Description of Artificial Sequence: Synthetic oligonucleotide
  Antisense strand to SEQ ID NO: 1722633
acuccaaucaacaaacaua

SEQ ID NO: 1722635 - RNA, 19 nt, Artificial Sequence
  Description of Artificial Sequence: Synthetic oligonucleotide
  Sense strand starting at position 3518 of SEQ ID NO: 1562106
uuuguuuagcgguauaaac

SEQ ID NO: 1722636 - RNA, 19 nt, Artificial Sequence
  Description of Artificial Sequence: Synthetic oligonucleotide
  Antisense strand to SEQ ID NO: 1722635
guuuauaccgcuaaacaaa

SEQ ID NO: 1722637 - RNA, 19 nt, Artificial Sequence
  Description of Artificial Sequence: Synthetic oligonucleotide
  Sense strand starting at position 3520 of SEQ ID NO: 1562106
uguuuagcgguauaaacuu

SEQ ID NO: 1722638 - RNA, 19 nt, Artificial Sequence
  Description of Artificial Sequence: Synthetic oligonucleotide
  Antisense strand to SEQ ID NO: 1722637
aaguuuauaccgcuaaaca

SEQ ID NO: 1722639 - RNA, 19 nt, Artificial Sequence
  Description of Artificial Sequence: Synthetic oligonucleotide
  Sense strand starting at position 3631 of SEQ ID NO: 1562106
gccugaaagcuguaagucu

SEQ ID NO: 1722640 - RNA, 19 nt, Artificial Sequence
  Description of Artificial Sequence: Synthetic oligonucleotide
  Antisense strand to SEQ ID NO: 1722639
agacuuacagcuuucaggc

SEQ ID NO: 1722641 - RNA, 19 nt, Artificial Sequence
  Description of Artificial Sequence: Synthetic oligonucleotide
  Sense strand starting at position 3667 of SEQ ID NO: 1562106
auuggaguuaagcagacuu

SEQ ID NO: 1722642 - RNA, 19 nt, Artificial Sequence
  Description of Artificial Sequence: Synthetic oligonucleotide
  Antisense strand to SEQ ID NO: 1722641
aagucugcuuaacuccaau

SEQ ID NO: 1722643 - RNA, 19 nt, Artificial Sequence
  Description of Artificial Sequence: Synthetic oligonucleotide
  Sense strand starting at position 3738 of SEQ ID NO: 1562106
agcacauauccuuggucua

SEQ ID NO: 1722644 - RNA, 19 nt, Artificial Sequence
  Description of Artificial Sequence: Synthetic oligonucleotide
  Antisense strand to SEQ ID NO: 1722643
uagaccaaggauaugugcu

SEQ ID NO: 1722645 - RNA, 19 nt, Artificial Sequence
  Description of Artificial Sequence: Synthetic oligonucleotide
  Sense strand starting at position 3741 of SEQ ID NO: 1562106
acauauccuuggucuauau

SEQ ID NO: 1722646 - RNA, 19 nt, Artificial Sequence
  Description of Artificial Sequence: Synthetic oligonucleotide
  Antisense strand to SEQ ID NO: 1722645
auauagaccaaggauaugu

SEQ ID NO: 1722647 - RNA, 19 nt, Artificial Sequence
  Description of Artificial Sequence: Synthetic oligonucleotide
  Sense strand starting at position 3743 of SEQ ID NO: 1562106
auauccuuggucuauauau

SEQ ID NO: 1722648 - RNA, 19 nt, Artificial Sequence
  Description of Artificial Sequence: Synthetic oligonucleotide
  Antisense strand to SEQ ID NO: 1722647
auauauagaccaaggauau

SEQ ID NO: 1722649 - RNA, 19 nt, Artificial Sequence
  Description of Artificial Sequence: Synthetic oligonucleotide
  Sense strand starting at position 3756 of SEQ ID NO: 1562106
auauauacacgugaaaguu

SEQ ID NO: 1722650 - RNA, 19 nt, Artificial Sequence
  Description of Artificial Sequence: Synthetic oligonucleotide
  Antisense strand to SEQ ID NO: 1722649
aacuuucacguguauauau

SEQ ID NO: 1722651 - RNA, 19 nt, Artificial Sequence
  Description of Artificial Sequence: Synthetic oligonucleotide
  Sense strand starting at position 3835 of SEQ ID NO: 1562106
guuguaucccauuaaacug

SEQ ID NO: 1722652 - RNA, 19 nt, Artificial Sequence
  Description of Artificial Sequence: Synthetic oligonucleotide
  Antisense strand to SEQ ID NO: 1722651
caguuuaaugggauacaac

SEQ ID NO: 1722653 - RNA, 19 nt, Artificial Sequence
  Description of Artificial Sequence: Synthetic oligonucleotide
  Sense strand starting at position 3974 of SEQ ID NO: 1562106
agagaauaauguucucauu

SEQ ID NO: 1722654 - RNA, 19 nt, Artificial Sequence
  Description of Artificial Sequence: Synthetic oligonucleotide
  Antisense strand to SEQ ID NO: 1722653
aaugagaacauuauucucu

SEQ ID NO: 1722655 - RNA, 19 nt, Artificial Sequence
  Description of Artificial Sequence: Synthetic oligonucleotide
  Sense strand starting at position 187 of SEQ ID NO: 1562107
cgguguaaucgcuccacuu

SEQ ID NO: 1722656 - RNA, 19 nt, Artificial Sequence
  Description of Artificial Sequence: Synthetic oligonucleotide
  Antisense strand to SEQ ID NO: 1722655
aaguggagcgauuacaccg

SEQ ID NO: 1722657 - RNA, 19 nt, Artificial Sequence
  Description of Artificial Sequence: Synthetic oligonucleotide
  Sense strand starting at position 356 of SEQ ID NO: 1562107
agucuaauagcuuagauaa

SEQ ID NO: 1722658 - RNA, 19 nt, Artificial Sequence
  Description of Artificial Sequence: Synthetic oligonucleotide
  Antisense strand to SEQ ID NO: 1722657
uuaucuaagcuauuagacu

SEQ ID NO: 1722659 - RNA, 19 nt, Artificial Sequence
  Description of Artificial Sequence: Synthetic oligonucleotide
  Sense strand starting at position 463 of SEQ ID NO: 1562107
cuccuucuuccaggagaag

SEQ ID NO: 1722660 - RNA, 19 nt, Artificial Sequence
  Description of Artificial Sequence: Synthetic oligonucleotide
  Antisense strand to SEQ ID NO: 1722659
cuucuccuggaagaaggag

SEQ ID NO: 1722661 - RNA, 19 nt, Artificial Sequence
  Description of Artificial Sequence: Synthetic oligonucleotide
  Sense strand starting at position 507 of SEQ ID NO: 1562107
uggguaaugcaccacuaaa

SEQ ID NO: 1722662 - RNA, 19 nt, Artificial Sequence
  Description of Artificial Sequence: Synthetic oligonucleotide
  Antisense strand to SEQ ID NO: 1722661
uuuaguggugcauuaccca

SEQ ID NO: 1722663 - RNA, 19 nt, Artificial Sequence
  Description of Artificial Sequence: Synthetic oligonucleotide
  Sense strand starting at position 585 of SEQ ID NO: 1562107
aagcaacuuccuggaggua

SEQ ID NO: 1722664 - RNA, 19 nt, Artificial Sequence
  Description of Artificial Sequence: Synthetic oligonucleotide
  Antisense strand to SEQ ID NO: 1722663
uaccuccaggaaguugcuu

SEQ ID NO: 1722665 - RNA, 19 nt, Artificial Sequence
  Description of Artificial Sequence: Synthetic oligonucleotide
  Sense strand starting at position 588 of SEQ ID NO: 1562107
caacuuccuggagguagaa

SEQ ID NO: 1722666 - RNA, 19 nt, Artificial Sequence
  Description of Artificial Sequence: Synthetic oligonucleotide
  Antisense strand to SEQ ID NO: 1722665
uucuaccuccaggaaguug

SEQ ID NO: 1722667 - RNA, 19 nt, Artificial Sequence
  Description of Artificial Sequence: Synthetic oligonucleotide
  Sense strand starting at position 601 of SEQ ID NO: 1562107
guagaagccuuaucuuaca

SEQ ID NO: 1722668 - RNA, 19 nt, Artificial Sequence
  Description of Artificial Sequence: Synthetic oligonucleotide
  Antisense strand to SEQ ID NO: 1722667
uguaagauaaggcuucuac

SEQ ID NO: 1722669 - RNA, 19 nt, Artificial Sequence
  Description of Artificial Sequence: Synthetic oligonucleotide
  Sense strand starting at position 938 of SEQ ID NO: 1562107
cugagacgcguugaaauga

SEQ ID NO: 1722670 - RNA, 19 nt, Artificial Sequence
  Description of Artificial Sequence: Synthetic oligonucleotide
  Antisense strand to SEQ ID NO: 1722669
ucauuucaacgcgucucag

SEQ ID NO: 1722671 - RNA, 19 nt, Artificial Sequence
  Description of Artificial Sequence: Synthetic oligonucleotide
  Sense strand starting at position 943 of SEQ ID NO: 1562107
acgcguugaaaugauuaaa

SEQ ID NO: 1722672 - RNA, 19 nt, Artificial Sequence
  Description of Artificial Sequence: Synthetic oligonucleotide
  Antisense strand to SEQ ID NO: 1722671
uuuaaucauuucaacgcgu

SEQ ID NO: 1722673 - RNA, 19 nt, Artificial Sequence
  Description of Artificial Sequence: Synthetic oligonucleotide
  Sense strand starting at position 997 of SEQ ID NO: 1562107
guaagcacucaugaaucuu

SEQ ID NO: 1722674 - RNA, 19 nt, Artificial Sequence
  Description of Artificial Sequence: Synthetic oligonucleotide
  Antisense strand to SEQ ID NO: 1722673
aagauucaugagugcuuac

SEQ ID NO: 1722675 - RNA, 19 nt, Artificial Sequence
  Description of Artificial Sequence: Synthetic oligonucleotide
  Sense strand starting at position 1060 of SEQ ID NO: 1562107
acugcuuauugggcauuua

SEQ ID NO: 1722676 - RNA, 19 nt, Artificial Sequence
  Description of Artificial Sequence: Synthetic oligonucleotide
  Antisense strand to SEQ ID NO: 1722675
uaaaugcccaauaagcagu

SEQ ID NO: 1722677 - RNA, 19 nt, Artificial Sequence
  Description of Artificial Sequence: Synthetic oligonucleotide
  Sense strand starting at position 1083 of SEQ ID NO: 1562107
guacaagguuuaguuauaa

SEQ ID NO: 1722678 - RNA, 19 nt, Artificial Sequence
  Description of Artificial Sequence: Synthetic oligonucleotide
  Antisense strand to SEQ ID NO: 1722677
uuauaacuaaaccuuguac

SEQ ID NO: 1722679 - RNA, 19 nt, Artificial Sequence
  Description of Artificial Sequence: Synthetic oligonucleotide
  Sense strand starting at position 1144 of SEQ ID NO: 1562107
augggugggcacuaucauu

SEQ ID NO: 1722680 - RNA, 19 nt, Artificial Sequence
  Description of Artificial Sequence: Synthetic oligonucleotide
  Antisense strand to SEQ ID NO: 1722679
aaugauagugcccacccau

SEQ ID NO: 1722681 - RNA, 19 nt, Artificial Sequence
  Description of Artificial Sequence: Synthetic oligonucleotide
  Sense strand starting at position 1202 of SEQ ID NO: 1562107
gguuaagugacuugcacca

SEQ ID NO: 1722682 - RNA, 19 nt, Artificial Sequence
  Description of Artificial Sequence: Synthetic oligonucleotide
  Antisense strand to SEQ ID NO: 1722681
uggugcaagucacuuaacc

SEQ ID NO: 1722683 - RNA, 19 nt, Artificial Sequence
  Description of Artificial Sequence: Synthetic oligonucleotide
  Sense strand starting at position 1209 of SEQ ID NO: 1562107
ugacuugcaccaugucaca

SEQ ID NO: 1722684 - RNA, 19 nt, Artificial Sequence
  Description of Artificial Sequence: Synthetic oligonucleotide
  Antisense strand to SEQ ID NO: 1722683
ugugacauggugcaaguca

SEQ ID NO: 1722685 - RNA, 19 nt, Artificial Sequence
  Description of Artificial Sequence: Synthetic oligonucleotide
  Sense strand starting at position 1239 of SEQ ID NO: 1562107
ccaguaaguguucauugug

SEQ ID NO: 1722686 - RNA, 19 nt, Artificial Sequence
  Description of Artificial Sequence: Synthetic oligonucleotide
  Antisense strand to SEQ ID NO: 1722685
cacaaugaacacuuacugg

SEQ ID NO: 1722687 - RNA, 19 nt, Artificial Sequence
  Description of Artificial Sequence: Synthetic oligonucleotide
  Sense strand starting at position 1254 of SEQ ID NO: 1562107
ugugacugucgcgugaaau

SEQ ID NO: 1722688 - RNA, 19 nt, Artificial Sequence
  Description of Artificial Sequence: Synthetic oligonucleotide
  Antisense strand to SEQ ID NO: 1722687
auuucacgcgacagucaca

SEQ ID NO: 1722689 - RNA, 19 nt, Artificial Sequence
  Description of Artificial Sequence: Synthetic oligonucleotide
  Sense strand starting at position 1257 of SEQ ID NO: 1562107
gacugucgcgugaaaugug

SEQ ID NO: 1722690 - RNA, 19 nt, Artificial Sequence
  Description of Artificial Sequence: Synthetic oligonucleotide
  Antisense strand to SEQ ID NO: 1722689
cacauuucacgcgacaguc

SEQ ID NO: 1722691 - RNA, 19 nt, Artificial Sequence
  Description of Artificial Sequence: Synthetic oligonucleotide
  Sense strand starting at position 1264 of SEQ ID NO: 1562107
gcgugaaaugugcaauaca

SEQ ID NO: 1722692 - RNA, 19 nt, Artificial Sequence
  Description of Artificial Sequence: Synthetic oligonucleotide
  Antisense strand to SEQ ID NO: 1722691
uguauugcacauuucacgc

SEQ ID NO: 1722693 - RNA, 19 nt, Artificial Sequence
  Description of Artificial Sequence: Synthetic oligonucleotide
  Sense strand starting at position 1267 of SEQ ID NO: 1562107
ugaaaugugcaauacagca

SEQ ID NO: 1722694 - RNA, 19 nt, Artificial Sequence
  Description of Artificial Sequence: Synthetic oligonucleotide
  Antisense strand to SEQ ID NO: 1722693
ugcuguauugcacauuuca

SEQ ID NO: 1722695 - RNA, 19 nt, Artificial Sequence
  Description of Artificial Sequence: Synthetic oligonucleotide
  Sense strand starting at position 1496 of SEQ ID NO: 1562107
gaaggaggaucgcuuaagu

SEQ ID NO: 1722696 - RNA, 19 nt, Artificial Sequence
  Description of Artificial Sequence: Synthetic oligonucleotide
  Antisense strand to SEQ ID NO: 1722695
acuuaagcgauccuccuuc

SEQ ID NO: 1722697 - RNA, 19 nt, Artificial Sequence
  Description of Artificial Sequence: Synthetic oligonucleotide
  Sense strand starting at position 1578 of SEQ ID NO: 1562107
gagaaccugucacugaaac

SEQ ID NO: 1722698 - RNA, 19 nt, Artificial Sequence
  Description of Artificial Sequence: Synthetic oligonucleotide
  Antisense strand to SEQ ID NO: 1722697
guuucagugacagguucuc

SEQ ID NO: 1722699 - RNA, 19 nt, Artificial Sequence
  Description of Artificial Sequence: Synthetic oligonucleotide
  Sense strand starting at position 1600 of SEQ ID NO: 1562107
acgaaauuauucccaugga

SEQ ID NO: 1722700 - RNA, 19 nt, Artificial Sequence
  Description of Artificial Sequence: Synthetic oligonucleotide
  Antisense strand to SEQ ID NO: 1722699
uccaugggaauaauuucgu

SEQ ID NO: 1722701 - RNA, 19 nt, Artificial Sequence
  Description of Artificial Sequence: Synthetic oligonucleotide
  Sense strand starting at position 1604 of SEQ ID NO: 1562107
aauuauucccauggaagug

SEQ ID NO: 1722702 - RNA, 19 nt, Artificial Sequence
  Description of Artificial Sequence: Synthetic oligonucleotide
  Antisense strand to SEQ ID NO: 1722701
cacuuccaugggaauaauu

SEQ ID NO: 1722703 - RNA, 19 nt, Artificial Sequence
  Description of Artificial Sequence: Synthetic oligonucleotide
  Sense strand starting at position 1680 of SEQ ID NO: 1562107
ggcguuaggagcguucaca

SEQ ID NO: 1722704 - RNA, 19 nt, Artificial Sequence
  Description of Artificial Sequence: Synthetic oligonucleotide
  Antisense strand to SEQ ID NO: 1722703
ugugaacgcuccuaacgcc

SEQ ID NO: 1722705 - RNA, 19 nt, Artificial Sequence
  Description of Artificial Sequence: Synthetic oligonucleotide
  Sense strand starting at position 2276 of SEQ ID NO: 1562107
cugugagauggcugaggau

SEQ ID NO: 1722706 - RNA, 19 nt, Artificial Sequence
  Description of Artificial Sequence: Synthetic oligonucleotide
  Antisense strand to SEQ ID NO: 1722705
auccucagccaucucacag

SEQ ID NO: 1722707 - RNA, 19 nt, Artificial Sequence
  Description of Artificial Sequence: Synthetic oligonucleotide
  Sense strand starting at position 2293 of SEQ ID NO: 1562107
augacaaggcgaggauuaa

SEQ ID NO: 1722708 - RNA, 19 nt, Artificial Sequence
  Description of Artificial Sequence: Synthetic oligonucleotide
  Antisense strand to SEQ ID NO: 1722707
uuaauccucgccuugucau

SEQ ID NO: 1722709 - RNA, 19 nt, Artificial Sequence
  Description of Artificial Sequence: Synthetic oligonucleotide
  Sense strand starting at position 2393 of SEQ ID NO: 1562107
cugaaaguggaguggugau

SEQ ID NO: 1722710 - RNA, 19 nt, Artificial Sequence
  Description of Artificial Sequence: Synthetic oligonucleotide
  Antisense strand to SEQ ID NO: 1722709
aucaccacuccacuuucag

SEQ ID NO: 1722711 - RNA, 19 nt, Artificial Sequence
  Description of Artificial Sequence: Synthetic oligonucleotide
  Sense strand starting at position 2902 of SEQ ID NO: 1562107
gcugaugaguuauucuuau

SEQ ID NO: 1722712 - RNA, 19 nt, Artificial Sequence
  Description of Artificial Sequence: Synthetic oligonucleotide
  Antisense strand to SEQ ID NO: 1722711
auaagaauaacucaucagc

SEQ ID NO: 1722713 - RNA, 19 nt, Artificial Sequence
  Description of Artificial Sequence: Synthetic oligonucleotide
  Sense strand starting at position 3279 of SEQ ID NO: 1562107
uucugauuauucucaggua

SEQ ID NO: 1722714 - RNA, 19 nt, Artificial Sequence
  Description of Artificial Sequence: Synthetic oligonucleotide
  Antisense strand to SEQ ID NO: 1722713
uaccugagaauaaucagaa

SEQ ID NO: 1722715 - RNA, 19 nt, Artificial Sequence
  Description of Artificial Sequence: Synthetic oligonucleotide
  Sense strand starting at position 3371 of SEQ ID NO: 1562107
cuuccaaagugauuguacu

SEQ ID NO: 1722716 - RNA, 19 nt, Artificial Sequence
  Description of Artificial Sequence: Synthetic oligonucleotide
  Antisense strand to SEQ ID NO: 1722715
aguacaaucacuuuggaag

SEQ ID NO: 1722717 - RNA, 19 nt, Artificial Sequence
  Description of Artificial Sequence: Synthetic oligonucleotide
  Sense strand starting at position 3581 of SEQ ID NO: 1562107
ucuauauccucuuugguga

SEQ ID NO: 1722718 - RNA, 19 nt, Artificial Sequence
  Description of Artificial Sequence: Synthetic oligonucleotide
  Antisense strand to SEQ ID NO: 1722717
ucaccaaagaggauauaga

SEQ ID NO: 1722719 - RNA, 19 nt, Artificial Sequence
  Description of Artificial Sequence: Synthetic oligonucleotide
  Sense strand starting at position 3582 of SEQ ID NO: 1562107
cuauauccucuuuggugaa

SEQ ID NO: 1722720 - RNA, 19 nt, Artificial Sequence
  Description of Artificial Sequence: Synthetic oligonucleotide
  Antisense strand to SEQ ID NO: 1722719
uucaccaaagaggauauag

SEQ ID NO: 1722721 - RNA, 19 nt, Artificial Sequence
  Description of Artificial Sequence: Synthetic oligonucleotide
  Sense strand starting at position 3662 of SEQ ID NO: 1562107
uuugaaaguucuuugcaaa

SEQ ID NO: 1722722 - RNA, 19 nt, Artificial Sequence
  Description of Artificial Sequence: Synthetic oligonucleotide
  Antisense strand to SEQ ID NO: 1722721
uuugcaaagaacuuucaaa

SEQ ID NO: 1722723 - RNA, 19 nt, Artificial Sequence
  Description of Artificial Sequence: Synthetic oligonucleotide
  Sense strand starting at position 3663 of SEQ ID NO: 1562107
uugaaaguucuuugcaaau

SEQ ID NO: 1722724 - RNA, 19 nt, Artificial Sequence
  Description of Artificial Sequence: Synthetic oligonucleotide
  Antisense strand to SEQ ID NO: 1722723
auuugcaaagaacuuucaa

SEQ ID NO: 1722725 - RNA, 19 nt, Artificial Sequence
  Description of Artificial Sequence: Synthetic oligonucleotide
  Sense strand starting at position 3674 of SEQ ID NO: 1562107
uugcaaauucuagauguca

SEQ ID NO: 1722726 - RNA, 19 nt, Artificial Sequence
  Description of Artificial Sequence: Synthetic oligonucleotide
  Antisense strand to SEQ ID NO: 1722725
ugacaucuagaauuugcaa

SEQ ID NO: 1722727 - RNA, 19 nt, Artificial Sequence
  Description of Artificial Sequence: Synthetic oligonucleotide
  Sense strand starting at position 3700 of SEQ ID NO: 1562107
gccaguuacgcuguuugca

SEQ ID NO: 1722728 - RNA, 19 nt, Artificial Sequence
  Description of Artificial Sequence: Synthetic oligonucleotide
  Antisense strand to SEQ ID NO: 1722727
ugcaaacagcguaacuggc

SEQ ID NO: 1722729 - RNA, 19 nt, Artificial Sequence
  Description of Artificial Sequence: Synthetic oligonucleotide
  Sense strand starting at position 3701 of SEQ ID NO: 1562107
ccaguuacgcuguuugcaa

SEQ ID NO: 1722730 - RNA, 19 nt, Artificial Sequence
  Description of Artificial Sequence: Synthetic oligonucleotide
  Antisense strand to SEQ ID NO: 1722729
uugcaaacagcguaacugg

SEQ ID NO: 1722731 - RNA, 19 nt, Artificial Sequence
  Description of Artificial Sequence: Synthetic oligonucleotide
  Sense strand starting at position 3868 of SEQ ID NO: 1562107
guuucucguauguuuaguu

SEQ ID NO: 1722732 - RNA, 19 nt, Artificial Sequence
  Description of Artificial Sequence: Synthetic oligonucleotide
  Antisense strand to SEQ ID NO: 1722731
aacuaaacauacgagaaac

SEQ ID NO: 1722733 - RNA, 19 nt, Artificial Sequence
  Description of Artificial Sequence: Synthetic oligonucleotide
  Sense strand starting at position 3890 of SEQ ID NO: 1562107
uuuguucucacagaagugu

SEQ ID NO: 1722734 - RNA, 19 nt, Artificial Sequence
  Description of Artificial Sequence: Synthetic oligonucleotide
  Antisense strand to SEQ ID NO: 1722733
acacuucugugagaacaaa

SEQ ID NO: 1722735 - RNA, 19 nt, Artificial Sequence
  Description of Artificial Sequence: Synthetic oligonucleotide
  Sense strand starting at position 156 of SEQ ID NO: 1562108
gccugcuuccugugaacuu

SEQ ID NO: 1722736 - RNA, 19 nt, Artificial Sequence
  Description of Artificial Sequence: Synthetic oligonucleotide
  Antisense strand to SEQ ID NO: 1722735
aaguucacaggaagcaggc

SEQ ID NO: 1722737 - RNA, 19 nt, Artificial Sequence
  Description of Artificial Sequence: Synthetic oligonucleotide
  Sense strand starting at position 157 of SEQ ID NO: 1562108
ccugcuuccugugaacuuu

SEQ ID NO: 1722738 - RNA, 19 nt, Artificial Sequence
  Description of Artificial Sequence: Synthetic oligonucleotide
  Antisense strand to SEQ ID NO: 1722737
aaaguucacaggaagcagg

SEQ ID NO: 1722739 - RNA, 19 nt, Artificial Sequence
  Description of Artificial Sequence: Synthetic oligonucleotide
  Sense strand starting at position 165 of SEQ ID NO: 1562108
cugugaacuuucuagagca

SEQ ID NO: 1722740 - RNA, 19 nt, Artificial Sequence
  Description of Artificial Sequence: Synthetic oligonucleotide
  Antisense strand to SEQ ID NO: 1722739
ugcucuagaaaguucacag

SEQ ID NO: 1722741 - RNA, 19 nt, Artificial Sequence
  Description of Artificial Sequence: Synthetic oligonucleotide
  Sense strand starting at position 167 of SEQ ID NO: 1562108
gugaacuuucuagagcaaa

SEQ ID NO: 1722742 - RNA, 19 nt, Artificial Sequence
  Description of Artificial Sequence: Synthetic oligonucleotide
  Antisense strand to SEQ ID NO: 1722741
uuugcucuagaaaguucac

SEQ ID NO: 1722743 - RNA, 19 nt, Artificial Sequence
  Description of Artificial Sequence: Synthetic oligonucleotide
  Sense strand starting at position 343 of SEQ ID NO: 1562108
uugugauguggcugcagga

SEQ ID NO: 1722744 - RNA, 19 nt, Artificial Sequence
  Description of Artificial Sequence: Synthetic oligonucleotide
  Antisense strand to SEQ ID NO: 1722743
uccugcagccacaucacaa

SEQ ID NO: 1722745 - RNA, 19 nt, Artificial Sequence
  Description of Artificial Sequence: Synthetic oligonucleotide
  Sense strand starting at position 412 of SEQ ID NO: 1562108
uccagaauccuuggcgcua

SEQ ID NO: 1722746 - RNA, 19 nt, Artificial Sequence
  Description of Artificial Sequence: Synthetic oligonucleotide
  Antisense strand to SEQ ID NO: 1722745
uagcgccaaggauucugga

SEQ ID NO: 1722747 - RNA, 19 nt, Artificial Sequence
  Description of Artificial Sequence: Synthetic oligonucleotide
  Sense strand starting at position 993 of SEQ ID NO: 1562108
gcaggagacugcucuggaa

SEQ ID NO: 1722748 - RNA, 19 nt, Artificial Sequence
  Description of Artificial Sequence: Synthetic oligonucleotide
  Antisense strand to SEQ ID NO: 1722747
uuccagagcagucuccugc

SEQ ID NO: 1722749 - RNA, 19 nt, Artificial Sequence
  Description of Artificial Sequence: Synthetic oligonucleotide
  Sense strand starting at position 1398 of SEQ ID NO: 1562108
gccugcuugucagggucau

SEQ ID NO: 1722750 - RNA, 19 nt, Artificial Sequence
  Description of Artificial Sequence: Synthetic oligonucleotide
  Antisense strand to SEQ ID NO: 1722749
augacccugacaagcaggc

SEQ ID NO: 1722751 - RNA, 19 nt, Artificial Sequence
  Description of Artificial Sequence: Synthetic oligonucleotide
  Sense strand starting at position 1402 of SEQ ID NO: 1562108
gcuugucagggucaugcau

SEQ ID NO: 1722752 - RNA, 19 nt, Artificial Sequence
  Description of Artificial Sequence: Synthetic oligonucleotide
  Antisense strand to SEQ ID NO: 1722751
augcaugacccugacaagc

SEQ ID NO: 1722753 - RNA, 19 nt, Artificial Sequence
  Description of Artificial Sequence: Synthetic oligonucleotide
  Sense strand starting at position 1446 of SEQ ID NO: 1562108
ggguaugccuccugacugu

SEQ ID NO: 1722754 - RNA, 19 nt, Artificial Sequence
  Description of Artificial Sequence: Synthetic oligonucleotide
  Antisense strand to SEQ ID NO: 1722753
acagucaggaggcauaccc

SEQ ID NO: 1722755 - RNA, 19 nt, Artificial Sequence
  Description of Artificial Sequence: Synthetic oligonucleotide
  Sense strand starting at position 1456 of SEQ ID NO: 1562108
ccugacuguccaggacaau

SEQ ID NO: 1722756 - RNA, 19 nt, Artificial Sequence
  Description of Artificial Sequence: Synthetic oligonucleotide
  Antisense strand to SEQ ID NO: 1722755
auuguccuggacagucagg

SEQ ID NO: 1722757 - RNA, 19 nt, Artificial Sequence
  Description of Artificial Sequence: Synthetic oligonucleotide
  Sense strand starting at position 2200 of SEQ ID NO: 1562108
ggugguaagccugguccaa

SEQ ID NO: 1722758 - RNA, 19 nt, Artificial Sequence
  Description of Artificial Sequence: Synthetic oligonucleotide
  Antisense strand to SEQ ID NO: 1722757
uuggaccaggcuuaccacc

SEQ ID NO: 1722759 - RNA, 19 nt, Artificial Sequence
  Description of Artificial Sequence: Synthetic oligonucleotide
  Sense strand starting at position 2202 of SEQ ID NO: 1562108
ugguaagccugguccaaga

SEQ ID NO: 1722760 - RNA, 19 nt, Artificial Sequence
  Description of Artificial Sequence: Synthetic oligonucleotide
  Antisense strand to SEQ ID NO: 1722759
ucuuggaccaggcuuacca

SEQ ID NO: 1722761 - RNA, 19 nt, Artificial Sequence
  Description of Artificial Sequence: Synthetic oligonucleotide
  Sense strand starting at position 2262 of SEQ ID NO: 1562108
ccgucuguccucugucuau

SEQ ID NO: 1722762 - RNA, 19 nt, Artificial Sequence
  Description of Artificial Sequence: Synthetic oligonucleotide
  Antisense strand to SEQ ID NO: 1722761
auagacagaggacagacgg

SEQ ID NO: 1722763 - RNA, 19 nt, Artificial Sequence
  Description of Artificial Sequence: Synthetic oligonucleotide
  Sense strand starting at position 2265 of SEQ ID NO: 1562108
ucuguccucugucuauaaa

SEQ ID NO: 1722764 - RNA, 19 nt, Artificial Sequence
  Description of Artificial Sequence: Synthetic oligonucleotide
  Antisense strand to SEQ ID NO: 1722763
uuuauagacagaggacaga

SEQ ID NO: 1722765 - RNA, 19 nt, Artificial Sequence
  Description of Artificial Sequence: Synthetic oligonucleotide
  Sense strand starting at position 2305 of SEQ ID NO: 1562108
ugccuuaccgaucaaauaa

SEQ ID NO: 1722766 - RNA, 19 nt, Artificial Sequence
  Description of Artificial Sequence: Synthetic oligonucleotide
  Antisense strand to SEQ ID NO: 1722765
uuauuugaucgguaaggca

SEQ ID NO: 1722767 - RNA, 19 nt, Artificial Sequence
  Description of Artificial Sequence: Synthetic oligonucleotide
  Sense strand starting at position 2329 of SEQ ID NO: 1562108
gggauaaagucuuaaccaa

SEQ ID NO: 1722768 - RNA, 19 nt, Artificial Sequence
  Description of Artificial Sequence: Synthetic oligonucleotide
  Antisense strand to SEQ ID NO: 1722767
uugguuaagacuuuauccc

SEQ ID NO: 1722769 - RNA, 19 nt, Artificial Sequence
  Description of Artificial Sequence: Synthetic oligonucleotide
  Sense strand starting at position 2470 of SEQ ID NO: 1562108
caugucuucucagcagaug

SEQ ID NO: 1722770 - RNA, 19 nt, Artificial Sequence
  Description of Artificial Sequence: Synthetic oligonucleotide
  Antisense strand to SEQ ID NO: 1722769
caucugcugagaagacaug

SEQ ID NO: 1722771 - RNA, 19 nt, Artificial Sequence
  Description of Artificial Sequence: Synthetic oligonucleotide
  Sense strand starting at position 2481 of SEQ ID NO: 1562108
agcagaugccugugaaggu

SEQ ID NO: 1722772 - RNA, 19 nt, Artificial Sequence
  Description of Artificial Sequence: Synthetic oligonucleotide
  Antisense strand to SEQ ID NO: 1722771
accuucacaggcaucugcu

SEQ ID NO: 1722773 - RNA, 19 nt, Artificial Sequence
  Description of Artificial Sequence: Synthetic oligonucleotide
  Sense strand starting at position 2482 of SEQ ID NO: 1562108
gcagaugccugugaagguu

SEQ ID NO: 1722774 - RNA, 19 nt, Artificial Sequence
  Description of Artificial Sequence: Synthetic oligonucleotide
  Antisense strand to SEQ ID NO: 1722773
aaccuucacaggcaucugc

SEQ ID NO: 1722775 - RNA, 19 nt, Artificial Sequence
  Description of Artificial Sequence: Synthetic oligonucleotide
  Sense strand starting at position 2488 of SEQ ID NO: 1562108
gccugugaagguugucauu

SEQ ID NO: 1722776 - RNA, 19 nt, Artificial Sequence
  Description of Artificial Sequence: Synthetic oligonucleotide
  Antisense strand to SEQ ID NO: 1722775
aaugacaaccuucacaggc

SEQ ID NO: 1722777 - RNA, 19 nt, Artificial Sequence
  Description of Artificial Sequence: Synthetic oligonucleotide
  Sense strand starting at position 2787 of SEQ ID NO: 1562108
gggccuugcacuuagaaca

SEQ ID NO: 1722778 - RNA, 19 nt, Artificial Sequence
  Description of Artificial Sequence: Synthetic oligonucleotide
  Antisense strand to SEQ ID NO: 1722777
uguucuaagugcaaggccc

SEQ ID NO: 1722779 - RNA, 19 nt, Artificial Sequence
  Description of Artificial Sequence: Synthetic oligonucleotide
  Sense strand starting at position 3023 of SEQ ID NO: 1562108
uuuggaaacuguugcuaaa

SEQ ID NO: 1722780 - RNA, 19 nt, Artificial Sequence
  Description of Artificial Sequence: Synthetic oligonucleotide
  Antisense strand to SEQ ID NO: 1722779
uuuagcaacaguuuccaaa

SEQ ID NO: 1722781 - RNA, 19 nt, Artificial Sequence
  Description of Artificial Sequence: Synthetic oligonucleotide
  Sense strand starting at position 3026 of SEQ ID NO: 1562108
ggaaacuguugcuaaacgu

SEQ ID NO: 1722782 - RNA, 19 nt, Artificial Sequence
  Description of Artificial Sequence: Synthetic oligonucleotide
  Antisense strand to SEQ ID NO: 1722781
acguuuagcaacaguuucc

SEQ ID NO: 1722783 - RNA, 19 nt, Artificial Sequence
  Description of Artificial Sequence: Synthetic oligonucleotide
  Sense strand starting at position 3037 of SEQ ID NO: 1562108
cuaaacguaucgcugucaa

SEQ ID NO: 1722784 - RNA, 19 nt, Artificial Sequence
  Description of Artificial Sequence: Synthetic oligonucleotide
  Antisense strand to SEQ ID NO: 1722783
uugacagcgauacguuuag

SEQ ID NO: 1722785 - RNA, 19 nt, Artificial Sequence
  Description of Artificial Sequence: Synthetic oligonucleotide
  Sense strand starting at position 3059 of SEQ ID NO: 1562108
cacccucuuugaggugauu

SEQ ID NO: 1722786 - RNA, 19 nt, Artificial Sequence
  Description of Artificial Sequence: Synthetic oligonucleotide
  Antisense strand to SEQ ID NO: 1722785
aaucaccucaaagagggug

SEQ ID NO: 1722787 - RNA, 19 nt, Artificial Sequence
  Description of Artificial Sequence: Synthetic oligonucleotide
  Sense strand starting at position 3068 of SEQ ID NO: 1562108
ugaggugauucgcuuccau

SEQ ID NO: 1722788 - RNA, 19 nt, Artificial Sequence
  Description of Artificial Sequence: Synthetic oligonucleotide
  Antisense strand to SEQ ID NO: 1722787
auggaagcgaaucaccuca

SEQ ID NO: 1722789 - RNA, 19 nt, Artificial Sequence
  Description of Artificial Sequence: Synthetic oligonucleotide
  Sense strand starting at position 3087 of SEQ ID NO: 1562108
ucacucugugauggugauu

SEQ ID NO: 1722790 - RNA, 19 nt, Artificial Sequence
  Description of Artificial Sequence: Synthetic oligonucleotide
  Antisense strand to SEQ ID NO: 1722789
aaucaccaucacagaguga

SEQ ID NO: 1722791 - RNA, 19 nt, Artificial Sequence
  Description of Artificial Sequence: Synthetic oligonucleotide
  Sense strand starting at position 3100 of SEQ ID NO: 1562108
gugauuuccuaccgagauc

SEQ ID NO: 1722792 - RNA, 19 nt, Artificial Sequence
  Description of Artificial Sequence: Synthetic oligonucleotide
  Antisense strand to SEQ ID NO: 1722791
gaucucgguaggaaaucac

SEQ ID NO: 1722793 - RNA, 19 nt, Artificial Sequence
  Description of Artificial Sequence: Synthetic oligonucleotide
  Sense strand starting at position 3109 of SEQ ID NO: 1562108
uaccgagaucugugaucau

SEQ ID NO: 1722794 - RNA, 19 nt, Artificial Sequence
  Description of Artificial Sequence: Synthetic oligonucleotide
  Antisense strand to SEQ ID NO: 1722793
augaucacagaucucggua

SEQ ID NO: 1722795 - RNA, 19 nt, Artificial Sequence
  Description of Artificial Sequence: Synthetic oligonucleotide
  Sense strand starting at position 3112 of SEQ ID NO: 1562108
cgagaucugugaucaugcu

SEQ ID NO: 1722796 - RNA, 19 nt, Artificial Sequence
  Description of Artificial Sequence: Synthetic oligonucleotide
  Antisense strand to SEQ ID NO: 1722795
agcaugaucacagaucucg

SEQ ID NO: 1722797 - RNA, 19 nt, Artificial Sequence
  Description of Artificial Sequence: Synthetic oligonucleotide
  Sense strand starting at position 3342 of SEQ ID NO: 1562108
ggccaucucacagggacau

SEQ ID NO: 1722798 - RNA, 19 nt, Artificial Sequence
  Description of Artificial Sequence: Synthetic oligonucleotide
  Antisense strand to SEQ ID NO: 1722797
augucccugugagauggcc

SEQ ID NO: 1722799 - RNA, 19 nt, Artificial Sequence
  Description of Artificial Sequence: Synthetic oligonucleotide
  Sense strand starting at position 3343 of SEQ ID NO: 1562108
gccaucucacagggacauu

SEQ ID NO: 1722800 - RNA, 19 nt, Artificial Sequence
  Description of Artificial Sequence: Synthetic oligonucleotide
  Antisense strand to SEQ ID NO: 1722799
aaugucccugugagauggc

SEQ ID NO: 1722801 - RNA, 19 nt, Artificial Sequence
  Description of Artificial Sequence: Synthetic oligonucleotide
  Sense strand starting at position 3638 of SEQ ID NO: 1562108
gggagacgaugcuagagau

SEQ ID NO: 1722802 - RNA, 19 nt, Artificial Sequence
  Description of Artificial Sequence: Synthetic oligonucleotide
  Antisense strand to SEQ ID NO: 1722801
aucucuagcaucgucuccc

SEQ ID NO: 1722803 - RNA, 19 nt, Artificial Sequence
  Description of Artificial Sequence: Synthetic oligonucleotide
  Sense strand starting at position 3745 of SEQ ID NO: 1562108
ccgcacagcuucuuguaaa

SEQ ID NO: 1722804 - RNA, 19 nt, Artificial Sequence
  Description of Artificial Sequence: Synthetic oligonucleotide
  Antisense strand to SEQ ID NO: 1722803
uuuacaagaagcugugcgg

SEQ ID NO: 1722805 - RNA, 19 nt, Artificial Sequence
  Description of Artificial Sequence: Synthetic oligonucleotide
  Sense strand starting at position 3746 of SEQ ID NO: 1562108
cgcacagcuucuuguaaac

SEQ ID NO: 1722806 - RNA, 19 nt, Artificial Sequence
  Description of Artificial Sequence: Synthetic oligonucleotide
  Antisense strand to SEQ ID NO: 1722805
guuuacaagaagcugugcg

SEQ ID NO: 1722807 - RNA, 19 nt, Artificial Sequence
  Description of Artificial Sequence: Synthetic oligonucleotide
  Sense strand starting at position 42 of SEQ ID NO: 1562109
ccgccauacucagcuauuu

SEQ ID NO: 1722808 - RNA, 19 nt, Artificial Sequence
  Description of Artificial Sequence: Synthetic oligonucleotide
  Antisense strand to SEQ ID NO: 1722807
aaauagcugaguauggcgg

SEQ ID NO: 1722809 - RNA, 19 nt, Artificial Sequence
  Description of Artificial Sequence: Synthetic oligonucleotide
  Sense strand starting at position 80 of SEQ ID NO: 1562109
acaggagucuugcuggguu

SEQ ID NO: 1722810 - RNA, 19 nt, Artificial Sequence
  Description of Artificial Sequence: Synthetic oligonucleotide
  Antisense strand to SEQ ID NO: 1722809
aacccagcaagacuccugu

SEQ ID NO: 1722811 - RNA, 19 nt, Artificial Sequence
  Description of Artificial Sequence: Synthetic oligonucleotide
  Sense strand starting at position 224 of SEQ ID NO: 1562109
gucaacagauguuuaaacu

SEQ ID NO: 1722812 - RNA, 19 nt, Artificial Sequence
  Description of Artificial Sequence: Synthetic oligonucleotide
  Antisense strand to SEQ ID NO: 1722811
aguuuaaacaucuguugac

SEQ ID NO: 1722813 - RNA, 19 nt, Artificial Sequence
  Description of Artificial Sequence: Synthetic oligonucleotide
  Sense strand starting at position 248 of SEQ ID NO: 1562109
gacuuaauugaccgugcca

SEQ ID NO: 1722814 - RNA, 19 nt, Artificial Sequence
  Description of Artificial Sequence: Synthetic oligonucleotide
  Antisense strand to SEQ ID NO: 1722813
uggcacggucaauuaaguc

SEQ ID NO: 1722815 - RNA, 19 nt, Artificial Sequence
  Description of Artificial Sequence: Synthetic oligonucleotide
  Sense strand starting at position 250 of SEQ ID NO: 1562109
cuuaauugaccgugccaca

SEQ ID NO: 1722816 - RNA, 19 nt, Artificial Sequence
  Description of Artificial Sequence: Synthetic oligonucleotide
  Antisense strand to SEQ ID NO: 1722815
uguggcacggucaauuaag

SEQ ID NO: 1722817 - RNA, 19 nt, Artificial Sequence
  Description of Artificial Sequence: Synthetic oligonucleotide
  Sense strand starting at position 380 of SEQ ID NO: 1562109
agagaaaugccuugguauu

SEQ ID NO: 1722818 - RNA, 19 nt, Artificial Sequence
  Description of Artificial Sequence: Synthetic oligonucleotide
  Antisense strand to SEQ ID NO: 1722817
aauaccaaggcauuucucu

SEQ ID NO: 1722819 - RNA, 19 nt, Artificial Sequence
  Description of Artificial Sequence: Synthetic oligonucleotide
  Sense strand starting at position 381 of SEQ ID NO: 1562109
gagaaaugccuugguauua

SEQ ID NO: 1722820 - RNA, 19 nt, Artificial Sequence
  Description of Artificial Sequence: Synthetic oligonucleotide
  Antisense strand to SEQ ID NO: 1722819
uaauaccaaggcauuucuc

SEQ ID NO: 1722821 - RNA, 19 nt, Artificial Sequence
  Description of Artificial Sequence: Synthetic oligonucleotide
  Sense strand starting at position 382 of SEQ ID NO: 1562109
agaaaugccuugguauuaa

SEQ ID NO: 1722822 - RNA, 19 nt, Artificial Sequence
  Description of Artificial Sequence: Synthetic oligonucleotide
  Antisense strand to SEQ ID NO: 1722821
uuaauaccaaggcauuucu

SEQ ID NO: 1722823 - RNA, 19 nt, Artificial Sequence
  Description of Artificial Sequence: Synthetic oligonucleotide
  Sense strand starting at position 403 of SEQ ID NO: 1562109
gaaagaagcugguugccau

SEQ ID NO: 1722824 - RNA, 19 nt, Artificial Sequence
  Description of Artificial Sequence: Synthetic oligonucleotide
  Antisense strand to SEQ ID NO: 1722823
auggcaaccagcuucuuuc

SEQ ID NO: 1722825 - RNA, 19 nt, Artificial Sequence
  Description of Artificial Sequence: Synthetic oligonucleotide
  Sense strand starting at position 681 of SEQ ID NO: 1562109
uuauacaucucaccagguu

SEQ ID NO: 1722826 - RNA, 19 nt, Artificial Sequence
  Description of Artificial Sequence: Synthetic oligonucleotide
  Antisense strand to SEQ ID NO: 1722825
aaccuggugagauguauaa

SEQ ID NO: 1722827 - RNA, 19 nt, Artificial Sequence
  Description of Artificial Sequence: Synthetic oligonucleotide
  Sense strand starting at position 878 of SEQ ID NO: 1562109
gaggucacauggccaauua

SEQ ID NO: 1722828 - RNA, 19 nt, Artificial Sequence
  Description of Artificial Sequence: Synthetic oligonucleotide
  Antisense strand to SEQ ID NO: 1722827
uaauuggccaugugaccuc

SEQ ID NO: 1722829 - RNA, 19 nt, Artificial Sequence
  Description of Artificial Sequence: Synthetic oligonucleotide
  Sense strand starting at position 932 of SEQ ID NO: 1562109
gucccauguccucgcacau

SEQ ID NO: 1722830 - RNA, 19 nt, Artificial Sequence
  Description of Artificial Sequence: Synthetic oligonucleotide
  Antisense strand to SEQ ID NO: 1722829
augugcgaggacaugggac

SEQ ID NO: 1722831 - RNA, 19 nt, Artificial Sequence
  Description of Artificial Sequence: Synthetic oligonucleotide
  Sense strand starting at position 977 of SEQ ID NO: 1562109
acccaauugucagcaggga

SEQ ID NO: 1722832 - RNA, 19 nt, Artificial Sequence
  Description of Artificial Sequence: Synthetic oligonucleotide
  Antisense strand to SEQ ID NO: 1722831
ucccugcugacaauugggu

SEQ ID NO: 1722833 - RNA, 19 nt, Artificial Sequence
  Description of Artificial Sequence: Synthetic oligonucleotide
  Sense strand starting at position 1066 of SEQ ID NO: 1562109
ccagaaagcccuuaugggu

SEQ ID NO: 1722834 - RNA, 19 nt, Artificial Sequence
  Description of Artificial Sequence: Synthetic oligonucleotide
  Antisense strand to SEQ ID NO: 1722833
acccauaagggcuuucugg

SEQ ID NO: 1722835 - RNA, 19 nt, Artificial Sequence
  Description of Artificial Sequence: Synthetic oligonucleotide
  Sense strand starting at position 1072 of SEQ ID NO: 1562109
agcccuuaugggugacuuu

SEQ ID NO: 1722836 - RNA, 19 nt, Artificial Sequence
  Description of Artificial Sequence: Synthetic oligonucleotide
  Antisense strand to SEQ ID NO: 1722835
aaagucacccauaagggcu

SEQ ID NO: 1722837 - RNA, 19 nt, Artificial Sequence
  Description of Artificial Sequence: Synthetic oligonucleotide
  Sense strand starting at position 1081 of SEQ ID NO: 1562109
gggugacuuucuuccaccu

SEQ ID NO: 1722838 - RNA, 19 nt, Artificial Sequence
  Description of Artificial Sequence: Synthetic oligonucleotide
  Antisense strand to SEQ ID NO: 1722837
agguggaagaaagucaccc

SEQ ID NO: 1722839 - RNA, 19 nt, Artificial Sequence
  Description of Artificial Sequence: Synthetic oligonucleotide
  Sense strand starting at position 1133 of SEQ ID NO: 1562109
ucgauaauuucccaucagu

SEQ ID NO: 1722840 - RNA, 19 nt, Artificial Sequence
  Description of Artificial Sequence: Synthetic oligonucleotide
  Antisense strand to SEQ ID NO: 1722839
acugaugggaaauuaucga

SEQ ID NO: 1722841 - RNA, 19 nt, Artificial Sequence
  Description of Artificial Sequence: Synthetic oligonucleotide
  Sense strand starting at position 1235 of SEQ ID NO: 1562109
aauccugcgccuuaaagua

SEQ ID NO: 1722842 - RNA, 19 nt, Artificial Sequence
  Description of Artificial Sequence: Synthetic oligonucleotide
  Antisense strand to SEQ ID NO: 1722841
uacuuuaaggcgcaggauu

SEQ ID NO: 1722843 - RNA, 19 nt, Artificial Sequence
  Description of Artificial Sequence: Synthetic oligonucleotide
  Sense strand starting at position 1243 of SEQ ID NO: 1562109
gccuuaaaguagucacacu

SEQ ID NO: 1722844 - RNA, 19 nt, Artificial Sequence
  Description of Artificial Sequence: Synthetic oligonucleotide
  Antisense strand to SEQ ID NO: 1722843
agugugacuacuuuaaggc

SEQ ID NO: 1722845 - RNA, 19 nt, Artificial Sequence
  Description of Artificial Sequence: Synthetic oligonucleotide
  Sense strand starting at position 1250 of SEQ ID NO: 1562109
aguagucacacucgaaaug

SEQ ID NO: 1722846 - RNA, 19 nt, Artificial Sequence
  Description of Artificial Sequence: Synthetic oligonucleotide
  Antisense strand to SEQ ID NO: 1722845
cauuucgagugugacuacu

SEQ ID NO: 1722847 - RNA, 19 nt, Artificial Sequence
  Description of Artificial Sequence: Synthetic oligonucleotide
  Sense strand starting at position 1251 of SEQ ID NO: 1562109
guagucacacucgaaaugu

SEQ ID NO: 1722848 - RNA, 19 nt, Artificial Sequence
  Description of Artificial Sequence: Synthetic oligonucleotide
  Antisense strand to SEQ ID NO: 1722847
acauuucgagugugacuac

SEQ ID NO: 1722849 - RNA, 19 nt, Artificial Sequence
  Description of Artificial Sequence: Synthetic oligonucleotide
  Sense strand starting at position 1375 of SEQ ID NO: 1562109
gcagucuuuguagaaggga

SEQ ID NO: 1722850 - RNA, 19 nt, Artificial Sequence
  Description of Artificial Sequence: Synthetic oligonucleotide
  Antisense strand to SEQ ID NO: 1722849
ucccuucuacaaagacugc

SEQ ID NO: 1722851 - RNA, 19 nt, Artificial Sequence
  Description of Artificial Sequence: Synthetic oligonucleotide
  Sense strand starting at position 1378 of SEQ ID NO: 1562109
gucuuuguagaagggaaga

SEQ ID NO: 1722852 - RNA, 19 nt, Artificial Sequence
  Description of Artificial Sequence: Synthetic oligonucleotide
  Antisense strand to SEQ ID NO: 1722851
ucuucccuucuacaaagac

SEQ ID NO: 1722853 - RNA, 19 nt, Artificial Sequence
  Description of Artificial Sequence: Synthetic oligonucleotide
  Sense strand starting at position 2359 of SEQ ID NO: 1562109
gucauugcucgagcgugau

SEQ ID NO: 1722854 - RNA, 19 nt, Artificial Sequence
  Description of Artificial Sequence: Synthetic oligonucleotide
  Antisense strand to SEQ ID NO: 1722853
aucacgcucgagcaaugac

SEQ ID NO: 1722855 - RNA, 19 nt, Artificial Sequence
  Description of Artificial Sequence: Synthetic oligonucleotide
  Sense strand starting at position 2362 of SEQ ID NO: 1562109
auugcucgagcgugauaag

SEQ ID NO: 1722856 - RNA, 19 nt, Artificial Sequence
  Description of Artificial Sequence: Synthetic oligonucleotide
  Antisense strand to SEQ ID NO: 1722855
cuuaucacgcucgagcaau

SEQ ID NO: 1722857 - RNA, 19 nt, Artificial Sequence
  Description of Artificial Sequence: Synthetic oligonucleotide
  Sense strand starting at position 2494 of SEQ ID NO: 1562109
accucaugcagagaucgua

SEQ ID NO: 1722858 - RNA, 19 nt, Artificial Sequence
  Description of Artificial Sequence: Synthetic oligonucleotide
  Antisense strand to SEQ ID NO: 1722857
uacgaucucugcaugaggu

SEQ ID NO: 1722859 - RNA, 19 nt, Artificial Sequence
  Description of Artificial Sequence: Synthetic oligonucleotide
  Sense strand starting at position 2497 of SEQ ID NO: 1562109
ucaugcagagaucguaaua

SEQ ID NO: 1722860 - RNA, 19 nt, Artificial Sequence
  Description of Artificial Sequence: Synthetic oligonucleotide
  Antisense strand to SEQ ID NO: 1722859
uauuacgaucucugcauga

SEQ ID NO: 1722861 - RNA, 19 nt, Artificial Sequence
  Description of Artificial Sequence: Synthetic oligonucleotide
  Sense strand starting at position 2502 of SEQ ID NO: 1562109
cagagaucguaauacagac

SEQ ID NO: 1722862 - RNA, 19 nt, Artificial Sequence
  Description of Artificial Sequence: Synthetic oligonucleotide
  Antisense strand to SEQ ID NO: 1722861
gucuguauuacgaucucug

SEQ ID NO: 1722863 - RNA, 19 nt, Artificial Sequence
  Description of Artificial Sequence: Synthetic oligonucleotide
  Sense strand starting at position 2937 of SEQ ID NO: 1562109
ucuugaaaccguugucaug

SEQ ID NO: 1722864 - RNA, 19 nt, Artificial Sequence
  Description of Artificial Sequence: Synthetic oligonucleotide
  Antisense strand to SEQ ID NO: 1722863
caugacaacgguuucaaga

SEQ ID NO: 1722865 - RNA, 19 nt, Artificial Sequence
  Description of Artificial Sequence: Synthetic oligonucleotide
  Sense strand starting at position 2948 of SEQ ID NO: 1562109
uugucaugguugcuuuacu

SEQ ID NO: 1722866 - RNA, 19 nt, Artificial Sequence
  Description of Artificial Sequence: Synthetic oligonucleotide
  Antisense strand to SEQ ID NO: 1722865
aguaaagcaaccaugacaa

SEQ ID NO: 1722867 - RNA, 19 nt, Artificial Sequence
  Description of Artificial Sequence: Synthetic oligonucleotide
  Sense strand starting at position 2949 of SEQ ID NO: 1562109
ugucaugguugcuuuacua

SEQ ID NO: 1722868 - RNA, 19 nt, Artificial Sequence
  Description of Artificial Sequence: Synthetic oligonucleotide
  Antisense strand to SEQ ID NO: 1722867
uaguaaagcaaccaugaca

SEQ ID NO: 1722869 - RNA, 19 nt, Artificial Sequence
  Description of Artificial Sequence: Synthetic oligonucleotide
  Sense strand starting at position 2965 of SEQ ID NO: 1562109
cuaacugaaugauaaugua

SEQ ID NO: 1722870 - RNA, 19 nt, Artificial Sequence
  Description of Artificial Sequence: Synthetic oligonucleotide
  Antisense strand to SEQ ID NO: 1722869
uacauuaucauucaguuag

SEQ ID NO: 1722871 - RNA, 19 nt, Artificial Sequence
  Description of Artificial Sequence: Synthetic oligonucleotide
  Sense strand starting at position 2968 of SEQ ID NO: 1562109
acugaaugauaauguacua

SEQ ID NO: 1722872 - RNA, 19 nt, Artificial Sequence
  Description of Artificial Sequence: Synthetic oligonucleotide
  Antisense strand to SEQ ID NO: 1722871
uaguacauuaucauucagu

SEQ ID NO: 1722873 - RNA, 19 nt, Artificial Sequence
  Description of Artificial Sequence: Synthetic oligonucleotide
  Sense strand starting at position 2981 of SEQ ID NO: 1562109
guacuaguucccgggcaac

SEQ ID NO: 1722874 - RNA, 19 nt, Artificial Sequence
  Description of Artificial Sequence: Synthetic oligonucleotide
  Antisense strand to SEQ ID NO: 1722873
guugcccgggaacuaguac

SEQ ID NO: 1722875 - RNA, 19 nt, Artificial Sequence
  Description of Artificial Sequence: Synthetic oligonucleotide
  Sense strand starting at position 2992 of SEQ ID NO: 1562109
cgggcaacucuugagaaac

SEQ ID NO: 1722876 - RNA, 19 nt, Artificial Sequence
  Description of Artificial Sequence: Synthetic oligonucleotide
  Antisense strand to SEQ ID NO: 1722875
guuucucaagaguugcccg

SEQ ID NO: 1722877 - RNA, 19 nt, Artificial Sequence
  Description of Artificial Sequence: Synthetic oligonucleotide
  Sense strand starting at position 3093 of SEQ ID NO: 1562109
uuuggaaagugacaucaca

SEQ ID NO: 1722878 - RNA, 19 nt, Artificial Sequence
  Description of Artificial Sequence: Synthetic oligonucleotide
  Antisense strand to SEQ ID NO: 1722877
ugugaugucacuuuccaaa

SEQ ID NO: 1722879 - RNA, 19 nt, Artificial Sequence
  Description of Artificial Sequence: Synthetic oligonucleotide
  Sense strand starting at position 3151 of SEQ ID NO: 1562109
uuaugaaauaggcaagugu

SEQ ID NO: 1722880 - RNA, 19 nt, Artificial Sequence
  Description of Artificial Sequence: Synthetic oligonucleotide
  Antisense strand to SEQ ID NO: 1722879
acacuugccuauuucauaa

SEQ ID NO: 1722881 - RNA, 19 nt, Artificial Sequence
  Description of Artificial Sequence: Synthetic oligonucleotide
  Sense strand starting at position 3167 of SEQ ID NO: 1562109
uguggucugugucuugaca

SEQ ID NO: 1722882 - RNA, 19 nt, Artificial Sequence
  Description of Artificial Sequence: Synthetic oligonucleotide
  Antisense strand to SEQ ID NO: 1722881
ugucaagacacagaccaca

SEQ ID NO: 1722883 - RNA, 19 nt, Artificial Sequence
  Description of Artificial Sequence: Synthetic oligonucleotide
  Sense strand starting at position 3175 of SEQ ID NO: 1562109
gugucuugacaauaaugug

SEQ ID NO: 1722884 - RNA, 19 nt, Artificial Sequence
  Description of Artificial Sequence: Synthetic oligonucleotide
  Antisense strand to SEQ ID NO: 1722883
cacauuauugucaagacac

SEQ ID NO: 1722885 - RNA, 19 nt, Artificial Sequence
  Description of Artificial Sequence: Synthetic oligonucleotide
  Sense strand starting at position 3183 of SEQ ID NO: 1562109
acaauaaugugucuuccca

SEQ ID NO: 1722886 - RNA, 19 nt, Artificial Sequence
  Description of Artificial Sequence: Synthetic oligonucleotide
  Antisense strand to SEQ ID NO: 1722885
ugggaagacacauuauugu

SEQ ID NO: 1722887 - RNA, 19 nt, Artificial Sequence
  Description of Artificial Sequence: Synthetic oligonucleotide
  Sense strand starting at position 57 of SEQ ID NO: 1562110
cugaacucagaauguuagu

SEQ ID NO: 1722888 - RNA, 19 nt, Artificial Sequence
  Description of Artificial Sequence: Synthetic oligonucleotide
  Antisense strand to SEQ ID NO: 1722887
acuaacauucugaguucag

SEQ ID NO: 1722889 - RNA, 19 nt, Artificial Sequence
  Description of Artificial Sequence: Synthetic oligonucleotide
  Sense strand starting at position 63 of SEQ ID NO: 1562110
ucagaauguuaguucugga

SEQ ID NO: 1722890 - RNA, 19 nt, Artificial Sequence
  Description of Artificial Sequence: Synthetic oligonucleotide
  Antisense strand to SEQ ID NO: 1722889
uccagaacuaacauucuga

SEQ ID NO: 1722891 - RNA, 19 nt, Artificial Sequence
  Description of Artificial Sequence: Synthetic oligonucleotide
  Sense strand starting at position 68 of SEQ ID NO: 1562110
auguuaguucuggaaucug

SEQ ID NO: 1722892 - RNA, 19 nt, Artificial Sequence
  Description of Artificial Sequence: Synthetic oligonucleotide
  Antisense strand to SEQ ID NO: 1722891
cagauuccagaacuaacau

SEQ ID NO: 1722893 - RNA, 19 nt, Artificial Sequence
  Description of Artificial Sequence: Synthetic oligonucleotide
  Sense strand starting at position 76 of SEQ ID NO: 1562110
ucuggaaucugucugacac

SEQ ID NO: 1722894 - RNA, 19 nt, Artificial Sequence
  Description of Artificial Sequence: Synthetic oligonucleotide
  Antisense strand to SEQ ID NO: 1722893
gugucagacagauuccaga

SEQ ID NO: 1722895 - RNA, 19 nt, Artificial Sequence
  Description of Artificial Sequence: Synthetic oligonucleotide
  Sense strand starting at position 77 of SEQ ID NO: 1562110
cuggaaucugucugacaca

SEQ ID NO: 1722896 - RNA, 19 nt, Artificial Sequence
  Description of Artificial Sequence: Synthetic oligonucleotide
  Antisense strand to SEQ ID NO: 1722895
ugugucagacagauuccag

SEQ ID NO: 1722897 - RNA, 19 nt, Artificial Sequence
  Description of Artificial Sequence: Synthetic oligonucleotide
  Sense strand starting at position 219 of SEQ ID NO: 1562110
accucuuacccucgaauga

SEQ ID NO: 1722898 - RNA, 19 nt, Artificial Sequence
  Description of Artificial Sequence: Synthetic oligonucleotide
  Antisense strand to SEQ ID NO: 1722897
ucauucgaggguaagaggu

SEQ ID NO: 1722899 - RNA, 19 nt, Artificial Sequence
  Description of Artificial Sequence: Synthetic oligonucleotide
  Sense strand starting at position 300 of SEQ ID NO: 1562110
uuggcaacuggucaugaga

SEQ ID NO: 1722900 - RNA, 19 nt, Artificial Sequence
  Description of Artificial Sequence: Synthetic oligonucleotide
  Antisense strand to SEQ ID NO: 1722899
ucucaugaccaguugccaa

SEQ ID NO: 1722901 - RNA, 19 nt, Artificial Sequence
  Description of Artificial Sequence: Synthetic oligonucleotide
  Sense strand starting at position 358 of SEQ ID NO: 1562110
cccacuuucccaugaggga

SEQ ID NO: 1722902 - RNA, 19 nt, Artificial Sequence
  Description of Artificial Sequence: Synthetic oligonucleotide
  Antisense strand to SEQ ID NO: 1722901
ucccucaugggaaaguggg

SEQ ID NO: 1722903 - RNA, 19 nt, Artificial Sequence
  Description of Artificial Sequence: Synthetic oligonucleotide
  Sense strand starting at position 460 of SEQ ID NO: 1562110
uucuuaagauggguauguu

SEQ ID NO: 1722904 - RNA, 19 nt, Artificial Sequence
  Description of Artificial Sequence: Synthetic oligonucleotide
  Antisense strand to SEQ ID NO: 1722903
aacauacccaucuuaagaa

SEQ ID NO: 1722905 - RNA, 19 nt, Artificial Sequence
  Description of Artificial Sequence: Synthetic oligonucleotide
  Sense strand starting at position 577 of SEQ ID NO: 1562110
ccacccuugucuuuggaaa

SEQ ID NO: 1722906 - RNA, 19 nt, Artificial Sequence
  Description of Artificial Sequence: Synthetic oligonucleotide
  Antisense strand to SEQ ID NO: 1722905
uuuccaaagacaagggugg

SEQ ID NO: 1722907 - RNA, 19 nt, Artificial Sequence
  Description of Artificial Sequence: Synthetic oligonucleotide
  Sense strand starting at position 578 of SEQ ID NO: 1562110
cacccuugucuuuggaaag

SEQ ID NO: 1722908 - RNA, 19 nt, Artificial Sequence
  Description of Artificial Sequence: Synthetic oligonucleotide
  Antisense strand to SEQ ID NO: 1722907
cuuuccaaagacaagggug

SEQ ID NO: 1722909 - RNA, 19 nt, Artificial Sequence
  Description of Artificial Sequence: Synthetic oligonucleotide
  Sense strand starting at position 738 of SEQ ID NO: 1562110
ugaaacugcccagguaaau

SEQ ID NO: 1722910 - RNA, 19 nt, Artificial Sequence
  Description of Artificial Sequence: Synthetic oligonucleotide
  Antisense strand to SEQ ID NO: 1722909
auuuaccugggcaguuuca

SEQ ID NO: 1722911 - RNA, 19 nt, Artificial Sequence
  Description of Artificial Sequence: Synthetic oligonucleotide
  Sense strand starting at position 775 of SEQ ID NO: 1562110
ugcacaauccagggaaucu

SEQ ID NO: 1722912 - RNA, 19 nt, Artificial Sequence
  Description of Artificial Sequence: Synthetic oligonucleotide
  Antisense strand to SEQ ID NO: 1722911
agauucccuggauugugca

SEQ ID NO: 1722913 - RNA, 19 nt, Artificial Sequence
  Description of Artificial Sequence: Synthetic oligonucleotide
  Sense strand starting at position 837 of SEQ ID NO: 1562110
guauucucucaggauaauc

SEQ ID NO: 1722914 - RNA, 19 nt, Artificial Sequence
  Description of Artificial Sequence: Synthetic oligonucleotide
  Antisense strand to SEQ ID NO: 1722913
gauuauccugagagaauac

SEQ ID NO: 1722915 - RNA, 19 nt, Artificial Sequence
  Description of Artificial Sequence: Synthetic oligonucleotide
  Sense strand starting at position 866 of SEQ ID NO: 1562110
ugacuuugugacugcauuu

SEQ ID NO: 1722916 - RNA, 19 nt, Artificial Sequence
  Description of Artificial Sequence: Synthetic oligonucleotide
  Antisense strand to SEQ ID NO: 1722915
aaaugcagucacaaaguca

SEQ ID NO: 1722917 - RNA, 19 nt, Artificial Sequence
  Description of Artificial Sequence: Synthetic oligonucleotide
  Sense strand starting at position 898 of SEQ ID NO: 1562110
cuacuucucugacuguauu

SEQ ID NO: 1722918 - RNA, 19 nt, Artificial Sequence
  Description of Artificial Sequence: Synthetic oligonucleotide
  Antisense strand to SEQ ID NO: 1722917
aauacagucagagaaguag

SEQ ID NO: 1722919 - RNA, 19 nt, Artificial Sequence
  Description of Artificial Sequence: Synthetic oligonucleotide
  Sense strand starting at position 1043 of SEQ ID NO: 1562110
cugccuggaucuccuuaau

SEQ ID NO: 1722920 - RNA, 19 nt, Artificial Sequence
  Description of Artificial Sequence: Synthetic oligonucleotide
  Antisense strand to SEQ ID NO: 1722919
auuaaggagauccaggcag

SEQ ID NO: 1722921 - RNA, 19 nt, Artificial Sequence
  Description of Artificial Sequence: Synthetic oligonucleotide
  Sense strand starting at position 1046 of SEQ ID NO: 1562110
ccuggaucuccuuaauguc

SEQ ID NO: 1722922 - RNA, 19 nt, Artificial Sequence
  Description of Artificial Sequence: Synthetic oligonucleotide
  Antisense strand to SEQ ID NO: 1722921
gacauuaaggagauccagg

SEQ ID NO: 1722923 - RNA, 19 nt, Artificial Sequence
  Description of Artificial Sequence: Synthetic oligonucleotide
  Sense strand starting at position 1054 of SEQ ID NO: 1562110
uccuuaauguccucuggau

SEQ ID NO: 1722924 - RNA, 19 nt, Artificial Sequence
  Description of Artificial Sequence: Synthetic oligonucleotide
  Antisense strand to SEQ ID NO: 1722923
auccagaggacauuaagga

SEQ ID NO: 1722925 - RNA, 19 nt, Artificial Sequence
  Description of Artificial Sequence: Synthetic oligonucleotide
  Sense strand starting at position 1056 of SEQ ID NO: 1562110
cuuaauguccucuggauca

SEQ ID NO: 1722926 - RNA, 19 nt, Artificial Sequence
  Description of Artificial Sequence: Synthetic oligonucleotide
  Antisense strand to SEQ ID NO: 1722925
ugauccagaggacauuaag

SEQ ID NO: 1722927 - RNA, 19 nt, Artificial Sequence
  Description of Artificial Sequence: Synthetic oligonucleotide
  Sense strand starting at position 1066 of SEQ ID NO: 1562110
ucuggaucauucuugcuca

SEQ ID NO: 1722928 - RNA, 19 nt, Artificial Sequence
  Description of Artificial Sequence: Synthetic oligonucleotide
  Antisense strand to SEQ ID NO: 1722927
ugagcaagaaugauccaga

SEQ ID NO: 1722929 - RNA, 19 nt, Artificial Sequence
  Description of Artificial Sequence: Synthetic oligonucleotide
  Sense strand starting at position 1069 of SEQ ID NO: 1562110
ggaucauucuugcucagaa

SEQ ID NO: 1722930 - RNA, 19 nt, Artificial Sequence
  Description of Artificial Sequence: Synthetic oligonucleotide
  Antisense strand to SEQ ID NO: 1722929
uucugagcaagaaugaucc

SEQ ID NO: 1722931 - RNA, 19 nt, Artificial Sequence
  Description of Artificial Sequence: Synthetic oligonucleotide
  Sense strand starting at position 1071 of SEQ ID NO: 1562110
aucauucuugcucagaaag

SEQ ID NO: 1722932 - RNA, 19 nt, Artificial Sequence
  Description of Artificial Sequence: Synthetic oligonucleotide
  Antisense strand to SEQ ID NO: 1722931
cuuucugagcaagaaugau

SEQ ID NO: 1722933 - RNA, 19 nt, Artificial Sequence
  Description of Artificial Sequence: Synthetic oligonucleotide
  Sense strand starting at position 1140 of SEQ ID NO: 1562110
guauacucccuccaugcau

SEQ ID NO: 1722934 - RNA, 19 nt, Artificial Sequence
  Description of Artificial Sequence: Synthetic oligonucleotide
  Antisense strand to SEQ ID NO: 1722933
augcauggagggaguauac

SEQ ID NO: 1722935 - RNA, 19 nt, Artificial Sequence
  Description of Artificial Sequence: Synthetic oligonucleotide
  Sense strand starting at position 1328 of SEQ ID NO: 1562110
cucaguuaguacucaauga

SEQ ID NO: 1722936 - RNA, 19 nt, Artificial Sequence
  Description of Artificial Sequence: Synthetic oligonucleotide
  Antisense strand to SEQ ID NO: 1722935
ucauugaguacuaacugag

SEQ ID NO: 1722937 - RNA, 19 nt, Artificial Sequence
  Description of Artificial Sequence: Synthetic oligonucleotide
  Sense strand starting at position 1332 of SEQ ID NO: 1562110
guuaguacucaaugacuuu

SEQ ID NO: 1722938 - RNA, 19 nt, Artificial Sequence
  Description of Artificial Sequence: Synthetic oligonucleotide
  Antisense strand to SEQ ID NO: 1722937
aaagucauugaguacuaac

SEQ ID NO: 1722939 - RNA, 19 nt, Artificial Sequence
  Description of Artificial Sequence: Synthetic oligonucleotide
  Sense strand starting at position 1382 of SEQ ID NO: 1562110
gcugaugagaggugaaaug

SEQ ID NO: 1722940 - RNA, 19 nt, Artificial Sequence
  Description of Artificial Sequence: Synthetic oligonucleotide
  Antisense strand to SEQ ID NO: 1722939
cauuucaccucucaucagc

SEQ ID NO: 1722941 - RNA, 19 nt, Artificial Sequence
  Description of Artificial Sequence: Synthetic oligonucleotide
  Sense strand starting at position 1847 of SEQ ID NO: 1562110
caggaauuagcucacguga

SEQ ID NO: 1722942 - RNA, 19 nt, Artificial Sequence
  Description of Artificial Sequence: Synthetic oligonucleotide
  Antisense strand to SEQ ID NO: 1722941
ucacgugagcuaauuccug

SEQ ID NO: 1722943 - RNA, 19 nt, Artificial Sequence
  Description of Artificial Sequence: Synthetic oligonucleotide
  Sense strand starting at position 1852 of SEQ ID NO: 1562110
auuagcucacgugauucua

SEQ ID NO: 1722944 - RNA, 19 nt, Artificial Sequence
  Description of Artificial Sequence: Synthetic oligonucleotide
  Antisense strand to SEQ ID NO: 1722943
uagaaucacgugagcuaau

SEQ ID NO: 1722945 - RNA, 19 nt, Artificial Sequence
  Description of Artificial Sequence: Synthetic oligonucleotide
  Sense strand starting at position 1886 of SEQ ID NO: 1562110
caccguaugccgucugcaa

SEQ ID NO: 1722946 - RNA, 19 nt, Artificial Sequence
  Description of Artificial Sequence: Synthetic oligonucleotide
  Antisense strand to SEQ ID NO: 1722945
uugcagacggcauacggug

SEQ ID NO: 1722947 - RNA, 19 nt, Artificial Sequence
  Description of Artificial Sequence: Synthetic oligonucleotide
  Sense strand starting at position 1936 of SEQ ID NO: 1562110
ucacccugagucugaagau

SEQ ID NO: 1722948 - RNA, 19 nt, Artificial Sequence
  Description of Artificial Sequence: Synthetic oligonucleotide
  Antisense strand to SEQ ID NO: 1722947
aucuucagacucaggguga

SEQ ID NO: 1722949 - RNA, 19 nt, Artificial Sequence
  Description of Artificial Sequence: Synthetic oligonucleotide
  Sense strand starting at position 2286 of SEQ ID NO: 1562110
agugccaggguauagaaau

SEQ ID NO: 1722950 - RNA, 19 nt, Artificial Sequence
  Description of Artificial Sequence: Synthetic oligonucleotide
  Antisense strand to SEQ ID NO: 1722949
auuucuauacccuggcacu

SEQ ID NO: 1722951 - RNA, 19 nt, Artificial Sequence
  Description of Artificial Sequence: Synthetic oligonucleotide
  Sense strand starting at position 2417 of SEQ ID NO: 1562110
gaaacuccgugucuauaua

SEQ ID NO: 1722952 - RNA, 19 nt, Artificial Sequence
  Description of Artificial Sequence: Synthetic oligonucleotide
  Antisense strand to SEQ ID NO: 1722951
uauauagacacggaguuuc

SEQ ID NO: 1722953 - RNA, 19 nt, Artificial Sequence
  Description of Artificial Sequence: Synthetic oligonucleotide
  Sense strand starting at position 3067 of SEQ ID NO: 1562110
ggacacacuuagucuuuga

SEQ ID NO: 1722954 - RNA, 19 nt, Artificial Sequence
  Description of Artificial Sequence: Synthetic oligonucleotide
  Antisense strand to SEQ ID NO: 1722953
ucaaagacuaagugugucc

SEQ ID NO: 1722955 - RNA, 19 nt, Artificial Sequence
  Description of Artificial Sequence: Synthetic oligonucleotide
  Sense strand starting at position 3263 of SEQ ID NO: 1562110
guuggaauuugggauacug

SEQ ID NO: 1722956 - RNA, 19 nt, Artificial Sequence
  Description of Artificial Sequence: Synthetic oligonucleotide
  Antisense strand to SEQ ID NO: 1722955
caguaucccaaauuccaac

SEQ ID NO: 1722957 - RNA, 19 nt, Artificial Sequence
  Description of Artificial Sequence: Synthetic oligonucleotide
  Sense strand starting at position 3293 of SEQ ID NO: 1562110
gggcauagugacuaagcaa

SEQ ID NO: 1722958 - RNA, 19 nt, Artificial Sequence
  Description of Artificial Sequence: Synthetic oligonucleotide
  Antisense strand to SEQ ID NO: 1722957
uugcuuagucacuaugccc

SEQ ID NO: 1722959 - RNA, 19 nt, Artificial Sequence
  Description of Artificial Sequence: Synthetic oligonucleotide
  Sense strand starting at position 3850 of SEQ ID NO: 1562110
aggugcugucuccaggaau

SEQ ID NO: 1722960 - RNA, 19 nt, Artificial Sequence
  Description of Artificial Sequence: Synthetic oligonucleotide
  Antisense strand to SEQ ID NO: 1722959
auuccuggagacagcaccu

SEQ ID NO: 1722961 - RNA, 19 nt, Artificial Sequence
  Description of Artificial Sequence: Synthetic oligonucleotide
  Sense strand starting at position 3863 of SEQ ID NO: 1562110
aggaaugugugccuuagaa

SEQ ID NO: 1722962 - RNA, 19 nt, Artificial Sequence
  Description of Artificial Sequence: Synthetic oligonucleotide
  Antisense strand to SEQ ID NO: 1722961
uucuaaggcacacauuccu

SEQ ID NO: 1722963 - RNA, 19 nt, Artificial Sequence
  Description of Artificial Sequence: Synthetic oligonucleotide
  Sense strand starting at position 3884 of SEQ ID NO: 1562110
gagggaugugucuguacug

SEQ ID NO: 1722964 - RNA, 19 nt, Artificial Sequence
  Description of Artificial Sequence: Synthetic oligonucleotide
  Antisense strand to SEQ ID NO: 1722963
caguacagacacaucccuc

SEQ ID NO: 1722965 - RNA, 19 nt, Artificial Sequence
  Description of Artificial Sequence: Synthetic oligonucleotide
  Sense strand starting at position 3902 of SEQ ID NO: 1562110
gcaggaugugaagguuuaa

SEQ ID NO: 1722966 - RNA, 19 nt, Artificial Sequence
  Description of Artificial Sequence: Synthetic oligonucleotide
  Antisense strand to SEQ ID NO: 1722965
uuaaaccuucacauccugc

SEQ ID NO: 1722967 - RNA, 19 nt, Artificial Sequence
  Description of Artificial Sequence: Synthetic oligonucleotide
  Sense strand starting at position 6 of SEQ ID NO: 1562111
cccugucacugauugacuu

SEQ ID NO: 1722968 - RNA, 19 nt, Artificial Sequence
  Description of Artificial Sequence: Synthetic oligonucleotide
  Antisense strand to SEQ ID NO: 1722967
aagucaaucagugacaggg

SEQ ID NO: 1722969 - RNA, 19 nt, Artificial Sequence
  Description of Artificial Sequence: Synthetic oligonucleotide
  Sense strand starting at position 7 of SEQ ID NO: 1562111
ccugucacugauugacuua

SEQ ID NO: 1722970 - RNA, 19 nt, Artificial Sequence
  Description of Artificial Sequence: Synthetic oligonucleotide
  Antisense strand to SEQ ID NO: 1722969
uaagucaaucagugacagg

SEQ ID NO: 1722971 - RNA, 19 nt, Artificial Sequence
  Description of Artificial Sequence: Synthetic oligonucleotide
  Sense strand starting at position 10 of SEQ ID NO: 1562111
gucacugauugacuuaacu

SEQ ID NO: 1722972 - RNA, 19 nt, Artificial Sequence
  Description of Artificial Sequence: Synthetic oligonucleotide
  Antisense strand to SEQ ID NO: 1722971
aguuaagucaaucagugac

SEQ ID NO: 1722973 - RNA, 19 nt, Artificial Sequence
  Description of Artificial Sequence: Synthetic oligonucleotide
  Sense strand starting at position 83 of SEQ ID NO: 1562111
gugggaacucuaugucuca

SEQ ID NO: 1722974 - RNA, 19 nt, Artificial Sequence
  Description of Artificial Sequence: Synthetic oligonucleotide
  Antisense strand to SEQ ID NO: 1722973
ugagacauagaguucccac

SEQ ID NO: 1722975 - RNA, 19 nt, Artificial Sequence
  Description of Artificial Sequence: Synthetic oligonucleotide
  Sense strand starting at position 84 of SEQ ID NO: 1562111
ugggaacucuaugucucau

SEQ ID NO: 1722976 - RNA, 19 nt, Artificial Sequence
  Description of Artificial Sequence: Synthetic oligonucleotide
  Antisense strand to SEQ ID NO: 1722975
augagacauagaguuccca

SEQ ID NO: 1722977 - RNA, 19 nt, Artificial Sequence
  Description of Artificial Sequence: Synthetic oligonucleotide
  Sense strand starting at position 135 of SEQ ID NO: 1562111
cguguaauccacuaggaau

SEQ ID NO: 1722978 - RNA, 19 nt, Artificial Sequence
  Description of Artificial Sequence: Synthetic oligonucleotide
  Antisense strand to SEQ ID NO: 1722977
auuccuaguggauuacacg

SEQ ID NO: 1722979 - RNA, 19 nt, Artificial Sequence
  Description of Artificial Sequence: Synthetic oligonucleotide
  Sense strand starting at position 249 of SEQ ID NO: 1562111
gugagacugucaguagaca

SEQ ID NO: 1722980 - RNA, 19 nt, Artificial Sequence
  Description of Artificial Sequence: Synthetic oligonucleotide
  Antisense strand to SEQ ID NO: 1722979
ugucuacugacagucucac

SEQ ID NO: 1722981 - RNA, 19 nt, Artificial Sequence
  Description of Artificial Sequence: Synthetic oligonucleotide
  Sense strand starting at position 267 of SEQ ID NO: 1562111
agaagucuggcagauguga

SEQ ID NO: 1722982 - RNA, 19 nt, Artificial Sequence
  Description of Artificial Sequence: Synthetic oligonucleotide
  Antisense strand to SEQ ID NO: 1722981
ucacaucugccagacuucu

SEQ ID NO: 1722983 - RNA, 19 nt, Artificial Sequence
  Description of Artificial Sequence: Synthetic oligonucleotide
  Sense strand starting at position 280 of SEQ ID NO: 1562111
augugaaucugcccuggga

SEQ ID NO: 1722984 - RNA, 19 nt, Artificial Sequence
  Description of Artificial Sequence: Synthetic oligonucleotide
  Antisense strand to SEQ ID NO: 1722983
ucccagggcagauucacau

SEQ ID NO: 1722985 - RNA, 19 nt, Artificial Sequence
  Description of Artificial Sequence: Synthetic oligonucleotide
  Sense strand starting at position 282 of SEQ ID NO: 1562111
gugaaucugcccugggaga

SEQ ID NO: 1722986 - RNA, 19 nt, Artificial Sequence
  Description of Artificial Sequence: Synthetic oligonucleotide
  Antisense strand to SEQ ID NO: 1722985
ucucccagggcagauucac

SEQ ID NO: 1722987 - RNA, 19 nt, Artificial Sequence
  Description of Artificial Sequence: Synthetic oligonucleotide
  Sense strand starting at position 284 of SEQ ID NO: 1562111
gaaucugcccugggagaga

SEQ ID NO: 1722988 - RNA, 19 nt, Artificial Sequence
  Description of Artificial Sequence: Synthetic oligonucleotide
  Antisense strand to SEQ ID NO: 1722987
ucucucccagggcagauuc

SEQ ID NO: 1722989 - RNA, 19 nt, Artificial Sequence
  Description of Artificial Sequence: Synthetic oligonucleotide
  Sense strand starting at position 297 of SEQ ID NO: 1562111
gagagauucugcuucccuc

SEQ ID NO: 1722990 - RNA, 19 nt, Artificial Sequence
  Description of Artificial Sequence: Synthetic oligonucleotide
  Antisense strand to SEQ ID NO: 1722989
gagggaagcagaaucucuc

SEQ ID NO: 1722991 - RNA, 19 nt, Artificial Sequence
  Description of Artificial Sequence: Synthetic oligonucleotide
  Sense strand starting at position 426 of SEQ ID NO: 1562111
gacggacucucugcuauua

SEQ ID NO: 1722992 - RNA, 19 nt, Artificial Sequence
  Description of Artificial Sequence: Synthetic oligonucleotide
  Antisense strand to SEQ ID NO: 1722991
uaauagcagagaguccguc

SEQ ID NO: 1722993 - RNA, 19 nt, Artificial Sequence
  Description of Artificial Sequence: Synthetic oligonucleotide
  Sense strand starting at position 450 of SEQ ID NO: 1562111
aaugaugaagucugucaag

SEQ ID NO: 1722994 - RNA, 19 nt, Artificial Sequence
  Description of Artificial Sequence: Synthetic oligonucleotide
  Antisense strand to SEQ ID NO: 1722993
cuugacagacuucaucauu

SEQ ID NO: 1722995 - RNA, 19 nt, Artificial Sequence
  Description of Artificial Sequence: Synthetic oligonucleotide
  Sense strand starting at position 461 of SEQ ID NO: 1562111
cugucaagcggucugcuaa

SEQ ID NO: 1722996 - RNA, 19 nt, Artificial Sequence
  Description of Artificial Sequence: Synthetic oligonucleotide
  Antisense strand to SEQ ID NO: 1722995
uuagcagaccgcuugacag

SEQ ID NO: 1722997 - RNA, 19 nt, Artificial Sequence
  Description of Artificial Sequence: Synthetic oligonucleotide
  Sense strand starting at position 471 of SEQ ID NO: 1562111
gucugcuaagacugaauga

SEQ ID NO: 1722998 - RNA, 19 nt, Artificial Sequence
  Description of Artificial Sequence: Synthetic oligonucleotide
  Antisense strand to SEQ ID NO: 1722997
ucauucagucuuagcagac

SEQ ID NO: 1722999 - RNA, 19 nt, Artificial Sequence
  Description of Artificial Sequence: Synthetic oligonucleotide
  Sense strand starting at position 601 of SEQ ID NO: 1562111
gucuuuauucugcaccuca

SEQ ID NO: 1723000 - RNA, 19 nt, Artificial Sequence
  Description of Artificial Sequence: Synthetic oligonucleotide
  Antisense strand to SEQ ID NO: 1722999
ugaggugcagaauaaagac

SEQ ID NO: 1723001 - RNA, 19 nt, Artificial Sequence
  Description of Artificial Sequence: Synthetic oligonucleotide
  Sense strand starting at position 621 of SEQ ID NO: 1562111
gacaucuugcauuagagcu

SEQ ID NO: 1723002 - RNA, 19 nt, Artificial Sequence
  Description of Artificial Sequence: Synthetic oligonucleotide
  Antisense strand to SEQ ID NO: 1723001
agcucuaaugcaagauguc

SEQ ID NO: 1723003 - RNA, 19 nt, Artificial Sequence
  Description of Artificial Sequence: Synthetic oligonucleotide
  Sense strand starting at position 827 of SEQ ID NO: 1562111
agcugaaucccaggaucga

SEQ ID NO: 1723004 - RNA, 19 nt, Artificial Sequence
  Description of Artificial Sequence: Synthetic oligonucleotide
  Antisense strand to SEQ ID NO: 1723003
ucgauccugggauucagcu

SEQ ID NO: 1723005 - RNA, 19 nt, Artificial Sequence
  Description of Artificial Sequence: Synthetic oligonucleotide
  Sense strand starting at position 828 of SEQ ID NO: 1562111
gcugaaucccaggaucgaa

SEQ ID NO: 1723006 - RNA, 19 nt, Artificial Sequence
  Description of Artificial Sequence: Synthetic oligonucleotide
  Antisense strand to SEQ ID NO: 1723005
uucgauccugggauucagc

SEQ ID NO: 1723007 - RNA, 19 nt, Artificial Sequence
  Description of Artificial Sequence: Synthetic oligonucleotide
  Sense strand starting at position 979 of SEQ ID NO: 1562111
gugugaugcgugguccacu

SEQ ID NO: 1723008 - RNA, 19 nt, Artificial Sequence
  Description of Artificial Sequence: Synthetic oligonucleotide
  Antisense strand to SEQ ID NO: 1723007
aguggaccacgcaucacac

SEQ ID NO: 1723009 - RNA, 19 nt, Artificial Sequence
  Description of Artificial Sequence: Synthetic oligonucleotide
  Sense strand starting at position 1045 of SEQ ID NO: 1562111
ggaagaauucccugucuuc

SEQ ID NO: 1723010 - RNA, 19 nt, Artificial Sequence
  Description of Artificial Sequence: Synthetic oligonucleotide
  Antisense strand to SEQ ID NO: 1723009
gaagacagggaauucuucc

SEQ ID NO: 1723011 - RNA, 19 nt, Artificial Sequence
  Description of Artificial Sequence: Synthetic oligonucleotide
  Sense strand starting at position 1199 of SEQ ID NO: 1562111
cugcucucuggauggagaa

SEQ ID NO: 1723012 - RNA, 19 nt, Artificial Sequence
  Description of Artificial Sequence: Synthetic oligonucleotide
  Antisense strand to SEQ ID NO: 1723011
uucuccauccagagagcag

SEQ ID NO: 1723013 - RNA, 19 nt, Artificial Sequence
  Description of Artificial Sequence: Synthetic oligonucleotide
  Sense strand starting at position 2642 of SEQ ID NO: 1562111
caagaaggauucgcuggaa

SEQ ID NO: 1723014 - RNA, 19 nt, Artificial Sequence
  Description of Artificial Sequence: Synthetic oligonucleotide
  Antisense strand to SEQ ID NO: 1723013
uuccagcgaauccuucuug

SEQ ID NO: 1723015 - RNA, 19 nt, Artificial Sequence
  Description of Artificial Sequence: Synthetic oligonucleotide
  Sense strand starting at position 2645 of SEQ ID NO: 1562111
gaaggauucgcuggaaacu

SEQ ID NO: 1723016 - RNA, 19 nt, Artificial Sequence
  Description of Artificial Sequence: Synthetic oligonucleotide
  Antisense strand to SEQ ID NO: 1723015
aguuuccagcgaauccuuc

SEQ ID NO: 1723017 - RNA, 19 nt, Artificial Sequence
  Description of Artificial Sequence: Synthetic oligonucleotide
  Sense strand starting at position 2646 of SEQ ID NO: 1562111
aaggauucgcuggaaacuu

SEQ ID NO: 1723018 - RNA, 19 nt, Artificial Sequence
  Description of Artificial Sequence: Synthetic oligonucleotide
  Antisense strand to SEQ ID NO: 1723017
aaguuuccagcgaauccuu

SEQ ID NO: 1723019 - RNA, 19 nt, Artificial Sequence
  Description of Artificial Sequence: Synthetic oligonucleotide
  Sense strand starting at position 2853 of SEQ ID NO: 1562111
agaggcuguuaguuccaua

SEQ ID NO: 1723020 - RNA, 19 nt, Artificial Sequence
  Description of Artificial Sequence: Synthetic oligonucleotide
  Antisense strand to SEQ ID NO: 1723019
uauggaacuaacagccucu

SEQ ID NO: 1723021 - RNA, 19 nt, Artificial Sequence
  Description of Artificial Sequence: Synthetic oligonucleotide
  Sense strand starting at position 2858 of SEQ ID NO: 1562111
cuguuaguuccauaagggu

SEQ ID NO: 1723022 - RNA, 19 nt, Artificial Sequence
  Description of Artificial Sequence: Synthetic oligonucleotide
  Antisense strand to SEQ ID NO: 1723021
acccuuauggaacuaacag

SEQ ID NO: 1723023 - RNA, 19 nt, Artificial Sequence
  Description of Artificial Sequence: Synthetic oligonucleotide
  Sense strand starting at position 2939 of SEQ ID NO: 1562111
aauacuguggcugaucgaa

SEQ ID NO: 1723024 - RNA, 19 nt, Artificial Sequence
  Description of Artificial Sequence: Synthetic oligonucleotide
  Antisense strand to SEQ ID NO: 1723023
uucgaucagccacaguauu

SEQ ID NO: 1723025 - RNA, 19 nt, Artificial Sequence
  Description of Artificial Sequence: Synthetic oligonucleotide
  Sense strand starting at position 3213 of SEQ ID NO: 1562111
ccuggacucuucccagaug

SEQ ID NO: 1723026 - RNA, 19 nt, Artificial Sequence
  Description of Artificial Sequence: Synthetic oligonucleotide
  Antisense strand to SEQ ID NO: 1723025
caucugggaagaguccagg

SEQ ID NO: 1723027 - RNA, 19 nt, Artificial Sequence
  Description of Artificial Sequence: Synthetic oligonucleotide
  Sense strand starting at position 3216 of SEQ ID NO: 1562111
ggacucuucccagaugcua

SEQ ID NO: 1723028 - RNA, 19 nt, Artificial Sequence
  Description of Artificial Sequence: Synthetic oligonucleotide
  Antisense strand to SEQ ID NO: 1723027
uagcaucugggaagagucc

SEQ ID NO: 1723029 - RNA, 19 nt, Artificial Sequence
  Description of Artificial Sequence: Synthetic oligonucleotide
  Sense strand starting at position 3354 of SEQ ID NO: 1562111
ggugacugucuccauggaa

SEQ ID NO: 1723030 - RNA, 19 nt, Artificial Sequence
  Description of Artificial Sequence: Synthetic oligonucleotide
  Antisense strand to SEQ ID NO: 1723029
uuccauggagacagucacc

SEQ ID NO: 1723031 - RNA, 19 nt, Artificial Sequence
  Description of Artificial Sequence: Synthetic oligonucleotide
  Sense strand starting at position 3425 of SEQ ID NO: 1562111
cagagaaccucuguauaag

SEQ ID NO: 1723032 - RNA, 19 nt, Artificial Sequence
  Description of Artificial Sequence: Synthetic oligonucleotide
  Antisense strand to SEQ ID NO: 1723031
cuuauacagagguucucug

SEQ ID NO: 1723033 - RNA, 19 nt, Artificial Sequence
  Description of Artificial Sequence: Synthetic oligonucleotide
  Sense strand starting at position 3557 of SEQ ID NO: 1562111
gggcaaaggaagugguuau

SEQ ID NO: 1723034 - RNA, 19 nt, Artificial Sequence
  Description of Artificial Sequence: Synthetic oligonucleotide
  Antisense strand to SEQ ID NO: 1723033
auaaccacuuccuuugccc

SEQ ID NO: 1723035 - RNA, 19 nt, Artificial Sequence
  Description of Artificial Sequence: Synthetic oligonucleotide
  Sense strand starting at position 3558 of SEQ ID NO: 1562111
ggcaaaggaagugguuaua

SEQ ID NO: 1723036 - RNA, 19 nt, Artificial Sequence
  Description of Artificial Sequence: Synthetic oligonucleotide
  Antisense strand to SEQ ID NO: 1723035
uauaaccacuuccuuugcc

SEQ ID NO: 1723037 - RNA, 19 nt, Artificial Sequence
  Description of Artificial Sequence: Synthetic oligonucleotide
  Sense strand starting at position 3581 of SEQ ID NO: 1562111
gccuccuuuccagagaaag

SEQ ID NO: 1723038 - RNA, 19 nt, Artificial Sequence
  Description of Artificial Sequence: Synthetic oligonucleotide
  Antisense strand to SEQ ID NO: 1723037
cuuucucuggaaaggaggc

SEQ ID NO: 1723039 - RNA, 19 nt, Artificial Sequence
  Description of Artificial Sequence: Synthetic oligonucleotide
  Sense strand starting at position 3629 of SEQ ID NO: 1562111
uuccuuuguggguauauca

SEQ ID NO: 1723040 - RNA, 19 nt, Artificial Sequence
  Description of Artificial Sequence: Synthetic oligonucleotide
  Antisense strand to SEQ ID NO: 1723039
ugauauacccacaaaggaa

SEQ ID NO: 1723041 - RNA, 19 nt, Artificial Sequence
  Description of Artificial Sequence: Synthetic oligonucleotide
  Sense strand starting at position 3790 of SEQ ID NO: 1562111
gggagaauucucuaguugu

SEQ ID NO: 1723042 - RNA, 19 nt, Artificial Sequence
  Description of Artificial Sequence: Synthetic oligonucleotide
  Antisense strand to SEQ ID NO: 1723041
acaacuagagaauucuccc

SEQ ID NO: 1723043 - RNA, 19 nt, Artificial Sequence
  Description of Artificial Sequence: Synthetic oligonucleotide
  Sense strand starting at position 3805 of SEQ ID NO: 1562111
uuguguuaucuccaucaag

SEQ ID NO: 1723044 - RNA, 19 nt, Artificial Sequence
  Description of Artificial Sequence: Synthetic oligonucleotide
  Antisense strand to SEQ ID NO: 1723043
cuugauggagauaacacaa

SEQ ID NO: 1723045 - RNA, 19 nt, Artificial Sequence
  Description of Artificial Sequence: Synthetic oligonucleotide
  Sense strand starting at position 3845 of SEQ ID NO: 1562111
aaguuuaggagcugagaag

SEQ ID NO: 1723046 - RNA, 19 nt, Artificial Sequence
  Description of Artificial Sequence: Synthetic oligonucleotide
  Antisense strand to SEQ ID NO: 1723045
cuucucagcuccuaaacuu

SEQ ID NO: 1723047 - RNA, 19 nt, Artificial Sequence
  Description of Artificial Sequence: Synthetic oligonucleotide
  Sense strand starting at position 99 of SEQ ID NO: 1562112
agcugaguguccuuaagaa

SEQ ID NO: 1723048 - RNA, 19 nt, Artificial Sequence
  Description of Artificial Sequence: Synthetic oligonucleotide
  Antisense strand to SEQ ID NO: 1723047
uucuuaaggacacucagcu

SEQ ID NO: 1723049 - RNA, 19 nt, Artificial Sequence
  Description of Artificial Sequence: Synthetic oligonucleotide
  Sense strand starting at position 253 of SEQ ID NO: 1562112
uggugcagugguuaggaau

SEQ ID NO: 1723050 - RNA, 19 nt, Artificial Sequence
  Description of Artificial Sequence: Synthetic oligonucleotide
  Antisense strand to SEQ ID NO: 1723049
auuccuaaccacugcacca

SEQ ID NO: 1723051 - RNA, 19 nt, Artificial Sequence
  Description of Artificial Sequence: Synthetic oligonucleotide
  Sense strand starting at position 379 of SEQ ID NO: 1562112
ggauauuaaugccuaccuu

SEQ ID NO: 1723052 - RNA, 19 nt, Artificial Sequence
  Description of Artificial Sequence: Synthetic oligonucleotide
  Antisense strand to SEQ ID NO: 1723051
aagguaggcauuaauaucc

SEQ ID NO: 1723053 - RNA, 19 nt, Artificial Sequence
  Description of Artificial Sequence: Synthetic oligonucleotide
  Sense strand starting at position 430 of SEQ ID NO: 1562112
gacugugauucuccacaga

SEQ ID NO: 1723054 - RNA, 19 nt, Artificial Sequence
  Description of Artificial Sequence: Synthetic oligonucleotide
  Antisense strand to SEQ ID NO: 1723053
ucuguggagaaucacaguc

SEQ ID NO: 1723055 - RNA, 19 nt, Artificial Sequence
  Description of Artificial Sequence: Synthetic oligonucleotide
  Sense strand starting at position 433 of SEQ ID NO: 1562112
ugugauucuccacagaacg

SEQ ID NO: 1723056 - RNA, 19 nt, Artificial Sequence
  Description of Artificial Sequence: Synthetic oligonucleotide
  Antisense strand to SEQ ID NO: 1723055
cguucuguggagaaucaca

SEQ ID NO: 1723057 - RNA, 19 nt, Artificial Sequence
  Description of Artificial Sequence: Synthetic oligonucleotide
  Sense strand starting at position 1195 of SEQ ID NO: 1562112
augccaccuccaugagaga

SEQ ID NO: 1723058 - RNA, 19 nt, Artificial Sequence
  Description of Artificial Sequence: Synthetic oligonucleotide
  Antisense strand to SEQ ID NO: 1723057
ucucucauggagguggcau

SEQ ID NO: 1723059 - RNA, 19 nt, Artificial Sequence
  Description of Artificial Sequence: Synthetic oligonucleotide
  Sense strand starting at position 1210 of SEQ ID NO: 1562112
gagagagguuuauugucua

SEQ ID NO: 1723060 - RNA, 19 nt, Artificial Sequence
  Description of Artificial Sequence: Synthetic oligonucleotide
  Antisense strand to SEQ ID NO: 1723059
uagacaauaaaccucucuc

SEQ ID NO: 1723061 - RNA, 19 nt, Artificial Sequence
  Description of Artificial Sequence: Synthetic oligonucleotide
  Sense strand starting at position 1275 of SEQ ID NO: 1562112
guaguaggugcucacucaa

SEQ ID NO: 1723062 - RNA, 19 nt, Artificial Sequence
  Description of Artificial Sequence: Synthetic oligonucleotide
  Antisense strand to SEQ ID NO: 1723061
uugagugagcaccuacuac

SEQ ID NO: 1723063 - RNA, 19 nt, Artificial Sequence
  Description of Artificial Sequence: Synthetic oligonucleotide
  Sense strand starting at position 1282 of SEQ ID NO: 1562112
gugcucacucaagaaucaa

SEQ ID NO: 1723064 - RNA, 19 nt, Artificial Sequence
  Description of Artificial Sequence: Synthetic oligonucleotide
  Antisense strand to SEQ ID NO: 1723063
uugauucuugagugagcac

SEQ ID NO: 1723065 - RNA, 19 nt, Artificial Sequence
  Description of Artificial Sequence: Synthetic oligonucleotide
  Sense strand starting at position 1400 of SEQ ID NO: 1562112
guuagaaucuccuucucug

SEQ ID NO: 1723066 - RNA, 19 nt, Artificial Sequence
  Description of Artificial Sequence: Synthetic oligonucleotide
  Antisense strand to SEQ ID NO: 1723065
cagagaaggagauucuaac

SEQ ID NO: 1723067 - RNA, 19 nt, Artificial Sequence
  Description of Artificial Sequence: Synthetic oligonucleotide
  Sense strand starting at position 2243 of SEQ ID NO: 1562112
agccauccucccugguaga

SEQ ID NO: 1723068 - RNA, 19 nt, Artificial Sequence
  Description of Artificial Sequence: Synthetic oligonucleotide
  Antisense strand to SEQ ID NO: 1723067
ucuaccagggaggauggcu

SEQ ID NO: 1723069 - RNA, 19 nt, Artificial Sequence
  Description of Artificial Sequence: Synthetic oligonucleotide
  Sense strand starting at position 2244 of SEQ ID NO: 1562112
gccauccucccugguagaa

SEQ ID NO: 1723070 - RNA, 19 nt, Artificial Sequence
  Description of Artificial Sequence: Synthetic oligonucleotide
  Antisense strand to SEQ ID NO: 1723069
uucuaccagggaggauggc

SEQ ID NO: 1723071 - RNA, 19 nt, Artificial Sequence
  Description of Artificial Sequence: Synthetic oligonucleotide
  Sense strand starting at position 2288 of SEQ ID NO: 1562112
ggccucuuugcagggaaga

SEQ ID NO: 1723072 - RNA, 19 nt, Artificial Sequence
  Description of Artificial Sequence: Synthetic oligonucleotide
  Antisense strand to SEQ ID NO: 1723071
ucuucccugcaaagaggcc

SEQ ID NO: 1723073 - RNA, 19 nt, Artificial Sequence
  Description of Artificial Sequence: Synthetic oligonucleotide
  Sense strand starting at position 2612 of SEQ ID NO: 1562112
ugagaaauaucagcuagug

SEQ ID NO: 1723074 - RNA, 19 nt, Artificial Sequence
  Description of Artificial Sequence: Synthetic oligonucleotide
  Antisense strand to SEQ ID NO: 1723073
cacuagcugauauuucuca

SEQ ID NO: 1723075 - RNA, 19 nt, Artificial Sequence
  Description of Artificial Sequence: Synthetic oligonucleotide
  Sense strand starting at position 2691 of SEQ ID NO: 1562112
uuagcuugcugaucugaga

SEQ ID NO: 1723076 - RNA, 19 nt, Artificial Sequence
  Description of Artificial Sequence: Synthetic oligonucleotide
  Antisense strand to SEQ ID NO: 1723075
ucucagaucagcaagcuaa

SEQ ID NO: 1723077 - RNA, 19 nt, Artificial Sequence
  Description of Artificial Sequence: Synthetic oligonucleotide
  Sense strand starting at position 2892 of SEQ ID NO: 1562112
cagggucaggaauguagau

SEQ ID NO: 1723078 - RNA, 19 nt, Artificial Sequence
  Description of Artificial Sequence: Synthetic oligonucleotide
  Antisense strand to SEQ ID NO: 1723077
aucuacauuccugacccug

SEQ ID NO: 1723079 - RNA, 19 nt, Artificial Sequence
  Description of Artificial Sequence: Synthetic oligonucleotide
  Sense strand starting at position 2940 of SEQ ID NO: 1562112
gggaguucuaacugguuaa

SEQ ID NO: 1723080 - RNA, 19 nt, Artificial Sequence
  Description of Artificial Sequence: Synthetic oligonucleotide
  Antisense strand to SEQ ID NO: 1723079
uuaaccaguuagaacuccc

SEQ ID NO: 1723081 - RNA, 19 nt, Artificial Sequence
  Description of Artificial Sequence: Synthetic oligonucleotide
  Sense strand starting at position 2941 of SEQ ID NO: 1562112
ggaguucuaacugguuaag

SEQ ID NO: 1723082 - RNA, 19 nt, Artificial Sequence
  Description of Artificial Sequence: Synthetic oligonucleotide
  Antisense strand to SEQ ID NO: 1723081
cuuaaccaguuagaacucc

SEQ ID NO: 1723083 - RNA, 19 nt, Artificial Sequence
  Description of Artificial Sequence: Synthetic oligonucleotide
  Sense strand starting at position 3030 of SEQ ID NO: 1562112
uguggugagguuggagaaa

SEQ ID NO: 1723084 - RNA, 19 nt, Artificial Sequence
  Description of Artificial Sequence: Synthetic oligonucleotide
  Antisense strand to SEQ ID NO: 1723083
uuucuccaaccucaccaca

SEQ ID NO: 1723085 - RNA, 19 nt, Artificial Sequence
  Description of Artificial Sequence: Synthetic oligonucleotide
  Sense strand starting at position 3064 of SEQ ID NO: 1562112
uauauaugcuccguaagaa

SEQ ID NO: 1723086 - RNA, 19 nt, Artificial Sequence
  Description of Artificial Sequence: Synthetic oligonucleotide
  Antisense strand to SEQ ID NO: 1723085
uucuuacggagcauauaua

SEQ ID NO: 1723087 - RNA, 19 nt, Artificial Sequence
  Description of Artificial Sequence: Synthetic oligonucleotide
  Sense strand starting at position 3065 of SEQ ID NO: 1562112
auauaugcuccguaagaac

SEQ ID NO: 1723088 - RNA, 19 nt, Artificial Sequence
  Description of Artificial Sequence: Synthetic oligonucleotide
  Antisense strand to SEQ ID NO: 1723087
guucuuacggagcauauau

SEQ ID NO: 1723089 - RNA, 19 nt, Artificial Sequence
  Description of Artificial Sequence: Synthetic oligonucleotide
  Sense strand starting at position 3169 of SEQ ID NO: 1562112
aggcauccacguggaaaua

SEQ ID NO: 1723090 - RNA, 19 nt, Artificial Sequence
  Description of Artificial Sequence: Synthetic oligonucleotide
  Antisense strand to SEQ ID NO: 1723089
uauuuccacguggaugccu

SEQ ID NO: 1723091 - RNA, 19 nt, Artificial Sequence
  Description of Artificial Sequence: Synthetic oligonucleotide
  Sense strand starting at position 3198 of SEQ ID NO: 1562112
uggcuaugagccugggauu

SEQ ID NO: 1723092 - RNA, 19 nt, Artificial Sequence
  Description of Artificial Sequence: Synthetic oligonucleotide
  Antisense strand to SEQ ID NO: 1723091
aaucccaggcucauagcca

SEQ ID NO: 1723093 - RNA, 19 nt, Artificial Sequence
  Description of Artificial Sequence: Synthetic oligonucleotide
  Sense strand starting at position 3443 of SEQ ID NO: 1562112
gcagguaucucagcaaaga

SEQ ID NO: 1723094 - RNA, 19 nt, Artificial Sequence
  Description of Artificial Sequence: Synthetic oligonucleotide
  Antisense strand to SEQ ID NO: 1723093
ucuuugcugagauaccugc

SEQ ID NO: 1723095 - RNA, 19 nt, Artificial Sequence
  Description of Artificial Sequence: Synthetic oligonucleotide
  Sense strand starting at position 3444 of SEQ ID NO: 1562112
cagguaucucagcaaagau

SEQ ID NO: 1723096 - RNA, 19 nt, Artificial Sequence
  Description of Artificial Sequence: Synthetic oligonucleotide
  Antisense strand to SEQ ID NO: 1723095
aucuuugcugagauaccug

SEQ ID NO: 1723097 - RNA, 19 nt, Artificial Sequence
  Description of Artificial Sequence: Synthetic oligonucleotide
  Sense strand starting at position 3615 of SEQ ID NO: 1562112
gagugacacuguguaacuu

SEQ ID NO: 1723098 - RNA, 19 nt, Artificial Sequence
  Description of Artificial Sequence: Synthetic oligonucleotide
  Antisense strand to SEQ ID NO: 1723097
aaguuacacagugucacuc

SEQ ID NO: 1723099 - RNA, 19 nt, Artificial Sequence
  Description of Artificial Sequence: Synthetic oligonucleotide
  Sense strand starting at position 3690 of SEQ ID NO: 1562112
gucugauuacacugagacc

SEQ ID NO: 1723100 - RNA, 19 nt, Artificial Sequence
  Description of Artificial Sequence: Synthetic oligonucleotide
  Antisense strand to SEQ ID NO: 1723099
ggucucaguguaaucagac

SEQ ID NO: 1723101 - RNA, 19 nt, Artificial Sequence
  Description of Artificial Sequence: Synthetic oligonucleotide
  Sense strand starting at position 3712 of SEQ ID NO: 1562112
cugguauucguggccuagu

SEQ ID NO: 1723102 - RNA, 19 nt, Artificial Sequence
  Description of Artificial Sequence: Synthetic oligonucleotide
  Antisense strand to SEQ ID NO: 1723101
acuaggccacgaauaccag

SEQ ID NO: 1723103 - RNA, 19 nt, Artificial Sequence
  Description of Artificial Sequence: Synthetic oligonucleotide
  Sense strand starting at position 3738 of SEQ ID NO: 1562112
ucuucucuucuagauguca

SEQ ID NO: 1723104 - RNA, 19 nt, Artificial Sequence
  Description of Artificial Sequence: Synthetic oligonucleotide
  Antisense strand to SEQ ID NO: 1723103
ugacaucuagaagagaaga

SEQ ID NO: 1723105 - RNA, 19 nt, Artificial Sequence
  Description of Artificial Sequence: Synthetic oligonucleotide
  Sense strand starting at position 3746 of SEQ ID NO: 1562112
ucuagaugucacuagaagu

SEQ ID NO: 1723106 - RNA, 19 nt, Artificial Sequence
  Description of Artificial Sequence: Synthetic oligonucleotide
  Antisense strand to SEQ ID NO: 1723105
acuucuagugacaucuaga

SEQ ID NO: 1723107 - RNA, 19 nt, Artificial Sequence
  Description of Artificial Sequence: Synthetic oligonucleotide
  Sense strand starting at position 3757 of SEQ ID NO: 1562112
cuagaaguaucacuuagca

SEQ ID NO: 1723108 - RNA, 19 nt, Artificial Sequence
  Description of Artificial Sequence: Synthetic oligonucleotide
  Antisense strand to SEQ ID NO: 1723107
ugcuaagugauacuucuag

SEQ ID NO: 1723109 - RNA, 19 nt, Artificial Sequence
  Description of Artificial Sequence: Synthetic oligonucleotide
  Sense strand starting at position 3769 of SEQ ID NO: 1562112
cuuagcaacgucuaaugaa

SEQ ID NO: 1723110 - RNA, 19 nt, Artificial Sequence
  Description of Artificial Sequence: Synthetic oligonucleotide
  Antisense strand to SEQ ID NO: 1723109
uucauuagacguugcuaag

SEQ ID NO: 1723111 - RNA, 19 nt, Artificial Sequence
  Description of Artificial Sequence: Synthetic oligonucleotide
  Sense strand starting at position 3797 of SEQ ID NO: 1562112
gcaaauaugguggauguca

SEQ ID NO: 1723112 - RNA, 19 nt, Artificial Sequence
  Description of Artificial Sequence: Synthetic oligonucleotide
  Antisense strand to SEQ ID NO: 1723111
ugacauccaccauauuugc

SEQ ID NO: 1723113 - RNA, 19 nt, Artificial Sequence
  Description of Artificial Sequence: Synthetic oligonucleotide
  Sense strand starting at position 3799 of SEQ ID NO: 1562112
aaauaugguggaugucauu

SEQ ID NO: 1723114 - RNA, 19 nt, Artificial Sequence
  Description of Artificial Sequence: Synthetic oligonucleotide
  Antisense strand to SEQ ID NO: 1723113
aaugacauccaccauauuu

SEQ ID NO: 1723115 - RNA, 19 nt, Artificial Sequence
  Description of Artificial Sequence: Synthetic oligonucleotide
  Sense strand starting at position 3818 of SEQ ID NO: 1562112
uucggauuagguuauaaau

SEQ ID NO: 1723116 - RNA, 19 nt, Artificial Sequence
  Description of Artificial Sequence: Synthetic oligonucleotide
  Antisense strand to SEQ ID NO: 1723115
auuuauaaccuaauccgaa

SEQ ID NO: 1723117 - RNA, 19 nt, Artificial Sequence
  Description of Artificial Sequence: Synthetic oligonucleotide
  Sense strand starting at position 3833 of SEQ ID NO: 1562112
aaaugauuucuguguuguu

SEQ ID NO: 1723118 - RNA, 19 nt, Artificial Sequence
  Description of Artificial Sequence: Synthetic oligonucleotide
  Antisense strand to SEQ ID NO: 1723117
aacaacacagaaaucauuu

SEQ ID NO: 1723119 - RNA, 19 nt, Artificial Sequence
  Description of Artificial Sequence: Synthetic oligonucleotide
  Sense strand starting at position 3834 of SEQ ID NO: 1562112
aaugauuucuguguuguuc

SEQ ID NO: 1723120 - RNA, 19 nt, Artificial Sequence
  Description of Artificial Sequence: Synthetic oligonucleotide
  Antisense strand to SEQ ID NO: 1723119
gaacaacacagaaaucauu

SEQ ID NO: 1723121 - RNA, 19 nt, Artificial Sequence
  Description of Artificial Sequence: Synthetic oligonucleotide
  Sense strand starting at position 3843 of SEQ ID NO: 1562112
uguguuguucaguuucgag

SEQ ID NO: 1723122 - RNA, 19 nt, Artificial Sequence
  Description of Artificial Sequence: Synthetic oligonucleotide
  Antisense strand to SEQ ID NO: 1723121
cucgaaacugaacaacaca

SEQ ID NO: 1723123 - RNA, 19 nt, Artificial Sequence
  Description of Artificial Sequence: Synthetic oligonucleotide
  Sense strand starting at position 3869 of SEQ ID NO: 1562112
acuuguuugcucugaugaa

SEQ ID NO: 1723124 - RNA, 19 nt, Artificial Sequence
  Description of Artificial Sequence: Synthetic oligonucleotide
  Antisense strand to SEQ ID NO: 1723123
uucaucagagcaaacaagu

SEQ ID NO: 1723125 - RNA, 19 nt, Artificial Sequence
  Description of Artificial Sequence: Synthetic oligonucleotide
  Sense strand starting at position 3972 of SEQ ID NO: 1562112
ggcaauaaccagugaggga

SEQ ID NO: 1723126 - RNA, 19 nt, Artificial Sequence
  Description of Artificial Sequence: Synthetic oligonucleotide
  Antisense strand to SEQ ID NO: 1723125
ucccucacugguuauugcc

SEQ ID NO: 1723127 - RNA, 19 nt, Artificial Sequence
  Description of Artificial Sequence: Synthetic oligonucleotide
  Sense strand starting at position 271 of SEQ ID NO: 1562113
aaaggagucccagguuuga

SEQ ID NO: 1723128 - RNA, 19 nt, Artificial Sequence
  Description of Artificial Sequence: Synthetic oligonucleotide
  Antisense strand to SEQ ID NO: 1723127
ucaaaccugggacuccuuu

SEQ ID NO: 1723129 - RNA, 19 nt, Artificial Sequence
  Description of Artificial Sequence: Synthetic oligonucleotide
  Sense strand starting at position 361 of SEQ ID NO: 1562113
gcagacaucugagucuuac

SEQ ID NO: 1723130 - RNA, 19 nt, Artificial Sequence
  Description of Artificial Sequence: Synthetic oligonucleotide
  Antisense strand to SEQ ID NO: 1723129
guaagacucagaugucugc

SEQ ID NO: 1723131 - RNA, 19 nt, Artificial Sequence
  Description of Artificial Sequence: Synthetic oligonucleotide
  Sense strand starting at position 371 of SEQ ID NO: 1562113
gagucuuaccugggcugaa

SEQ ID NO: 1723132 - RNA, 19 nt, Artificial Sequence
  Description of Artificial Sequence: Synthetic oligonucleotide
  Antisense strand to SEQ ID NO: 1723131
uucagcccagguaagacuc

SEQ ID NO: 1723133 - RNA, 19 nt, Artificial Sequence
  Description of Artificial Sequence: Synthetic oligonucleotide
  Sense strand starting at position 1152 of SEQ ID NO: 1562113
gggacucccagucaucgau

SEQ ID NO: 1723134 - RNA, 19 nt, Artificial Sequence
  Description of Artificial Sequence: Synthetic oligonucleotide
  Antisense strand to SEQ ID NO: 1723133
aucgaugacugggaguccc

SEQ ID NO: 1723135 - RNA, 19 nt, Artificial Sequence
  Description of Artificial Sequence: Synthetic oligonucleotide
  Sense strand starting at position 1209 of SEQ ID NO: 1562113
gguggcugguaauuacaaa

SEQ ID NO: 1723136 - RNA, 19 nt, Artificial Sequence
  Description of Artificial Sequence: Synthetic oligonucleotide
  Antisense strand to SEQ ID NO: 1723135
uuuguaauuaccagccacc

SEQ ID NO: 1723137 - RNA, 19 nt, Artificial Sequence
  Description of Artificial Sequence: Synthetic oligonucleotide
  Sense strand starting at position 1765 of SEQ ID NO: 1562113
ccaucuuugcagcgagaga

SEQ ID NO: 1723138 - RNA, 19 nt, Artificial Sequence
  Description of Artificial Sequence: Synthetic oligonucleotide
  Antisense strand to SEQ ID NO: 1723137
ucucucgcugcaaagaugg

SEQ ID NO: 1723139 - RNA, 19 nt, Artificial Sequence
  Description of Artificial Sequence: Synthetic oligonucleotide
  Sense strand starting at position 2426 of SEQ ID NO: 1562113
gcagcagguuacucuuuaa

SEQ ID NO: 1723140 - RNA, 19 nt, Artificial Sequence
  Description of Artificial Sequence: Synthetic oligonucleotide
  Antisense strand to SEQ ID NO: 1723139
uuaaagaguaaccugcugc

SEQ ID NO: 1723141 - RNA, 19 nt, Artificial Sequence
  Description of Artificial Sequence: Synthetic oligonucleotide
  Sense strand starting at position 2684 of SEQ ID NO: 1562113
cuccaagccuuccagagaa

SEQ ID NO: 1723142 - RNA, 19 nt, Artificial Sequence
  Description of Artificial Sequence: Synthetic oligonucleotide
  Antisense strand to SEQ ID NO: 1723141
uucucuggaaggcuuggag

SEQ ID NO: 1723143 - RNA, 19 nt, Artificial Sequence
  Description of Artificial Sequence: Synthetic oligonucleotide
  Sense strand starting at position 539 of SEQ ID NO: 1562114
gcgagucugugcacaggua

SEQ ID NO: 1723144 - RNA, 19 nt, Artificial Sequence
  Description of Artificial Sequence: Synthetic oligonucleotide
  Antisense strand to SEQ ID NO: 1723143
uaccugugcacagacucgc

SEQ ID NO: 1723145 - RNA, 19 nt, Artificial Sequence
  Description of Artificial Sequence: Synthetic oligonucleotide
  Sense strand starting at position 540 of SEQ ID NO: 1562114
cgagucugugcacagguaa

SEQ ID NO: 1723146 - RNA, 19 nt, Artificial Sequence
  Description of Artificial Sequence: Synthetic oligonucleotide
  Antisense strand to SEQ ID NO: 1723145
uuaccugugcacagacucg

SEQ ID NO: 1723147 - RNA, 19 nt, Artificial Sequence
  Description of Artificial Sequence: Synthetic oligonucleotide
  Sense strand starting at position 551 of SEQ ID NO: 1562114
acagguaaugcuggauuau

SEQ ID NO: 1723148 - RNA, 19 nt, Artificial Sequence
  Description of Artificial Sequence: Synthetic oligonucleotide
  Antisense strand to SEQ ID NO: 1723147
auaauccagcauuaccugu

SEQ ID NO: 1723149 - RNA, 19 nt, Artificial Sequence
  Description of Artificial Sequence: Synthetic oligonucleotide
  Sense strand starting at position 552 of SEQ ID NO: 1562114
cagguaaugcuggauuauu

SEQ ID NO: 1723150 - RNA, 19 nt, Artificial Sequence
  Description of Artificial Sequence: Synthetic oligonucleotide
  Antisense strand to SEQ ID NO: 1723149
aauaauccagcauuaccug

SEQ ID NO: 1723151 - RNA, 19 nt, Artificial Sequence
  Description of Artificial Sequence: Synthetic oligonucleotide
  Sense strand starting at position 562 of SEQ ID NO: 1562114
uggauuauugcggacuaaa

SEQ ID NO: 1723152 - RNA, 19 nt, Artificial Sequence
  Description of Artificial Sequence: Synthetic oligonucleotide
  Antisense strand to SEQ ID NO: 1723151
uuuaguccgcaauaaucca

SEQ ID NO: 1723153 - RNA, 19 nt, Artificial Sequence
  Description of Artificial Sequence: Synthetic oligonucleotide
  Sense strand starting at position 565 of SEQ ID NO: 1562114
auuauugcggacuaaaugu

SEQ ID NO: 1723154 - RNA, 19 nt, Artificial Sequence
  Description of Artificial Sequence: Synthetic oligonucleotide
  Antisense strand to SEQ ID NO: 1723153
acauuuaguccgcaauaau

SEQ ID NO: 1723155 - RNA, 19 nt, Artificial Sequence
  Description of Artificial Sequence: Synthetic oligonucleotide
  Sense strand starting at position 574 of SEQ ID NO: 1562114
gacuaaauguguuugugug

SEQ ID NO: 1723156 - RNA, 19 nt, Artificial Sequence
  Description of Artificial Sequence: Synthetic oligonucleotide
  Antisense strand to SEQ ID NO: 1723155
cacacaaacacauuuaguc

SEQ ID NO: 1723157 - RNA, 19 nt, Artificial Sequence
  Description of Artificial Sequence: Synthetic oligonucleotide
  Sense strand starting at position 615 of SEQ ID NO: 1562114
uguguauaccuguaugucu

SEQ ID NO: 1723158 - RNA, 19 nt, Artificial Sequence
  Description of Artificial Sequence: Synthetic oligonucleotide
  Antisense strand to SEQ ID NO: 1723157
agacauacagguauacaca

SEQ ID NO: 1723159 - RNA, 19 nt, Artificial Sequence
  Description of Artificial Sequence: Synthetic oligonucleotide
  Sense strand starting at position 709 of SEQ ID NO: 1562114
aaacgaauauucguguguu

SEQ ID NO: 1723160 - RNA, 19 nt, Artificial Sequence
  Description of Artificial Sequence: Synthetic oligonucleotide
  Antisense strand to SEQ ID NO: 1723159
aacacacgaauauucguuu

SEQ ID NO: 1723161 - RNA, 19 nt, Artificial Sequence
  Description of Artificial Sequence: Synthetic oligonucleotide
  Sense strand starting at position 727 of SEQ ID NO: 1562114
uugguaugugcagguauau

SEQ ID NO: 1723162 - RNA, 19 nt, Artificial Sequence
  Description of Artificial Sequence: Synthetic oligonucleotide
  Antisense strand to SEQ ID NO: 1723161
auauaccugcacauaccaa

SEQ ID NO: 1723163 - RNA, 19 nt, Artificial Sequence
  Description of Artificial Sequence: Synthetic oligonucleotide
  Sense strand starting at position 789 of SEQ ID NO: 1562114
gggauaguacuguggucua

SEQ ID NO: 1723164 - RNA, 19 nt, Artificial Sequence
  Description of Artificial Sequence: Synthetic oligonucleotide
  Antisense strand to SEQ ID NO: 1723163
uagaccacaguacuauccc

SEQ ID NO: 1723165 - RNA, 19 nt, Artificial Sequence
  Description of Artificial Sequence: Synthetic oligonucleotide
  Sense strand starting at position 792 of SEQ ID NO: 1562114
auaguacuguggucuauau

SEQ ID NO: 1723166 - RNA, 19 nt, Artificial Sequence
  Description of Artificial Sequence: Synthetic oligonucleotide
  Antisense strand to SEQ ID NO: 1723165
auauagaccacaguacuau

SEQ ID NO: 1723167 - RNA, 19 nt, Artificial Sequence
  Description of Artificial Sequence: Synthetic oligonucleotide
  Sense strand starting at position 794 of SEQ ID NO: 1562114
aguacuguggucuauauau

SEQ ID NO: 1723168 - RNA, 19 nt, Artificial Sequence
  Description of Artificial Sequence: Synthetic oligonucleotide
  Antisense strand to SEQ ID NO: 1723167
auauauagaccacaguacu

SEQ ID NO: 1723169 - RNA, 19 nt, Artificial Sequence
  Description of Artificial Sequence: Synthetic oligonucleotide
  Sense strand starting at position 874 of SEQ ID NO: 1562114
uguggugugccugccuaua

SEQ ID NO: 1723170 - RNA, 19 nt, Artificial Sequence
  Description of Artificial Sequence: Synthetic oligonucleotide
  Antisense strand to SEQ ID NO: 1723169
uauaggcaggcacaccaca

SEQ ID NO: 1723171 - RNA, 19 nt, Artificial Sequence
  Description of Artificial Sequence: Synthetic oligonucleotide
  Sense strand starting at position 1225 of SEQ ID NO: 1562114
gggagauuccuggguacag

SEQ ID NO: 1723172 - RNA, 19 nt, Artificial Sequence
  Description of Artificial Sequence: Synthetic oligonucleotide
  Antisense strand to SEQ ID NO: 1723171
cuguacccaggaaucuccc

SEQ ID NO: 1723173 - RNA, 19 nt, Artificial Sequence
  Description of Artificial Sequence: Synthetic oligonucleotide
  Sense strand starting at position 2311 of SEQ ID NO: 1562114
ggcgaagugcugcauuucu

SEQ ID NO: 1723174 - RNA, 19 nt, Artificial Sequence
  Description of Artificial Sequence: Synthetic oligonucleotide
  Antisense strand to SEQ ID NO: 1723173
agaaaugcagcacuucgcc

SEQ ID NO: 1723175 - RNA, 19 nt, Artificial Sequence
  Description of Artificial Sequence: Synthetic oligonucleotide
  Sense strand starting at position 2507 of SEQ ID NO: 1562114
gcaggacugaguugucagu

SEQ ID NO: 1723176 - RNA, 19 nt, Artificial Sequence
  Description of Artificial Sequence: Synthetic oligonucleotide
  Antisense strand to SEQ ID NO: 1723175
acugacaacucaguccugc

SEQ ID NO: 1723177 - RNA, 19 nt, Artificial Sequence
  Description of Artificial Sequence: Synthetic oligonucleotide
  Sense strand starting at position 2509 of SEQ ID NO: 1562114
aggacugaguugucagucu

SEQ ID NO: 1723178 - RNA, 19 nt, Artificial Sequence
  Description of Artificial Sequence: Synthetic oligonucleotide
  Antisense strand to SEQ ID NO: 1723177
agacugacaacucaguccu

SEQ ID NO: 1723179 - RNA, 19 nt, Artificial Sequence
  Description of Artificial Sequence: Synthetic oligonucleotide
  Sense strand starting at position 2536 of SEQ ID NO: 1562114
gcgggucgucuauaaguca

SEQ ID NO: 1723180 - RNA, 19 nt, Artificial Sequence
  Description of Artificial Sequence: Synthetic oligonucleotide
  Antisense strand to SEQ ID NO: 1723179
ugacuuauagacgacccgc

SEQ ID NO: 1723181 - RNA, 19 nt, Artificial Sequence
  Description of Artificial Sequence: Synthetic oligonucleotide
  Sense strand starting at position 2567 of SEQ ID NO: 1562114
cccauccuucgcgcguaaa

SEQ ID NO: 1723182 - RNA, 19 nt, Artificial Sequence
  Description of Artificial Sequence: Synthetic oligonucleotide
  Antisense strand to SEQ ID NO: 1723181
uuuacgcgcgaaggauggg

SEQ ID NO: 1723183 - RNA, 19 nt, Artificial Sequence
  Description of Artificial Sequence: Synthetic oligonucleotide
  Sense strand starting at position 2736 of SEQ ID NO: 1562114
ucuccaaaugcgugcagaa

SEQ ID NO: 1723184 - RNA, 19 nt, Artificial Sequence
  Description of Artificial Sequence: Synthetic oligonucleotide
  Antisense strand to SEQ ID NO: 1723183
uucugcacgcauuuggaga

SEQ ID NO: 1723185 - RNA, 19 nt, Artificial Sequence
  Description of Artificial Sequence: Synthetic oligonucleotide
  Sense strand starting at position 2809 of SEQ ID NO: 1562114
gcaggacucuaugaggaca

SEQ ID NO: 1723186 - RNA, 19 nt, Artificial Sequence
  Description of Artificial Sequence: Synthetic oligonucleotide
  Antisense strand to SEQ ID NO: 1723185
uguccucauagaguccugc

SEQ ID NO: 1723187 - RNA, 19 nt, Artificial Sequence
  Description of Artificial Sequence: Synthetic oligonucleotide
  Sense strand starting at position 2986 of SEQ ID NO: 1562114
gugaaagcuugggcuguuu

SEQ ID NO: 1723188 - RNA, 19 nt, Artificial Sequence
  Description of Artificial Sequence: Synthetic oligonucleotide
  Antisense strand to SEQ ID NO: 1723187
aaacagcccaagcuuucac

SEQ ID NO: 1723189 - RNA, 19 nt, Artificial Sequence
  Description of Artificial Sequence: Synthetic oligonucleotide
  Sense strand starting at position 3055 of SEQ ID NO: 1562114
gacaaagaccgaugcugua

SEQ ID NO: 1723190 - RNA, 19 nt, Artificial Sequence
  Description of Artificial Sequence: Synthetic oligonucleotide
  Antisense strand to SEQ ID NO: 1723189
uacagcaucggucuuuguc

SEQ ID NO: 1723191 - RNA, 19 nt, Artificial Sequence
  Description of Artificial Sequence: Synthetic oligonucleotide
  Sense strand starting at position 3097 of SEQ ID NO: 1562114
caguguggccucugagaau

SEQ ID NO: 1723192 - RNA, 19 nt, Artificial Sequence
  Description of Artificial Sequence: Synthetic oligonucleotide
  Antisense strand to SEQ ID NO: 1723191
auucucagaggccacacug

SEQ ID NO: 1723193 - RNA, 19 nt, Artificial Sequence
  Description of Artificial Sequence: Synthetic oligonucleotide
  Sense strand starting at position 3103 of SEQ ID NO: 1562114
ggccucugagaaugagguu

SEQ ID NO: 1723194 - RNA, 19 nt, Artificial Sequence
  Description of Artificial Sequence: Synthetic oligonucleotide
  Antisense strand to SEQ ID NO: 1723193
aaccucauucucagaggcc

SEQ ID NO: 1723195 - RNA, 19 nt, Artificial Sequence
  Description of Artificial Sequence: Synthetic oligonucleotide
  Sense strand starting at position 3104 of SEQ ID NO: 1562114
gccucugagaaugagguuu

SEQ ID NO: 1723196 - RNA, 19 nt, Artificial Sequence
  Description of Artificial Sequence: Synthetic oligonucleotide
  Antisense strand to SEQ ID NO: 1723195
aaaccucauucucagaggc

SEQ ID NO: 1723197 - RNA, 19 nt, Artificial Sequence
  Description of Artificial Sequence: Synthetic oligonucleotide
  Sense strand starting at position 3110 of SEQ ID NO: 1562114
gagaaugagguuugguaac

SEQ ID NO: 1723198 - RNA, 19 nt, Artificial Sequence
  Description of Artificial Sequence: Synthetic oligonucleotide
  Antisense strand to SEQ ID NO: 1723197
guuaccaaaccucauucuc

SEQ ID NO: 1723199 - RNA, 19 nt, Artificial Sequence
  Description of Artificial Sequence: Synthetic oligonucleotide
  Sense strand starting at position 3239 of SEQ ID NO: 1562114
guguuagucccuuuguagu

SEQ ID NO: 1723200 - RNA, 19 nt, Artificial Sequence
  Description of Artificial Sequence: Synthetic oligonucleotide
  Antisense strand to SEQ ID NO: 1723199
acuacaaagggacuaacac

SEQ ID NO: 1723201 - RNA, 19 nt, Artificial Sequence
  Description of Artificial Sequence: Synthetic oligonucleotide
  Sense strand starting at position 3324 of SEQ ID NO: 1562114
ggcuccuccugagcaguaa

SEQ ID NO: 1723202 - RNA, 19 nt, Artificial Sequence
  Description of Artificial Sequence: Synthetic oligonucleotide
  Antisense strand to SEQ ID NO: 1723201
uuacugcucaggaggagcc

SEQ ID NO: 1723203 - RNA, 19 nt, Artificial Sequence
  Description of Artificial Sequence: Synthetic oligonucleotide
  Sense strand starting at position 3325 of SEQ ID NO: 1562114
gcuccuccugagcaguaaa

SEQ ID NO: 1723204 - RNA, 19 nt, Artificial Sequence
  Description of Artificial Sequence: Synthetic oligonucleotide
  Antisense strand to SEQ ID NO: 1723203
uuuacugcucaggaggagc

SEQ ID NO: 1723205 - RNA, 19 nt, Artificial Sequence
  Description of Artificial Sequence: Synthetic oligonucleotide
  Sense strand starting at position 3475 of SEQ ID NO: 1562114
ggcccuuucucccugggaa

SEQ ID NO: 1723206 - RNA, 19 nt, Artificial Sequence
  Description of Artificial Sequence: Synthetic oligonucleotide
  Antisense strand to SEQ ID NO: 1723205
uucccagggagaaagggcc

SEQ ID NO: 1723207 - RNA, 19 nt, Artificial Sequence
  Description of Artificial Sequence: Synthetic oligonucleotide
  Sense strand starting at position 3476 of SEQ ID NO: 1562114
gcccuuucucccugggaac

SEQ ID NO: 1723208 - RNA, 19 nt, Artificial Sequence
  Description of Artificial Sequence: Synthetic oligonucleotide
  Antisense strand to SEQ ID NO: 1723207
guucccagggagaaagggc

SEQ ID NO: 1723209 - RNA, 19 nt, Artificial Sequence
  Description of Artificial Sequence: Synthetic oligonucleotide
  Sense strand starting at position 3500 of SEQ ID NO: 1562114
ccacucuuucucugcagua

SEQ ID NO: 1723210 - RNA, 19 nt, Artificial Sequence
  Description of Artificial Sequence: Synthetic oligonucleotide
  Antisense strand to SEQ ID NO: 1723209
uacugcagagaaagagugg

SEQ ID NO: 1723211 - RNA, 19 nt, Artificial Sequence
  Description of Artificial Sequence: Synthetic oligonucleotide
  Sense strand starting at position 3502 of SEQ ID NO: 1562114
acucuuucucugcaguauu

SEQ ID NO: 1723212 - RNA, 19 nt, Artificial Sequence
  Description of Artificial Sequence: Synthetic oligonucleotide
  Antisense strand to SEQ ID NO: 1723211
aauacugcagagaaagagu

SEQ ID NO: 1723213 - RNA, 19 nt, Artificial Sequence
  Description of Artificial Sequence: Synthetic oligonucleotide
  Sense strand starting at position 3521 of SEQ ID NO: 1562114
ucuagauuagcucacguca

SEQ ID NO: 1723214 - RNA, 19 nt, Artificial Sequence
  Description of Artificial Sequence: Synthetic oligonucleotide
  Antisense strand to SEQ ID NO: 1723213
ugacgugagcuaaucuaga

SEQ ID NO: 1723215 - RNA, 19 nt, Artificial Sequence
  Description of Artificial Sequence: Synthetic oligonucleotide
  Sense strand starting at position 3562 of SEQ ID NO: 1562114
gggcuuuggccagagaguu

SEQ ID NO: 1723216 - RNA, 19 nt, Artificial Sequence
  Description of Artificial Sequence: Synthetic oligonucleotide
  Antisense strand to SEQ ID NO: 1723215
aacucucuggccaaagccc

SEQ ID NO: 1723217 - RNA, 19 nt, Artificial Sequence
  Description of Artificial Sequence: Synthetic oligonucleotide
  Sense strand starting at position 3671 of SEQ ID NO: 1562114
ggaggcuucucuccagaua

SEQ ID NO: 1723218 - RNA, 19 nt, Artificial Sequence
  Description of Artificial Sequence: Synthetic oligonucleotide
  Antisense strand to SEQ ID NO: 1723217
uaucuggagagaagccucc

SEQ ID NO: 1723219 - RNA, 19 nt, Artificial Sequence
  Description of Artificial Sequence: Synthetic oligonucleotide
  Sense strand starting at position 3672 of SEQ ID NO: 1562114
gaggcuucucuccagauag

SEQ ID NO: 1723220 - RNA, 19 nt, Artificial Sequence
  Description of Artificial Sequence: Synthetic oligonucleotide
  Antisense strand to SEQ ID NO: 1723219
cuaucuggagagaagccuc

SEQ ID NO: 1723221 - RNA, 19 nt, Artificial Sequence
  Description of Artificial Sequence: Synthetic oligonucleotide
  Sense strand starting at position 3892 of SEQ ID NO: 1562114
auagaaccguccuccaaau

SEQ ID NO: 1723222 - RNA, 19 nt, Artificial Sequence
  Description of Artificial Sequence: Synthetic oligonucleotide
  Antisense strand to SEQ ID NO: 1723221
auuuggaggacgguucuau

SEQ ID NO: 1723223 - RNA, 19 nt, Artificial Sequence
  Description of Artificial Sequence: Synthetic oligonucleotide
  Sense strand starting at position 17 of SEQ ID NO: 1562115
guuagacacugagaaucaa

SEQ ID NO: 1723224 - RNA, 19 nt, Artificial Sequence
  Description of Artificial Sequence: Synthetic oligonucleotide
  Antisense strand to SEQ ID NO: 1723223
uugauucucagugucuaac

SEQ ID NO: 1723225 - RNA, 19 nt, Artificial Sequence
  Description of Artificial Sequence: Synthetic oligonucleotide
  Sense strand starting at position 60 of SEQ ID NO: 1562115
gugugacccuaaguuacuu

SEQ ID NO: 1723226 - RNA, 19 nt, Artificial Sequence
  Description of Artificial Sequence: Synthetic oligonucleotide
  Antisense strand to SEQ ID NO: 1723225
aaguaacuuagggucacac

SEQ ID NO: 1723227 - RNA, 19 nt, Artificial Sequence
  Description of Artificial Sequence: Synthetic oligonucleotide
  Sense strand starting at position 299 of SEQ ID NO: 1562115
aggcuuagucucuauucuu

SEQ ID NO: 1723228 - RNA, 19 nt, Artificial Sequence
  Description of Artificial Sequence: Synthetic oligonucleotide
  Antisense strand to SEQ ID NO: 1723227
aagaauagagacuaagccu

SEQ ID NO: 1723229 - RNA, 19 nt, Artificial Sequence
  Description of Artificial Sequence: Synthetic oligonucleotide
  Sense strand starting at position 607 of SEQ ID NO: 1562115
cggcuuagucucuauucuu

SEQ ID NO: 1723230 - RNA, 19 nt, Artificial Sequence
  Description of Artificial Sequence: Synthetic oligonucleotide
  Antisense strand to SEQ ID NO: 1723229
aagaauagagacuaagccg

SEQ ID NO: 1723231 - RNA, 19 nt, Artificial Sequence
  Description of Artificial Sequence: Synthetic oligonucleotide
  Sense strand starting at position 930 of SEQ ID NO: 1562115
guagcugcacuccaaauau

SEQ ID NO: 1723232 - RNA, 19 nt, Artificial Sequence
  Description of Artificial Sequence: Synthetic oligonucleotide
  Antisense strand to SEQ ID NO: 1723231
auauuuggagugcagcuac

SEQ ID NO: 1723233 - RNA, 19 nt, Artificial Sequence
  Description of Artificial Sequence: Synthetic oligonucleotide
  Sense strand starting at position 966 of SEQ ID NO: 1562115
cuaagaagauuucguaauu

SEQ ID NO: 1723234 - RNA, 19 nt, Artificial Sequence
  Description of Artificial Sequence: Synthetic oligonucleotide
  Antisense strand to SEQ ID NO: 1723233
aauuacgaaaucuucuuag

SEQ ID NO: 1723235 - RNA, 19 nt, Artificial Sequence
  Description of Artificial Sequence: Synthetic oligonucleotide
  Sense strand starting at position 978 of SEQ ID NO: 1562115
cguaauuauuucucacgcu

SEQ ID NO: 1723236 - RNA, 19 nt, Artificial Sequence
  Description of Artificial Sequence: Synthetic oligonucleotide
  Antisense strand to SEQ ID NO: 1723235
agcgugagaaauaauuacg

SEQ ID NO: 1723237 - RNA, 19 nt, Artificial Sequence
  Description of Artificial Sequence: Synthetic oligonucleotide
  Sense strand starting at position 1020 of SEQ ID NO: 1562115
aguaaaugccagcauaaua

SEQ ID NO: 1723238 - RNA, 19 nt, Artificial Sequence
  Description of Artificial Sequence: Synthetic oligonucleotide
  Antisense strand to SEQ ID NO: 1723237
uauuaugcuggcauuuacu

SEQ ID NO: 1723239 - RNA, 19 nt, Artificial Sequence
  Description of Artificial Sequence: Synthetic oligonucleotide
  Sense strand starting at position 1078 of SEQ ID NO: 1562115
agucaucuuugaccacuua

SEQ ID NO: 1723240 - RNA, 19 nt, Artificial Sequence
  Description of Artificial Sequence: Synthetic oligonucleotide
  Antisense strand to SEQ ID NO: 1723239
uaaguggucaaagaugacu

SEQ ID NO: 1723241 - RNA, 19 nt, Artificial Sequence
  Description of Artificial Sequence: Synthetic oligonucleotide
  Sense strand starting at position 1079 of SEQ ID NO: 1562115
gucaucuuugaccacuuau

SEQ ID NO: 1723242 - RNA, 19 nt, Artificial Sequence
  Description of Artificial Sequence: Synthetic oligonucleotide
  Antisense strand to SEQ ID NO: 1723241
auaaguggucaaagaugac

SEQ ID NO: 1723243 - RNA, 19 nt, Artificial Sequence
  Description of Artificial Sequence: Synthetic oligonucleotide
  Sense strand starting at position 1262 of SEQ ID NO: 1562115
cccuaaggccuggaaucua

SEQ ID NO: 1723244 - RNA, 19 nt, Artificial Sequence
  Description of Artificial Sequence: Synthetic oligonucleotide
  Antisense strand to SEQ ID NO: 1723243
uagauuccaggccuuaggg

SEQ ID NO: 1723245 - RNA, 19 nt, Artificial Sequence
  Description of Artificial Sequence: Synthetic oligonucleotide
  Sense strand starting at position 1570 of SEQ ID NO: 1562115
uuguuugcucacguguuua

SEQ ID NO: 1723246 - RNA, 19 nt, Artificial Sequence
  Description of Artificial Sequence: Synthetic oligonucleotide
  Antisense strand to SEQ ID NO: 1723245
uaaacacgugagcaaacaa

SEQ ID NO: 1723247 - RNA, 19 nt, Artificial Sequence
  Description of Artificial Sequence: Synthetic oligonucleotide
  Sense strand starting at position 1572 of SEQ ID NO: 1562115
guuugcucacguguuuacu

SEQ ID NO: 1723248 - RNA, 19 nt, Artificial Sequence
  Description of Artificial Sequence: Synthetic oligonucleotide
  Antisense strand to SEQ ID NO: 1723247
aguaaacacgugagcaaac

SEQ ID NO: 1723249 - RNA, 19 nt, Artificial Sequence
  Description of Artificial Sequence: Synthetic oligonucleotide
  Sense strand starting at position 2224 of SEQ ID NO: 1562115
ccugcuaguguucugcaua

SEQ ID NO: 1723250 - RNA, 19 nt, Artificial Sequence
  Description of Artificial Sequence: Synthetic oligonucleotide
  Antisense strand to SEQ ID NO: 1723249
uaugcagaacacuagcagg

SEQ ID NO: 1723251 - RNA, 19 nt, Artificial Sequence
  Description of Artificial Sequence: Synthetic oligonucleotide
  Sense strand starting at position 2227 of SEQ ID NO: 1562115
gcuaguguucugcauacag

SEQ ID NO: 1723252 - RNA, 19 nt, Artificial Sequence
  Description of Artificial Sequence: Synthetic oligonucleotide
  Antisense strand to SEQ ID NO: 1723251
cuguaugcagaacacuagc

SEQ ID NO: 1723253 - RNA, 19 nt, Artificial Sequence
  Description of Artificial Sequence: Synthetic oligonucleotide
  Sense strand starting at position 2345 of SEQ ID NO: 1562115
uaaguaucucaugggcuuu

SEQ ID NO: 1723254 - RNA, 19 nt, Artificial Sequence
  Description of Artificial Sequence: Synthetic oligonucleotide
  Antisense strand to SEQ ID NO: 1723253
aaagcccaugagauacuua

SEQ ID NO: 1723255 - RNA, 19 nt, Artificial Sequence
  Description of Artificial Sequence: Synthetic oligonucleotide
  Sense strand starting at position 2409 of SEQ ID NO: 1562115
uugggcgauccagaaguaa

SEQ ID NO: 1723256 - RNA, 19 nt, Artificial Sequence
  Description of Artificial Sequence: Synthetic oligonucleotide
  Antisense strand to SEQ ID NO: 1723255
uuacuucuggaucgcccaa

SEQ ID NO: 1723257 - RNA, 19 nt, Artificial Sequence
  Description of Artificial Sequence: Synthetic oligonucleotide
  Sense strand starting at position 2429 of SEQ ID NO: 1562115
acgaaacauuugugaaaua

SEQ ID NO: 1723258 - RNA, 19 nt, Artificial Sequence
  Description of Artificial Sequence: Synthetic oligonucleotide
  Antisense strand to SEQ ID NO: 1723257
uauuucacaaauguuucgu

SEQ ID NO: 1723259 - RNA, 19 nt, Artificial Sequence
  Description of Artificial Sequence: Synthetic oligonucleotide
  Sense strand starting at position 2430 of SEQ ID NO: 1562115
cgaaacauuugugaaauau

SEQ ID NO: 1723260 - RNA, 19 nt, Artificial Sequence
  Description of Artificial Sequence: Synthetic oligonucleotide
  Antisense strand to SEQ ID NO: 1723259
auauuucacaaauguuucg

SEQ ID NO: 1723261 - RNA, 19 nt, Artificial Sequence
  Description of Artificial Sequence: Synthetic oligonucleotide
  Sense strand starting at position 2525 of SEQ ID NO: 1562115
augggagaauccuaaagga

SEQ ID NO: 1723262 - RNA, 19 nt, Artificial Sequence
  Description of Artificial Sequence: Synthetic oligonucleotide
  Antisense strand to SEQ ID NO: 1723261
uccuuuaggauucucccau

SEQ ID NO: 1723263 - RNA, 19 nt, Artificial Sequence
  Description of Artificial Sequence: Synthetic oligonucleotide
  Sense strand starting at position 2586 of SEQ ID NO: 1562115
uguaacuguggugguuaaa

SEQ ID NO: 1723264 - RNA, 19 nt, Artificial Sequence
  Description of Artificial Sequence: Synthetic oligonucleotide
  Antisense strand to SEQ ID NO: 1723263
uuuaaccaccacaguuaca

SEQ ID NO: 1723265 - RNA, 19 nt, Artificial Sequence
  Description of Artificial Sequence: Synthetic oligonucleotide
  Sense strand starting at position 2589 of SEQ ID NO: 1562115
aacuguggugguuaaagua

SEQ ID NO: 1723266 - RNA, 19 nt, Artificial Sequence
  Description of Artificial Sequence: Synthetic oligonucleotide
  Antisense strand to SEQ ID NO: 1723265
uacuuuaaccaccacaguu

SEQ ID NO: 1723267 - RNA, 19 nt, Artificial Sequence
  Description of Artificial Sequence: Synthetic oligonucleotide
  Sense strand starting at position 2663 of SEQ ID NO: 1562115
cuucaucuugcgggaugga

SEQ ID NO: 1723268 - RNA, 19 nt, Artificial Sequence
  Description of Artificial Sequence: Synthetic oligonucleotide
  Antisense strand to SEQ ID NO: 1723267
uccaucccgcaagaugaag

SEQ ID NO: 1723269 - RNA, 19 nt, Artificial Sequence
  Description of Artificial Sequence: Synthetic oligonucleotide
  Sense strand starting at position 2664 of SEQ ID NO: 1562115
uucaucuugcgggauggau

SEQ ID NO: 1723270 - RNA, 19 nt, Artificial Sequence
  Description of Artificial Sequence: Synthetic oligonucleotide
  Antisense strand to SEQ ID NO: 1723269
auccaucccgcaagaugaa

SEQ ID NO: 1723271 - RNA, 19 nt, Artificial Sequence
  Description of Artificial Sequence: Synthetic oligonucleotide
  Sense strand starting at position 2666 of SEQ ID NO: 1562115
caucuugcgggauggauua

SEQ ID NO: 1723272 - RNA, 19 nt, Artificial Sequence
  Description of Artificial Sequence: Synthetic oligonucleotide
  Antisense strand to SEQ ID NO: 1723271
uaauccaucccgcaagaug

SEQ ID NO: 1723273 - RNA, 19 nt, Artificial Sequence
  Description of Artificial Sequence: Synthetic oligonucleotide
  Sense strand starting at position 2668 of SEQ ID NO: 1562115
ucuugcgggauggauuaaa

SEQ ID NO: 1723274 - RNA, 19 nt, Artificial Sequence
  Description of Artificial Sequence: Synthetic oligonucleotide
  Antisense strand to SEQ ID NO: 1723273
uuuaauccaucccgcaaga

SEQ ID NO: 1723275 - RNA, 19 nt, Artificial Sequence
  Description of Artificial Sequence: Synthetic oligonucleotide
  Sense strand starting at position 2927 of SEQ ID NO: 1562115
uggcaucaugcaggcauua

SEQ ID NO: 1723276 - RNA, 19 nt, Artificial Sequence
  Description of Artificial Sequence: Synthetic oligonucleotide
  Antisense strand to SEQ ID NO: 1723275
uaaugccugcaugaugcca

SEQ ID NO: 1723277 - RNA, 19 nt, Artificial Sequence
  Description of Artificial Sequence: Synthetic oligonucleotide
  Sense strand starting at position 2929 of SEQ ID NO: 1562115
gcaucaugcaggcauuagu

SEQ ID NO: 1723278 - RNA, 19 nt, Artificial Sequence
  Description of Artificial Sequence: Synthetic oligonucleotide
  Antisense strand to SEQ ID NO: 1723277
acuaaugccugcaugaugc

SEQ ID NO: 1723279 - RNA, 19 nt, Artificial Sequence
  Description of Artificial Sequence: Synthetic oligonucleotide
  Sense strand starting at position 3052 of SEQ ID NO: 1562115
gaaagagccuguccucaca

SEQ ID NO: 1723280 - RNA, 19 nt, Artificial Sequence
  Description of Artificial Sequence: Synthetic oligonucleotide
  Antisense strand to SEQ ID NO: 1723279
ugugaggacaggcucuuuc

SEQ ID NO: 1723281 - RNA, 19 nt, Artificial Sequence
  Description of Artificial Sequence: Synthetic oligonucleotide
  Sense strand starting at position 3369 of SEQ ID NO: 1562115
gcaaucugugaacacucuu

SEQ ID NO: 1723282 - RNA, 19 nt, Artificial Sequence
  Description of Artificial Sequence: Synthetic oligonucleotide
  Antisense strand to SEQ ID NO: 1723281
aagaguguucacagauugc

SEQ ID NO: 1723283 - RNA, 19 nt, Artificial Sequence
  Description of Artificial Sequence: Synthetic oligonucleotide
  Sense strand starting at position 3451 of SEQ ID NO: 1562115
acucuuggaaggugacuaa

SEQ ID NO: 1723284 - RNA, 19 nt, Artificial Sequence
  Description of Artificial Sequence: Synthetic oligonucleotide
  Antisense strand to SEQ ID NO: 1723283
uuagucaccuuccaagagu

SEQ ID NO: 1723285 - RNA, 19 nt, Artificial Sequence
  Description of Artificial Sequence: Synthetic oligonucleotide
  Sense strand starting at position 3512 of SEQ ID NO: 1562115
gaucaagucuugucaaggu

SEQ ID NO: 1723286 - RNA, 19 nt, Artificial Sequence
  Description of Artificial Sequence: Synthetic oligonucleotide
  Antisense strand to SEQ ID NO: 1723285
accuugacaagacuugauc

SEQ ID NO: 1723287 - RNA, 19 nt, Artificial Sequence
  Description of Artificial Sequence: Synthetic oligonucleotide
  Sense strand starting at position 3657 of SEQ ID NO: 1562115
guuacaaucuuggcucaca

SEQ ID NO: 1723288 - RNA, 19 nt, Artificial Sequence
  Description of Artificial Sequence: Synthetic oligonucleotide
  Antisense strand to SEQ ID NO: 1723287
ugugagccaagauuguaac

SEQ ID NO: 1723289 - RNA, 19 nt, Artificial Sequence
  Description of Artificial Sequence: Synthetic oligonucleotide
  Sense strand starting at position 3765 of SEQ ID NO: 1562115
uauacacgucuguauaagu

SEQ ID NO: 1723290 - RNA, 19 nt, Artificial Sequence
  Description of Artificial Sequence: Synthetic oligonucleotide
  Antisense strand to SEQ ID NO: 1723289
acuuauacagacguguaua

SEQ ID NO: 1723291 - RNA, 19 nt, Artificial Sequence
  Description of Artificial Sequence: Synthetic oligonucleotide
  Sense strand starting at position 3778 of SEQ ID NO: 1562115
auaaguauggccuauagua

SEQ ID NO: 1723292 - RNA, 19 nt, Artificial Sequence
  Description of Artificial Sequence: Synthetic oligonucleotide
  Antisense strand to SEQ ID NO: 1723291
uacuauaggccauacuuau

SEQ ID NO: 1723293 - RNA, 19 nt, Artificial Sequence
  Description of Artificial Sequence: Synthetic oligonucleotide
  Sense strand starting at position 3780 of SEQ ID NO: 1562115
aaguauggccuauaguaau

SEQ ID NO: 1723294 - RNA, 19 nt, Artificial Sequence
  Description of Artificial Sequence: Synthetic oligonucleotide
  Antisense strand to SEQ ID NO: 1723293
auuacuauaggccauacuu

SEQ ID NO: 1723295 - RNA, 19 nt, Artificial Sequence
  Description of Artificial Sequence: Synthetic oligonucleotide
  Sense strand starting at position 3854 of SEQ ID NO: 1562115
acugaaugccaaugugcua

SEQ ID NO: 1723296 - RNA, 19 nt, Artificial Sequence
  Description of Artificial Sequence: Synthetic oligonucleotide
  Antisense strand to SEQ ID NO: 1723295
uagcacauuggcauucagu

SEQ ID NO: 1723297 - RNA, 19 nt, Artificial Sequence
  Description of Artificial Sequence: Synthetic oligonucleotide
  Sense strand starting at position 3873 of SEQ ID NO: 1562115
acguauguccagggagaga

SEQ ID NO: 1723298 - RNA, 19 nt, Artificial Sequence
  Description of Artificial Sequence: Synthetic oligonucleotide
  Antisense strand to SEQ ID NO: 1723297
ucucucccuggacauacgu

SEQ ID NO: 1723299 - RNA, 19 nt, Artificial Sequence
  Description of Artificial Sequence: Synthetic oligonucleotide
  Sense strand starting at position 3965 of SEQ ID NO: 1562115
ucagccagcucccugaaau

SEQ ID NO: 1723300 - RNA, 19 nt, Artificial Sequence
  Description of Artificial Sequence: Synthetic oligonucleotide
  Antisense strand to SEQ ID NO: 1723299
auuucagggagcuggcuga

SEQ ID NO: 1723301 - RNA, 19 nt, Artificial Sequence
  Description of Artificial Sequence: Synthetic oligonucleotide
  Sense strand starting at position 3975 of SEQ ID NO: 1562115
cccugaaaucauggccaau

SEQ ID NO: 1723302 - RNA, 19 nt, Artificial Sequence
  Description of Artificial Sequence: Synthetic oligonucleotide
  Antisense strand to SEQ ID NO: 1723301
auuggccaugauuucaggg

SEQ ID NO: 1723303 - RNA, 19 nt, Artificial Sequence
  Description of Artificial Sequence: Synthetic oligonucleotide
  Sense strand starting at position 11 of SEQ ID NO: 1562116
gcccaaggcuagucagaua

SEQ ID NO: 1723304 - RNA, 19 nt, Artificial Sequence
  Description of Artificial Sequence: Synthetic oligonucleotide
  Antisense strand to SEQ ID NO: 1723303
uaucugacuagccuugggc

SEQ ID NO: 1723305 - RNA, 19 nt, Artificial Sequence
  Description of Artificial Sequence: Synthetic oligonucleotide
  Sense strand starting at position 14 of SEQ ID NO: 1562116
caaggcuagucagauaaca

SEQ ID NO: 1723306 - RNA, 19 nt, Artificial Sequence
  Description of Artificial Sequence: Synthetic oligonucleotide
  Antisense strand to SEQ ID NO: 1723305
uguuaucugacuagccuug

SEQ ID NO: 1723307 - RNA, 19 nt, Artificial Sequence
  Description of Artificial Sequence: Synthetic oligonucleotide
  Sense strand starting at position 84 of SEQ ID NO: 1562116
ccaaguagcccaggagaau

SEQ ID NO: 1723308 - RNA, 19 nt, Artificial Sequence
  Description of Artificial Sequence: Synthetic oligonucleotide
  Antisense strand to SEQ ID NO: 1723307
auucuccugggcuacuugg

SEQ ID NO: 1723309 - RNA, 19 nt, Artificial Sequence
  Description of Artificial Sequence: Synthetic oligonucleotide
  Sense strand starting at position 141 of SEQ ID NO: 1562116
augucuagcuucccgaaga

SEQ ID NO: 1723310 - RNA, 19 nt, Artificial Sequence
  Description of Artificial Sequence: Synthetic oligonucleotide
  Antisense strand to SEQ ID NO: 1723309
ucuucgggaagcuagacau

SEQ ID NO: 1723311 - RNA, 19 nt, Artificial Sequence
  Description of Artificial Sequence: Synthetic oligonucleotide
  Sense strand starting at position 288 of SEQ ID NO: 1562116
ccgagagguacucacuuga

SEQ ID NO: 1723312 - RNA, 19 nt, Artificial Sequence
  Description of Artificial Sequence: Synthetic oligonucleotide
  Antisense strand to SEQ ID NO: 1723311
ucaagugaguaccucucgg

SEQ ID NO: 1723313 - RNA, 19 nt, Artificial Sequence
  Description of Artificial Sequence: Synthetic oligonucleotide
  Sense strand starting at position 299 of SEQ ID NO: 1562116
ucacuugaauccucgaagu

SEQ ID NO: 1723314 - RNA, 19 nt, Artificial Sequence
  Description of Artificial Sequence: Synthetic oligonucleotide
  Antisense strand to SEQ ID NO: 1723313
acuucgaggauucaaguga

SEQ ID NO: 1723315 - RNA, 19 nt, Artificial Sequence
  Description of Artificial Sequence: Synthetic oligonucleotide
  Sense strand starting at position 301 of SEQ ID NO: 1562116
acuugaauccucgaaguau

SEQ ID NO: 1723316 - RNA, 19 nt, Artificial Sequence
  Description of Artificial Sequence: Synthetic oligonucleotide
  Antisense strand to SEQ ID NO: 1723315
auacuucgaggauucaagu

SEQ ID NO: 1723317 - RNA, 19 nt, Artificial Sequence
  Description of Artificial Sequence: Synthetic oligonucleotide
  Sense strand starting at position 314 of SEQ ID NO: 1562116
aaguauccauucugcgaca

SEQ ID NO: 1723318 - RNA, 19 nt, Artificial Sequence
  Description of Artificial Sequence: Synthetic oligonucleotide
  Antisense strand to SEQ ID NO: 1723317
ugucgcagaauggauacuu

SEQ ID NO: 1723319 - RNA, 19 nt, Artificial Sequence
  Description of Artificial Sequence: Synthetic oligonucleotide
  Sense strand starting at position 315 of SEQ ID NO: 1562116
aguauccauucugcgacau

SEQ ID NO: 1723320 - RNA, 19 nt, Artificial Sequence
  Description of Artificial Sequence: Synthetic oligonucleotide
  Antisense strand to SEQ ID NO: 1723319
augucgcagaauggauacu

SEQ ID NO: 1723321 - RNA, 19 nt, Artificial Sequence
  Description of Artificial Sequence: Synthetic oligonucleotide
  Sense strand starting at position 316 of SEQ ID NO: 1562116
guauccauucugcgacaug

SEQ ID NO: 1723322 - RNA, 19 nt, Artificial Sequence
  Description of Artificial Sequence: Synthetic oligonucleotide
  Antisense strand to SEQ ID NO: 1723321
caugucgcagaauggauac

SEQ ID NO: 1723323 - RNA, 19 nt, Artificial Sequence
  Description of Artificial Sequence: Synthetic oligonucleotide
  Sense strand starting at position 432 of SEQ ID NO: 1562116
ggcucauuccuucgcucuu

SEQ ID NO: 1723324 - RNA, 19 nt, Artificial Sequence
  Description of Artificial Sequence: Synthetic oligonucleotide
  Antisense strand to SEQ ID NO: 1723323
aagagcgaaggaaugagcc

SEQ ID NO: 1723325 - RNA, 19 nt, Artificial Sequence
  Description of Artificial Sequence: Synthetic oligonucleotide
  Sense strand starting at position 441 of SEQ ID NO: 1562116
cuucgcucuuccgagggau

SEQ ID NO: 1723326 - RNA, 19 nt, Artificial Sequence
  Description of Artificial Sequence: Synthetic oligonucleotide
  Antisense strand to SEQ ID NO: 1723325
aucccucggaagagcgaag

SEQ ID NO: 1723327 - RNA, 19 nt, Artificial Sequence
  Description of Artificial Sequence: Synthetic oligonucleotide
  Sense strand starting at position 444 of SEQ ID NO: 1562116
cgcucuuccgagggaugca

SEQ ID NO: 1723328 - RNA, 19 nt, Artificial Sequence
  Description of Artificial Sequence: Synthetic oligonucleotide
  Antisense strand to SEQ ID NO: 1723327
ugcaucccucggaagagcg

SEQ ID NO: 1723329 - RNA, 19 nt, Artificial Sequence
  Description of Artificial Sequence: Synthetic oligonucleotide
  Sense strand starting at position 445 of SEQ ID NO: 1562116
gcucuuccgagggaugcaa

SEQ ID NO: 1723330 - RNA, 19 nt, Artificial Sequence
  Description of Artificial Sequence: Synthetic oligonucleotide
  Antisense strand to SEQ ID NO: 1723329
uugcaucccucggaagagc

SEQ ID NO: 1723331 - RNA, 19 nt, Artificial Sequence
  Description of Artificial Sequence: Synthetic oligonucleotide
  Sense strand starting at position 623 of SEQ ID NO: 1562116
augucuucccaccgaguua

SEQ ID NO: 1723332 - RNA, 19 nt, Artificial Sequence
  Description of Artificial Sequence: Synthetic oligonucleotide
  Antisense strand to SEQ ID NO: 1723331
uaacucggugggaagacau

SEQ ID NO: 1723333 - RNA, 19 nt, Artificial Sequence
  Description of Artificial Sequence: Synthetic oligonucleotide
  Sense strand starting at position 1286 of SEQ ID NO: 1562116
cagguaaagggucguacaa

SEQ ID NO: 1723334 - RNA, 19 nt, Artificial Sequence
  Description of Artificial Sequence: Synthetic oligonucleotide
  Antisense strand to SEQ ID NO: 1723333
uuguacgacccuuuaccug

SEQ ID NO: 1723335 - RNA, 19 nt, Artificial Sequence
  Description of Artificial Sequence: Synthetic oligonucleotide
  Sense strand starting at position 1288 of SEQ ID NO: 1562116
gguaaagggucguacaaac

SEQ ID NO: 1723336 - RNA, 19 nt, Artificial Sequence
  Description of Artificial Sequence: Synthetic oligonucleotide
  Antisense strand to SEQ ID NO: 1723335
guuuguacgacccuuuacc

SEQ ID NO: 1723337 - RNA, 19 nt, Artificial Sequence
  Description of Artificial Sequence: Synthetic oligonucleotide
  Sense strand starting at position 1627 of SEQ ID NO: 1562116
acagcagagcccuaaugaa

SEQ ID NO: 1723338 - RNA, 19 nt, Artificial Sequence
  Description of Artificial Sequence: Synthetic oligonucleotide
  Antisense strand to SEQ ID NO: 1723337
uucauuagggcucugcugu

SEQ ID NO: 1723339 - RNA, 19 nt, Artificial Sequence
  Description of Artificial Sequence: Synthetic oligonucleotide
  Sense strand starting at position 2423 of SEQ ID NO: 1562116
ugcauuuaucccgguagcu

SEQ ID NO: 1723340 - RNA, 19 nt, Artificial Sequence
  Description of Artificial Sequence: Synthetic oligonucleotide
  Antisense strand to SEQ ID NO: 1723339
agcuaccgggauaaaugca

SEQ ID NO: 1723341 - RNA, 19 nt, Artificial Sequence
  Description of Artificial Sequence: Synthetic oligonucleotide
  Sense strand starting at position 2736 of SEQ ID NO: 1562116
cgcuuagucuccugcgagu

SEQ ID NO: 1723342 - RNA, 19 nt, Artificial Sequence
  Description of Artificial Sequence: Synthetic oligonucleotide
  Antisense strand to SEQ ID NO: 1723341
acucgcaggagacuaagcg

SEQ ID NO: 1723343 - RNA, 19 nt, Artificial Sequence
  Description of Artificial Sequence: Synthetic oligonucleotide
  Sense strand starting at position 2738 of SEQ ID NO: 1562116
cuuagucuccugcgaguag

SEQ ID NO: 1723344 - RNA, 19 nt, Artificial Sequence
  Description of Artificial Sequence: Synthetic oligonucleotide
  Antisense strand to SEQ ID NO: 1723343
cuacucgcaggagacuaag

SEQ ID NO: 1723345 - RNA, 19 nt, Artificial Sequence
  Description of Artificial Sequence: Synthetic oligonucleotide
  Sense strand starting at position 2969 of SEQ ID NO: 1562116
gugcccuaaccaugguaga

SEQ ID NO: 1723346 - RNA, 19 nt, Artificial Sequence
  Description of Artificial Sequence: Synthetic oligonucleotide
  Antisense strand to SEQ ID NO: 1723345
ucuaccaugguuagggcac

SEQ ID NO: 1723347 - RNA, 19 nt, Artificial Sequence
  Description of Artificial Sequence: Synthetic oligonucleotide
  Sense strand starting at position 3048 of SEQ ID NO: 1562116
ggaagccucaugcauagau

SEQ ID NO: 1723348 - RNA, 19 nt, Artificial Sequence
  Description of Artificial Sequence: Synthetic oligonucleotide
  Antisense strand to SEQ ID NO: 1723347
aucuaugcaugaggcuucc

SEQ ID NO: 1723349 - RNA, 19 nt, Artificial Sequence
  Description of Artificial Sequence: Synthetic oligonucleotide
  Sense strand starting at position 3058 of SEQ ID NO: 1562116
ugcauagauugggugagua

SEQ ID NO: 1723350 - RNA, 19 nt, Artificial Sequence
  Description of Artificial Sequence: Synthetic oligonucleotide
  Antisense strand to SEQ ID NO: 1723349
uacucacccaaucuaugca

SEQ ID NO: 1723351 - RNA, 19 nt, Artificial Sequence
  Description of Artificial Sequence: Synthetic oligonucleotide
  Sense strand starting at position 3087 of SEQ ID NO: 1562116
aguucuccucccggcaaga

SEQ ID NO: 1723352 - RNA, 19 nt, Artificial Sequence
  Description of Artificial Sequence: Synthetic oligonucleotide
  Antisense strand to SEQ ID NO: 1723351
ucuugccgggaggagaacu

SEQ ID NO: 1723353 - RNA, 19 nt, Artificial Sequence
  Description of Artificial Sequence: Synthetic oligonucleotide
  Sense strand starting at position 3089 of SEQ ID NO: 1562116
uucuccucccggcaagaua

SEQ ID NO: 1723354 - RNA, 19 nt, Artificial Sequence
  Description of Artificial Sequence: Synthetic oligonucleotide
  Antisense strand to SEQ ID NO: 1723353
uaucuugccgggaggagaa

SEQ ID NO: 1723355 - RNA, 19 nt, Artificial Sequence
  Description of Artificial Sequence: Synthetic oligonucleotide
  Sense strand starting at position 3100 of SEQ ID NO: 1562116
gcaagauaagaacgcauua

SEQ ID NO: 1723356 - RNA, 19 nt, Artificial Sequence
  Description of Artificial Sequence: Synthetic oligonucleotide
  Antisense strand to SEQ ID NO: 1723355
uaaugcguucuuaucuugc

SEQ ID NO: 1723357 - RNA, 19 nt, Artificial Sequence
  Description of Artificial Sequence: Synthetic oligonucleotide
  Sense strand starting at position 3282 of SEQ ID NO: 1562116
gggugacucuggagagaca

SEQ ID NO: 1723358 - RNA, 19 nt, Artificial Sequence
  Description of Artificial Sequence: Synthetic oligonucleotide
  Antisense strand to SEQ ID NO: 1723357
ugucucuccagagucaccc

SEQ ID NO: 1723359 - RNA, 19 nt, Artificial Sequence
  Description of Artificial Sequence: Synthetic oligonucleotide
  Sense strand starting at position 3566 of SEQ ID NO: 1562116
acccacuuguuccaggaaa

SEQ ID NO: 1723360 - RNA, 19 nt, Artificial Sequence
  Description of Artificial Sequence: Synthetic oligonucleotide
  Antisense strand to SEQ ID NO: 1723359
uuuccuggaacaagugggu

SEQ ID NO: 1723361 - RNA, 19 nt, Artificial Sequence
  Description of Artificial Sequence: Synthetic oligonucleotide
  Sense strand starting at position 3568 of SEQ ID NO: 1562116
ccacuuguuccaggaaagc

SEQ ID NO: 1723362 - RNA, 19 nt, Artificial Sequence
  Description of Artificial Sequence: Synthetic oligonucleotide
  Antisense strand to SEQ ID NO: 1723361
gcuuuccuggaacaagugg

SEQ ID NO: 1723363 - RNA, 19 nt, Artificial Sequence
  Description of Artificial Sequence: Synthetic oligonucleotide
  Sense strand starting at position 3893 of SEQ ID NO: 1562116
ccuccuguccuguguagau

SEQ ID NO: 1723364 - RNA, 19 nt, Artificial Sequence
  Description of Artificial Sequence: Synthetic oligonucleotide
  Antisense strand to SEQ ID NO: 1723363
aucuacacaggacaggagg

SEQ ID NO: 1723365 - RNA, 19 nt, Artificial Sequence
  Description of Artificial Sequence: Synthetic oligonucleotide
  Sense strand starting at position 3962 of SEQ ID NO: 1562116
cccacuggguccuuacaua

SEQ ID NO: 1723366 - RNA, 19 nt, Artificial Sequence
  Description of Artificial Sequence: Synthetic oligonucleotide
  Antisense strand to SEQ ID NO: 1723365
uauguaaggacccaguggg

SEQ ID NO: 1723367 - RNA, 19 nt, Artificial Sequence
  Description of Artificial Sequence: Synthetic oligonucleotide
  Sense strand starting at position 445 of SEQ ID NO: 1562117
gguucuggagcucaugaua

SEQ ID NO: 1723368 - RNA, 19 nt, Artificial Sequence
  Description of Artificial Sequence: Synthetic oligonucleotide
  Antisense strand to SEQ ID NO: 1723367
uaucaugagcuccagaacc

SEQ ID NO: 1723369 - RNA, 19 nt, Artificial Sequence
  Description of Artificial Sequence: Synthetic oligonucleotide
  Sense strand starting at position 482 of SEQ ID NO: 1562117
ucaggcuugccuuguuuaa

SEQ ID NO: 1723370 - RNA, 19 nt, Artificial Sequence
  Description of Artificial Sequence: Synthetic oligonucleotide
  Antisense strand to SEQ ID NO: 1723369
uuaaacaaggcaagccuga

SEQ ID NO: 1723371 - RNA, 19 nt, Artificial Sequence
  Description of Artificial Sequence: Synthetic oligonucleotide
  Sense strand starting at position 484 of SEQ ID NO: 1562117
aggcuugccuuguuuaaac

SEQ ID NO: 1723372 - RNA, 19 nt, Artificial Sequence
  Description of Artificial Sequence: Synthetic oligonucleotide
  Antisense strand to SEQ ID NO: 1723371
guuuaaacaaggcaagccu

SEQ ID NO: 1723373 - RNA, 19 nt, Artificial Sequence
  Description of Artificial Sequence: Synthetic oligonucleotide
  Sense strand starting at position 780 of SEQ ID NO: 1562117
uccugagggcucuggguaa

SEQ ID NO: 1723374 - RNA, 19 nt, Artificial Sequence
  Description of Artificial Sequence: Synthetic oligonucleotide
  Antisense strand to SEQ ID NO: 1723373
uuacccagagcccucagga

SEQ ID NO: 1723375 - RNA, 19 nt, Artificial Sequence
  Description of Artificial Sequence: Synthetic oligonucleotide
  Sense strand starting at position 821 of SEQ ID NO: 1562117
cgcacugcucuacaaacaa

SEQ ID NO: 1723376 - RNA, 19 nt, Artificial Sequence
  Description of Artificial Sequence: Synthetic oligonucleotide
  Antisense strand to SEQ ID NO: 1723375
uuguuuguagagcagugcg

SEQ ID NO: 1723377 - RNA, 19 nt, Artificial Sequence
  Description of Artificial Sequence: Synthetic oligonucleotide
  Sense strand starting at position 842 of SEQ ID NO: 1562117
cucgaauggucaggucacu

SEQ ID NO: 1723378 - RNA, 19 nt, Artificial Sequence
  Description of Artificial Sequence: Synthetic oligonucleotide
  Antisense strand to SEQ ID NO: 1723377
agugaccugaccauucgag

SEQ ID NO: 1723379 - RNA, 19 nt, Artificial Sequence
  Description of Artificial Sequence: Synthetic oligonucleotide
  Sense strand starting at position 1051 of SEQ ID NO: 1562117
acagaauucuuggcccaag

SEQ ID NO: 1723380 - RNA, 19 nt, Artificial Sequence
  Description of Artificial Sequence: Synthetic oligonucleotide
  Antisense strand to SEQ ID NO: 1723379
cuugggccaagaauucugu

SEQ ID NO: 1723381 - RNA, 19 nt, Artificial Sequence
  Description of Artificial Sequence: Synthetic oligonucleotide
  Sense strand starting at position 1063 of SEQ ID NO: 1562117
gcccaaggcuagucagaua

SEQ ID NO: 1723382 - RNA, 19 nt, Artificial Sequence
  Description of Artificial Sequence: Synthetic oligonucleotide
  Antisense strand to SEQ ID NO: 1723381
uaucugacuagccuugggc

SEQ ID NO: 1723383 - RNA, 19 nt, Artificial Sequence
  Description of Artificial Sequence: Synthetic oligonucleotide
  Sense strand starting at position 1066 of SEQ ID NO: 1562117
caaggcuagucagauaaca

SEQ ID NO: 1723384 - RNA, 19 nt, Artificial Sequence
  Description of Artificial Sequence: Synthetic oligonucleotide
  Antisense strand to SEQ ID NO: 1723383
uguuaucugacuagccuug

SEQ ID NO: 1723385 - RNA, 19 nt, Artificial Sequence
  Description of Artificial Sequence: Synthetic oligonucleotide
  Sense strand starting at position 1136 of SEQ ID NO: 1562117
ccaaguagcccaggagaau

SEQ ID NO: 1723386 - RNA, 19 nt, Artificial Sequence
  Description of Artificial Sequence: Synthetic oligonucleotide
  Antisense strand to SEQ ID NO: 1723385
auucuccugggcuacuugg

SEQ ID NO: 1723387 - RNA, 19 nt, Artificial Sequence
  Description of Artificial Sequence: Synthetic oligonucleotide
  Sense strand starting at position 1193 of SEQ ID NO: 1562117
augucuagcuucccgaaga

SEQ ID NO: 1723388 - RNA, 19 nt, Artificial Sequence
  Description of Artificial Sequence: Synthetic oligonucleotide
  Antisense strand to SEQ ID NO: 1723387
ucuucgggaagcuagacau

SEQ ID NO: 1723389 - RNA, 19 nt, Artificial Sequence
  Description of Artificial Sequence: Synthetic oligonucleotide
  Sense strand starting at position 1340 of SEQ ID NO: 1562117
ccgagagguacucacuuga

SEQ ID NO: 1723390 - RNA, 19 nt, Artificial Sequence
  Description of Artificial Sequence: Synthetic oligonucleotide
  Antisense strand to SEQ ID NO: 1723389
ucaagugaguaccucucgg

SEQ ID NO: 1723391 - RNA, 19 nt, Artificial Sequence
  Description of Artificial Sequence: Synthetic oligonucleotide
  Sense strand starting at position 1351 of SEQ ID NO: 1562117
ucacuugaauccucgaagu

SEQ ID NO: 1723392 - RNA, 19 nt, Artificial Sequence
  Description of Artificial Sequence: Synthetic oligonucleotide
  Antisense strand to SEQ ID NO: 1723391
acuucgaggauucaaguga

SEQ ID NO: 1723393 - RNA, 19 nt, Artificial Sequence
  Description of Artificial Sequence: Synthetic oligonucleotide
  Sense strand starting at position 1353 of SEQ ID NO: 1562117
acuugaauccucgaaguau

SEQ ID NO: 1723394 - RNA, 19 nt, Artificial Sequence
  Description of Artificial Sequence: Synthetic oligonucleotide
  Antisense strand to SEQ ID NO: 1723393
auacuucgaggauucaagu

SEQ ID NO: 1723395 - RNA, 19 nt, Artificial Sequence
  Description of Artificial Sequence: Synthetic oligonucleotide
  Sense strand starting at position 1366 of SEQ ID NO: 1562117
aaguauccauucugcgaca

SEQ ID NO: 1723396 - RNA, 19 nt, Artificial Sequence
  Description of Artificial Sequence: Synthetic oligonucleotide
  Antisense strand to SEQ ID NO: 1723395
ugucgcagaauggauacuu

SEQ ID NO: 1723397 - RNA, 19 nt, Artificial Sequence
  Description of Artificial Sequence: Synthetic oligonucleotide
  Sense strand starting at position 1367 of SEQ ID NO: 1562117
aguauccauucugcgacau

SEQ ID NO: 1723398 - RNA, 19 nt, Artificial Sequence
  Description of Artificial Sequence: Synthetic oligonucleotide
  Antisense strand to SEQ ID NO: 1723397
augucgcagaauggauacu

SEQ ID NO: 1723399 - RNA, 19 nt, Artificial Sequence
  Description of Artificial Sequence: Synthetic oligonucleotide
  Sense strand starting at position 1368 of SEQ ID NO: 1562117
guauccauucugcgacaug

SEQ ID NO: 1723400 - RNA, 19 nt, Artificial Sequence
  Description of Artificial Sequence: Synthetic oligonucleotide
  Antisense strand to SEQ ID NO: 1723399
caugucgcagaauggauac

SEQ ID NO: 1723401 - RNA, 19 nt, Artificial Sequence
  Description of Artificial Sequence: Synthetic oligonucleotide
  Sense strand starting at position 1484 of SEQ ID NO: 1562117
ggcucauuccuucgcucuu

SEQ ID NO: 1723402 - RNA, 19 nt, Artificial Sequence
  Description of Artificial Sequence: Synthetic oligonucleotide
  Antisense strand to SEQ ID NO: 1723401
aagagcgaaggaaugagcc

SEQ ID NO: 1723403 - RNA, 19 nt, Artificial Sequence
  Description of Artificial Sequence: Synthetic oligonucleotide
  Sense strand starting at position 1493 of SEQ ID NO: 1562117
cuucgcucuuccgagggau

SEQ ID NO: 1723404 - RNA, 19 nt, Artificial Sequence
  Description of Artificial Sequence: Synthetic oligonucleotide
  Antisense strand to SEQ ID NO: 1723403
aucccucggaagagcgaag

SEQ ID NO: 1723405 - RNA, 19 nt, Artificial Sequence
  Description of Artificial Sequence: Synthetic oligonucleotide
  Sense strand starting at position 1496 of SEQ ID NO: 1562117
cgcucuuccgagggaugca

SEQ ID NO: 1723406 - RNA, 19 nt, Artificial Sequence
  Description of Artificial Sequence: Synthetic oligonucleotide
  Antisense strand to SEQ ID NO: 1723405
ugcaucccucggaagagcg

SEQ ID NO: 1723407 - RNA, 19 nt, Artificial Sequence
  Description of Artificial Sequence: Synthetic oligonucleotide
  Sense strand starting at position 1497 of SEQ ID NO: 1562117
gcucuuccgagggaugcaa

SEQ ID NO: 1723408 - RNA, 19 nt, Artificial Sequence
  Description of Artificial Sequence: Synthetic oligonucleotide
  Antisense strand to SEQ ID NO: 1723407
uugcaucccucggaagagc

SEQ ID NO: 1723409 - RNA, 19 nt, Artificial Sequence
  Description of Artificial Sequence: Synthetic oligonucleotide
  Sense strand starting at position 1675 of SEQ ID NO: 1562117
augucuucccaccgaguua

SEQ ID NO: 1723410 - RNA, 19 nt, Artificial Sequence
  Description of Artificial Sequence: Synthetic oligonucleotide
  Antisense strand to SEQ ID NO: 1723409
uaacucggugggaagacau

SEQ ID NO: 1723411 - RNA, 19 nt, Artificial Sequence
  Description of Artificial Sequence: Synthetic oligonucleotide
  Sense strand starting at position 2338 of SEQ ID NO: 1562117
cagguaaagggucguacaa

SEQ ID NO: 1723412 - RNA, 19 nt, Artificial Sequence
  Description of Artificial Sequence: Synthetic oligonucleotide
  Antisense strand to SEQ ID NO: 1723411
uuguacgacccuuuaccug

SEQ ID NO: 1723413 - RNA, 19 nt, Artificial Sequence
  Description of Artificial Sequence: Synthetic oligonucleotide
  Sense strand starting at position 2340 of SEQ ID NO: 1562117
gguaaagggucguacaaac

SEQ ID NO: 1723414 - RNA, 19 nt, Artificial Sequence
  Description of Artificial Sequence: Synthetic oligonucleotide
  Antisense strand to SEQ ID NO: 1723413
guuuguacgacccuuuacc

SEQ ID NO: 1723415 - RNA, 19 nt, Artificial Sequence
  Description of Artificial Sequence: Synthetic oligonucleotide
  Sense strand starting at position 2679 of SEQ ID NO: 1562117
acagcagagcccuaaugaa

SEQ ID NO: 1723416 - RNA, 19 nt, Artificial Sequence
  Description of Artificial Sequence: Synthetic oligonucleotide
  Antisense strand to SEQ ID NO: 1723415
uucauuagggcucugcugu

SEQ ID NO: 1723417 - RNA, 19 nt, Artificial Sequence
  Description of Artificial Sequence: Synthetic oligonucleotide
  Sense strand starting at position 3475 of SEQ ID NO: 1562117
ugcauuuaucccgguagcu

SEQ ID NO: 1723418 - RNA, 19 nt, Artificial Sequence
  Description of Artificial Sequence: Synthetic oligonucleotide
  Antisense strand to SEQ ID NO: 1723417
agcuaccgggauaaaugca

SEQ ID NO: 1723419 - RNA, 19 nt, Artificial Sequence
  Description of Artificial Sequence: Synthetic oligonucleotide
  Sense strand starting at position 3788 of SEQ ID NO: 1562117
cgcuuagucuccugcgagu

SEQ ID NO: 1723420 - RNA, 19 nt, Artificial Sequence
  Description of Artificial Sequence: Synthetic oligonucleotide
  Antisense strand to SEQ ID NO: 1723419
acucgcaggagacuaagcg

SEQ ID NO: 1723421 - RNA, 19 nt, Artificial Sequence
  Description of Artificial Sequence: Synthetic oligonucleotide
  Sense strand starting at position 3790 of SEQ ID NO: 1562117
cuuagucuccugcgaguag

SEQ ID NO: 1723422 - RNA, 19 nt, Artificial Sequence
  Description of Artificial Sequence: Synthetic oligonucleotide
  Antisense strand to SEQ ID NO: 1723421
cuacucgcaggagacuaag

SEQ ID NO: 1723423 - RNA, 19 nt, Artificial Sequence
  Description of Artificial Sequence: Synthetic oligonucleotide
  Sense strand starting at position 315 of SEQ ID NO: 1562118
cccacugaugccugacaga

SEQ ID NO: 1723424 - RNA, 19 nt, Artificial Sequence
  Description of Artificial Sequence: Synthetic oligonucleotide
  Antisense strand to SEQ ID NO: 1723423
ucugucaggcaucaguggg

SEQ ID NO: 1723425 - RNA, 19 nt, Artificial Sequence
  Description of Artificial Sequence: Synthetic oligonucleotide
  Sense strand starting at position 328 of SEQ ID NO: 1562118
gacagacaccugugcagaa

SEQ ID NO: 1723426 - RNA, 19 nt, Artificial Sequence
  Description of Artificial Sequence: Synthetic oligonucleotide
  Antisense strand to SEQ ID NO: 1723425
uucugcacaggugucuguc

SEQ ID NO: 1723427 - RNA, 19 nt, Artificial Sequence
  Description of Artificial Sequence: Synthetic oligonucleotide
  Sense strand starting at position 907 of SEQ ID NO: 1562118
gguucuggagcucaugaua

SEQ ID NO: 1723428 - RNA, 19 nt, Artificial Sequence
  Description of Artificial Sequence: Synthetic oligonucleotide
  Antisense strand to SEQ ID NO: 1723427
uaucaugagcuccagaacc

SEQ ID NO: 1723429 - RNA, 19 nt, Artificial Sequence
  Description of Artificial Sequence: Synthetic oligonucleotide
  Sense strand starting at position 944 of SEQ ID NO: 1562118
ucaggcuugccuuguuuaa

SEQ ID NO: 1723430 - RNA, 19 nt, Artificial Sequence
  Description of Artificial Sequence: Synthetic oligonucleotide
  Antisense strand to SEQ ID NO: 1723429
uuaaacaaggcaagccuga

SEQ ID NO: 1723431 - RNA, 19 nt, Artificial Sequence
  Description of Artificial Sequence: Synthetic oligonucleotide
  Sense strand starting at position 946 of SEQ ID NO: 1562118
aggcuugccuuguuuaaac

SEQ ID NO: 1723432 - RNA, 19 nt, Artificial Sequence
  Description of Artificial Sequence: Synthetic oligonucleotide
  Antisense strand to SEQ ID NO: 1723431
guuuaaacaaggcaagccu

SEQ ID NO: 1723433 - RNA, 19 nt, Artificial Sequence
  Description of Artificial Sequence: Synthetic oligonucleotide
  Sense strand starting at position 1242 of SEQ ID NO: 1562118
uccugagggcucuggguaa

SEQ ID NO: 1723434 - RNA, 19 nt, Artificial Sequence
  Description of Artificial Sequence: Synthetic oligonucleotide
  Antisense strand to SEQ ID NO: 1723433
uuacccagagcccucagga

SEQ ID NO: 1723435 - RNA, 19 nt, Artificial Sequence
  Description of Artificial Sequence: Synthetic oligonucleotide
  Sense strand starting at position 1283 of SEQ ID NO: 1562118
cgcacugcucuacaaacaa

SEQ ID NO: 1723436 - RNA, 19 nt, Artificial Sequence
  Description of Artificial Sequence: Synthetic oligonucleotide
  Antisense strand to SEQ ID NO: 1723435
uuguuuguagagcagugcg

SEQ ID NO: 1723437 - RNA, 19 nt, Artificial Sequence
  Description of Artificial Sequence: Synthetic oligonucleotide
  Sense strand starting at position 1304 of SEQ ID NO: 1562118
cucgaauggucaggucacu

SEQ ID NO: 1723438 - RNA, 19 nt, Artificial Sequence
  Description of Artificial Sequence: Synthetic oligonucleotide
  Antisense strand to SEQ ID NO: 1723437
agugaccugaccauucgag

SEQ ID NO: 1723439 - RNA, 19 nt, Artificial Sequence
  Description of Artificial Sequence: Synthetic oligonucleotide
  Sense strand starting at position 1513 of SEQ ID NO: 1562118
acagaauucuuggcccaag

SEQ ID NO: 1723440 - RNA, 19 nt, Artificial Sequence
  Description of Artificial Sequence: Synthetic oligonucleotide
  Antisense strand to SEQ ID NO: 1723439
cuugggccaagaauucugu

SEQ ID NO: 1723441 - RNA, 19 nt, Artificial Sequence
  Description of Artificial Sequence: Synthetic oligonucleotide
  Sense strand starting at position 1525 of SEQ ID NO: 1562118
gcccaaggcuagucagaua

SEQ ID NO: 1723442 - RNA, 19 nt, Artificial Sequence
  Description of Artificial Sequence: Synthetic oligonucleotide
  Antisense strand to SEQ ID NO: 1723441
uaucugacuagccuugggc

SEQ ID NO: 1723443 - RNA, 19 nt, Artificial Sequence
  Description of Artificial Sequence: Synthetic oligonucleotide
  Sense strand starting at position 1528 of SEQ ID NO: 1562118
caaggcuagucagauaaca

SEQ ID NO: 1723444 - RNA, 19 nt, Artificial Sequence
  Description of Artificial Sequence: Synthetic oligonucleotide
  Antisense strand to SEQ ID NO: 1723443
uguuaucugacuagccuug

SEQ ID NO: 1723445 - RNA, 19 nt, Artificial Sequence
  Description of Artificial Sequence: Synthetic oligonucleotide
  Sense strand starting at position 1598 of SEQ ID NO: 1562118
ccaaguagcccaggagaau

SEQ ID NO: 1723446 - RNA, 19 nt, Artificial Sequence
  Description of Artificial Sequence: Synthetic oligonucleotide
  Antisense strand to SEQ ID NO: 1723445
auucuccugggcuacuugg

SEQ ID NO: 1723447 - RNA, 19 nt, Artificial Sequence
  Description of Artificial Sequence: Synthetic oligonucleotide
  Sense strand starting at position 1655 of SEQ ID NO: 1562118
augucuagcuucccgaaga

SEQ ID NO: 1723448 - RNA, 19 nt, Artificial Sequence
  Description of Artificial Sequence: Synthetic oligonucleotide
  Antisense strand to SEQ ID NO: 1723447
ucuucgggaagcuagacau

SEQ ID NO: 1723449 - RNA, 19 nt, Artificial Sequence
  Description of Artificial Sequence: Synthetic oligonucleotide
  Sense strand starting at position 1802 of SEQ ID NO: 1562118
ccgagagguacucacuuga

SEQ ID NO: 1723450 - RNA, 19 nt, Artificial Sequence
  Description of Artificial Sequence: Synthetic oligonucleotide
  Antisense strand to SEQ ID NO: 1723449
ucaagugaguaccucucgg

SEQ ID NO: 1723451 - RNA, 19 nt, Artificial Sequence
  Description of Artificial Sequence: Synthetic oligonucleotide
  Sense strand starting at position 1813 of SEQ ID NO: 1562118
ucacuugaauccucgaagu

SEQ ID NO: 1723452 - RNA, 19 nt, Artificial Sequence
  Description of Artificial Sequence: Synthetic oligonucleotide
  Antisense strand to SEQ ID NO: 1723451
acuucgaggauucaaguga

SEQ ID NO: 1723453 - RNA, 19 nt, Artificial Sequence
  Description of Artificial Sequence: Synthetic oligonucleotide
  Sense strand starting at position 1815 of SEQ ID NO: 1562118
acuugaauccucgaaguau

SEQ ID NO: 1723454 - RNA, 19 nt, Artificial Sequence
  Description of Artificial Sequence: Synthetic oligonucleotide
  Antisense strand to SEQ ID NO: 1723453
auacuucgaggauucaagu

SEQ ID NO: 1723455 - RNA, 19 nt, Artificial Sequence
  Description of Artificial Sequence: Synthetic oligonucleotide
  Sense strand starting at position 1828 of SEQ ID NO: 1562118
aaguauccauucugcgaca

SEQ ID NO: 1723456 - RNA, 19 nt, Artificial Sequence
  Description of Artificial Sequence: Synthetic oligonucleotide
  Antisense strand to SEQ ID NO: 1723455
ugucgcagaauggauacuu

SEQ ID NO: 1723457 - RNA, 19 nt, Artificial Sequence
  Description of Artificial Sequence: Synthetic oligonucleotide
  Sense strand starting at position 1829 of SEQ ID NO: 1562118
aguauccauucugcgacau

SEQ ID NO: 1723458 - RNA, 19 nt, Artificial Sequence
  Description of Artificial Sequence: Synthetic oligonucleotide
  Antisense strand to SEQ ID NO: 1723457
augucgcagaauggauacu

SEQ ID NO: 1723459 - RNA, 19 nt, Artificial Sequence
  Description of Artificial Sequence: Synthetic oligonucleotide
  Sense strand starting at position 1830 of SEQ ID NO: 1562118
guauccauucugcgacaug

SEQ ID NO: 1723460 - RNA, 19 nt, Artificial Sequence
  Description of Artificial Sequence: Synthetic oligonucleotide
  Antisense strand to SEQ ID NO: 1723459
caugucgcagaauggauac

SEQ ID NO: 1723461 - RNA, 19 nt, Artificial Sequence
  Description of Artificial Sequence: Synthetic oligonucleotide
  Sense strand starting at position 1946 of SEQ ID NO: 1562118
ggcucauuccuucgcucuu

SEQ ID NO: 1723462 - RNA, 19 nt, Artificial Sequence
  Description of Artificial Sequence: Synthetic oligonucleotide
  Antisense strand to SEQ ID NO: 1723461
aagagcgaaggaaugagcc

SEQ ID NO: 1723463 - RNA, 19 nt, Artificial Sequence
  Description of Artificial Sequence: Synthetic oligonucleotide
  Sense strand starting at position 1955 of SEQ ID NO: 1562118
cuucgcucuuccgagggau

SEQ ID NO: 1723464 - RNA, 19 nt, Artificial Sequence
  Description of Artificial Sequence: Synthetic oligonucleotide
  Antisense strand to SEQ ID NO: 1723463
aucccucggaagagcgaag

SEQ ID NO: 1723465 - RNA, 19 nt, Artificial Sequence
  Description of Artificial Sequence: Synthetic oligonucleotide
  Sense strand starting at position 1958 of SEQ ID NO: 1562118
cgcucuuccgagggaugca

SEQ ID NO: 1723466 - RNA, 19 nt, Artificial Sequence
  Description of Artificial Sequence: Synthetic oligonucleotide
  Antisense strand to SEQ ID NO: 1723465
ugcaucccucggaagagcg

SEQ ID NO: 1723467 - RNA, 19 nt, Artificial Sequence
  Description of Artificial Sequence: Synthetic oligonucleotide
  Sense strand starting at position 1959 of SEQ ID NO: 1562118
gcucuuccgagggaugcaa

SEQ ID NO: 1723468 - RNA, 19 nt, Artificial Sequence
  Description of Artificial Sequence: Synthetic oligonucleotide
  Antisense strand to SEQ ID NO: 1723467
uugcaucccucggaagagc

SEQ ID NO: 1723469 - RNA, 19 nt, Artificial Sequence
  Description of Artificial Sequence: Synthetic oligonucleotide
  Sense strand starting at position 2137 of SEQ ID NO: 1562118
augucuucccaccgaguua

SEQ ID NO: 1723470 - RNA, 19 nt, Artificial Sequence
  Description of Artificial Sequence: Synthetic oligonucleotide
  Antisense strand to SEQ ID NO: 1723469
uaacucggugggaagacau

SEQ ID NO: 1723471 - RNA, 19 nt, Artificial Sequence
  Description of Artificial Sequence: Synthetic oligonucleotide
  Sense strand starting at position 2800 of SEQ ID NO: 1562118
cagguaaagggucguacaa

SEQ ID NO: 1723472 - RNA, 19 nt, Artificial Sequence
  Description of Artificial Sequence: Synthetic oligonucleotide
  Antisense strand to SEQ ID NO: 1723471
uuguacgacccuuuaccug

SEQ ID NO: 1723473 - RNA, 19 nt, Artificial Sequence
  Description of Artificial Sequence: Synthetic oligonucleotide
  Sense strand starting at position 2802 of SEQ ID NO: 1562118
gguaaagggucguacaaac

SEQ ID NO: 1723474 - RNA, 19 nt, Artificial Sequence
  Description of Artificial Sequence: Synthetic oligonucleotide
  Antisense strand to SEQ ID NO: 1723473
guuuguacgacccuuuacc

SEQ ID NO: 1723475 - RNA, 19 nt, Artificial Sequence
  Description of Artificial Sequence: Synthetic oligonucleotide
  Sense strand starting at position 3141 of SEQ ID NO: 1562118
acagcagagcccuaaugaa

SEQ ID NO: 1723476 - RNA, 19 nt, Artificial Sequence
  Description of Artificial Sequence: Synthetic oligonucleotide
  Antisense strand to SEQ ID NO: 1723475
uucauuagggcucugcugu

SEQ ID NO: 1723477 - RNA, 19 nt, Artificial Sequence
  Description of Artificial Sequence: Synthetic oligonucleotide
  Sense strand starting at position 3937 of SEQ ID NO: 1562118
ugcauuuaucccgguagcu

SEQ ID NO: 1723478 - RNA, 19 nt, Artificial Sequence
  Description of Artificial Sequence: Synthetic oligonucleotide
  Antisense strand to SEQ ID NO: 1723477
agcuaccgggauaaaugca

SEQ ID NO: 1723479 - RNA, 19 nt, Artificial Sequence
  Description of Artificial Sequence: Synthetic oligonucleotide
  Sense strand starting at position 202 of SEQ ID NO: 1562119
gcgcgugacauuccuaaua

SEQ ID NO: 1723480 - RNA, 19 nt, Artificial Sequence
  Description of Artificial Sequence: Synthetic oligonucleotide
  Antisense strand to SEQ ID NO: 1723479
uauuaggaaugucacgcgc

SEQ ID NO: 1723481 - RNA, 19 nt, Artificial Sequence
  Description of Artificial Sequence: Synthetic oligonucleotide
  Sense strand starting at position 270 of SEQ ID NO: 1562119
ggccaaggauaugaacaau

SEQ ID NO: 1723482 - RNA, 19 nt, Artificial Sequence
  Description of Artificial Sequence: Synthetic oligonucleotide
  Antisense strand to SEQ ID NO: 1723481
auuguucauauccuuggcc

SEQ ID NO: 1723483 - RNA, 19 nt, Artificial Sequence
  Description of Artificial Sequence: Synthetic oligonucleotide
  Sense strand starting at position 380 of SEQ ID NO: 1562119
ccaugagauugucccaaag

SEQ ID NO: 1723484 - RNA, 19 nt, Artificial Sequence
  Description of Artificial Sequence: Synthetic oligonucleotide
  Antisense strand to SEQ ID NO: 1723483
cuuugggacaaucucaugg

SEQ ID NO: 1723485 - RNA, 19 nt, Artificial Sequence
  Description of Artificial Sequence: Synthetic oligonucleotide
  Sense strand starting at position 424 of SEQ ID NO: 1562119
guuauuauagauugcgauc

SEQ ID NO: 1723486 - RNA, 19 nt, Artificial Sequence
  Description of Artificial Sequence: Synthetic oligonucleotide
  Antisense strand to SEQ ID NO: 1723485
gaucgcaaucuauaauaac

SEQ ID NO: 1723487 - RNA, 19 nt, Artificial Sequence
  Description of Artificial Sequence: Synthetic oligonucleotide
  Sense strand starting at position 436 of SEQ ID NO: 1562119
ugcgaucuuguugguaaua

SEQ ID NO: 1723488 - RNA, 19 nt, Artificial Sequence
  Description of Artificial Sequence: Synthetic oligonucleotide
  Antisense strand to SEQ ID NO: 1723487
uauuaccaacaagaucgca

SEQ ID NO: 1723489 - RNA, 19 nt, Artificial Sequence
  Description of Artificial Sequence: Synthetic oligonucleotide
  Sense strand starting at position 437 of SEQ ID NO: 1562119
gcgaucuuguugguaauag

SEQ ID NO: 1723490 - RNA, 19 nt, Artificial Sequence
  Description of Artificial Sequence: Synthetic oligonucleotide
  Antisense strand to SEQ ID NO: 1723489
cuauuaccaacaagaucgc

SEQ ID NO: 1723491 - RNA, 19 nt, Artificial Sequence
  Description of Artificial Sequence: Synthetic oligonucleotide
  Sense strand starting at position 449 of SEQ ID NO: 1562119
guaauagcaaguuauggga

SEQ ID NO: 1723492 - RNA, 19 nt, Artificial Sequence
  Description of Artificial Sequence: Synthetic oligonucleotide
  Antisense strand to SEQ ID NO: 1723491
ucccauaacuugcuauuac

SEQ ID NO: 1723493 - RNA, 19 nt, Artificial Sequence
  Description of Artificial Sequence: Synthetic oligonucleotide
  Sense strand starting at position 561 of SEQ ID NO: 1562119
aaagcagaucuuggugacu

SEQ ID NO: 1723494 - RNA, 19 nt, Artificial Sequence
  Description of Artificial Sequence: Synthetic oligonucleotide
  Antisense strand to SEQ ID NO: 1723493
agucaccaagaucugcuuu

SEQ ID NO: 1723495 - RNA, 19 nt, Artificial Sequence
  Description of Artificial Sequence: Synthetic oligonucleotide
  Sense strand starting at position 564 of SEQ ID NO: 1562119
gcagaucuuggugacugau

SEQ ID NO: 1723496 - RNA, 19 nt, Artificial Sequence
  Description of Artificial Sequence: Synthetic oligonucleotide
  Antisense strand to SEQ ID NO: 1723495
aucagucaccaagaucugc

SEQ ID NO: 1723497 - RNA, 19 nt, Artificial Sequence
  Description of Artificial Sequence: Synthetic oligonucleotide
  Sense strand starting at position 589 of SEQ ID NO: 1562119
aggucuccaggcuauaaua

SEQ ID NO: 1723498 - RNA, 19 nt, Artificial Sequence
  Description of Artificial Sequence: Synthetic oligonucleotide
  Antisense strand to SEQ ID NO: 1723497
uauuauagccuggagaccu

SEQ ID NO: 1723499 - RNA, 19 nt, Artificial Sequence
  Description of Artificial Sequence: Synthetic oligonucleotide
  Sense strand starting at position 591 of SEQ ID NO: 1562119
gucuccaggcuauaauaau

SEQ ID NO: 1723500 - RNA, 19 nt, Artificial Sequence
  Description of Artificial Sequence: Synthetic oligonucleotide
  Antisense strand to SEQ ID NO: 1723499
auuauuauagccuggagac

SEQ ID NO: 1723501 - RNA, 19 nt, Artificial Sequence
  Description of Artificial Sequence: Synthetic oligonucleotide
  Sense strand starting at position 756 of SEQ ID NO: 1562119
uggugaugccucuguauau

SEQ ID NO: 1723502 - RNA, 19 nt, Artificial Sequence
  Description of Artificial Sequence: Synthetic oligonucleotide
  Antisense strand to SEQ ID NO: 1723501
auauacagaggcaucacca

SEQ ID NO: 1723503 - RNA, 19 nt, Artificial Sequence
  Description of Artificial Sequence: Synthetic oligonucleotide
  Sense strand starting at position 757 of SEQ ID NO: 1562119
ggugaugccucuguauauc

SEQ ID NO: 1723504 - RNA, 19 nt, Artificial Sequence
  Description of Artificial Sequence: Synthetic oligonucleotide
  Antisense strand to SEQ ID NO: 1723503
gauauacagaggcaucacc

SEQ ID NO: 1723505 - RNA, 19 nt, Artificial Sequence
  Description of Artificial Sequence: Synthetic oligonucleotide
  Sense strand starting at position 1138 of SEQ ID NO: 1562119
auauaugguuaccugaaau

SEQ ID NO: 1723506 - RNA, 19 nt, Artificial Sequence
  Description of Artificial Sequence: Synthetic oligonucleotide
  Antisense strand to SEQ ID NO: 1723505
auuucagguaaccauauau

SEQ ID NO: 1723507 - RNA, 19 nt, Artificial Sequence
  Description of Artificial Sequence: Synthetic oligonucleotide
  Sense strand starting at position 1324 of SEQ ID NO: 1562119
uccuuagucugagcaguaa

SEQ ID NO: 1723508 - RNA, 19 nt, Artificial Sequence
  Description of Artificial Sequence: Synthetic oligonucleotide
  Antisense strand to SEQ ID NO: 1723507
uuacugcucagacuaagga

SEQ ID NO: 1723509 - RNA, 19 nt, Artificial Sequence
  Description of Artificial Sequence: Synthetic oligonucleotide
  Sense strand starting at position 1328 of SEQ ID NO: 1562119
uagucugagcaguaauaug

SEQ ID NO: 1723510 - RNA, 19 nt, Artificial Sequence
  Description of Artificial Sequence: Synthetic oligonucleotide
  Antisense strand to SEQ ID NO: 1723509
cauauuacugcucagacua

SEQ ID NO: 1723511 - RNA, 19 nt, Artificial Sequence
  Description of Artificial Sequence: Synthetic oligonucleotide
  Sense strand starting at position 1333 of SEQ ID NO: 1562119
ugagcaguaauaugggaga

SEQ ID NO: 1723512 - RNA, 19 nt, Artificial Sequence
  Description of Artificial Sequence: Synthetic oligonucleotide
  Antisense strand to SEQ ID NO: 1723511
ucucccauauuacugcuca

SEQ ID NO: 1723513 - RNA, 19 nt, Artificial Sequence
  Description of Artificial Sequence: Synthetic oligonucleotide
  Sense strand starting at position 1370 of SEQ ID NO: 1562119
ggagccagcuguuugaguu

SEQ ID NO: 1723514 - RNA, 19 nt, Artificial Sequence
  Description of Artificial Sequence: Synthetic oligonucleotide
  Antisense strand to SEQ ID NO: 1723513
aacucaaacagcuggcucc

SEQ ID NO: 1723515 - RNA, 19 nt, Artificial Sequence
  Description of Artificial Sequence: Synthetic oligonucleotide
  Sense strand starting at position 1403 of SEQ ID NO: 1562119
cugcuuacaaucuggguga

SEQ ID NO: 1723516 - RNA, 19 nt, Artificial Sequence
  Description of Artificial Sequence: Synthetic oligonucleotide
  Antisense strand to SEQ ID NO: 1723515
ucacccagauuguaagcag

SEQ ID NO: 1723517 - RNA, 19 nt, Artificial Sequence
  Description of Artificial Sequence: Synthetic oligonucleotide
  Sense strand starting at position 1455 of SEQ ID NO: 1562119
aucuccucaucuguaagua

SEQ ID NO: 1723518 - RNA, 19 nt, Artificial Sequence
  Description of Artificial Sequence: Synthetic oligonucleotide
  Antisense strand to SEQ ID NO: 1723517
uacuuacagaugaggagau

SEQ ID NO: 1723519 - RNA, 19 nt, Artificial Sequence
  Description of Artificial Sequence: Synthetic oligonucleotide
  Sense strand starting at position 1487 of SEQ ID NO: 1562119
guaugaacuccgugguuug

SEQ ID NO: 1723520 - RNA, 19 nt, Artificial Sequence
  Description of Artificial Sequence: Synthetic oligonucleotide
  Antisense strand to SEQ ID NO: 1723519
caaaccacggaguucauac

SEQ ID NO: 1723521 - RNA, 19 nt, Artificial Sequence
  Description of Artificial Sequence: Synthetic oligonucleotide
  Sense strand starting at position 1517 of SEQ ID NO: 1562119
aaggaugcuggugaguuua

SEQ ID NO: 1723522 - RNA, 19 nt, Artificial Sequence
  Description of Artificial Sequence: Synthetic oligonucleotide
  Antisense strand to SEQ ID NO: 1723521
uaaacucaccagcauccuu

SEQ ID NO: 1723523 - RNA, 19 nt, Artificial Sequence
  Description of Artificial Sequence: Synthetic oligonucleotide
  Sense strand starting at position 1530 of SEQ ID NO: 1562119
aguuuaugcuguuuccaac

SEQ ID NO: 1723524 - RNA, 19 nt, Artificial Sequence
  Description of Artificial Sequence: Synthetic oligonucleotide
  Antisense strand to SEQ ID NO: 1723523
guuggaaacagcauaaacu

SEQ ID NO: 1723525 - RNA, 19 nt, Artificial Sequence
  Description of Artificial Sequence: Synthetic oligonucleotide
  Sense strand starting at position 1575 of SEQ ID NO: 1562119
aaggguuacugaucauuau

SEQ ID NO: 1723526 - RNA, 19 nt, Artificial Sequence
  Description of Artificial Sequence: Synthetic oligonucleotide
  Antisense strand to SEQ ID NO: 1723525
auaaugaucaguaacccuu

SEQ ID NO: 1723527 - RNA, 19 nt, Artificial Sequence
  Description of Artificial Sequence: Synthetic oligonucleotide
  Sense strand starting at position 1578 of SEQ ID NO: 1562119
gguuacugaucauuaucgu

SEQ ID NO: 1723528 - RNA, 19 nt, Artificial Sequence
  Description of Artificial Sequence: Synthetic oligonucleotide
  Antisense strand to SEQ ID NO: 1723527
acgauaaugaucaguaacc

SEQ ID NO: 1723529 - RNA, 19 nt, Artificial Sequence
  Description of Artificial Sequence: Synthetic oligonucleotide
  Sense strand starting at position 1581 of SEQ ID NO: 1562119
uacugaucauuaucgugaa

SEQ ID NO: 1723530 - RNA, 19 nt, Artificial Sequence
  Description of Artificial Sequence: Synthetic oligonucleotide
  Antisense strand to SEQ ID NO: 1723529
uucacgauaaugaucagua

SEQ ID NO: 1723531 - RNA, 19 nt, Artificial Sequence
  Description of Artificial Sequence: Synthetic oligonucleotide
  Sense strand starting at position 1704 of SEQ ID NO: 1562119
ugaacucaccagugguaua

SEQ ID NO: 1723532 - RNA, 19 nt, Artificial Sequence
  Description of Artificial Sequence: Synthetic oligonucleotide
  Antisense strand to SEQ ID NO: 1723531
uauaccacuggugaguuca

SEQ ID NO: 1723533 - RNA, 19 nt, Artificial Sequence
  Description of Artificial Sequence: Synthetic oligonucleotide
  Sense strand starting at position 2450 of SEQ ID NO: 1562119
aggcacauaccuugagacu

SEQ ID NO: 1723534 - RNA, 19 nt, Artificial Sequence
  Description of Artificial Sequence: Synthetic oligonucleotide
  Antisense strand to SEQ ID NO: 1723533
agucucaagguaugugccu

SEQ ID NO: 1723535 - RNA, 19 nt, Artificial Sequence
  Description of Artificial Sequence: Synthetic oligonucleotide
  Sense strand starting at position 2523 of SEQ ID NO: 1562119
ggccuuucucaaugacuua

SEQ ID NO: 1723536 - RNA, 19 nt, Artificial Sequence
  Description of Artificial Sequence: Synthetic oligonucleotide
  Antisense strand to SEQ ID NO: 1723535
uaagucauugagaaaggcc

SEQ ID NO: 1723537 - RNA, 19 nt, Artificial Sequence
  Description of Artificial Sequence: Synthetic oligonucleotide
  Sense strand starting at position 2536 of SEQ ID NO: 1562119
gacuuagcuuaggauuugu

SEQ ID NO: 1723538 - RNA, 19 nt, Artificial Sequence
  Description of Artificial Sequence: Synthetic oligonucleotide
  Antisense strand to SEQ ID NO: 1723537
acaaauccuaagcuaaguc

SEQ ID NO: 1723539 - RNA, 19 nt, Artificial Sequence
  Description of Artificial Sequence: Synthetic oligonucleotide
  Sense strand starting at position 2586 of SEQ ID NO: 1562119
gcagauauauuacuuuggu

SEQ ID NO: 1723540 - RNA, 19 nt, Artificial Sequence
  Description of Artificial Sequence: Synthetic oligonucleotide
  Antisense strand to SEQ ID NO: 1723539
accaaaguaauauaucugc

SEQ ID NO: 1723541 - RNA, 19 nt, Artificial Sequence
  Description of Artificial Sequence: Synthetic oligonucleotide
  Sense strand starting at position 2589 of SEQ ID NO: 1562119
gauauauuacuuugguuug

SEQ ID NO: 1723542 - RNA, 19 nt, Artificial Sequence
  Description of Artificial Sequence: Synthetic oligonucleotide
  Antisense strand to SEQ ID NO: 1723541
caaaccaaaguaauauauc

SEQ ID NO: 1723543 - RNA, 19 nt, Artificial Sequence
  Description of Artificial Sequence: Synthetic oligonucleotide
  Sense strand starting at position 2606 of SEQ ID NO: 1562119
ugcccaguguguuuaacaa

SEQ ID NO: 1723544 - RNA, 19 nt, Artificial Sequence
  Description of Artificial Sequence: Synthetic oligonucleotide
  Antisense strand to SEQ ID NO: 1723543
uuguuaaacacacugggca

SEQ ID NO: 1723545 - RNA, 19 nt, Artificial Sequence
  Description of Artificial Sequence: Synthetic oligonucleotide
  Sense strand starting at position 2630 of SEQ ID NO: 1562119
uacuguaaucagcagugga

SEQ ID NO: 1723546 - RNA, 19 nt, Artificial Sequence
  Description of Artificial Sequence: Synthetic oligonucleotide
  Antisense strand to SEQ ID NO: 1723545
uccacugcugauuacagua

SEQ ID NO: 1723547 - RNA, 19 nt, Artificial Sequence
  Description of Artificial Sequence: Synthetic oligonucleotide
  Sense strand starting at position 2676 of SEQ ID NO: 1562119
cuggcuucucaggaauauu

SEQ ID NO: 1723548 - RNA, 19 nt, Artificial Sequence
  Description of Artificial Sequence: Synthetic oligonucleotide
  Antisense strand to SEQ ID NO: 1723547
aauauuccugagaagccag

SEQ ID NO: 1723549 - RNA, 19 nt, Artificial Sequence
  Description of Artificial Sequence: Synthetic oligonucleotide
  Sense strand starting at position 2897 of SEQ ID NO: 1562119
ucagaacuguugcuaggaa

SEQ ID NO: 1723550 - RNA, 19 nt, Artificial Sequence
  Description of Artificial Sequence: Synthetic oligonucleotide
  Antisense strand to SEQ ID NO: 1723549
uuccuagcaacaguucuga

SEQ ID NO: 1723551 - RNA, 19 nt, Artificial Sequence
  Description of Artificial Sequence: Synthetic oligonucleotide
  Sense strand starting at position 3098 of SEQ ID NO: 1562119
aggucaugaguccgagacu

SEQ ID NO: 1723552 - RNA, 19 nt, Artificial Sequence
  Description of Artificial Sequence: Synthetic oligonucleotide
  Antisense strand to SEQ ID NO: 1723551
agucucggacucaugaccu

SEQ ID NO: 1723553 - RNA, 19 nt, Artificial Sequence
  Description of Artificial Sequence: Synthetic oligonucleotide
  Sense strand starting at position 3447 of SEQ ID NO: 1562119
gacuuugaguagucuccuu

SEQ ID NO: 1723554 - RNA, 19 nt, Artificial Sequence
  Description of Artificial Sequence: Synthetic oligonucleotide
  Antisense strand to SEQ ID NO: 1723553
aaggagacuacucaaaguc

SEQ ID NO: 1723555 - RNA, 19 nt, Artificial Sequence
  Description of Artificial Sequence: Synthetic oligonucleotide
  Sense strand starting at position 3468 of SEQ ID NO: 1562119
cccguuuccuguuuagaaa

SEQ ID NO: 1723556 - RNA, 19 nt, Artificial Sequence
  Description of Artificial Sequence: Synthetic oligonucleotide
  Antisense strand to SEQ ID NO: 1723555
uuucuaaacaggaaacggg

SEQ ID NO: 1723557 - RNA, 19 nt, Artificial Sequence
  Description of Artificial Sequence: Synthetic oligonucleotide
  Sense strand starting at position 3923 of SEQ ID NO: 1562119
ugaaguuauuucuaaccag

SEQ ID NO: 1723558 - RNA, 19 nt, Artificial Sequence
  Description of Artificial Sequence: Synthetic oligonucleotide
  Antisense strand to SEQ ID NO: 1723557
cugguuagaaauaacuuca

SEQ ID NO: 1723559 - RNA, 19 nt, Artificial Sequence
  Description of Artificial Sequence: Synthetic oligonucleotide
  Sense strand starting at position 10 of SEQ ID NO: 1562120
acuggagucucaucacuuu

SEQ ID NO: 1723560 - RNA, 19 nt, Artificial Sequence
  Description of Artificial Sequence: Synthetic oligonucleotide
  Antisense strand to SEQ ID NO: 1723559
aaagugaugagacuccagu

SEQ ID NO: 1723561 - RNA, 19 nt, Artificial Sequence
  Description of Artificial Sequence: Synthetic oligonucleotide
  Sense strand starting at position 34 of SEQ ID NO: 1562120
guccaacacuguuuacuua

SEQ ID NO: 1723562 - RNA, 19 nt, Artificial Sequence
  Description of Artificial Sequence: Synthetic oligonucleotide
  Antisense strand to SEQ ID NO: 1723561
uaaguaaacaguguuggac

SEQ ID NO: 1723563 - RNA, 19 nt, Artificial Sequence
  Description of Artificial Sequence: Synthetic oligonucleotide
  Sense strand starting at position 87 of SEQ ID NO: 1562120
ggcauuauuucugcaaguu

SEQ ID NO: 1723564 - RNA, 19 nt, Artificial Sequence
  Description of Artificial Sequence: Synthetic oligonucleotide
  Antisense strand to SEQ ID NO: 1723563
aacuugcagaaauaaugcc

SEQ ID NO: 1723565 - RNA, 19 nt, Artificial Sequence
  Description of Artificial Sequence: Synthetic oligonucleotide
  Sense strand starting at position 116 of SEQ ID NO: 1562120
ccucaauuugcccaguugu

SEQ ID NO: 1723566 - RNA, 19 nt, Artificial Sequence
  Description of Artificial Sequence: Synthetic oligonucleotide
  Antisense strand to SEQ ID NO: 1723565
acaacugggcaaauugagg

SEQ ID NO: 1723567 - RNA, 19 nt, Artificial Sequence
  Description of Artificial Sequence: Synthetic oligonucleotide
  Sense strand starting at position 284 of SEQ ID NO: 1562120
ugugaacuaguacaauauu

SEQ ID NO: 1723568 - RNA, 19 nt, Artificial Sequence
  Description of Artificial Sequence: Synthetic oligonucleotide
  Antisense strand to SEQ ID NO: 1723567
aauauuguacuaguucaca

SEQ ID NO: 1723569 - RNA, 19 nt, Artificial Sequence
  Description of Artificial Sequence: Synthetic oligonucleotide
  Sense strand starting at position 313 of SEQ ID NO: 1562120
cuguuacugugacuacaaa

SEQ ID NO: 1723570 - RNA, 19 nt, Artificial Sequence
  Description of Artificial Sequence: Synthetic oligonucleotide
  Antisense strand to SEQ ID NO: 1723569
uuuguagucacaguaacag

SEQ ID NO: 1723571 - RNA, 19 nt, Artificial Sequence
  Description of Artificial Sequence: Synthetic oligonucleotide
  Sense strand starting at position 352 of SEQ ID NO: 1562120
ugcuuuauuccaggaacua

SEQ ID NO: 1723572 - RNA, 19 nt, Artificial Sequence
  Description of Artificial Sequence: Synthetic oligonucleotide
  Antisense strand to SEQ ID NO: 1723571
uaguuccuggaauaaagca

SEQ ID NO: 1723573 - RNA, 19 nt, Artificial Sequence
  Description of Artificial Sequence: Synthetic oligonucleotide
  Sense strand starting at position 353 of SEQ ID NO: 1562120
gcuuuauuccaggaacuag

SEQ ID NO: 1723574 - RNA, 19 nt, Artificial Sequence
  Description of Artificial Sequence: Synthetic oligonucleotide
  Antisense strand to SEQ ID NO: 1723573
cuaguuccuggaauaaagc

SEQ ID NO: 1723575 - RNA, 19 nt, Artificial Sequence
  Description of Artificial Sequence: Synthetic oligonucleotide
  Sense strand starting at position 397 of SEQ ID NO: 1562120
gguauaacaugucugauug

SEQ ID NO: 1723576 - RNA, 19 nt, Artificial Sequence
  Description of Artificial Sequence: Synthetic oligonucleotide
  Antisense strand to SEQ ID NO: 1723575
caaucagacauguuauacc

SEQ ID NO: 1723577 - RNA, 19 nt, Artificial Sequence
  Description of Artificial Sequence: Synthetic oligonucleotide
  Sense strand starting at position 405 of SEQ ID NO: 1562120
augucugauuggguaugau

SEQ ID NO: 1723578 - RNA, 19 nt, Artificial Sequence
  Description of Artificial Sequence: Synthetic oligonucleotide
  Antisense strand to SEQ ID NO: 1723577
aucauacccaaucagacau

SEQ ID NO: 1723579 - RNA, 19 nt, Artificial Sequence
  Description of Artificial Sequence: Synthetic oligonucleotide
  Sense strand starting at position 408 of SEQ ID NO: 1562120
ucugauuggguaugauuac

SEQ ID NO: 1723580 - RNA, 19 nt, Artificial Sequence
  Description of Artificial Sequence: Synthetic oligonucleotide
  Antisense strand to SEQ ID NO: 1723579
guaaucauacccaaucaga

SEQ ID NO: 1723581 - RNA, 19 nt, Artificial Sequence
  Description of Artificial Sequence: Synthetic oligonucleotide
  Sense strand starting at position 485 of SEQ ID NO: 1562120
aucucaguuaguggcagaa

SEQ ID NO: 1723582 - RNA, 19 nt, Artificial Sequence
  Description of Artificial Sequence: Synthetic oligonucleotide
  Antisense strand to SEQ ID NO: 1723581
uucugccacuaacugagau

SEQ ID NO: 1723583 - RNA, 19 nt, Artificial Sequence
  Description of Artificial Sequence: Synthetic oligonucleotide
  Sense strand starting at position 588 of SEQ ID NO: 1562120
ggagcagcugcucaauaaa

SEQ ID NO: 1723584 - RNA, 19 nt, Artificial Sequence
  Description of Artificial Sequence: Synthetic oligonucleotide
  Antisense strand to SEQ ID NO: 1723583
uuuauugagcagcugcucc

SEQ ID NO: 1723585 - RNA, 19 nt, Artificial Sequence
  Description of Artificial Sequence: Synthetic oligonucleotide
  Sense strand starting at position 591 of SEQ ID NO: 1562120
gcagcugcucaauaaauaa

SEQ ID NO: 1723586 - RNA, 19 nt, Artificial Sequence
  Description of Artificial Sequence: Synthetic oligonucleotide
  Antisense strand to SEQ ID NO: 1723585
uuauuuauugagcagcugc

SEQ ID NO: 1723587 - RNA, 19 nt, Artificial Sequence
  Description of Artificial Sequence: Synthetic oligonucleotide
  Sense strand starting at position 1312 of SEQ ID NO: 1562120
ugaguagauggcuaacagu

SEQ ID NO: 1723588 - RNA, 19 nt, Artificial Sequence
  Description of Artificial Sequence: Synthetic oligonucleotide
  Antisense strand to SEQ ID NO: 1723587
acuguuagccaucuacuca

SEQ ID NO: 1723589 - RNA, 19 nt, Artificial Sequence
  Description of Artificial Sequence: Synthetic oligonucleotide
  Sense strand starting at position 2084 of SEQ ID NO: 1562120
gggaaacuccucugagguc

SEQ ID NO: 1723590 - RNA, 19 nt, Artificial Sequence
  Description of Artificial Sequence: Synthetic oligonucleotide
  Antisense strand to SEQ ID NO: 1723589
gaccucagaggaguuuccc

SEQ ID NO: 1723591 - RNA, 19 nt, Artificial Sequence
  Description of Artificial Sequence: Synthetic oligonucleotide
  Sense strand starting at position 2093 of SEQ ID NO: 1562120
cucugaggucacugugacu

SEQ ID NO: 1723592 - RNA, 19 nt, Artificial Sequence
  Description of Artificial Sequence: Synthetic oligonucleotide
  Antisense strand to SEQ ID NO: 1723591
agucacagugaccucagag

SEQ ID NO: 1723593 - RNA, 19 nt, Artificial Sequence
  Description of Artificial Sequence: Synthetic oligonucleotide
  Sense strand starting at position 2149 of SEQ ID NO: 1562120
cucgacuucgcugugcuaa

SEQ ID NO: 1723594 - RNA, 19 nt, Artificial Sequence
  Description of Artificial Sequence: Synthetic oligonucleotide
  Antisense strand to SEQ ID NO: 1723593
uuagcacagcgaagucgag

SEQ ID NO: 1723595 - RNA, 19 nt, Artificial Sequence
  Description of Artificial Sequence: Synthetic oligonucleotide
  Sense strand starting at position 2265 of SEQ ID NO: 1562120
ggaauaaccgccuggacuu

SEQ ID NO: 1723596 - RNA, 19 nt, Artificial Sequence
  Description of Artificial Sequence: Synthetic oligonucleotide
  Antisense strand to SEQ ID NO: 1723595
aaguccaggcgguuauucc

SEQ ID NO: 1723597 - RNA, 19 nt, Artificial Sequence
  Description of Artificial Sequence: Synthetic oligonucleotide
  Sense strand starting at position 2306 of SEQ ID NO: 1562120
ucuguaaacauguguugag

SEQ ID NO: 1723598 - RNA, 19 nt, Artificial Sequence
  Description of Artificial Sequence: Synthetic oligonucleotide
  Antisense strand to SEQ ID NO: 1723597
cucaacacauguuuacaga

SEQ ID NO: 1723599 - RNA, 19 nt, Artificial Sequence
  Description of Artificial Sequence: Synthetic oligonucleotide
  Sense strand starting at position 2400 of SEQ ID NO: 1562120
ucaccacaugcuuaguaga

SEQ ID NO: 1723600 - RNA, 19 nt, Artificial Sequence
  Description of Artificial Sequence: Synthetic oligonucleotide
  Antisense strand to SEQ ID NO: 1723599
ucuacuaagcaugugguga

SEQ ID NO: 1723601 - RNA, 19 nt, Artificial Sequence
  Description of Artificial Sequence: Synthetic oligonucleotide
  Sense strand starting at position 2696 of SEQ ID NO: 1562120
gcuuccaaucuccagagaa

SEQ ID NO: 1723602 - RNA, 19 nt, Artificial Sequence
  Description of Artificial Sequence: Synthetic oligonucleotide
  Antisense strand to SEQ ID NO: 1723601
uucucuggagauuggaagc

SEQ ID NO: 1723603 - RNA, 19 nt, Artificial Sequence
  Description of Artificial Sequence: Synthetic oligonucleotide
  Sense strand starting at position 2873 of SEQ ID NO: 1562120
cugagccuuuaucuagaau

SEQ ID NO: 1723604 - RNA, 19 nt, Artificial Sequence
  Description of Artificial Sequence: Synthetic oligonucleotide
  Antisense strand to SEQ ID NO: 1723603
auucuagauaaaggcucag

SEQ ID NO: 1723605 - RNA, 19 nt, Artificial Sequence
  Description of Artificial Sequence: Synthetic oligonucleotide
  Sense strand starting at position 2876 of SEQ ID NO: 1562120
agccuuuaucuagaaugcu

SEQ ID NO: 1723606 - RNA, 19 nt, Artificial Sequence
  Description of Artificial Sequence: Synthetic oligonucleotide
  Antisense strand to SEQ ID NO: 1723605
agcauucuagauaaaggcu

SEQ ID NO: 1723607 - RNA, 19 nt, Artificial Sequence
  Description of Artificial Sequence: Synthetic oligonucleotide
  Sense strand starting at position 2885 of SEQ ID NO: 1562120
cuagaaugcucuucuucug

SEQ ID NO: 1723608 - RNA, 19 nt, Artificial Sequence
  Description of Artificial Sequence: Synthetic oligonucleotide
  Antisense strand to SEQ ID NO: 1723607
cagaagaagagcauucuag

SEQ ID NO: 1723609 - RNA, 19 nt, Artificial Sequence
  Description of Artificial Sequence: Synthetic oligonucleotide
  Sense strand starting at position 3059 of SEQ ID NO: 1562120
cucauacacuuguuuguua

SEQ ID NO: 1723610 - RNA, 19 nt, Artificial Sequence
  Description of Artificial Sequence: Synthetic oligonucleotide
  Antisense strand to SEQ ID NO: 1723609
uaacaaacaaguguaugag

SEQ ID NO: 1723611 - RNA, 19 nt, Artificial Sequence
  Description of Artificial Sequence: Synthetic oligonucleotide
  Sense strand starting at position 3060 of SEQ ID NO: 1562120
ucauacacuuguuuguuaa

SEQ ID NO: 1723612 - RNA, 19 nt, Artificial Sequence
  Description of Artificial Sequence: Synthetic oligonucleotide
  Antisense strand to SEQ ID NO: 1723611
uuaacaaacaaguguauga

SEQ ID NO: 1723613 - RNA, 19 nt, Artificial Sequence
  Description of Artificial Sequence: Synthetic oligonucleotide
  Sense strand starting at position 3149 of SEQ ID NO: 1562120
cugcaaugccuacaacagu

SEQ ID NO: 1723614 - RNA, 19 nt, Artificial Sequence
  Description of Artificial Sequence: Synthetic oligonucleotide
  Antisense strand to SEQ ID NO: 1723613
acuguuguaggcauugcag

SEQ ID NO: 1723615 - RNA, 19 nt, Artificial Sequence
  Description of Artificial Sequence: Synthetic oligonucleotide
  Sense strand starting at position 3348 of SEQ ID NO: 1562120
ugcaauaaucuaggugaca

SEQ ID NO: 1723616 - RNA, 19 nt, Artificial Sequence
  Description of Artificial Sequence: Synthetic oligonucleotide
  Antisense strand to SEQ ID NO: 1723615
ugucaccuagauuauugca

SEQ ID NO: 1723617 - RNA, 19 nt, Artificial Sequence
  Description of Artificial Sequence: Synthetic oligonucleotide
  Sense strand starting at position 3349 of SEQ ID NO: 1562120
gcaauaaucuaggugacag

SEQ ID NO: 1723618 - RNA, 19 nt, Artificial Sequence
  Description of Artificial Sequence: Synthetic oligonucleotide
  Antisense strand to SEQ ID NO: 1723617
cugucaccuagauuauugc

SEQ ID NO: 1723619 - RNA, 19 nt, Artificial Sequence
  Description of Artificial Sequence: Synthetic oligonucleotide
  Sense strand starting at position 3373 of SEQ ID NO: 1562120
ggcagucuggaugaaagua

SEQ ID NO: 1723620 - RNA, 19 nt, Artificial Sequence
  Description of Artificial Sequence: Synthetic oligonucleotide
  Antisense strand to SEQ ID NO: 1723619
uacuuucauccagacugcc

SEQ ID NO: 1723621 - RNA, 19 nt, Artificial Sequence
  Description of Artificial Sequence: Synthetic oligonucleotide
  Sense strand starting at position 3386 of SEQ ID NO: 1562120
aaaguaauacgguggaggu

SEQ ID NO: 1723622 - RNA, 19 nt, Artificial Sequence
  Description of Artificial Sequence: Synthetic oligonucleotide
  Antisense strand to SEQ ID NO: 1723621
accuccaccguauuacuuu

SEQ ID NO: 1723623 - RNA, 19 nt, Artificial Sequence
  Description of Artificial Sequence: Synthetic oligonucleotide
  Sense strand starting at position 3415 of SEQ ID NO: 1562120
guuggacuccuggacgcau

SEQ ID NO: 1723624 - RNA, 19 nt, Artificial Sequence
  Description of Artificial Sequence: Synthetic oligonucleotide
  Antisense strand to SEQ ID NO: 1723623
augcguccaggaguccaac

SEQ ID NO: 1723625 - RNA, 19 nt, Artificial Sequence
  Description of Artificial Sequence: Synthetic oligonucleotide
  Sense strand starting at position 3564 of SEQ ID NO: 1562120
gucucuuaagacugcuaaa

SEQ ID NO: 1723626 - RNA, 19 nt, Artificial Sequence
  Description of Artificial Sequence: Synthetic oligonucleotide
  Antisense strand to SEQ ID NO: 1723625
uuuagcagucuuaagagac

SEQ ID NO: 1723627 - RNA, 19 nt, Artificial Sequence
  Description of Artificial Sequence: Synthetic oligonucleotide
  Sense strand starting at position 3577 of SEQ ID NO: 1562120
gcuaaagcugacugagaga

SEQ ID NO: 1723628 - RNA, 19 nt, Artificial Sequence
  Description of Artificial Sequence: Synthetic oligonucleotide
  Antisense strand to SEQ ID NO: 1723627
ucucucagucagcuuuagc

SEQ ID NO: 1723629 - RNA, 19 nt, Artificial Sequence
  Description of Artificial Sequence: Synthetic oligonucleotide
  Sense strand starting at position 3604 of SEQ ID NO: 1562120
aggauccaccaauguuuau

SEQ ID NO: 1723630 - RNA, 19 nt, Artificial Sequence
  Description of Artificial Sequence: Synthetic oligonucleotide
  Antisense strand to SEQ ID NO: 1723629
auaaacauugguggauccu

SEQ ID NO: 1723631 - RNA, 19 nt, Artificial Sequence
  Description of Artificial Sequence: Synthetic oligonucleotide
  Sense strand starting at position 3686 of SEQ ID NO: 1562120
uuuacauagcuuugaggua

SEQ ID NO: 1723632 - RNA, 19 nt, Artificial Sequence
  Description of Artificial Sequence: Synthetic oligonucleotide
  Antisense strand to SEQ ID NO: 1723631
uaccucaaagcuauguaaa

SEQ ID NO: 1723633 - RNA, 19 nt, Artificial Sequence
  Description of Artificial Sequence: Synthetic oligonucleotide
  Sense strand starting at position 3691 of SEQ ID NO: 1562120
auagcuuugagguagauac

SEQ ID NO: 1723634 - RNA, 19 nt, Artificial Sequence
  Description of Artificial Sequence: Synthetic oligonucleotide
  Antisense strand to SEQ ID NO: 1723633
guaucuaccucaaagcuau

SEQ ID NO: 1723635 - RNA, 19 nt, Artificial Sequence
  Description of Artificial Sequence: Synthetic oligonucleotide
  Sense strand starting at position 3901 of SEQ ID NO: 1562120
gcgggaaugaccuggucua

SEQ ID NO: 1723636 - RNA, 19 nt, Artificial Sequence
  Description of Artificial Sequence: Synthetic oligonucleotide
  Antisense strand to SEQ ID NO: 1723635
uagaccaggucauucccgc

SEQ ID NO: 1723637 - RNA, 19 nt, Artificial Sequence
  Description of Artificial Sequence: Synthetic oligonucleotide
  Sense strand starting at position 3902 of SEQ ID NO: 1562120
cgggaaugaccuggucuac

SEQ ID NO: 1723638 - RNA, 19 nt, Artificial Sequence
  Description of Artificial Sequence: Synthetic oligonucleotide
  Antisense strand to SEQ ID NO: 1723637
guagaccaggucauucccg

SEQ ID NO: 1723639 - RNA, 19 nt, Artificial Sequence
  Description of Artificial Sequence: Synthetic oligonucleotide
  Sense strand starting at position 50 of SEQ ID NO: 1562121
cccagugagcuacagauua

SEQ ID NO: 1723640 - RNA, 19 nt, Artificial Sequence
  Description of Artificial Sequence: Synthetic oligonucleotide
  Antisense strand to SEQ ID NO: 1723639
uaaucuguagcucacuggg

SEQ ID NO: 1723641 - RNA, 19 nt, Artificial Sequence
  Description of Artificial Sequence: Synthetic oligonucleotide
  Sense strand starting at position 85 of SEQ ID NO: 1562121
gagggaagcucccucauga

SEQ ID NO: 1723642 - RNA, 19 nt, Artificial Sequence
  Description of Artificial Sequence: Synthetic oligonucleotide
  Antisense strand to SEQ ID NO: 1723641
ucaugagggagcuucccuc

SEQ ID NO: 1723643 - RNA, 19 nt, Artificial Sequence
  Description of Artificial Sequence: Synthetic oligonucleotide
  Sense strand starting at position 404 of SEQ ID NO: 1562121
uugccucuuuaagaacaga

SEQ ID NO: 1723644 - RNA, 19 nt, Artificial Sequence
  Description of Artificial Sequence: Synthetic oligonucleotide
  Antisense strand to SEQ ID NO: 1723643
ucuguucuuaaagaggcaa

SEQ ID NO: 1723645 - RNA, 19 nt, Artificial Sequence
  Description of Artificial Sequence: Synthetic oligonucleotide
  Sense strand starting at position 490 of SEQ ID NO: 1562121
cuguguggccuagagucaa

SEQ ID NO: 1723646 - RNA, 19 nt, Artificial Sequence
  Description of Artificial Sequence: Synthetic oligonucleotide
  Antisense strand to SEQ ID NO: 1723645
uugacucuaggccacacag

SEQ ID NO: 1723647 - RNA, 19 nt, Artificial Sequence
  Description of Artificial Sequence: Synthetic oligonucleotide
  Sense strand starting at position 577 of SEQ ID NO: 1562121
guugcuagggacugaauga

SEQ ID NO: 1723648 - RNA, 19 nt, Artificial Sequence
  Description of Artificial Sequence: Synthetic oligonucleotide
  Antisense strand to SEQ ID NO: 1723647
ucauucagucccuagcaac

SEQ ID NO: 1723649 - RNA, 19 nt, Artificial Sequence
  Description of Artificial Sequence: Synthetic oligonucleotide
  Sense strand starting at position 626 of SEQ ID NO: 1562121
ggcacauuccagcacucaa

SEQ ID NO: 1723650 - RNA, 19 nt, Artificial Sequence
  Description of Artificial Sequence: Synthetic oligonucleotide
  Antisense strand to SEQ ID NO: 1723649
uugagugcuggaaugugcc

SEQ ID NO: 1723651 - RNA, 19 nt, Artificial Sequence
  Description of Artificial Sequence: Synthetic oligonucleotide
  Sense strand starting at position 668 of SEQ ID NO: 1562121
ccuugucauuauuaccaga

SEQ ID NO: 1723652 - RNA, 19 nt, Artificial Sequence
  Description of Artificial Sequence: Synthetic oligonucleotide
  Antisense strand to SEQ ID NO: 1723651
ucugguaauaaugacaagg

SEQ ID NO: 1723653 - RNA, 19 nt, Artificial Sequence
  Description of Artificial Sequence: Synthetic oligonucleotide
  Sense strand starting at position 670 of SEQ ID NO: 1562121
uugucauuauuaccagauu

SEQ ID NO: 1723654 - RNA, 19 nt, Artificial Sequence
  Description of Artificial Sequence: Synthetic oligonucleotide
  Antisense strand to SEQ ID NO: 1723653
aaucugguaauaaugacaa

SEQ ID NO: 1723655 - RNA, 19 nt, Artificial Sequence
  Description of Artificial Sequence: Synthetic oligonucleotide
  Sense strand starting at position 671 of SEQ ID NO: 1562121
ugucauuauuaccagauuc

SEQ ID NO: 1723656 - RNA, 19 nt, Artificial Sequence
  Description of Artificial Sequence: Synthetic oligonucleotide
  Antisense strand to SEQ ID NO: 1723655
gaaucugguaauaaugaca

SEQ ID NO: 1723657 - RNA, 19 nt, Artificial Sequence
  Description of Artificial Sequence: Synthetic oligonucleotide
  Sense strand starting at position 782 of SEQ ID NO: 1562121
cagagccaguuucugauua

SEQ ID NO: 1723658 - RNA, 19 nt, Artificial Sequence
  Description of Artificial Sequence: Synthetic oligonucleotide
  Antisense strand to SEQ ID NO: 1723657
uaaucagaaacuggcucug

SEQ ID NO: 1723659 - RNA, 19 nt, Artificial Sequence
  Description of Artificial Sequence: Synthetic oligonucleotide
  Sense strand starting at position 784 of SEQ ID NO: 1562121
gagccaguuucugauuaga

SEQ ID NO: 1723660 - RNA, 19 nt, Artificial Sequence
  Description of Artificial Sequence: Synthetic oligonucleotide
  Antisense strand to SEQ ID NO: 1723659
ucuaaucagaaacuggcuc

SEQ ID NO: 1723661 - RNA, 19 nt, Artificial Sequence
  Description of Artificial Sequence: Synthetic oligonucleotide
  Sense strand starting at position 786 of SEQ ID NO: 1562121
gccaguuucugauuagaug

SEQ ID NO: 1723662 - RNA, 19 nt, Artificial Sequence
  Description of Artificial Sequence: Synthetic oligonucleotide
  Antisense strand to SEQ ID NO: 1723661
caucuaaucagaaacuggc

SEQ ID NO: 1723663 - RNA, 19 nt, Artificial Sequence
  Description of Artificial Sequence: Synthetic oligonucleotide
  Sense strand starting at position 792 of SEQ ID NO: 1562121
uucugauuagauggaggua

SEQ ID NO: 1723664 - RNA, 19 nt, Artificial Sequence
  Description of Artificial Sequence: Synthetic oligonucleotide
  Antisense strand to SEQ ID NO: 1723663
uaccuccaucuaaucagaa

SEQ ID NO: 1723665 - RNA, 19 nt, Artificial Sequence
  Description of Artificial Sequence: Synthetic oligonucleotide
  Sense strand starting at position 1055 of SEQ ID NO: 1562121
ggcgguuucucccuuggaa

SEQ ID NO: 1723666 - RNA, 19 nt, Artificial Sequence
  Description of Artificial Sequence: Synthetic oligonucleotide
  Antisense strand to SEQ ID NO: 1723665
uuccaagggagaaaccgcc

SEQ ID NO: 1723667 - RNA, 19 nt, Artificial Sequence
  Description of Artificial Sequence: Synthetic oligonucleotide
  Sense strand starting at position 1057 of SEQ ID NO: 1562121
cgguuucucccuuggaagu

SEQ ID NO: 1723668 - RNA, 19 nt, Artificial Sequence
  Description of Artificial Sequence: Synthetic oligonucleotide
  Antisense strand to SEQ ID NO: 1723667
acuuccaagggagaaaccg

SEQ ID NO: 1723669 - RNA, 19 nt, Artificial Sequence
  Description of Artificial Sequence: Synthetic oligonucleotide
  Sense strand starting at position 1375 of SEQ ID NO: 1562121
cgagaaacuuccgugcaug

SEQ ID NO: 1723670 - RNA, 19 nt, Artificial Sequence
  Description of Artificial Sequence: Synthetic oligonucleotide
  Antisense strand to SEQ ID NO: 1723669
caugcacggaaguuucucg

SEQ ID NO: 1723671 - RNA, 19 nt, Artificial Sequence
  Description of Artificial Sequence: Synthetic oligonucleotide
  Sense strand starting at position 1376 of SEQ ID NO: 1562121
gagaaacuuccgugcauga

SEQ ID NO: 1723672 - RNA, 19 nt, Artificial Sequence
  Description of Artificial Sequence: Synthetic oligonucleotide
  Antisense strand to SEQ ID NO: 1723671
ucaugcacggaaguuucuc

SEQ ID NO: 1723673 - RNA, 19 nt, Artificial Sequence
  Description of Artificial Sequence: Synthetic oligonucleotide
  Sense strand starting at position 1378 of SEQ ID NO: 1562121
gaaacuuccgugcaugaag

SEQ ID NO: 1723674 - RNA, 19 nt, Artificial Sequence
  Description of Artificial Sequence: Synthetic oligonucleotide
  Antisense strand to SEQ ID NO: 1723673
cuucaugcacggaaguuuc

SEQ ID NO: 1723675 - RNA, 19 nt, Artificial Sequence
  Description of Artificial Sequence: Synthetic oligonucleotide
  Sense strand starting at position 1389 of SEQ ID NO: 1562121
gcaugaagguuuccuccuu

SEQ ID NO: 1723676 - RNA, 19 nt, Artificial Sequence
  Description of Artificial Sequence: Synthetic oligonucleotide
  Antisense strand to SEQ ID NO: 1723675
aaggaggaaaccuucaugc

SEQ ID NO: 1723677 - RNA, 19 nt, Artificial Sequence
  Description of Artificial Sequence: Synthetic oligonucleotide
  Sense strand starting at position 1686 of SEQ ID NO: 1562121
cggcgaauuuggccuccga

SEQ ID NO: 1723678 - RNA, 19 nt, Artificial Sequence
  Description of Artificial Sequence: Synthetic oligonucleotide
  Antisense strand to SEQ ID NO: 1723677
ucggaggccaaauucgccg

SEQ ID NO: 1723679 - RNA, 19 nt, Artificial Sequence
  Description of Artificial Sequence: Synthetic oligonucleotide
  Sense strand starting at position 2606 of SEQ ID NO: 1562121
gagggaacucccuguugga

SEQ ID NO: 1723680 - RNA, 19 nt, Artificial Sequence
  Description of Artificial Sequence: Synthetic oligonucleotide
  Antisense strand to SEQ ID NO: 1723679
uccaacagggaguucccuc

SEQ ID NO: 1723681 - RNA, 19 nt, Artificial Sequence
  Description of Artificial Sequence: Synthetic oligonucleotide
  Sense strand starting at position 2645 of SEQ ID NO: 1562121
ccgucuguccuggaacaca

SEQ ID NO: 1723682 - RNA, 19 nt, Artificial Sequence
  Description of Artificial Sequence: Synthetic oligonucleotide
  Antisense strand to SEQ ID NO: 1723681
uguguuccaggacagacgg

SEQ ID NO: 1723683 - RNA, 19 nt, Artificial Sequence
  Description of Artificial Sequence: Synthetic oligonucleotide
  Sense strand starting at position 2743 of SEQ ID NO: 1562121
ggaagaaguuggcucauau

SEQ ID NO: 1723684 - RNA, 19 nt, Artificial Sequence
  Description of Artificial Sequence: Synthetic oligonucleotide
  Antisense strand to SEQ ID NO: 1723683
auaugagccaacuucuucc

SEQ ID NO: 1723685 - RNA, 19 nt, Artificial Sequence
  Description of Artificial Sequence: Synthetic oligonucleotide
  Sense strand starting at position 2753 of SEQ ID NO: 1562121
ggcucauaucagggcucau

SEQ ID NO: 1723686 - RNA, 19 nt, Artificial Sequence
  Description of Artificial Sequence: Synthetic oligonucleotide
  Antisense strand to SEQ ID NO: 1723685
augagcccugauaugagcc

SEQ ID NO: 1723687 - RNA, 19 nt, Artificial Sequence
  Description of Artificial Sequence: Synthetic oligonucleotide
  Sense strand starting at position 2765 of SEQ ID NO: 1562121
ggcucauaauuguugccaa

SEQ ID NO: 1723688 - RNA, 19 nt, Artificial Sequence
  Description of Artificial Sequence: Synthetic oligonucleotide
  Antisense strand to SEQ ID NO: 1723687
uuggcaacaauuaugagcc

SEQ ID NO: 1723689 - RNA, 19 nt, Artificial Sequence
  Description of Artificial Sequence: Synthetic oligonucleotide
  Sense strand starting at position 2768 of SEQ ID NO: 1562121
ucauaauuguugccaagua

SEQ ID NO: 1723690 - RNA, 19 nt, Artificial Sequence
  Description of Artificial Sequence: Synthetic oligonucleotide
  Antisense strand to SEQ ID NO: 1723689
uacuuggcaacaauuauga

SEQ ID NO: 1723691 - RNA, 19 nt, Artificial Sequence
  Description of Artificial Sequence: Synthetic oligonucleotide
  Sense strand starting at position 2850 of SEQ ID NO: 1562121
aaagaaguuuccgaaaguc

SEQ ID NO: 1723692 - RNA, 19 nt, Artificial Sequence
  Description of Artificial Sequence: Synthetic oligonucleotide
  Antisense strand to SEQ ID NO: 1723691
gacuuucggaaacuucuuu

SEQ ID NO: 1723693 - RNA, 19 nt, Artificial Sequence
  Description of Artificial Sequence: Synthetic oligonucleotide
  Sense strand starting at position 2880 of SEQ ID NO: 1562121
ugugaauccugagauaagu

SEQ ID NO: 1723694 - RNA, 19 nt, Artificial Sequence
  Description of Artificial Sequence: Synthetic oligonucleotide
  Antisense strand to SEQ ID NO: 1723693
acuuaucucaggauucaca

SEQ ID NO: 1723695 - RNA, 19 nt, Artificial Sequence
  Description of Artificial Sequence: Synthetic oligonucleotide
  Sense strand starting at position 3003 of SEQ ID NO: 1562121
cggguucaccguggagaga

SEQ ID NO: 1723696 - RNA, 19 nt, Artificial Sequence
  Description of Artificial Sequence: Synthetic oligonucleotide
  Antisense strand to SEQ ID NO: 1723695
ucucuccacggugaacccg

SEQ ID NO: 1723697 - RNA, 19 nt, Artificial Sequence
  Description of Artificial Sequence: Synthetic oligonucleotide
  Sense strand starting at position 3065 of SEQ ID NO: 1562121
ugcaguuauuuaugaaaug

SEQ ID NO: 1723698 - RNA, 19 nt, Artificial Sequence
  Description of Artificial Sequence: Synthetic oligonucleotide
  Antisense strand to SEQ ID NO: 1723697
cauuucauaaauaacugca

SEQ ID NO: 1723699 - RNA, 19 nt, Artificial Sequence
  Description of Artificial Sequence: Synthetic oligonucleotide
  Sense strand starting at position 3275 of SEQ ID NO: 1562121
cccacauuguucccagaug

SEQ ID NO: 1723700 - RNA, 19 nt, Artificial Sequence
  Description of Artificial Sequence: Synthetic oligonucleotide
  Antisense strand to SEQ ID NO: 1723699
caucugggaacaauguggg

SEQ ID NO: 1723701 - RNA, 19 nt, Artificial Sequence
  Description of Artificial Sequence: Synthetic oligonucleotide
  Sense strand starting at position 3358 of SEQ ID NO: 1562121
ggugcacacccagaaguau

SEQ ID NO: 1723702 - RNA, 19 nt, Artificial Sequence
  Description of Artificial Sequence: Synthetic oligonucleotide
  Antisense strand to SEQ ID NO: 1723701
auacuucugggugugcacc

SEQ ID NO: 1723703 - RNA, 19 nt, Artificial Sequence
  Description of Artificial Sequence: Synthetic oligonucleotide
  Sense strand starting at position 3371 of SEQ ID NO: 1562121
aaguauuucuccugugaag

SEQ ID NO: 1723704 - RNA, 19 nt, Artificial Sequence
  Description of Artificial Sequence: Synthetic oligonucleotide
  Antisense strand to SEQ ID NO: 1723703
cuucacaggagaaauacuu

SEQ ID NO: 1723705 - RNA, 19 nt, Artificial Sequence
  Description of Artificial Sequence: Synthetic oligonucleotide
  Sense strand starting at position 3374 of SEQ ID NO: 1562121
uauuucuccugugaaggaa

SEQ ID NO: 1723706 - RNA, 19 nt, Artificial Sequence
  Description of Artificial Sequence: Synthetic oligonucleotide
  Antisense strand to SEQ ID NO: 1723705
uuccuucacaggagaaaua

SEQ ID NO: 1723707 - RNA, 19 nt, Artificial Sequence
  Description of Artificial Sequence: Synthetic oligonucleotide
  Sense strand starting at position 3396 of SEQ ID NO: 1562121
ggcugagcuucgcugcaga

SEQ ID NO: 1723708 - RNA, 19 nt, Artificial Sequence
  Description of Artificial Sequence: Synthetic oligonucleotide
  Antisense strand to SEQ ID NO: 1723707
ucugcagcgaagcucagcc

SEQ ID NO: 1723709 - RNA, 19 nt, Artificial Sequence
  Description of Artificial Sequence: Synthetic oligonucleotide
  Sense strand starting at position 3430 of SEQ ID NO: 1562121
ggaugagcuucgcugcaga

SEQ ID NO: 1723710 - RNA, 19 nt, Artificial Sequence
  Description of Artificial Sequence: Synthetic oligonucleotide
  Antisense strand to SEQ ID NO: 1723709
ucugcagcgaagcucaucc

SEQ ID NO: 1723711 - RNA, 19 nt, Artificial Sequence
  Description of Artificial Sequence: Synthetic oligonucleotide
  Sense strand starting at position 3520 of SEQ ID NO: 1562121
uggugagcuccguguuaca

SEQ ID NO: 1723712 - RNA, 19 nt, Artificial Sequence
  Description of Artificial Sequence: Synthetic oligonucleotide
  Antisense strand to SEQ ID NO: 1723711
uguaacacggagcucacca

SEQ ID NO: 1723713 - RNA, 19 nt, Artificial Sequence
  Description of Artificial Sequence: Synthetic oligonucleotide
  Sense strand starting at position 3612 of SEQ ID NO: 1562121
acuggacucuguuuccaaa

SEQ ID NO: 1723714 - RNA, 19 nt, Artificial Sequence
  Description of Artificial Sequence: Synthetic oligonucleotide
  Antisense strand to SEQ ID NO: 1723713
uuuggaaacagaguccagu

SEQ ID NO: 1723715 - RNA, 19 nt, Artificial Sequence
  Description of Artificial Sequence: Synthetic oligonucleotide
  Sense strand starting at position 3859 of SEQ ID NO: 1562121
ccaggcauucuuugggauu

SEQ ID NO: 1723716 - RNA, 19 nt, Artificial Sequence
  Description of Artificial Sequence: Synthetic oligonucleotide
  Antisense strand to SEQ ID NO: 1723715
aaucccaaagaaugccugg

SEQ ID NO: 1723717 - RNA, 19 nt, Artificial Sequence
  Description of Artificial Sequence: Synthetic oligonucleotide
  Sense strand starting at position 3921 of SEQ ID NO: 1562121
ucagguacauucgugcaaa

SEQ ID NO: 1723718 - RNA, 19 nt, Artificial Sequence
  Description of Artificial Sequence: Synthetic oligonucleotide
  Antisense strand to SEQ ID NO: 1723717
uuugcacgaauguaccuga

SEQ ID NO: 1723719 - RNA, 19 nt, Artificial Sequence
  Description of Artificial Sequence: Synthetic oligonucleotide
  Sense strand starting at position 388 of SEQ ID NO: 1562122
gaugaaugcgaccagguua

SEQ ID NO: 1723720 - RNA, 19 nt, Artificial Sequence
  Description of Artificial Sequence: Synthetic oligonucleotide
  Antisense strand to SEQ ID NO: 1723719
uaaccuggucgcauucauc

SEQ ID NO: 1723721 - RNA, 19 nt, Artificial Sequence
  Description of Artificial Sequence: Synthetic oligonucleotide
  Sense strand starting at position 486 of SEQ ID NO: 1562122
uucugauuccaguauucua

SEQ ID NO: 1723722 - RNA, 19 nt, Artificial Sequence
  Description of Artificial Sequence: Synthetic oligonucleotide
  Antisense strand to SEQ ID NO: 1723721
uagaauacuggaaucagaa

SEQ ID NO: 1723723 - RNA, 19 nt, Artificial Sequence
  Description of Artificial Sequence: Synthetic oligonucleotide
  Sense strand starting at position 499 of SEQ ID NO: 1562122
auucuauacuuugcaggau

SEQ ID NO: 1723724 - RNA, 19 nt, Artificial Sequence
  Description of Artificial Sequence: Synthetic oligonucleotide
  Antisense strand to SEQ ID NO: 1723723
auccugcaaaguauagaau

SEQ ID NO: 1723725 - RNA, 19 nt, Artificial Sequence
  Description of Artificial Sequence: Synthetic oligonucleotide
  Sense strand starting at position 502 of SEQ ID NO: 1562122
cuauacuuugcaggauaca

SEQ ID NO: 1723726 - RNA, 19 nt, Artificial Sequence
  Description of Artificial Sequence: Synthetic oligonucleotide
  Antisense strand to SEQ ID NO: 1723725
uguauccugcaaaguauag

SEQ ID NO: 1723727 - RNA, 19 nt, Artificial Sequence
  Description of Artificial Sequence: Synthetic oligonucleotide
  Sense strand starting at position 536 of SEQ ID NO: 1562122
ugucccacugaguacaaau

SEQ ID NO: 1723728 - RNA, 19 nt, Artificial Sequence
  Description of Artificial Sequence: Synthetic oligonucleotide
  Antisense strand to SEQ ID NO: 1723727
auuuguacucagugggaca

SEQ ID NO: 1723729 - RNA, 19 nt, Artificial Sequence
  Description of Artificial Sequence: Synthetic oligonucleotide
  Sense strand starting at position 674 of SEQ ID NO: 1562122
ggcgaaucacuuugagacc

SEQ ID NO: 1723730 - RNA, 19 nt, Artificial Sequence
  Description of Artificial Sequence: Synthetic oligonucleotide
  Antisense strand to SEQ ID NO: 1723729
ggucucaaagugauucgcc

SEQ ID NO: 1723731 - RNA, 19 nt, Artificial Sequence
  Description of Artificial Sequence: Synthetic oligonucleotide
  Sense strand starting at position 936 of SEQ ID NO: 1562122
cauaaauggcuuuguagca

SEQ ID NO: 1723732 - RNA, 19 nt, Artificial Sequence
  Description of Artificial Sequence: Synthetic oligonucleotide
  Antisense strand to SEQ ID NO: 1723731
ugcuacaaagccauuuaug

SEQ ID NO: 1723733 - RNA, 19 nt, Artificial Sequence
  Description of Artificial Sequence: Synthetic oligonucleotide
  Sense strand starting at position 985 of SEQ ID NO: 1562122
caguguggcaacgacauua

SEQ ID NO: 1723734 - RNA, 19 nt, Artificial Sequence
  Description of Artificial Sequence: Synthetic oligonucleotide
  Antisense strand to SEQ ID NO: 1723733
uaaugucguugccacacug

SEQ ID NO: 1723735 - RNA, 19 nt, Artificial Sequence
  Description of Artificial Sequence: Synthetic oligonucleotide
  Sense strand starting at position 999 of SEQ ID NO: 1562122
cauuaagaucagcggaaca

SEQ ID NO: 1723736 - RNA, 19 nt, Artificial Sequence
  Description of Artificial Sequence: Synthetic oligonucleotide
  Antisense strand to SEQ ID NO: 1723735
uguuccgcugaucuuaaug

SEQ ID NO: 1723737 - RNA, 19 nt, Artificial Sequence
  Description of Artificial Sequence: Synthetic oligonucleotide
  Sense strand starting at position 1039 of SEQ ID NO: 1562122
aaaggauuucgcugcuuaa

SEQ ID NO: 1723738 - RNA, 19 nt, Artificial Sequence
  Description of Artificial Sequence: Synthetic oligonucleotide
  Antisense strand to SEQ ID NO: 1723737
uuaagcagcgaaauccuuu

SEQ ID NO: 1723739 - RNA, 19 nt, Artificial Sequence
  Description of Artificial Sequence: Synthetic oligonucleotide
  Sense strand starting at position 1042 of SEQ ID NO: 1562122
ggauuucgcugcuuaaauu

SEQ ID NO: 1723740 - RNA, 19 nt, Artificial Sequence
  Description of Artificial Sequence: Synthetic oligonucleotide
  Antisense strand to SEQ ID NO: 1723739
aauuuaagcagcgaaaucc

SEQ ID NO: 1723741 - RNA, 19 nt, Artificial Sequence
  Description of Artificial Sequence: Synthetic oligonucleotide
  Sense strand starting at position 1167 of SEQ ID NO: 1562122
aaagauguuccugaacgug

SEQ ID NO: 1723742 - RNA, 19 nt, Artificial Sequence
  Description of Artificial Sequence: Synthetic oligonucleotide
  Antisense strand to SEQ ID NO: 1723741
cacguucaggaacaucuuu

SEQ ID NO: 1723743 - RNA, 19 nt, Artificial Sequence
  Description of Artificial Sequence: Synthetic oligonucleotide
  Sense strand starting at position 1281 of SEQ ID NO: 1562122
agagcuagaccuugaauuc

SEQ ID NO: 1723744 - RNA, 19 nt, Artificial Sequence
  Description of Artificial Sequence: Synthetic oligonucleotide
  Antisense strand to SEQ ID NO: 1723743
gaauucaaggucuagcucu

SEQ ID NO: 1723745 - RNA, 19 nt, Artificial Sequence
  Description of Artificial Sequence: Synthetic oligonucleotide
  Sense strand starting at position 1322 of SEQ ID NO: 1562122
agaugaacgaguugugaaa

SEQ ID NO: 1723746 - RNA, 19 nt, Artificial Sequence
  Description of Artificial Sequence: Synthetic oligonucleotide
  Antisense strand to SEQ ID NO: 1723745
uuucacaacucguucaucu

SEQ ID NO: 1723747 - RNA, 19 nt, Artificial Sequence
  Description of Artificial Sequence: Synthetic oligonucleotide
  Sense strand starting at position 2535 of SEQ ID NO: 1562122
aucagaccugcccaugaau

SEQ ID NO: 1723748 - RNA, 19 nt, Artificial Sequence
  Description of Artificial Sequence: Synthetic oligonucleotide
  Antisense strand to SEQ ID NO: 1723747
auucaugggcaggucugau

SEQ ID NO: 1723749 - RNA, 19 nt, Artificial Sequence
  Description of Artificial Sequence: Synthetic oligonucleotide
  Sense strand starting at position 2648 of SEQ ID NO: 1562122
auggaucugagcugagaug

SEQ ID NO: 1723750 - RNA, 19 nt, Artificial Sequence
  Description of Artificial Sequence: Synthetic oligonucleotide
  Antisense strand to SEQ ID NO: 1723749
caucucagcucagauccau

SEQ ID NO: 1723751 - RNA, 19 nt, Artificial Sequence
  Description of Artificial Sequence: Synthetic oligonucleotide
  Sense strand starting at position 2660 of SEQ ID NO: 1562122
ugagaugucucucccagag

SEQ ID NO: 1723752 - RNA, 19 nt, Artificial Sequence
  Description of Artificial Sequence: Synthetic oligonucleotide
  Antisense strand to SEQ ID NO: 1723751
cucugggagagacaucuca

SEQ ID NO: 1723753 - RNA, 19 nt, Artificial Sequence
  Description of Artificial Sequence: Synthetic oligonucleotide
  Sense strand starting at position 2710 of SEQ ID NO: 1562122
ugcucugcuccgucacaau

SEQ ID NO: 1723754 - RNA, 19 nt, Artificial Sequence
  Description of Artificial Sequence: Synthetic oligonucleotide
  Antisense strand to SEQ ID NO: 1723753
auugugacggagcagagca

SEQ ID NO: 1723755 - RNA, 19 nt, Artificial Sequence
  Description of Artificial Sequence: Synthetic oligonucleotide
  Sense strand starting at position 2803 of SEQ ID NO: 1562122
aacugaguucuugaaggca

SEQ ID NO: 1723756 - RNA, 19 nt, Artificial Sequence
  Description of Artificial Sequence: Synthetic oligonucleotide
  Antisense strand to SEQ ID NO: 1723755
ugccuucaagaacucaguu

SEQ ID NO: 1723757 - RNA, 19 nt, Artificial Sequence
  Description of Artificial Sequence: Synthetic oligonucleotide
  Sense strand starting at position 2806 of SEQ ID NO: 1562122
ugaguucuugaaggcaaga

SEQ ID NO: 1723758 - RNA, 19 nt, Artificial Sequence
  Description of Artificial Sequence: Synthetic oligonucleotide
  Antisense strand to SEQ ID NO: 1723757
ucuugccuucaagaacuca

SEQ ID NO: 1723759 - RNA, 19 nt, Artificial Sequence
  Description of Artificial Sequence: Synthetic oligonucleotide
  Sense strand starting at position 2855 of SEQ ID NO: 1562122
cagugucucccauauaguc

SEQ ID NO: 1723760 - RNA, 19 nt, Artificial Sequence
  Description of Artificial Sequence: Synthetic oligonucleotide
  Antisense strand to SEQ ID NO: 1723759
gacuauaugggagacacug

SEQ ID NO: 1723761 - RNA, 19 nt, Artificial Sequence
  Description of Artificial Sequence: Synthetic oligonucleotide
  Sense strand starting at position 2864 of SEQ ID NO: 1562122
ccauauagucaaggcucaa

SEQ ID NO: 1723762 - RNA, 19 nt, Artificial Sequence
  Description of Artificial Sequence: Synthetic oligonucleotide
  Antisense strand to SEQ ID NO: 1723761
uugagccuugacuauaugg

SEQ ID NO: 1723763 - RNA, 19 nt, Artificial Sequence
  Description of Artificial Sequence: Synthetic oligonucleotide
  Sense strand starting at position 2915 of SEQ ID NO: 1562122
agcuauuugugggaugaau

SEQ ID NO: 1723764 - RNA, 19 nt, Artificial Sequence
  Description of Artificial Sequence: Synthetic oligonucleotide
  Antisense strand to SEQ ID NO: 1723763
auucaucccacaaauagcu

SEQ ID NO: 1723765 - RNA, 19 nt, Artificial Sequence
  Description of Artificial Sequence: Synthetic oligonucleotide
  Sense strand starting at position 2950 of SEQ ID NO: 1562122
cuaguuuauuuguuguaac

SEQ ID NO: 1723766 - RNA, 19 nt, Artificial Sequence
  Description of Artificial Sequence: Synthetic oligonucleotide
  Antisense strand to SEQ ID NO: 1723765
guuacaacaaauaaacuag

SEQ ID NO: 1723767 - RNA, 19 nt, Artificial Sequence
  Description of Artificial Sequence: Synthetic oligonucleotide
  Sense strand starting at position 3051 of SEQ ID NO: 1562122
uguugcaucaauggaugaa

SEQ ID NO: 1723768 - RNA, 19 nt, Artificial Sequence
  Description of Artificial Sequence: Synthetic oligonucleotide
  Antisense strand to SEQ ID NO: 1723767
uucauccauugaugcaaca

SEQ ID NO: 1723769 - RNA, 19 nt, Artificial Sequence
  Description of Artificial Sequence: Synthetic oligonucleotide
  Sense strand starting at position 3127 of SEQ ID NO: 1562122
gagccuuguccagggaaca

SEQ ID NO: 1723770 - RNA, 19 nt, Artificial Sequence
  Description of Artificial Sequence: Synthetic oligonucleotide
  Antisense strand to SEQ ID NO: 1723769
uguucccuggacaaggcuc

SEQ ID NO: 1723771 - RNA, 19 nt, Artificial Sequence
  Description of Artificial Sequence: Synthetic oligonucleotide
  Sense strand starting at position 3268 of SEQ ID NO: 1562122
acaucuaguuacuuagaag

SEQ ID NO: 1723772 - RNA, 19 nt, Artificial Sequence
  Description of Artificial Sequence: Synthetic oligonucleotide
  Antisense strand to SEQ ID NO: 1723771
cuucuaaguaacuagaugu

SEQ ID NO: 1723773 - RNA, 19 nt, Artificial Sequence
  Description of Artificial Sequence: Synthetic oligonucleotide
  Sense strand starting at position 3277 of SEQ ID NO: 1562122
uacuuagaagcuuguuaga

SEQ ID NO: 1723774 - RNA, 19 nt, Artificial Sequence
  Description of Artificial Sequence: Synthetic oligonucleotide
  Antisense strand to SEQ ID NO: 1723773
ucuaacaagcuucuaagua

SEQ ID NO: 1723775 - RNA, 19 nt, Artificial Sequence
  Description of Artificial Sequence: Synthetic oligonucleotide
  Sense strand starting at position 3279 of SEQ ID NO: 1562122
cuuagaagcuuguuagaag

SEQ ID NO: 1723776 - RNA, 19 nt, Artificial Sequence
  Description of Artificial Sequence: Synthetic oligonucleotide
  Antisense strand to SEQ ID NO: 1723775
cuucuaacaagcuucuaag

SEQ ID NO: 1723777 - RNA, 19 nt, Artificial Sequence
  Description of Artificial Sequence: Synthetic oligonucleotide
  Sense strand starting at position 3321 of SEQ ID NO: 1562122
cuuguuugauuguuaaaga

SEQ ID NO: 1723778 - RNA, 19 nt, Artificial Sequence
  Description of Artificial Sequence: Synthetic oligonucleotide
  Antisense strand to SEQ ID NO: 1723777
ucuuuaacaaucaaacaag

SEQ ID NO: 1723779 - RNA, 19 nt, Artificial Sequence
  Description of Artificial Sequence: Synthetic oligonucleotide
  Sense strand starting at position 3432 of SEQ ID NO: 1562122
gaaauaauaugguugggua

SEQ ID NO: 1723780 - RNA, 19 nt, Artificial Sequence
  Description of Artificial Sequence: Synthetic oligonucleotide
  Antisense strand to SEQ ID NO: 1723779
uacccaaccauauuauuuc

SEQ ID NO: 1723781 - RNA, 19 nt, Artificial Sequence
  Description of Artificial Sequence: Synthetic oligonucleotide
  Sense strand starting at position 3455 of SEQ ID NO: 1562122
cuaagugcaauuuguggua

SEQ ID NO: 1723782 - RNA, 19 nt, Artificial Sequence
  Description of Artificial Sequence: Synthetic oligonucleotide
  Antisense strand to SEQ ID NO: 1723781
uaccacaaauugcacuuag

SEQ ID NO: 1723783 - RNA, 19 nt, Artificial Sequence
  Description of Artificial Sequence: Synthetic oligonucleotide
  Sense strand starting at position 3546 of SEQ ID NO: 1562122
cugagaguaccucagccuu

SEQ ID NO: 1723784 - RNA, 19 nt, Artificial Sequence
  Description of Artificial Sequence: Synthetic oligonucleotide
  Antisense strand to SEQ ID NO: 1723783
aaggcugagguacucucag

SEQ ID NO: 1723785 - RNA, 19 nt, Artificial Sequence
  Description of Artificial Sequence: Synthetic oligonucleotide
  Sense strand starting at position 3548 of SEQ ID NO: 1562122
gagaguaccucagccuuga

SEQ ID NO: 1723786 - RNA, 19 nt, Artificial Sequence
  Description of Artificial Sequence: Synthetic oligonucleotide
  Antisense strand to SEQ ID NO: 1723785
ucaaggcugagguacucuc

SEQ ID NO: 1723787 - RNA, 19 nt, Artificial Sequence
  Description of Artificial Sequence: Synthetic oligonucleotide
  Sense strand starting at position 3552 of SEQ ID NO: 1562122
guaccucagccuugacuaa

SEQ ID NO: 1723788 - RNA, 19 nt, Artificial Sequence
  Description of Artificial Sequence: Synthetic oligonucleotide
  Antisense strand to SEQ ID NO: 1723787
uuagucaaggcugagguac

SEQ ID NO: 1723789 - RNA, 19 nt, Artificial Sequence
  Description of Artificial Sequence: Synthetic oligonucleotide
  Sense strand starting at position 3647 of SEQ ID NO: 1562122
ccuggaguuccaugaggcu

SEQ ID NO: 1723790 - RNA, 19 nt, Artificial Sequence
  Description of Artificial Sequence: Synthetic oligonucleotide
  Antisense strand to SEQ ID NO: 1723789
agccucauggaacuccagg

SEQ ID NO: 1723791 - RNA, 19 nt, Artificial Sequence
  Description of Artificial Sequence: Synthetic oligonucleotide
  Sense strand starting at position 3812 of SEQ ID NO: 1562122
uuacuagaucuagaguggu

SEQ ID NO: 1723792 - RNA, 19 nt, Artificial Sequence
  Description of Artificial Sequence: Synthetic oligonucleotide
  Antisense strand to SEQ ID NO: 1723791
accacucuagaucuaguaa

SEQ ID NO: 1723793 - RNA, 19 nt, Artificial Sequence
  Description of Artificial Sequence: Synthetic oligonucleotide
  Sense strand starting at position 3881 of SEQ ID NO: 1562122
gugucuccucaugguagaa

SEQ ID NO: 1723794 - RNA, 19 nt, Artificial Sequence
  Description of Artificial Sequence: Synthetic oligonucleotide
  Antisense strand to SEQ ID NO: 1723793
uucuaccaugaggagacac

SEQ ID NO: 1723795 - RNA, 19 nt, Artificial Sequence
  Description of Artificial Sequence: Synthetic oligonucleotide
  Sense strand starting at position 3945 of SEQ ID NO: 1562122
ugauuaucuccuggagacu

SEQ ID NO: 1723796 - RNA, 19 nt, Artificial Sequence
  Description of Artificial Sequence: Synthetic oligonucleotide
  Antisense strand to SEQ ID NO: 1723795
agucuccaggagauaauca

SEQ ID NO: 1723797 - RNA, 19 nt, Artificial Sequence
  Description of Artificial Sequence: Synthetic oligonucleotide
  Sense strand starting at position 3954 of SEQ ID NO: 1562122
ccuggagacucuguuagga

SEQ ID NO: 1723798 - RNA, 19 nt, Artificial Sequence
  Description of Artificial Sequence: Synthetic oligonucleotide
  Antisense strand to SEQ ID NO: 1723797
uccuaacagagucuccagg

SEQ ID NO: 1723799 - RNA, 19 nt, Artificial Sequence
  Description of Artificial Sequence: Synthetic oligonucleotide
  Sense strand starting at position 58 of SEQ ID NO: 1562123
cuccacugauccuuuguga

SEQ ID NO: 1723800 - RNA, 19 nt, Artificial Sequence
  Description of Artificial Sequence: Synthetic oligonucleotide
  Antisense strand to SEQ ID NO: 1723799
ucacaaaggaucaguggag

SEQ ID NO: 1723801 - RNA, 19 nt, Artificial Sequence
  Description of Artificial Sequence: Synthetic oligonucleotide
  Sense strand starting at position 274 of SEQ ID NO: 1562123
ggcccugagaccuggagaa

SEQ ID NO: 1723802 - RNA, 19 nt, Artificial Sequence
  Description of Artificial Sequence: Synthetic oligonucleotide
  Antisense strand to SEQ ID NO: 1723801
uucuccaggucucagggcc

SEQ ID NO: 1723803 - RNA, 19 nt, Artificial Sequence
  Description of Artificial Sequence: Synthetic oligonucleotide
  Sense strand starting at position 287 of SEQ ID NO: 1562123
ggagaacaguucucuugaa

SEQ ID NO: 1723804 - RNA, 19 nt, Artificial Sequence
  Description of Artificial Sequence: Synthetic oligonucleotide
  Antisense strand to SEQ ID NO: 1723803
uucaagagaacuguucucc

SEQ ID NO: 1723805 - RNA, 19 nt, Artificial Sequence
  Description of Artificial Sequence: Synthetic oligonucleotide
  Sense strand starting at position 540 of SEQ ID NO: 1562123
ucaaacauuggccauaagu

SEQ ID NO: 1723806 - RNA, 19 nt, Artificial Sequence
  Description of Artificial Sequence: Synthetic oligonucleotide
  Antisense strand to SEQ ID NO: 1723805
acuuauggccaauguuuga

SEQ ID NO: 1723807 - RNA, 19 nt, Artificial Sequence
  Description of Artificial Sequence: Synthetic oligonucleotide
  Sense strand starting at position 616 of SEQ ID NO: 1562123
ggccuuguacuuuauacaa

SEQ ID NO: 1723808 - RNA, 19 nt, Artificial Sequence
  Description of Artificial Sequence: Synthetic oligonucleotide
  Antisense strand to SEQ ID NO: 1723807
uuguauaaaguacaaggcc

SEQ ID NO: 1723809 - RNA, 19 nt, Artificial Sequence
  Description of Artificial Sequence: Synthetic oligonucleotide
  Sense strand starting at position 894 of SEQ ID NO: 1562123
gugugacucacugacggau

SEQ ID NO: 1723810 - RNA, 19 nt, Artificial Sequence
  Description of Artificial Sequence: Synthetic oligonucleotide
  Antisense strand to SEQ ID NO: 1723809
auccgucagugagucacac

SEQ ID NO: 1723811 - RNA, 19 nt, Artificial Sequence
  Description of Artificial Sequence: Synthetic oligonucleotide
  Sense strand starting at position 1134 of SEQ ID NO: 1562123
cagauuucuuaggaggaca

SEQ ID NO: 1723812 - RNA, 19 nt, Artificial Sequence
  Description of Artificial Sequence: Synthetic oligonucleotide
  Antisense strand to SEQ ID NO: 1723811
uguccuccuaagaaaucug

SEQ ID NO: 1723813 - RNA, 19 nt, Artificial Sequence
  Description of Artificial Sequence: Synthetic oligonucleotide
  Sense strand starting at position 1311 of SEQ ID NO: 1562123
gaucuccagguguauugau

SEQ ID NO: 1723814 - RNA, 19 nt, Artificial Sequence
  Description of Artificial Sequence: Synthetic oligonucleotide
  Antisense strand to SEQ ID NO: 1723813
aucaauacaccuggagauc

SEQ ID NO: 1723815 - RNA, 19 nt, Artificial Sequence
  Description of Artificial Sequence: Synthetic oligonucleotide
  Sense strand starting at position 1323 of SEQ ID NO: 1562123
uauugaugggcuugauuaa

SEQ ID NO: 1723816 - RNA, 19 nt, Artificial Sequence
  Description of Artificial Sequence: Synthetic oligonucleotide
  Antisense strand to SEQ ID NO: 1723815
uuaaucaagcccaucaaua

SEQ ID NO: 1723817 - RNA, 19 nt, Artificial Sequence
  Description of Artificial Sequence: Synthetic oligonucleotide
  Sense strand starting at position 1581 of SEQ ID NO: 1562123
gucagaaacuaaugauuug

SEQ ID NO: 1723818 - RNA, 19 nt, Artificial Sequence
  Description of Artificial Sequence: Synthetic oligonucleotide
  Antisense strand to SEQ ID NO: 1723817
caaaucauuaguuucugac

SEQ ID NO: 1723819 - RNA, 19 nt, Artificial Sequence
  Description of Artificial Sequence: Synthetic oligonucleotide
  Sense strand starting at position 1968 of SEQ ID NO: 1562123
gcuggacuucauggugaag

SEQ ID NO: 1723820 - RNA, 19 nt, Artificial Sequence
  Description of Artificial Sequence: Synthetic oligonucleotide
  Antisense strand to SEQ ID NO: 1723819
cuucaccaugaaguccagc

SEQ ID NO: 1723821 - RNA, 19 nt, Artificial Sequence
  Description of Artificial Sequence: Synthetic oligonucleotide
  Sense strand starting at position 2127 of SEQ ID NO: 1562123
caccaaggagauuguuuau

SEQ ID NO: 1723822 - RNA, 19 nt, Artificial Sequence
  Description of Artificial Sequence: Synthetic oligonucleotide
  Antisense strand to SEQ ID NO: 1723821
auaaacaaucuccuuggug

SEQ ID NO: 1723823 - RNA, 19 nt, Artificial Sequence
  Description of Artificial Sequence: Synthetic oligonucleotide
  Sense strand starting at position 2130 of SEQ ID NO: 1562123
caaggagauuguuuaucuu

SEQ ID NO: 1723824 - RNA, 19 nt, Artificial Sequence
  Description of Artificial Sequence: Synthetic oligonucleotide
  Antisense strand to SEQ ID NO: 1723823
aagauaaacaaucuccuug

SEQ ID NO: 1723825 - RNA, 19 nt, Artificial Sequence
  Description of Artificial Sequence: Synthetic oligonucleotide
  Sense strand starting at position 2205 of SEQ ID NO: 1562123
agagauuggccugggaagu

SEQ ID NO: 1723826 - RNA, 19 nt, Artificial Sequence
  Description of Artificial Sequence: Synthetic oligonucleotide
  Antisense strand to SEQ ID NO: 1723825
acuucccaggccaaucucu

SEQ ID NO: 1723827 - RNA, 19 nt, Artificial Sequence
  Description of Artificial Sequence: Synthetic oligonucleotide
  Sense strand starting at position 2206 of SEQ ID NO: 1562123
gagauuggccugggaaguu

SEQ ID NO: 1723828 - RNA, 19 nt, Artificial Sequence
  Description of Artificial Sequence: Synthetic oligonucleotide
  Antisense strand to SEQ ID NO: 1723827
aacuucccaggccaaucuc

SEQ ID NO: 1723829 - RNA, 19 nt, Artificial Sequence
  Description of Artificial Sequence: Synthetic oligonucleotide
  Sense strand starting at position 2215 of SEQ ID NO: 1562123
cugggaaguugguugauua

SEQ ID NO: 1723830 - RNA, 19 nt, Artificial Sequence
  Description of Artificial Sequence: Synthetic oligonucleotide
  Antisense strand to SEQ ID NO: 1723829
uaaucaaccaacuucccag

SEQ ID NO: 1723831 - RNA, 19 nt, Artificial Sequence
  Description of Artificial Sequence: Synthetic oligonucleotide
  Sense strand starting at position 2216 of SEQ ID NO: 1562123
ugggaaguugguugauuaa

SEQ ID NO: 1723832 - RNA, 19 nt, Artificial Sequence
  Description of Artificial Sequence: Synthetic oligonucleotide
  Antisense strand to SEQ ID NO: 1723831
uuaaucaaccaacuuccca

SEQ ID NO: 1723833 - RNA, 19 nt, Artificial Sequence
  Description of Artificial Sequence: Synthetic oligonucleotide
  Sense strand starting at position 2219 of SEQ ID NO: 1562123
gaaguugguugauuaaaga

SEQ ID NO: 1723834 - RNA, 19 nt, Artificial Sequence
  Description of Artificial Sequence: Synthetic oligonucleotide
  Antisense strand to SEQ ID NO: 1723833
ucuuuaaucaaccaacuuc

SEQ ID NO: 1723835 - RNA, 19 nt, Artificial Sequence
  Description of Artificial Sequence: Synthetic oligonucleotide
  Sense strand starting at position 2283 of SEQ ID NO: 1562123
ggccauuagccuuauaggu

SEQ ID NO: 1723836 - RNA, 19 nt, Artificial Sequence
  Description of Artificial Sequence: Synthetic oligonucleotide
  Antisense strand to SEQ ID NO: 1723835
accuauaaggcuaauggcc

SEQ ID NO: 1723837 - RNA, 19 nt, Artificial Sequence
  Description of Artificial Sequence: Synthetic oligonucleotide
  Sense strand starting at position 2290 of SEQ ID NO: 1562123
agccuuauagguggagaga

SEQ ID NO: 1723838 - RNA, 19 nt, Artificial Sequence
  Description of Artificial Sequence: Synthetic oligonucleotide
  Antisense strand to SEQ ID NO: 1723837
ucucuccaccuauaaggcu

SEQ ID NO: 1723839 - RNA, 19 nt, Artificial Sequence
  Description of Artificial Sequence: Synthetic oligonucleotide
  Sense strand starting at position 2376 of SEQ ID NO: 1562123
cugagacuuugugcaauac

SEQ ID NO: 1723840 - RNA, 19 nt, Artificial Sequence
  Description of Artificial Sequence: Synthetic oligonucleotide
  Antisense strand to SEQ ID NO: 1723839
guauugcacaaagucucag

SEQ ID NO: 1723841 - RNA, 19 nt, Artificial Sequence
  Description of Artificial Sequence: Synthetic oligonucleotide
  Sense strand starting at position 2377 of SEQ ID NO: 1562123
ugagacuuugugcaauaca

SEQ ID NO: 1723842 - RNA, 19 nt, Artificial Sequence
  Description of Artificial Sequence: Synthetic oligonucleotide
  Antisense strand to SEQ ID NO: 1723841
uguauugcacaaagucuca

SEQ ID NO: 1723843 - RNA, 19 nt, Artificial Sequence
  Description of Artificial Sequence: Synthetic oligonucleotide
  Sense strand starting at position 2437 of SEQ ID NO: 1562123
acucucaggcauugugaaa

SEQ ID NO: 1723844 - RNA, 19 nt, Artificial Sequence
  Description of Artificial Sequence: Synthetic oligonucleotide
  Antisense strand to SEQ ID NO: 1723843
uuucacaaugccugagagu

SEQ ID NO: 1723845 - RNA, 19 nt, Artificial Sequence
  Description of Artificial Sequence: Synthetic oligonucleotide
  Sense strand starting at position 2451 of SEQ ID NO: 1562123
ugaaacucugcugauuacu

SEQ ID NO: 1723846 - RNA, 19 nt, Artificial Sequence
  Description of Artificial Sequence: Synthetic oligonucleotide
  Antisense strand to SEQ ID NO: 1723845
aguaaucagcagaguuuca

SEQ ID NO: 1723847 - RNA, 19 nt, Artificial Sequence
  Description of Artificial Sequence: Synthetic oligonucleotide
  Sense strand starting at position 2556 of SEQ ID NO: 1562123
gccuguucugugccugaca

SEQ ID NO: 1723848 - RNA, 19 nt, Artificial Sequence
  Description of Artificial Sequence: Synthetic oligonucleotide
  Antisense strand to SEQ ID NO: 1723847
ugucaggcacagaacaggc

SEQ ID NO: 1723849 - RNA, 19 nt, Artificial Sequence
  Description of Artificial Sequence: Synthetic oligonucleotide
  Sense strand starting at position 2648 of SEQ ID NO: 1562123
ucagcugugaaaugaaaug

SEQ ID NO: 1723850 - RNA, 19 nt, Artificial Sequence
  Description of Artificial Sequence: Synthetic oligonucleotide
  Antisense strand to SEQ ID NO: 1723849
cauuucauuucacagcuga

SEQ ID NO: 1723851 - RNA, 19 nt, Artificial Sequence
  Description of Artificial Sequence: Synthetic oligonucleotide
  Sense strand starting at position 2659 of SEQ ID NO: 1562123
augaaaugauacuaacaag

SEQ ID NO: 1723852 - RNA, 19 nt, Artificial Sequence
  Description of Artificial Sequence: Synthetic oligonucleotide
  Antisense strand to SEQ ID NO: 1723851
cuuguuaguaucauuucau

SEQ ID NO: 1723853 - RNA, 19 nt, Artificial Sequence
  Description of Artificial Sequence: Synthetic oligonucleotide
  Sense strand starting at position 2771 of SEQ ID NO: 1562123
ugaaaugaaucugagauaa

SEQ ID NO: 1723854 - RNA, 19 nt, Artificial Sequence
  Description of Artificial Sequence: Synthetic oligonucleotide
  Antisense strand to SEQ ID NO: 1723853
uuaucucagauucauuuca

SEQ ID NO: 1723855 - RNA, 19 nt, Artificial Sequence
  Description of Artificial Sequence: Synthetic oligonucleotide
  Sense strand starting at position 2793 of SEQ ID NO: 1562123
gggaaagcagcucaucagu

SEQ ID NO: 1723856 - RNA, 19 nt, Artificial Sequence
  Description of Artificial Sequence: Synthetic oligonucleotide
  Antisense strand to SEQ ID NO: 1723855
acugaugagcugcuuuccc

SEQ ID NO: 1723857 - RNA, 19 nt, Artificial Sequence
  Description of Artificial Sequence: Synthetic oligonucleotide
  Sense strand starting at position 2795 of SEQ ID NO: 1562123
gaaagcagcucaucaguca

SEQ ID NO: 1723858 - RNA, 19 nt, Artificial Sequence
  Description of Artificial Sequence: Synthetic oligonucleotide
  Antisense strand to SEQ ID NO: 1723857
ugacugaugagcugcuuuc

SEQ ID NO: 1723859 - RNA, 19 nt, Artificial Sequence
  Description of Artificial Sequence: Synthetic oligonucleotide
  Sense strand starting at position 2823 of SEQ ID NO: 1562123
acauuuagcugugagauaa

SEQ ID NO: 1723860 - RNA, 19 nt, Artificial Sequence
  Description of Artificial Sequence: Synthetic oligonucleotide
  Antisense strand to SEQ ID NO: 1723859
uuaucucacagcuaaaugu

SEQ ID NO: 1723861 - RNA, 19 nt, Artificial Sequence
  Description of Artificial Sequence: Synthetic oligonucleotide
  Sense strand starting at position 2833 of SEQ ID NO: 1562123
gugagauaauuugagaucu

SEQ ID NO: 1723862 - RNA, 19 nt, Artificial Sequence
  Description of Artificial Sequence: Synthetic oligonucleotide
  Antisense strand to SEQ ID NO: 1723861
agaucucaaauuaucucac

SEQ ID NO: 1723863 - RNA, 19 nt, Artificial Sequence
  Description of Artificial Sequence: Synthetic oligonucleotide
  Sense strand starting at position 2850 of SEQ ID NO: 1562123
cuuagaggauugcuuccua

SEQ ID NO: 1723864 - RNA, 19 nt, Artificial Sequence
  Description of Artificial Sequence: Synthetic oligonucleotide
  Antisense strand to SEQ ID NO: 1723863
uaggaagcaauccucuaag

SEQ ID NO: 1723865 - RNA, 19 nt, Artificial Sequence
  Description of Artificial Sequence: Synthetic oligonucleotide
  Sense strand starting at position 2969 of SEQ ID NO: 1562123
agcgaccauuaucucuaaa

SEQ ID NO: 1723866 - RNA, 19 nt, Artificial Sequence
  Description of Artificial Sequence: Synthetic oligonucleotide
  Antisense strand to SEQ ID NO: 1723865
uuuagagauaauggucgcu

SEQ ID NO: 1723867 - RNA, 19 nt, Artificial Sequence
  Description of Artificial Sequence: Synthetic oligonucleotide
  Sense strand starting at position 3050 of SEQ ID NO: 1562123
guguauggauuccuugaga

SEQ ID NO: 1723868 - RNA, 19 nt, Artificial Sequence
  Description of Artificial Sequence: Synthetic oligonucleotide
  Antisense strand to SEQ ID NO: 1723867
ucucaaggaauccauacac

SEQ ID NO: 1723869 - RNA, 19 nt, Artificial Sequence
  Description of Artificial Sequence: Synthetic oligonucleotide
  Sense strand starting at position 3058 of SEQ ID NO: 1562123
auuccuugagaguaggagu

SEQ ID NO: 1723870 - RNA, 19 nt, Artificial Sequence
  Description of Artificial Sequence: Synthetic oligonucleotide
  Antisense strand to SEQ ID NO: 1723869
acuccuacucucaaggaau

SEQ ID NO: 1723871 - RNA, 19 nt, Artificial Sequence
  Description of Artificial Sequence: Synthetic oligonucleotide
  Sense strand starting at position 3519 of SEQ ID NO: 1562123
aagucacuccaugguuuga

SEQ ID NO: 1723872 - RNA, 19 nt, Artificial Sequence
  Description of Artificial Sequence: Synthetic oligonucleotide
  Antisense strand to SEQ ID NO: 1723871
ucaaaccauggagugacuu

SEQ ID NO: 1723873 - RNA, 19 nt, Artificial Sequence
  Description of Artificial Sequence: Synthetic oligonucleotide
  Sense strand starting at position 3521 of SEQ ID NO: 1562123
gucacuccaugguuugaau

SEQ ID NO: 1723874 - RNA, 19 nt, Artificial Sequence
  Description of Artificial Sequence: Synthetic oligonucleotide
  Antisense strand to SEQ ID NO: 1723873
auucaaaccauggagugac

SEQ ID NO: 1723875 - RNA, 19 nt, Artificial Sequence
  Description of Artificial Sequence: Synthetic oligonucleotide
  Sense strand starting at position 3774 of SEQ ID NO: 1562123
uuugauuucucucacagag

SEQ ID NO: 1723876 - RNA, 19 nt, Artificial Sequence
  Description of Artificial Sequence: Synthetic oligonucleotide
  Antisense strand to SEQ ID NO: 1723875
cucugugagagaaaucaaa

SEQ ID NO: 1723877 - RNA, 19 nt, Artificial Sequence
  Description of Artificial Sequence: Synthetic oligonucleotide
  Sense strand starting at position 3852 of SEQ ID NO: 1562123
ucaagaaauuaucuggagu

SEQ ID NO: 1723878 - RNA, 19 nt, Artificial Sequence
  Description of Artificial Sequence: Synthetic oligonucleotide
  Antisense strand to SEQ ID NO: 1723877
acuccagauaauuucuuga

SEQ ID NO: 1723879 - RNA, 19 nt, Artificial Sequence
  Description of Artificial Sequence: Synthetic oligonucleotide
  Sense strand starting at position 143 of SEQ ID NO: 1562124
aggguuauacccugucuca

SEQ ID NO: 1723880 - RNA, 19 nt, Artificial Sequence
  Description of Artificial Sequence: Synthetic oligonucleotide
  Antisense strand to SEQ ID NO: 1723879
ugagacaggguauaacccu

SEQ ID NO: 1723881 - RNA, 19 nt, Artificial Sequence
  Description of Artificial Sequence: Synthetic oligonucleotide
  Sense strand starting at position 251 of SEQ ID NO: 1562124
uuuccaagucaguauugaa

SEQ ID NO: 1723882 - RNA, 19 nt, Artificial Sequence
  Description of Artificial Sequence: Synthetic oligonucleotide
  Antisense strand to SEQ ID NO: 1723881
uucaauacugacuuggaaa

SEQ ID NO: 1723883 - RNA, 19 nt, Artificial Sequence
  Description of Artificial Sequence: Synthetic oligonucleotide
  Sense strand starting at position 380 of SEQ ID NO: 1562124
aacgcaaaccagugguaaa

SEQ ID NO: 1723884 - RNA, 19 nt, Artificial Sequence
  Description of Artificial Sequence: Synthetic oligonucleotide
  Antisense strand to SEQ ID NO: 1723883
uuuaccacugguuugcguu

SEQ ID NO: 1723885 - RNA, 19 nt, Artificial Sequence
  Description of Artificial Sequence: Synthetic oligonucleotide
  Sense strand starting at position 392 of SEQ ID NO: 1562124
ugguaaauuggaugcuaag

SEQ ID NO: 1723886 - RNA, 19 nt, Artificial Sequence
  Description of Artificial Sequence: Synthetic oligonucleotide
  Antisense strand to SEQ ID NO: 1723885
cuuagcauccaauuuacca

SEQ ID NO: 1723887 - RNA, 19 nt, Artificial Sequence
  Description of Artificial Sequence: Synthetic oligonucleotide
  Sense strand starting at position 594 of SEQ ID NO: 1562124
uugauaauacacugugaau

SEQ ID NO: 1723888 - RNA, 19 nt, Artificial Sequence
  Description of Artificial Sequence: Synthetic oligonucleotide
  Antisense strand to SEQ ID NO: 1723887
auucacaguguauuaucaa

SEQ ID NO: 1723889 - RNA, 19 nt, Artificial Sequence
  Description of Artificial Sequence: Synthetic oligonucleotide
  Sense strand starting at position 605 of SEQ ID NO: 1562124
cugugaaucuaguuaagaa

SEQ ID NO: 1723890 - RNA, 19 nt, Artificial Sequence
  Description of Artificial Sequence: Synthetic oligonucleotide
  Antisense strand to SEQ ID NO: 1723889
uucuuaacuagauucacag

SEQ ID NO: 1723891 - RNA, 19 nt, Artificial Sequence
  Description of Artificial Sequence: Synthetic oligonucleotide
  Sense strand starting at position 617 of SEQ ID NO: 1562124
uuaagaagcacggguugaa

SEQ ID NO: 1723892 - RNA, 19 nt, Artificial Sequence
  Description of Artificial Sequence: Synthetic oligonucleotide
  Antisense strand to SEQ ID NO: 1723891
uucaacccgugcuucuuaa

SEQ ID NO: 1723893 - RNA, 19 nt, Artificial Sequence
  Description of Artificial Sequence: Synthetic oligonucleotide
  Sense strand starting at position 944 of SEQ ID NO: 1562124
gaaagaaagggcuguaucu

SEQ ID NO: 1723894 - RNA, 19 nt, Artificial Sequence
  Description of Artificial Sequence: Synthetic oligonucleotide
  Antisense strand to SEQ ID NO: 1723893
agauacagcccuuucuuuc

SEQ ID NO: 1723895 - RNA, 19 nt, Artificial Sequence
  Description of Artificial Sequence: Synthetic oligonucleotide
  Sense strand starting at position 946 of SEQ ID NO: 1562124
aagaaagggcuguaucuuu

SEQ ID NO: 1723896 - RNA, 19 nt, Artificial Sequence
  Description of Artificial Sequence: Synthetic oligonucleotide
  Antisense strand to SEQ ID NO: 1723895
aaagauacagcccuuucuu

SEQ ID NO: 1723897 - RNA, 19 nt, Artificial Sequence
  Description of Artificial Sequence: Synthetic oligonucleotide
  Sense strand starting at position 965 of SEQ ID NO: 1562124
agcccaugcccugaaucaa

SEQ ID NO: 1723898 - RNA, 19 nt, Artificial Sequence
  Description of Artificial Sequence: Synthetic oligonucleotide
  Antisense strand to SEQ ID NO: 1723897
uugauucagggcaugggcu

SEQ ID NO: 1723899 - RNA, 19 nt, Artificial Sequence
  Description of Artificial Sequence: Synthetic oligonucleotide
  Sense strand starting at position 975 of SEQ ID NO: 1562124
cugaaucaauguuccuuga

SEQ ID NO: 1723900 - RNA, 19 nt, Artificial Sequence
  Description of Artificial Sequence: Synthetic oligonucleotide
  Antisense strand to SEQ ID NO: 1723899
ucaaggaacauugauucag

SEQ ID NO: 1723901 - RNA, 19 nt, Artificial Sequence
  Description of Artificial Sequence: Synthetic oligonucleotide
  Sense strand starting at position 986 of SEQ ID NO: 1562124
uuccuugaacuuuaaggua

SEQ ID NO: 1723902 - RNA, 19 nt, Artificial Sequence
  Description of Artificial Sequence: Synthetic oligonucleotide
  Antisense strand to SEQ ID NO: 1723901
uaccuuaaaguucaaggaa

SEQ ID NO: 1723903 - RNA, 19 nt, Artificial Sequence
  Description of Artificial Sequence: Synthetic oligonucleotide
  Sense strand starting at position 1045 of SEQ ID NO: 1562124
agagucaugaaguguaauu

SEQ ID NO: 1723904 - RNA, 19 nt, Artificial Sequence
  Description of Artificial Sequence: Synthetic oligonucleotide
  Antisense strand to SEQ ID NO: 1723903
aauuacacuucaugacucu

SEQ ID NO: 1723905 - RNA, 19 nt, Artificial Sequence
  Description of Artificial Sequence: Synthetic oligonucleotide
  Sense strand starting at position 1047 of SEQ ID NO: 1562124
agucaugaaguguaauucu

SEQ ID NO: 1723906 - RNA, 19 nt, Artificial Sequence
  Description of Artificial Sequence: Synthetic oligonucleotide
  Antisense strand to SEQ ID NO: 1723905
agaauuacacuucaugacu

SEQ ID NO: 1723907 - RNA, 19 nt, Artificial Sequence
  Description of Artificial Sequence: Synthetic oligonucleotide
  Sense strand starting at position 1100 of SEQ ID NO: 1562124
gugaaaugaacuuggagca

SEQ ID NO: 1723908 - RNA, 19 nt, Artificial Sequence
  Description of Artificial Sequence: Synthetic oligonucleotide
  Antisense strand to SEQ ID NO: 1723907
ugcuccaaguucauuucac

SEQ ID NO: 1723909 - RNA, 19 nt, Artificial Sequence
  Description of Artificial Sequence: Synthetic oligonucleotide
  Sense strand starting at position 1157 of SEQ ID NO: 1562124
agccaacuggcuuacaaau

SEQ ID NO: 1723910 - RNA, 19 nt, Artificial Sequence
  Description of Artificial Sequence: Synthetic oligonucleotide
  Antisense strand to SEQ ID NO: 1723909
auuuguaagccaguuggcu

SEQ ID NO: 1723911 - RNA, 19 nt, Artificial Sequence
  Description of Artificial Sequence: Synthetic oligonucleotide
  Sense strand starting at position 1175 of SEQ ID NO: 1562124
uaucguuaugucuaggauc

SEQ ID NO: 1723912 - RNA, 19 nt, Artificial Sequence
  Description of Artificial Sequence: Synthetic oligonucleotide
  Antisense strand to SEQ ID NO: 1723911
gauccuagacauaacgaua

SEQ ID NO: 1723913 - RNA, 19 nt, Artificial Sequence
  Description of Artificial Sequence: Synthetic oligonucleotide
  Sense strand starting at position 1352 of SEQ ID NO: 1562124
aguagaugucaaggugaua

SEQ ID NO: 1723914 - RNA, 19 nt, Artificial Sequence
  Description of Artificial Sequence: Synthetic oligonucleotide
  Antisense strand to SEQ ID NO: 1723913
uaucaccuugacaucuacu

SEQ ID NO: 1723915 - RNA, 19 nt, Artificial Sequence
  Description of Artificial Sequence: Synthetic oligonucleotide
  Sense strand starting at position 1371 of SEQ ID NO: 1562124
aaauguaggcuccaugagu

SEQ ID NO: 1723916 - RNA, 19 nt, Artificial Sequence
  Description of Artificial Sequence: Synthetic oligonucleotide
  Antisense strand to SEQ ID NO: 1723915
acucauggagccuacauuu

SEQ ID NO: 1723917 - RNA, 19 nt, Artificial Sequence
  Description of Artificial Sequence: Synthetic oligonucleotide
  Sense strand starting at position 1378 of SEQ ID NO: 1562124
ggcuccaugaguuaaugga

SEQ ID NO: 1723918 - RNA, 19 nt, Artificial Sequence
  Description of Artificial Sequence: Synthetic oligonucleotide
  Antisense strand to SEQ ID NO: 1723917
uccauuaacucauggagcc

SEQ ID NO: 1723919 - RNA, 19 nt, Artificial Sequence
  Description of Artificial Sequence: Synthetic oligonucleotide
  Sense strand starting at position 1635 of SEQ ID NO: 1562124
ugaauaauaucuccaccgu

SEQ ID NO: 1723920 - RNA, 19 nt, Artificial Sequence
  Description of Artificial Sequence: Synthetic oligonucleotide
  Antisense strand to SEQ ID NO: 1723919
acgguggagauauuauuca

SEQ ID NO: 1723921 - RNA, 19 nt, Artificial Sequence
  Description of Artificial Sequence: Synthetic oligonucleotide
  Sense strand starting at position 1817 of SEQ ID NO: 1562124
aacaucugagguugucaga

SEQ ID NO: 1723922 - RNA, 19 nt, Artificial Sequence
  Description of Artificial Sequence: Synthetic oligonucleotide
  Antisense strand to SEQ ID NO: 1723921
ucugacaaccucagauguu

SEQ ID NO: 1723923 - RNA, 19 nt, Artificial Sequence
  Description of Artificial Sequence: Synthetic oligonucleotide
  Sense strand starting at position 1824 of SEQ ID NO: 1562124
gagguugucagagguccau

SEQ ID NO: 1723924 - RNA, 19 nt, Artificial Sequence
  Description of Artificial Sequence: Synthetic oligonucleotide
  Antisense strand to SEQ ID NO: 1723923
auggaccucugacaaccuc

SEQ ID NO: 1723925 - RNA, 19 nt, Artificial Sequence
  Description of Artificial Sequence: Synthetic oligonucleotide
  Sense strand starting at position 1991 of SEQ ID NO: 1562124
agcacuuucgcgcuuacuu

SEQ ID NO: 1723926 - RNA, 19 nt, Artificial Sequence
  Description of Artificial Sequence: Synthetic oligonucleotide
  Antisense strand to SEQ ID NO: 1723925
aaguaagcgcgaaagugcu

SEQ ID NO: 1723927 - RNA, 19 nt, Artificial Sequence
  Description of Artificial Sequence: Synthetic oligonucleotide
  Sense strand starting at position 2112 of SEQ ID NO: 1562124
uuaagauggcagcgaaaca

SEQ ID NO: 1723928 - RNA, 19 nt, Artificial Sequence
  Description of Artificial Sequence: Synthetic oligonucleotide
  Antisense strand to SEQ ID NO: 1723927
uguuucgcugccaucuuaa

SEQ ID NO: 1723929 - RNA, 19 nt, Artificial Sequence
  Description of Artificial Sequence: Synthetic oligonucleotide
  Sense strand starting at position 2305 of SEQ ID NO: 1562124
aguugaacugaccgagaga

SEQ ID NO: 1723930 - RNA, 19 nt, Artificial Sequence
  Description of Artificial Sequence: Synthetic oligonucleotide
  Antisense strand to SEQ ID NO: 1723929
ucucucggucaguucaacu

SEQ ID NO: 1723931 - RNA, 19 nt, Artificial Sequence
  Description of Artificial Sequence: Synthetic oligonucleotide
  Sense strand starting at position 2397 of SEQ ID NO: 1562124
ggugcgaaagauugugaga

SEQ ID NO: 1723932 - RNA, 19 nt, Artificial Sequence
  Description of Artificial Sequence: Synthetic oligonucleotide
  Antisense strand to SEQ ID NO: 1723931
ucucacaaucuuucgcacc

SEQ ID NO: 1723933 - RNA, 19 nt, Artificial Sequence
  Description of Artificial Sequence: Synthetic oligonucleotide
  Sense strand starting at position 2402 of SEQ ID NO: 1562124
gaaagauugugagaaagga

SEQ ID NO: 1723934 - RNA, 19 nt, Artificial Sequence
  Description of Artificial Sequence: Synthetic oligonucleotide
  Antisense strand to SEQ ID NO: 1723933
uccuuucucacaaucuuuc

SEQ ID NO: 1723935 - RNA, 19 nt, Artificial Sequence
  Description of Artificial Sequence: Synthetic oligonucleotide
  Sense strand starting at position 2546 of SEQ ID NO: 1562124
ggaaaugccgggugaauua

SEQ ID NO: 1723936 - RNA, 19 nt, Artificial Sequence
  Description of Artificial Sequence: Synthetic oligonucleotide
  Antisense strand to SEQ ID NO: 1723935
uaauucacccggcauuucc

SEQ ID NO: 1723937 - RNA, 19 nt, Artificial Sequence
  Description of Artificial Sequence: Synthetic oligonucleotide
  Sense strand starting at position 2553 of SEQ ID NO: 1562124
ccgggugaauuaucuaauc

SEQ ID NO: 1723938 - RNA, 19 nt, Artificial Sequence
  Description of Artificial Sequence: Synthetic oligonucleotide
  Antisense strand to SEQ ID NO: 1723937
gauuagauaauucacccgg

SEQ ID NO: 1723939 - RNA, 19 nt, Artificial Sequence
  Description of Artificial Sequence: Synthetic oligonucleotide
  Sense strand starting at position 2558 of SEQ ID NO: 1562124
ugaauuaucuaaucuguga

SEQ ID NO: 1723940 - RNA, 19 nt, Artificial Sequence
  Description of Artificial Sequence: Synthetic oligonucleotide
  Antisense strand to SEQ ID NO: 1723939
ucacagauuagauaauuca

SEQ ID NO: 1723941 - RNA, 19 nt, Artificial Sequence
  Description of Artificial Sequence: Synthetic oligonucleotide
  Sense strand starting at position 2561 of SEQ ID NO: 1562124
auuaucuaaucugugaaga

SEQ ID NO: 1723942 - RNA, 19 nt, Artificial Sequence
  Description of Artificial Sequence: Synthetic oligonucleotide
  Antisense strand to SEQ ID NO: 1723941
ucuucacagauuagauaau

SEQ ID NO: 1723943 - RNA, 19 nt, Artificial Sequence
  Description of Artificial Sequence: Synthetic oligonucleotide
  Sense strand starting at position 2562 of SEQ ID NO: 1562124
uuaucuaaucugugaagag

SEQ ID NO: 1723944 - RNA, 19 nt, Artificial Sequence
  Description of Artificial Sequence: Synthetic oligonucleotide
  Antisense strand to SEQ ID NO: 1723943
cucuucacagauuagauaa

SEQ ID NO: 1723945 - RNA, 19 nt, Artificial Sequence
  Description of Artificial Sequence: Synthetic oligonucleotide
  Sense strand starting at position 2784 of SEQ ID NO: 1562124
uuuguaauuggucauguca

SEQ ID NO: 1723946 - RNA, 19 nt, Artificial Sequence
  Description of Artificial Sequence: Synthetic oligonucleotide
  Antisense strand to SEQ ID NO: 1723945
ugacaugaccaauuacaaa

SEQ ID NO: 1723947 - RNA, 19 nt, Artificial Sequence
  Description of Artificial Sequence: Synthetic oligonucleotide
  Sense strand starting at position 2875 of SEQ ID NO: 1562124
ggcagaagcugugccauuu

SEQ ID NO: 1723948 - RNA, 19 nt, Artificial Sequence
  Description of Artificial Sequence: Synthetic oligonucleotide
  Antisense strand to SEQ ID NO: 1723947
aaauggcacagcuucugcc

SEQ ID NO: 1723949 - RNA, 19 nt, Artificial Sequence
  Description of Artificial Sequence: Synthetic oligonucleotide
  Sense strand starting at position 2950 of SEQ ID NO: 1562124
uggaauauacgcugaauaa

SEQ ID NO: 1723950 - RNA, 19 nt, Artificial Sequence
  Description of Artificial Sequence: Synthetic oligonucleotide
  Antisense strand to SEQ ID NO: 1723949
uuauucagcguauauucca

SEQ ID NO: 1723951 - RNA, 19 nt, Artificial Sequence
  Description of Artificial Sequence: Synthetic oligonucleotide
  Sense strand starting at position 3299 of SEQ ID NO: 1562124
gguguccucacugaaggau

SEQ ID NO: 1723952 - RNA, 19 nt, Artificial Sequence
  Description of Artificial Sequence: Synthetic oligonucleotide
  Antisense strand to SEQ ID NO: 1723951
auccuucagugaggacacc

SEQ ID NO: 1723953 - RNA, 19 nt, Artificial Sequence
  Description of Artificial Sequence: Synthetic oligonucleotide
  Sense strand starting at position 3302 of SEQ ID NO: 1562124
guccucacugaaggauauu

SEQ ID NO: 1723954 - RNA, 19 nt, Artificial Sequence
  Description of Artificial Sequence: Synthetic oligonucleotide
  Antisense strand to SEQ ID NO: 1723953
aauauccuucagugaggac

SEQ ID NO: 1723955 - RNA, 19 nt, Artificial Sequence
  Description of Artificial Sequence: Synthetic oligonucleotide
  Sense strand starting at position 3378 of SEQ ID NO: 1562124
gaaauagcugccgauggua

SEQ ID NO: 1723956 - RNA, 19 nt, Artificial Sequence
  Description of Artificial Sequence: Synthetic oligonucleotide
  Antisense strand to SEQ ID NO: 1723955
uaccaucggcagcuauuuc

SEQ ID NO: 1723957 - RNA, 19 nt, Artificial Sequence
  Description of Artificial Sequence: Synthetic oligonucleotide
  Sense strand starting at position 3623 of SEQ ID NO: 1562124
gcguuagagacguugugca

SEQ ID NO: 1723958 - RNA, 19 nt, Artificial Sequence
  Description of Artificial Sequence: Synthetic oligonucleotide
  Antisense strand to SEQ ID NO: 1723957
ugcacaacgucucuaacgc

SEQ ID NO: 1723959 - RNA, 19 nt, Artificial Sequence
  Description of Artificial Sequence: Synthetic oligonucleotide
  Sense strand starting at position 120 of SEQ ID NO: 1562125
ccaugagaaugauguacau

SEQ ID NO: 1723960 - RNA, 19 nt, Artificial Sequence
  Description of Artificial Sequence: Synthetic oligonucleotide
  Antisense strand to SEQ ID NO: 1723959
auguacaucauucucaugg

SEQ ID NO: 1723961 - RNA, 19 nt, Artificial Sequence
  Description of Artificial Sequence: Synthetic oligonucleotide
  Sense strand starting at position 144 of SEQ ID NO: 1562125
aucuguauguuugcaaauu

SEQ ID NO: 1723962 - RNA, 19 nt, Artificial Sequence
  Description of Artificial Sequence: Synthetic oligonucleotide
  Antisense strand to SEQ ID NO: 1723961
aauuugcaaacauacagau

SEQ ID NO: 1723963 - RNA, 19 nt, Artificial Sequence
  Description of Artificial Sequence: Synthetic oligonucleotide
  Sense strand starting at position 276 of SEQ ID NO: 1562125
gagugaaggagcugucuga

SEQ ID NO: 1723964 - RNA, 19 nt, Artificial Sequence
  Description of Artificial Sequence: Synthetic oligonucleotide
  Antisense strand to SEQ ID NO: 1723963
ucagacagcuccuucacuc

SEQ ID NO: 1723965 - RNA, 19 nt, Artificial Sequence
  Description of Artificial Sequence: Synthetic oligonucleotide
  Sense strand starting at position 348 of SEQ ID NO: 1562125
ggaggauacugguucuuga

SEQ ID NO: 1723966 - RNA, 19 nt, Artificial Sequence
  Description of Artificial Sequence: Synthetic oligonucleotide
  Antisense strand to SEQ ID NO: 1723965
ucaagaaccaguauccucc

SEQ ID NO: 1723967 - RNA, 19 nt, Artificial Sequence
  Description of Artificial Sequence: Synthetic oligonucleotide
  Sense strand starting at position 362 of SEQ ID NO: 1562125
cuugaaggagaguguucaa

SEQ ID NO: 1723968 - RNA, 19 nt, Artificial Sequence
  Description of Artificial Sequence: Synthetic oligonucleotide
  Antisense strand to SEQ ID NO: 1723967
uugaacacucuccuucaag

SEQ ID NO: 1723969 - RNA, 19 nt, Artificial Sequence
  Description of Artificial Sequence: Synthetic oligonucleotide
  Sense strand starting at position 504 of SEQ ID NO: 1562125
agagcugugcucugaagga

SEQ ID NO: 1723970 - RNA, 19 nt, Artificial Sequence
  Description of Artificial Sequence: Synthetic oligonucleotide
  Antisense strand to SEQ ID NO: 1723969
uccuucagagcacagcucu

SEQ ID NO: 1723971 - RNA, 19 nt, Artificial Sequence
  Description of Artificial Sequence: Synthetic oligonucleotide
  Sense strand starting at position 534 of SEQ ID NO: 1562125
aggcucuccagagaaguuu

SEQ ID NO: 1723972 - RNA, 19 nt, Artificial Sequence
  Description of Artificial Sequence: Synthetic oligonucleotide
  Antisense strand to SEQ ID NO: 1723971
aaacuucucuggagagccu

SEQ ID NO: 1723973 - RNA, 19 nt, Artificial Sequence
  Description of Artificial Sequence: Synthetic oligonucleotide
  Sense strand starting at position 640 of SEQ ID NO: 1562125
aggcauauuucuuauaaug

SEQ ID NO: 1723974 - RNA, 19 nt, Artificial Sequence
  Description of Artificial Sequence: Synthetic oligonucleotide
  Antisense strand to SEQ ID NO: 1723973
cauuauaagaaauaugccu

SEQ ID NO: 1723975 - RNA, 19 nt, Artificial Sequence
  Description of Artificial Sequence: Synthetic oligonucleotide
  Sense strand starting at position 650 of SEQ ID NO: 1562125
cuuauaaugcuguggacga

SEQ ID NO: 1723976 - RNA, 19 nt, Artificial Sequence
  Description of Artificial Sequence: Synthetic oligonucleotide
  Antisense strand to SEQ ID NO: 1723975
ucguccacagcauuauaag

SEQ ID NO: 1723977 - RNA, 19 nt, Artificial Sequence
  Description of Artificial Sequence: Synthetic oligonucleotide
  Sense strand starting at position 1076 of SEQ ID NO: 1562125
ccucaacugcucuaaagga

SEQ ID NO: 1723978 - RNA, 19 nt, Artificial Sequence
  Description of Artificial Sequence: Synthetic oligonucleotide
  Antisense strand to SEQ ID NO: 1723977
uccuuuagagcaguugagg

SEQ ID NO: 1723979 - RNA, 19 nt, Artificial Sequence
  Description of Artificial Sequence: Synthetic oligonucleotide
  Sense strand starting at position 1216 of SEQ ID NO: 1562125
cuaguuggcccuuaagaga

SEQ ID NO: 1723980 - RNA, 19 nt, Artificial Sequence
  Description of Artificial Sequence: Synthetic oligonucleotide
  Antisense strand to SEQ ID NO: 1723979
ucucuuaagggccaacuag

SEQ ID NO: 1723981 - RNA, 19 nt, Artificial Sequence
  Description of Artificial Sequence: Synthetic oligonucleotide
  Sense strand starting at position 2255 of SEQ ID NO: 1562125
agagguggcccuggagaaa

SEQ ID NO: 1723982 - RNA, 19 nt, Artificial Sequence
  Description of Artificial Sequence: Synthetic oligonucleotide
  Antisense strand to SEQ ID NO: 1723981
uuucuccagggccaccucu

SEQ ID NO: 1723983 - RNA, 19 nt, Artificial Sequence
  Description of Artificial Sequence: Synthetic oligonucleotide
  Sense strand starting at position 2351 of SEQ ID NO: 1562125
gguuuccucucagcagaaa

SEQ ID NO: 1723984 - RNA, 19 nt, Artificial Sequence
  Description of Artificial Sequence: Synthetic oligonucleotide
  Antisense strand to SEQ ID NO: 1723983
uuucugcugagaggaaacc

SEQ ID NO: 1723985 - RNA, 19 nt, Artificial Sequence
  Description of Artificial Sequence: Synthetic oligonucleotide
  Sense strand starting at position 2374 of SEQ ID NO: 1562125
cuugucauugcccaagcua

SEQ ID NO: 1723986 - RNA, 19 nt, Artificial Sequence
  Description of Artificial Sequence: Synthetic oligonucleotide
  Antisense strand to SEQ ID NO: 1723985
uagcuugggcaaugacaag

SEQ ID NO: 1723987 - RNA, 19 nt, Artificial Sequence
  Description of Artificial Sequence: Synthetic oligonucleotide
  Sense strand starting at position 2453 of SEQ ID NO: 1562125
gguuaaauguuagucuaca

SEQ ID NO: 1723988 - RNA, 19 nt, Artificial Sequence
  Description of Artificial Sequence: Synthetic oligonucleotide
  Antisense strand to SEQ ID NO: 1723987
uguagacuaacauuuaacc

SEQ ID NO: 1723989 - RNA, 19 nt, Artificial Sequence
  Description of Artificial Sequence: Synthetic oligonucleotide
  Sense strand starting at position 2454 of SEQ ID NO: 1562125
guuaaauguuagucuacau

SEQ ID NO: 1723990 - RNA, 19 nt, Artificial Sequence
  Description of Artificial Sequence: Synthetic oligonucleotide
  Antisense strand to SEQ ID NO: 1723989
auguagacuaacauuuaac

SEQ ID NO: 1723991 - RNA, 19 nt, Artificial Sequence
  Description of Artificial Sequence: Synthetic oligonucleotide
  Sense strand starting at position 2473 of SEQ ID NO: 1562125
gucacaaccuccucuguga

SEQ ID NO: 1723992 - RNA, 19 nt, Artificial Sequence
  Description of Artificial Sequence: Synthetic oligonucleotide
  Antisense strand to SEQ ID NO: 1723991
ucacagaggagguugugac

SEQ ID NO: 1723993 - RNA, 19 nt, Artificial Sequence
  Description of Artificial Sequence: Synthetic oligonucleotide
  Sense strand starting at position 2514 of SEQ ID NO: 1562125
agcagaauauuuguuagcu

SEQ ID NO: 1723994 - RNA, 19 nt, Artificial Sequence
  Description of Artificial Sequence: Synthetic oligonucleotide
  Antisense strand to SEQ ID NO: 1723993
agcuaacaaauauucugcu

SEQ ID NO: 1723995 - RNA, 19 nt, Artificial Sequence
  Description of Artificial Sequence: Synthetic oligonucleotide
  Sense strand starting at position 2515 of SEQ ID NO: 1562125
gcagaauauuuguuagcuc

SEQ ID NO: 1723996 - RNA, 19 nt, Artificial Sequence
  Description of Artificial Sequence: Synthetic oligonucleotide
  Antisense strand to SEQ ID NO: 1723995
gagcuaacaaauauucugc

SEQ ID NO: 1723997 - RNA, 19 nt, Artificial Sequence
  Description of Artificial Sequence: Synthetic oligonucleotide
  Sense strand starting at position 2574 of SEQ ID NO: 1562125
agccuuagguaagcuuaau

SEQ ID NO: 1723998 - RNA, 19 nt, Artificial Sequence
  Description of Artificial Sequence: Synthetic oligonucleotide
  Antisense strand to SEQ ID NO: 1723997
auuaagcuuaccuaaggcu

SEQ ID NO: 1723999 - RNA, 19 nt, Artificial Sequence
  Description of Artificial Sequence: Synthetic oligonucleotide
  Sense strand starting at position 2580 of SEQ ID NO: 1562125
agguaagcuuaaucucuuu

SEQ ID NO: 1724000 - RNA, 19 nt, Artificial Sequence
  Description of Artificial Sequence: Synthetic oligonucleotide
  Antisense strand to SEQ ID NO: 1723999
aaagagauuaagcuuaccu

SEQ ID NO: 1724001 - RNA, 19 nt, Artificial Sequence
  Description of Artificial Sequence: Synthetic oligonucleotide
  Sense strand starting at position 3004 of SEQ ID NO: 1562125
gauuacaaaugaugggaaa

SEQ ID NO: 1724002 - RNA, 19 nt, Artificial Sequence
  Description of Artificial Sequence: Synthetic oligonucleotide
  Antisense strand to SEQ ID NO: 1724001
uuucccaucauuuguaauc

SEQ ID NO: 1724003 - RNA, 19 nt, Artificial Sequence
  Description of Artificial Sequence: Synthetic oligonucleotide
  Sense strand starting at position 3026 of SEQ ID NO: 1562125
ugcaaauuggcuuggugua

SEQ ID NO: 1724004 - RNA, 19 nt, Artificial Sequence
  Description of Artificial Sequence: Synthetic oligonucleotide
  Antisense strand to SEQ ID NO: 1724003
uacaccaagccaauuugca

SEQ ID NO: 1724005 - RNA, 19 nt, Artificial Sequence
  Description of Artificial Sequence: Synthetic oligonucleotide
  Sense strand starting at position 3027 of SEQ ID NO: 1562125
gcaaauuggcuugguguaa

SEQ ID NO: 1724006 - RNA, 19 nt, Artificial Sequence
  Description of Artificial Sequence: Synthetic oligonucleotide
  Antisense strand to SEQ ID NO: 1724005
uuacaccaagccaauuugc

SEQ ID NO: 1724007 - RNA, 19 nt, Artificial Sequence
  Description of Artificial Sequence: Synthetic oligonucleotide
  Sense strand starting at position 3039 of SEQ ID NO: 1562125
gguguaagcagacagguaa

SEQ ID NO: 1724008 - RNA, 19 nt, Artificial Sequence
  Description of Artificial Sequence: Synthetic oligonucleotide
  Antisense strand to SEQ ID NO: 1724007
uuaccugucugcuuacacc

SEQ ID NO: 1724009 - RNA, 19 nt, Artificial Sequence
  Description of Artificial Sequence: Synthetic oligonucleotide
  Sense strand starting at position 3149 of SEQ ID NO: 1562125
aucucuguucuuugcagua

SEQ ID NO: 1724010 - RNA, 19 nt, Artificial Sequence
  Description of Artificial Sequence: Synthetic oligonucleotide
  Antisense strand to SEQ ID NO: 1724009
uacugcaaagaacagagau

SEQ ID NO: 1724011 - RNA, 19 nt, Artificial Sequence
  Description of Artificial Sequence: Synthetic oligonucleotide
  Sense strand starting at position 3290 of SEQ ID NO: 1562125
cacugagguucugauauuc

SEQ ID NO: 1724012 - RNA, 19 nt, Artificial Sequence
  Description of Artificial Sequence: Synthetic oligonucleotide
  Antisense strand to SEQ ID NO: 1724011
gaauaucagaaccucagug

SEQ ID NO: 1724013 - RNA, 19 nt, Artificial Sequence
  Description of Artificial Sequence: Synthetic oligonucleotide
  Sense strand starting at position 3311 of SEQ ID NO: 1562125
auuaguugagucugaguca

SEQ ID NO: 1724014 - RNA, 19 nt, Artificial Sequence
  Description of Artificial Sequence: Synthetic oligonucleotide
  Antisense strand to SEQ ID NO: 1724013
ugacucagacucaacuaau

SEQ ID NO: 1724015 - RNA, 19 nt, Artificial Sequence
  Description of Artificial Sequence: Synthetic oligonucleotide
  Sense strand starting at position 3359 of SEQ ID NO: 1562125
aauucaugugguggagagu

SEQ ID NO: 1724016 - RNA, 19 nt, Artificial Sequence
  Description of Artificial Sequence: Synthetic oligonucleotide
  Antisense strand to SEQ ID NO: 1724015
acucuccaccacaugaauu

SEQ ID NO: 1724017 - RNA, 19 nt, Artificial Sequence
  Description of Artificial Sequence: Synthetic oligonucleotide
  Sense strand starting at position 3396 of SEQ ID NO: 1562125
ggcccuguuuaucuuuaga

SEQ ID NO: 1724018 - RNA, 19 nt, Artificial Sequence
  Description of Artificial Sequence: Synthetic oligonucleotide
  Antisense strand to SEQ ID NO: 1724017
ucuaaagauaaacagggcc

SEQ ID NO: 1724019 - RNA, 19 nt, Artificial Sequence
  Description of Artificial Sequence: Synthetic oligonucleotide
  Sense strand starting at position 3398 of SEQ ID NO: 1562125
cccuguuuaucuuuagaag

SEQ ID NO: 1724020 - RNA, 19 nt, Artificial Sequence
  Description of Artificial Sequence: Synthetic oligonucleotide
  Antisense strand to SEQ ID NO: 1724019
cuucuaaagauaaacaggg

SEQ ID NO: 1724021 - RNA, 19 nt, Artificial Sequence
  Description of Artificial Sequence: Synthetic oligonucleotide
  Sense strand starting at position 3399 of SEQ ID NO: 1562125
ccuguuuaucuuuagaagg

SEQ ID NO: 1724022 - RNA, 19 nt, Artificial Sequence
  Description of Artificial Sequence: Synthetic oligonucleotide
  Antisense strand to SEQ ID NO: 1724021
ccuucuaaagauaaacagg

SEQ ID NO: 1724023 - RNA, 19 nt, Artificial Sequence
  Description of Artificial Sequence: Synthetic oligonucleotide
  Sense strand starting at position 3464 of SEQ ID NO: 1562125
aaguauuggccaugguuga

SEQ ID NO: 1724024 - RNA, 19 nt, Artificial Sequence
  Description of Artificial Sequence: Synthetic oligonucleotide
  Antisense strand to SEQ ID NO: 1724023
ucaaccauggccaauacuu

SEQ ID NO: 1724025 - RNA, 19 nt, Artificial Sequence
  Description of Artificial Sequence: Synthetic oligonucleotide
  Sense strand starting at position 3465 of SEQ ID NO: 1562125
aguauuggccaugguugaa

SEQ ID NO: 1724026 - RNA, 19 nt, Artificial Sequence
  Description of Artificial Sequence: Synthetic oligonucleotide
  Antisense strand to SEQ ID NO: 1724025
uucaaccauggccaauacu

SEQ ID NO: 1724027 - RNA, 19 nt, Artificial Sequence
  Description of Artificial Sequence: Synthetic oligonucleotide
  Sense strand starting at position 3539 of SEQ ID NO: 1562125
gggaccuuuccaugucaug

SEQ ID NO: 1724028 - RNA, 19 nt, Artificial Sequence
  Description of Artificial Sequence: Synthetic oligonucleotide
  Antisense strand to SEQ ID NO: 1724027
caugacauggaaagguccc

SEQ ID NO: 1724029 - RNA, 19 nt, Artificial Sequence
  Description of Artificial Sequence: Synthetic oligonucleotide
  Sense strand starting at position 3672 of SEQ ID NO: 1562125
aguguauggaagugagcaa

SEQ ID NO: 1724030 - RNA, 19 nt, Artificial Sequence
  Description of Artificial Sequence: Synthetic oligonucleotide
  Antisense strand to SEQ ID NO: 1724029
uugcucacuuccauacacu

SEQ ID NO: 1724031 - RNA, 19 nt, Artificial Sequence
  Description of Artificial Sequence: Synthetic oligonucleotide
  Sense strand starting at position 3673 of SEQ ID NO: 1562125
guguauggaagugagcaau

SEQ ID NO: 1724032 - RNA, 19 nt, Artificial Sequence
  Description of Artificial Sequence: Synthetic oligonucleotide
  Antisense strand to SEQ ID NO: 1724031
auugcucacuuccauacac

SEQ ID NO: 1724033 - RNA, 19 nt, Artificial Sequence
  Description of Artificial Sequence: Synthetic oligonucleotide
  Sense strand starting at position 3683 of SEQ ID NO: 1562125
gugagcaaugcugggaaca

SEQ ID NO: 1724034 - RNA, 19 nt, Artificial Sequence
  Description of Artificial Sequence: Synthetic oligonucleotide
  Antisense strand to SEQ ID NO: 1724033
uguucccagcauugcucac

SEQ ID NO: 1724035 - RNA, 19 nt, Artificial Sequence
  Description of Artificial Sequence: Synthetic oligonucleotide
  Sense strand starting at position 3684 of SEQ ID NO: 1562125
ugagcaaugcugggaacau

SEQ ID NO: 1724036 - RNA, 19 nt, Artificial Sequence
  Description of Artificial Sequence: Synthetic oligonucleotide
  Antisense strand to SEQ ID NO: 1724035
auguucccagcauugcuca

SEQ ID NO: 1724037 - RNA, 19 nt, Artificial Sequence
  Description of Artificial Sequence: Synthetic oligonucleotide
  Sense strand starting at position 3765 of SEQ ID NO: 1562125
gcaggagucacccagaauc

SEQ ID NO: 1724038 - RNA, 19 nt, Artificial Sequence
  Description of Artificial Sequence: Synthetic oligonucleotide
  Antisense strand to SEQ ID NO: 1724037
gauucugggugacuccugc

SEQ ID NO: 1724039 - RNA, 19 nt, Artificial Sequence
  Description of Artificial Sequence: Synthetic oligonucleotide
  Sense strand starting at position 102 of SEQ ID NO: 1562126
aggugcuucccauaugcau

SEQ ID NO: 1724040 - RNA, 19 nt, Artificial Sequence
  Description of Artificial Sequence: Synthetic oligonucleotide
  Antisense strand to SEQ ID NO: 1724039
augcauaugggaagcaccu

SEQ ID NO: 1724041 - RNA, 19 nt, Artificial Sequence
  Description of Artificial Sequence: Synthetic oligonucleotide
  Sense strand starting at position 160 of SEQ ID NO: 1562126
ucaugcccaucugaaagau

SEQ ID NO: 1724042 - RNA, 19 nt, Artificial Sequence
  Description of Artificial Sequence: Synthetic oligonucleotide
  Antisense strand to SEQ ID NO: 1724041
aucuuucagaugggcauga

SEQ ID NO: 1724043 - RNA, 19 nt, Artificial Sequence
  Description of Artificial Sequence: Synthetic oligonucleotide
  Sense strand starting at position 184 of SEQ ID NO: 1562126
aaaugaggcucacagaaga

SEQ ID NO: 1724044 - RNA, 19 nt, Artificial Sequence
  Description of Artificial Sequence: Synthetic oligonucleotide
  Antisense strand to SEQ ID NO: 1724043
ucuucugugagccucauuu

SEQ ID NO: 1724045 - RNA, 19 nt, Artificial Sequence
  Description of Artificial Sequence: Synthetic oligonucleotide
  Sense strand starting at position 358 of SEQ ID NO: 1562126
gguugcaccuuucccauau

SEQ ID NO: 1724046 - RNA, 19 nt, Artificial Sequence
  Description of Artificial Sequence: Synthetic oligonucleotide
  Antisense strand to SEQ ID NO: 1724045
auaugggaaaggugcaacc

SEQ ID NO: 1724047 - RNA, 19 nt, Artificial Sequence
  Description of Artificial Sequence: Synthetic oligonucleotide
  Sense strand starting at position 388 of SEQ ID NO: 1562126
ccauuuggcugagaaacag

SEQ ID NO: 1724048 - RNA, 19 nt, Artificial Sequence
  Description of Artificial Sequence: Synthetic oligonucleotide
  Antisense strand to SEQ ID NO: 1724047
cuguuucucagccaaaugg

SEQ ID NO: 1724049 - RNA, 19 nt, Artificial Sequence
  Description of Artificial Sequence: Synthetic oligonucleotide
  Sense strand starting at position 418 of SEQ ID NO: 1562126
uugggaaggugucugcuuu

SEQ ID NO: 1724050 - RNA, 19 nt, Artificial Sequence
  Description of Artificial Sequence: Synthetic oligonucleotide
  Antisense strand to SEQ ID NO: 1724049
aaagcagacaccuucccaa

SEQ ID NO: 1724051 - RNA, 19 nt, Artificial Sequence
  Description of Artificial Sequence: Synthetic oligonucleotide
  Sense strand starting at position 444 of SEQ ID NO: 1562126
ugcuuagcugaugaagaaa

SEQ ID NO: 1724052 - RNA, 19 nt, Artificial Sequence
  Description of Artificial Sequence: Synthetic oligonucleotide
  Antisense strand to SEQ ID NO: 1724051
uuucuucaucagcuaagca

SEQ ID NO: 1724053 - RNA, 19 nt, Artificial Sequence
  Description of Artificial Sequence: Synthetic oligonucleotide
  Sense strand starting at position 455 of SEQ ID NO: 1562126
ugaagaaaguuucugccaa

SEQ ID NO: 1724054 - RNA, 19 nt, Artificial Sequence
  Description of Artificial Sequence: Synthetic oligonucleotide
  Antisense strand to SEQ ID NO: 1724053
uuggcagaaacuuucuuca

SEQ ID NO: 1724055 - RNA, 19 nt, Artificial Sequence
  Description of Artificial Sequence: Synthetic oligonucleotide
  Sense strand starting at position 468 of SEQ ID NO: 1562126
ugccaaacguuuccagaga

SEQ ID NO: 1724056 - RNA, 19 nt, Artificial Sequence
  Description of Artificial Sequence: Synthetic oligonucleotide
  Antisense strand to SEQ ID NO: 1724055
ucucuggaaacguuuggca

SEQ ID NO: 1724057 - RNA, 19 nt, Artificial Sequence
  Description of Artificial Sequence: Synthetic oligonucleotide
  Sense strand starting at position 494 of SEQ ID NO: 1562126
ccuggaacuugagcuagaa

SEQ ID NO: 1724058 - RNA, 19 nt, Artificial Sequence
  Description of Artificial Sequence: Synthetic oligonucleotide
  Antisense strand to SEQ ID NO: 1724057
uucuagcucaaguuccagg

SEQ ID NO: 1724059 - RNA, 19 nt, Artificial Sequence
  Description of Artificial Sequence: Synthetic oligonucleotide
  Sense strand starting at position 535 of SEQ ID NO: 1562126
uguccacagcuuugggaau

SEQ ID NO: 1724060 - RNA, 19 nt, Artificial Sequence
  Description of Artificial Sequence: Synthetic oligonucleotide
  Antisense strand to SEQ ID NO: 1724059
auucccaaagcuguggaca

SEQ ID NO: 1724061 - RNA, 19 nt, Artificial Sequence
  Description of Artificial Sequence: Synthetic oligonucleotide
  Sense strand starting at position 541 of SEQ ID NO: 1562126
cagcuuugggaaugagaac

SEQ ID NO: 1724062 - RNA, 19 nt, Artificial Sequence
  Description of Artificial Sequence: Synthetic oligonucleotide
  Antisense strand to SEQ ID NO: 1724061
guucucauucccaaagcug

SEQ ID NO: 1724063 - RNA, 19 nt, Artificial Sequence
  Description of Artificial Sequence: Synthetic oligonucleotide
  Sense strand starting at position 1146 of SEQ ID NO: 1562126
gguaaacucugagggagaa

SEQ ID NO: 1724064 - RNA, 19 nt, Artificial Sequence
  Description of Artificial Sequence: Synthetic oligonucleotide
  Antisense strand to SEQ ID NO: 1724063
uucucccucagaguuuacc

SEQ ID NO: 1724065 - RNA, 19 nt, Artificial Sequence
  Description of Artificial Sequence: Synthetic oligonucleotide
  Sense strand starting at position 1167 of SEQ ID NO: 1562126
agcagagucaggcguuaau

SEQ ID NO: 1724066 - RNA, 19 nt, Artificial Sequence
  Description of Artificial Sequence: Synthetic oligonucleotide
  Antisense strand to SEQ ID NO: 1724065
auuaacgccugacucugcu

SEQ ID NO: 1724067 - RNA, 19 nt, Artificial Sequence
  Description of Artificial Sequence: Synthetic oligonucleotide
  Sense strand starting at position 1170 of SEQ ID NO: 1562126
agagucaggcguuaauuaa

SEQ ID NO: 1724068 - RNA, 19 nt, Artificial Sequence
  Description of Artificial Sequence: Synthetic oligonucleotide
  Antisense strand to SEQ ID NO: 1724067
uuaauuaacgccugacucu

SEQ ID NO: 1724069 - RNA, 19 nt, Artificial Sequence
  Description of Artificial Sequence: Synthetic oligonucleotide
  Sense strand starting at position 1243 of SEQ ID NO: 1562126
gccgauucucaauacauaa

SEQ ID NO: 1724070 - RNA, 19 nt, Artificial Sequence
  Description of Artificial Sequence: Synthetic oligonucleotide
  Antisense strand to SEQ ID NO: 1724069
uuauguauugagaaucggc

SEQ ID NO: 1724071 - RNA, 19 nt, Artificial Sequence
  Description of Artificial Sequence: Synthetic oligonucleotide
  Sense strand starting at position 1361 of SEQ ID NO: 1562126
gaggucauuuccugaucuc

SEQ ID NO: 1724072 - RNA, 19 nt, Artificial Sequence
  Description of Artificial Sequence: Synthetic oligonucleotide
  Antisense strand to SEQ ID NO: 1724071
gagaucaggaaaugaccuc

SEQ ID NO: 1724073 - RNA, 19 nt, Artificial Sequence
  Description of Artificial Sequence: Synthetic oligonucleotide
  Sense strand starting at position 2529 of SEQ ID NO: 1562126
ggcucucggcggcuugaaa

SEQ ID NO: 1724074 - RNA, 19 nt, Artificial Sequence
  Description of Artificial Sequence: Synthetic oligonucleotide
  Antisense strand to SEQ ID NO: 1724073
uuucaagccgccgagagcc

SEQ ID NO: 1724075 - RNA, 19 nt, Artificial Sequence
  Description of Artificial Sequence: Synthetic oligonucleotide
  Sense strand starting at position 2530 of SEQ ID NO: 1562126
gcucucggcggcuugaaau

SEQ ID NO: 1724076 - RNA, 19 nt, Artificial Sequence
  Description of Artificial Sequence: Synthetic oligonucleotide
  Antisense strand to SEQ ID NO: 1724075
auuucaagccgccgagagc

SEQ ID NO: 1724077 - RNA, 19 nt, Artificial Sequence
  Description of Artificial Sequence: Synthetic oligonucleotide
  Sense strand starting at position 2604 of SEQ ID NO: 1562126
ucccuuauccaguguuuac

SEQ ID NO: 1724078 - RNA, 19 nt, Artificial Sequence
  Description of Artificial Sequence: Synthetic oligonucleotide
  Antisense strand to SEQ ID NO: 1724077
guaaacacuggauaaggga

SEQ ID NO: 1724079 - RNA, 19 nt, Artificial Sequence
  Description of Artificial Sequence: Synthetic oligonucleotide
  Sense strand starting at position 2903 of SEQ ID NO: 1562126
cagaguaacuccuagagag

SEQ ID NO: 1724080 - RNA, 19 nt, Artificial Sequence
  Description of Artificial Sequence: Synthetic oligonucleotide
  Antisense strand to SEQ ID NO: 1724079
cucucuaggaguuacucug

SEQ ID NO: 1724081 - RNA, 19 nt, Artificial Sequence
  Description of Artificial Sequence: Synthetic oligonucleotide
  Sense strand starting at position 3048 of SEQ ID NO: 1562126
ggagggaccugguuagagu

SEQ ID NO: 1724082 - RNA, 19 nt, Artificial Sequence
  Description of Artificial Sequence: Synthetic oligonucleotide
  Antisense strand to SEQ ID NO: 1724081
acucuaaccaggucccucc

SEQ ID NO: 1724083 - RNA, 19 nt, Artificial Sequence
  Description of Artificial Sequence: Synthetic oligonucleotide
  Sense strand starting at position 3135 of SEQ ID NO: 1562126
cgugaagauccucgauccu

SEQ ID NO: 1724084 - RNA, 19 nt, Artificial Sequence
  Description of Artificial Sequence: Synthetic oligonucleotide
  Antisense strand to SEQ ID NO: 1724083
aggaucgaggaucuucacg

SEQ ID NO: 1724085 - RNA, 19 nt, Artificial Sequence
  Description of Artificial Sequence: Synthetic oligonucleotide
  Sense strand starting at position 3144 of SEQ ID NO: 1562126
ccucgauccugugucuaaa

SEQ ID NO: 1724086 - RNA, 19 nt, Artificial Sequence
  Description of Artificial Sequence: Synthetic oligonucleotide
  Antisense strand to SEQ ID NO: 1724085
uuuagacacaggaucgagg

SEQ ID NO: 1724087 - RNA, 19 nt, Artificial Sequence
  Description of Artificial Sequence: Synthetic oligonucleotide
  Sense strand starting at position 3154 of SEQ ID NO: 1562126
gugucuaaaggcuguaaca

SEQ ID NO: 1724088 - RNA, 19 nt, Artificial Sequence
  Description of Artificial Sequence: Synthetic oligonucleotide
  Antisense strand to SEQ ID NO: 1724087
uguuacagccuuuagacac

SEQ ID NO: 1724089 - RNA, 19 nt, Artificial Sequence
  Description of Artificial Sequence: Synthetic oligonucleotide
  Sense strand starting at position 3312 of SEQ ID NO: 1562126
uguuuccaccugugaagga

SEQ ID NO: 1724090 - RNA, 19 nt, Artificial Sequence
  Description of Artificial Sequence: Synthetic oligonucleotide
  Antisense strand to SEQ ID NO: 1724089
uccuucacagguggaaaca

SEQ ID NO: 1724091 - RNA, 19 nt, Artificial Sequence
  Description of Artificial Sequence: Synthetic oligonucleotide
  Sense strand starting at position 3387 of SEQ ID NO: 1562126
gaacuacugucuguuuagu

SEQ ID NO: 1724092 - RNA, 19 nt, Artificial Sequence
  Description of Artificial Sequence: Synthetic oligonucleotide
  Antisense strand to SEQ ID NO: 1724091
acuaaacagacaguaguuc

SEQ ID NO: 1724093 - RNA, 19 nt, Artificial Sequence
  Description of Artificial Sequence: Synthetic oligonucleotide
  Sense strand starting at position 3389 of SEQ ID NO: 1562126
acuacugucuguuuaguca

SEQ ID NO: 1724094 - RNA, 19 nt, Artificial Sequence
  Description of Artificial Sequence: Synthetic oligonucleotide
  Antisense strand to SEQ ID NO: 1724093
ugacuaaacagacaguagu

SEQ ID NO: 1724095 - RNA, 19 nt, Artificial Sequence
  Description of Artificial Sequence: Synthetic oligonucleotide
  Sense strand starting at position 3419 of SEQ ID NO: 1562126
gugugacagccgugaacaa

SEQ ID NO: 1724096 - RNA, 19 nt, Artificial Sequence
  Description of Artificial Sequence: Synthetic oligonucleotide
  Antisense strand to SEQ ID NO: 1724095
uuguucacggcugucacac

SEQ ID NO: 1724097 - RNA, 19 nt, Artificial Sequence
  Description of Artificial Sequence: Synthetic oligonucleotide
  Sense strand starting at position 3420 of SEQ ID NO: 1562126
ugugacagccgugaacaaa

SEQ ID NO: 1724098 - RNA, 19 nt, Artificial Sequence
  Description of Artificial Sequence: Synthetic oligonucleotide
  Antisense strand to SEQ ID NO: 1724097
uuuguucacggcugucaca

SEQ ID NO: 1724099 - RNA, 19 nt, Artificial Sequence
  Description of Artificial Sequence: Synthetic oligonucleotide
  Sense strand starting at position 3492 of SEQ ID NO: 1562126
gcaguaagcagucauuaag

SEQ ID NO: 1724100 - RNA, 19 nt, Artificial Sequence
  Description of Artificial Sequence: Synthetic oligonucleotide
  Antisense strand to SEQ ID NO: 1724099
cuuaaugacugcuuacugc

SEQ ID NO: 1724101 - RNA, 19 nt, Artificial Sequence
  Description of Artificial Sequence: Synthetic oligonucleotide
  Sense strand starting at position 3498 of SEQ ID NO: 1562126
agcagucauuaagcggaau

SEQ ID NO: 1724102 - RNA, 19 nt, Artificial Sequence
  Description of Artificial Sequence: Synthetic oligonucleotide
  Antisense strand to SEQ ID NO: 1724101
auuccgcuuaaugacugcu

SEQ ID NO: 1724103 - RNA, 19 nt, Artificial Sequence
  Description of Artificial Sequence: Synthetic oligonucleotide
  Sense strand starting at position 3499 of SEQ ID NO: 1562126
gcagucauuaagcggaaua

SEQ ID NO: 1724104 - RNA, 19 nt, Artificial Sequence
  Description of Artificial Sequence: Synthetic oligonucleotide
  Antisense strand to SEQ ID NO: 1724103
uauuccgcuuaaugacugc

SEQ ID NO: 1724105 - RNA, 19 nt, Artificial Sequence
  Description of Artificial Sequence: Synthetic oligonucleotide
  Sense strand starting at position 3501 of SEQ ID NO: 1562126
agucauuaagcggaauacu

SEQ ID NO: 1724106 - RNA, 19 nt, Artificial Sequence
  Description of Artificial Sequence: Synthetic oligonucleotide
  Antisense strand to SEQ ID NO: 1724105
aguauuccgcuuaaugacu

SEQ ID NO: 1724107 - RNA, 19 nt, Artificial Sequence
  Description of Artificial Sequence: Synthetic oligonucleotide
  Sense strand starting at position 3529 of SEQ ID NO: 1562126
gugucaauuuagcuccaau

SEQ ID NO: 1724108 - RNA, 19 nt, Artificial Sequence
  Description of Artificial Sequence: Synthetic oligonucleotide
  Antisense strand to SEQ ID NO: 1724107
auuggagcuaaauugacac

SEQ ID NO: 1724109 - RNA, 19 nt, Artificial Sequence
  Description of Artificial Sequence: Synthetic oligonucleotide
  Sense strand starting at position 3547 of SEQ ID NO: 1562126
ucaggauccuuugcuugaa

SEQ ID NO: 1724110 - RNA, 19 nt, Artificial Sequence
  Description of Artificial Sequence: Synthetic oligonucleotide
  Antisense strand to SEQ ID NO: 1724109
uucaagcaaaggauccuga

SEQ ID NO: 1724111 - RNA, 19 nt, Artificial Sequence
  Description of Artificial Sequence: Synthetic oligonucleotide
  Sense strand starting at position 3878 of SEQ ID NO: 1562126
cucagccucguuuagugaa

SEQ ID NO: 1724112 - RNA, 19 nt, Artificial Sequence
  Description of Artificial Sequence: Synthetic oligonucleotide
  Antisense strand to SEQ ID NO: 1724111
uucacuaaacgaggcugag

SEQ ID NO: 1724113 - RNA, 19 nt, Artificial Sequence
  Description of Artificial Sequence: Synthetic oligonucleotide
  Sense strand starting at position 3880 of SEQ ID NO: 1562126
cagccucguuuagugaaga

SEQ ID NO: 1724114 - RNA, 19 nt, Artificial Sequence
  Description of Artificial Sequence: Synthetic oligonucleotide
  Antisense strand to SEQ ID NO: 1724113
ucuucacuaaacgaggcug

SEQ ID NO: 1724115 - RNA, 19 nt, Artificial Sequence
  Description of Artificial Sequence: Synthetic oligonucleotide
  Sense strand starting at position 3885 of SEQ ID NO: 1562126
ucguuuagugaagagagaa

SEQ ID NO: 1724116 - RNA, 19 nt, Artificial Sequence
  Description of Artificial Sequence: Synthetic oligonucleotide
  Antisense strand to SEQ ID NO: 1724115
uucucucuucacuaaacga

SEQ ID NO: 1724117 - RNA, 19 nt, Artificial Sequence
  Description of Artificial Sequence: Synthetic oligonucleotide
  Sense strand starting at position 3967 of SEQ ID NO: 1562126
uuuggucacuaucaagagu

SEQ ID NO: 1724118 - RNA, 19 nt, Artificial Sequence
  Description of Artificial Sequence: Synthetic oligonucleotide
  Antisense strand to SEQ ID NO: 1724117
acucuugauagugaccaaa

SEQ ID NO: 1724119 - RNA, 19 nt, Artificial Sequence
  Description of Artificial Sequence: Synthetic oligonucleotide
  Sense strand starting at position 76 of SEQ ID NO: 1562127
ucuuuaaugcauuguauag

SEQ ID NO: 1724120 - RNA, 19 nt, Artificial Sequence
  Description of Artificial Sequence: Synthetic oligonucleotide
  Antisense strand to SEQ ID NO: 1724119
cuauacaaugcauuaaaga

SEQ ID NO: 1724121 - RNA, 19 nt, Artificial Sequence
  Description of Artificial Sequence: Synthetic oligonucleotide
  Sense strand starting at position 253 of SEQ ID NO: 1562127
ugguuaaaguaguuauuac

SEQ ID NO: 1724122 - RNA, 19 nt, Artificial Sequence
  Description of Artificial Sequence: Synthetic oligonucleotide
  Antisense strand to SEQ ID NO: 1724121
guaauaacuacuuuaacca

SEQ ID NO: 1724123 - RNA, 19 nt, Artificial Sequence
  Description of Artificial Sequence: Synthetic oligonucleotide
  Sense strand starting at position 286 of SEQ ID NO: 1562127
cccgcagugccauaagaga

SEQ ID NO: 1724124 - RNA, 19 nt, Artificial Sequence
  Description of Artificial Sequence: Synthetic oligonucleotide
  Antisense strand to SEQ ID NO: 1724123
ucucuuauggcacugcggg

SEQ ID NO: 1724125 - RNA, 19 nt, Artificial Sequence
  Description of Artificial Sequence: Synthetic oligonucleotide
  Sense strand starting at position 309 of SEQ ID NO: 1562127
gcaguagaccuuuagguca

SEQ ID NO: 1724126 - RNA, 19 nt, Artificial Sequence
  Description of Artificial Sequence: Synthetic oligonucleotide
  Antisense strand to SEQ ID NO: 1724125
ugaccuaaaggucuacugc

SEQ ID NO: 1724127 - RNA, 19 nt, Artificial Sequence
  Description of Artificial Sequence: Synthetic oligonucleotide
  Sense strand starting at position 314 of SEQ ID NO: 1562127
agaccuuuaggucagaguu

SEQ ID NO: 1724128 - RNA, 19 nt, Artificial Sequence
  Description of Artificial Sequence: Synthetic oligonucleotide
  Antisense strand to SEQ ID NO: 1724127
aacucugaccuaaaggucu

SEQ ID NO: 1724129 - RNA, 19 nt, Artificial Sequence
  Description of Artificial Sequence: Synthetic oligonucleotide
  Sense strand starting at position 362 of SEQ ID NO: 1562127
ccugcauuacccugaagga

SEQ ID NO: 1724130 - RNA, 19 nt, Artificial Sequence
  Description of Artificial Sequence: Synthetic oligonucleotide
  Antisense strand to SEQ ID NO: 1724129
uccuucaggguaaugcagg

SEQ ID NO: 1724131 - RNA, 19 nt, Artificial Sequence
  Description of Artificial Sequence: Synthetic oligonucleotide
  Sense strand starting at position 684 of SEQ ID NO: 1562127
agagauguaucaucccuau

SEQ ID NO: 1724132 - RNA, 19 nt, Artificial Sequence
  Description of Artificial Sequence: Synthetic oligonucleotide
  Antisense strand to SEQ ID NO: 1724131
auagggaugauacaucucu

SEQ ID NO: 1724133 - RNA, 19 nt, Artificial Sequence
  Description of Artificial Sequence: Synthetic oligonucleotide
  Sense strand starting at position 762 of SEQ ID NO: 1562127
acagaucuacucuguguua

SEQ ID NO: 1724134 - RNA, 19 nt, Artificial Sequence
  Description of Artificial Sequence: Synthetic oligonucleotide
  Antisense strand to SEQ ID NO: 1724133
uaacacagaguagaucugu

SEQ ID NO: 1724135 - RNA, 19 nt, Artificial Sequence
  Description of Artificial Sequence: Synthetic oligonucleotide
  Sense strand starting at position 764 of SEQ ID NO: 1562127
agaucuacucuguguuaaa

SEQ ID NO: 1724136 - RNA, 19 nt, Artificial Sequence
  Description of Artificial Sequence: Synthetic oligonucleotide
  Antisense strand to SEQ ID NO: 1724135
uuuaacacagaguagaucu

SEQ ID NO: 1724137 - RNA, 19 nt, Artificial Sequence
  Description of Artificial Sequence: Synthetic oligonucleotide
  Sense strand starting at position 944 of SEQ ID NO: 1562127
acaggaaauugucugcaaa

SEQ ID NO: 1724138 - RNA, 19 nt, Artificial Sequence
  Description of Artificial Sequence: Synthetic oligonucleotide
  Antisense strand to SEQ ID NO: 1724137
uuugcagacaauuuccugu

SEQ ID NO: 1724139 - RNA, 19 nt, Artificial Sequence
  Description of Artificial Sequence: Synthetic oligonucleotide
  Sense strand starting at position 945 of SEQ ID NO: 1562127
caggaaauugucugcaaag

SEQ ID NO: 1724140 - RNA, 19 nt, Artificial Sequence
  Description of Artificial Sequence: Synthetic oligonucleotide
  Antisense strand to SEQ ID NO: 1724139
cuuugcagacaauuuccug

SEQ ID NO: 1724141 - RNA, 19 nt, Artificial Sequence
  Description of Artificial Sequence: Synthetic oligonucleotide
  Sense strand starting at position 946 of SEQ ID NO: 1562127
aggaaauugucugcaaagg

SEQ ID NO: 1724142 - RNA, 19 nt, Artificial Sequence
  Description of Artificial Sequence: Synthetic oligonucleotide
  Antisense strand to SEQ ID NO: 1724141
ccuuugcagacaauuuccu

SEQ ID NO: 1724143 - RNA, 19 nt, Artificial Sequence
  Description of Artificial Sequence: Synthetic oligonucleotide
  Sense strand starting at position 960 of SEQ ID NO: 1562127
aaaggagucucugugagga

SEQ ID NO: 1724144 - RNA, 19 nt, Artificial Sequence
  Description of Artificial Sequence: Synthetic oligonucleotide
  Antisense strand to SEQ ID NO: 1724143
uccucacagagacuccuuu

SEQ ID NO: 1724145 - RNA, 19 nt, Artificial Sequence
  Description of Artificial Sequence: Synthetic oligonucleotide
  Sense strand starting at position 965 of SEQ ID NO: 1562127
agucucugugaggaagauu

SEQ ID NO: 1724146 - RNA, 19 nt, Artificial Sequence
  Description of Artificial Sequence: Synthetic oligonucleotide
  Antisense strand to SEQ ID NO: 1724145
aaucuuccucacagagacu

SEQ ID NO: 1724147 - RNA, 19 nt, Artificial Sequence
  Description of Artificial Sequence: Synthetic oligonucleotide
  Sense strand starting at position 1314 of SEQ ID NO: 1562127
uggagcaggcggcauaaau

SEQ ID NO: 1724148 - RNA, 19 nt, Artificial Sequence
  Description of Artificial Sequence: Synthetic oligonucleotide
  Antisense strand to SEQ ID NO: 1724147
auuuaugccgccugcucca

SEQ ID NO: 1724149 - RNA, 19 nt, Artificial Sequence
  Description of Artificial Sequence: Synthetic oligonucleotide
  Sense strand starting at position 2180 of SEQ ID NO: 1562127
cgacucuuaugacuccauu

SEQ ID NO: 1724150 - RNA, 19 nt, Artificial Sequence
  Description of Artificial Sequence: Synthetic oligonucleotide
  Antisense strand to SEQ ID NO: 1724149
aauggagucauaagagucg

SEQ ID NO: 1724151 - RNA, 19 nt, Artificial Sequence
  Description of Artificial Sequence: Synthetic oligonucleotide
  Sense strand starting at position 2348 of SEQ ID NO: 1562127
uguauaauuuguguguaug

SEQ ID NO: 1724152 - RNA, 19 nt, Artificial Sequence
  Description of Artificial Sequence: Synthetic oligonucleotide
  Antisense strand to SEQ ID NO: 1724151
cauacacacaaauuauaca

SEQ ID NO: 1724153 - RNA, 19 nt, Artificial Sequence
  Description of Artificial Sequence: Synthetic oligonucleotide
  Sense strand starting at position 2349 of SEQ ID NO: 1562127
guauaauuuguguguaugu

SEQ ID NO: 1724154 - RNA, 19 nt, Artificial Sequence
  Description of Artificial Sequence: Synthetic oligonucleotide
  Antisense strand to SEQ ID NO: 1724153
acauacacacaaauuauac

SEQ ID NO: 1724155 - RNA, 19 nt, Artificial Sequence
  Description of Artificial Sequence: Synthetic oligonucleotide
  Sense strand starting at position 2409 of SEQ ID NO: 1562127
ggaaucugugguugaguca

SEQ ID NO: 1724156 - RNA, 19 nt, Artificial Sequence
  Description of Artificial Sequence: Synthetic oligonucleotide
  Antisense strand to SEQ ID NO: 1724155
ugacucaaccacagauucc

SEQ ID NO: 1724157 - RNA, 19 nt, Artificial Sequence
  Description of Artificial Sequence: Synthetic oligonucleotide
  Sense strand starting at position 2410 of SEQ ID NO: 1562127
gaaucugugguugagucau

SEQ ID NO: 1724158 - RNA, 19 nt, Artificial Sequence
  Description of Artificial Sequence: Synthetic oligonucleotide
  Antisense strand to SEQ ID NO: 1724157
augacucaaccacagauuc

SEQ ID NO: 1724159 - RNA, 19 nt, Artificial Sequence
  Description of Artificial Sequence: Synthetic oligonucleotide
  Sense strand starting at position 2416 of SEQ ID NO: 1562127
gugguugagucaucuaagg

SEQ ID NO: 1724160 - RNA, 19 nt, Artificial Sequence
  Description of Artificial Sequence: Synthetic oligonucleotide
  Antisense strand to SEQ ID NO: 1724159
ccuuagaugacucaaccac

SEQ ID NO: 1724161 - RNA, 19 nt, Artificial Sequence
  Description of Artificial Sequence: Synthetic oligonucleotide
  Sense strand starting at position 2482 of SEQ ID NO: 1562127
gggaaauuucagcggcgau

SEQ ID NO: 1724162 - RNA, 19 nt, Artificial Sequence
  Description of Artificial Sequence: Synthetic oligonucleotide
  Antisense strand to SEQ ID NO: 1724161
aucgccgcugaaauuuccc

SEQ ID NO: 1724163 - RNA, 19 nt, Artificial Sequence
  Description of Artificial Sequence: Synthetic oligonucleotide
  Sense strand starting at position 2796 of SEQ ID NO: 1562127
aguuguuugccgagggcaa

SEQ ID NO: 1724164 - RNA, 19 nt, Artificial Sequence
  Description of Artificial Sequence: Synthetic oligonucleotide
  Antisense strand to SEQ ID NO: 1724163
uugcccucggcaaacaacu

SEQ ID NO: 1724165 - RNA, 19 nt, Artificial Sequence
  Description of Artificial Sequence: Synthetic oligonucleotide
  Sense strand starting at position 2826 of SEQ ID NO: 1562127
ucugcuuucgguggaauuu

SEQ ID NO: 1724166 - RNA, 19 nt, Artificial Sequence
  Description of Artificial Sequence: Synthetic oligonucleotide
  Antisense strand to SEQ ID NO: 1724165
aaauuccaccgaaagcaga

SEQ ID NO: 1724167 - RNA, 19 nt, Artificial Sequence
  Description of Artificial Sequence: Synthetic oligonucleotide
  Sense strand starting at position 3072 of SEQ ID NO: 1562127
cuacuugugcuggucguau

SEQ ID NO: 1724168 - RNA, 19 nt, Artificial Sequence
  Description of Artificial Sequence: Synthetic oligonucleotide
  Antisense strand to SEQ ID NO: 1724167
auacgaccagcacaaguag

SEQ ID NO: 1724169 - RNA, 19 nt, Artificial Sequence
  Description of Artificial Sequence: Synthetic oligonucleotide
  Sense strand starting at position 3083 of SEQ ID NO: 1562127
ggucguauuagagauuaaa

SEQ ID NO: 1724170 - RNA, 19 nt, Artificial Sequence
  Description of Artificial Sequence: Synthetic oligonucleotide
  Antisense strand to SEQ ID NO: 1724169
uuuaaucucuaauacgacc

SEQ ID NO: 1724171 - RNA, 19 nt, Artificial Sequence
  Description of Artificial Sequence: Synthetic oligonucleotide
  Sense strand starting at position 3190 of SEQ ID NO: 1562127
ggcagccucccggaugauu

SEQ ID NO: 1724172 - RNA, 19 nt, Artificial Sequence
  Description of Artificial Sequence: Synthetic oligonucleotide
  Antisense strand to SEQ ID NO: 1724171
aaucauccgggaggcugcc

SEQ ID NO: 1724173 - RNA, 19 nt, Artificial Sequence
  Description of Artificial Sequence: Synthetic oligonucleotide
  Sense strand starting at position 3290 of SEQ ID NO: 1562127
ugaggaacuguuuguacuu

SEQ ID NO: 1724174 - RNA, 19 nt, Artificial Sequence
  Description of Artificial Sequence: Synthetic oligonucleotide
  Antisense strand to SEQ ID NO: 1724173
aaguacaaacaguuccuca

SEQ ID NO: 1724175 - RNA, 19 nt, Artificial Sequence
  Description of Artificial Sequence: Synthetic oligonucleotide
  Sense strand starting at position 3291 of SEQ ID NO: 1562127
gaggaacuguuuguacuuu

SEQ ID NO: 1724176 - RNA, 19 nt, Artificial Sequence
  Description of Artificial Sequence: Synthetic oligonucleotide
  Antisense strand to SEQ ID NO: 1724175
aaaguacaaacaguuccuc

SEQ ID NO: 1724177 - RNA, 19 nt, Artificial Sequence
  Description of Artificial Sequence: Synthetic oligonucleotide
  Sense strand starting at position 3315 of SEQ ID NO: 1562127
gaaggaugcgauuagaagu

SEQ ID NO: 1724178 - RNA, 19 nt, Artificial Sequence
  Description of Artificial Sequence: Synthetic oligonucleotide
  Antisense strand to SEQ ID NO: 1724177
acuucuaaucgcauccuuc

SEQ ID NO: 1724179 - RNA, 19 nt, Artificial Sequence
  Description of Artificial Sequence: Synthetic oligonucleotide
  Sense strand starting at position 3328 of SEQ ID NO: 1562127
agaagucgugccucgcaau

SEQ ID NO: 1724180 - RNA, 19 nt, Artificial Sequence
  Description of Artificial Sequence: Synthetic oligonucleotide
  Antisense strand to SEQ ID NO: 1724179
auugcgaggcacgacuucu

SEQ ID NO: 1724181 - RNA, 19 nt, Artificial Sequence
  Description of Artificial Sequence: Synthetic oligonucleotide
  Sense strand starting at position 3384 of SEQ ID NO: 1562127
ccuugucucgcuuaggaga

SEQ ID NO: 1724182 - RNA, 19 nt, Artificial Sequence
  Description of Artificial Sequence: Synthetic oligonucleotide
  Antisense strand to SEQ ID NO: 1724181
ucuccuaagcgagacaagg

SEQ ID NO: 1724183 - RNA, 19 nt, Artificial Sequence
  Description of Artificial Sequence: Synthetic oligonucleotide
  Sense strand starting at position 3623 of SEQ ID NO: 1562127
gaaggcgcugcguuuagaa

SEQ ID NO: 1724184 - RNA, 19 nt, Artificial Sequence
  Description of Artificial Sequence: Synthetic oligonucleotide
  Antisense strand to SEQ ID NO: 1724183
uucuaaacgcagcgccuuc

SEQ ID NO: 1724185 - RNA, 19 nt, Artificial Sequence
  Description of Artificial Sequence: Synthetic oligonucleotide
  Sense strand starting at position 3642 of SEQ ID NO: 1562127
agagacggguuguuaagaa

SEQ ID NO: 1724186 - RNA, 19 nt, Artificial Sequence
  Description of Artificial Sequence: Synthetic oligonucleotide
  Antisense strand to SEQ ID NO: 1724185
uucuuaacaacccgucucu

SEQ ID NO: 1724187 - RNA, 19 nt, Artificial Sequence
  Description of Artificial Sequence: Synthetic oligonucleotide
  Sense strand starting at position 3670 of SEQ ID NO: 1562127
ggauaccuuuaaucgaaau

SEQ ID NO: 1724188 - RNA, 19 nt, Artificial Sequence
  Description of Artificial Sequence: Synthetic oligonucleotide
  Antisense strand to SEQ ID NO: 1724187
auuucgauuaaagguaucc

SEQ ID NO: 1724189 - RNA, 19 nt, Artificial Sequence
  Description of Artificial Sequence: Synthetic oligonucleotide
  Sense strand starting at position 3765 of SEQ ID NO: 1562127
aauuaacaguguuuggaug

SEQ ID NO: 1724190 - RNA, 19 nt, Artificial Sequence
  Description of Artificial Sequence: Synthetic oligonucleotide
  Antisense strand to SEQ ID NO: 1724189
cauccaaacacuguuaauu

SEQ ID NO: 1724191 - RNA, 19 nt, Artificial Sequence
  Description of Artificial Sequence: Synthetic oligonucleotide
  Sense strand starting at position 3807 of SEQ ID NO: 1562127
aaaggcauguugcugaaau

SEQ ID NO: 1724192 - RNA, 19 nt, Artificial Sequence
  Description of Artificial Sequence: Synthetic oligonucleotide
  Antisense strand to SEQ ID NO: 1724191
auuucagcaacaugccuuu

SEQ ID NO: 1724193 - RNA, 19 nt, Artificial Sequence
  Description of Artificial Sequence: Synthetic oligonucleotide
  Sense strand starting at position 3817 of SEQ ID NO: 1562127
ugcugaaauuuguuuacuu

SEQ ID NO: 1724194 - RNA, 19 nt, Artificial Sequence
  Description of Artificial Sequence: Synthetic oligonucleotide
  Antisense strand to SEQ ID NO: 1724193
aaguaaacaaauuucagca

SEQ ID NO: 1724195 - RNA, 19 nt, Artificial Sequence
  Description of Artificial Sequence: Synthetic oligonucleotide
  Sense strand starting at position 3882 of SEQ ID NO: 1562127
ucugcaaaguccuuagaua

SEQ ID NO: 1724196 - RNA, 19 nt, Artificial Sequence
  Description of Artificial Sequence: Synthetic oligonucleotide
  Antisense strand to SEQ ID NO: 1724195
uaucuaaggacuuugcaga

SEQ ID NO: 1724197 - RNA, 19 nt, Artificial Sequence
  Description of Artificial Sequence: Synthetic oligonucleotide
  Sense strand starting at position 3883 of SEQ ID NO: 1562127
cugcaaaguccuuagauac

SEQ ID NO: 1724198 - RNA, 19 nt, Artificial Sequence
  Description of Artificial Sequence: Synthetic oligonucleotide
  Antisense strand to SEQ ID NO: 1724197
guaucuaaggacuuugcag

SEQ ID NO: 1724199 - RNA, 19 nt, Artificial Sequence
  Description of Artificial Sequence: Synthetic oligonucleotide
  Sense strand starting at position 105 of SEQ ID NO: 1562128
accaucauuugcuagaaug

SEQ ID NO: 1724200 - RNA, 19 nt, Artificial Sequence
  Description of Artificial Sequence: Synthetic oligonucleotide
  Antisense strand to SEQ ID NO: 1724199
cauucuagcaaaugauggu

SEQ ID NO: 1724201 - RNA, 19 nt, Artificial Sequence
  Description of Artificial Sequence: Synthetic oligonucleotide
  Sense strand starting at position 130 of SEQ ID NO: 1562128
caaccuuugcaguggaaau

SEQ ID NO: 1724202 - RNA, 19 nt, Artificial Sequence
  Description of Artificial Sequence: Synthetic oligonucleotide
  Antisense strand to SEQ ID NO: 1724201
auuuccacugcaaagguug

SEQ ID NO: 1724203 - RNA, 19 nt, Artificial Sequence
  Description of Artificial Sequence: Synthetic oligonucleotide
  Sense strand starting at position 317 of SEQ ID NO: 1562128
aguccugaguuccugagaa

SEQ ID NO: 1724204 - RNA, 19 nt, Artificial Sequence
  Description of Artificial Sequence: Synthetic oligonucleotide
  Antisense strand to SEQ ID NO: 1724203
uucucaggaacucaggacu

SEQ ID NO: 1724205 - RNA, 19 nt, Artificial Sequence
  Description of Artificial Sequence: Synthetic oligonucleotide
  Sense strand starting at position 646 of SEQ ID NO: 1562128
aaagcugcuugagugauau

SEQ ID NO: 1724206 - RNA, 19 nt, Artificial Sequence
  Description of Artificial Sequence: Synthetic oligonucleotide
  Antisense strand to SEQ ID NO: 1724205
auaucacucaagcagcuuu

SEQ ID NO: 1724207 - RNA, 19 nt, Artificial Sequence
  Description of Artificial Sequence: Synthetic oligonucleotide
  Sense strand starting at position 749 of SEQ ID NO: 1562128
ggcuacuuguggccaacua

SEQ ID NO: 1724208 - RNA, 19 nt, Artificial Sequence
  Description of Artificial Sequence: Synthetic oligonucleotide
  Antisense strand to SEQ ID NO: 1724207
uaguuggccacaaguagcc

SEQ ID NO: 1724209 - RNA, 19 nt, Artificial Sequence
  Description of Artificial Sequence: Synthetic oligonucleotide
  Sense strand starting at position 813 of SEQ ID NO: 1562128
cgacucugccugcagagau

SEQ ID NO: 1724210 - RNA, 19 nt, Artificial Sequence
  Description of Artificial Sequence: Synthetic oligonucleotide
  Antisense strand to SEQ ID NO: 1724209
aucucugcaggcagagucg

SEQ ID NO: 1724211 - RNA, 19 nt, Artificial Sequence
  Description of Artificial Sequence: Synthetic oligonucleotide
  Sense strand starting at position 1111 of SEQ ID NO: 1562128
augcuucucagagggaaag

SEQ ID NO: 1724212 - RNA, 19 nt, Artificial Sequence
  Description of Artificial Sequence: Synthetic oligonucleotide
  Antisense strand to SEQ ID NO: 1724211
cuuucccucugagaagcau

SEQ ID NO: 1724213 - RNA, 19 nt, Artificial Sequence
  Description of Artificial Sequence: Synthetic oligonucleotide
  Sense strand starting at position 1112 of SEQ ID NO: 1562128
ugcuucucagagggaaaga

SEQ ID NO: 1724214 - RNA, 19 nt, Artificial Sequence
  Description of Artificial Sequence: Synthetic oligonucleotide
  Antisense strand to SEQ ID NO: 1724213
ucuuucccucugagaagca

SEQ ID NO: 1724215 - RNA, 19 nt, Artificial Sequence
  Description of Artificial Sequence: Synthetic oligonucleotide
  Sense strand starting at position 1137 of SEQ ID NO: 1562128
ggaagcagucauuggcacu

SEQ ID NO: 1724216 - RNA, 19 nt, Artificial Sequence
  Description of Artificial Sequence: Synthetic oligonucleotide
  Antisense strand to SEQ ID NO: 1724215
agugccaaugacugcuucc

SEQ ID NO: 1724217 - RNA, 19 nt, Artificial Sequence
  Description of Artificial Sequence: Synthetic oligonucleotide
  Sense strand starting at position 1235 of SEQ ID NO: 1562128
agcuuaaauguuugccaaa

SEQ ID NO: 1724218 - RNA, 19 nt, Artificial Sequence
  Description of Artificial Sequence: Synthetic oligonucleotide
  Antisense strand to SEQ ID NO: 1724217
uuuggcaaacauuuaagcu

SEQ ID NO: 1724219 - RNA, 19 nt, Artificial Sequence
  Description of Artificial Sequence: Synthetic oligonucleotide
  Sense strand starting at position 1236 of SEQ ID NO: 1562128
gcuuaaauguuugccaaau

SEQ ID NO: 1724220 - RNA, 19 nt, Artificial Sequence
  Description of Artificial Sequence: Synthetic oligonucleotide
  Antisense strand to SEQ ID NO: 1724219
auuuggcaaacauuuaagc

SEQ ID NO: 1724221 - RNA, 19 nt, Artificial Sequence
  Description of Artificial Sequence: Synthetic oligonucleotide
  Sense strand starting at position 1237 of SEQ ID NO: 1562128
cuuaaauguuugccaaaug

SEQ ID NO: 1724222 - RNA, 19 nt, Artificial Sequence
  Description of Artificial Sequence: Synthetic oligonucleotide
  Antisense strand to SEQ ID NO: 1724221
cauuuggcaaacauuuaag

SEQ ID NO: 1724223 - RNA, 19 nt, Artificial Sequence
  Description of Artificial Sequence: Synthetic oligonucleotide
  Sense strand starting at position 1420 of SEQ ID NO: 1562128
guaagaaugagucacgauu

SEQ ID NO: 1724224 - RNA, 19 nt, Artificial Sequence
  Description of Artificial Sequence: Synthetic oligonucleotide
  Antisense strand to SEQ ID NO: 1724223
aaucgugacucauucuuac

SEQ ID NO: 1724225 - RNA, 19 nt, Artificial Sequence
  Description of Artificial Sequence: Synthetic oligonucleotide
  Sense strand starting at position 2126 of SEQ ID NO: 1562128
aagagauaguuaguaucuu

SEQ ID NO: 1724226 - RNA, 19 nt, Artificial Sequence
  Description of Artificial Sequence: Synthetic oligonucleotide
  Antisense strand to SEQ ID NO: 1724225
aagauacuaacuaucucuu

SEQ ID NO: 1724227 - RNA, 19 nt, Artificial Sequence
  Description of Artificial Sequence: Synthetic oligonucleotide
  Sense strand starting at position 2134 of SEQ ID NO: 1562128
guuaguaucuugcucuaga

SEQ ID NO: 1724228 - RNA, 19 nt, Artificial Sequence
  Description of Artificial Sequence: Synthetic oligonucleotide
  Antisense strand to SEQ ID NO: 1724227
ucuagagcaagauacuaac

SEQ ID NO: 1724229 - RNA, 19 nt, Artificial Sequence
  Description of Artificial Sequence: Synthetic oligonucleotide
  Sense strand starting at position 2135 of SEQ ID NO: 1562128
uuaguaucuugcucuagag

SEQ ID NO: 1724230 - RNA, 19 nt, Artificial Sequence
  Description of Artificial Sequence: Synthetic oligonucleotide
  Antisense strand to SEQ ID NO: 1724229
cucuagagcaagauacuaa

SEQ ID NO: 1724231 - RNA, 19 nt, Artificial Sequence
  Description of Artificial Sequence: Synthetic oligonucleotide
  Sense strand starting at position 2361 of SEQ ID NO: 1562128
cauaguuggcucuagugaa

SEQ ID NO: 1724232 - RNA, 19 nt, Artificial Sequence
  Description of Artificial Sequence: Synthetic oligonucleotide
  Antisense strand to SEQ ID NO: 1724231
uucacuagagccaacuaug

SEQ ID NO: 1724233 - RNA, 19 nt, Artificial Sequence
  Description of Artificial Sequence: Synthetic oligonucleotide
  Sense strand starting at position 2365 of SEQ ID NO: 1562128
guuggcucuagugaaauag

SEQ ID NO: 1724234 - RNA, 19 nt, Artificial Sequence
  Description of Artificial Sequence: Synthetic oligonucleotide
  Antisense strand to SEQ ID NO: 1724233
cuauuucacuagagccaac

SEQ ID NO: 1724235 - RNA, 19 nt, Artificial Sequence
  Description of Artificial Sequence: Synthetic oligonucleotide
  Sense strand starting at position 2447 of SEQ ID NO: 1562128
gguauuuaaugugaaugac

SEQ ID NO: 1724236 - RNA, 19 nt, Artificial Sequence
  Description of Artificial Sequence: Synthetic oligonucleotide
  Antisense strand to SEQ ID NO: 1724235
gucauucacauuaaauacc

SEQ ID NO: 1724237 - RNA, 19 nt, Artificial Sequence
  Description of Artificial Sequence: Synthetic oligonucleotide
  Sense strand starting at position 2494 of SEQ ID NO: 1562128
aggaaucuuaagugucuga

SEQ ID NO: 1724238 - RNA, 19 nt, Artificial Sequence
  Description of Artificial Sequence: Synthetic oligonucleotide
  Antisense strand to SEQ ID NO: 1724237
ucagacacuuaagauuccu

SEQ ID NO: 1724239 - RNA, 19 nt, Artificial Sequence
  Description of Artificial Sequence: Synthetic oligonucleotide
  Sense strand starting at position 2546 of SEQ ID NO: 1562128
ggugaaucauuggaaagau

SEQ ID NO: 1724240 - RNA, 19 nt, Artificial Sequence
  Description of Artificial Sequence: Synthetic oligonucleotide
  Antisense strand to SEQ ID NO: 1724239
aucuuuccaaugauucacc

SEQ ID NO: 1724241 - RNA, 19 nt, Artificial Sequence
  Description of Artificial Sequence: Synthetic oligonucleotide
  Sense strand starting at position 2749 of SEQ ID NO: 1562128
ucugcuucaugugugggaa

SEQ ID NO: 1724242 - RNA, 19 nt, Artificial Sequence
  Description of Artificial Sequence: Synthetic oligonucleotide
  Antisense strand to SEQ ID NO: 1724241
uucccacacaugaagcaga

SEQ ID NO: 1724243 - RNA, 19 nt, Artificial Sequence
  Description of Artificial Sequence: Synthetic oligonucleotide
  Sense strand starting at position 2752 of SEQ ID NO: 1562128
gcuucaugugugggaagua

SEQ ID NO: 1724244 - RNA, 19 nt, Artificial Sequence
  Description of Artificial Sequence: Synthetic oligonucleotide
  Antisense strand to SEQ ID NO: 1724243
uacuucccacacaugaagc

SEQ ID NO: 1724245 - RNA, 19 nt, Artificial Sequence
  Description of Artificial Sequence: Synthetic oligonucleotide
  Sense strand starting at position 2805 of SEQ ID NO: 1562128
aggccugucugaucuguca

SEQ ID NO: 1724246 - RNA, 19 nt, Artificial Sequence
  Description of Artificial Sequence: Synthetic oligonucleotide
  Antisense strand to SEQ ID NO: 1724245
ugacagaucagacaggccu

SEQ ID NO: 1724247 - RNA, 19 nt, Artificial Sequence
  Description of Artificial Sequence: Synthetic oligonucleotide
  Sense strand starting at position 2808 of SEQ ID NO: 1562128
ccugucugaucugucauua

SEQ ID NO: 1724248 - RNA, 19 nt, Artificial Sequence
  Description of Artificial Sequence: Synthetic oligonucleotide
  Antisense strand to SEQ ID NO: 1724247
uaaugacagaucagacagg

SEQ ID NO: 1724249 - RNA, 19 nt, Artificial Sequence
  Description of Artificial Sequence: Synthetic oligonucleotide
  Sense strand starting at position 2812 of SEQ ID NO: 1562128
ucugaucugucauuacucu

SEQ ID NO: 1724250 - RNA, 19 nt, Artificial Sequence
  Description of Artificial Sequence: Synthetic oligonucleotide
  Antisense strand to SEQ ID NO: 1724249
agaguaaugacagaucaga

SEQ ID NO: 1724251 - RNA, 19 nt, Artificial Sequence
  Description of Artificial Sequence: Synthetic oligonucleotide
  Sense strand starting at position 2818 of SEQ ID NO: 1562128
cugucauuacucugcucua

SEQ ID NO: 1724252 - RNA, 19 nt, Artificial Sequence
  Description of Artificial Sequence: Synthetic oligonucleotide
  Antisense strand to SEQ ID NO: 1724251
uagagcagaguaaugacag

SEQ ID NO: 1724253 - RNA, 19 nt, Artificial Sequence
  Description of Artificial Sequence: Synthetic oligonucleotide
  Sense strand starting at position 3062 of SEQ ID NO: 1562128
aaauguuacugucucagag

SEQ ID NO: 1724254 - RNA, 19 nt, Artificial Sequence
  Description of Artificial Sequence: Synthetic oligonucleotide
  Antisense strand to SEQ ID NO: 1724253
cucugagacaguaacauuu

SEQ ID NO: 1724255 - RNA, 19 nt, Artificial Sequence
  Description of Artificial Sequence: Synthetic oligonucleotide
  Sense strand starting at position 3177 of SEQ ID NO: 1562128
guauauuuacuauguguca

SEQ ID NO: 1724256 - RNA, 19 nt, Artificial Sequence
  Description of Artificial Sequence: Synthetic oligonucleotide
  Antisense strand to SEQ ID NO: 1724255
ugacacauaguaaauauac

SEQ ID NO: 1724257 - RNA, 19 nt, Artificial Sequence
  Description of Artificial Sequence: Synthetic oligonucleotide
  Sense strand starting at position 3353 of SEQ ID NO: 1562128
cccagucuucuaugggaac

SEQ ID NO: 1724258 - RNA, 19 nt, Artificial Sequence
  Description of Artificial Sequence: Synthetic oligonucleotide
  Antisense strand to SEQ ID NO: 1724257
guucccauagaagacuggg

SEQ ID NO: 1724259 - RNA, 19 nt, Artificial Sequence
  Description of Artificial Sequence: Synthetic oligonucleotide
  Sense strand starting at position 3421 of SEQ ID NO: 1562128
gcucuuaaguccuuaaguc

SEQ ID NO: 1724260 - RNA, 19 nt, Artificial Sequence
  Description of Artificial Sequence: Synthetic oligonucleotide
  Antisense strand to SEQ ID NO: 1724259
gacuuaaggacuuaagagc

SEQ ID NO: 1724261 - RNA, 19 nt, Artificial Sequence
  Description of Artificial Sequence: Synthetic oligonucleotide
  Sense strand starting at position 3422 of SEQ ID NO: 1562128
cucuuaaguccuuaagucu

SEQ ID NO: 1724262 - RNA, 19 nt, Artificial Sequence
  Description of Artificial Sequence: Synthetic oligonucleotide
  Antisense strand to SEQ ID NO: 1724261
agacuuaaggacuuaagag

SEQ ID NO: 1724263 - RNA, 19 nt, Artificial Sequence
  Description of Artificial Sequence: Synthetic oligonucleotide
  Sense strand starting at position 3431 of SEQ ID NO: 1562128
ccuuaagucuguuuacucu

SEQ ID NO: 1724264 - RNA, 19 nt, Artificial Sequence
  Description of Artificial Sequence: Synthetic oligonucleotide
  Antisense strand to SEQ ID NO: 1724263
agaguaaacagacuuaagg

SEQ ID NO: 1724265 - RNA, 19 nt, Artificial Sequence
  Description of Artificial Sequence: Synthetic oligonucleotide
  Sense strand starting at position 3536 of SEQ ID NO: 1562128
acaucaugacucugcagua

SEQ ID NO: 1724266 - RNA, 19 nt, Artificial Sequence
  Description of Artificial Sequence: Synthetic oligonucleotide
  Antisense strand to SEQ ID NO: 1724265
uacugcagagucaugaugu

SEQ ID NO: 1724267 - RNA, 19 nt, Artificial Sequence
  Description of Artificial Sequence: Synthetic oligonucleotide
  Sense strand starting at position 3550 of SEQ ID NO: 1562128
caguacuggccuggugaga

SEQ ID NO: 1724268 - RNA, 19 nt, Artificial Sequence
  Description of Artificial Sequence: Synthetic oligonucleotide
  Antisense strand to SEQ ID NO: 1724267
ucucaccaggccaguacug

SEQ ID NO: 1724269 - RNA, 19 nt, Artificial Sequence
  Description of Artificial Sequence: Synthetic oligonucleotide
  Sense strand starting at position 3650 of SEQ ID NO: 1562128
aucucugagcugcaauaaa

SEQ ID NO: 1724270 - RNA, 19 nt, Artificial Sequence
  Description of Artificial Sequence: Synthetic oligonucleotide
  Antisense strand to SEQ ID NO: 1724269
uuuauugcagcucagagau

SEQ ID NO: 1724271 - RNA, 19 nt, Artificial Sequence
  Description of Artificial Sequence: Synthetic oligonucleotide
  Sense strand starting at position 3731 of SEQ ID NO: 1562128
ccuguauuccguuaaacca

SEQ ID NO: 1724272 - RNA, 19 nt, Artificial Sequence
  Description of Artificial Sequence: Synthetic oligonucleotide
  Antisense strand to SEQ ID NO: 1724271
ugguuuaacggaauacagg

SEQ ID NO: 1724273 - RNA, 19 nt, Artificial Sequence
  Description of Artificial Sequence: Synthetic oligonucleotide
  Sense strand starting at position 3800 of SEQ ID NO: 1562128
agagcaauuuagcaggaau

SEQ ID NO: 1724274 - RNA, 19 nt, Artificial Sequence
  Description of Artificial Sequence: Synthetic oligonucleotide
  Antisense strand to SEQ ID NO: 1724273
auuccugcuaaauugcucu

SEQ ID NO: 1724275 - RNA, 19 nt, Artificial Sequence
  Description of Artificial Sequence: Synthetic oligonucleotide
  Sense strand starting at position 3840 of SEQ ID NO: 1562128
augugaaauguugaggucu

SEQ ID NO: 1724276 - RNA, 19 nt, Artificial Sequence
  Description of Artificial Sequence: Synthetic oligonucleotide
  Antisense strand to SEQ ID NO: 1724275
agaccucaacauuucacau

SEQ ID NO: 1724277 - RNA, 19 nt, Artificial Sequence
  Description of Artificial Sequence: Synthetic oligonucleotide
  Sense strand starting at position 3914 of SEQ ID NO: 1562128
ugcucuaaugcucacugaa

SEQ ID NO: 1724278 - RNA, 19 nt, Artificial Sequence
  Description of Artificial Sequence: Synthetic oligonucleotide
  Antisense strand to SEQ ID NO: 1724277
uucagugagcauuagagca

SEQ ID NO: 1724279 - RNA, 19 nt, Artificial Sequence
  Description of Artificial Sequence: Synthetic oligonucleotide
  Sense strand starting at position 248 of SEQ ID NO: 1562129
uguaucuggcacugugaua

SEQ ID NO: 1724280 - RNA, 19 nt, Artificial Sequence
  Description of Artificial Sequence: Synthetic oligonucleotide
  Antisense strand to SEQ ID NO: 1724279
uaucacagugccagauaca

SEQ ID NO: 1724281 - RNA, 19 nt, Artificial Sequence
  Description of Artificial Sequence: Synthetic oligonucleotide
  Sense strand starting at position 259 of SEQ ID NO: 1562129
cugugauaagcacaguaca

SEQ ID NO: 1724282 - RNA, 19 nt, Artificial Sequence
  Description of Artificial Sequence: Synthetic oligonucleotide
  Antisense strand to SEQ ID NO: 1724281
uguacugugcuuaucacag

SEQ ID NO: 1724283 - RNA, 19 nt, Artificial Sequence
  Description of Artificial Sequence: Synthetic oligonucleotide
  Sense strand starting at position 376 of SEQ ID NO: 1562129
cugggaagcuguguuggaa

SEQ ID NO: 1724284 - RNA, 19 nt, Artificial Sequence
  Description of Artificial Sequence: Synthetic oligonucleotide
  Antisense strand to SEQ ID NO: 1724283
uuccaacacagcuucccag

SEQ ID NO: 1724285 - RNA, 19 nt, Artificial Sequence
  Description of Artificial Sequence: Synthetic oligonucleotide
  Sense strand starting at position 415 of SEQ ID NO: 1562129
cgccuauucuaaccaguua

SEQ ID NO: 1724286 - RNA, 19 nt, Artificial Sequence
  Description of Artificial Sequence: Synthetic oligonucleotide
  Antisense strand to SEQ ID NO: 1724285
uaacugguuagaauaggcg

SEQ ID NO: 1724287 - RNA, 19 nt, Artificial Sequence
  Description of Artificial Sequence: Synthetic oligonucleotide
  Sense strand starting at position 468 of SEQ ID NO: 1562129
agucccaucgaauauacau

SEQ ID NO: 1724288 - RNA, 19 nt, Artificial Sequence
  Description of Artificial Sequence: Synthetic oligonucleotide
  Antisense strand to SEQ ID NO: 1724287
auguauauucgaugggacu

SEQ ID NO: 1724289 - RNA, 19 nt, Artificial Sequence
  Description of Artificial Sequence: Synthetic oligonucleotide
  Sense strand starting at position 1095 of SEQ ID NO: 1562129
ccgggaacauucuugcuaa

SEQ ID NO: 1724290 - RNA, 19 nt, Artificial Sequence
  Description of Artificial Sequence: Synthetic oligonucleotide
  Antisense strand to SEQ ID NO: 1724289
uuagcaagaauguucccgg

SEQ ID NO: 1724291 - RNA, 19 nt, Artificial Sequence
  Description of Artificial Sequence: Synthetic oligonucleotide
  Sense strand starting at position 1098 of SEQ ID NO: 1562129
ggaacauucuugcuaaucu

SEQ ID NO: 1724292 - RNA, 19 nt, Artificial Sequence
  Description of Artificial Sequence: Synthetic oligonucleotide
  Antisense strand to SEQ ID NO: 1724291
agauuagcaagaauguucc

SEQ ID NO: 1724293 - RNA, 19 nt, Artificial Sequence
  Description of Artificial Sequence: Synthetic oligonucleotide
  Sense strand starting at position 1118 of SEQ ID NO: 1562129
uuaggaaucugcucaggaa

SEQ ID NO: 1724294 - RNA, 19 nt, Artificial Sequence
  Description of Artificial Sequence: Synthetic oligonucleotide
  Antisense strand to SEQ ID NO: 1724293
uuccugagcagauuccuaa

SEQ ID NO: 1724295 - RNA, 19 nt, Artificial Sequence
  Description of Artificial Sequence: Synthetic oligonucleotide
  Sense strand starting at position 1982 of SEQ ID NO: 1562129
gcucacuagcccuggaguu

SEQ ID NO: 1724296 - RNA, 19 nt, Artificial Sequence
  Description of Artificial Sequence: Synthetic oligonucleotide
  Antisense strand to SEQ ID NO: 1724295
aacuccagggcuagugagc

SEQ ID NO: 1724297 - RNA, 19 nt, Artificial Sequence
  Description of Artificial Sequence: Synthetic oligonucleotide
  Sense strand starting at position 2014 of SEQ ID NO: 1562129
ggagcuucugccgagcaga

SEQ ID NO: 1724298 - RNA, 19 nt, Artificial Sequence
  Description of Artificial Sequence: Synthetic oligonucleotide
  Antisense strand to SEQ ID NO: 1724297
ucugcucggcagaagcucc

SEQ ID NO: 1724299 - RNA, 19 nt, Artificial Sequence
  Description of Artificial Sequence: Synthetic oligonucleotide
  Sense strand starting at position 2074 of SEQ ID NO: 1562129
uaaggagagccuuaaguuc

SEQ ID NO: 1724300 - RNA, 19 nt, Artificial Sequence
  Description of Artificial Sequence: Synthetic oligonucleotide
  Antisense strand to SEQ ID NO: 1724299
gaacuuaaggcucuccuua

SEQ ID NO: 1724301 - RNA, 19 nt, Artificial Sequence
  Description of Artificial Sequence: Synthetic oligonucleotide
  Sense strand starting at position 2085 of SEQ ID NO: 1562129
uuaaguuccuguuuggaca

SEQ ID NO: 1724302 - RNA, 19 nt, Artificial Sequence
  Description of Artificial Sequence: Synthetic oligonucleotide
  Antisense strand to SEQ ID NO: 1724301
uguccaaacaggaacuuaa

SEQ ID NO: 1724303 - RNA, 19 nt, Artificial Sequence
  Description of Artificial Sequence: Synthetic oligonucleotide
  Sense strand starting at position 2110 of SEQ ID NO: 1562129
uagcuuaaauccguacuga

SEQ ID NO: 1724304 - RNA, 19 nt, Artificial Sequence
  Description of Artificial Sequence: Synthetic oligonucleotide
  Antisense strand to SEQ ID NO: 1724303
ucaguacggauuuaagcua

SEQ ID NO: 1724305 - RNA, 19 nt, Artificial Sequence
  Description of Artificial Sequence: Synthetic oligonucleotide
  Sense strand starting at position 2111 of SEQ ID NO: 1562129
agcuuaaauccguacugag

SEQ ID NO: 1724306 - RNA, 19 nt, Artificial Sequence
  Description of Artificial Sequence: Synthetic oligonucleotide
  Antisense strand to SEQ ID NO: 1724305
cucaguacggauuuaagcu

SEQ ID NO: 1724307 - RNA, 19 nt, Artificial Sequence
  Description of Artificial Sequence: Synthetic oligonucleotide
  Sense strand starting at position 2520 of SEQ ID NO: 1562129
gauccauaagggugugaau

SEQ ID NO: 1724308 - RNA, 19 nt, Artificial Sequence
  Description of Artificial Sequence: Synthetic oligonucleotide
  Antisense strand to SEQ ID NO: 1724307
auucacacccuuauggauc

SEQ ID NO: 1724309 - RNA, 19 nt, Artificial Sequence
  Description of Artificial Sequence: Synthetic oligonucleotide
  Sense strand starting at position 2550 of SEQ ID NO: 1562129
uguauuacucauugcugua

SEQ ID NO: 1724310 - RNA, 19 nt, Artificial Sequence
  Description of Artificial Sequence: Synthetic oligonucleotide
  Antisense strand to SEQ ID NO: 1724309
uacagcaaugaguaauaca

SEQ ID NO: 1724311 - RNA, 19 nt, Artificial Sequence
  Description of Artificial Sequence: Synthetic oligonucleotide
  Sense strand starting at position 2562 of SEQ ID NO: 1562129
ugcuguagugccuagaaca

SEQ ID NO: 1724312 - RNA, 19 nt, Artificial Sequence
  Description of Artificial Sequence: Synthetic oligonucleotide
  Antisense strand to SEQ ID NO: 1724311
uguucuaggcacuacagca

SEQ ID NO: 1724313 - RNA, 19 nt, Artificial Sequence
  Description of Artificial Sequence: Synthetic oligonucleotide
  Sense strand starting at position 2625 of SEQ ID NO: 1562129
cauccagucguaugacauu

SEQ ID NO: 1724314 - RNA, 19 nt, Artificial Sequence
  Description of Artificial Sequence: Synthetic oligonucleotide
  Antisense strand to SEQ ID NO: 1724313
aaugucauacgacuggaug

SEQ ID NO: 1724315 - RNA, 19 nt, Artificial Sequence
  Description of Artificial Sequence: Synthetic oligonucleotide
  Sense strand starting at position 2628 of SEQ ID NO: 1562129
ccagucguaugacauuuau

SEQ ID NO: 1724316 - RNA, 19 nt, Artificial Sequence
  Description of Artificial Sequence: Synthetic oligonucleotide
  Antisense strand to SEQ ID NO: 1724315
auaaaugucauacgacugg

SEQ ID NO: 1724317 - RNA, 19 nt, Artificial Sequence
  Description of Artificial Sequence: Synthetic oligonucleotide
  Sense strand starting at position 2970 of SEQ ID NO: 1562129
gggcccuuccuaugacuuu

SEQ ID NO: 1724318 - RNA, 19 nt, Artificial Sequence
  Description of Artificial Sequence: Synthetic oligonucleotide
  Antisense strand to SEQ ID NO: 1724317
aaagucauaggaagggccc

SEQ ID NO: 1724319 - RNA, 19 nt, Artificial Sequence
  Description of Artificial Sequence: Synthetic oligonucleotide
  Sense strand starting at position 3083 of SEQ ID NO: 1562129
ugaugugaaugucuaauag

SEQ ID NO: 1724320 - RNA, 19 nt, Artificial Sequence
  Description of Artificial Sequence: Synthetic oligonucleotide
  Antisense strand to SEQ ID NO: 1724319
cuauuagacauucacauca

SEQ ID NO: 1724321 - RNA, 19 nt, Artificial Sequence
  Description of Artificial Sequence: Synthetic oligonucleotide
  Sense strand starting at position 3253 of SEQ ID NO: 1562129
uuucucugccaucgaauaa

SEQ ID NO: 1724322 - RNA, 19 nt, Artificial Sequence
  Description of Artificial Sequence: Synthetic oligonucleotide
  Antisense strand to SEQ ID NO: 1724321
uuauucgauggcagagaaa

SEQ ID NO: 1724323 - RNA, 19 nt, Artificial Sequence
  Description of Artificial Sequence: Synthetic oligonucleotide
  Sense strand starting at position 3257 of SEQ ID NO: 1562129
ucugccaucgaauaaucaa

SEQ ID NO: 1724324 - RNA, 19 nt, Artificial Sequence
  Description of Artificial Sequence: Synthetic oligonucleotide
  Antisense strand to SEQ ID NO: 1724323
uugauuauucgauggcaga

SEQ ID NO: 1724325 - RNA, 19 nt, Artificial Sequence
  Description of Artificial Sequence: Synthetic oligonucleotide
  Sense strand starting at position 3260 of SEQ ID NO: 1562129
gccaucgaauaaucaaauu

SEQ ID NO: 1724326 - RNA, 19 nt, Artificial Sequence
  Description of Artificial Sequence: Synthetic oligonucleotide
  Antisense strand to SEQ ID NO: 1724325
aauuugauuauucgauggc

SEQ ID NO: 1724327 - RNA, 19 nt, Artificial Sequence
  Description of Artificial Sequence: Synthetic oligonucleotide
  Sense strand starting at position 3314 of SEQ ID NO: 1562129
ucuugaauaugauuguugu

SEQ ID NO: 1724328 - RNA, 19 nt, Artificial Sequence
  Description of Artificial Sequence: Synthetic oligonucleotide
  Antisense strand to SEQ ID NO: 1724327
acaacaaucauauucaaga

SEQ ID NO: 1724329 - RNA, 19 nt, Artificial Sequence
  Description of Artificial Sequence: Synthetic oligonucleotide
  Sense strand starting at position 3317 of SEQ ID NO: 1562129
ugaauaugauuguugucac

SEQ ID NO: 1724330 - RNA, 19 nt, Artificial Sequence
  Description of Artificial Sequence: Synthetic oligonucleotide
  Antisense strand to SEQ ID NO: 1724329
gugacaacaaucauauuca

SEQ ID NO: 1724331 - RNA, 19 nt, Artificial Sequence
  Description of Artificial Sequence: Synthetic oligonucleotide
  Sense strand starting at position 3320 of SEQ ID NO: 1562129
auaugauuguugucaccca

SEQ ID NO: 1724332 - RNA, 19 nt, Artificial Sequence
  Description of Artificial Sequence: Synthetic oligonucleotide
  Antisense strand to SEQ ID NO: 1724331
ugggugacaacaaucauau

SEQ ID NO: 1724333 - RNA, 19 nt, Artificial Sequence
  Description of Artificial Sequence: Synthetic oligonucleotide
  Sense strand starting at position 3372 of SEQ ID NO: 1562129
cgucucugucuuggaucau

SEQ ID NO: 1724334 - RNA, 19 nt, Artificial Sequence
  Description of Artificial Sequence: Synthetic oligonucleotide
  Antisense strand to SEQ ID NO: 1724333
augauccaagacagagacg

SEQ ID NO: 1724335 - RNA, 19 nt, Artificial Sequence
  Description of Artificial Sequence: Synthetic oligonucleotide
  Sense strand starting at position 3376 of SEQ ID NO: 1562129
ucugucuuggaucauugaa

SEQ ID NO: 1724336 - RNA, 19 nt, Artificial Sequence
  Description of Artificial Sequence: Synthetic oligonucleotide
  Antisense strand to SEQ ID NO: 1724335
uucaaugauccaagacaga

SEQ ID NO: 1724337 - RNA, 19 nt, Artificial Sequence
  Description of Artificial Sequence: Synthetic oligonucleotide
  Sense strand starting at position 3455 of SEQ ID NO: 1562129
ucuaaacguacugggauau

SEQ ID NO: 1724338 - RNA, 19 nt, Artificial Sequence
  Description of Artificial Sequence: Synthetic oligonucleotide
  Antisense strand to SEQ ID NO: 1724337
auaucccaguacguuuaga

SEQ ID NO: 1724339 - RNA, 19 nt, Artificial Sequence
  Description of Artificial Sequence: Synthetic oligonucleotide
  Sense strand starting at position 3571 of SEQ ID NO: 1562129
cgucaacauugcccucauu

SEQ ID NO: 1724340 - RNA, 19 nt, Artificial Sequence
  Description of Artificial Sequence: Synthetic oligonucleotide
  Antisense strand to SEQ ID NO: 1724339
aaugagggcaauguugacg

SEQ ID NO: 1724341 - RNA, 19 nt, Artificial Sequence
  Description of Artificial Sequence: Synthetic oligonucleotide
  Sense strand starting at position 3709 of SEQ ID NO: 1562129
uccugucaccuguagauga

SEQ ID NO: 1724342 - RNA, 19 nt, Artificial Sequence
  Description of Artificial Sequence: Synthetic oligonucleotide
  Antisense strand to SEQ ID NO: 1724341
ucaucuacaggugacagga

SEQ ID NO: 1724343 - RNA, 19 nt, Artificial Sequence
  Description of Artificial Sequence: Synthetic oligonucleotide
  Sense strand starting at position 3749 of SEQ ID NO: 1562129
ugaauuauguugcccaaag

SEQ ID NO: 1724344 - RNA, 19 nt, Artificial Sequence
  Description of Artificial Sequence: Synthetic oligonucleotide
  Antisense strand to SEQ ID NO: 1724343
cuuugggcaacauaauuca

SEQ ID NO: 1724345 - RNA, 19 nt, Artificial Sequence
  Description of Artificial Sequence: Synthetic oligonucleotide
  Sense strand starting at position 3750 of SEQ ID NO: 1562129
gaauuauguugcccaaagu

SEQ ID NO: 1724346 - RNA, 19 nt, Artificial Sequence
  Description of Artificial Sequence: Synthetic oligonucleotide
  Antisense strand to SEQ ID NO: 1724345
acuuugggcaacauaauuc

SEQ ID NO: 1724347 - RNA, 19 nt, Artificial Sequence
  Description of Artificial Sequence: Synthetic oligonucleotide
  Sense strand starting at position 3770 of SEQ ID NO: 1562129
gcggagucagagugggaau

SEQ ID NO: 1724348 - RNA, 19 nt, Artificial Sequence
  Description of Artificial Sequence: Synthetic oligonucleotide
  Antisense strand to SEQ ID NO: 1724347
auucccacucugacuccgc

SEQ ID NO: 1724349 - RNA, 19 nt, Artificial Sequence
  Description of Artificial Sequence: Synthetic oligonucleotide
  Sense strand starting at position 3771 of SEQ ID NO: 1562129
cggagucagagugggaaua

SEQ ID NO: 1724350 - RNA, 19 nt, Artificial Sequence
  Description of Artificial Sequence: Synthetic oligonucleotide
  Antisense strand to SEQ ID NO: 1724349
uauucccacucugacuccg

SEQ ID NO: 1724351 - RNA, 19 nt, Artificial Sequence
  Description of Artificial Sequence: Synthetic oligonucleotide
  Sense strand starting at position 3772 of SEQ ID NO: 1562129
ggagucagagugggaauau

SEQ ID NO: 1724352 - RNA, 19 nt, Artificial Sequence
  Description of Artificial Sequence: Synthetic oligonucleotide
  Antisense strand to SEQ ID NO: 1724351
auauucccacucugacucc

SEQ ID NO: 1724353 - RNA, 19 nt, Artificial Sequence
  Description of Artificial Sequence: Synthetic oligonucleotide
  Sense strand starting at position 3773 of SEQ ID NO: 1562129
gagucagagugggaauaua

SEQ ID NO: 1724354 - RNA, 19 nt, Artificial Sequence
  Description of Artificial Sequence: Synthetic oligonucleotide
  Antisense strand to SEQ ID NO: 1724353
uauauucccacucugacuc

SEQ ID NO: 1724355 - RNA, 19 nt, Artificial Sequence
  Description of Artificial Sequence: Synthetic oligonucleotide
  Sense strand starting at position 3903 of SEQ ID NO: 1562129
caccauuauugggauagag

SEQ ID NO: 1724356 - RNA, 19 nt, Artificial Sequence
  Description of Artificial Sequence: Synthetic oligonucleotide
  Antisense strand to SEQ ID NO: 1724355
cucuaucccaauaauggug

SEQ ID NO: 1724357 - RNA, 19 nt, Artificial Sequence
  Description of Artificial Sequence: Synthetic oligonucleotide
  Sense strand starting at position 3978 of SEQ ID NO: 1562129
auaaguaugcaauguaaca

SEQ ID NO: 1724358 - RNA, 19 nt, Artificial Sequence
  Description of Artificial Sequence: Synthetic oligonucleotide
  Antisense strand to SEQ ID NO: 1724357
uguuacauugcauacuuau

SEQ ID NO: 1724359 - RNA, 19 nt, Artificial Sequence
  Description of Artificial Sequence: Synthetic oligonucleotide
  Sense strand starting at position 164 of SEQ ID NO: 1562130
uuuaguagugaacaaguau

SEQ ID NO: 1724360 - RNA, 19 nt, Artificial Sequence
  Description of Artificial Sequence: Synthetic oligonucleotide
  Antisense strand to SEQ ID NO: 1724359
auacuuguucacuacuaaa

SEQ ID NO: 1724361 - RNA, 19 nt, Artificial Sequence
  Description of Artificial Sequence: Synthetic oligonucleotide
  Sense strand starting at position 778 of SEQ ID NO: 1562130
caagguuaucucuaaccga

SEQ ID NO: 1724362 - RNA, 19 nt, Artificial Sequence
  Description of Artificial Sequence: Synthetic oligonucleotide
  Antisense strand to SEQ ID NO: 1724361
ucgguuagagauaaccuug

SEQ ID NO: 1724363 - RNA, 19 nt, Artificial Sequence
  Description of Artificial Sequence: Synthetic oligonucleotide
  Sense strand starting at position 849 of SEQ ID NO: 1562130
auuccaguaucagccagau

SEQ ID NO: 1724364 - RNA, 19 nt, Artificial Sequence
  Description of Artificial Sequence: Synthetic oligonucleotide
  Antisense strand to SEQ ID NO: 1724363
aucuggcugauacuggaau

SEQ ID NO: 1724365 - RNA, 19 nt, Artificial Sequence
  Description of Artificial Sequence: Synthetic oligonucleotide
  Sense strand starting at position 853 of SEQ ID NO: 1562130
caguaucagccagauguga

SEQ ID NO: 1724366 - RNA, 19 nt, Artificial Sequence
  Description of Artificial Sequence: Synthetic oligonucleotide
  Antisense strand to SEQ ID NO: 1724365
ucacaucuggcugauacug

SEQ ID NO: 1724367 - RNA, 19 nt, Artificial Sequence
  Description of Artificial Sequence: Synthetic oligonucleotide
  Sense strand starting at position 899 of SEQ ID NO: 1562130
agcuguuugccugagggaa

SEQ ID NO: 1724368 - RNA, 19 nt, Artificial Sequence
  Description of Artificial Sequence: Synthetic oligonucleotide
  Antisense strand to SEQ ID NO: 1724367
uucccucaggcaaacagcu

SEQ ID NO: 1724369 - RNA, 19 nt, Artificial Sequence
  Description of Artificial Sequence: Synthetic oligonucleotide
  Sense strand starting at position 911 of SEQ ID NO: 1562130
gagggaaguuccuuaaccu

SEQ ID NO: 1724370 - RNA, 19 nt, Artificial Sequence
  Description of Artificial Sequence: Synthetic oligonucleotide
  Antisense strand to SEQ ID NO: 1724369
agguuaaggaacuucccuc

SEQ ID NO: 1724371 - RNA, 19 nt, Artificial Sequence
  Description of Artificial Sequence: Synthetic oligonucleotide
  Sense strand starting at position 931 of SEQ ID NO: 1562130
ucagguccucaucaguaaa

SEQ ID NO: 1724372 - RNA, 19 nt, Artificial Sequence
  Description of Artificial Sequence: Synthetic oligonucleotide
  Antisense strand to SEQ ID NO: 1724371
uuuacugaugaggaccuga

SEQ ID NO: 1724373 - RNA, 19 nt, Artificial Sequence
  Description of Artificial Sequence: Synthetic oligonucleotide
  Sense strand starting at position 1097 of SEQ ID NO: 1562130
aagcaucaggccuggaaau

SEQ ID NO: 1724374 - RNA, 19 nt, Artificial Sequence
  Description of Artificial Sequence: Synthetic oligonucleotide
  Antisense strand to SEQ ID NO: 1724373
auuuccaggccugaugcuu

SEQ ID NO: 1724375 - RNA, 19 nt, Artificial Sequence
  Description of Artificial Sequence: Synthetic oligonucleotide
  Sense strand starting at position 1098 of SEQ ID NO: 1562130
agcaucaggccuggaaauu

SEQ ID NO: 1724376 - RNA, 19 nt, Artificial Sequence
  Description of Artificial Sequence: Synthetic oligonucleotide
  Antisense strand to SEQ ID NO: 1724375
aauuuccaggccugaugcu

SEQ ID NO: 1724377 - RNA, 19 nt, Artificial Sequence
  Description of Artificial Sequence: Synthetic oligonucleotide
  Sense strand starting at position 1099 of SEQ ID NO: 1562130
gcaucaggccuggaaauuc

SEQ ID NO: 1724378 - RNA, 19 nt, Artificial Sequence
  Description of Artificial Sequence: Synthetic oligonucleotide
  Antisense strand to SEQ ID NO: 1724377
gaauuuccaggccugaugc

SEQ ID NO: 1724379 - RNA, 19 nt, Artificial Sequence
  Description of Artificial Sequence: Synthetic oligonucleotide
  Sense strand starting at position 1194 of SEQ ID NO: 1562130
aauugugaacuuggaugau

SEQ ID NO: 1724380 - RNA, 19 nt, Artificial Sequence
  Description of Artificial Sequence: Synthetic oligonucleotide
  Antisense strand to SEQ ID NO: 1724379
aucauccaaguucacaauu

SEQ ID NO: 1724381 - RNA, 19 nt, Artificial Sequence
  Description of Artificial Sequence: Synthetic oligonucleotide
  Sense strand starting at position 1206 of SEQ ID NO: 1562130
ggaugauuuccuugugugc

SEQ ID NO: 1724382 - RNA, 19 nt, Artificial Sequence
  Description of Artificial Sequence: Synthetic oligonucleotide
  Antisense strand to SEQ ID NO: 1724381
gcacacaaggaaaucaucc

SEQ ID NO: 1724383 - RNA, 19 nt, Artificial Sequence
  Description of Artificial Sequence: Synthetic oligonucleotide
  Sense strand starting at position 1268 of SEQ ID NO: 1562130
guaugugaacugcauugga

SEQ ID NO: 1724384 - RNA, 19 nt, Artificial Sequence
  Description of Artificial Sequence: Synthetic oligonucleotide
  Antisense strand to SEQ ID NO: 1724383
uccaaugcaguucacauac

SEQ ID NO: 1724385 - RNA, 19 nt, Artificial Sequence
  Description of Artificial Sequence: Synthetic oligonucleotide
  Sense strand starting at position 1272 of SEQ ID NO: 1562130
gugaacugcauuggaugau

SEQ ID NO: 1724386 - RNA, 19 nt, Artificial Sequence
  Description of Artificial Sequence: Synthetic oligonucleotide
  Antisense strand to SEQ ID NO: 1724385
aucauccaaugcaguucac

SEQ ID NO: 1724387 - RNA, 19 nt, Artificial Sequence
  Description of Artificial Sequence: Synthetic oligonucleotide
  Sense strand starting at position 1275 of SEQ ID NO: 1562130
aacugcauuggaugauuga

SEQ ID NO: 1724388 - RNA, 19 nt, Artificial Sequence
  Description of Artificial Sequence: Synthetic oligonucleotide
  Antisense strand to SEQ ID NO: 1724387
ucaaucauccaaugcaguu

SEQ ID NO: 1724389 - RNA, 19 nt, Artificial Sequence
  Description of Artificial Sequence: Synthetic oligonucleotide
  Sense strand starting at position 1278 of SEQ ID NO: 1562130
ugcauuggaugauugacaa

SEQ ID NO: 1724390 - RNA, 19 nt, Artificial Sequence
  Description of Artificial Sequence: Synthetic oligonucleotide
  Antisense strand to SEQ ID NO: 1724389
uugucaaucauccaaugca

SEQ ID NO: 1724391 - RNA, 19 nt, Artificial Sequence
  Description of Artificial Sequence: Synthetic oligonucleotide
  Sense strand starting at position 2393 of SEQ ID NO: 1562130
ggaacuguccuccaacacu

SEQ ID NO: 1724392 - RNA, 19 nt, Artificial Sequence
  Description of Artificial Sequence: Synthetic oligonucleotide
  Antisense strand to SEQ ID NO: 1724391
aguguuggaggacaguucc

SEQ ID NO: 1724393 - RNA, 19 nt, Artificial Sequence
  Description of Artificial Sequence: Synthetic oligonucleotide
  Sense strand starting at position 2522 of SEQ ID NO: 1562130
agaacccagucaucuguaa

SEQ ID NO: 1724394 - RNA, 19 nt, Artificial Sequence
  Description of Artificial Sequence: Synthetic oligonucleotide
  Antisense strand to SEQ ID NO: 1724393
uuacagaugacuggguucu

SEQ ID NO: 1724395 - RNA, 19 nt, Artificial Sequence
  Description of Artificial Sequence: Synthetic oligonucleotide
  Sense strand starting at position 2526 of SEQ ID NO: 1562130
cccagucaucuguaagauc

SEQ ID NO: 1724396 - RNA, 19 nt, Artificial Sequence
  Description of Artificial Sequence: Synthetic oligonucleotide
  Antisense strand to SEQ ID NO: 1724395
gaucuuacagaugacuggg

SEQ ID NO: 1724397 - RNA, 19 nt, Artificial Sequence
  Description of Artificial Sequence: Synthetic oligonucleotide
  Sense strand starting at position 2537 of SEQ ID NO: 1562130
guaagaucaucugccucaa

SEQ ID NO: 1724398 - RNA, 19 nt, Artificial Sequence
  Description of Artificial Sequence: Synthetic oligonucleotide
  Antisense strand to SEQ ID NO: 1724397
uugaggcagaugaucuuac

SEQ ID NO: 1724399 - RNA, 19 nt, Artificial Sequence
  Description of Artificial Sequence: Synthetic oligonucleotide
  Sense strand starting at position 2704 of SEQ ID NO: 1562130
ucaucagaugucuguaaag

SEQ ID NO: 1724400 - RNA, 19 nt, Artificial Sequence
  Description of Artificial Sequence: Synthetic oligonucleotide
  Antisense strand to SEQ ID NO: 1724399
cuuuacagacaucugauga

SEQ ID NO: 1724401 - RNA, 19 nt, Artificial Sequence
  Description of Artificial Sequence: Synthetic oligonucleotide
  Sense strand starting at position 2706 of SEQ ID NO: 1562130
aucagaugucuguaaagca

SEQ ID NO: 1724402 - RNA, 19 nt, Artificial Sequence
  Description of Artificial Sequence: Synthetic oligonucleotide
  Antisense strand to SEQ ID NO: 1724401
ugcuuuacagacaucugau

SEQ ID NO: 1724403 - RNA, 19 nt, Artificial Sequence
  Description of Artificial Sequence: Synthetic oligonucleotide
  Sense strand starting at position 2731 of SEQ ID NO: 1562130
ggaauaugaaaugguuguu

SEQ ID NO: 1724404 - RNA, 19 nt, Artificial Sequence
  Description of Artificial Sequence: Synthetic oligonucleotide
  Antisense strand to SEQ ID NO: 1724403
aacaaccauuucauauucc

SEQ ID NO: 1724405 - RNA, 19 nt, Artificial Sequence
  Description of Artificial Sequence: Synthetic oligonucleotide
  Sense strand starting at position 2734 of SEQ ID NO: 1562130
auaugaaaugguuguuaag

SEQ ID NO: 1724406 - RNA, 19 nt, Artificial Sequence
  Description of Artificial Sequence: Synthetic oligonucleotide
  Antisense strand to SEQ ID NO: 1724405
cuuaacaaccauuucauau

SEQ ID NO: 1724407 - RNA, 19 nt, Artificial Sequence
  Description of Artificial Sequence: Synthetic oligonucleotide
  Sense strand starting at position 2736 of SEQ ID NO: 1562130
augaaaugguuguuaagag

SEQ ID NO: 1724408 - RNA, 19 nt, Artificial Sequence
  Description of Artificial Sequence: Synthetic oligonucleotide
  Antisense strand to SEQ ID NO: 1724407
cucuuaacaaccauuucau

SEQ ID NO: 1724409 - RNA, 19 nt, Artificial Sequence
  Description of Artificial Sequence: Synthetic oligonucleotide
  Sense strand starting at position 2937 of SEQ ID NO: 1562130
ucugaauucuggcuauaac

SEQ ID NO: 1724410 - RNA, 19 nt, Artificial Sequence
  Description of Artificial Sequence: Synthetic oligonucleotide
  Antisense strand to SEQ ID NO: 1724409
guuauagccagaauucaga

SEQ ID NO: 1724411 - RNA, 19 nt, Artificial Sequence
  Description of Artificial Sequence: Synthetic oligonucleotide
  Sense strand starting at position 2938 of SEQ ID NO: 1562130
cugaauucuggcuauaacu

SEQ ID NO: 1724412 - RNA, 19 nt, Artificial Sequence
  Description of Artificial Sequence: Synthetic oligonucleotide
  Antisense strand to SEQ ID NO: 1724411
aguuauagccagaauucag

SEQ ID NO: 1724413 - RNA, 19 nt, Artificial Sequence
  Description of Artificial Sequence: Synthetic oligonucleotide
  Sense strand starting at position 2977 of SEQ ID NO: 1562130
guagcugucaaauaaguug

SEQ ID NO: 1724414 - RNA, 19 nt, Artificial Sequence
  Description of Artificial Sequence: Synthetic oligonucleotide
  Antisense strand to SEQ ID NO: 1724413
caacuuauuugacagcuac

SEQ ID NO: 1724415 - RNA, 19 nt, Artificial Sequence
  Description of Artificial Sequence: Synthetic oligonucleotide
  Sense strand starting at position 3204 of SEQ ID NO: 1562130
gaacaugcaccugagugua

SEQ ID NO: 1724416 - RNA, 19 nt, Artificial Sequence
  Description of Artificial Sequence: Synthetic oligonucleotide
  Antisense strand to SEQ ID NO: 1724415
uacacucaggugcauguuc

SEQ ID NO: 1724417 - RNA, 19 nt, Artificial Sequence
  Description of Artificial Sequence: Synthetic oligonucleotide
  Sense strand starting at position 3216 of SEQ ID NO: 1562130
gaguguagagaauguuaag

SEQ ID NO: 1724418 - RNA, 19 nt, Artificial Sequence
  Description of Artificial Sequence: Synthetic oligonucleotide
  Antisense strand to SEQ ID NO: 1724417
cuuaacauucucuacacuc

SEQ ID NO: 1724419 - RNA, 19 nt, Artificial Sequence
  Description of Artificial Sequence: Synthetic oligonucleotide
  Sense strand starting at position 3429 of SEQ ID NO: 1562130
uguccuaucucagucaaag

SEQ ID NO: 1724420 - RNA, 19 nt, Artificial Sequence
  Description of Artificial Sequence: Synthetic oligonucleotide
  Antisense strand to SEQ ID NO: 1724419
cuuugacugagauaggaca

SEQ ID NO: 1724421 - RNA, 19 nt, Artificial Sequence
  Description of Artificial Sequence: Synthetic oligonucleotide
  Sense strand starting at position 3536 of SEQ ID NO: 1562130
augagcaucucagcaauua

SEQ ID NO: 1724422 - RNA, 19 nt, Artificial Sequence
  Description of Artificial Sequence: Synthetic oligonucleotide
  Antisense strand to SEQ ID NO: 1724421
uaauugcugagaugcucau

SEQ ID NO: 1724423 - RNA, 19 nt, Artificial Sequence
  Description of Artificial Sequence: Synthetic oligonucleotide
  Sense strand starting at position 3537 of SEQ ID NO: 1562130
ugagcaucucagcaauuag

SEQ ID NO: 1724424 - RNA, 19 nt, Artificial Sequence
  Description of Artificial Sequence: Synthetic oligonucleotide
  Antisense strand to SEQ ID NO: 1724423
cuaauugcugagaugcuca

SEQ ID NO: 1724425 - RNA, 19 nt, Artificial Sequence
  Description of Artificial Sequence: Synthetic oligonucleotide
  Sense strand starting at position 3627 of SEQ ID NO: 1562130
uagccaagaguugauaacu

SEQ ID NO: 1724426 - RNA, 19 nt, Artificial Sequence
  Description of Artificial Sequence: Synthetic oligonucleotide
  Antisense strand to SEQ ID NO: 1724425
aguuaucaacucuuggcua

SEQ ID NO: 1724427 - RNA, 19 nt, Artificial Sequence
  Description of Artificial Sequence: Synthetic oligonucleotide
  Sense strand starting at position 3632 of SEQ ID NO: 1562130
aagaguugauaacuguuaa

SEQ ID NO: 1724428 - RNA, 19 nt, Artificial Sequence
  Description of Artificial Sequence: Synthetic oligonucleotide
  Antisense strand to SEQ ID NO: 1724427
uuaacaguuaucaacucuu

SEQ ID NO: 1724429 - RNA, 19 nt, Artificial Sequence
  Description of Artificial Sequence: Synthetic oligonucleotide
  Sense strand starting at position 3732 of SEQ ID NO: 1562130
cugcauguuguguucuauu

SEQ ID NO: 1724430 - RNA, 19 nt, Artificial Sequence
  Description of Artificial Sequence: Synthetic oligonucleotide
  Antisense strand to SEQ ID NO: 1724429
aauagaacacaacaugcag

SEQ ID NO: 1724431 - RNA, 19 nt, Artificial Sequence
  Description of Artificial Sequence: Synthetic oligonucleotide
  Sense strand starting at position 3771 of SEQ ID NO: 1562130
uguacauuacacugugaga

SEQ ID NO: 1724432 - RNA, 19 nt, Artificial Sequence
  Description of Artificial Sequence: Synthetic oligonucleotide
  Antisense strand to SEQ ID NO: 1724431
ucucacaguguaauguaca

SEQ ID NO: 1724433 - RNA, 19 nt, Artificial Sequence
  Description of Artificial Sequence: Synthetic oligonucleotide
  Sense strand starting at position 3773 of SEQ ID NO: 1562130
uacauuacacugugagaag

SEQ ID NO: 1724434 - RNA, 19 nt, Artificial Sequence
  Description of Artificial Sequence: Synthetic oligonucleotide
  Antisense strand to SEQ ID NO: 1724433
cuucucacaguguaaugua

SEQ ID NO: 1724435 - RNA, 19 nt, Artificial Sequence
  Description of Artificial Sequence: Synthetic oligonucleotide
  Sense strand starting at position 3900 of SEQ ID NO: 1562130
ccaauaacccguuaaugau

SEQ ID NO: 1724436 - RNA, 19 nt, Artificial Sequence
  Description of Artificial Sequence: Synthetic oligonucleotide
  Antisense strand to SEQ ID NO: 1724435
aucauuaacggguuauugg

SEQ ID NO: 1724437 - RNA, 19 nt, Artificial Sequence
  Description of Artificial Sequence: Synthetic oligonucleotide
  Sense strand starting at position 3944 of SEQ ID NO: 1562130
agaagccaguuauugagaa

SEQ ID NO: 1724438 - RNA, 19 nt, Artificial Sequence
  Description of Artificial Sequence: Synthetic oligonucleotide
  Antisense strand to SEQ ID NO: 1724437
uucucaauaacuggcuucu

SEQ ID NO: 1724439 - RNA, 19 nt, Artificial Sequence
  Description of Artificial Sequence: Synthetic oligonucleotide
  Sense strand starting at position 127 of SEQ ID NO: 1562131
agggacaguagcugauaau

SEQ ID NO: 1724440 - RNA, 19 nt, Artificial Sequence
  Description of Artificial Sequence: Synthetic oligonucleotide
  Antisense strand to SEQ ID NO: 1724439
auuaucagcuacugucccu

SEQ ID NO: 1724441 - RNA, 19 nt, Artificial Sequence
  Description of Artificial Sequence: Synthetic oligonucleotide
  Sense strand starting at position 130 of SEQ ID NO: 1562131
gacaguagcugauaauuaa

SEQ ID NO: 1724442 - RNA, 19 nt, Artificial Sequence
  Description of Artificial Sequence: Synthetic oligonucleotide
  Antisense strand to SEQ ID NO: 1724441
uuaauuaucagcuacuguc

SEQ ID NO: 1724443 - RNA, 19 nt, Artificial Sequence
  Description of Artificial Sequence: Synthetic oligonucleotide
  Sense strand starting at position 134 of SEQ ID NO: 1562131
guagcugauaauuaagguu

SEQ ID NO: 1724444 - RNA, 19 nt, Artificial Sequence
  Description of Artificial Sequence: Synthetic oligonucleotide
  Antisense strand to SEQ ID NO: 1724443
aaccuuaauuaucagcuac

SEQ ID NO: 1724445 - RNA, 19 nt, Artificial Sequence
  Description of Artificial Sequence: Synthetic oligonucleotide
  Sense strand starting at position 172 of SEQ ID NO: 1562131
ucacuauguaaucguggga

SEQ ID NO: 1724446 - RNA, 19 nt, Artificial Sequence
  Description of Artificial Sequence: Synthetic oligonucleotide
  Antisense strand to SEQ ID NO: 1724445
ucccacgauuacauaguga

SEQ ID NO: 1724447 - RNA, 19 nt, Artificial Sequence
  Description of Artificial Sequence: Synthetic oligonucleotide
  Sense strand starting at position 226 of SEQ ID NO: 1562131
ccugcaauaugggaauuau

SEQ ID NO: 1724448 - RNA, 19 nt, Artificial Sequence
  Description of Artificial Sequence: Synthetic oligonucleotide
  Antisense strand to SEQ ID NO: 1724447
auaauucccauauugcagg

SEQ ID NO: 1724449 - RNA, 19 nt, Artificial Sequence
  Description of Artificial Sequence: Synthetic oligonucleotide
  Sense strand starting at position 279 of SEQ ID NO: 1562131
aguggaucaugagacuagu

SEQ ID NO: 1724450 - RNA, 19 nt, Artificial Sequence
  Description of Artificial Sequence: Synthetic oligonucleotide
  Antisense strand to SEQ ID NO: 1724449
acuagucucaugauccacu

SEQ ID NO: 1724451 - RNA, 19 nt, Artificial Sequence
  Description of Artificial Sequence: Synthetic oligonucleotide
  Sense strand starting at position 423 of SEQ ID NO: 1562131
guauguauucaagguggag

SEQ ID NO: 1724452 - RNA, 19 nt, Artificial Sequence
  Description of Artificial Sequence: Synthetic oligonucleotide
  Antisense strand to SEQ ID NO: 1724451
cuccaccuugaauacauac

SEQ ID NO: 1724453 - RNA, 19 nt, Artificial Sequence
  Description of Artificial Sequence: Synthetic oligonucleotide
  Sense strand starting at position 554 of SEQ ID NO: 1562131
auguuuaguugcuuuggga

SEQ ID NO: 1724454 - RNA, 19 nt, Artificial Sequence
  Description of Artificial Sequence: Synthetic oligonucleotide
  Antisense strand to SEQ ID NO: 1724453
ucccaaagcaacuaaacau

SEQ ID NO: 1724455 - RNA, 19 nt, Artificial Sequence
  Description of Artificial Sequence: Synthetic oligonucleotide
  Sense strand starting at position 601 of SEQ ID NO: 1562131
cgcuaacagcaguaauuaa

SEQ ID NO: 1724456 - RNA, 19 nt, Artificial Sequence
  Description of Artificial Sequence: Synthetic oligonucleotide
  Antisense strand to SEQ ID NO: 1724455
uuaauuacugcuguuagcg

SEQ ID NO: 1724457 - RNA, 19 nt, Artificial Sequence
  Description of Artificial Sequence: Synthetic oligonucleotide
  Sense strand starting at position 612 of SEQ ID NO: 1562131
guaauuaacuaggcaccua

SEQ ID NO: 1724458 - RNA, 19 nt, Artificial Sequence
  Description of Artificial Sequence: Synthetic oligonucleotide
  Antisense strand to SEQ ID NO: 1724457
uaggugccuaguuaauuac

SEQ ID NO: 1724459 - RNA, 19 nt, Artificial Sequence
  Description of Artificial Sequence: Synthetic oligonucleotide
  Sense strand starting at position 811 of SEQ ID NO: 1562131
ggcugaaagcucuauccug

SEQ ID NO: 1724460 - RNA, 19 nt, Artificial Sequence
  Description of Artificial Sequence: Synthetic oligonucleotide
  Antisense strand to SEQ ID NO: 1724459
caggauagagcuuucagcc

SEQ ID NO: 1724461 - RNA, 19 nt, Artificial Sequence
  Description of Artificial Sequence: Synthetic oligonucleotide
  Sense strand starting at position 819 of SEQ ID NO: 1562131
gcucuauccugugcaaggu

SEQ ID NO: 1724462 - RNA, 19 nt, Artificial Sequence
  Description of Artificial Sequence: Synthetic oligonucleotide
  Antisense strand to SEQ ID NO: 1724461
accuugcacaggauagagc

SEQ ID NO: 1724463 - RNA, 19 nt, Artificial Sequence
  Description of Artificial Sequence: Synthetic oligonucleotide
  Sense strand starting at position 890 of SEQ ID NO: 1562131
cuuccuggguccuuagauu

SEQ ID NO: 1724464 - RNA, 19 nt, Artificial Sequence
  Description of Artificial Sequence: Synthetic oligonucleotide
  Antisense strand to SEQ ID NO: 1724463
aaucuaaggacccaggaag

SEQ ID NO: 1724465 - RNA, 19 nt, Artificial Sequence
  Description of Artificial Sequence: Synthetic oligonucleotide
  Sense strand starting at position 901 of SEQ ID NO: 1562131
cuuagauuccuagguccuu

SEQ ID NO: 1724466 - RNA, 19 nt, Artificial Sequence
  Description of Artificial Sequence: Synthetic oligonucleotide
  Antisense strand to SEQ ID NO: 1724465
aaggaccuaggaaucuaag

SEQ ID NO: 1724467 - RNA, 19 nt, Artificial Sequence
  Description of Artificial Sequence: Synthetic oligonucleotide
  Sense strand starting at position 1016 of SEQ ID NO: 1562131
cuugguugcuucucaggga

SEQ ID NO: 1724468 - RNA, 19 nt, Artificial Sequence
  Description of Artificial Sequence: Synthetic oligonucleotide
  Antisense strand to SEQ ID NO: 1724467
ucccugagaagcaaccaag

SEQ ID NO: 1724469 - RNA, 19 nt, Artificial Sequence
  Description of Artificial Sequence: Synthetic oligonucleotide
  Sense strand starting at position 1105 of SEQ ID NO: 1562131
cccucuuguccuugauguu

SEQ ID NO: 1724470 - RNA, 19 nt, Artificial Sequence
  Description of Artificial Sequence: Synthetic oligonucleotide
  Antisense strand to SEQ ID NO: 1724469
aacaucaaggacaagaggg

SEQ ID NO: 1724471 - RNA, 19 nt, Artificial Sequence
  Description of Artificial Sequence: Synthetic oligonucleotide
  Sense strand starting at position 2270 of SEQ ID NO: 1562131
gacuccaaggcuugaguuu

SEQ ID NO: 1724472 - RNA, 19 nt, Artificial Sequence
  Description of Artificial Sequence: Synthetic oligonucleotide
  Antisense strand to SEQ ID NO: 1724471
aaacucaagccuuggaguc

SEQ ID NO: 1724473 - RNA, 19 nt, Artificial Sequence
  Description of Artificial Sequence: Synthetic oligonucleotide
  Sense strand starting at position 2271 of SEQ ID NO: 1562131
acuccaaggcuugaguuua

SEQ ID NO: 1724474 - RNA, 19 nt, Artificial Sequence
  Description of Artificial Sequence: Synthetic oligonucleotide
  Antisense strand to SEQ ID NO: 1724473
uaaacucaagccuuggagu

SEQ ID NO: 1724475 - RNA, 19 nt, Artificial Sequence
  Description of Artificial Sequence: Synthetic oligonucleotide
  Sense strand starting at position 2281 of SEQ ID NO: 1562131
uugaguuuaagagguagac

SEQ ID NO: 1724476 - RNA, 19 nt, Artificial Sequence
  Description of Artificial Sequence: Synthetic oligonucleotide
  Antisense strand to SEQ ID NO: 1724475
gucuaccucuuaaacucaa

SEQ ID NO: 1724477 - RNA, 19 nt, Artificial Sequence
  Description of Artificial Sequence: Synthetic oligonucleotide
  Sense strand starting at position 2517 of SEQ ID NO: 1562131
ggaagaaguugguuuccua

SEQ ID NO: 1724478 - RNA, 19 nt, Artificial Sequence
  Description of Artificial Sequence: Synthetic oligonucleotide
  Antisense strand to SEQ ID NO: 1724477
uaggaaaccaacuucuucc

SEQ ID NO: 1724479 - RNA, 19 nt, Artificial Sequence
  Description of Artificial Sequence: Synthetic oligonucleotide
  Sense strand starting at position 2603 of SEQ ID NO: 1562131
guggcuucuaaagaugaca

SEQ ID NO: 1724480 - RNA, 19 nt, Artificial Sequence
  Description of Artificial Sequence: Synthetic oligonucleotide
  Antisense strand to SEQ ID NO: 1724479
ugucaucuuuagaagccac

SEQ ID NO: 1724481 - RNA, 19 nt, Artificial Sequence
  Description of Artificial Sequence: Synthetic oligonucleotide
  Sense strand starting at position 2734 of SEQ ID NO: 1562131
guguucacagucgaguaua

SEQ ID NO: 1724482 - RNA, 19 nt, Artificial Sequence
  Description of Artificial Sequence: Synthetic oligonucleotide
  Antisense strand to SEQ ID NO: 1724481
uauacucgacugugaacac

SEQ ID NO: 1724483 - RNA, 19 nt, Artificial Sequence
  Description of Artificial Sequence: Synthetic oligonucleotide
  Sense strand starting at position 2771 of SEQ ID NO: 1562131
cacuuugaggccuggcaga

SEQ ID NO: 1724484 - RNA, 19 nt, Artificial Sequence
  Description of Artificial Sequence: Synthetic oligonucleotide
  Antisense strand to SEQ ID NO: 1724483
ucugccaggccucaaagug

SEQ ID NO: 1724485 - RNA, 19 nt, Artificial Sequence
  Description of Artificial Sequence: Synthetic oligonucleotide
  Sense strand starting at position 2853 of SEQ ID NO: 1562131
gagacaugguuucuaaucu

SEQ ID NO: 1724486 - RNA, 19 nt, Artificial Sequence
  Description of Artificial Sequence: Synthetic oligonucleotide
  Antisense strand to SEQ ID NO: 1724485
agauuagaaaccaugucuc

SEQ ID NO: 1724487 - RNA, 19 nt, Artificial Sequence
  Description of Artificial Sequence: Synthetic oligonucleotide
  Sense strand starting at position 3016 of SEQ ID NO: 1562131
gguaaacugugacucccua

SEQ ID NO: 1724488 - RNA, 19 nt, Artificial Sequence
  Description of Artificial Sequence: Synthetic oligonucleotide
  Antisense strand to SEQ ID NO: 1724487
uagggagucacaguuuacc

SEQ ID NO: 1724489 - RNA, 19 nt, Artificial Sequence
  Description of Artificial Sequence: Synthetic oligonucleotide
  Sense strand starting at position 3061 of SEQ ID NO: 1562131
agugaaugcuuacucuuac

SEQ ID NO: 1724490 - RNA, 19 nt, Artificial Sequence
  Description of Artificial Sequence: Synthetic oligonucleotide
  Antisense strand to SEQ ID NO: 1724489
guaagaguaagcauucacu

SEQ ID NO: 1724491 - RNA, 19 nt, Artificial Sequence
  Description of Artificial Sequence: Synthetic oligonucleotide
  Sense strand starting at position 3099 of SEQ ID NO: 1562131
uuccaaguguuaucuuuac

SEQ ID NO: 1724492 - RNA, 19 nt, Artificial Sequence
  Description of Artificial Sequence: Synthetic oligonucleotide
  Antisense strand to SEQ ID NO: 1724491
guaaagauaacacuuggaa

SEQ ID NO: 1724493 - RNA, 19 nt, Artificial Sequence
  Description of Artificial Sequence: Synthetic oligonucleotide
  Sense strand starting at position 3319 of SEQ ID NO: 1562131
gucuaauuggccuagguca

SEQ ID NO: 1724494 - RNA, 19 nt, Artificial Sequence
  Description of Artificial Sequence: Synthetic oligonucleotide
  Antisense strand to SEQ ID NO: 1724493
ugaccuaggccaauuagac

SEQ ID NO: 1724495 - RNA, 19 nt, Artificial Sequence
  Description of Artificial Sequence: Synthetic oligonucleotide
  Sense strand starting at position 3334 of SEQ ID NO: 1562131
gucacacauuuaugaguga

SEQ ID NO: 1724496 - RNA, 19 nt, Artificial Sequence
  Description of Artificial Sequence: Synthetic oligonucleotide
  Antisense strand to SEQ ID NO: 1724495
ucacucauaaaugugugac

SEQ ID NO: 1724497 - RNA, 19 nt, Artificial Sequence
  Description of Artificial Sequence: Synthetic oligonucleotide
  Sense strand starting at position 3435 of SEQ ID NO: 1562131
agagguaaagcaugauugu

SEQ ID NO: 1724498 - RNA, 19 nt, Artificial Sequence
  Description of Artificial Sequence: Synthetic oligonucleotide
  Antisense strand to SEQ ID NO: 1724497
acaaucaugcuuuaccucu

SEQ ID NO: 1724499 - RNA, 19 nt, Artificial Sequence
  Description of Artificial Sequence: Synthetic oligonucleotide
  Sense strand starting at position 3436 of SEQ ID NO: 1562131
gagguaaagcaugauugua

SEQ ID NO: 1724500 - RNA, 19 nt, Artificial Sequence
  Description of Artificial Sequence: Synthetic oligonucleotide
  Antisense strand to SEQ ID NO: 1724499
uacaaucaugcuuuaccuc

SEQ ID NO: 1724501 - RNA, 19 nt, Artificial Sequence
  Description of Artificial Sequence: Synthetic oligonucleotide
  Sense strand starting at position 3438 of SEQ ID NO: 1562131
gguaaagcaugauuguaau

SEQ ID NO: 1724502 - RNA, 19 nt, Artificial Sequence
  Description of Artificial Sequence: Synthetic oligonucleotide
  Antisense strand to SEQ ID NO: 1724501
auuacaaucaugcuuuacc

SEQ ID NO: 1724503 - RNA, 19 nt, Artificial Sequence
  Description of Artificial Sequence: Synthetic oligonucleotide
  Sense strand starting at position 3444 of SEQ ID NO: 1562131
gcaugauuguaaucugaaa

SEQ ID NO: 1724504 - RNA, 19 nt, Artificial Sequence
  Description of Artificial Sequence: Synthetic oligonucleotide
  Antisense strand to SEQ ID NO: 1724503
uuucagauuacaaucaugc

SEQ ID NO: 1724505 - RNA, 19 nt, Artificial Sequence
  Description of Artificial Sequence: Synthetic oligonucleotide
  Sense strand starting at position 3520 of SEQ ID NO: 1562131
ccauuccuagcugggauau

SEQ ID NO: 1724506 - RNA, 19 nt, Artificial Sequence
  Description of Artificial Sequence: Synthetic oligonucleotide
  Antisense strand to SEQ ID NO: 1724505
auaucccagcuaggaaugg

SEQ ID NO: 1724507 - RNA, 19 nt, Artificial Sequence
  Description of Artificial Sequence: Synthetic oligonucleotide
  Sense strand starting at position 3530 of SEQ ID NO: 1562131
cugggauauguugagcaau

SEQ ID NO: 1724508 - RNA, 19 nt, Artificial Sequence
  Description of Artificial Sequence: Synthetic oligonucleotide
  Antisense strand to SEQ ID NO: 1724507
auugcucaacauaucccag

SEQ ID NO: 1724509 - RNA, 19 nt, Artificial Sequence
  Description of Artificial Sequence: Synthetic oligonucleotide
  Sense strand starting at position 3532 of SEQ ID NO: 1562131
gggauauguugagcaauaa

SEQ ID NO: 1724510 - RNA, 19 nt, Artificial Sequence
  Description of Artificial Sequence: Synthetic oligonucleotide
  Antisense strand to SEQ ID NO: 1724509
uuauugcucaacauauccc

SEQ ID NO: 1724511 - RNA, 19 nt, Artificial Sequence
  Description of Artificial Sequence: Synthetic oligonucleotide
  Sense strand starting at position 3558 of SEQ ID NO: 1562131
ggacuacaccaguguuuag

SEQ ID NO: 1724512 - RNA, 19 nt, Artificial Sequence
  Description of Artificial Sequence: Synthetic oligonucleotide
  Antisense strand to SEQ ID NO: 1724511
cuaaacacugguguagucc

SEQ ID NO: 1724513 - RNA, 19 nt, Artificial Sequence
  Description of Artificial Sequence: Synthetic oligonucleotide
  Sense strand starting at position 3570 of SEQ ID NO: 1562131
uguuuagccucccugaacu

SEQ ID NO: 1724514 - RNA, 19 nt, Artificial Sequence
  Description of Artificial Sequence: Synthetic oligonucleotide
  Antisense strand to SEQ ID NO: 1724513
aguucagggaggcuaaaca

SEQ ID NO: 1724515 - RNA, 19 nt, Artificial Sequence
  Description of Artificial Sequence: Synthetic oligonucleotide
  Sense strand starting at position 3965 of SEQ ID NO: 1562131
uuaaguuagagugguaggu

SEQ ID NO: 1724516 - RNA, 19 nt, Artificial Sequence
  Description of Artificial Sequence: Synthetic oligonucleotide
  Antisense strand to SEQ ID NO: 1724515
accuaccacucuaacuuaa

SEQ ID NO: 1724517 - RNA, 19 nt, Artificial Sequence
  Description of Artificial Sequence: Synthetic oligonucleotide
  Sense strand starting at position 3971 of SEQ ID NO: 1562131
uagagugguaggugucaaa

SEQ ID NO: 1724518 - RNA, 19 nt, Artificial Sequence
  Description of Artificial Sequence: Synthetic oligonucleotide
  Antisense strand to SEQ ID NO: 1724517
uuugacaccuaccacucua

SEQ ID NO: 1724519 - RNA, 19 nt, Artificial Sequence
  Description of Artificial Sequence: Synthetic oligonucleotide
  Sense strand starting at position 35 of SEQ ID NO: 1562132
ggucgggugcuugagaacu

SEQ ID NO: 1724520 - RNA, 19 nt, Artificial Sequence
  Description of Artificial Sequence: Synthetic oligonucleotide
  Antisense strand to SEQ ID NO: 1724519
aguucucaagcacccgacc

SEQ ID NO: 1724521 - RNA, 19 nt, Artificial Sequence
  Description of Artificial Sequence: Synthetic oligonucleotide
  Sense strand starting at position 41 of SEQ ID NO: 1562132
gugcuugagaacugauuga

SEQ ID NO: 1724522 - RNA, 19 nt, Artificial Sequence
  Description of Artificial Sequence: Synthetic oligonucleotide
  Antisense strand to SEQ ID NO: 1724521
ucaaucaguucucaagcac

SEQ ID NO: 1724523 - RNA, 19 nt, Artificial Sequence
  Description of Artificial Sequence: Synthetic oligonucleotide
  Sense strand starting at position 297 of SEQ ID NO: 1562132
uggaaauaagugggaguca

SEQ ID NO: 1724524 - RNA, 19 nt, Artificial Sequence
  Description of Artificial Sequence: Synthetic oligonucleotide
  Antisense strand to SEQ ID NO: 1724523
ugacucccacuuauuucca

SEQ ID NO: 1724525 - RNA, 19 nt, Artificial Sequence
  Description of Artificial Sequence: Synthetic oligonucleotide
  Sense strand starting at position 298 of SEQ ID NO: 1562132
ggaaauaagugggagucaa

SEQ ID NO: 1724526 - RNA, 19 nt, Artificial Sequence
  Description of Artificial Sequence: Synthetic oligonucleotide
  Antisense strand to SEQ ID NO: 1724525
uugacucccacuuauuucc

SEQ ID NO: 1724527 - RNA, 19 nt, Artificial Sequence
  Description of Artificial Sequence: Synthetic oligonucleotide
  Sense strand starting at position 310 of SEQ ID NO: 1562132
gagucaagauuggucugga

SEQ ID NO: 1724528 - RNA, 19 nt, Artificial Sequence
  Description of Artificial Sequence: Synthetic oligonucleotide
  Antisense strand to SEQ ID NO: 1724527
uccagaccaaucuugacuc

SEQ ID NO: 1724529 - RNA, 19 nt, Artificial Sequence
  Description of Artificial Sequence: Synthetic oligonucleotide
  Sense strand starting at position 311 of SEQ ID NO: 1562132
agucaagauuggucuggau

SEQ ID NO: 1724530 - RNA, 19 nt, Artificial Sequence
  Description of Artificial Sequence: Synthetic oligonucleotide
  Antisense strand to SEQ ID NO: 1724529
auccagaccaaucuugacu

SEQ ID NO: 1724531 - RNA, 19 nt, Artificial Sequence
  Description of Artificial Sequence: Synthetic oligonucleotide
  Sense strand starting at position 371 of SEQ ID NO: 1562132
ucucaaguuugacccagau

SEQ ID NO: 1724532 - RNA, 19 nt, Artificial Sequence
  Description of Artificial Sequence: Synthetic oligonucleotide
  Antisense strand to SEQ ID NO: 1724531
aucugggucaaacuugaga

SEQ ID NO: 1724533 - RNA, 19 nt, Artificial Sequence
  Description of Artificial Sequence: Synthetic oligonucleotide
  Sense strand starting at position 466 of SEQ ID NO: 1562132
ccaguucucuuagucucaa

SEQ ID NO: 1724534 - RNA, 19 nt, Artificial Sequence
  Description of Artificial Sequence: Synthetic oligonucleotide
  Antisense strand to SEQ ID NO: 1724533
uugagacuaagagaacugg

SEQ ID NO: 1724535 - RNA, 19 nt, Artificial Sequence
  Description of Artificial Sequence: Synthetic oligonucleotide
  Sense strand starting at position 538 of SEQ ID NO: 1562132
cuaagucuugugugaggau

SEQ ID NO: 1724536 - RNA, 19 nt, Artificial Sequence
  Description of Artificial Sequence: Synthetic oligonucleotide
  Antisense strand to SEQ ID NO: 1724535
auccucacacaagacuuag

SEQ ID NO: 1724537 - RNA, 19 nt, Artificial Sequence
  Description of Artificial Sequence: Synthetic oligonucleotide
  Sense strand starting at position 867 of SEQ ID NO: 1562132
cuccguucugcagacacau

SEQ ID NO: 1724538 - RNA, 19 nt, Artificial Sequence
  Description of Artificial Sequence: Synthetic oligonucleotide
  Antisense strand to SEQ ID NO: 1724537
augugucugcagaacggag

SEQ ID NO: 1724539 - RNA, 19 nt, Artificial Sequence
  Description of Artificial Sequence: Synthetic oligonucleotide
  Sense strand starting at position 1120 of SEQ ID NO: 1562132
acauuuaaugccugcagca

SEQ ID NO: 1724540 - RNA, 19 nt, Artificial Sequence
  Description of Artificial Sequence: Synthetic oligonucleotide
  Antisense strand to SEQ ID NO: 1724539
ugcugcaggcauuaaaugu

SEQ ID NO: 1724541 - RNA, 19 nt, Artificial Sequence
  Description of Artificial Sequence: Synthetic oligonucleotide
  Sense strand starting at position 1136 of SEQ ID NO: 1562132
gcaauucugagaugagagu

SEQ ID NO: 1724542 - RNA, 19 nt, Artificial Sequence
  Description of Artificial Sequence: Synthetic oligonucleotide
  Antisense strand to SEQ ID NO: 1724541
acucucaucucagaauugc

SEQ ID NO: 1724543 - RNA, 19 nt, Artificial Sequence
  Description of Artificial Sequence: Synthetic oligonucleotide
  Sense strand starting at position 1149 of SEQ ID NO: 1562132
gagagugaguucucccacu

SEQ ID NO: 1724544 - RNA, 19 nt, Artificial Sequence
  Description of Artificial Sequence: Synthetic oligonucleotide
  Antisense strand to SEQ ID NO: 1724543
agugggagaacucacucuc

SEQ ID NO: 1724545 - RNA, 19 nt, Artificial Sequence
  Description of Artificial Sequence: Synthetic oligonucleotide
  Sense strand starting at position 1242 of SEQ ID NO: 1562132
cgcuuuaagaaguguggga

SEQ ID NO: 1724546 - RNA, 19 nt, Artificial Sequence
  Description of Artificial Sequence: Synthetic oligonucleotide
  Antisense strand to SEQ ID NO: 1724545
ucccacacuucuuaaagcg

SEQ ID NO: 1724547 - RNA, 19 nt, Artificial Sequence
  Description of Artificial Sequence: Synthetic oligonucleotide
  Sense strand starting at position 1244 of SEQ ID NO: 1562132
cuuuaagaagugugggagu

SEQ ID NO: 1724548 - RNA, 19 nt, Artificial Sequence
  Description of Artificial Sequence: Synthetic oligonucleotide
  Antisense strand to SEQ ID NO: 1724547
acucccacacuucuuaaag

SEQ ID NO: 1724549 - RNA, 19 nt, Artificial Sequence
  Description of Artificial Sequence: Synthetic oligonucleotide
  Sense strand starting at position 1246 of SEQ ID NO: 1562132
uuaagaagugugggaguuu

SEQ ID NO: 1724550 - RNA, 19 nt, Artificial Sequence
  Description of Artificial Sequence: Synthetic oligonucleotide
  Antisense strand to SEQ ID NO: 1724549
aaacucccacacuucuuaa

SEQ ID NO: 1724551 - RNA, 19 nt, Artificial Sequence
  Description of Artificial Sequence: Synthetic oligonucleotide
  Sense strand starting at position 1255 of SEQ ID NO: 1562132
gugggaguuucagcuggau

SEQ ID NO: 1724552 - RNA, 19 nt, Artificial Sequence
  Description of Artificial Sequence: Synthetic oligonucleotide
  Antisense strand to SEQ ID NO: 1724551
auccagcugaaacucccac

SEQ ID NO: 1724553 - RNA, 19 nt, Artificial Sequence
  Description of Artificial Sequence: Synthetic oligonucleotide
  Sense strand starting at position 1258 of SEQ ID NO: 1562132
ggaguuucagcuggaucaa

SEQ ID NO: 1724554 - RNA, 19 nt, Artificial Sequence
  Description of Artificial Sequence: Synthetic oligonucleotide
  Antisense strand to SEQ ID NO: 1724553
uugauccagcugaaacucc

SEQ ID NO: 1724555 - RNA, 19 nt, Artificial Sequence
  Description of Artificial Sequence: Synthetic oligonucleotide
  Sense strand starting at position 2175 of SEQ ID NO: 1562132
gcgcguacccuccuugaau

SEQ ID NO: 1724556 - RNA, 19 nt, Artificial Sequence
  Description of Artificial Sequence: Synthetic oligonucleotide
  Antisense strand to SEQ ID NO: 1724555
auucaaggaggguacgcgc

SEQ ID NO: 1724557 - RNA, 19 nt, Artificial Sequence
  Description of Artificial Sequence: Synthetic oligonucleotide
  Sense strand starting at position 2321 of SEQ ID NO: 1562132
gaagaugcgugauuugggu

SEQ ID NO: 1724558 - RNA, 19 nt, Artificial Sequence
  Description of Artificial Sequence: Synthetic oligonucleotide
  Antisense strand to SEQ ID NO: 1724557
acccaaaucacgcaucuuc

SEQ ID NO: 1724559 - RNA, 19 nt, Artificial Sequence
  Description of Artificial Sequence: Synthetic oligonucleotide
  Sense strand starting at position 2326 of SEQ ID NO: 1562132
ugcgugauuuggguugguu

SEQ ID NO: 1724560 - RNA, 19 nt, Artificial Sequence
  Description of Artificial Sequence: Synthetic oligonucleotide
  Antisense strand to SEQ ID NO: 1724559
aaccaacccaaaucacgca

SEQ ID NO: 1724561 - RNA, 19 nt, Artificial Sequence
  Description of Artificial Sequence: Synthetic oligonucleotide
  Sense strand starting at position 2465 of SEQ ID NO: 1562132
acgaaaugaucacuuacau

SEQ ID NO: 1724562 - RNA, 19 nt, Artificial Sequence
  Description of Artificial Sequence: Synthetic oligonucleotide
  Antisense strand to SEQ ID NO: 1724561
auguaagugaucauuucgu

SEQ ID NO: 1724563 - RNA, 19 nt, Artificial Sequence
  Description of Artificial Sequence: Synthetic oligonucleotide
  Sense strand starting at position 2486 of SEQ ID NO: 1562132
ugauuauuguuucuacagu

SEQ ID NO: 1724564 - RNA, 19 nt, Artificial Sequence
  Description of Artificial Sequence: Synthetic oligonucleotide
  Antisense strand to SEQ ID NO: 1724563
acuguagaaacaauaauca

SEQ ID NO: 1724565 - RNA, 19 nt, Artificial Sequence
  Description of Artificial Sequence: Synthetic oligonucleotide
  Sense strand starting at position 2580 of SEQ ID NO: 1562132
gggugaguuacuuggcuua

SEQ ID NO: 1724566 - RNA, 19 nt, Artificial Sequence
  Description of Artificial Sequence: Synthetic oligonucleotide
  Antisense strand to SEQ ID NO: 1724565
uaagccaaguaacucaccc

SEQ ID NO: 1724567 - RNA, 19 nt, Artificial Sequence
  Description of Artificial Sequence: Synthetic oligonucleotide
  Sense strand starting at position 2582 of SEQ ID NO: 1562132
gugaguuacuuggcuuaac

SEQ ID NO: 1724568 - RNA, 19 nt, Artificial Sequence
  Description of Artificial Sequence: Synthetic oligonucleotide
  Antisense strand to SEQ ID NO: 1724567
guuaagccaaguaacucac

SEQ ID NO: 1724569 - RNA, 19 nt, Artificial Sequence
  Description of Artificial Sequence: Synthetic oligonucleotide
  Sense strand starting at position 2611 of SEQ ID NO: 1562132
gccagagguuucuuucuuu

SEQ ID NO: 1724570 - RNA, 19 nt, Artificial Sequence
  Description of Artificial Sequence: Synthetic oligonucleotide
  Antisense strand to SEQ ID NO: 1724569
aaagaaagaaaccucuggc

SEQ ID NO: 1724571 - RNA, 19 nt, Artificial Sequence
  Description of Artificial Sequence: Synthetic oligonucleotide
  Sense strand starting at position 3182 of SEQ ID NO: 1562132
acccuuucugaguggcaca

SEQ ID NO: 1724572 - RNA, 19 nt, Artificial Sequence
  Description of Artificial Sequence: Synthetic oligonucleotide
  Antisense strand to SEQ ID NO: 1724571
ugugccacucagaaagggu

SEQ ID NO: 1724573 - RNA, 19 nt, Artificial Sequence
  Description of Artificial Sequence: Synthetic oligonucleotide
  Sense strand starting at position 3372 of SEQ ID NO: 1562132
gcuguaacuggacauuaau

SEQ ID NO: 1724574 - RNA, 19 nt, Artificial Sequence
  Description of Artificial Sequence: Synthetic oligonucleotide
  Antisense strand to SEQ ID NO: 1724573
auuaauguccaguuacagc

SEQ ID NO: 1724575 - RNA, 19 nt, Artificial Sequence
  Description of Artificial Sequence: Synthetic oligonucleotide
  Sense strand starting at position 3474 of SEQ ID NO: 1562132
gccuaaguuugugcaauuu

SEQ ID NO: 1724576 - RNA, 19 nt, Artificial Sequence
  Description of Artificial Sequence: Synthetic oligonucleotide
  Antisense strand to SEQ ID NO: 1724575
aaauugcacaaacuuaggc

SEQ ID NO: 1724577 - RNA, 19 nt, Artificial Sequence
  Description of Artificial Sequence: Synthetic oligonucleotide
  Sense strand starting at position 3838 of SEQ ID NO: 1562132
uuuggcuuaugggcaagau

SEQ ID NO: 1724578 - RNA, 19 nt, Artificial Sequence
  Description of Artificial Sequence: Synthetic oligonucleotide
  Antisense strand to SEQ ID NO: 1724577
aucuugcccauaagccaaa

SEQ ID NO: 1724579 - RNA, 19 nt, Artificial Sequence
  Description of Artificial Sequence: Synthetic oligonucleotide
  Sense strand starting at position 3839 of SEQ ID NO: 1562132
uuggcuuaugggcaagaua

SEQ ID NO: 1724580 - RNA, 19 nt, Artificial Sequence
  Description of Artificial Sequence: Synthetic oligonucleotide
  Antisense strand to SEQ ID NO: 1724579
uaucuugcccauaagccaa

SEQ ID NO: 1724581 - RNA, 19 nt, Artificial Sequence
  Description of Artificial Sequence: Synthetic oligonucleotide
  Sense strand starting at position 3842 of SEQ ID NO: 1562132
gcuuaugggcaagauauug

SEQ ID NO: 1724582 - RNA, 19 nt, Artificial Sequence
  Description of Artificial Sequence: Synthetic oligonucleotide
  Antisense strand to SEQ ID NO: 1724581
caauaucuugcccauaagc

SEQ ID NO: 1724583 - RNA, 19 nt, Artificial Sequence
  Description of Artificial Sequence: Synthetic oligonucleotide
  Sense strand starting at position 3926 of SEQ ID NO: 1562132
aauaacuuguccuucggua

SEQ ID NO: 1724584 - RNA, 19 nt, Artificial Sequence
  Description of Artificial Sequence: Synthetic oligonucleotide
  Antisense strand to SEQ ID NO: 1724583
uaccgaaggacaaguuauu

SEQ ID NO: 1724585 - RNA, 19 nt, Artificial Sequence
  Description of Artificial Sequence: Synthetic oligonucleotide
  Sense strand starting at position 3928 of SEQ ID NO: 1562132
uaacuuguccuucgguaua

SEQ ID NO: 1724586 - RNA, 19 nt, Artificial Sequence
  Description of Artificial Sequence: Synthetic oligonucleotide
  Antisense strand to SEQ ID NO: 1724585
uauaccgaaggacaaguua

SEQ ID NO: 1724587 - RNA, 19 nt, Artificial Sequence
  Description of Artificial Sequence: Synthetic oligonucleotide
  Sense strand starting at position 3940 of SEQ ID NO: 1562132
cgguauaugccuuacaugu

SEQ ID NO: 1724588 - RNA, 19 nt, Artificial Sequence
  Description of Artificial Sequence: Synthetic oligonucleotide
  Antisense strand to SEQ ID NO: 1724587
acauguaaggcauauaccg

SEQ ID NO: 1724589 - RNA, 19 nt, Artificial Sequence
  Description of Artificial Sequence: Synthetic oligonucleotide
  Sense strand starting at position 3950 of SEQ ID NO: 1562132
cuuacaugucugggcacaa

SEQ ID NO: 1724590 - RNA, 19 nt, Artificial Sequence
  Description of Artificial Sequence: Synthetic oligonucleotide
  Antisense strand to SEQ ID NO: 1724589
uugugcccagacauguaag

SEQ ID NO: 1724591 - RNA, 19 nt, Artificial Sequence
  Description of Artificial Sequence: Synthetic oligonucleotide
  Sense strand starting at position 3951 of SEQ ID NO: 1562132
uuacaugucugggcacaaa

SEQ ID NO: 1724592 - RNA, 19 nt, Artificial Sequence
  Description of Artificial Sequence: Synthetic oligonucleotide
  Antisense strand to SEQ ID NO: 1724591
uuugugcccagacauguaa

SEQ ID NO: 1724593 - RNA, 19 nt, Artificial Sequence
  Description of Artificial Sequence: Synthetic oligonucleotide
  Sense strand starting at position 3978 of SEQ ID NO: 1562132
ucaugaaaccauggguugu

SEQ ID NO: 1724594 - RNA, 19 nt, Artificial Sequence
  Description of Artificial Sequence: Synthetic oligonucleotide
  Antisense strand to SEQ ID NO: 1724593
acaacccaugguuucauga

SEQ ID NO: 1724595 - RNA, 19 nt, Artificial Sequence
  Description of Artificial Sequence: Synthetic oligonucleotide
  Sense strand starting at position 3980 of SEQ ID NO: 1562132
augaaaccauggguuguua

SEQ ID NO: 1724596 - RNA, 19 nt, Artificial Sequence
  Description of Artificial Sequence: Synthetic oligonucleotide
  Antisense strand to SEQ ID NO: 1724595
uaacaacccaugguuucau

SEQ ID NO: 1724597 - RNA, 19 nt, Artificial Sequence
  Description of Artificial Sequence: Synthetic oligonucleotide
  Sense strand starting at position 3982 of SEQ ID NO: 1562132
gaaaccauggguuguuaga

SEQ ID NO: 1724598 - RNA, 19 nt, Artificial Sequence
  Description of Artificial Sequence: Synthetic oligonucleotide
  Antisense strand to SEQ ID NO: 1724597
ucuaacaacccaugguuuc

SEQ ID NO: 1724599 - RNA, 19 nt, Artificial Sequence
  Description of Artificial Sequence: Synthetic oligonucleotide
  Sense strand starting at position 302 of SEQ ID NO: 1562133
aaagaaucguggucucaag

SEQ ID NO: 1724600 - RNA, 19 nt, Artificial Sequence
  Description of Artificial Sequence: Synthetic oligonucleotide
  Antisense strand to SEQ ID NO: 1724599
cuugagaccacgauucuuu

SEQ ID NO: 1724601 - RNA, 19 nt, Artificial Sequence
  Description of Artificial Sequence: Synthetic oligonucleotide
  Sense strand starting at position 415 of SEQ ID NO: 1562133
caaugauacccuuguugga

SEQ ID NO: 1724602 - RNA, 19 nt, Artificial Sequence
  Description of Artificial Sequence: Synthetic oligonucleotide
  Antisense strand to SEQ ID NO: 1724601
uccaacaaggguaucauug

SEQ ID NO: 1724603 - RNA, 19 nt, Artificial Sequence
  Description of Artificial Sequence: Synthetic oligonucleotide
  Sense strand starting at position 459 of SEQ ID NO: 1562133
guauuuacuuacuagauga

SEQ ID NO: 1724604 - RNA, 19 nt, Artificial Sequence
  Description of Artificial Sequence: Synthetic oligonucleotide
  Antisense strand to SEQ ID NO: 1724603
ucaucuaguaaguaaauac

SEQ ID NO: 1724605 - RNA, 19 nt, Artificial Sequence
  Description of Artificial Sequence: Synthetic oligonucleotide
  Sense strand starting at position 476 of SEQ ID NO: 1562133
gaacaaguuucucuaugga

SEQ ID NO: 1724606 - RNA, 19 nt, Artificial Sequence
  Description of Artificial Sequence: Synthetic oligonucleotide
  Antisense strand to SEQ ID NO: 1724605
uccauagagaaacuuguuc

SEQ ID NO: 1724607 - RNA, 19 nt, Artificial Sequence
  Description of Artificial Sequence: Synthetic oligonucleotide
  Sense strand starting at position 479 of SEQ ID NO: 1562133
caaguuucucuauggaggu

SEQ ID NO: 1724608 - RNA, 19 nt, Artificial Sequence
  Description of Artificial Sequence: Synthetic oligonucleotide
  Antisense strand to SEQ ID NO: 1724607
accuccauagagaaacuug

SEQ ID NO: 1724609 - RNA, 19 nt, Artificial Sequence
  Description of Artificial Sequence: Synthetic oligonucleotide
  Sense strand starting at position 526 of SEQ ID NO: 1562133
uuaagacggcuccaaauua

SEQ ID NO: 1724610 - RNA, 19 nt, Artificial Sequence
  Description of Artificial Sequence: Synthetic oligonucleotide
  Antisense strand to SEQ ID NO: 1724609
uaauuuggagccgucuuaa

SEQ ID NO: 1724611 - RNA, 19 nt, Artificial Sequence
  Description of Artificial Sequence: Synthetic oligonucleotide
  Sense strand starting at position 603 of SEQ ID NO: 1562133
guugacgauucugcaagaa

SEQ ID NO: 1724612 - RNA, 19 nt, Artificial Sequence
  Description of Artificial Sequence: Synthetic oligonucleotide
  Antisense strand to SEQ ID NO: 1724611
uucuugcagaaucgucaac

SEQ ID NO: 1724613 - RNA, 19 nt, Artificial Sequence
  Description of Artificial Sequence: Synthetic oligonucleotide
  Sense strand starting at position 607 of SEQ ID NO: 1562133
acgauucugcaagaaaggu

SEQ ID NO: 1724614 - RNA, 19 nt, Artificial Sequence
  Description of Artificial Sequence: Synthetic oligonucleotide
  Antisense strand to SEQ ID NO: 1724613
accuuucuugcagaaucgu

SEQ ID NO: 1724615 - RNA, 19 nt, Artificial Sequence
  Description of Artificial Sequence: Synthetic oligonucleotide
  Sense strand starting at position 617 of SEQ ID NO: 1562133
aagaaagguugcucgcaaa

SEQ ID NO: 1724616 - RNA, 19 nt, Artificial Sequence
  Description of Artificial Sequence: Synthetic oligonucleotide
  Antisense strand to SEQ ID NO: 1724615
uuugcgagcaaccuuucuu

SEQ ID NO: 1724617 - RNA, 19 nt, Artificial Sequence
  Description of Artificial Sequence: Synthetic oligonucleotide
  Sense strand starting at position 694 of SEQ ID NO: 1562133
ucgucugaaucuuuaauug

SEQ ID NO: 1724618 - RNA, 19 nt, Artificial Sequence
  Description of Artificial Sequence: Synthetic oligonucleotide
  Antisense strand to SEQ ID NO: 1724617
caauuaaagauucagacga

SEQ ID NO: 1724619 - RNA, 19 nt, Artificial Sequence
  Description of Artificial Sequence: Synthetic oligonucleotide
  Sense strand starting at position 698 of SEQ ID NO: 1562133
cugaaucuuuaauuggcua

SEQ ID NO: 1724620 - RNA, 19 nt, Artificial Sequence
  Description of Artificial Sequence: Synthetic oligonucleotide
  Antisense strand to SEQ ID NO: 1724619
uagccaauuaaagauucag

SEQ ID NO: 1724621 - RNA, 19 nt, Artificial Sequence
  Description of Artificial Sequence: Synthetic oligonucleotide
  Sense strand starting at position 703 of SEQ ID NO: 1562133
ucuuuaauuggcuauggga

SEQ ID NO: 1724622 - RNA, 19 nt, Artificial Sequence
  Description of Artificial Sequence: Synthetic oligonucleotide
  Antisense strand to SEQ ID NO: 1724621
ucccauagccaauuaaaga

SEQ ID NO: 1724623 - RNA, 19 nt, Artificial Sequence
  Description of Artificial Sequence: Synthetic oligonucleotide
  Sense strand starting at position 705 of SEQ ID NO: 1562133
uuuaauuggcuaugggaau

SEQ ID NO: 1724624 - RNA, 19 nt, Artificial Sequence
  Description of Artificial Sequence: Synthetic oligonucleotide
  Antisense strand to SEQ ID NO: 1724623
auucccauagccaauuaaa

SEQ ID NO: 1724625 - RNA, 19 nt, Artificial Sequence
  Description of Artificial Sequence: Synthetic oligonucleotide
  Sense strand starting at position 780 of SEQ ID NO: 1562133
aguuuacaucaaugggcaa

SEQ ID NO: 1724626 - RNA, 19 nt, Artificial Sequence
  Description of Artificial Sequence: Synthetic oligonucleotide
  Antisense strand to SEQ ID NO: 1724625
uugcccauugauguaaacu

SEQ ID NO: 1724627 - RNA, 19 nt, Artificial Sequence
  Description of Artificial Sequence: Synthetic oligonucleotide
  Sense strand starting at position 899 of SEQ ID NO: 1562133
gcauguucggacgcuugau

SEQ ID NO: 1724628 - RNA, 19 nt, Artificial Sequence
  Description of Artificial Sequence: Synthetic oligonucleotide
  Antisense strand to SEQ ID NO: 1724627
aucaagcguccgaacaugc

SEQ ID NO: 1724629 - RNA, 19 nt, Artificial Sequence
  Description of Artificial Sequence: Synthetic oligonucleotide
  Sense strand starting at position 1783 of SEQ ID NO: 1562133
gcaagacgcgucuagagaa

SEQ ID NO: 1724630 - RNA, 19 nt, Artificial Sequence
  Description of Artificial Sequence: Synthetic oligonucleotide
  Antisense strand to SEQ ID NO: 1724629
uucucuagacgcgucuugc

SEQ ID NO: 1724631 - RNA, 19 nt, Artificial Sequence
  Description of Artificial Sequence: Synthetic oligonucleotide
  Sense strand starting at position 1872 of SEQ ID NO: 1562133
accagaucucgugagagca

SEQ ID NO: 1724632 - RNA, 19 nt, Artificial Sequence
  Description of Artificial Sequence: Synthetic oligonucleotide
  Antisense strand to SEQ ID NO: 1724631
ugcucucacgagaucuggu

SEQ ID NO: 1724633 - RNA, 19 nt, Artificial Sequence
  Description of Artificial Sequence: Synthetic oligonucleotide
  Sense strand starting at position 2105 of SEQ ID NO: 1562133
gguuguucgcgccuugaga

SEQ ID NO: 1724634 - RNA, 19 nt, Artificial Sequence
  Description of Artificial Sequence: Synthetic oligonucleotide
  Antisense strand to SEQ ID NO: 1724633
ucucaaggcgcgaacaacc

SEQ ID NO: 1724635 - RNA, 19 nt, Artificial Sequence
  Description of Artificial Sequence: Synthetic oligonucleotide
  Sense strand starting at position 2350 of SEQ ID NO: 1562133
acccgauuuccacgucugu

SEQ ID NO: 1724636 - RNA, 19 nt, Artificial Sequence
  Description of Artificial Sequence: Synthetic oligonucleotide
  Antisense strand to SEQ ID NO: 1724635
acagacguggaaaucgggu

SEQ ID NO: 1724637 - RNA, 19 nt, Artificial Sequence
  Description of Artificial Sequence: Synthetic oligonucleotide
  Sense strand starting at position 2354 of SEQ ID NO: 1562133
gauuuccacgucugugcaa

SEQ ID NO: 1724638 - RNA, 19 nt, Artificial Sequence
  Description of Artificial Sequence: Synthetic oligonucleotide
  Antisense strand to SEQ ID NO: 1724637
uugcacagacguggaaauc

SEQ ID NO: 1724639 - RNA, 19 nt, Artificial Sequence
  Description of Artificial Sequence: Synthetic oligonucleotide
  Sense strand starting at position 2446 of SEQ ID NO: 1562133
gagccuggugucuaggaau

SEQ ID NO: 1724640 - RNA, 19 nt, Artificial Sequence
  Description of Artificial Sequence: Synthetic oligonucleotide
  Antisense strand to SEQ ID NO: 1724639
auuccuagacaccaggcuc

SEQ ID NO: 1724641 - RNA, 19 nt, Artificial Sequence
  Description of Artificial Sequence: Synthetic oligonucleotide
  Sense strand starting at position 2466 of SEQ ID NO: 1562133
agucgucgucugucaccua

SEQ ID NO: 1724642 - RNA, 19 nt, Artificial Sequence
  Description of Artificial Sequence: Synthetic oligonucleotide
  Antisense strand to SEQ ID NO: 1724641
uaggugacagacgacgacu

SEQ ID NO: 1724643 - RNA, 19 nt, Artificial Sequence
  Description of Artificial Sequence: Synthetic oligonucleotide
  Sense strand starting at position 2560 of SEQ ID NO: 1562133
gucacauuccugcagauua

SEQ ID NO: 1724644 - RNA, 19 nt, Artificial Sequence
  Description of Artificial Sequence: Synthetic oligonucleotide
  Antisense strand to SEQ ID NO: 1724643
uaaucugcaggaaugugac

SEQ ID NO: 1724645 - RNA, 19 nt, Artificial Sequence
  Description of Artificial Sequence: Synthetic oligonucleotide
  Sense strand starting at position 2605 of SEQ ID NO: 1562133
gucuacuaauucgcauuua

SEQ ID NO: 1724646 - RNA, 19 nt, Artificial Sequence
  Description of Artificial Sequence: Synthetic oligonucleotide
  Antisense strand to SEQ ID NO: 1724645
uaaaugcgaauuaguagac

SEQ ID NO: 1724647 - RNA, 19 nt, Artificial Sequence
  Description of Artificial Sequence: Synthetic oligonucleotide
  Sense strand starting at position 2690 of SEQ ID NO: 1562133
cgcucugucgacuuucuua

SEQ ID NO: 1724648 - RNA, 19 nt, Artificial Sequence
  Description of Artificial Sequence: Synthetic oligonucleotide
  Antisense strand to SEQ ID NO: 1724647
uaagaaagucgacagagcg

SEQ ID NO: 1724649 - RNA, 19 nt, Artificial Sequence
  Description of Artificial Sequence: Synthetic oligonucleotide
  Sense strand starting at position 2693 of SEQ ID NO: 1562133
ucugucgacuuucuuaaga

SEQ ID NO: 1724650 - RNA, 19 nt, Artificial Sequence
  Description of Artificial Sequence: Synthetic oligonucleotide
  Antisense strand to SEQ ID NO: 1724649
ucuuaagaaagucgacaga

SEQ ID NO: 1724651 - RNA, 19 nt, Artificial Sequence
  Description of Artificial Sequence: Synthetic oligonucleotide
  Sense strand starting at position 2708 of SEQ ID NO: 1562133
aagaaagggcucuguccaa

SEQ ID NO: 1724652 - RNA, 19 nt, Artificial Sequence
  Description of Artificial Sequence: Synthetic oligonucleotide
  Antisense strand to SEQ ID NO: 1724651
uuggacagagcccuuucuu

SEQ ID NO: 1724653 - RNA, 19 nt, Artificial Sequence
  Description of Artificial Sequence: Synthetic oligonucleotide
  Sense strand starting at position 2712 of SEQ ID NO: 1562133
aagggcucuguccaaacau

SEQ ID NO: 1724654 - RNA, 19 nt, Artificial Sequence
  Description of Artificial Sequence: Synthetic oligonucleotide
  Antisense strand to SEQ ID NO: 1724653
auguuuggacagagcccuu

SEQ ID NO: 1724655 - RNA, 19 nt, Artificial Sequence
  Description of Artificial Sequence: Synthetic oligonucleotide
  Sense strand starting at position 2749 of SEQ ID NO: 1562133
uuugaugugcaauaucauu

SEQ ID NO: 1724656 - RNA, 19 nt, Artificial Sequence
  Description of Artificial Sequence: Synthetic oligonucleotide
  Antisense strand to SEQ ID NO: 1724655
aaugauauugcacaucaaa

SEQ ID NO: 1724657 - RNA, 19 nt, Artificial Sequence
  Description of Artificial Sequence: Synthetic oligonucleotide
  Sense strand starting at position 2754 of SEQ ID NO: 1562133
ugugcaauaucauucugau

SEQ ID NO: 1724658 - RNA, 19 nt, Artificial Sequence
  Description of Artificial Sequence: Synthetic oligonucleotide
  Antisense strand to SEQ ID NO: 1724657
aucagaaugauauugcaca

SEQ ID NO: 1724659 - RNA, 19 nt, Artificial Sequence
  Description of Artificial Sequence: Synthetic oligonucleotide
  Sense strand starting at position 3539 of SEQ ID NO: 1562133
ucacuugauccucauggua

SEQ ID NO: 1724660 - RNA, 19 nt, Artificial Sequence
  Description of Artificial Sequence: Synthetic oligonucleotide
  Antisense strand to SEQ ID NO: 1724659
uaccaugaggaucaaguga

SEQ ID NO: 1724661 - RNA, 19 nt, Artificial Sequence
  Description of Artificial Sequence: Synthetic oligonucleotide
  Sense strand starting at position 3554 of SEQ ID NO: 1562133
gguaguccuguggaguaua

SEQ ID NO: 1724662 - RNA, 19 nt, Artificial Sequence
  Description of Artificial Sequence: Synthetic oligonucleotide
  Antisense strand to SEQ ID NO: 1724661
uauacuccacaggacuacc

SEQ ID NO: 1724663 - RNA, 19 nt, Artificial Sequence
  Description of Artificial Sequence: Synthetic oligonucleotide
  Sense strand starting at position 3557 of SEQ ID NO: 1562133
aguccuguggaguauagau

SEQ ID NO: 1724664 - RNA, 19 nt, Artificial Sequence
  Description of Artificial Sequence: Synthetic oligonucleotide
  Antisense strand to SEQ ID NO: 1724663
aucuauacuccacaggacu

SEQ ID NO: 1724665 - RNA, 19 nt, Artificial Sequence
  Description of Artificial Sequence: Synthetic oligonucleotide
  Sense strand starting at position 3572 of SEQ ID NO: 1562133
agauacuguuauccacauu

SEQ ID NO: 1724666 - RNA, 19 nt, Artificial Sequence
  Description of Artificial Sequence: Synthetic oligonucleotide
  Antisense strand to SEQ ID NO: 1724665
aauguggauaacaguaucu

SEQ ID NO: 1724667 - RNA, 19 nt, Artificial Sequence
  Description of Artificial Sequence: Synthetic oligonucleotide
  Sense strand starting at position 3717 of SEQ ID NO: 1562133
acagaauucuaguuguuug

SEQ ID NO: 1724668 - RNA, 19 nt, Artificial Sequence
  Description of Artificial Sequence: Synthetic oligonucleotide
  Antisense strand to SEQ ID NO: 1724667
caaacaacuagaauucugu

SEQ ID NO: 1724669 - RNA, 19 nt, Artificial Sequence
  Description of Artificial Sequence: Synthetic oligonucleotide
  Sense strand starting at position 3727 of SEQ ID NO: 1562133
aguuguuugcuagauaauu

SEQ ID NO: 1724670 - RNA, 19 nt, Artificial Sequence
  Description of Artificial Sequence: Synthetic oligonucleotide
  Antisense strand to SEQ ID NO: 1724669
aauuaucuagcaaacaacu

SEQ ID NO: 1724671 - RNA, 19 nt, Artificial Sequence
  Description of Artificial Sequence: Synthetic oligonucleotide
  Sense strand starting at position 3736 of SEQ ID NO: 1562133
cuagauaauucuguuuaga

SEQ ID NO: 1724672 - RNA, 19 nt, Artificial Sequence
  Description of Artificial Sequence: Synthetic oligonucleotide
  Antisense strand to SEQ ID NO: 1724671
ucuaaacagaauuaucuag

SEQ ID NO: 1724673 - RNA, 19 nt, Artificial Sequence
  Description of Artificial Sequence: Synthetic oligonucleotide
  Sense strand starting at position 3760 of SEQ ID NO: 1562133
guaaauacccacuguccua

SEQ ID NO: 1724674 - RNA, 19 nt, Artificial Sequence
  Description of Artificial Sequence: Synthetic oligonucleotide
  Antisense strand to SEQ ID NO: 1724673
uaggacaguggguauuuac

SEQ ID NO: 1724675 - RNA, 19 nt, Artificial Sequence
  Description of Artificial Sequence: Synthetic oligonucleotide
  Sense strand starting at position 3777 of SEQ ID NO: 1562133
uacuuauuagcguaaacug

SEQ ID NO: 1724676 - RNA, 19 nt, Artificial Sequence
  Description of Artificial Sequence: Synthetic oligonucleotide
  Antisense strand to SEQ ID NO: 1724675
caguuuacgcuaauaagua

SEQ ID NO: 1724677 - RNA, 19 nt, Artificial Sequence
  Description of Artificial Sequence: Synthetic oligonucleotide
  Sense strand starting at position 3876 of SEQ ID NO: 1562133
ucauaaggaucugaggaua

SEQ ID NO: 1724678 - RNA, 19 nt, Artificial Sequence
  Description of Artificial Sequence: Synthetic oligonucleotide
  Antisense strand to SEQ ID NO: 1724677
uauccucagauccuuauga

SEQ ID NO: 1724679 - RNA, 19 nt, Artificial Sequence
  Description of Artificial Sequence: Synthetic oligonucleotide
  Sense strand starting at position 4 of SEQ ID NO: 1562134
agacuuaguuucccauuau

SEQ ID NO: 1724680 - RNA, 19 nt, Artificial Sequence
  Description of Artificial Sequence: Synthetic oligonucleotide
  Antisense strand to SEQ ID NO: 1724679
auaaugggaaacuaagucu

SEQ ID NO: 1724681 - RNA, 19 nt, Artificial Sequence
  Description of Artificial Sequence: Synthetic oligonucleotide
  Sense strand starting at position 85 of SEQ ID NO: 1562134
gguuaucagcaucagcaga

SEQ ID NO: 1724682 - RNA, 19 nt, Artificial Sequence
  Description of Artificial Sequence: Synthetic oligonucleotide
  Antisense strand to SEQ ID NO: 1724681
ucugcugaugcugauaacc

SEQ ID NO: 1724683 - RNA, 19 nt, Artificial Sequence
  Description of Artificial Sequence: Synthetic oligonucleotide
  Sense strand starting at position 129 of SEQ ID NO: 1562134
gcgucaggguaauuauuua

SEQ ID NO: 1724684 - RNA, 19 nt, Artificial Sequence
  Description of Artificial Sequence: Synthetic oligonucleotide
  Antisense strand to SEQ ID NO: 1724683
uaaauaauuacccugacgc

SEQ ID NO: 1724685 - RNA, 19 nt, Artificial Sequence
  Description of Artificial Sequence: Synthetic oligonucleotide
  Sense strand starting at position 159 of SEQ ID NO: 1562134
ucuuuauuccuguaaugua

SEQ ID NO: 1724686 - RNA, 19 nt, Artificial Sequence
  Description of Artificial Sequence: Synthetic oligonucleotide
  Antisense strand to SEQ ID NO: 1724685
uacauuacaggaauaaaga

SEQ ID NO: 1724687 - RNA, 19 nt, Artificial Sequence
  Description of Artificial Sequence: Synthetic oligonucleotide
  Sense strand starting at position 499 of SEQ ID NO: 1562134
aaagaaucguggucucaag

SEQ ID NO: 1724688 - RNA, 19 nt, Artificial Sequence
  Description of Artificial Sequence: Synthetic oligonucleotide
  Antisense strand to SEQ ID NO: 1724687
cuugagaccacgauucuuu

SEQ ID NO: 1724689 - RNA, 19 nt, Artificial Sequence
  Description of Artificial Sequence: Synthetic oligonucleotide
  Sense strand starting at position 612 of SEQ ID NO: 1562134
caaugauacccuuguugga

SEQ ID NO: 1724690 - RNA, 19 nt, Artificial Sequence
  Description of Artificial Sequence: Synthetic oligonucleotide
  Antisense strand to SEQ ID NO: 1724689
uccaacaaggguaucauug

SEQ ID NO: 1724691 - RNA, 19 nt, Artificial Sequence
  Description of Artificial Sequence: Synthetic oligonucleotide
  Sense strand starting at position 656 of SEQ ID NO: 1562134
guauuuacuuacuagauga

SEQ ID NO: 1724692 - RNA, 19 nt, Artificial Sequence
  Description of Artificial Sequence: Synthetic oligonucleotide
  Antisense strand to SEQ ID NO: 1724691
ucaucuaguaaguaaauac

SEQ ID NO: 1724693 - RNA, 19 nt, Artificial Sequence
  Description of Artificial Sequence: Synthetic oligonucleotide
  Sense strand starting at position 673 of SEQ ID NO: 1562134
gaacaaguuucucuaugga

SEQ ID NO: 1724694 - RNA, 19 nt, Artificial Sequence
  Description of Artificial Sequence: Synthetic oligonucleotide
  Antisense strand to SEQ ID NO: 1724693
uccauagagaaacuuguuc

SEQ ID NO: 1724695 - RNA, 19 nt, Artificial Sequence
  Description of Artificial Sequence: Synthetic oligonucleotide
  Sense strand starting at position 676 of SEQ ID NO: 1562134
caaguuucucuauggaggu

SEQ ID NO: 1724696 - RNA, 19 nt, Artificial Sequence
  Description of Artificial Sequence: Synthetic oligonucleotide
  Antisense strand to SEQ ID NO: 1724695
accuccauagagaaacuug

SEQ ID NO: 1724697 - RNA, 19 nt, Artificial Sequence
  Description of Artificial Sequence: Synthetic oligonucleotide
  Sense strand starting at position 723 of SEQ ID NO: 1562134
uuaagacggcuccaaauua

SEQ ID NO: 1724698 - RNA, 19 nt, Artificial Sequence
  Description of Artificial Sequence: Synthetic oligonucleotide
  Antisense strand to SEQ ID NO: 1724697
uaauuuggagccgucuuaa

SEQ ID NO: 1724699 - RNA, 19 nt, Artificial Sequence
  Description of Artificial Sequence: Synthetic oligonucleotide
  Sense strand starting at position 800 of SEQ ID NO: 1562134
guugacgauucugcaagaa

SEQ ID NO: 1724700 - RNA, 19 nt, Artificial Sequence
  Description of Artificial Sequence: Synthetic oligonucleotide
  Antisense strand to SEQ ID NO: 1724699
uucuugcagaaucgucaac

SEQ ID NO: 1724701 - RNA, 19 nt, Artificial Sequence
  Description of Artificial Sequence: Synthetic oligonucleotide
  Sense strand starting at position 804 of SEQ ID NO: 1562134
acgauucugcaagaaaggu

SEQ ID NO: 1724702 - RNA, 19 nt, Artificial Sequence
  Description of Artificial Sequence: Synthetic oligonucleotide
  Antisense strand to SEQ ID NO: 1724701
accuuucuugcagaaucgu

SEQ ID NO: 1724703 - RNA, 19 nt, Artificial Sequence
  Description of Artificial Sequence: Synthetic oligonucleotide
  Sense strand starting at position 895 of SEQ ID NO: 1562134
cugaaucuuuaauuggcua

SEQ ID NO: 1724704 - RNA, 19 nt, Artificial Sequence
  Description of Artificial Sequence: Synthetic oligonucleotide
  Antisense strand to SEQ ID NO: 1724703
uagccaauuaaagauucag

SEQ ID NO: 1724705 - RNA, 19 nt, Artificial Sequence
  Description of Artificial Sequence: Synthetic oligonucleotide
  Sense strand starting at position 900 of SEQ ID NO: 1562134
ucuuuaauuggcuauggga

SEQ ID NO: 1724706 - RNA, 19 nt, Artificial Sequence
  Description of Artificial Sequence: Synthetic oligonucleotide
  Antisense strand to SEQ ID NO: 1724705
ucccauagccaauuaaaga

SEQ ID NO: 1724707 - RNA, 19 nt, Artificial Sequence
  Description of Artificial Sequence: Synthetic oligonucleotide
  Sense strand starting at position 902 of SEQ ID NO: 1562134
uuuaauuggcuaugggaau

SEQ ID NO: 1724708 - RNA, 19 nt, Artificial Sequence
  Description of Artificial Sequence: Synthetic oligonucleotide
  Antisense strand to SEQ ID NO: 1724707
auucccauagccaauuaaa

SEQ ID NO: 1724709 - RNA, 19 nt, Artificial Sequence
  Description of Artificial Sequence: Synthetic oligonucleotide
  Sense strand starting at position 977 of SEQ ID NO: 1562134
aguuuacaucaaugggcaa

SEQ ID NO: 1724710 - RNA, 19 nt, Artificial Sequence
  Description of Artificial Sequence: Synthetic oligonucleotide
  Antisense strand to SEQ ID NO: 1724709
uugcccauugauguaaacu

SEQ ID NO: 1724711 - RNA, 19 nt, Artificial Sequence
  Description of Artificial Sequence: Synthetic oligonucleotide
  Sense strand starting at position 1096 of SEQ ID NO: 1562134
gcauguucggacgcuugau

SEQ ID NO: 1724712 - RNA, 19 nt, Artificial Sequence
  Description of Artificial Sequence: Synthetic oligonucleotide
  Antisense strand to SEQ ID NO: 1724711
aucaagcguccgaacaugc

SEQ ID NO: 1724713 - RNA, 19 nt, Artificial Sequence
  Description of Artificial Sequence: Synthetic oligonucleotide
  Sense strand starting at position 1980 of SEQ ID NO: 1562134
gcaagacgcgucuagagaa

SEQ ID NO: 1724714 - RNA, 19 nt, Artificial Sequence
  Description of Artificial Sequence: Synthetic oligonucleotide
  Antisense strand to SEQ ID NO: 1724713
uucucuagacgcgucuugc

SEQ ID NO: 1724715 - RNA, 19 nt, Artificial Sequence
  Description of Artificial Sequence: Synthetic oligonucleotide
  Sense strand starting at position 2069 of SEQ ID NO: 1562134
accagaucucgugagagca

SEQ ID NO: 1724716 - RNA, 19 nt, Artificial Sequence
  Description of Artificial Sequence: Synthetic oligonucleotide
  Antisense strand to SEQ ID NO: 1724715
ugcucucacgagaucuggu

SEQ ID NO: 1724717 - RNA, 19 nt, Artificial Sequence
  Description of Artificial Sequence: Synthetic oligonucleotide
  Sense strand starting at position 2302 of SEQ ID NO: 1562134
gguuguucgcgccuugaga

SEQ ID NO: 1724718 - RNA, 19 nt, Artificial Sequence
  Description of Artificial Sequence: Synthetic oligonucleotide
  Antisense strand to SEQ ID NO: 1724717
ucucaaggcgcgaacaacc

SEQ ID NO: 1724719 - RNA, 19 nt, Artificial Sequence
  Description of Artificial Sequence: Synthetic oligonucleotide
  Sense strand starting at position 2547 of SEQ ID NO: 1562134
acccgauuuccacgucugu

SEQ ID NO: 1724720 - RNA, 19 nt, Artificial Sequence
  Description of Artificial Sequence: Synthetic oligonucleotide
  Antisense strand to SEQ ID NO: 1724719
acagacguggaaaucgggu

SEQ ID NO: 1724721 - RNA, 19 nt, Artificial Sequence
  Description of Artificial Sequence: Synthetic oligonucleotide
  Sense strand starting at position 2551 of SEQ ID NO: 1562134
gauuuccacgucugugcaa

SEQ ID NO: 1724722 - RNA, 19 nt, Artificial Sequence
  Description of Artificial Sequence: Synthetic oligonucleotide
  Antisense strand to SEQ ID NO: 1724721
uugcacagacguggaaauc

SEQ ID NO: 1724723 - RNA, 19 nt, Artificial Sequence
  Description of Artificial Sequence: Synthetic oligonucleotide
  Sense strand starting at position 2643 of SEQ ID NO: 1562134
gagccuggugucuaggaau

SEQ ID NO: 1724724 - RNA, 19 nt, Artificial Sequence
  Description of Artificial Sequence: Synthetic oligonucleotide
  Antisense strand to SEQ ID NO: 1724723
auuccuagacaccaggcuc

SEQ ID NO: 1724725 - RNA, 19 nt, Artificial Sequence
  Description of Artificial Sequence: Synthetic oligonucleotide
  Sense strand starting at position 2663 of SEQ ID NO: 1562134
agucgucgucugucaccua

SEQ ID NO: 1724726 - RNA, 19 nt, Artificial Sequence
  Description of Artificial Sequence: Synthetic oligonucleotide
  Antisense strand to SEQ ID NO: 1724725
uaggugacagacgacgacu

SEQ ID NO: 1724727 - RNA, 19 nt, Artificial Sequence
  Description of Artificial Sequence: Synthetic oligonucleotide
  Sense strand starting at position 2757 of SEQ ID NO: 1562134
gucacauuccugcagauua

SEQ ID NO: 1724728 - RNA, 19 nt, Artificial Sequence
  Description of Artificial Sequence: Synthetic oligonucleotide
  Antisense strand to SEQ ID NO: 1724727
uaaucugcaggaaugugac

SEQ ID NO: 1724729 - RNA, 19 nt, Artificial Sequence
  Description of Artificial Sequence: Synthetic oligonucleotide
  Sense strand starting at position 2802 of SEQ ID NO: 1562134
gucuacuaauucgcauuua

SEQ ID NO: 1724730 - RNA, 19 nt, Artificial Sequence
  Description of Artificial Sequence: Synthetic oligonucleotide
  Antisense strand to SEQ ID NO: 1724729
uaaaugcgaauuaguagac

SEQ ID NO: 1724731 - RNA, 19 nt, Artificial Sequence
  Description of Artificial Sequence: Synthetic oligonucleotide
  Sense strand starting at position 2887 of SEQ ID NO: 1562134
cgcucugucgacuuucuua

SEQ ID NO: 1724732 - RNA, 19 nt, Artificial Sequence
  Description of Artificial Sequence: Synthetic oligonucleotide
  Antisense strand to SEQ ID NO: 1724731
uaagaaagucgacagagcg

SEQ ID NO: 1724733 - RNA, 19 nt, Artificial Sequence
  Description of Artificial Sequence: Synthetic oligonucleotide
  Sense strand starting at position 2905 of SEQ ID NO: 1562134
aagaaagggcucuguccaa

SEQ ID NO: 1724734 - RNA, 19 nt, Artificial Sequence
  Description of Artificial Sequence: Synthetic oligonucleotide
  Antisense strand to SEQ ID NO: 1724733
uuggacagagcccuuucuu

SEQ ID NO: 1724735 - RNA, 19 nt, Artificial Sequence
  Description of Artificial Sequence: Synthetic oligonucleotide
  Sense strand starting at position 2909 of SEQ ID NO: 1562134
aagggcucuguccaaacau

SEQ ID NO: 1724736 - RNA, 19 nt, Artificial Sequence
  Description of Artificial Sequence: Synthetic oligonucleotide
  Antisense strand to SEQ ID NO: 1724735
auguuuggacagagcccuu

SEQ ID NO: 1724737 - RNA, 19 nt, Artificial Sequence
  Description of Artificial Sequence: Synthetic oligonucleotide
  Sense strand starting at position 2946 of SEQ ID NO: 1562134
uuugaugugcaauaucauu

SEQ ID NO: 1724738 - RNA, 19 nt, Artificial Sequence
  Description of Artificial Sequence: Synthetic oligonucleotide
  Antisense strand to SEQ ID NO: 1724737
aaugauauugcacaucaaa

SEQ ID NO: 1724739 - RNA, 19 nt, Artificial Sequence
  Description of Artificial Sequence: Synthetic oligonucleotide
  Sense strand starting at position 2951 of SEQ ID NO: 1562134
ugugcaauaucauucugau

SEQ ID NO: 1724740 - RNA, 19 nt, Artificial Sequence
  Description of Artificial Sequence: Synthetic oligonucleotide
  Antisense strand to SEQ ID NO: 1724739
aucagaaugauauugcaca

SEQ ID NO: 1724741 - RNA, 19 nt, Artificial Sequence
  Description of Artificial Sequence: Synthetic oligonucleotide
  Sense strand starting at position 3736 of SEQ ID NO: 1562134
ucacuugauccucauggua

SEQ ID NO: 1724742 - RNA, 19 nt, Artificial Sequence
  Description of Artificial Sequence: Synthetic oligonucleotide
  Antisense strand to SEQ ID NO: 1724741
uaccaugaggaucaaguga

SEQ ID NO: 1724743 - RNA, 19 nt, Artificial Sequence
  Description of Artificial Sequence: Synthetic oligonucleotide
  Sense strand starting at position 3751 of SEQ ID NO: 1562134
gguaguccuguggaguaua

SEQ ID NO: 1724744 - RNA, 19 nt, Artificial Sequence
  Description of Artificial Sequence: Synthetic oligonucleotide
  Antisense strand to SEQ ID NO: 1724743
uauacuccacaggacuacc

SEQ ID NO: 1724745 - RNA, 19 nt, Artificial Sequence
  Description of Artificial Sequence: Synthetic oligonucleotide
  Sense strand starting at position 3754 of SEQ ID NO: 1562134
aguccuguggaguauagau

SEQ ID NO: 1724746 - RNA, 19 nt, Artificial Sequence
  Description of Artificial Sequence: Synthetic oligonucleotide
  Antisense strand to SEQ ID NO: 1724745
aucuauacuccacaggacu

SEQ ID NO: 1724747 - RNA, 19 nt, Artificial Sequence
  Description of Artificial Sequence: Synthetic oligonucleotide
  Sense strand starting at position 3769 of SEQ ID NO: 1562134
agauacuguuauccacauu

SEQ ID NO: 1724748 - RNA, 19 nt, Artificial Sequence
  Description of Artificial Sequence: Synthetic oligonucleotide
  Antisense strand to SEQ ID NO: 1724747
aauguggauaacaguaucu

SEQ ID NO: 1724749 - RNA, 19 nt, Artificial Sequence
  Description of Artificial Sequence: Synthetic oligonucleotide
  Sense strand starting at position 3914 of SEQ ID NO: 1562134
acagaauucuaguuguuug

SEQ ID NO: 1724750 - RNA, 19 nt, Artificial Sequence
  Description of Artificial Sequence: Synthetic oligonucleotide
  Antisense strand to SEQ ID NO: 1724749
caaacaacuagaauucugu

SEQ ID NO: 1724751 - RNA, 19 nt, Artificial Sequence
  Description of Artificial Sequence: Synthetic oligonucleotide
  Sense strand starting at position 3924 of SEQ ID NO: 1562134
aguuguuugcuagauaauu

SEQ ID NO: 1724752 - RNA, 19 nt, Artificial Sequence
  Description of Artificial Sequence: Synthetic oligonucleotide
  Antisense strand to SEQ ID NO: 1724751
aauuaucuagcaaacaacu

SEQ ID NO: 1724753 - RNA, 19 nt, Artificial Sequence
  Description of Artificial Sequence: Synthetic oligonucleotide
  Sense strand starting at position 3933 of SEQ ID NO: 1562134
cuagauaauucuguuuaga

SEQ ID NO: 1724754 - RNA, 19 nt, Artificial Sequence
  Description of Artificial Sequence: Synthetic oligonucleotide
  Antisense strand to SEQ ID NO: 1724753
ucuaaacagaauuaucuag

SEQ ID NO: 1724755 - RNA, 19 nt, Artificial Sequence
  Description of Artificial Sequence: Synthetic oligonucleotide
  Sense strand starting at position 3957 of SEQ ID NO: 1562134
guaaauacccacuguccua

SEQ ID NO: 1724756 - RNA, 19 nt, Artificial Sequence
  Description of Artificial Sequence: Synthetic oligonucleotide
  Antisense strand to SEQ ID NO: 1724755
uaggacaguggguauuuac

SEQ ID NO: 1724757 - RNA, 19 nt, Artificial Sequence
  Description of Artificial Sequence: Synthetic oligonucleotide
  Sense strand starting at position 3974 of SEQ ID NO: 1562134
uacuuauuagcguaaacug

SEQ ID NO: 1724758 - RNA, 19 nt, Artificial Sequence
  Description of Artificial Sequence: Synthetic oligonucleotide
  Antisense strand to SEQ ID NO: 1724757
caguuuacgcuaauaagua

SEQ ID NO: 1724759 - RNA, 19 nt, Artificial Sequence
  Description of Artificial Sequence: Synthetic oligonucleotide
  Sense strand starting at position 15 of SEQ ID NO: 1562135
aggagagcucaggaagcuu

SEQ ID NO: 1724760 - RNA, 19 nt, Artificial Sequence
  Description of Artificial Sequence: Synthetic oligonucleotide
  Antisense strand to SEQ ID NO: 1724759
aagcuuccugagcucuccu

SEQ ID NO: 1724761 - RNA, 19 nt, Artificial Sequence
  Description of Artificial Sequence: Synthetic oligonucleotide
  Sense strand starting at position 327 of SEQ ID NO: 1562135
aagacacuguccugggauu

SEQ ID NO: 1724762 - RNA, 19 nt, Artificial Sequence
  Description of Artificial Sequence: Synthetic oligonucleotide
  Antisense strand to SEQ ID NO: 1724761
aaucccaggacagugucuu

SEQ ID NO: 1724763 - RNA, 19 nt, Artificial Sequence
  Description of Artificial Sequence: Synthetic oligonucleotide
  Sense strand starting at position 504 of SEQ ID NO: 1562135
ccgggaaagcccuggguaa

SEQ ID NO: 1724764 - RNA, 19 nt, Artificial Sequence
  Description of Artificial Sequence: Synthetic oligonucleotide
  Antisense strand to SEQ ID NO: 1724763
uuacccagggcuuucccgg

SEQ ID NO: 1724765 - RNA, 19 nt, Artificial Sequence
  Description of Artificial Sequence: Synthetic oligonucleotide
  Sense strand starting at position 579 of SEQ ID NO: 1562135
ggcggcggugucuaucaau

SEQ ID NO: 1724766 - RNA, 19 nt, Artificial Sequence
  Description of Artificial Sequence: Synthetic oligonucleotide
  Antisense strand to SEQ ID NO: 1724765
auugauagacaccgccgcc

SEQ ID NO: 1724767 - RNA, 19 nt, Artificial Sequence
  Description of Artificial Sequence: Synthetic oligonucleotide
  Sense strand starting at position 774 of SEQ ID NO: 1562135
gagcgcgcuucccaaauaa

SEQ ID NO: 1724768 - RNA, 19 nt, Artificial Sequence
  Description of Artificial Sequence: Synthetic oligonucleotide
  Antisense strand to SEQ ID NO: 1724767
uuauuugggaagcgcgcuc

SEQ ID NO: 1724769 - RNA, 19 nt, Artificial Sequence
  Description of Artificial Sequence: Synthetic oligonucleotide
  Sense strand starting at position 871 of SEQ ID NO: 1562135
ccggauuguucagugggaa

SEQ ID NO: 1724770 - RNA, 19 nt, Artificial Sequence
  Description of Artificial Sequence: Synthetic oligonucleotide
  Antisense strand to SEQ ID NO: 1724769
uucccacugaacaauccgg

SEQ ID NO: 1724771 - RNA, 19 nt, Artificial Sequence
  Description of Artificial Sequence: Synthetic oligonucleotide
  Sense strand starting at position 872 of SEQ ID NO: 1562135
cggauuguucagugggaag

SEQ ID NO: 1724772 - RNA, 19 nt, Artificial Sequence
  Description of Artificial Sequence: Synthetic oligonucleotide
  Antisense strand to SEQ ID NO: 1724771
cuucccacugaacaauccg

SEQ ID NO: 1724773 - RNA, 19 nt, Artificial Sequence
  Description of Artificial Sequence: Synthetic oligonucleotide
  Sense strand starting at position 874 of SEQ ID NO: 1562135
gauuguucagugggaagga

SEQ ID NO: 1724774 - RNA, 19 nt, Artificial Sequence
  Description of Artificial Sequence: Synthetic oligonucleotide
  Antisense strand to SEQ ID NO: 1724773
uccuucccacugaacaauc

SEQ ID NO: 1724775 - RNA, 19 nt, Artificial Sequence
  Description of Artificial Sequence: Synthetic oligonucleotide
  Sense strand starting at position 1300 of SEQ ID NO: 1562135
agcugcuauccgugaggcu

SEQ ID NO: 1724776 - RNA, 19 nt, Artificial Sequence
  Description of Artificial Sequence: Synthetic oligonucleotide
  Antisense strand to SEQ ID NO: 1724775
agccucacggauagcagcu

SEQ ID NO: 1724777 - RNA, 19 nt, Artificial Sequence
  Description of Artificial Sequence: Synthetic oligonucleotide
  Sense strand starting at position 2081 of SEQ ID NO: 1562135
gcgcgguuccgcgaacaaa

SEQ ID NO: 1724778 - RNA, 19 nt, Artificial Sequence
  Description of Artificial Sequence: Synthetic oligonucleotide
  Antisense strand to SEQ ID NO: 1724777
uuuguucgcggaaccgcgc

SEQ ID NO: 1724779 - RNA, 19 nt, Artificial Sequence
  Description of Artificial Sequence: Synthetic oligonucleotide
  Sense strand starting at position 2148 of SEQ ID NO: 1562135
ggagggaucugcgaggcaa

SEQ ID NO: 1724780 - RNA, 19 nt, Artificial Sequence
  Description of Artificial Sequence: Synthetic oligonucleotide
  Antisense strand to SEQ ID NO: 1724779
uugccucgcagaucccucc

SEQ ID NO: 1724781 - RNA, 19 nt, Artificial Sequence
  Description of Artificial Sequence: Synthetic oligonucleotide
  Sense strand starting at position 2607 of SEQ ID NO: 1562135
cgugaagcccugugugcau

SEQ ID NO: 1724782 - RNA, 19 nt, Artificial Sequence
  Description of Artificial Sequence: Synthetic oligonucleotide
  Antisense strand to SEQ ID NO: 1724781
augcacacagggcuucacg

SEQ ID NO: 1724783 - RNA, 19 nt, Artificial Sequence
  Description of Artificial Sequence: Synthetic oligonucleotide
  Sense strand starting at position 3041 of SEQ ID NO: 1562135
gggaccuauuacgagaugu

SEQ ID NO: 1724784 - RNA, 19 nt, Artificial Sequence
  Description of Artificial Sequence: Synthetic oligonucleotide
  Antisense strand to SEQ ID NO: 1724783
acaucucguaauagguccc

SEQ ID NO: 1724785 - RNA, 19 nt, Artificial Sequence
  Description of Artificial Sequence: Synthetic oligonucleotide
  Sense strand starting at position 3043 of SEQ ID NO: 1562135
gaccuauuacgagauguca

SEQ ID NO: 1724786 - RNA, 19 nt, Artificial Sequence
  Description of Artificial Sequence: Synthetic oligonucleotide
  Antisense strand to SEQ ID NO: 1724785
ugacaucucguaauagguc

SEQ ID NO: 1724787 - RNA, 19 nt, Artificial Sequence
  Description of Artificial Sequence: Synthetic oligonucleotide
  Sense strand starting at position 3727 of SEQ ID NO: 1562135
ucuggauccaggugaguga

SEQ ID NO: 1724788 - RNA, 19 nt, Artificial Sequence
  Description of Artificial Sequence: Synthetic oligonucleotide
  Antisense strand to SEQ ID NO: 1724787
ucacucaccuggauccaga

SEQ ID NO: 1724789 - RNA, 19 nt, Artificial Sequence
  Description of Artificial Sequence: Synthetic oligonucleotide
  Sense strand starting at position 3803 of SEQ ID NO: 1562135
ucagcaggcucuuggcaaa

SEQ ID NO: 1724790 - RNA, 19 nt, Artificial Sequence
  Description of Artificial Sequence: Synthetic oligonucleotide
  Antisense strand to SEQ ID NO: 1724789
uuugccaagagccugcuga

SEQ ID NO: 1724791 - RNA, 19 nt, Artificial Sequence
  Description of Artificial Sequence: Synthetic oligonucleotide
  Sense strand starting at position 178 of SEQ ID NO: 1562136
ggauuccucucaccaaaug

SEQ ID NO: 1724792 - RNA, 19 nt, Artificial Sequence
  Description of Artificial Sequence: Synthetic oligonucleotide
  Antisense strand to SEQ ID NO: 1724791
cauuuggugagaggaaucc

SEQ ID NO: 1724793 - RNA, 19 nt, Artificial Sequence
  Description of Artificial Sequence: Synthetic oligonucleotide
  Sense strand starting at position 192 of SEQ ID NO: 1562136
aaaugugucucagccuaga

SEQ ID NO: 1724794 - RNA, 19 nt, Artificial Sequence
  Description of Artificial Sequence: Synthetic oligonucleotide
  Antisense strand to SEQ ID NO: 1724793
ucuaggcugagacacauuu

SEQ ID NO: 1724795 - RNA, 19 nt, Artificial Sequence
  Description of Artificial Sequence: Synthetic oligonucleotide
  Sense strand starting at position 207 of SEQ ID NO: 1562136
uagacacgcuaguuaacaa

SEQ ID NO: 1724796 - RNA, 19 nt, Artificial Sequence
  Description of Artificial Sequence: Synthetic oligonucleotide
  Antisense strand to SEQ ID NO: 1724795
uuguuaacuagcgugucua

SEQ ID NO: 1724797 - RNA, 19 nt, Artificial Sequence
  Description of Artificial Sequence: Synthetic oligonucleotide
  Sense strand starting at position 289 of SEQ ID NO: 1562136
uuggaauccuggcuaugua

SEQ ID NO: 1724798 - RNA, 19 nt, Artificial Sequence
  Description of Artificial Sequence: Synthetic oligonucleotide
  Antisense strand to SEQ ID NO: 1724797
uacauagccaggauuccaa

SEQ ID NO: 1724799 - RNA, 19 nt, Artificial Sequence
  Description of Artificial Sequence: Synthetic oligonucleotide
  Sense strand starting at position 290 of SEQ ID NO: 1562136
uggaauccuggcuauguaa

SEQ ID NO: 1724800 - RNA, 19 nt, Artificial Sequence
  Description of Artificial Sequence: Synthetic oligonucleotide
  Antisense strand to SEQ ID NO: 1724799
uuacauagccaggauucca

SEQ ID NO: 1724801 - RNA, 19 nt, Artificial Sequence
  Description of Artificial Sequence: Synthetic oligonucleotide
  Sense strand starting at position 292 of SEQ ID NO: 1562136
gaauccuggcuauguaauu

SEQ ID NO: 1724802 - RNA, 19 nt, Artificial Sequence
  Description of Artificial Sequence: Synthetic oligonucleotide
  Antisense strand to SEQ ID NO: 1724801
aauuacauagccaggauuc

SEQ ID NO: 1724803 - RNA, 19 nt, Artificial Sequence
  Description of Artificial Sequence: Synthetic oligonucleotide
  Sense strand starting at position 782 of SEQ ID NO: 1562136
cugccuauuggcuaugaau

SEQ ID NO: 1724804 - RNA, 19 nt, Artificial Sequence
  Description of Artificial Sequence: Synthetic oligonucleotide
  Antisense strand to SEQ ID NO: 1724803
auucauagccaauaggcag

SEQ ID NO: 1724805 - RNA, 19 nt, Artificial Sequence
  Description of Artificial Sequence: Synthetic oligonucleotide
  Sense strand starting at position 784 of SEQ ID NO: 1562136
gccuauuggcuaugaauaa

SEQ ID NO: 1724806 - RNA, 19 nt, Artificial Sequence
  Description of Artificial Sequence: Synthetic oligonucleotide
  Antisense strand to SEQ ID NO: 1724805
uuauucauagccaauaggc

SEQ ID NO: 1724807 - RNA, 19 nt, Artificial Sequence
  Description of Artificial Sequence: Synthetic oligonucleotide
  Sense strand starting at position 802 of SEQ ID NO: 1562136
auaacaauuccucaggcga

SEQ ID NO: 1724808 - RNA, 19 nt, Artificial Sequence
  Description of Artificial Sequence: Synthetic oligonucleotide
  Antisense strand to SEQ ID NO: 1724807
ucgccugaggaauuguuau

SEQ ID NO: 1724809 - RNA, 19 nt, Artificial Sequence
  Description of Artificial Sequence: Synthetic oligonucleotide
  Sense strand starting at position 874 of SEQ ID NO: 1562136
ccugaugaccaucguauga

SEQ ID NO: 1724810 - RNA, 19 nt, Artificial Sequence
  Description of Artificial Sequence: Synthetic oligonucleotide
  Antisense strand to SEQ ID NO: 1724809
ucauacgauggucaucagg

SEQ ID NO: 1724811 - RNA, 19 nt, Artificial Sequence
  Description of Artificial Sequence: Synthetic oligonucleotide
  Sense strand starting at position 1400 of SEQ ID NO: 1562136
augguuaguggugaugaaa

SEQ ID NO: 1724812 - RNA, 19 nt, Artificial Sequence
  Description of Artificial Sequence: Synthetic oligonucleotide
  Antisense strand to SEQ ID NO: 1724811
uuucaucaccacuaaccau

SEQ ID NO: 1724813 - RNA, 19 nt, Artificial Sequence
  Description of Artificial Sequence: Synthetic oligonucleotide
  Sense strand starting at position 1430 of SEQ ID NO: 1562136
cucagaucaccgggucuuu

SEQ ID NO: 1724814 - RNA, 19 nt, Artificial Sequence
  Description of Artificial Sequence: Synthetic oligonucleotide
  Antisense strand to SEQ ID NO: 1724813
aaagacccggugaucugag

SEQ ID NO: 1724815 - RNA, 19 nt, Artificial Sequence
  Description of Artificial Sequence: Synthetic oligonucleotide
  Sense strand starting at position 1501 of SEQ ID NO: 1562136
cuggcaccucaguaguuaa

SEQ ID NO: 1724816 - RNA, 19 nt, Artificial Sequence
  Description of Artificial Sequence: Synthetic oligonucleotide
  Antisense strand to SEQ ID NO: 1724815
uuaacuacugaggugccag

SEQ ID NO: 1724817 - RNA, 19 nt, Artificial Sequence
  Description of Artificial Sequence: Synthetic oligonucleotide
  Sense strand starting at position 1504 of SEQ ID NO: 1562136
gcaccucaguaguuaauaa

SEQ ID NO: 1724818 - RNA, 19 nt, Artificial Sequence
  Description of Artificial Sequence: Synthetic oligonucleotide
  Antisense strand to SEQ ID NO: 1724817
uuauuaacuacugaggugc

SEQ ID NO: 1724819 - RNA, 19 nt, Artificial Sequence
  Description of Artificial Sequence: Synthetic oligonucleotide
  Sense strand starting at position 1526 of SEQ ID NO: 1562136
ucagacuuccuuggcuaga

SEQ ID NO: 1724820 - RNA, 19 nt, Artificial Sequence
  Description of Artificial Sequence: Synthetic oligonucleotide
  Antisense strand to SEQ ID NO: 1724819
ucuagccaaggaagucuga

SEQ ID NO: 1724821 - RNA, 19 nt, Artificial Sequence
  Description of Artificial Sequence: Synthetic oligonucleotide
  Sense strand starting at position 1528 of SEQ ID NO: 1562136
agacuuccuuggcuagaag

SEQ ID NO: 1724822 - RNA, 19 nt, Artificial Sequence
  Description of Artificial Sequence: Synthetic oligonucleotide
  Antisense strand to SEQ ID NO: 1724821
cuucuagccaaggaagucu

SEQ ID NO: 1724823 - RNA, 19 nt, Artificial Sequence
  Description of Artificial Sequence: Synthetic oligonucleotide
  Sense strand starting at position 1694 of SEQ ID NO: 1562136
ucacuaccuucucuguaga

SEQ ID NO: 1724824 - RNA, 19 nt, Artificial Sequence
  Description of Artificial Sequence: Synthetic oligonucleotide
  Antisense strand to SEQ ID NO: 1724823
ucuacagagaagguaguga

SEQ ID NO: 1724825 - RNA, 19 nt, Artificial Sequence
  Description of Artificial Sequence: Synthetic oligonucleotide
  Sense strand starting at position 1707 of SEQ ID NO: 1562136
uguagaagcuccuucuauc

SEQ ID NO: 1724826 - RNA, 19 nt, Artificial Sequence
  Description of Artificial Sequence: Synthetic oligonucleotide
  Antisense strand to SEQ ID NO: 1724825
gauagaaggagcuucuaca

SEQ ID NO: 1724827 - RNA, 19 nt, Artificial Sequence
  Description of Artificial Sequence: Synthetic oligonucleotide
  Sense strand starting at position 1721 of SEQ ID NO: 1562136
cuaucuucucacugggaga

SEQ ID NO: 1724828 - RNA, 19 nt, Artificial Sequence
  Description of Artificial Sequence: Synthetic oligonucleotide
  Antisense strand to SEQ ID NO: 1724827
ucucccagugagaagauag

SEQ ID NO: 1724829 - RNA, 19 nt, Artificial Sequence
  Description of Artificial Sequence: Synthetic oligonucleotide
  Sense strand starting at position 1734 of SEQ ID NO: 1562136
gggagagaguugcccgauu

SEQ ID NO: 1724830 - RNA, 19 nt, Artificial Sequence
  Description of Artificial Sequence: Synthetic oligonucleotide
  Antisense strand to SEQ ID NO: 1724829
aaucgggcaacucucuccc

SEQ ID NO: 1724831 - RNA, 19 nt, Artificial Sequence
  Description of Artificial Sequence: Synthetic oligonucleotide
  Sense strand starting at position 1815 of SEQ ID NO: 1562136
aguugacaguucccaguga

SEQ ID NO: 1724832 - RNA, 19 nt, Artificial Sequence
  Description of Artificial Sequence: Synthetic oligonucleotide
  Antisense strand to SEQ ID NO: 1724831
ucacugggaacugucaacu

SEQ ID NO: 1724833 - RNA, 19 nt, Artificial Sequence
  Description of Artificial Sequence: Synthetic oligonucleotide
  Sense strand starting at position 1929 of SEQ ID NO: 1562136
uggaguccuuucccuugua

SEQ ID NO: 1724834 - RNA, 19 nt, Artificial Sequence
  Description of Artificial Sequence: Synthetic oligonucleotide
  Antisense strand to SEQ ID NO: 1724833
uacaagggaaaggacucca

SEQ ID NO: 1724835 - RNA, 19 nt, Artificial Sequence
  Description of Artificial Sequence: Synthetic oligonucleotide
  Sense strand starting at position 1958 of SEQ ID NO: 1562136
gcaucuuagaggcaaagua

SEQ ID NO: 1724836 - RNA, 19 nt, Artificial Sequence
  Description of Artificial Sequence: Synthetic oligonucleotide
  Antisense strand to SEQ ID NO: 1724835
uacuuugccucuaagaugc

SEQ ID NO: 1724837 - RNA, 19 nt, Artificial Sequence
  Description of Artificial Sequence: Synthetic oligonucleotide
  Sense strand starting at position 1966 of SEQ ID NO: 1562136
gaggcaaaguaguccagaa

SEQ ID NO: 1724838 - RNA, 19 nt, Artificial Sequence
  Description of Artificial Sequence: Synthetic oligonucleotide
  Antisense strand to SEQ ID NO: 1724837
uucuggacuacuuugccuc

SEQ ID NO: 1724839 - RNA, 19 nt, Artificial Sequence
  Description of Artificial Sequence: Synthetic oligonucleotide
  Sense strand starting at position 2294 of SEQ ID NO: 1562136
gccuuagcgcuguucuuga

SEQ ID NO: 1724840 - RNA, 19 nt, Artificial Sequence
  Description of Artificial Sequence: Synthetic oligonucleotide
  Antisense strand to SEQ ID NO: 1724839
ucaagaacagcgcuaaggc

SEQ ID NO: 1724841 - RNA, 19 nt, Artificial Sequence
  Description of Artificial Sequence: Synthetic oligonucleotide
  Sense strand starting at position 2307 of SEQ ID NO: 1562136
ucuugaacucaacgagcau

SEQ ID NO: 1724842 - RNA, 19 nt, Artificial Sequence
  Description of Artificial Sequence: Synthetic oligonucleotide
  Antisense strand to SEQ ID NO: 1724841
augcucguugaguucaaga

SEQ ID NO: 1724843 - RNA, 19 nt, Artificial Sequence
  Description of Artificial Sequence: Synthetic oligonucleotide
  Sense strand starting at position 2428 of SEQ ID NO: 1562136
cuucgugugcuccuggcaa

SEQ ID NO: 1724844 - RNA, 19 nt, Artificial Sequence
  Description of Artificial Sequence: Synthetic oligonucleotide
  Antisense strand to SEQ ID NO: 1724843
uugccaggagcacacgaag

SEQ ID NO: 1724845 - RNA, 19 nt, Artificial Sequence
  Description of Artificial Sequence: Synthetic oligonucleotide
  Sense strand starting at position 2460 of SEQ ID NO: 1562136
cccucauuaugaucugugu

SEQ ID NO: 1724846 - RNA, 19 nt, Artificial Sequence
  Description of Artificial Sequence: Synthetic oligonucleotide
  Antisense strand to SEQ ID NO: 1724845
acacagaucauaaugaggg

SEQ ID NO: 1724847 - RNA, 19 nt, Artificial Sequence
  Description of Artificial Sequence: Synthetic oligonucleotide
  Sense strand starting at position 2464 of SEQ ID NO: 1562136
cauuaugaucuguguugug

SEQ ID NO: 1724848 - RNA, 19 nt, Artificial Sequence
  Description of Artificial Sequence: Synthetic oligonucleotide
  Antisense strand to SEQ ID NO: 1724847
cacaacacagaucauaaug

SEQ ID NO: 1724849 - RNA, 19 nt, Artificial Sequence
  Description of Artificial Sequence: Synthetic oligonucleotide
  Sense strand starting at position 2476 of SEQ ID NO: 1562136
uguugugauuucuuguaug

SEQ ID NO: 1724850 - RNA, 19 nt, Artificial Sequence
  Description of Artificial Sequence: Synthetic oligonucleotide
  Antisense strand to SEQ ID NO: 1724849
cauacaagaaaucacaaca

SEQ ID NO: 1724851 - RNA, 19 nt, Artificial Sequence
  Description of Artificial Sequence: Synthetic oligonucleotide
  Sense strand starting at position 2571 of SEQ ID NO: 1562136
ccagaucugcccuagcaca

SEQ ID NO: 1724852 - RNA, 19 nt, Artificial Sequence
  Description of Artificial Sequence: Synthetic oligonucleotide
  Antisense strand to SEQ ID NO: 1724851
ugugcuagggcagaucugg

SEQ ID NO: 1724853 - RNA, 19 nt, Artificial Sequence
  Description of Artificial Sequence: Synthetic oligonucleotide
  Sense strand starting at position 2757 of SEQ ID NO: 1562136
aucagagguuuacuacaua

SEQ ID NO: 1724854 - RNA, 19 nt, Artificial Sequence
  Description of Artificial Sequence: Synthetic oligonucleotide
  Antisense strand to SEQ ID NO: 1724853
uauguaguaaaccucugau

SEQ ID NO: 1724855 - RNA, 19 nt, Artificial Sequence
  Description of Artificial Sequence: Synthetic oligonucleotide
  Sense strand starting at position 2809 of SEQ ID NO: 1562136
ucauuuaaccguugagguu

SEQ ID NO: 1724856 - RNA, 19 nt, Artificial Sequence
  Description of Artificial Sequence: Synthetic oligonucleotide
  Antisense strand to SEQ ID NO: 1724855
aaccucaacgguuaaauga

SEQ ID NO: 1724857 - RNA, 19 nt, Artificial Sequence
  Description of Artificial Sequence: Synthetic oligonucleotide
  Sense strand starting at position 2833 of SEQ ID NO: 1562136
gcguguuacugucccauuu

SEQ ID NO: 1724858 - RNA, 19 nt, Artificial Sequence
  Description of Artificial Sequence: Synthetic oligonucleotide
  Antisense strand to SEQ ID NO: 1724857
aaaugggacaguaacacgc

SEQ ID NO: 1724859 - RNA, 19 nt, Artificial Sequence
  Description of Artificial Sequence: Synthetic oligonucleotide
  Sense strand starting at position 2981 of SEQ ID NO: 1562136
gguuccaucuuggcccaaa

SEQ ID NO: 1724860 - RNA, 19 nt, Artificial Sequence
  Description of Artificial Sequence: Synthetic oligonucleotide
  Antisense strand to SEQ ID NO: 1724859
uuugggccaagauggaacc

SEQ ID NO: 1724861 - RNA, 19 nt, Artificial Sequence
  Description of Artificial Sequence: Synthetic oligonucleotide
  Sense strand starting at position 3111 of SEQ ID NO: 1562136
gggucagagccugaugacu

SEQ ID NO: 1724862 - RNA, 19 nt, Artificial Sequence
  Description of Artificial Sequence: Synthetic oligonucleotide
  Antisense strand to SEQ ID NO: 1724861
agucaucaggcucugaccc

SEQ ID NO: 1724863 - RNA, 19 nt, Artificial Sequence
  Description of Artificial Sequence: Synthetic oligonucleotide
  Sense strand starting at position 3388 of SEQ ID NO: 1562136
ccggcuucugaagacucaa

SEQ ID NO: 1724864 - RNA, 19 nt, Artificial Sequence
  Description of Artificial Sequence: Synthetic oligonucleotide
  Antisense strand to SEQ ID NO: 1724863
uugagucuucagaagccgg

SEQ ID NO: 1724865 - RNA, 19 nt, Artificial Sequence
  Description of Artificial Sequence: Synthetic oligonucleotide
  Sense strand starting at position 3746 of SEQ ID NO: 1562136
ggguguugugccaggccau

SEQ ID NO: 1724866 - RNA, 19 nt, Artificial Sequence
  Description of Artificial Sequence: Synthetic oligonucleotide
  Antisense strand to SEQ ID NO: 1724865
auggccuggcacaacaccc

SEQ ID NO: 1724867 - RNA, 19 nt, Artificial Sequence
  Description of Artificial Sequence: Synthetic oligonucleotide
  Sense strand starting at position 3772 of SEQ ID NO: 1562136
ugacaagagucggcaacau

SEQ ID NO: 1724868 - RNA, 19 nt, Artificial Sequence
  Description of Artificial Sequence: Synthetic oligonucleotide
  Antisense strand to SEQ ID NO: 1724867
auguugccgacucuuguca

SEQ ID NO: 1724869 - RNA, 19 nt, Artificial Sequence
  Description of Artificial Sequence: Synthetic oligonucleotide
  Sense strand starting at position 3826 of SEQ ID NO: 1562136
aggagagcucaggaagcuu

SEQ ID NO: 1724870 - RNA, 19 nt, Artificial Sequence
  Description of Artificial Sequence: Synthetic oligonucleotide
  Antisense strand to SEQ ID NO: 1724869
aagcuuccugagcucuccu

SEQ ID NO: 1724871 - RNA, 19 nt, Artificial Sequence
  Description of Artificial Sequence: Synthetic oligonucleotide
  Sense strand starting at position 2186 of SEQ ID NO: 1562137
ggcagagaagccgguauuu

SEQ ID NO: 1724872 - RNA, 19 nt, Artificial Sequence
  Description of Artificial Sequence: Synthetic oligonucleotide
  Antisense strand to SEQ ID NO: 1724871
aaauaccggcuucucugcc

SEQ ID NO: 1724873 - RNA, 19 nt, Artificial Sequence
  Description of Artificial Sequence: Synthetic oligonucleotide
  Sense strand starting at position 2289 of SEQ ID NO: 1562137
cggcgagaucgguuucuuu

SEQ ID NO: 1724874 - RNA, 19 nt, Artificial Sequence
  Description of Artificial Sequence: Synthetic oligonucleotide
  Antisense strand to SEQ ID NO: 1724873
aaagaaaccgaucucgccg

SEQ ID NO: 1724875 - RNA, 19 nt, Artificial Sequence
  Description of Artificial Sequence: Synthetic oligonucleotide
  Sense strand starting at position 2401 of SEQ ID NO: 1562137
uuuagcucauuccgagaca

SEQ ID NO: 1724876 - RNA, 19 nt, Artificial Sequence
  Description of Artificial Sequence: Synthetic oligonucleotide
  Antisense strand to SEQ ID NO: 1724875
ugucucggaaugagcuaaa

SEQ ID NO: 1724877 - RNA, 19 nt, Artificial Sequence
  Description of Artificial Sequence: Synthetic oligonucleotide
  Sense strand starting at position 2404 of SEQ ID NO: 1562137
agcucauuccgagacaccu

SEQ ID NO: 1724878 - RNA, 19 nt, Artificial Sequence
  Description of Artificial Sequence: Synthetic oligonucleotide
  Antisense strand to SEQ ID NO: 1724877
aggugucucggaaugagcu

SEQ ID NO: 1724879 - RNA, 19 nt, Artificial Sequence
  Description of Artificial Sequence: Synthetic oligonucleotide
  Sense strand starting at position 2530 of SEQ ID NO: 1562137
gaacucagguugucguaga

SEQ ID NO: 1724880 - RNA, 19 nt, Artificial Sequence
  Description of Artificial Sequence: Synthetic oligonucleotide
  Antisense strand to SEQ ID NO: 1724879
ucuacgacaaccugaguuc

SEQ ID NO: 1724881 - RNA, 19 nt, Artificial Sequence
  Description of Artificial Sequence: Synthetic oligonucleotide
  Sense strand starting at position 2531 of SEQ ID NO: 1562137
aacucagguugucguagau

SEQ ID NO: 1724882 - RNA, 19 nt, Artificial Sequence
  Description of Artificial Sequence: Synthetic oligonucleotide
  Antisense strand to SEQ ID NO: 1724881
aucuacgacaaccugaguu

SEQ ID NO: 1724883 - RNA, 19 nt, Artificial Sequence
  Description of Artificial Sequence: Synthetic oligonucleotide
  Sense strand starting at position 2534 of SEQ ID NO: 1562137
ucagguugucguagauguu

SEQ ID NO: 1724884 - RNA, 19 nt, Artificial Sequence
  Description of Artificial Sequence: Synthetic oligonucleotide
  Antisense strand to SEQ ID NO: 1724883
aacaucuacgacaaccuga

SEQ ID NO: 1724885 - RNA, 19 nt, Artificial Sequence
  Description of Artificial Sequence: Synthetic oligonucleotide
  Sense strand starting at position 2644 of SEQ ID NO: 1562137
uauauuuaaucucguucga

SEQ ID NO: 1724886 - RNA, 19 nt, Artificial Sequence
  Description of Artificial Sequence: Synthetic oligonucleotide
  Antisense strand to SEQ ID NO: 1724885
ucgaacgagauuaaauaua

SEQ ID NO: 1724887 - RNA, 19 nt, Artificial Sequence
  Description of Artificial Sequence: Synthetic oligonucleotide
  Sense strand starting at position 2646 of SEQ ID NO: 1562137
uauuuaaucucguucgaag

SEQ ID NO: 1724888 - RNA, 19 nt, Artificial Sequence
  Description of Artificial Sequence: Synthetic oligonucleotide
  Antisense strand to SEQ ID NO: 1724887
cuucgaacgagauuaaaua

SEQ ID NO: 1724889 - RNA, 19 nt, Artificial Sequence
  Description of Artificial Sequence: Synthetic oligonucleotide
  Sense strand starting at position 2658 of SEQ ID NO: 1562137
uucgaagcuccauaagaau

SEQ ID NO: 1724890 - RNA, 19 nt, Artificial Sequence
  Description of Artificial Sequence: Synthetic oligonucleotide
  Antisense strand to SEQ ID NO: 1724889
auucuuauggagcuucgaa

SEQ ID NO: 1724891 - RNA, 19 nt, Artificial Sequence
  Description of Artificial Sequence: Synthetic oligonucleotide
  Sense strand starting at position 2687 of SEQ ID NO: 1562137
aagggaauaugauaauaug

SEQ ID NO: 1724892 - RNA, 19 nt, Artificial Sequence
  Description of Artificial Sequence: Synthetic oligonucleotide
  Antisense strand to SEQ ID NO: 1724891
cauauuaucauauucccuu

SEQ ID NO: 1724893 - RNA, 19 nt, Artificial Sequence
  Description of Artificial Sequence: Synthetic oligonucleotide
  Sense strand starting at position 2690 of SEQ ID NO: 1562137
ggaauaugauaauaugaug

SEQ ID NO: 1724894 - RNA, 19 nt, Artificial Sequence
  Description of Artificial Sequence: Synthetic oligonucleotide
  Antisense strand to SEQ ID NO: 1724893
caucauauuaucauauucc

SEQ ID NO: 1724895 - RNA, 19 nt, Artificial Sequence
  Description of Artificial Sequence: Synthetic oligonucleotide
  Sense strand starting at position 2698 of SEQ ID NO: 1562137
auaauaugaugcccaguuu

SEQ ID NO: 1724896 - RNA, 19 nt, Artificial Sequence
  Description of Artificial Sequence: Synthetic oligonucleotide
  Antisense strand to SEQ ID NO: 1724895
aaacugggcaucauauuau

SEQ ID NO: 1724897 - RNA, 19 nt, Artificial Sequence
  Description of Artificial Sequence: Synthetic oligonucleotide
  Sense strand starting at position 2876 of SEQ ID NO: 1562137
gcgacauucgaggaugcgu

SEQ ID NO: 1724898 - RNA, 19 nt, Artificial Sequence
  Description of Artificial Sequence: Synthetic oligonucleotide
  Antisense strand to SEQ ID NO: 1724897
acgcauccucgaaugucgc

SEQ ID NO: 1724899 - RNA, 19 nt, Artificial Sequence
  Description of Artificial Sequence: Synthetic oligonucleotide
  Sense strand starting at position 2899 of SEQ ID NO: 1562137
gcgccauucccagguccua

SEQ ID NO: 1724900 - RNA, 19 nt, Artificial Sequence
  Description of Artificial Sequence: Synthetic oligonucleotide
  Antisense strand to SEQ ID NO: 1724899
uaggaccugggaauggcgc

SEQ ID NO: 1724901 - RNA, 19 nt, Artificial Sequence
  Description of Artificial Sequence: Synthetic oligonucleotide
  Sense strand starting at position 3211 of SEQ ID NO: 1562137
ggauuagggucuuuaaggu

SEQ ID NO: 1724902 - RNA, 19 nt, Artificial Sequence
  Description of Artificial Sequence: Synthetic oligonucleotide
  Antisense strand to SEQ ID NO: 1724901
accuuaaagacccuaaucc

SEQ ID NO: 1724903 - RNA, 19 nt, Artificial Sequence
  Description of Artificial Sequence: Synthetic oligonucleotide
  Sense strand starting at position 3217 of SEQ ID NO: 1562137
gggucuuuaagguggcauu

SEQ ID NO: 1724904 - RNA, 19 nt, Artificial Sequence
  Description of Artificial Sequence: Synthetic oligonucleotide
  Antisense strand to SEQ ID NO: 1724903
aaugccaccuuaaagaccc

SEQ ID NO: 1724905 - RNA, 19 nt, Artificial Sequence
  Description of Artificial Sequence: Synthetic oligonucleotide
  Sense strand starting at position 3580 of SEQ ID NO: 1562137
gagucacacuuccugaguu

SEQ ID NO: 1724906 - RNA, 19 nt, Artificial Sequence
  Description of Artificial Sequence: Synthetic oligonucleotide
  Antisense strand to SEQ ID NO: 1724905
aacucaggaagugugacuc

SEQ ID NO: 1724907 - RNA, 19 nt, Artificial Sequence
  Description of Artificial Sequence: Synthetic oligonucleotide
  Sense strand starting at position 3704 of SEQ ID NO: 1562137
uccugauaccuaggcaaug

SEQ ID NO: 1724908 - RNA, 19 nt, Artificial Sequence
  Description of Artificial Sequence: Synthetic oligonucleotide
  Antisense strand to SEQ ID NO: 1724907
cauugccuagguaucagga

SEQ ID NO: 1724909 - RNA, 19 nt, Artificial Sequence
  Description of Artificial Sequence: Synthetic oligonucleotide
  Sense strand starting at position 3705 of SEQ ID NO: 1562137
ccugauaccuaggcaaugu

SEQ ID NO: 1724910 - RNA, 19 nt, Artificial Sequence
  Description of Artificial Sequence: Synthetic oligonucleotide
  Antisense strand to SEQ ID NO: 1724909
acauugccuagguaucagg

SEQ ID NO: 1724911 - RNA, 19 nt, Artificial Sequence
  Description of Artificial Sequence: Synthetic oligonucleotide
  Sense strand starting at position 12 of SEQ ID NO: 1562138
aggcuccuccuuuauagaa

SEQ ID NO: 1724912 - RNA, 19 nt, Artificial Sequence
  Description of Artificial Sequence: Synthetic oligonucleotide
  Antisense strand to SEQ ID NO: 1724911
uucuauaaaggaggagccu

SEQ ID NO: 1724913 - RNA, 19 nt, Artificial Sequence
  Description of Artificial Sequence: Synthetic oligonucleotide
  Sense strand starting at position 40 of SEQ ID NO: 1562138
cuguauuccucacauugca

SEQ ID NO: 1724914 - RNA, 19 nt, Artificial Sequence
  Description of Artificial Sequence: Synthetic oligonucleotide
  Antisense strand to SEQ ID NO: 1724913
ugcaaugugaggaauacag

SEQ ID NO: 1724915 - RNA, 19 nt, Artificial Sequence
  Description of Artificial Sequence: Synthetic oligonucleotide
  Sense strand starting at position 75 of SEQ ID NO: 1562138
ugacgcuucugaucacuga

SEQ ID NO: 1724916 - RNA, 19 nt, Artificial Sequence
  Description of Artificial Sequence: Synthetic oligonucleotide
  Antisense strand to SEQ ID NO: 1724915
ucagugaucagaagcguca

SEQ ID NO: 1724917 - RNA, 19 nt, Artificial Sequence
  Description of Artificial Sequence: Synthetic oligonucleotide
  Sense strand starting at position 76 of SEQ ID NO: 1562138
gacgcuucugaucacugaa

SEQ ID NO: 1724918 - RNA, 19 nt, Artificial Sequence
  Description of Artificial Sequence: Synthetic oligonucleotide
  Antisense strand to SEQ ID NO: 1724917
uucagugaucagaagcguc

SEQ ID NO: 1724919 - RNA, 19 nt, Artificial Sequence
  Description of Artificial Sequence: Synthetic oligonucleotide
  Sense strand starting at position 78 of SEQ ID NO: 1562138
cgcuucugaucacugaaac

SEQ ID NO: 1724920 - RNA, 19 nt, Artificial Sequence
  Description of Artificial Sequence: Synthetic oligonucleotide
  Antisense strand to SEQ ID NO: 1724919
guuucagugaucagaagcg

SEQ ID NO: 1724921 - RNA, 19 nt, Artificial Sequence
  Description of Artificial Sequence: Synthetic oligonucleotide
  Sense strand starting at position 79 of SEQ ID NO: 1562138
gcuucugaucacugaaacu

SEQ ID NO: 1724922 - RNA, 19 nt, Artificial Sequence
  Description of Artificial Sequence: Synthetic oligonucleotide
  Antisense strand to SEQ ID NO: 1724921
aguuucagugaucagaagc

SEQ ID NO: 1724923 - RNA, 19 nt, Artificial Sequence
  Description of Artificial Sequence: Synthetic oligonucleotide
  Sense strand starting at position 89 of SEQ ID NO: 1562138
acugaaacuucuuggaaga

SEQ ID NO: 1724924 - RNA, 19 nt, Artificial Sequence
  Description of Artificial Sequence: Synthetic oligonucleotide
  Antisense strand to SEQ ID NO: 1724923
ucuuccaagaaguuucagu

SEQ ID NO: 1724925 - RNA, 19 nt, Artificial Sequence
  Description of Artificial Sequence: Synthetic oligonucleotide
  Sense strand starting at position 91 of SEQ ID NO: 1562138
ugaaacuucuuggaagaaa

SEQ ID NO: 1724926 - RNA, 19 nt, Artificial Sequence
  Description of Artificial Sequence: Synthetic oligonucleotide
  Antisense strand to SEQ ID NO: 1724925
uuucuuccaagaaguuuca

SEQ ID NO: 1724927 - RNA, 19 nt, Artificial Sequence
  Description of Artificial Sequence: Synthetic oligonucleotide
  Sense strand starting at position 182 of SEQ ID NO: 1562138
uuaauacaaucugguugua

SEQ ID NO: 1724928 - RNA, 19 nt, Artificial Sequence
  Description of Artificial Sequence: Synthetic oligonucleotide
  Antisense strand to SEQ ID NO: 1724927
uacaaccagauuguauuaa

SEQ ID NO: 1724929 - RNA, 19 nt, Artificial Sequence
  Description of Artificial Sequence: Synthetic oligonucleotide
  Sense strand starting at position 184 of SEQ ID NO: 1562138
aauacaaucugguuguaga

SEQ ID NO: 1724930 - RNA, 19 nt, Artificial Sequence
  Description of Artificial Sequence: Synthetic oligonucleotide
  Antisense strand to SEQ ID NO: 1724929
ucuacaaccagauuguauu

SEQ ID NO: 1724931 - RNA, 19 nt, Artificial Sequence
  Description of Artificial Sequence: Synthetic oligonucleotide
  Sense strand starting at position 185 of SEQ ID NO: 1562138
auacaaucugguuguagaa

SEQ ID NO: 1724932 - RNA, 19 nt, Artificial Sequence
  Description of Artificial Sequence: Synthetic oligonucleotide
  Antisense strand to SEQ ID NO: 1724931
uucuacaaccagauuguau

SEQ ID NO: 1724933 - RNA, 19 nt, Artificial Sequence
  Description of Artificial Sequence: Synthetic oligonucleotide
  Sense strand starting at position 438 of SEQ ID NO: 1562138
aacauacacgcguaugaga

SEQ ID NO: 1724934 - RNA, 19 nt, Artificial Sequence
  Description of Artificial Sequence: Synthetic oligonucleotide
  Antisense strand to SEQ ID NO: 1724933
ucucauacgcguguauguu

SEQ ID NO: 1724935 - RNA, 19 nt, Artificial Sequence
  Description of Artificial Sequence: Synthetic oligonucleotide
  Sense strand starting at position 548 of SEQ ID NO: 1562138
agaugcacgcgcuguaaua

SEQ ID NO: 1724936 - RNA, 19 nt, Artificial Sequence
  Description of Artificial Sequence: Synthetic oligonucleotide
  Antisense strand to SEQ ID NO: 1724935
uauuacagcgcgugcaucu

SEQ ID NO: 1724937 - RNA, 19 nt, Artificial Sequence
  Description of Artificial Sequence: Synthetic oligonucleotide
  Sense strand starting at position 698 of SEQ ID NO: 1562138
aguugagguacuggucgaa

SEQ ID NO: 1724938 - RNA, 19 nt, Artificial Sequence
  Description of Artificial Sequence: Synthetic oligonucleotide
  Antisense strand to SEQ ID NO: 1724937
uucgaccaguaccucaacu

SEQ ID NO: 1724939 - RNA, 19 nt, Artificial Sequence
  Description of Artificial Sequence: Synthetic oligonucleotide
  Sense strand starting at position 1876 of SEQ ID NO: 1562138
cggcgaucucugcauucca

SEQ ID NO: 1724940 - RNA, 19 nt, Artificial Sequence
  Description of Artificial Sequence: Synthetic oligonucleotide
  Antisense strand to SEQ ID NO: 1724939
uggaaugcagagaucgccg

SEQ ID NO: 1724941 - RNA, 19 nt, Artificial Sequence
  Description of Artificial Sequence: Synthetic oligonucleotide
  Sense strand starting at position 2514 of SEQ ID NO: 1562138
acucuacacccauguguaa

SEQ ID NO: 1724942 - RNA, 19 nt, Artificial Sequence
  Description of Artificial Sequence: Synthetic oligonucleotide
  Antisense strand to SEQ ID NO: 1724941
uuacacauggguguagagu

SEQ ID NO: 1724943 - RNA, 19 nt, Artificial Sequence
  Description of Artificial Sequence: Synthetic oligonucleotide
  Sense strand starting at position 2555 of SEQ ID NO: 1562138
gugccuuuaugggacaaga

SEQ ID NO: 1724944 - RNA, 19 nt, Artificial Sequence
  Description of Artificial Sequence: Synthetic oligonucleotide
  Antisense strand to SEQ ID NO: 1724943
ucuugucccauaaaggcac

SEQ ID NO: 1724945 - RNA, 19 nt, Artificial Sequence
  Description of Artificial Sequence: Synthetic oligonucleotide
  Sense strand starting at position 2872 of SEQ ID NO: 1562138
gcguccagcuuccugaauu

SEQ ID NO: 1724946 - RNA, 19 nt, Artificial Sequence
  Description of Artificial Sequence: Synthetic oligonucleotide
  Antisense strand to SEQ ID NO: 1724945
aauucaggaagcuggacgc

SEQ ID NO: 1724947 - RNA, 19 nt, Artificial Sequence
  Description of Artificial Sequence: Synthetic oligonucleotide
  Sense strand starting at position 2873 of SEQ ID NO: 1562138
cguccagcuuccugaauuu

SEQ ID NO: 1724948 - RNA, 19 nt, Artificial Sequence
  Description of Artificial Sequence: Synthetic oligonucleotide
  Antisense strand to SEQ ID NO: 1724947
aaauucaggaagcuggacg

SEQ ID NO: 1724949 - RNA, 19 nt, Artificial Sequence
  Description of Artificial Sequence: Synthetic oligonucleotide
  Sense strand starting at position 3157 of SEQ ID NO: 1562138
gccagaagcucuugguucu

SEQ ID NO: 1724950 - RNA, 19 nt, Artificial Sequence
  Description of Artificial Sequence: Synthetic oligonucleotide
  Antisense strand to SEQ ID NO: 1724949
agaaccaagagcuucuggc

SEQ ID NO: 1724951 - RNA, 19 nt, Artificial Sequence
  Description of Artificial Sequence: Synthetic oligonucleotide
  Sense strand starting at position 3199 of SEQ ID NO: 1562138
ccacauccagccuguguua

SEQ ID NO: 1724952 - RNA, 19 nt, Artificial Sequence
  Description of Artificial Sequence: Synthetic oligonucleotide
  Antisense strand to SEQ ID NO: 1724951
uaacacaggcuggaugugg

SEQ ID NO: 1724953 - RNA, 19 nt, Artificial Sequence
  Description of Artificial Sequence: Synthetic oligonucleotide
  Sense strand starting at position 3204 of SEQ ID NO: 1562138
uccagccuguguuaugaau

SEQ ID NO: 1724954 - RNA, 19 nt, Artificial Sequence
  Description of Artificial Sequence: Synthetic oligonucleotide
  Antisense strand to SEQ ID NO: 1724953
auucauaacacaggcugga

SEQ ID NO: 1724955 - RNA, 19 nt, Artificial Sequence
  Description of Artificial Sequence: Synthetic oligonucleotide
  Sense strand starting at position 3255 of SEQ ID NO: 1562138
cuuagaggcuguuccugaa

SEQ ID NO: 1724956 - RNA, 19 nt, Artificial Sequence
  Description of Artificial Sequence: Synthetic oligonucleotide
  Antisense strand to SEQ ID NO: 1724955
uucaggaacagccucuaag

SEQ ID NO: 1724957 - RNA, 19 nt, Artificial Sequence
  Description of Artificial Sequence: Synthetic oligonucleotide
  Sense strand starting at position 3259 of SEQ ID NO: 1562138
gaggcuguuccugaacugu

SEQ ID NO: 1724958 - RNA, 19 nt, Artificial Sequence
  Description of Artificial Sequence: Synthetic oligonucleotide
  Antisense strand to SEQ ID NO: 1724957
acaguucaggaacagccuc

SEQ ID NO: 1724959 - RNA, 19 nt, Artificial Sequence
  Description of Artificial Sequence: Synthetic oligonucleotide
  Sense strand starting at position 3569 of SEQ ID NO: 1562138
ggguuguggccacagggau

SEQ ID NO: 1724960 - RNA, 19 nt, Artificial Sequence
  Description of Artificial Sequence: Synthetic oligonucleotide
  Antisense strand to SEQ ID NO: 1724959
aucccuguggccacaaccc

SEQ ID NO: 1724961 - RNA, 19 nt, Artificial Sequence
  Description of Artificial Sequence: Synthetic oligonucleotide
  Sense strand starting at position 3614 of SEQ ID NO: 1562138
ugcugcuaguccuccuuua

SEQ ID NO: 1724962 - RNA, 19 nt, Artificial Sequence
  Description of Artificial Sequence: Synthetic oligonucleotide
  Antisense strand to SEQ ID NO: 1724961
uaaaggaggacuagcagca

SEQ ID NO: 1724963 - RNA, 19 nt, Artificial Sequence
  Description of Artificial Sequence: Synthetic oligonucleotide
  Sense strand starting at position 3628 of SEQ ID NO: 1562138
cuuuaaucucaguaugggu

SEQ ID NO: 1724964 - RNA, 19 nt, Artificial Sequence
  Description of Artificial Sequence: Synthetic oligonucleotide
  Antisense strand to SEQ ID NO: 1724963
acccauacugagauuaaag

SEQ ID NO: 1724965 - RNA, 19 nt, Artificial Sequence
  Description of Artificial Sequence: Synthetic oligonucleotide
  Sense strand starting at position 195 of SEQ ID NO: 1562139
augacucaaucagaucuga

SEQ ID NO: 1724966 - RNA, 19 nt, Artificial Sequence
  Description of Artificial Sequence: Synthetic oligonucleotide
  Antisense strand to SEQ ID NO: 1724965
ucagaucugauugagucau

SEQ ID NO: 1724967 - RNA, 19 nt, Artificial Sequence
  Description of Artificial Sequence: Synthetic oligonucleotide
  Sense strand starting at position 430 of SEQ ID NO: 1562139
cgugguguccggguucaga

SEQ ID NO: 1724968 - RNA, 19 nt, Artificial Sequence
  Description of Artificial Sequence: Synthetic oligonucleotide
  Antisense strand to SEQ ID NO: 1724967
ucugaacccggacaccacg

SEQ ID NO: 1724969 - RNA, 19 nt, Artificial Sequence
  Description of Artificial Sequence: Synthetic oligonucleotide
  Sense strand starting at position 493 of SEQ ID NO: 1562139
gagggucggcuaggauaau

SEQ ID NO: 1724970 - RNA, 19 nt, Artificial Sequence
  Description of Artificial Sequence: Synthetic oligonucleotide
  Antisense strand to SEQ ID NO: 1724969
auuauccuagccgacccuc

SEQ ID NO: 1724971 - RNA, 19 nt, Artificial Sequence
  Description of Artificial Sequence: Synthetic oligonucleotide
  Sense strand starting at position 494 of SEQ ID NO: 1562139
agggucggcuaggauaauu

SEQ ID NO: 1724972 - RNA, 19 nt, Artificial Sequence
  Description of Artificial Sequence: Synthetic oligonucleotide
  Antisense strand to SEQ ID NO: 1724971
aauuauccuagccgacccu

SEQ ID NO: 1724973 - RNA, 19 nt, Artificial Sequence
  Description of Artificial Sequence: Synthetic oligonucleotide
  Sense strand starting at position 822 of SEQ ID NO: 1562139
gcagauugcucaguccaca

SEQ ID NO: 1724974 - RNA, 19 nt, Artificial Sequence
  Description of Artificial Sequence: Synthetic oligonucleotide
  Antisense strand to SEQ ID NO: 1724973
uguggacugagcaaucugc

SEQ ID NO: 1724975 - RNA, 19 nt, Artificial Sequence
  Description of Artificial Sequence: Synthetic oligonucleotide
  Sense strand starting at position 854 of SEQ ID NO: 1562139
ggaagucucucacaggcuu

SEQ ID NO: 1724976 - RNA, 19 nt, Artificial Sequence
  Description of Artificial Sequence: Synthetic oligonucleotide
  Antisense strand to SEQ ID NO: 1724975
aagccugugagagacuucc

SEQ ID NO: 1724977 - RNA, 19 nt, Artificial Sequence
  Description of Artificial Sequence: Synthetic oligonucleotide
  Sense strand starting at position 931 of SEQ ID NO: 1562139
gggaggcuccgucaagagu

SEQ ID NO: 1724978 - RNA, 19 nt, Artificial Sequence
  Description of Artificial Sequence: Synthetic oligonucleotide
  Antisense strand to SEQ ID NO: 1724977
acucuugacggagccuccc

SEQ ID NO: 1724979 - RNA, 19 nt, Artificial Sequence
  Description of Artificial Sequence: Synthetic oligonucleotide
  Sense strand starting at position 1046 of SEQ ID NO: 1562139
gccugauuaacacggagaa

SEQ ID NO: 1724980 - RNA, 19 nt, Artificial Sequence
  Description of Artificial Sequence: Synthetic oligonucleotide
  Antisense strand to SEQ ID NO: 1724979
uucuccguguuaaucaggc

SEQ ID NO: 1724981 - RNA, 19 nt, Artificial Sequence
  Description of Artificial Sequence: Synthetic oligonucleotide
  Sense strand starting at position 1291 of SEQ ID NO: 1562139
agccuuagaucuuggugga

SEQ ID NO: 1724982 - RNA, 19 nt, Artificial Sequence
  Description of Artificial Sequence: Synthetic oligonucleotide
  Antisense strand to SEQ ID NO: 1724981
uccaccaagaucuaaggcu

SEQ ID NO: 1724983 - RNA, 19 nt, Artificial Sequence
  Description of Artificial Sequence: Synthetic oligonucleotide
  Sense strand starting at position 1292 of SEQ ID NO: 1562139
gccuuagaucuugguggaa

SEQ ID NO: 1724984 - RNA, 19 nt, Artificial Sequence
  Description of Artificial Sequence: Synthetic oligonucleotide
  Antisense strand to SEQ ID NO: 1724983
uuccaccaagaucuaaggc

SEQ ID NO: 1724985 - RNA, 19 nt, Artificial Sequence
  Description of Artificial Sequence: Synthetic oligonucleotide
  Sense strand starting at position 1312 of SEQ ID NO: 1562139
ccaauuguccugggagcca

SEQ ID NO: 1724986 - RNA, 19 nt, Artificial Sequence
  Description of Artificial Sequence: Synthetic oligonucleotide
  Antisense strand to SEQ ID NO: 1724985
uggcucccaggacaauugg

SEQ ID NO: 1724987 - RNA, 19 nt, Artificial Sequence
  Description of Artificial Sequence: Synthetic oligonucleotide
  Sense strand starting at position 1479 of SEQ ID NO: 1562139
guaggaggugcccagauau

SEQ ID NO: 1724988 - RNA, 19 nt, Artificial Sequence
  Description of Artificial Sequence: Synthetic oligonucleotide
  Antisense strand to SEQ ID NO: 1724987
auaucugggcaccuccuac

SEQ ID NO: 1724989 - RNA, 19 nt, Artificial Sequence
  Description of Artificial Sequence: Synthetic oligonucleotide
  Sense strand starting at position 1486 of SEQ ID NO: 1562139
gugcccagauaucaucuua

SEQ ID NO: 1724990 - RNA, 19 nt, Artificial Sequence
  Description of Artificial Sequence: Synthetic oligonucleotide
  Antisense strand to SEQ ID NO: 1724989
uaagaugauaucugggcac

SEQ ID NO: 1724991 - RNA, 19 nt, Artificial Sequence
  Description of Artificial Sequence: Synthetic oligonucleotide
  Sense strand starting at position 2153 of SEQ ID NO: 1562139
cugacuuuguuguuguuua

SEQ ID NO: 1724992 - RNA, 19 nt, Artificial Sequence
  Description of Artificial Sequence: Synthetic oligonucleotide
  Antisense strand to SEQ ID NO: 1724991
uaaacaacaacaaagucag

SEQ ID NO: 1724993 - RNA, 19 nt, Artificial Sequence
  Description of Artificial Sequence: Synthetic oligonucleotide
  Sense strand starting at position 2157 of SEQ ID NO: 1562139
cuuuguuguuguuuaagag

SEQ ID NO: 1724994 - RNA, 19 nt, Artificial Sequence
  Description of Artificial Sequence: Synthetic oligonucleotide
  Antisense strand to SEQ ID NO: 1724993
cucuuaaacaacaacaaag

SEQ ID NO: 1724995 - RNA, 19 nt, Artificial Sequence
  Description of Artificial Sequence: Synthetic oligonucleotide
  Sense strand starting at position 2179 of SEQ ID NO: 1562139
gggucuuucucauugccca

SEQ ID NO: 1724996 - RNA, 19 nt, Artificial Sequence
  Description of Artificial Sequence: Synthetic oligonucleotide
  Antisense strand to SEQ ID NO: 1724995
ugggcaaugagaaagaccc

SEQ ID NO: 1724997 - RNA, 19 nt, Artificial Sequence
  Description of Artificial Sequence: Synthetic oligonucleotide
  Sense strand starting at position 2373 of SEQ ID NO: 1562139
uggcacucagucuauaaca

SEQ ID NO: 1724998 - RNA, 19 nt, Artificial Sequence
  Description of Artificial Sequence: Synthetic oligonucleotide
  Antisense strand to SEQ ID NO: 1724997
uguuauagacugagugcca

SEQ ID NO: 1724999 - RNA, 19 nt, Artificial Sequence
  Description of Artificial Sequence: Synthetic oligonucleotide
  Sense strand starting at position 2375 of SEQ ID NO: 1562139
gcacucagucuauaacagu

SEQ ID NO: 1725000 - RNA, 19 nt, Artificial Sequence
  Description of Artificial Sequence: Synthetic oligonucleotide
  Antisense strand to SEQ ID NO: 1724999
acuguuauagacugagugc

SEQ ID NO: 1725001 - RNA, 19 nt, Artificial Sequence
  Description of Artificial Sequence: Synthetic oligonucleotide
  Sense strand starting at position 3079 of SEQ ID NO: 1562139
aagugaugacgucacagca

SEQ ID NO: 1725002 - RNA, 19 nt, Artificial Sequence
  Description of Artificial Sequence: Synthetic oligonucleotide
  Antisense strand to SEQ ID NO: 1725001
ugcugugacgucaucacuu

SEQ ID NO: 1725003 - RNA, 19 nt, Artificial Sequence
  Description of Artificial Sequence: Synthetic oligonucleotide
  Sense strand starting at position 3176 of SEQ ID NO: 1562139
cagcacgugucacuaacau

SEQ ID NO: 1725004 - RNA, 19 nt, Artificial Sequence
  Description of Artificial Sequence: Synthetic oligonucleotide
  Antisense strand to SEQ ID NO: 1725003
auguuagugacacgugcug

SEQ ID NO: 1725005 - RNA, 19 nt, Artificial Sequence
  Description of Artificial Sequence: Synthetic oligonucleotide
  Sense strand starting at position 3180 of SEQ ID NO: 1562139
acgugucacuaacaugcua

SEQ ID NO: 1725006 - RNA, 19 nt, Artificial Sequence
  Description of Artificial Sequence: Synthetic oligonucleotide
  Antisense strand to SEQ ID NO: 1725005
uagcauguuagugacacgu

SEQ ID NO: 1725007 - RNA, 19 nt, Artificial Sequence
  Description of Artificial Sequence: Synthetic oligonucleotide
  Sense strand starting at position 3613 of SEQ ID NO: 1562139
uguaguaggugcucaaaua

SEQ ID NO: 1725008 - RNA, 19 nt, Artificial Sequence
  Description of Artificial Sequence: Synthetic oligonucleotide
  Antisense strand to SEQ ID NO: 1725007
uauuugagcaccuacuaca

SEQ ID NO: 1725009 - RNA, 19 nt, Artificial Sequence
  Description of Artificial Sequence: Synthetic oligonucleotide
  Sense strand starting at position 3614 of SEQ ID NO: 1562139
guaguaggugcucaaauau

SEQ ID NO: 1725010 - RNA, 19 nt, Artificial Sequence
  Description of Artificial Sequence: Synthetic oligonucleotide
  Antisense strand to SEQ ID NO: 1725009
auauuugagcaccuacuac

SEQ ID NO: 1725011 - RNA, 19 nt, Artificial Sequence
  Description of Artificial Sequence: Synthetic oligonucleotide
  Sense strand starting at position 3635 of SEQ ID NO: 1562139
gcaaauaaugaauguuaag

SEQ ID NO: 1725012 - RNA, 19 nt, Artificial Sequence
  Description of Artificial Sequence: Synthetic oligonucleotide
  Antisense strand to SEQ ID NO: 1725011
cuuaacauucauuauuugc

SEQ ID NO: 1725013 - RNA, 19 nt, Artificial Sequence
  Description of Artificial Sequence: Synthetic oligonucleotide
  Sense strand starting at position 3801 of SEQ ID NO: 1562139
gggucuguggguugagaau

SEQ ID NO: 1725014 - RNA, 19 nt, Artificial Sequence
  Description of Artificial Sequence: Synthetic oligonucleotide
  Antisense strand to SEQ ID NO: 1725013
auucucaacccacagaccc

SEQ ID NO: 1725015 - RNA, 19 nt, Artificial Sequence
  Description of Artificial Sequence: Synthetic oligonucleotide
  Sense strand starting at position 3928 of SEQ ID NO: 1562139
cuugcuauguaacagaaua

SEQ ID NO: 1725016 - RNA, 19 nt, Artificial Sequence
  Description of Artificial Sequence: Synthetic oligonucleotide
  Antisense strand to SEQ ID NO: 1725015
uauucuguuacauagcaag

SEQ ID NO: 1725017 - RNA, 19 nt, Artificial Sequence
  Description of Artificial Sequence: Synthetic oligonucleotide
  Sense strand starting at position 3939 of SEQ ID NO: 1562139
acagaauaucagugcagcu

SEQ ID NO: 1725018 - RNA, 19 nt, Artificial Sequence
  Description of Artificial Sequence: Synthetic oligonucleotide
  Antisense strand to SEQ ID NO: 1725017
agcugcacugauauucugu

SEQ ID NO: 1725019 - RNA, 19 nt, Artificial Sequence
  Description of Artificial Sequence: Synthetic oligonucleotide
  Sense strand starting at position 3941 of SEQ ID NO: 1562139
agaauaucagugcagcuua

SEQ ID NO: 1725020 - RNA, 19 nt, Artificial Sequence
  Description of Artificial Sequence: Synthetic oligonucleotide
  Antisense strand to SEQ ID NO: 1725019
uaagcugcacugauauucu

SEQ ID NO: 1725021 - RNA, 19 nt, Artificial Sequence
  Description of Artificial Sequence: Synthetic oligonucleotide
  Sense strand starting at position 3946 of SEQ ID NO: 1562139
aucagugcagcuuauagaa

SEQ ID NO: 1725022 - RNA, 19 nt, Artificial Sequence
  Description of Artificial Sequence: Synthetic oligonucleotide
  Antisense strand to SEQ ID NO: 1725021
uucuauaagcugcacugau

SEQ ID NO: 1725023 - RNA, 19 nt, Artificial Sequence
  Description of Artificial Sequence: Synthetic oligonucleotide
  Sense strand starting at position 3948 of SEQ ID NO: 1562139
cagugcagcuuauagaaau

SEQ ID NO: 1725024 - RNA, 19 nt, Artificial Sequence
  Description of Artificial Sequence: Synthetic oligonucleotide
  Antisense strand to SEQ ID NO: 1725023
auuucuauaagcugcacug

SEQ ID NO: 1725025 - RNA, 19 nt, Artificial Sequence
  Description of Artificial Sequence: Synthetic oligonucleotide
  Sense strand starting at position 3975 of SEQ ID NO: 1562139
ccaggcacaccuugugauu

SEQ ID NO: 1725026 - RNA, 19 nt, Artificial Sequence
  Description of Artificial Sequence: Synthetic oligonucleotide
  Antisense strand to SEQ ID NO: 1725025
aaucacaaggugugccugg

SEQ ID NO: 1725027 - RNA, 19 nt, Artificial Sequence
  Description of Artificial Sequence: Synthetic oligonucleotide
  Sense strand starting at position 3978 of SEQ ID NO: 1562139
ggcacaccuugugauucua

SEQ ID NO: 1725028 - RNA, 19 nt, Artificial Sequence
  Description of Artificial Sequence: Synthetic oligonucleotide
  Antisense strand to SEQ ID NO: 1725027
uagaaucacaaggugugcc

SEQ ID NO: 1725029 - RNA, 19 nt, Artificial Sequence
  Description of Artificial Sequence: Synthetic oligonucleotide
  Sense strand starting at position 13 of SEQ ID NO: 1562140
uuuaguuucucauugguac

SEQ ID NO: 1725030 - RNA, 19 nt, Artificial Sequence
  Description of Artificial Sequence: Synthetic oligonucleotide
  Antisense strand to SEQ ID NO: 1725029
guaccaaugagaaacuaaa

SEQ ID NO: 1725031 - RNA, 19 nt, Artificial Sequence
  Description of Artificial Sequence: Synthetic oligonucleotide
  Sense strand starting at position 36 of SEQ ID NO: 1562140
caagaauccugggagauca

SEQ ID NO: 1725032 - RNA, 19 nt, Artificial Sequence
  Description of Artificial Sequence: Synthetic oligonucleotide
  Antisense strand to SEQ ID NO: 1725031
ugaucucccaggauucuug

SEQ ID NO: 1725033 - RNA, 19 nt, Artificial Sequence
  Description of Artificial Sequence: Synthetic oligonucleotide
  Sense strand starting at position 98 of SEQ ID NO: 1562140
cgacaaguagcucaagguu

SEQ ID NO: 1725034 - RNA, 19 nt, Artificial Sequence
  Description of Artificial Sequence: Synthetic oligonucleotide
  Antisense strand to SEQ ID NO: 1725033
aaccuugagcuacuugucg

SEQ ID NO: 1725035 - RNA, 19 nt, Artificial Sequence
  Description of Artificial Sequence: Synthetic oligonucleotide
  Sense strand starting at position 145 of SEQ ID NO: 1562140
cuggccuucugacuuggaa

SEQ ID NO: 1725036 - RNA, 19 nt, Artificial Sequence
  Description of Artificial Sequence: Synthetic oligonucleotide
  Antisense strand to SEQ ID NO: 1725035
uuccaagucagaaggccag

SEQ ID NO: 1725037 - RNA, 19 nt, Artificial Sequence
  Description of Artificial Sequence: Synthetic oligonucleotide
  Sense strand starting at position 335 of SEQ ID NO: 1562140
cuaguaucaaaguagguau

SEQ ID NO: 1725038 - RNA, 19 nt, Artificial Sequence
  Description of Artificial Sequence: Synthetic oligonucleotide
  Antisense strand to SEQ ID NO: 1725037
auaccuacuuugauacuag

SEQ ID NO: 1725039 - RNA, 19 nt, Artificial Sequence
  Description of Artificial Sequence: Synthetic oligonucleotide
  Sense strand starting at position 348 of SEQ ID NO: 1562140
agguaugugcucuaacuuc

SEQ ID NO: 1725040 - RNA, 19 nt, Artificial Sequence
  Description of Artificial Sequence: Synthetic oligonucleotide
  Antisense strand to SEQ ID NO: 1725039
gaaguuagagcacauaccu

SEQ ID NO: 1725041 - RNA, 19 nt, Artificial Sequence
  Description of Artificial Sequence: Synthetic oligonucleotide
  Sense strand starting at position 365 of SEQ ID NO: 1562140
ucauacuguucuguccaua

SEQ ID NO: 1725042 - RNA, 19 nt, Artificial Sequence
  Description of Artificial Sequence: Synthetic oligonucleotide
  Antisense strand to SEQ ID NO: 1725041
uauggacagaacaguauga

SEQ ID NO: 1725043 - RNA, 19 nt, Artificial Sequence
  Description of Artificial Sequence: Synthetic oligonucleotide
  Sense strand starting at position 888 of SEQ ID NO: 1562140
ggaagucagccuugaacuc

SEQ ID NO: 1725044 - RNA, 19 nt, Artificial Sequence
  Description of Artificial Sequence: Synthetic oligonucleotide
  Antisense strand to SEQ ID NO: 1725043
gaguucaaggcugacuucc

SEQ ID NO: 1725045 - RNA, 19 nt, Artificial Sequence
  Description of Artificial Sequence: Synthetic oligonucleotide
  Sense strand starting at position 889 of SEQ ID NO: 1562140
gaagucagccuugaacuca

SEQ ID NO: 1725046 - RNA, 19 nt, Artificial Sequence
  Description of Artificial Sequence: Synthetic oligonucleotide
  Antisense strand to SEQ ID NO: 1725045
ugaguucaaggcugacuuc

SEQ ID NO: 1725047 - RNA, 19 nt, Artificial Sequence
  Description of Artificial Sequence: Synthetic oligonucleotide
  Sense strand starting at position 952 of SEQ ID NO: 1562140
cagcgucugcugcucuaua

SEQ ID NO: 1725048 - RNA, 19 nt, Artificial Sequence
  Description of Artificial Sequence: Synthetic oligonucleotide
  Antisense strand to SEQ ID NO: 1725047
uauagagcagcagacgcug

SEQ ID NO: 1725049 - RNA, 19 nt, Artificial Sequence
  Description of Artificial Sequence: Synthetic oligonucleotide
  Sense strand starting at position 954 of SEQ ID NO: 1562140
gcgucugcugcucuauaau

SEQ ID NO: 1725050 - RNA, 19 nt, Artificial Sequence
  Description of Artificial Sequence: Synthetic oligonucleotide
  Antisense strand to SEQ ID NO: 1725049
auuauagagcagcagacgc

SEQ ID NO: 1725051 - RNA, 19 nt, Artificial Sequence
  Description of Artificial Sequence: Synthetic oligonucleotide
  Sense strand starting at position 1363 of SEQ ID NO: 1562140
uugucucaaucagucaaua

SEQ ID NO: 1725052 - RNA, 19 nt, Artificial Sequence
  Description of Artificial Sequence: Synthetic oligonucleotide
  Antisense strand to SEQ ID NO: 1725051
uauugacugauugagacaa

SEQ ID NO: 1725053 - RNA, 19 nt, Artificial Sequence
  Description of Artificial Sequence: Synthetic oligonucleotide
  Sense strand starting at position 1414 of SEQ ID NO: 1562140
agguucuacuaugugcuaa

SEQ ID NO: 1725054 - RNA, 19 nt, Artificial Sequence
  Description of Artificial Sequence: Synthetic oligonucleotide
  Antisense strand to SEQ ID NO: 1725053
uuagcacauaguagaaccu

SEQ ID NO: 1725055 - RNA, 19 nt, Artificial Sequence
  Description of Artificial Sequence: Synthetic oligonucleotide
  Sense strand starting at position 1527 of SEQ ID NO: 1562140
agaguuugaaagggucaga

SEQ ID NO: 1725056 - RNA, 19 nt, Artificial Sequence
  Description of Artificial Sequence: Synthetic oligonucleotide
  Antisense strand to SEQ ID NO: 1725055
ucugacccuuucaaacucu

SEQ ID NO: 1725057 - RNA, 19 nt, Artificial Sequence
  Description of Artificial Sequence: Synthetic oligonucleotide
  Sense strand starting at position 1614 of SEQ ID NO: 1562140
auuguuacaucaguaccau

SEQ ID NO: 1725058 - RNA, 19 nt, Artificial Sequence
  Description of Artificial Sequence: Synthetic oligonucleotide
  Antisense strand to SEQ ID NO: 1725057
augguacugauguaacaau

SEQ ID NO: 1725059 - RNA, 19 nt, Artificial Sequence
  Description of Artificial Sequence: Synthetic oligonucleotide
  Sense strand starting at position 1615 of SEQ ID NO: 1562140
uuguuacaucaguaccauu

SEQ ID NO: 1725060 - RNA, 19 nt, Artificial Sequence
  Description of Artificial Sequence: Synthetic oligonucleotide
  Antisense strand to SEQ ID NO: 1725059
aaugguacugauguaacaa

SEQ ID NO: 1725061 - RNA, 19 nt, Artificial Sequence
  Description of Artificial Sequence: Synthetic oligonucleotide
  Sense strand starting at position 1638 of SEQ ID NO: 1562140
aagggauuacuguguggca

SEQ ID NO: 1725062 - RNA, 19 nt, Artificial Sequence
  Description of Artificial Sequence: Synthetic oligonucleotide
  Antisense strand to SEQ ID NO: 1725061
ugccacacaguaaucccuu

SEQ ID NO: 1725063 - RNA, 19 nt, Artificial Sequence
  Description of Artificial Sequence: Synthetic oligonucleotide
  Sense strand starting at position 1639 of SEQ ID NO: 1562140
agggauuacuguguggcau

SEQ ID NO: 1725064 - RNA, 19 nt, Artificial Sequence
  Description of Artificial Sequence: Synthetic oligonucleotide
  Antisense strand to SEQ ID NO: 1725063
augccacacaguaaucccu

SEQ ID NO: 1725065 - RNA, 19 nt, Artificial Sequence
  Description of Artificial Sequence: Synthetic oligonucleotide
  Sense strand starting at position 1640 of SEQ ID NO: 1562140
gggauuacuguguggcauc

SEQ ID NO: 1725066 - RNA, 19 nt, Artificial Sequence
  Description of Artificial Sequence: Synthetic oligonucleotide
  Antisense strand to SEQ ID NO: 1725065
gaugccacacaguaauccc

SEQ ID NO: 1725067 - RNA, 19 nt, Artificial Sequence
  Description of Artificial Sequence: Synthetic oligonucleotide
  Sense strand starting at position 1758 of SEQ ID NO: 1562140
gucguaaggcuaggaagaa

SEQ ID NO: 1725068 - RNA, 19 nt, Artificial Sequence
  Description of Artificial Sequence: Synthetic oligonucleotide
  Antisense strand to SEQ ID NO: 1725067
uucuuccuagccuuacgac

SEQ ID NO: 1725069 - RNA, 19 nt, Artificial Sequence
  Description of Artificial Sequence: Synthetic oligonucleotide
  Sense strand starting at position 1779 of SEQ ID NO: 1562140
ggaucugagcucugaaccu

SEQ ID NO: 1725070 - RNA, 19 nt, Artificial Sequence
  Description of Artificial Sequence: Synthetic oligonucleotide
  Antisense strand to SEQ ID NO: 1725069
agguucagagcucagaucc

SEQ ID NO: 1725071 - RNA, 19 nt, Artificial Sequence
  Description of Artificial Sequence: Synthetic oligonucleotide
  Sense strand starting at position 1864 of SEQ ID NO: 1562140
gaaaguguuuggcuaaguu

SEQ ID NO: 1725072 - RNA, 19 nt, Artificial Sequence
  Description of Artificial Sequence: Synthetic oligonucleotide
  Antisense strand to SEQ ID NO: 1725071
aacuuagccaaacacuuuc

SEQ ID NO: 1725073 - RNA, 19 nt, Artificial Sequence
  Description of Artificial Sequence: Synthetic oligonucleotide
  Sense strand starting at position 1868 of SEQ ID NO: 1562140
guguuuggcuaaguuagaa

SEQ ID NO: 1725074 - RNA, 19 nt, Artificial Sequence
  Description of Artificial Sequence: Synthetic oligonucleotide
  Antisense strand to SEQ ID NO: 1725073
uucuaacuuagccaaacac

SEQ ID NO: 1725075 - RNA, 19 nt, Artificial Sequence
  Description of Artificial Sequence: Synthetic oligonucleotide
  Sense strand starting at position 1975 of SEQ ID NO: 1562140
agcuaaucucuauaugaug

SEQ ID NO: 1725076 - RNA, 19 nt, Artificial Sequence
  Description of Artificial Sequence: Synthetic oligonucleotide
  Antisense strand to SEQ ID NO: 1725075
caucauauagagauuagcu

SEQ ID NO: 1725077 - RNA, 19 nt, Artificial Sequence
  Description of Artificial Sequence: Synthetic oligonucleotide
  Sense strand starting at position 2011 of SEQ ID NO: 1562140
gaaagaggcuggucagaga

SEQ ID NO: 1725078 - RNA, 19 nt, Artificial Sequence
  Description of Artificial Sequence: Synthetic oligonucleotide
  Antisense strand to SEQ ID NO: 1725077
ucucugaccagccucuuuc

SEQ ID NO: 1725079 - RNA, 19 nt, Artificial Sequence
  Description of Artificial Sequence: Synthetic oligonucleotide
  Sense strand starting at position 2025 of SEQ ID NO: 1562140
agagacaucggccagugau

SEQ ID NO: 1725080 - RNA, 19 nt, Artificial Sequence
  Description of Artificial Sequence: Synthetic oligonucleotide
  Antisense strand to SEQ ID NO: 1725079
aucacuggccgaugucucu

SEQ ID NO: 1725081 - RNA, 19 nt, Artificial Sequence
  Description of Artificial Sequence: Synthetic oligonucleotide
  Sense strand starting at position 2028 of SEQ ID NO: 1562140
gacaucggccagugaugaa

SEQ ID NO: 1725082 - RNA, 19 nt, Artificial Sequence
  Description of Artificial Sequence: Synthetic oligonucleotide
  Antisense strand to SEQ ID NO: 1725081
uucaucacuggccgauguc

SEQ ID NO: 1725083 - RNA, 19 nt, Artificial Sequence
  Description of Artificial Sequence: Synthetic oligonucleotide
  Sense strand starting at position 2052 of SEQ ID NO: 1562140
ugacaucaucccugcugaa

SEQ ID NO: 1725084 - RNA, 19 nt, Artificial Sequence
  Description of Artificial Sequence: Synthetic oligonucleotide
  Antisense strand to SEQ ID NO: 1725083
uucagcagggaugauguca

SEQ ID NO: 1725085 - RNA, 19 nt, Artificial Sequence
  Description of Artificial Sequence: Synthetic oligonucleotide
  Sense strand starting at position 2471 of SEQ ID NO: 1562140
guggcuucuuuaguuauuu

SEQ ID NO: 1725086 - RNA, 19 nt, Artificial Sequence
  Description of Artificial Sequence: Synthetic oligonucleotide
  Antisense strand to SEQ ID NO: 1725085
aaauaacuaaagaagccac

SEQ ID NO: 1725087 - RNA, 19 nt, Artificial Sequence
  Description of Artificial Sequence: Synthetic oligonucleotide
  Sense strand starting at position 2491 of SEQ ID NO: 1562140
uugaacaucuaagaggaaa

SEQ ID NO: 1725088 - RNA, 19 nt, Artificial Sequence
  Description of Artificial Sequence: Synthetic oligonucleotide
  Antisense strand to SEQ ID NO: 1725087
uuuccucuuagauguucaa

SEQ ID NO: 1725089 - RNA, 19 nt, Artificial Sequence
  Description of Artificial Sequence: Synthetic oligonucleotide
  Sense strand starting at position 2502 of SEQ ID NO: 1562140
agaggaaagcuguaucugu

SEQ ID NO: 1725090 - RNA, 19 nt, Artificial Sequence
  Description of Artificial Sequence: Synthetic oligonucleotide
  Antisense strand to SEQ ID NO: 1725089
acagauacagcuuuccucu

SEQ ID NO: 1725091 - RNA, 19 nt, Artificial Sequence
  Description of Artificial Sequence: Synthetic oligonucleotide
  Sense strand starting at position 2507 of SEQ ID NO: 1562140
aaagcuguaucuguuuaga

SEQ ID NO: 1725092 - RNA, 19 nt, Artificial Sequence
  Description of Artificial Sequence: Synthetic oligonucleotide
  Antisense strand to SEQ ID NO: 1725091
ucuaaacagauacagcuuu

SEQ ID NO: 1725093 - RNA, 19 nt, Artificial Sequence
  Description of Artificial Sequence: Synthetic oligonucleotide
  Sense strand starting at position 2546 of SEQ ID NO: 1562140
agugauuccgaguagcuaa

SEQ ID NO: 1725094 - RNA, 19 nt, Artificial Sequence
  Description of Artificial Sequence: Synthetic oligonucleotide
  Antisense strand to SEQ ID NO: 1725093
uuagcuacucggaaucacu

SEQ ID NO: 1725095 - RNA, 19 nt, Artificial Sequence
  Description of Artificial Sequence: Synthetic oligonucleotide
  Sense strand starting at position 2690 of SEQ ID NO: 1562140
uuuacacaucccuggucua

SEQ ID NO: 1725096 - RNA, 19 nt, Artificial Sequence
  Description of Artificial Sequence: Synthetic oligonucleotide
  Antisense strand to SEQ ID NO: 1725095
uagaccagggauguguaaa

SEQ ID NO: 1725097 - RNA, 19 nt, Artificial Sequence
  Description of Artificial Sequence: Synthetic oligonucleotide
  Sense strand starting at position 2821 of SEQ ID NO: 1562140
ccuuccacuggcugugaaa

SEQ ID NO: 1725098 - RNA, 19 nt, Artificial Sequence
  Description of Artificial Sequence: Synthetic oligonucleotide
  Antisense strand to SEQ ID NO: 1725097
uuucacagccaguggaagg

SEQ ID NO: 1725099 - RNA, 19 nt, Artificial Sequence
  Description of Artificial Sequence: Synthetic oligonucleotide
  Sense strand starting at position 2823 of SEQ ID NO: 1562140
uuccacuggcugugaaaca

SEQ ID NO: 1725100 - RNA, 19 nt, Artificial Sequence
  Description of Artificial Sequence: Synthetic oligonucleotide
  Antisense strand to SEQ ID NO: 1725099
uguuucacagccaguggaa

SEQ ID NO: 1725101 - RNA, 19 nt, Artificial Sequence
  Description of Artificial Sequence: Synthetic oligonucleotide
  Sense strand starting at position 2927 of SEQ ID NO: 1562140
gaaagaagcuucccuagug

SEQ ID NO: 1725102 - RNA, 19 nt, Artificial Sequence
  Description of Artificial Sequence: Synthetic oligonucleotide
  Antisense strand to SEQ ID NO: 1725101
cacuagggaagcuucuuuc

SEQ ID NO: 1725103 - RNA, 19 nt, Artificial Sequence
  Description of Artificial Sequence: Synthetic oligonucleotide
  Sense strand starting at position 3106 of SEQ ID NO: 1562140
ggcuucgugaauugaauga

SEQ ID NO: 1725104 - RNA, 19 nt, Artificial Sequence
  Description of Artificial Sequence: Synthetic oligonucleotide
  Antisense strand to SEQ ID NO: 1725103
ucauucaauucacgaagcc

SEQ ID NO: 1725105 - RNA, 19 nt, Artificial Sequence
  Description of Artificial Sequence: Synthetic oligonucleotide
  Sense strand starting at position 3110 of SEQ ID NO: 1562140
ucgugaauugaaugaagua

SEQ ID NO: 1725106 - RNA, 19 nt, Artificial Sequence
  Description of Artificial Sequence: Synthetic oligonucleotide
  Antisense strand to SEQ ID NO: 1725105
uacuucauucaauucacga

SEQ ID NO: 1725107 - RNA, 19 nt, Artificial Sequence
  Description of Artificial Sequence: Synthetic oligonucleotide
  Sense strand starting at position 3787 of SEQ ID NO: 1562140
aaacacucggcccggaaau

SEQ ID NO: 1725108 - RNA, 19 nt, Artificial Sequence
  Description of Artificial Sequence: Synthetic oligonucleotide
  Antisense strand to SEQ ID NO: 1725107
auuuccgggccgaguguuu

SEQ ID NO: 1725109 - RNA, 19 nt, Artificial Sequence
  Description of Artificial Sequence: Synthetic oligonucleotide
  Sense strand starting at position 56 of SEQ ID NO: 1562141
acucgaaaguguuuggcua

SEQ ID NO: 1725110 - RNA, 19 nt, Artificial Sequence
  Description of Artificial Sequence: Synthetic oligonucleotide
  Antisense strand to SEQ ID NO: 1725109
uagccaaacacuuucgagu

SEQ ID NO: 1725111 - RNA, 19 nt, Artificial Sequence
  Description of Artificial Sequence: Synthetic oligonucleotide
  Sense strand starting at position 57 of SEQ ID NO: 1562141
cucgaaaguguuuggcuaa

SEQ ID NO: 1725112 - RNA, 19 nt, Artificial Sequence
  Description of Artificial Sequence: Synthetic oligonucleotide
  Antisense strand to SEQ ID NO: 1725111
uuagccaaacacuuucgag

SEQ ID NO: 1725113 - RNA, 19 nt, Artificial Sequence
  Description of Artificial Sequence: Synthetic oligonucleotide
  Sense strand starting at position 60 of SEQ ID NO: 1562141
gaaaguguuuggcuaaguu

SEQ ID NO: 1725114 - RNA, 19 nt, Artificial Sequence
  Description of Artificial Sequence: Synthetic oligonucleotide
  Antisense strand to SEQ ID NO: 1725113
aacuuagccaaacacuuuc

SEQ ID NO: 1725115 - RNA, 19 nt, Artificial Sequence
  Description of Artificial Sequence: Synthetic oligonucleotide
  Sense strand starting at position 64 of SEQ ID NO: 1562141
guguuuggcuaaguuagaa

SEQ ID NO: 1725116 - RNA, 19 nt, Artificial Sequence
  Description of Artificial Sequence: Synthetic oligonucleotide
  Antisense strand to SEQ ID NO: 1725115
uucuaacuuagccaaacac

SEQ ID NO: 1725117 - RNA, 19 nt, Artificial Sequence
  Description of Artificial Sequence: Synthetic oligonucleotide
  Sense strand starting at position 171 of SEQ ID NO: 1562141
agcuaaucucuauaugaug

SEQ ID NO: 1725118 - RNA, 19 nt, Artificial Sequence
  Description of Artificial Sequence: Synthetic oligonucleotide
  Antisense strand to SEQ ID NO: 1725117
caucauauagagauuagcu

SEQ ID NO: 1725119 - RNA, 19 nt, Artificial Sequence
  Description of Artificial Sequence: Synthetic oligonucleotide
  Sense strand starting at position 207 of SEQ ID NO: 1562141
gaaagaggcuggucagaga

SEQ ID NO: 1725120 - RNA, 19 nt, Artificial Sequence
  Description of Artificial Sequence: Synthetic oligonucleotide
  Antisense strand to SEQ ID NO: 1725119
ucucugaccagccucuuuc

SEQ ID NO: 1725121 - RNA, 19 nt, Artificial Sequence
  Description of Artificial Sequence: Synthetic oligonucleotide
  Sense strand starting at position 221 of SEQ ID NO: 1562141
agagacaucggccagugau

SEQ ID NO: 1725122 - RNA, 19 nt, Artificial Sequence
  Description of Artificial Sequence: Synthetic oligonucleotide
  Antisense strand to SEQ ID NO: 1725121
aucacuggccgaugucucu

SEQ ID NO: 1725123 - RNA, 19 nt, Artificial Sequence
  Description of Artificial Sequence: Synthetic oligonucleotide
  Sense strand starting at position 224 of SEQ ID NO: 1562141
gacaucggccagugaugaa

SEQ ID NO: 1725124 - RNA, 19 nt, Artificial Sequence
  Description of Artificial Sequence: Synthetic oligonucleotide
  Antisense strand to SEQ ID NO: 1725123
uucaucacuggccgauguc

SEQ ID NO: 1725125 - RNA, 19 nt, Artificial Sequence
  Description of Artificial Sequence: Synthetic oligonucleotide
  Sense strand starting at position 248 of SEQ ID NO: 1562141
ugacaucaucccugcugaa

SEQ ID NO: 1725126 - RNA, 19 nt, Artificial Sequence
  Description of Artificial Sequence: Synthetic oligonucleotide
  Antisense strand to SEQ ID NO: 1725125
uucagcagggaugauguca

SEQ ID NO: 1725127 - RNA, 19 nt, Artificial Sequence
  Description of Artificial Sequence: Synthetic oligonucleotide
  Sense strand starting at position 667 of SEQ ID NO: 1562141
guggcuucuuuaguuauuu

SEQ ID NO: 1725128 - RNA, 19 nt, Artificial Sequence
  Description of Artificial Sequence: Synthetic oligonucleotide
  Antisense strand to SEQ ID NO: 1725127
aaauaacuaaagaagccac

SEQ ID NO: 1725129 - RNA, 19 nt, Artificial Sequence
  Description of Artificial Sequence: Synthetic oligonucleotide
  Sense strand starting at position 687 of SEQ ID NO: 1562141
uugaacaucuaagaggaaa

SEQ ID NO: 1725130 - RNA, 19 nt, Artificial Sequence
  Description of Artificial Sequence: Synthetic oligonucleotide
  Antisense strand to SEQ ID NO: 1725129
uuuccucuuagauguucaa

SEQ ID NO: 1725131 - RNA, 19 nt, Artificial Sequence
  Description of Artificial Sequence: Synthetic oligonucleotide
  Sense strand starting at position 698 of SEQ ID NO: 1562141
agaggaaagcuguaucugu

SEQ ID NO: 1725132 - RNA, 19 nt, Artificial Sequence
  Description of Artificial Sequence: Synthetic oligonucleotide
  Antisense strand to SEQ ID NO: 1725131
acagauacagcuuuccucu

SEQ ID NO: 1725133 - RNA, 19 nt, Artificial Sequence
  Description of Artificial Sequence: Synthetic oligonucleotide
  Sense strand starting at position 703 of SEQ ID NO: 1562141
aaagcuguaucuguuuaga

SEQ ID NO: 1725134 - RNA, 19 nt, Artificial Sequence
  Description of Artificial Sequence: Synthetic oligonucleotide
  Antisense strand to SEQ ID NO: 1725133
ucuaaacagauacagcuuu

SEQ ID NO: 1725135 - RNA, 19 nt, Artificial Sequence
  Description of Artificial Sequence: Synthetic oligonucleotide
  Sense strand starting at position 705 of SEQ ID NO: 1562141
agcuguaucuguuuagagu

SEQ ID NO: 1725136 - RNA, 19 nt, Artificial Sequence
  Description of Artificial Sequence: Synthetic oligonucleotide
  Antisense strand to SEQ ID NO: 1725135
acucuaaacagauacagcu

SEQ ID NO: 1725137 - RNA, 19 nt, Artificial Sequence
  Description of Artificial Sequence: Synthetic oligonucleotide
  Sense strand starting at position 706 of SEQ ID NO: 1562141
gcuguaucuguuuagaguc

SEQ ID NO: 1725138 - RNA, 19 nt, Artificial Sequence
  Description of Artificial Sequence: Synthetic oligonucleotide
  Antisense strand to SEQ ID NO: 1725137
gacucuaaacagauacagc

SEQ ID NO: 1725139 - RNA, 19 nt, Artificial Sequence
  Description of Artificial Sequence: Synthetic oligonucleotide
  Sense strand starting at position 742 of SEQ ID NO: 1562141
agugauuccgaguagcuaa

SEQ ID NO: 1725140 - RNA, 19 nt, Artificial Sequence
  Description of Artificial Sequence: Synthetic oligonucleotide
  Antisense strand to SEQ ID NO: 1725139
uuagcuacucggaaucacu

SEQ ID NO: 1725141 - RNA, 19 nt, Artificial Sequence
  Description of Artificial Sequence: Synthetic oligonucleotide
  Sense strand starting at position 886 of SEQ ID NO: 1562141
uuuacacaucccuggucua

SEQ ID NO: 1725142 - RNA, 19 nt, Artificial Sequence
  Description of Artificial Sequence: Synthetic oligonucleotide
  Antisense strand to SEQ ID NO: 1725141
uagaccagggauguguaaa

SEQ ID NO: 1725143 - RNA, 19 nt, Artificial Sequence
  Description of Artificial Sequence: Synthetic oligonucleotide
  Sense strand starting at position 1017 of SEQ ID NO: 1562141
ccuuccacuggcugugaaa

SEQ ID NO: 1725144 - RNA, 19 nt, Artificial Sequence
  Description of Artificial Sequence: Synthetic oligonucleotide
  Antisense strand to SEQ ID NO: 1725143
uuucacagccaguggaagg

SEQ ID NO: 1725145 - RNA, 19 nt, Artificial Sequence
  Description of Artificial Sequence: Synthetic oligonucleotide
  Sense strand starting at position 1019 of SEQ ID NO: 1562141
uuccacuggcugugaaaca

SEQ ID NO: 1725146 - RNA, 19 nt, Artificial Sequence
  Description of Artificial Sequence: Synthetic oligonucleotide
  Antisense strand to SEQ ID NO: 1725145
uguuucacagccaguggaa

SEQ ID NO: 1725147 - RNA, 19 nt, Artificial Sequence
  Description of Artificial Sequence: Synthetic oligonucleotide
  Sense strand starting at position 1123 of SEQ ID NO: 1562141
gaaagaagcuucccuagug

SEQ ID NO: 1725148 - RNA, 19 nt, Artificial Sequence
  Description of Artificial Sequence: Synthetic oligonucleotide
  Antisense strand to SEQ ID NO: 1725147
cacuagggaagcuucuuuc

SEQ ID NO: 1725149 - RNA, 19 nt, Artificial Sequence
  Description of Artificial Sequence: Synthetic oligonucleotide
  Sense strand starting at position 1250 of SEQ ID NO: 1562141
ggccacgucaguugugaaa

SEQ ID NO: 1725150 - RNA, 19 nt, Artificial Sequence
  Description of Artificial Sequence: Synthetic oligonucleotide
  Antisense strand to SEQ ID NO: 1725149
uuucacaacugacguggcc

SEQ ID NO: 1725151 - RNA, 19 nt, Artificial Sequence
  Description of Artificial Sequence: Synthetic oligonucleotide
  Sense strand starting at position 1302 of SEQ ID NO: 1562141
ggcuucgugaauugaauga

SEQ ID NO: 1725152 - RNA, 19 nt, Artificial Sequence
  Description of Artificial Sequence: Synthetic oligonucleotide
  Antisense strand to SEQ ID NO: 1725151
ucauucaauucacgaagcc

SEQ ID NO: 1725153 - RNA, 19 nt, Artificial Sequence
  Description of Artificial Sequence: Synthetic oligonucleotide
  Sense strand starting at position 1306 of SEQ ID NO: 1562141
ucgugaauugaaugaagua

SEQ ID NO: 1725154 - RNA, 19 nt, Artificial Sequence
  Description of Artificial Sequence: Synthetic oligonucleotide
  Antisense strand to SEQ ID NO: 1725153
uacuucauucaauucacga

SEQ ID NO: 1725155 - RNA, 19 nt, Artificial Sequence
  Description of Artificial Sequence: Synthetic oligonucleotide
  Sense strand starting at position 1365 of SEQ ID NO: 1562141
ggcccugcaugaucucauu

SEQ ID NO: 1725156 - RNA, 19 nt, Artificial Sequence
  Description of Artificial Sequence: Synthetic oligonucleotide
  Antisense strand to SEQ ID NO: 1725155
aaugagaucaugcagggcc

SEQ ID NO: 1725157 - RNA, 19 nt, Artificial Sequence
  Description of Artificial Sequence: Synthetic oligonucleotide
  Sense strand starting at position 1983 of SEQ ID NO: 1562141
aaacacucggcccggaaau

SEQ ID NO: 1725158 - RNA, 19 nt, Artificial Sequence
  Description of Artificial Sequence: Synthetic oligonucleotide
  Antisense strand to SEQ ID NO: 1725157
auuuccgggccgaguguuu

SEQ ID NO: 1725159 - RNA, 19 nt, Artificial Sequence
  Description of Artificial Sequence: Synthetic oligonucleotide
  Sense strand starting at position 2287 of SEQ ID NO: 1562141
ggagcugggagcuaugagu

SEQ ID NO: 1725160 - RNA, 19 nt, Artificial Sequence
  Description of Artificial Sequence: Synthetic oligonucleotide
  Antisense strand to SEQ ID NO: 1725159
acucauagcucccagcucc

SEQ ID NO: 1725161 - RNA, 19 nt, Artificial Sequence
  Description of Artificial Sequence: Synthetic oligonucleotide
  Sense strand starting at position 2360 of SEQ ID NO: 1562141
acgagcuguacucaugacu

SEQ ID NO: 1725162 - RNA, 19 nt, Artificial Sequence
  Description of Artificial Sequence: Synthetic oligonucleotide
  Antisense strand to SEQ ID NO: 1725161
agucaugaguacagcucgu

SEQ ID NO: 1725163 - RNA, 19 nt, Artificial Sequence
  Description of Artificial Sequence: Synthetic oligonucleotide
  Sense strand starting at position 2454 of SEQ ID NO: 1562141
gagccagugagaugcugaa

SEQ ID NO: 1725164 - RNA, 19 nt, Artificial Sequence
  Description of Artificial Sequence: Synthetic oligonucleotide
  Antisense strand to SEQ ID NO: 1725163
uucagcaucucacuggcuc

SEQ ID NO: 1725165 - RNA, 19 nt, Artificial Sequence
  Description of Artificial Sequence: Synthetic oligonucleotide
  Sense strand starting at position 2470 of SEQ ID NO: 1562141
gaaaucacgcgugauugga

SEQ ID NO: 1725166 - RNA, 19 nt, Artificial Sequence
  Description of Artificial Sequence: Synthetic oligonucleotide
  Antisense strand to SEQ ID NO: 1725165
uccaaucacgcgugauuuc

SEQ ID NO: 1725167 - RNA, 19 nt, Artificial Sequence
  Description of Artificial Sequence: Synthetic oligonucleotide
  Sense strand starting at position 2472 of SEQ ID NO: 1562141
aaucacgcgugauuggaau

SEQ ID NO: 1725168 - RNA, 19 nt, Artificial Sequence
  Description of Artificial Sequence: Synthetic oligonucleotide
  Antisense strand to SEQ ID NO: 1725167
auuccaaucacgcgugauu

SEQ ID NO: 1725169 - RNA, 19 nt, Artificial Sequence
  Description of Artificial Sequence: Synthetic oligonucleotide
  Sense strand starting at position 2828 of SEQ ID NO: 1562141
agcacuuucggauaaacua

SEQ ID NO: 1725170 - RNA, 19 nt, Artificial Sequence
  Description of Artificial Sequence: Synthetic oligonucleotide
  Antisense strand to SEQ ID NO: 1725169
uaguuuauccgaaagugcu

SEQ ID NO: 1725171 - RNA, 19 nt, Artificial Sequence
  Description of Artificial Sequence: Synthetic oligonucleotide
  Sense strand starting at position 2959 of SEQ ID NO: 1562141
guaggauucucacucugag

SEQ ID NO: 1725172 - RNA, 19 nt, Artificial Sequence
  Description of Artificial Sequence: Synthetic oligonucleotide
  Antisense strand to SEQ ID NO: 1725171
cucagagugagaauccuac

SEQ ID NO: 1725173 - RNA, 19 nt, Artificial Sequence
  Description of Artificial Sequence: Synthetic oligonucleotide
  Sense strand starting at position 3035 of SEQ ID NO: 1562141
cugggaaacguuuggagaa

SEQ ID NO: 1725174 - RNA, 19 nt, Artificial Sequence
  Description of Artificial Sequence: Synthetic oligonucleotide
  Antisense strand to SEQ ID NO: 1725173
uucuccaaacguuucccag

SEQ ID NO: 1725175 - RNA, 19 nt, Artificial Sequence
  Description of Artificial Sequence: Synthetic oligonucleotide
  Sense strand starting at position 3134 of SEQ ID NO: 1562141
ucuuuaucagcucauguuu

SEQ ID NO: 1725176 - RNA, 19 nt, Artificial Sequence
  Description of Artificial Sequence: Synthetic oligonucleotide
  Antisense strand to SEQ ID NO: 1725175
aaacaugagcugauaaaga

SEQ ID NO: 1725177 - RNA, 19 nt, Artificial Sequence
  Description of Artificial Sequence: Synthetic oligonucleotide
  Sense strand starting at position 3166 of SEQ ID NO: 1562141
aauuaucugcaaugugaug

SEQ ID NO: 1725178 - RNA, 19 nt, Artificial Sequence
  Description of Artificial Sequence: Synthetic oligonucleotide
  Antisense strand to SEQ ID NO: 1725177
caucacauugcagauaauu

SEQ ID NO: 1725179 - RNA, 19 nt, Artificial Sequence
  Description of Artificial Sequence: Synthetic oligonucleotide
  Sense strand starting at position 3194 of SEQ ID NO: 1562141
ggaauuccaucugagacaa

SEQ ID NO: 1725180 - RNA, 19 nt, Artificial Sequence
  Description of Artificial Sequence: Synthetic oligonucleotide
  Antisense strand to SEQ ID NO: 1725179
uugucucagauggaauucc

SEQ ID NO: 1725181 - RNA, 19 nt, Artificial Sequence
  Description of Artificial Sequence: Synthetic oligonucleotide
  Sense strand starting at position 3247 of SEQ ID NO: 1562141
ucagcacucugguuuggua

SEQ ID NO: 1725182 - RNA, 19 nt, Artificial Sequence
  Description of Artificial Sequence: Synthetic oligonucleotide
  Antisense strand to SEQ ID NO: 1725181
uaccaaaccagagugcuga

SEQ ID NO: 1725183 - RNA, 19 nt, Artificial Sequence
  Description of Artificial Sequence: Synthetic oligonucleotide
  Sense strand starting at position 3377 of SEQ ID NO: 1562141
guaggaaacccuggucauc

SEQ ID NO: 1725184 - RNA, 19 nt, Artificial Sequence
  Description of Artificial Sequence: Synthetic oligonucleotide
  Antisense strand to SEQ ID NO: 1725183
gaugaccaggguuuccuac

SEQ ID NO: 1725185 - RNA, 19 nt, Artificial Sequence
  Description of Artificial Sequence: Synthetic oligonucleotide
  Sense strand starting at position 3379 of SEQ ID NO: 1562141
aggaaacccuggucaucau

SEQ ID NO: 1725186 - RNA, 19 nt, Artificial Sequence
  Description of Artificial Sequence: Synthetic oligonucleotide
  Antisense strand to SEQ ID NO: 1725185
augaugaccaggguuuccu

SEQ ID NO: 1725187 - RNA, 19 nt, Artificial Sequence
  Description of Artificial Sequence: Synthetic oligonucleotide
  Sense strand starting at position 3784 of SEQ ID NO: 1562141
gcuugugauuucucuacuu

SEQ ID NO: 1725188 - RNA, 19 nt, Artificial Sequence
  Description of Artificial Sequence: Synthetic oligonucleotide
  Antisense strand to SEQ ID NO: 1725187
aaguagagaaaucacaagc

SEQ ID NO: 1725189 - RNA, 19 nt, Artificial Sequence
  Description of Artificial Sequence: Synthetic oligonucleotide
  Sense strand starting at position 30 of SEQ ID NO: 1562142
aagaaauucuggccaggca

SEQ ID NO: 1725190 - RNA, 19 nt, Artificial Sequence
  Description of Artificial Sequence: Synthetic oligonucleotide
  Antisense strand to SEQ ID NO: 1725189
ugccuggccagaauuucuu

SEQ ID NO: 1725191 - RNA, 19 nt, Artificial Sequence
  Description of Artificial Sequence: Synthetic oligonucleotide
  Sense strand starting at position 31 of SEQ ID NO: 1562142
agaaauucuggccaggcau

SEQ ID NO: 1725192 - RNA, 19 nt, Artificial Sequence
  Description of Artificial Sequence: Synthetic oligonucleotide
  Antisense strand to SEQ ID NO: 1725191
augccuggccagaauuucu

SEQ ID NO: 1725193 - RNA, 19 nt, Artificial Sequence
  Description of Artificial Sequence: Synthetic oligonucleotide
  Sense strand starting at position 366 of SEQ ID NO: 1562142
ggcgucucacgccucuaau

SEQ ID NO: 1725194 - RNA, 19 nt, Artificial Sequence
  Description of Artificial Sequence: Synthetic oligonucleotide
  Antisense strand to SEQ ID NO: 1725193
auuagaggcgugagacgcc

SEQ ID NO: 1725195 - RNA, 19 nt, Artificial Sequence
  Description of Artificial Sequence: Synthetic oligonucleotide
  Sense strand starting at position 739 of SEQ ID NO: 1562142
cuuagugguaucuggagaa

SEQ ID NO: 1725196 - RNA, 19 nt, Artificial Sequence
  Description of Artificial Sequence: Synthetic oligonucleotide
  Antisense strand to SEQ ID NO: 1725195
uucuccagauaccacuaag

SEQ ID NO: 1725197 - RNA, 19 nt, Artificial Sequence
  Description of Artificial Sequence: Synthetic oligonucleotide
  Sense strand starting at position 743 of SEQ ID NO: 1562142
gugguaucuggagaaacuu

SEQ ID NO: 1725198 - RNA, 19 nt, Artificial Sequence
  Description of Artificial Sequence: Synthetic oligonucleotide
  Antisense strand to SEQ ID NO: 1725197
aaguuucuccagauaccac

SEQ ID NO: 1725199 - RNA, 19 nt, Artificial Sequence
  Description of Artificial Sequence: Synthetic oligonucleotide
  Sense strand starting at position 757 of SEQ ID NO: 1562142
aacuuuagggucuggaagu

SEQ ID NO: 1725200 - RNA, 19 nt, Artificial Sequence
  Description of Artificial Sequence: Synthetic oligonucleotide
  Antisense strand to SEQ ID NO: 1725199
acuuccagacccuaaaguu

SEQ ID NO: 1725201 - RNA, 19 nt, Artificial Sequence
  Description of Artificial Sequence: Synthetic oligonucleotide
  Sense strand starting at position 767 of SEQ ID NO: 1562142
ucuggaagucccugaugaa

SEQ ID NO: 1725202 - RNA, 19 nt, Artificial Sequence
  Description of Artificial Sequence: Synthetic oligonucleotide
  Antisense strand to SEQ ID NO: 1725201
uucaucagggacuuccaga

SEQ ID NO: 1725203 - RNA, 19 nt, Artificial Sequence
  Description of Artificial Sequence: Synthetic oligonucleotide
  Sense strand starting at position 788 of SEQ ID NO: 1562142
acuggaauuugucagaaug

SEQ ID NO: 1725204 - RNA, 19 nt, Artificial Sequence
  Description of Artificial Sequence: Synthetic oligonucleotide
  Antisense strand to SEQ ID NO: 1725203
cauucugacaaauuccagu

SEQ ID NO: 1725205 - RNA, 19 nt, Artificial Sequence
  Description of Artificial Sequence: Synthetic oligonucleotide
  Sense strand starting at position 1310 of SEQ ID NO: 1562142
gccucacaugcgggaauuu

SEQ ID NO: 1725206 - RNA, 19 nt, Artificial Sequence
  Description of Artificial Sequence: Synthetic oligonucleotide
  Antisense strand to SEQ ID NO: 1725205
aaauucccgcaugugaggc

SEQ ID NO: 1725207 - RNA, 19 nt, Artificial Sequence
  Description of Artificial Sequence: Synthetic oligonucleotide
  Sense strand starting at position 1341 of SEQ ID NO: 1562142
gcuguauuccuuccguagu

SEQ ID NO: 1725208 - RNA, 19 nt, Artificial Sequence
  Description of Artificial Sequence: Synthetic oligonucleotide
  Antisense strand to SEQ ID NO: 1725207
acuacggaaggaauacagc

SEQ ID NO: 1725209 - RNA, 19 nt, Artificial Sequence
  Description of Artificial Sequence: Synthetic oligonucleotide
  Sense strand starting at position 1560 of SEQ ID NO: 1562142
aaugaaauggaacguuauu

SEQ ID NO: 1725210 - RNA, 19 nt, Artificial Sequence
  Description of Artificial Sequence: Synthetic oligonucleotide
  Antisense strand to SEQ ID NO: 1725209
aauaacguuccauuucauu

SEQ ID NO: 1725211 - RNA, 19 nt, Artificial Sequence
  Description of Artificial Sequence: Synthetic oligonucleotide
  Sense strand starting at position 1577 of SEQ ID NO: 1562142
uucucaguucuuugaggag

SEQ ID NO: 1725212 - RNA, 19 nt, Artificial Sequence
  Description of Artificial Sequence: Synthetic oligonucleotide
  Antisense strand to SEQ ID NO: 1725211
cuccucaaagaacugagaa

SEQ ID NO: 1725213 - RNA, 19 nt, Artificial Sequence
  Description of Artificial Sequence: Synthetic oligonucleotide
  Sense strand starting at position 1772 of SEQ ID NO: 1562142
aguuauugauuggcaagga

SEQ ID NO: 1725214 - RNA, 19 nt, Artificial Sequence
  Description of Artificial Sequence: Synthetic oligonucleotide
  Antisense strand to SEQ ID NO: 1725213
uccuugccaaucaauaacu

SEQ ID NO: 1725215 - RNA, 19 nt, Artificial Sequence
  Description of Artificial Sequence: Synthetic oligonucleotide
  Sense strand starting at position 1782 of SEQ ID NO: 1562142
uggcaaggauguuuggaau

SEQ ID NO: 1725216 - RNA, 19 nt, Artificial Sequence
  Description of Artificial Sequence: Synthetic oligonucleotide
  Antisense strand to SEQ ID NO: 1725215
auuccaaacauccuugcca

SEQ ID NO: 1725217 - RNA, 19 nt, Artificial Sequence
  Description of Artificial Sequence: Synthetic oligonucleotide
  Sense strand starting at position 1951 of SEQ ID NO: 1562142
agaggaccuggaugaguuu

SEQ ID NO: 1725218 - RNA, 19 nt, Artificial Sequence
  Description of Artificial Sequence: Synthetic oligonucleotide
  Antisense strand to SEQ ID NO: 1725217
aaacucauccagguccucu

SEQ ID NO: 1725219 - RNA, 19 nt, Artificial Sequence
  Description of Artificial Sequence: Synthetic oligonucleotide
  Sense strand starting at position 2008 of SEQ ID NO: 1562142
cgguuugugagggaauagu

SEQ ID NO: 1725220 - RNA, 19 nt, Artificial Sequence
  Description of Artificial Sequence: Synthetic oligonucleotide
  Antisense strand to SEQ ID NO: 1725219
acuauucccucacaaaccg

SEQ ID NO: 1725221 - RNA, 19 nt, Artificial Sequence
  Description of Artificial Sequence: Synthetic oligonucleotide
  Sense strand starting at position 2213 of SEQ ID NO: 1562142
acgagucacccagauaguu

SEQ ID NO: 1725222 - RNA, 19 nt, Artificial Sequence
  Description of Artificial Sequence: Synthetic oligonucleotide
  Antisense strand to SEQ ID NO: 1725221
aacuaucugggugacucgu

SEQ ID NO: 1725223 - RNA, 19 nt, Artificial Sequence
  Description of Artificial Sequence: Synthetic oligonucleotide
  Sense strand starting at position 2237 of SEQ ID NO: 1562142
ccuugauauccuuaucugu

SEQ ID NO: 1725224 - RNA, 19 nt, Artificial Sequence
  Description of Artificial Sequence: Synthetic oligonucleotide
  Antisense strand to SEQ ID NO: 1725223
acagauaaggauaucaagg

SEQ ID NO: 1725225 - RNA, 19 nt, Artificial Sequence
  Description of Artificial Sequence: Synthetic oligonucleotide
  Sense strand starting at position 2276 of SEQ ID NO: 1562142
ccacuaccucauuaggagu

SEQ ID NO: 1725226 - RNA, 19 nt, Artificial Sequence
  Description of Artificial Sequence: Synthetic oligonucleotide
  Antisense strand to SEQ ID NO: 1725225
acuccuaaugagguagugg

SEQ ID NO: 1725227 - RNA, 19 nt, Artificial Sequence
  Description of Artificial Sequence: Synthetic oligonucleotide
  Sense strand starting at position 2308 of SEQ ID NO: 1562142
ugagaucauuuguauggaa

SEQ ID NO: 1725228 - RNA, 19 nt, Artificial Sequence
  Description of Artificial Sequence: Synthetic oligonucleotide
  Antisense strand to SEQ ID NO: 1725227
uuccauacaaaugaucuca

SEQ ID NO: 1725229 - RNA, 19 nt, Artificial Sequence
  Description of Artificial Sequence: Synthetic oligonucleotide
  Sense strand starting at position 2358 of SEQ ID NO: 1562142
aagugcuucgugccuugua

SEQ ID NO: 1725230 - RNA, 19 nt, Artificial Sequence
  Description of Artificial Sequence: Synthetic oligonucleotide
  Antisense strand to SEQ ID NO: 1725229
uacaaggcacgaagcacuu

SEQ ID NO: 1725231 - RNA, 19 nt, Artificial Sequence
  Description of Artificial Sequence: Synthetic oligonucleotide
  Sense strand starting at position 2360 of SEQ ID NO: 1562142
gugcuucgugccuuguaga

SEQ ID NO: 1725232 - RNA, 19 nt, Artificial Sequence
  Description of Artificial Sequence: Synthetic oligonucleotide
  Antisense strand to SEQ ID NO: 1725231
ucuacaaggcacgaagcac

SEQ ID NO: 1725233 - RNA, 19 nt, Artificial Sequence
  Description of Artificial Sequence: Synthetic oligonucleotide
  Sense strand starting at position 2368 of SEQ ID NO: 1562142
ugccuuguagaguaagacu

SEQ ID NO: 1725234 - RNA, 19 nt, Artificial Sequence
  Description of Artificial Sequence: Synthetic oligonucleotide
  Antisense strand to SEQ ID NO: 1725233
agucuuacucuacaaggca

SEQ ID NO: 1725235 - RNA, 19 nt, Artificial Sequence
  Description of Artificial Sequence: Synthetic oligonucleotide
  Sense strand starting at position 2376 of SEQ ID NO: 1562142
agaguaagacuucggguca

SEQ ID NO: 1725236 - RNA, 19 nt, Artificial Sequence
  Description of Artificial Sequence: Synthetic oligonucleotide
  Antisense strand to SEQ ID NO: 1725235
ugacccgaagucuuacucu

SEQ ID NO: 1725237 - RNA, 19 nt, Artificial Sequence
  Description of Artificial Sequence: Synthetic oligonucleotide
  Sense strand starting at position 2387 of SEQ ID NO: 1562142
ucgggucagacccaguauu

SEQ ID NO: 1725238 - RNA, 19 nt, Artificial Sequence
  Description of Artificial Sequence: Synthetic oligonucleotide
  Antisense strand to SEQ ID NO: 1725237
aauacugggucugacccga

SEQ ID NO: 1725239 - RNA, 19 nt, Artificial Sequence
  Description of Artificial Sequence: Synthetic oligonucleotide
  Sense strand starting at position 2687 of SEQ ID NO: 1562142
gggauuacaggccagguau

SEQ ID NO: 1725240 - RNA, 19 nt, Artificial Sequence
  Description of Artificial Sequence: Synthetic oligonucleotide
  Antisense strand to SEQ ID NO: 1725239
auaccuggccuguaauccc

SEQ ID NO: 1725241 - RNA, 19 nt, Artificial Sequence
  Description of Artificial Sequence: Synthetic oligonucleotide
  Sense strand starting at position 2825 of SEQ ID NO: 1562142
acacaaugucuaggccuaa

SEQ ID NO: 1725242 - RNA, 19 nt, Artificial Sequence
  Description of Artificial Sequence: Synthetic oligonucleotide
  Antisense strand to SEQ ID NO: 1725241
uuaggccuagacauugugu

SEQ ID NO: 1725243 - RNA, 19 nt, Artificial Sequence
  Description of Artificial Sequence: Synthetic oligonucleotide
  Sense strand starting at position 2978 of SEQ ID NO: 1562142
gugauucuaaacgaaguga

SEQ ID NO: 1725244 - RNA, 19 nt, Artificial Sequence
  Description of Artificial Sequence: Synthetic oligonucleotide
  Antisense strand to SEQ ID NO: 1725243
ucacuucguuuagaaucac

SEQ ID NO: 1725245 - RNA, 19 nt, Artificial Sequence
  Description of Artificial Sequence: Synthetic oligonucleotide
  Sense strand starting at position 3020 of SEQ ID NO: 1562142
gagaccuuccagugaucaa

SEQ ID NO: 1725246 - RNA, 19 nt, Artificial Sequence
  Description of Artificial Sequence: Synthetic oligonucleotide
  Antisense strand to SEQ ID NO: 1725245
uugaucacuggaaggucuc

SEQ ID NO: 1725247 - RNA, 19 nt, Artificial Sequence
  Description of Artificial Sequence: Synthetic oligonucleotide
  Sense strand starting at position 3023 of SEQ ID NO: 1562142
accuuccagugaucaagau

SEQ ID NO: 1725248 - RNA, 19 nt, Artificial Sequence
  Description of Artificial Sequence: Synthetic oligonucleotide
  Antisense strand to SEQ ID NO: 1725247
aucuugaucacuggaaggu

SEQ ID NO: 1725249 - RNA, 19 nt, Artificial Sequence
  Description of Artificial Sequence: Synthetic oligonucleotide
  Sense strand starting at position 3027 of SEQ ID NO: 1562142
uccagugaucaagauguca

SEQ ID NO: 1725250 - RNA, 19 nt, Artificial Sequence
  Description of Artificial Sequence: Synthetic oligonucleotide
  Antisense strand to SEQ ID NO: 1725249
ugacaucuugaucacugga

SEQ ID NO: 1725251 - RNA, 19 nt, Artificial Sequence
  Description of Artificial Sequence: Synthetic oligonucleotide
  Sense strand starting at position 3043 of SEQ ID NO: 1562142
ucagcaucggcuguuuauu

SEQ ID NO: 1725252 - RNA, 19 nt, Artificial Sequence
  Description of Artificial Sequence: Synthetic oligonucleotide
  Antisense strand to SEQ ID NO: 1725251
aauaaacagccgaugcuga

SEQ ID NO: 1725253 - RNA, 19 nt, Artificial Sequence
  Description of Artificial Sequence: Synthetic oligonucleotide
  Sense strand starting at position 3194 of SEQ ID NO: 1562142
gcagguggagcccaucaau

SEQ ID NO: 1725254 - RNA, 19 nt, Artificial Sequence
  Description of Artificial Sequence: Synthetic oligonucleotide
  Antisense strand to SEQ ID NO: 1725253
auugaugggcuccaccugc

SEQ ID NO: 1725255 - RNA, 19 nt, Artificial Sequence
  Description of Artificial Sequence: Synthetic oligonucleotide
  Sense strand starting at position 3357 of SEQ ID NO: 1562142
ccacuuugucauuaaaugu

SEQ ID NO: 1725256 - RNA, 19 nt, Artificial Sequence
  Description of Artificial Sequence: Synthetic oligonucleotide
  Antisense strand to SEQ ID NO: 1725255
acauuuaaugacaaagugg

SEQ ID NO: 1725257 - RNA, 19 nt, Artificial Sequence
  Description of Artificial Sequence: Synthetic oligonucleotide
  Sense strand starting at position 3456 of SEQ ID NO: 1562142
gcugcagcccuguuuauau

SEQ ID NO: 1725258 - RNA, 19 nt, Artificial Sequence
  Description of Artificial Sequence: Synthetic oligonucleotide
  Antisense strand to SEQ ID NO: 1725257
auauaaacagggcugcagc

SEQ ID NO: 1725259 - RNA, 19 nt, Artificial Sequence
  Description of Artificial Sequence: Synthetic oligonucleotide
  Sense strand starting at position 3529 of SEQ ID NO: 1562142
gguagugucugauuugccu

SEQ ID NO: 1725260 - RNA, 19 nt, Artificial Sequence
  Description of Artificial Sequence: Synthetic oligonucleotide
  Antisense strand to SEQ ID NO: 1725259
aggcaaaucagacacuacc

SEQ ID NO: 1725261 - RNA, 19 nt, Artificial Sequence
  Description of Artificial Sequence: Synthetic oligonucleotide
  Sense strand starting at position 3537 of SEQ ID NO: 1562142
cugauuugccugugcaacu

SEQ ID NO: 1725262 - RNA, 19 nt, Artificial Sequence
  Description of Artificial Sequence: Synthetic oligonucleotide
  Antisense strand to SEQ ID NO: 1725261
aguugcacaggcaaaucag

SEQ ID NO: 1725263 - RNA, 19 nt, Artificial Sequence
  Description of Artificial Sequence: Synthetic oligonucleotide
  Sense strand starting at position 3586 of SEQ ID NO: 1562142
ggguucuggugcauugagu

SEQ ID NO: 1725264 - RNA, 19 nt, Artificial Sequence
  Description of Artificial Sequence: Synthetic oligonucleotide
  Antisense strand to SEQ ID NO: 1725263
acucaaugcaccagaaccc

SEQ ID NO: 1725265 - RNA, 19 nt, Artificial Sequence
  Description of Artificial Sequence: Synthetic oligonucleotide
  Sense strand starting at position 3621 of SEQ ID NO: 1562142
gagguauaacugcaaugcu

SEQ ID NO: 1725266 - RNA, 19 nt, Artificial Sequence
  Description of Artificial Sequence: Synthetic oligonucleotide
  Antisense strand to SEQ ID NO: 1725265
agcauugcaguuauaccuc

SEQ ID NO: 1725267 - RNA, 19 nt, Artificial Sequence
  Description of Artificial Sequence: Synthetic oligonucleotide
  Sense strand starting at position 3691 of SEQ ID NO: 1562142
guuuguuaugccucgaagc

SEQ ID NO: 1725268 - RNA, 19 nt, Artificial Sequence
  Description of Artificial Sequence: Synthetic oligonucleotide
  Antisense strand to SEQ ID NO: 1725267
gcuucgaggcauaacaaac

SEQ ID NO: 1725269 - RNA, 19 nt, Artificial Sequence
  Description of Artificial Sequence: Synthetic oligonucleotide
  Sense strand starting at position 75 of SEQ ID NO: 1562143
auagaagagucucuugauu

SEQ ID NO: 1725270 - RNA, 19 nt, Artificial Sequence
  Description of Artificial Sequence: Synthetic oligonucleotide
  Antisense strand to SEQ ID NO: 1725269
aaucaagagacucuucuau

SEQ ID NO: 1725271 - RNA, 19 nt, Artificial Sequence
  Description of Artificial Sequence: Synthetic oligonucleotide
  Sense strand starting at position 93 of SEQ ID NO: 1562143
uuuguaaucggacgaauuc

SEQ ID NO: 1725272 - RNA, 19 nt, Artificial Sequence
  Description of Artificial Sequence: Synthetic oligonucleotide
  Antisense strand to SEQ ID NO: 1725271
gaauucguccgauuacaaa

SEQ ID NO: 1725273 - RNA, 19 nt, Artificial Sequence
  Description of Artificial Sequence: Synthetic oligonucleotide
  Sense strand starting at position 94 of SEQ ID NO: 1562143
uuguaaucggacgaauucu

SEQ ID NO: 1725274 - RNA, 19 nt, Artificial Sequence
  Description of Artificial Sequence: Synthetic oligonucleotide
  Antisense strand to SEQ ID NO: 1725273
agaauucguccgauuacaa

SEQ ID NO: 1725275 - RNA, 19 nt, Artificial Sequence
  Description of Artificial Sequence: Synthetic oligonucleotide
  Sense strand starting at position 231 of SEQ ID NO: 1562143
ugagcuucugcuggagaga

SEQ ID NO: 1725276 - RNA, 19 nt, Artificial Sequence
  Description of Artificial Sequence: Synthetic oligonucleotide
  Antisense strand to SEQ ID NO: 1725275
ucucuccagcagaagcuca

SEQ ID NO: 1725277 - RNA, 19 nt, Artificial Sequence
  Description of Artificial Sequence: Synthetic oligonucleotide
  Sense strand starting at position 234 of SEQ ID NO: 1562143
gcuucugcuggagagaguu

SEQ ID NO: 1725278 - RNA, 19 nt, Artificial Sequence
  Description of Artificial Sequence: Synthetic oligonucleotide
  Antisense strand to SEQ ID NO: 1725277
aacucucuccagcagaagc

SEQ ID NO: 1725279 - RNA, 19 nt, Artificial Sequence
  Description of Artificial Sequence: Synthetic oligonucleotide
  Sense strand starting at position 298 of SEQ ID NO: 1562143
cuugaugaccucugcaaca

SEQ ID NO: 1725280 - RNA, 19 nt, Artificial Sequence
  Description of Artificial Sequence: Synthetic oligonucleotide
  Antisense strand to SEQ ID NO: 1725279
uguugcagaggucaucaag

SEQ ID NO: 1725281 - RNA, 19 nt, Artificial Sequence
  Description of Artificial Sequence: Synthetic oligonucleotide
  Sense strand starting at position 396 of SEQ ID NO: 1562143
gagaaucaggcauggcaga

SEQ ID NO: 1725282 - RNA, 19 nt, Artificial Sequence
  Description of Artificial Sequence: Synthetic oligonucleotide
  Antisense strand to SEQ ID NO: 1725281
ucugccaugccugauucuc

SEQ ID NO: 1725283 - RNA, 19 nt, Artificial Sequence
  Description of Artificial Sequence: Synthetic oligonucleotide
  Sense strand starting at position 483 of SEQ ID NO: 1562143
agauuagugauagguagag

SEQ ID NO: 1725284 - RNA, 19 nt, Artificial Sequence
  Description of Artificial Sequence: Synthetic oligonucleotide
  Antisense strand to SEQ ID NO: 1725283
cucuaccuaucacuaaucu

SEQ ID NO: 1725285 - RNA, 19 nt, Artificial Sequence
  Description of Artificial Sequence: Synthetic oligonucleotide
  Sense strand starting at position 502 of SEQ ID NO: 1562143
gagacuaagucuccagcau

SEQ ID NO: 1725286 - RNA, 19 nt, Artificial Sequence
  Description of Artificial Sequence: Synthetic oligonucleotide
  Antisense strand to SEQ ID NO: 1725285
augcuggagacuuagucuc

SEQ ID NO: 1725287 - RNA, 19 nt, Artificial Sequence
  Description of Artificial Sequence: Synthetic oligonucleotide
  Sense strand starting at position 503 of SEQ ID NO: 1562143
agacuaagucuccagcaua

SEQ ID NO: 1725288 - RNA, 19 nt, Artificial Sequence
  Description of Artificial Sequence: Synthetic oligonucleotide
  Antisense strand to SEQ ID NO: 1725287
uaugcuggagacuuagucu

SEQ ID NO: 1725289 - RNA, 19 nt, Artificial Sequence
  Description of Artificial Sequence: Synthetic oligonucleotide
  Sense strand starting at position 577 of SEQ ID NO: 1562143
cugguccuccaguagagaa

SEQ ID NO: 1725290 - RNA, 19 nt, Artificial Sequence
  Description of Artificial Sequence: Synthetic oligonucleotide
  Antisense strand to SEQ ID NO: 1725289
uucucuacuggaggaccag

SEQ ID NO: 1725291 - RNA, 19 nt, Artificial Sequence
  Description of Artificial Sequence: Synthetic oligonucleotide
  Sense strand starting at position 593 of SEQ ID NO: 1562143
gaaugagucagccagugca

SEQ ID NO: 1725292 - RNA, 19 nt, Artificial Sequence
  Description of Artificial Sequence: Synthetic oligonucleotide
  Antisense strand to SEQ ID NO: 1725291
ugcacuggcugacucauuc

SEQ ID NO: 1725293 - RNA, 19 nt, Artificial Sequence
  Description of Artificial Sequence: Synthetic oligonucleotide
  Sense strand starting at position 1003 of SEQ ID NO: 1562143
accaaaguuccaggagagu

SEQ ID NO: 1725294 - RNA, 19 nt, Artificial Sequence
  Description of Artificial Sequence: Synthetic oligonucleotide
  Antisense strand to SEQ ID NO: 1725293
acucuccuggaacuuuggu

SEQ ID NO: 1725295 - RNA, 19 nt, Artificial Sequence
  Description of Artificial Sequence: Synthetic oligonucleotide
  Sense strand starting at position 1036 of SEQ ID NO: 1562143
agcagagacacaugugaua

SEQ ID NO: 1725296 - RNA, 19 nt, Artificial Sequence
  Description of Artificial Sequence: Synthetic oligonucleotide
  Antisense strand to SEQ ID NO: 1725295
uaucacaugugucucugcu

SEQ ID NO: 1725297 - RNA, 19 nt, Artificial Sequence
  Description of Artificial Sequence: Synthetic oligonucleotide
  Sense strand starting at position 1082 of SEQ ID NO: 1562143
gcagaauguguagacacau

SEQ ID NO: 1725298 - RNA, 19 nt, Artificial Sequence
  Description of Artificial Sequence: Synthetic oligonucleotide
  Antisense strand to SEQ ID NO: 1725297
augugucuacacauucugc

SEQ ID NO: 1725299 - RNA, 19 nt, Artificial Sequence
  Description of Artificial Sequence: Synthetic oligonucleotide
  Sense strand starting at position 1269 of SEQ ID NO: 1562143
aggagacauuccuagaaac

SEQ ID NO: 1725300 - RNA, 19 nt, Artificial Sequence
  Description of Artificial Sequence: Synthetic oligonucleotide
  Antisense strand to SEQ ID NO: 1725299
guuucuaggaaugucuccu

SEQ ID NO: 1725301 - RNA, 19 nt, Artificial Sequence
  Description of Artificial Sequence: Synthetic oligonucleotide
  Sense strand starting at position 1402 of SEQ ID NO: 1562143
aacacauagcaaugaguga

SEQ ID NO: 1725302 - RNA, 19 nt, Artificial Sequence
  Description of Artificial Sequence: Synthetic oligonucleotide
  Antisense strand to SEQ ID NO: 1725301
ucacucauugcuauguguu

SEQ ID NO: 1725303 - RNA, 19 nt, Artificial Sequence
  Description of Artificial Sequence: Synthetic oligonucleotide
  Sense strand starting at position 1409 of SEQ ID NO: 1562143
agcaaugagugagcacaua

SEQ ID NO: 1725304 - RNA, 19 nt, Artificial Sequence
  Description of Artificial Sequence: Synthetic oligonucleotide
  Antisense strand to SEQ ID NO: 1725303
uaugugcucacucauugcu

SEQ ID NO: 1725305 - RNA, 19 nt, Artificial Sequence
  Description of Artificial Sequence: Synthetic oligonucleotide
  Sense strand starting at position 1769 of SEQ ID NO: 1562143
gagggauguugucuaccca

SEQ ID NO: 1725306 - RNA, 19 nt, Artificial Sequence
  Description of Artificial Sequence: Synthetic oligonucleotide
  Antisense strand to SEQ ID NO: 1725305
uggguagacaacaucccuc

SEQ ID NO: 1725307 - RNA, 19 nt, Artificial Sequence
  Description of Artificial Sequence: Synthetic oligonucleotide
  Sense strand starting at position 2013 of SEQ ID NO: 1562143
ccgacucuccuggguacaa

SEQ ID NO: 1725308 - RNA, 19 nt, Artificial Sequence
  Description of Artificial Sequence: Synthetic oligonucleotide
  Antisense strand to SEQ ID NO: 1725307
uuguacccaggagagucgg

SEQ ID NO: 1725309 - RNA, 19 nt, Artificial Sequence
  Description of Artificial Sequence: Synthetic oligonucleotide
  Sense strand starting at position 2014 of SEQ ID NO: 1562143
cgacucuccuggguacaaa

SEQ ID NO: 1725310 - RNA, 19 nt, Artificial Sequence
  Description of Artificial Sequence: Synthetic oligonucleotide
  Antisense strand to SEQ ID NO: 1725309
uuuguacccaggagagucg

SEQ ID NO: 1725311 - RNA, 19 nt, Artificial Sequence
  Description of Artificial Sequence: Synthetic oligonucleotide
  Sense strand starting at position 2029 of SEQ ID NO: 1562143
caaagacuucugggaguug

SEQ ID NO: 1725312 - RNA, 19 nt, Artificial Sequence
  Description of Artificial Sequence: Synthetic oligonucleotide
  Antisense strand to SEQ ID NO: 1725311
caacucccagaagucuuug

SEQ ID NO: 1725313 - RNA, 19 nt, Artificial Sequence
  Description of Artificial Sequence: Synthetic oligonucleotide
  Sense strand starting at position 2536 of SEQ ID NO: 1562143
uccuuugugaaaugacgau

SEQ ID NO: 1725314 - RNA, 19 nt, Artificial Sequence
  Description of Artificial Sequence: Synthetic oligonucleotide
  Antisense strand to SEQ ID NO: 1725313
aucgucauuucacaaagga

SEQ ID NO: 1725315 - RNA, 19 nt, Artificial Sequence
  Description of Artificial Sequence: Synthetic oligonucleotide
  Sense strand starting at position 2540 of SEQ ID NO: 1562143
uugugaaaugacgaugguu

SEQ ID NO: 1725316 - RNA, 19 nt, Artificial Sequence
  Description of Artificial Sequence: Synthetic oligonucleotide
  Antisense strand to SEQ ID NO: 1725315
aaccaucgucauuucacaa

SEQ ID NO: 1725317 - RNA, 19 nt, Artificial Sequence
  Description of Artificial Sequence: Synthetic oligonucleotide
  Sense strand starting at position 2542 of SEQ ID NO: 1562143
gugaaaugacgaugguucu

SEQ ID NO: 1725318 - RNA, 19 nt, Artificial Sequence
  Description of Artificial Sequence: Synthetic oligonucleotide
  Antisense strand to SEQ ID NO: 1725317
agaaccaucgucauuucac

SEQ ID NO: 1725319 - RNA, 19 nt, Artificial Sequence
  Description of Artificial Sequence: Synthetic oligonucleotide
  Sense strand starting at position 2548 of SEQ ID NO: 1562143
ugacgaugguucucacuua

SEQ ID NO: 1725320 - RNA, 19 nt, Artificial Sequence
  Description of Artificial Sequence: Synthetic oligonucleotide
  Antisense strand to SEQ ID NO: 1725319
uaagugagaaccaucguca

SEQ ID NO: 1725321 - RNA, 19 nt, Artificial Sequence
  Description of Artificial Sequence: Synthetic oligonucleotide
  Sense strand starting at position 2599 of SEQ ID NO: 1562143
gcuauucuuccauggauua

SEQ ID NO: 1725322 - RNA, 19 nt, Artificial Sequence
  Description of Artificial Sequence: Synthetic oligonucleotide
  Antisense strand to SEQ ID NO: 1725321
uaauccauggaagaauagc

SEQ ID NO: 1725323 - RNA, 19 nt, Artificial Sequence
  Description of Artificial Sequence: Synthetic oligonucleotide
  Sense strand starting at position 2600 of SEQ ID NO: 1562143
cuauucuuccauggauuag

SEQ ID NO: 1725324 - RNA, 19 nt, Artificial Sequence
  Description of Artificial Sequence: Synthetic oligonucleotide
  Antisense strand to SEQ ID NO: 1725323
cuaauccauggaagaauag

SEQ ID NO: 1725325 - RNA, 19 nt, Artificial Sequence
  Description of Artificial Sequence: Synthetic oligonucleotide
  Sense strand starting at position 2850 of SEQ ID NO: 1562143
aaagguuggugagccaaga

SEQ ID NO: 1725326 - RNA, 19 nt, Artificial Sequence
  Description of Artificial Sequence: Synthetic oligonucleotide
  Antisense strand to SEQ ID NO: 1725325
ucuuggcucaccaaccuuu

SEQ ID NO: 1725327 - RNA, 19 nt, Artificial Sequence
  Description of Artificial Sequence: Synthetic oligonucleotide
  Sense strand starting at position 2986 of SEQ ID NO: 1562143
gaauaugggucccuccuua

SEQ ID NO: 1725328 - RNA, 19 nt, Artificial Sequence
  Description of Artificial Sequence: Synthetic oligonucleotide
  Antisense strand to SEQ ID NO: 1725327
uaaggagggacccauauuc

SEQ ID NO: 1725329 - RNA, 19 nt, Artificial Sequence
  Description of Artificial Sequence: Synthetic oligonucleotide
  Sense strand starting at position 2991 of SEQ ID NO: 1562143
ugggucccuccuuagugaa

SEQ ID NO: 1725330 - RNA, 19 nt, Artificial Sequence
  Description of Artificial Sequence: Synthetic oligonucleotide
  Antisense strand to SEQ ID NO: 1725329
uucacuaaggagggaccca

SEQ ID NO: 1725331 - RNA, 19 nt, Artificial Sequence
  Description of Artificial Sequence: Synthetic oligonucleotide
  Sense strand starting at position 2993 of SEQ ID NO: 1562143
ggucccuccuuagugaaga

SEQ ID NO: 1725332 - RNA, 19 nt, Artificial Sequence
  Description of Artificial Sequence: Synthetic oligonucleotide
  Antisense strand to SEQ ID NO: 1725331
ucuucacuaaggagggacc

SEQ ID NO: 1725333 - RNA, 19 nt, Artificial Sequence
  Description of Artificial Sequence: Synthetic oligonucleotide
  Sense strand starting at position 3010 of SEQ ID NO: 1562143
gagguacuucuagagucag

SEQ ID NO: 1725334 - RNA, 19 nt, Artificial Sequence
  Description of Artificial Sequence: Synthetic oligonucleotide
  Antisense strand to SEQ ID NO: 1725333
cugacucuagaaguaccuc

SEQ ID NO: 1725335 - RNA, 19 nt, Artificial Sequence
  Description of Artificial Sequence: Synthetic oligonucleotide
  Sense strand starting at position 3116 of SEQ ID NO: 1562143
gggcuuugugagcaucuaa

SEQ ID NO: 1725336 - RNA, 19 nt, Artificial Sequence
  Description of Artificial Sequence: Synthetic oligonucleotide
  Antisense strand to SEQ ID NO: 1725335
uuagaugcucacaaagccc

SEQ ID NO: 1725337 - RNA, 19 nt, Artificial Sequence
  Description of Artificial Sequence: Synthetic oligonucleotide
  Sense strand starting at position 3172 of SEQ ID NO: 1562143
cugguacuaucauuaauga

SEQ ID NO: 1725338 - RNA, 19 nt, Artificial Sequence
  Description of Artificial Sequence: Synthetic oligonucleotide
  Antisense strand to SEQ ID NO: 1725337
ucauuaaugauaguaccag

SEQ ID NO: 1725339 - RNA, 19 nt, Artificial Sequence
  Description of Artificial Sequence: Synthetic oligonucleotide
  Sense strand starting at position 3465 of SEQ ID NO: 1562143
uccugaaugccagaaguag

SEQ ID NO: 1725340 - RNA, 19 nt, Artificial Sequence
  Description of Artificial Sequence: Synthetic oligonucleotide
  Antisense strand to SEQ ID NO: 1725339
cuacuucuggcauucagga

SEQ ID NO: 1725341 - RNA, 19 nt, Artificial Sequence
  Description of Artificial Sequence: Synthetic oligonucleotide
  Sense strand starting at position 3525 of SEQ ID NO: 1562143
cauauauaguggucuugau

SEQ ID NO: 1725342 - RNA, 19 nt, Artificial Sequence
  Description of Artificial Sequence: Synthetic oligonucleotide
  Antisense strand to SEQ ID NO: 1725341
aucaagaccacuauauaug

SEQ ID NO: 1725343 - RNA, 19 nt, Artificial Sequence
  Description of Artificial Sequence: Synthetic oligonucleotide
  Sense strand starting at position 3603 of SEQ ID NO: 1562143
ccauuaacauucccagugu

SEQ ID NO: 1725344 - RNA, 19 nt, Artificial Sequence
  Description of Artificial Sequence: Synthetic oligonucleotide
  Antisense strand to SEQ ID NO: 1725343
acacugggaauguuaaugg

SEQ ID NO: 1725345 - RNA, 19 nt, Artificial Sequence
  Description of Artificial Sequence: Synthetic oligonucleotide
  Sense strand starting at position 3607 of SEQ ID NO: 1562143
uaacauucccaguguugga

SEQ ID NO: 1725346 - RNA, 19 nt, Artificial Sequence
  Description of Artificial Sequence: Synthetic oligonucleotide
  Antisense strand to SEQ ID NO: 1725345
uccaacacugggaauguua

SEQ ID NO: 1725347 - RNA, 19 nt, Artificial Sequence
  Description of Artificial Sequence: Synthetic oligonucleotide
  Sense strand starting at position 3629 of SEQ ID NO: 1562143
gagaaacuuggugguaaag

SEQ ID NO: 1725348 - RNA, 19 nt, Artificial Sequence
  Description of Artificial Sequence: Synthetic oligonucleotide
  Antisense strand to SEQ ID NO: 1725347
cuuuaccaccaaguuucuc

SEQ ID NO: 1725349 - RNA, 19 nt, Artificial Sequence
  Description of Artificial Sequence: Synthetic oligonucleotide
  Sense strand starting at position 148 of SEQ ID NO: 1562144
uuccaacauuaugugaaga

SEQ ID NO: 1725350 - RNA, 19 nt, Artificial Sequence
  Description of Artificial Sequence: Synthetic oligonucleotide
  Antisense strand to SEQ ID NO: 1725349
ucuucacauaauguuggaa

SEQ ID NO: 1725351 - RNA, 19 nt, Artificial Sequence
  Description of Artificial Sequence: Synthetic oligonucleotide
  Sense strand starting at position 172 of SEQ ID NO: 1562144
aggccagauaaaugaagua

SEQ ID NO: 1725352 - RNA, 19 nt, Artificial Sequence
  Description of Artificial Sequence: Synthetic oligonucleotide
  Antisense strand to SEQ ID NO: 1725351
uacuucauuuaucuggccu

SEQ ID NO: 1725353 - RNA, 19 nt, Artificial Sequence
  Description of Artificial Sequence: Synthetic oligonucleotide
  Sense strand starting at position 184 of SEQ ID NO: 1562144
ugaaguaccuguccuaaug

SEQ ID NO: 1725354 - RNA, 19 nt, Artificial Sequence
  Description of Artificial Sequence: Synthetic oligonucleotide
  Antisense strand to SEQ ID NO: 1725353
cauuaggacagguacuuca

SEQ ID NO: 1725355 - RNA, 19 nt, Artificial Sequence
  Description of Artificial Sequence: Synthetic oligonucleotide
  Sense strand starting at position 677 of SEQ ID NO: 1562144
gacagaagcuguucuaagu

SEQ ID NO: 1725356 - RNA, 19 nt, Artificial Sequence
  Description of Artificial Sequence: Synthetic oligonucleotide
  Antisense strand to SEQ ID NO: 1725355
acuuagaacagcuucuguc

SEQ ID NO: 1725357 - RNA, 19 nt, Artificial Sequence
  Description of Artificial Sequence: Synthetic oligonucleotide
  Sense strand starting at position 693 of SEQ ID NO: 1562144
agugcuuuacaagaaucua

SEQ ID NO: 1725358 - RNA, 19 nt, Artificial Sequence
  Description of Artificial Sequence: Synthetic oligonucleotide
  Antisense strand to SEQ ID NO: 1725357
uagauucuuguaaagcacu

SEQ ID NO: 1725359 - RNA, 19 nt, Artificial Sequence
  Description of Artificial Sequence: Synthetic oligonucleotide
  Sense strand starting at position 885 of SEQ ID NO: 1562144
ugugucugacuccaggaau

SEQ ID NO: 1725360 - RNA, 19 nt, Artificial Sequence
  Description of Artificial Sequence: Synthetic oligonucleotide
  Antisense strand to SEQ ID NO: 1725359
auuccuggagucagacaca

SEQ ID NO: 1725361 - RNA, 19 nt, Artificial Sequence
  Description of Artificial Sequence: Synthetic oligonucleotide
  Sense strand starting at position 888 of SEQ ID NO: 1562144
gucugacuccaggaaugcu

SEQ ID NO: 1725362 - RNA, 19 nt, Artificial Sequence
  Description of Artificial Sequence: Synthetic oligonucleotide
  Antisense strand to SEQ ID NO: 1725361
agcauuccuggagucagac

SEQ ID NO: 1725363 - RNA, 19 nt, Artificial Sequence
  Description of Artificial Sequence: Synthetic oligonucleotide
  Sense strand starting at position 965 of SEQ ID NO: 1562144
gcgucagaaucaucuagaa

SEQ ID NO: 1725364 - RNA, 19 nt, Artificial Sequence
  Description of Artificial Sequence: Synthetic oligonucleotide
  Antisense strand to SEQ ID NO: 1725363
uucuagaugauucugacgc

SEQ ID NO: 1725365 - RNA, 19 nt, Artificial Sequence
  Description of Artificial Sequence: Synthetic oligonucleotide
  Sense strand starting at position 978 of SEQ ID NO: 1562144
cuagaaggcuuguuagaga

SEQ ID NO: 1725366 - RNA, 19 nt, Artificial Sequence
  Description of Artificial Sequence: Synthetic oligonucleotide
  Antisense strand to SEQ ID NO: 1725365
ucucuaacaagccuucuag

SEQ ID NO: 1725367 - RNA, 19 nt, Artificial Sequence
  Description of Artificial Sequence: Synthetic oligonucleotide
  Sense strand starting at position 1113 of SEQ ID NO: 1562144
agguuauugggagguuuag

SEQ ID NO: 1725368 - RNA, 19 nt, Artificial Sequence
  Description of Artificial Sequence: Synthetic oligonucleotide
  Antisense strand to SEQ ID NO: 1725367
cuaaaccucccaauaaccu

SEQ ID NO: 1725369 - RNA, 19 nt, Artificial Sequence
  Description of Artificial Sequence: Synthetic oligonucleotide
  Sense strand starting at position 1185 of SEQ ID NO: 1562144
agagaacuaugcuugcaca

SEQ ID NO: 1725370 - RNA, 19 nt, Artificial Sequence
  Description of Artificial Sequence: Synthetic oligonucleotide
  Antisense strand to SEQ ID NO: 1725369
ugugcaagcauaguucucu

SEQ ID NO: 1725371 - RNA, 19 nt, Artificial Sequence
  Description of Artificial Sequence: Synthetic oligonucleotide
  Sense strand starting at position 1221 of SEQ ID NO: 1562144
gcacauugacagugauaau

SEQ ID NO: 1725372 - RNA, 19 nt, Artificial Sequence
  Description of Artificial Sequence: Synthetic oligonucleotide
  Antisense strand to SEQ ID NO: 1725371
auuaucacugucaaugugc

SEQ ID NO: 1725373 - RNA, 19 nt, Artificial Sequence
  Description of Artificial Sequence: Synthetic oligonucleotide
  Sense strand starting at position 1469 of SEQ ID NO: 1562144
uucugacaagugcaucuaa

SEQ ID NO: 1725374 - RNA, 19 nt, Artificial Sequence
  Description of Artificial Sequence: Synthetic oligonucleotide
  Antisense strand to SEQ ID NO: 1725373
uuagaugcacuugucagaa

SEQ ID NO: 1725375 - RNA, 19 nt, Artificial Sequence
  Description of Artificial Sequence: Synthetic oligonucleotide
  Sense strand starting at position 1507 of SEQ ID NO: 1562144
cucaaauucuggcucugau

SEQ ID NO: 1725376 - RNA, 19 nt, Artificial Sequence
  Description of Artificial Sequence: Synthetic oligonucleotide
  Antisense strand to SEQ ID NO: 1725375
aucagagccagaauuugag

SEQ ID NO: 1725377 - RNA, 19 nt, Artificial Sequence
  Description of Artificial Sequence: Synthetic oligonucleotide
  Sense strand starting at position 1754 of SEQ ID NO: 1562144
ccaacauaugucugaugaa

SEQ ID NO: 1725378 - RNA, 19 nt, Artificial Sequence
  Description of Artificial Sequence: Synthetic oligonucleotide
  Antisense strand to SEQ ID NO: 1725377
uucaucagacauauguugg

SEQ ID NO: 1725379 - RNA, 19 nt, Artificial Sequence
  Description of Artificial Sequence: Synthetic oligonucleotide
  Sense strand starting at position 1792 of SEQ ID NO: 1562144
cucucaauccgguaaggua

SEQ ID NO: 1725380 - RNA, 19 nt, Artificial Sequence
  Description of Artificial Sequence: Synthetic oligonucleotide
  Antisense strand to SEQ ID NO: 1725379
uaccuuaccggauugagag

SEQ ID NO: 1725381 - RNA, 19 nt, Artificial Sequence
  Description of Artificial Sequence: Synthetic oligonucleotide
  Sense strand starting at position 1871 of SEQ ID NO: 1562144
cccagucuauucuuugaga

SEQ ID NO: 1725382 - RNA, 19 nt, Artificial Sequence
  Description of Artificial Sequence: Synthetic oligonucleotide
  Antisense strand to SEQ ID NO: 1725381
ucucaaagaauagacuggg

SEQ ID NO: 1725383 - RNA, 19 nt, Artificial Sequence
  Description of Artificial Sequence: Synthetic oligonucleotide
  Sense strand starting at position 1872 of SEQ ID NO: 1562144
ccagucuauucuuugagau

SEQ ID NO: 1725384 - RNA, 19 nt, Artificial Sequence
  Description of Artificial Sequence: Synthetic oligonucleotide
  Antisense strand to SEQ ID NO: 1725383
aucucaaagaauagacugg

SEQ ID NO: 1725385 - RNA, 19 nt, Artificial Sequence
  Description of Artificial Sequence: Synthetic oligonucleotide
  Sense strand starting at position 2116 of SEQ ID NO: 1562144
ggaacagaguguucagcca

SEQ ID NO: 1725386 - RNA, 19 nt, Artificial Sequence
  Description of Artificial Sequence: Synthetic oligonucleotide
  Antisense strand to SEQ ID NO: 1725385
uggcugaacacucuguucc

SEQ ID NO: 1725387 - RNA, 19 nt, Artificial Sequence
  Description of Artificial Sequence: Synthetic oligonucleotide
  Sense strand starting at position 2531 of SEQ ID NO: 1562144
gggugcucccaggaaauua

SEQ ID NO: 1725388 - RNA, 19 nt, Artificial Sequence
  Description of Artificial Sequence: Synthetic oligonucleotide
  Antisense strand to SEQ ID NO: 1725387
uaauuuccugggagcaccc

SEQ ID NO: 1725389 - RNA, 19 nt, Artificial Sequence
  Description of Artificial Sequence: Synthetic oligonucleotide
  Sense strand starting at position 2683 of SEQ ID NO: 1562144
gggucauggucucuagaga

SEQ ID NO: 1725390 - RNA, 19 nt, Artificial Sequence
  Description of Artificial Sequence: Synthetic oligonucleotide
  Antisense strand to SEQ ID NO: 1725389
ucucuagagaccaugaccc

SEQ ID NO: 1725391 - RNA, 19 nt, Artificial Sequence
  Description of Artificial Sequence: Synthetic oligonucleotide
  Sense strand starting at position 2739 of SEQ ID NO: 1562144
uuccuugacucucuagaga

SEQ ID NO: 1725392 - RNA, 19 nt, Artificial Sequence
  Description of Artificial Sequence: Synthetic oligonucleotide
  Antisense strand to SEQ ID NO: 1725391
ucucuagagagucaaggaa

SEQ ID NO: 1725393 - RNA, 19 nt, Artificial Sequence
  Description of Artificial Sequence: Synthetic oligonucleotide
  Sense strand starting at position 2802 of SEQ ID NO: 1562144
uagugagccucagauuuaa

SEQ ID NO: 1725394 - RNA, 19 nt, Artificial Sequence
  Description of Artificial Sequence: Synthetic oligonucleotide
  Antisense strand to SEQ ID NO: 1725393
uuaaaucugaggcucacua

SEQ ID NO: 1725395 - RNA, 19 nt, Artificial Sequence
  Description of Artificial Sequence: Synthetic oligonucleotide
  Sense strand starting at position 2830 of SEQ ID NO: 1562144
uugugauggguccagcuau

SEQ ID NO: 1725396 - RNA, 19 nt, Artificial Sequence
  Description of Artificial Sequence: Synthetic oligonucleotide
  Antisense strand to SEQ ID NO: 1725395
auagcuggacccaucacaa

SEQ ID NO: 1725397 - RNA, 19 nt, Artificial Sequence
  Description of Artificial Sequence: Synthetic oligonucleotide
  Sense strand starting at position 2943 of SEQ ID NO: 1562144
uuugacuuacaguguuuga

SEQ ID NO: 1725398 - RNA, 19 nt, Artificial Sequence
  Description of Artificial Sequence: Synthetic oligonucleotide
  Antisense strand to SEQ ID NO: 1725397
ucaaacacuguaagucaaa

SEQ ID NO: 1725399 - RNA, 19 nt, Artificial Sequence
  Description of Artificial Sequence: Synthetic oligonucleotide
  Sense strand starting at position 2946 of SEQ ID NO: 1562144
gacuuacaguguuugacuu

SEQ ID NO: 1725400 - RNA, 19 nt, Artificial Sequence
  Description of Artificial Sequence: Synthetic oligonucleotide
  Antisense strand to SEQ ID NO: 1725399
aagucaaacacuguaaguc

SEQ ID NO: 1725401 - RNA, 19 nt, Artificial Sequence
  Description of Artificial Sequence: Synthetic oligonucleotide
  Sense strand starting at position 2953 of SEQ ID NO: 1562144
aguguuugacuuuaugaug

SEQ ID NO: 1725402 - RNA, 19 nt, Artificial Sequence
  Description of Artificial Sequence: Synthetic oligonucleotide
  Antisense strand to SEQ ID NO: 1725401
caucauaaagucaaacacu

SEQ ID NO: 1725403 - RNA, 19 nt, Artificial Sequence
  Description of Artificial Sequence: Synthetic oligonucleotide
  Sense strand starting at position 3118 of SEQ ID NO: 1562144
ccaacuguagacuaguaua

SEQ ID NO: 1725404 - RNA, 19 nt, Artificial Sequence
  Description of Artificial Sequence: Synthetic oligonucleotide
  Antisense strand to SEQ ID NO: 1725403
uauacuagucuacaguugg

SEQ ID NO: 1725405 - RNA, 19 nt, Artificial Sequence
  Description of Artificial Sequence: Synthetic oligonucleotide
  Sense strand starting at position 3147 of SEQ ID NO: 1562144
gcaaguuuaagguagguaa

SEQ ID NO: 1725406 - RNA, 19 nt, Artificial Sequence
  Description of Artificial Sequence: Synthetic oligonucleotide
  Antisense strand to SEQ ID NO: 1725405
uuaccuaccuuaaacuugc

SEQ ID NO: 1725407 - RNA, 19 nt, Artificial Sequence
  Description of Artificial Sequence: Synthetic oligonucleotide
  Sense strand starting at position 3227 of SEQ ID NO: 1562144
caacuuaggcuagguuuau

SEQ ID NO: 1725408 - RNA, 19 nt, Artificial Sequence
  Description of Artificial Sequence: Synthetic oligonucleotide
  Antisense strand to SEQ ID NO: 1725407
auaaaccuagccuaaguug

SEQ ID NO: 1725409 - RNA, 19 nt, Artificial Sequence
  Description of Artificial Sequence: Synthetic oligonucleotide
  Sense strand starting at position 3228 of SEQ ID NO: 1562144
aacuuaggcuagguuuauu

SEQ ID NO: 1725410 - RNA, 19 nt, Artificial Sequence
  Description of Artificial Sequence: Synthetic oligonucleotide
  Antisense strand to SEQ ID NO: 1725409
aauaaaccuagccuaaguu

SEQ ID NO: 1725411 - RNA, 19 nt, Artificial Sequence
  Description of Artificial Sequence: Synthetic oligonucleotide
  Sense strand starting at position 3237 of SEQ ID NO: 1562144
uagguuuauuaggcuauaa

SEQ ID NO: 1725412 - RNA, 19 nt, Artificial Sequence
  Description of Artificial Sequence: Synthetic oligonucleotide
  Antisense strand to SEQ ID NO: 1725411
uuauagccuaauaaaccua

SEQ ID NO: 1725413 - RNA, 19 nt, Artificial Sequence
  Description of Artificial Sequence: Synthetic oligonucleotide
  Sense strand starting at position 3239 of SEQ ID NO: 1562144
gguuuauuaggcuauaauc

SEQ ID NO: 1725414 - RNA, 19 nt, Artificial Sequence
  Description of Artificial Sequence: Synthetic oligonucleotide
  Antisense strand to SEQ ID NO: 1725413
gauuauagccuaauaaacc

SEQ ID NO: 1725415 - RNA, 19 nt, Artificial Sequence
  Description of Artificial Sequence: Synthetic oligonucleotide
  Sense strand starting at position 3255 of SEQ ID NO: 1562144
aucucaucauaaguugaga

SEQ ID NO: 1725416 - RNA, 19 nt, Artificial Sequence
  Description of Artificial Sequence: Synthetic oligonucleotide
  Antisense strand to SEQ ID NO: 1725415
ucucaacuuaugaugagau

SEQ ID NO: 1725417 - RNA, 19 nt, Artificial Sequence
  Description of Artificial Sequence: Synthetic oligonucleotide
  Sense strand starting at position 3369 of SEQ ID NO: 1562144
ucaaguguacaauauguua

SEQ ID NO: 1725418 - RNA, 19 nt, Artificial Sequence
  Description of Artificial Sequence: Synthetic oligonucleotide
  Antisense strand to SEQ ID NO: 1725417
uaacauauuguacacuuga

SEQ ID NO: 1725419 - RNA, 19 nt, Artificial Sequence
  Description of Artificial Sequence: Synthetic oligonucleotide
  Sense strand starting at position 3409 of SEQ ID NO: 1562144
ugcaauaggucuuuacaac

SEQ ID NO: 1725420 - RNA, 19 nt, Artificial Sequence
  Description of Artificial Sequence: Synthetic oligonucleotide
  Antisense strand to SEQ ID NO: 1725419
guuguaaagaccuauugca

SEQ ID NO: 1725421 - RNA, 19 nt, Artificial Sequence
  Description of Artificial Sequence: Synthetic oligonucleotide
  Sense strand starting at position 3410 of SEQ ID NO: 1562144
gcaauaggucuuuacaacu

SEQ ID NO: 1725422 - RNA, 19 nt, Artificial Sequence
  Description of Artificial Sequence: Synthetic oligonucleotide
  Antisense strand to SEQ ID NO: 1725421
aguuguaaagaccuauugc

SEQ ID NO: 1725423 - RNA, 19 nt, Artificial Sequence
  Description of Artificial Sequence: Synthetic oligonucleotide
  Sense strand starting at position 3499 of SEQ ID NO: 1562144
ccggguauccaccauucua

SEQ ID NO: 1725424 - RNA, 19 nt, Artificial Sequence
  Description of Artificial Sequence: Synthetic oligonucleotide
  Antisense strand to SEQ ID NO: 1725423
uagaaugguggauacccgg

SEQ ID NO: 1725425 - RNA, 19 nt, Artificial Sequence
  Description of Artificial Sequence: Synthetic oligonucleotide
  Sense strand starting at position 3704 of SEQ ID NO: 1562144
uuauccauccagugacgga

SEQ ID NO: 1725426 - RNA, 19 nt, Artificial Sequence
  Description of Artificial Sequence: Synthetic oligonucleotide
  Antisense strand to SEQ ID NO: 1725425
uccgucacuggauggauaa

SEQ ID NO: 1725427 - RNA, 19 nt, Artificial Sequence
  Description of Artificial Sequence: Synthetic oligonucleotide
  Sense strand starting at position 3838 of SEQ ID NO: 1562144
ccagaauuggugcaagugu

SEQ ID NO: 1725428 - RNA, 19 nt, Artificial Sequence
  Description of Artificial Sequence: Synthetic oligonucleotide
  Antisense strand to SEQ ID NO: 1725427
acacuugcaccaauucugg

SEQ ID NO: 1725429 - RNA, 19 nt, Artificial Sequence
  Description of Artificial Sequence: Synthetic oligonucleotide
  Sense strand starting at position 223 of SEQ ID NO: 1562145
ucuaucuuaggaugucaaa

SEQ ID NO: 1725430 - RNA, 19 nt, Artificial Sequence
  Description of Artificial Sequence: Synthetic oligonucleotide
  Antisense strand to SEQ ID NO: 1725429
uuugacauccuaagauaga

SEQ ID NO: 1725431 - RNA, 19 nt, Artificial Sequence
  Description of Artificial Sequence: Synthetic oligonucleotide
  Sense strand starting at position 478 of SEQ ID NO: 1562145
agagguucccauugaguua

SEQ ID NO: 1725432 - RNA, 19 nt, Artificial Sequence
  Description of Artificial Sequence: Synthetic oligonucleotide
  Antisense strand to SEQ ID NO: 1725431
uaacucaaugggaaccucu

SEQ ID NO: 1725433 - RNA, 19 nt, Artificial Sequence
  Description of Artificial Sequence: Synthetic oligonucleotide
  Sense strand starting at position 485 of SEQ ID NO: 1562145
cccauugaguuagugggaa

SEQ ID NO: 1725434 - RNA, 19 nt, Artificial Sequence
  Description of Artificial Sequence: Synthetic oligonucleotide
  Antisense strand to SEQ ID NO: 1725433
uucccacuaacucaauggg

SEQ ID NO: 1725435 - RNA, 19 nt, Artificial Sequence
  Description of Artificial Sequence: Synthetic oligonucleotide
  Sense strand starting at position 487 of SEQ ID NO: 1562145
cauugaguuagugggaauu

SEQ ID NO: 1725436 - RNA, 19 nt, Artificial Sequence
  Description of Artificial Sequence: Synthetic oligonucleotide
  Antisense strand to SEQ ID NO: 1725435
aauucccacuaacucaaug

SEQ ID NO: 1725437 - RNA, 19 nt, Artificial Sequence
  Description of Artificial Sequence: Synthetic oligonucleotide
  Sense strand starting at position 520 of SEQ ID NO: 1562145
aggagaacuugucuuuaug

SEQ ID NO: 1725438 - RNA, 19 nt, Artificial Sequence
  Description of Artificial Sequence: Synthetic oligonucleotide
  Antisense strand to SEQ ID NO: 1725437
cauaaagacaaguucuccu

SEQ ID NO: 1725439 - RNA, 19 nt, Artificial Sequence
  Description of Artificial Sequence: Synthetic oligonucleotide
  Sense strand starting at position 588 of SEQ ID NO: 1562145
gacucugaaagaugugguu

SEQ ID NO: 1725440 - RNA, 19 nt, Artificial Sequence
  Description of Artificial Sequence: Synthetic oligonucleotide
  Antisense strand to SEQ ID NO: 1725439
aaccacaucuuucagaguc

SEQ ID NO: 1725441 - RNA, 19 nt, Artificial Sequence
  Description of Artificial Sequence: Synthetic oligonucleotide
  Sense strand starting at position 607 of SEQ ID NO: 1562145
uucucuuggaguuagaguu

SEQ ID NO: 1725442 - RNA, 19 nt, Artificial Sequence
  Description of Artificial Sequence: Synthetic oligonucleotide
  Antisense strand to SEQ ID NO: 1725441
aacucuaacuccaagagaa

SEQ ID NO: 1725443 - RNA, 19 nt, Artificial Sequence
  Description of Artificial Sequence: Synthetic oligonucleotide
  Sense strand starting at position 836 of SEQ ID NO: 1562145
uuuaauugcccacauagga

SEQ ID NO: 1725444 - RNA, 19 nt, Artificial Sequence
  Description of Artificial Sequence: Synthetic oligonucleotide
  Antisense strand to SEQ ID NO: 1725443
uccuaugugggcaauuaaa

SEQ ID NO: 1725445 - RNA, 19 nt, Artificial Sequence
  Description of Artificial Sequence: Synthetic oligonucleotide
  Sense strand starting at position 1067 of SEQ ID NO: 1562145
uuaagaguuggguaguaag

SEQ ID NO: 1725446 - RNA, 19 nt, Artificial Sequence
  Description of Artificial Sequence: Synthetic oligonucleotide
  Antisense strand to SEQ ID NO: 1725445
cuuacuacccaacucuuaa

SEQ ID NO: 1725447 - RNA, 19 nt, Artificial Sequence
  Description of Artificial Sequence: Synthetic oligonucleotide
  Sense strand starting at position 1264 of SEQ ID NO: 1562145
auaauaagugguugaguga

SEQ ID NO: 1725448 - RNA, 19 nt, Artificial Sequence
  Description of Artificial Sequence: Synthetic oligonucleotide
  Antisense strand to SEQ ID NO: 1725447
ucacucaaccacuuauuau

SEQ ID NO: 1725449 - RNA, 19 nt, Artificial Sequence
  Description of Artificial Sequence: Synthetic oligonucleotide
  Sense strand starting at position 1334 of SEQ ID NO: 1562145
ucugacuuacgguauaaac

SEQ ID NO: 1725450 - RNA, 19 nt, Artificial Sequence
  Description of Artificial Sequence: Synthetic oligonucleotide
  Antisense strand to SEQ ID NO: 1725449
guuuauaccguaagucaga

SEQ ID NO: 1725451 - RNA, 19 nt, Artificial Sequence
  Description of Artificial Sequence: Synthetic oligonucleotide
  Sense strand starting at position 1453 of SEQ ID NO: 1562145
caggaaucaucuguccaag

SEQ ID NO: 1725452 - RNA, 19 nt, Artificial Sequence
  Description of Artificial Sequence: Synthetic oligonucleotide
  Antisense strand to SEQ ID NO: 1725451
cuuggacagaugauuccug

SEQ ID NO: 1725453 - RNA, 19 nt, Artificial Sequence
  Description of Artificial Sequence: Synthetic oligonucleotide
  Sense strand starting at position 1456 of SEQ ID NO: 1562145
gaaucaucuguccaagagu

SEQ ID NO: 1725454 - RNA, 19 nt, Artificial Sequence
  Description of Artificial Sequence: Synthetic oligonucleotide
  Antisense strand to SEQ ID NO: 1725453
acucuuggacagaugauuc

SEQ ID NO: 1725455 - RNA, 19 nt, Artificial Sequence
  Description of Artificial Sequence: Synthetic oligonucleotide
  Sense strand starting at position 1459 of SEQ ID NO: 1562145
ucaucuguccaagaguucu

SEQ ID NO: 1725456 - RNA, 19 nt, Artificial Sequence
  Description of Artificial Sequence: Synthetic oligonucleotide
  Antisense strand to SEQ ID NO: 1725455
agaacucuuggacagauga

SEQ ID NO: 1725457 - RNA, 19 nt, Artificial Sequence
  Description of Artificial Sequence: Synthetic oligonucleotide
  Sense strand starting at position 1467 of SEQ ID NO: 1562145
ccaagaguucuguauaugu

SEQ ID NO: 1725458 - RNA, 19 nt, Artificial Sequence
  Description of Artificial Sequence: Synthetic oligonucleotide
  Antisense strand to SEQ ID NO: 1725457
acauauacagaacucuugg

SEQ ID NO: 1725459 - RNA, 19 nt, Artificial Sequence
  Description of Artificial Sequence: Synthetic oligonucleotide
  Sense strand starting at position 1560 of SEQ ID NO: 1562145
ucaucaauggucugggauc

SEQ ID NO: 1725460 - RNA, 19 nt, Artificial Sequence
  Description of Artificial Sequence: Synthetic oligonucleotide
  Antisense strand to SEQ ID NO: 1725459
gaucccagaccauugauga

SEQ ID NO: 1725461 - RNA, 19 nt, Artificial Sequence
  Description of Artificial Sequence: Synthetic oligonucleotide
  Sense strand starting at position 1562 of SEQ ID NO: 1562145
aucaauggucugggaucuu

SEQ ID NO: 1725462 - RNA, 19 nt, Artificial Sequence
  Description of Artificial Sequence: Synthetic oligonucleotide
  Antisense strand to SEQ ID NO: 1725461
aagaucccagaccauugau

SEQ ID NO: 1725463 - RNA, 19 nt, Artificial Sequence
  Description of Artificial Sequence: Synthetic oligonucleotide
  Sense strand starting at position 1654 of SEQ ID NO: 1562145
uggaaaggacuuuguguca

SEQ ID NO: 1725464 - RNA, 19 nt, Artificial Sequence
  Description of Artificial Sequence: Synthetic oligonucleotide
  Antisense strand to SEQ ID NO: 1725463
ugacacaaaguccuuucca

SEQ ID NO: 1725465 - RNA, 19 nt, Artificial Sequence
  Description of Artificial Sequence: Synthetic oligonucleotide
  Sense strand starting at position 1661 of SEQ ID NO: 1562145
gacuuugugucauuucugu

SEQ ID NO: 1725466 - RNA, 19 nt, Artificial Sequence
  Description of Artificial Sequence: Synthetic oligonucleotide
  Antisense strand to SEQ ID NO: 1725465
acagaaaugacacaaaguc

SEQ ID NO: 1725467 - RNA, 19 nt, Artificial Sequence
  Description of Artificial Sequence: Synthetic oligonucleotide
  Sense strand starting at position 1715 of SEQ ID NO: 1562145
aaguaaugcccugagucaa

SEQ ID NO: 1725468 - RNA, 19 nt, Artificial Sequence
  Description of Artificial Sequence: Synthetic oligonucleotide
  Antisense strand to SEQ ID NO: 1725467
uugacucagggcauuacuu

SEQ ID NO: 1725469 - RNA, 19 nt, Artificial Sequence
  Description of Artificial Sequence: Synthetic oligonucleotide
  Sense strand starting at position 1723 of SEQ ID NO: 1562145
cccugagucaagggacuaa

SEQ ID NO: 1725470 - RNA, 19 nt, Artificial Sequence
  Description of Artificial Sequence: Synthetic oligonucleotide
  Antisense strand to SEQ ID NO: 1725469
uuagucccuugacucaggg

SEQ ID NO: 1725471 - RNA, 19 nt, Artificial Sequence
  Description of Artificial Sequence: Synthetic oligonucleotide
  Sense strand starting at position 1735 of SEQ ID NO: 1562145
ggacuaagugucuaugggu

SEQ ID NO: 1725472 - RNA, 19 nt, Artificial Sequence
  Description of Artificial Sequence: Synthetic oligonucleotide
  Antisense strand to SEQ ID NO: 1725471
acccauagacacuuagucc

SEQ ID NO: 1725473 - RNA, 19 nt, Artificial Sequence
  Description of Artificial Sequence: Synthetic oligonucleotide
  Sense strand starting at position 2086 of SEQ ID NO: 1562145
ggacauuacuagguguuga

SEQ ID NO: 1725474 - RNA, 19 nt, Artificial Sequence
  Description of Artificial Sequence: Synthetic oligonucleotide
  Antisense strand to SEQ ID NO: 1725473
ucaacaccuaguaaugucc

SEQ ID NO: 1725475 - RNA, 19 nt, Artificial Sequence
  Description of Artificial Sequence: Synthetic oligonucleotide
  Sense strand starting at position 2087 of SEQ ID NO: 1562145
gacauuacuagguguugag

SEQ ID NO: 1725476 - RNA, 19 nt, Artificial Sequence
  Description of Artificial Sequence: Synthetic oligonucleotide
  Antisense strand to SEQ ID NO: 1725475
cucaacaccuaguaauguc

SEQ ID NO: 1725477 - RNA, 19 nt, Artificial Sequence
  Description of Artificial Sequence: Synthetic oligonucleotide
  Sense strand starting at position 2096 of SEQ ID NO: 1562145
agguguugaguugaacagu

SEQ ID NO: 1725478 - RNA, 19 nt, Artificial Sequence
  Description of Artificial Sequence: Synthetic oligonucleotide
  Antisense strand to SEQ ID NO: 1725477
acuguucaacucaacaccu

SEQ ID NO: 1725479 - RNA, 19 nt, Artificial Sequence
  Description of Artificial Sequence: Synthetic oligonucleotide
  Sense strand starting at position 2156 of SEQ ID NO: 1562145
ugauuagacccuugauagu

SEQ ID NO: 1725480 - RNA, 19 nt, Artificial Sequence
  Description of Artificial Sequence: Synthetic oligonucleotide
  Antisense strand to SEQ ID NO: 1725479
acuaucaagggucuaauca

SEQ ID NO: 1725481 - RNA, 19 nt, Artificial Sequence
  Description of Artificial Sequence: Synthetic oligonucleotide
  Sense strand starting at position 2243 of SEQ ID NO: 1562145
aggguagaaucaucagagu

SEQ ID NO: 1725482 - RNA, 19 nt, Artificial Sequence
  Description of Artificial Sequence: Synthetic oligonucleotide
  Antisense strand to SEQ ID NO: 1725481
acucugaugauucuacccu

SEQ ID NO: 1725483 - RNA, 19 nt, Artificial Sequence
  Description of Artificial Sequence: Synthetic oligonucleotide
  Sense strand starting at position 2337 of SEQ ID NO: 1562145
gaaagagugcaauagcacu

SEQ ID NO: 1725484 - RNA, 19 nt, Artificial Sequence
  Description of Artificial Sequence: Synthetic oligonucleotide
  Antisense strand to SEQ ID NO: 1725483
agugcuauugcacucuuuc

SEQ ID NO: 1725485 - RNA, 19 nt, Artificial Sequence
  Description of Artificial Sequence: Synthetic oligonucleotide
  Sense strand starting at position 2343 of SEQ ID NO: 1562145
gugcaauagcacuauaaua

SEQ ID NO: 1725486 - RNA, 19 nt, Artificial Sequence
  Description of Artificial Sequence: Synthetic oligonucleotide
  Antisense strand to SEQ ID NO: 1725485
uauuauagugcuauugcac

SEQ ID NO: 1725487 - RNA, 19 nt, Artificial Sequence
  Description of Artificial Sequence: Synthetic oligonucleotide
  Sense strand starting at position 2363 of SEQ ID NO: 1562145
uaguaacaggguuaguuau

SEQ ID NO: 1725488 - RNA, 19 nt, Artificial Sequence
  Description of Artificial Sequence: Synthetic oligonucleotide
  Antisense strand to SEQ ID NO: 1725487
auaacuaacccuguuacua

SEQ ID NO: 1725489 - RNA, 19 nt, Artificial Sequence
  Description of Artificial Sequence: Synthetic oligonucleotide
  Sense strand starting at position 2365 of SEQ ID NO: 1562145
guaacaggguuaguuauaa

SEQ ID NO: 1725490 - RNA, 19 nt, Artificial Sequence
  Description of Artificial Sequence: Synthetic oligonucleotide
  Antisense strand to SEQ ID NO: 1725489
uuauaacuaacccuguuac

SEQ ID NO: 1725491 - RNA, 19 nt, Artificial Sequence
  Description of Artificial Sequence: Synthetic oligonucleotide
  Sense strand starting at position 2376 of SEQ ID NO: 1562145
aguuauaaccuagaguacu

SEQ ID NO: 1725492 - RNA, 19 nt, Artificial Sequence
  Description of Artificial Sequence: Synthetic oligonucleotide
  Antisense strand to SEQ ID NO: 1725491
aguacucuagguuauaacu

SEQ ID NO: 1725493 - RNA, 19 nt, Artificial Sequence
  Description of Artificial Sequence: Synthetic oligonucleotide
  Sense strand starting at position 2475 of SEQ ID NO: 1562145
accaucauuuaaggaugaa

SEQ ID NO: 1725494 - RNA, 19 nt, Artificial Sequence
  Description of Artificial Sequence: Synthetic oligonucleotide
  Antisense strand to SEQ ID NO: 1725493
uucauccuuaaaugauggu

SEQ ID NO: 1725495 - RNA, 19 nt, Artificial Sequence
  Description of Artificial Sequence: Synthetic oligonucleotide
  Sense strand starting at position 2587 of SEQ ID NO: 1562145
gucacacuacacuauguua

SEQ ID NO: 1725496 - RNA, 19 nt, Artificial Sequence
  Description of Artificial Sequence: Synthetic oligonucleotide
  Antisense strand to SEQ ID NO: 1725495
uaacauaguguagugugac

SEQ ID NO: 1725497 - RNA, 19 nt, Artificial Sequence
  Description of Artificial Sequence: Synthetic oligonucleotide
  Sense strand starting at position 2595 of SEQ ID NO: 1562145
acacuauguuaucuaggaa

SEQ ID NO: 1725498 - RNA, 19 nt, Artificial Sequence
  Description of Artificial Sequence: Synthetic oligonucleotide
  Antisense strand to SEQ ID NO: 1725497
uuccuagauaacauagugu

SEQ ID NO: 1725499 - RNA, 19 nt, Artificial Sequence
  Description of Artificial Sequence: Synthetic oligonucleotide
  Sense strand starting at position 2598 of SEQ ID NO: 1562145
cuauguuaucuaggaacau

SEQ ID NO: 1725500 - RNA, 19 nt, Artificial Sequence
  Description of Artificial Sequence: Synthetic oligonucleotide
  Antisense strand to SEQ ID NO: 1725499
auguuccuagauaacauag

SEQ ID NO: 1725501 - RNA, 19 nt, Artificial Sequence
  Description of Artificial Sequence: Synthetic oligonucleotide
  Sense strand starting at position 3011 of SEQ ID NO: 1562145
gggugaaucccaugagguc

SEQ ID NO: 1725502 - RNA, 19 nt, Artificial Sequence
  Description of Artificial Sequence: Synthetic oligonucleotide
  Antisense strand to SEQ ID NO: 1725501
gaccucaugggauucaccc

SEQ ID NO: 1725503 - RNA, 19 nt, Artificial Sequence
  Description of Artificial Sequence: Synthetic oligonucleotide
  Sense strand starting at position 3012 of SEQ ID NO: 1562145
ggugaaucccaugagguca

SEQ ID NO: 1725504 - RNA, 19 nt, Artificial Sequence
  Description of Artificial Sequence: Synthetic oligonucleotide
  Antisense strand to SEQ ID NO: 1725503
ugaccucaugggauucacc

SEQ ID NO: 1725505 - RNA, 19 nt, Artificial Sequence
  Description of Artificial Sequence: Synthetic oligonucleotide
  Sense strand starting at position 3413 of SEQ ID NO: 1562145
auuucucaugcagguguua

SEQ ID NO: 1725506 - RNA, 19 nt, Artificial Sequence
  Description of Artificial Sequence: Synthetic oligonucleotide
  Antisense strand to SEQ ID NO: 1725505
uaacaccugcaugagaaau

SEQ ID NO: 1725507 - RNA, 19 nt, Artificial Sequence
  Description of Artificial Sequence: Synthetic oligonucleotide
  Sense strand starting at position 3583 of SEQ ID NO: 1562145
ucccuacaccuagguauua

SEQ ID NO: 1725508 - RNA, 19 nt, Artificial Sequence
  Description of Artificial Sequence: Synthetic oligonucleotide
  Antisense strand to SEQ ID NO: 1725507
uaauaccuagguguaggga

SEQ ID NO: 1725509 - RNA, 19 nt, Artificial Sequence
  Description of Artificial Sequence: Synthetic oligonucleotide
  Sense strand starting at position 102 of SEQ ID NO: 1562146
cuagguaauccaugucaau

SEQ ID NO: 1725510 - RNA, 19 nt, Artificial Sequence
  Description of Artificial Sequence: Synthetic oligonucleotide
  Antisense strand to SEQ ID NO: 1725509
auugacauggauuaccuag

SEQ ID NO: 1725511 - RNA, 19 nt, Artificial Sequence
  Description of Artificial Sequence: Synthetic oligonucleotide
  Sense strand starting at position 209 of SEQ ID NO: 1562146
gcaauuaccaauggaaggu

SEQ ID NO: 1725512 - RNA, 19 nt, Artificial Sequence
  Description of Artificial Sequence: Synthetic oligonucleotide
  Antisense strand to SEQ ID NO: 1725511
accuuccauugguaauugc

SEQ ID NO: 1725513 - RNA, 19 nt, Artificial Sequence
  Description of Artificial Sequence: Synthetic oligonucleotide
  Sense strand starting at position 282 of SEQ ID NO: 1562146
acuguaaucuagcugaacu

SEQ ID NO: 1725514 - RNA, 19 nt, Artificial Sequence
  Description of Artificial Sequence: Synthetic oligonucleotide
  Antisense strand to SEQ ID NO: 1725513
aguucagcuagauuacagu

SEQ ID NO: 1725515 - RNA, 19 nt, Artificial Sequence
  Description of Artificial Sequence: Synthetic oligonucleotide
  Sense strand starting at position 354 of SEQ ID NO: 1562146
auacaauauuggcuuugaa

SEQ ID NO: 1725516 - RNA, 19 nt, Artificial Sequence
  Description of Artificial Sequence: Synthetic oligonucleotide
  Antisense strand to SEQ ID NO: 1725515
uucaaagccaauauuguau

SEQ ID NO: 1725517 - RNA, 19 nt, Artificial Sequence
  Description of Artificial Sequence: Synthetic oligonucleotide
  Sense strand starting at position 426 of SEQ ID NO: 1562146
cgcacauuacccuaguuga

SEQ ID NO: 1725518 - RNA, 19 nt, Artificial Sequence
  Description of Artificial Sequence: Synthetic oligonucleotide
  Antisense strand to SEQ ID NO: 1725517
ucaacuaggguaaugugcg

SEQ ID NO: 1725519 - RNA, 19 nt, Artificial Sequence
  Description of Artificial Sequence: Synthetic oligonucleotide
  Sense strand starting at position 526 of SEQ ID NO: 1562146
uugugaguucugcaacaaa

SEQ ID NO: 1725520 - RNA, 19 nt, Artificial Sequence
  Description of Artificial Sequence: Synthetic oligonucleotide
  Antisense strand to SEQ ID NO: 1725519
uuuguugcagaacucacaa

SEQ ID NO: 1725521 - RNA, 19 nt, Artificial Sequence
  Description of Artificial Sequence: Synthetic oligonucleotide
  Sense strand starting at position 605 of SEQ ID NO: 1562146
ucugucagcugacuguuaa

SEQ ID NO: 1725522 - RNA, 19 nt, Artificial Sequence
  Description of Artificial Sequence: Synthetic oligonucleotide
  Antisense strand to SEQ ID NO: 1725521
uuaacagucagcugacaga

SEQ ID NO: 1725523 - RNA, 19 nt, Artificial Sequence
  Description of Artificial Sequence: Synthetic oligonucleotide
  Sense strand starting at position 606 of SEQ ID NO: 1562146
cugucagcugacuguuaau

SEQ ID NO: 1725524 - RNA, 19 nt, Artificial Sequence
  Description of Artificial Sequence: Synthetic oligonucleotide
  Antisense strand to SEQ ID NO: 1725523
auuaacagucagcugacag

SEQ ID NO: 1725525 - RNA, 19 nt, Artificial Sequence
  Description of Artificial Sequence: Synthetic oligonucleotide
  Sense strand starting at position 671 of SEQ ID NO: 1562146
augagcuuauugucuagga

SEQ ID NO: 1725526 - RNA, 19 nt, Artificial Sequence
  Description of Artificial Sequence: Synthetic oligonucleotide
  Antisense strand to SEQ ID NO: 1725525
uccuagacaauaagcucau

SEQ ID NO: 1725527 - RNA, 19 nt, Artificial Sequence
  Description of Artificial Sequence: Synthetic oligonucleotide
  Sense strand starting at position 672 of SEQ ID NO: 1562146
ugagcuuauugucuaggaa

SEQ ID NO: 1725528 - RNA, 19 nt, Artificial Sequence
  Description of Artificial Sequence: Synthetic oligonucleotide
  Antisense strand to SEQ ID NO: 1725527
uuccuagacaauaagcuca

SEQ ID NO: 1725529 - RNA, 19 nt, Artificial Sequence
  Description of Artificial Sequence: Synthetic oligonucleotide
  Sense strand starting at position 673 of SEQ ID NO: 1562146
gagcuuauugucuaggaag

SEQ ID NO: 1725530 - RNA, 19 nt, Artificial Sequence
  Description of Artificial Sequence: Synthetic oligonucleotide
  Antisense strand to SEQ ID NO: 1725529
cuuccuagacaauaagcuc

SEQ ID NO: 1725531 - RNA, 19 nt, Artificial Sequence
  Description of Artificial Sequence: Synthetic oligonucleotide
  Sense strand starting at position 675 of SEQ ID NO: 1562146
gcuuauugucuaggaagag

SEQ ID NO: 1725532 - RNA, 19 nt, Artificial Sequence
  Description of Artificial Sequence: Synthetic oligonucleotide
  Antisense strand to SEQ ID NO: 1725531
cucuuccuagacaauaagc

SEQ ID NO: 1725533 - RNA, 19 nt, Artificial Sequence
  Description of Artificial Sequence: Synthetic oligonucleotide
  Sense strand starting at position 873 of SEQ ID NO: 1562146
aguguugcaggauaauacu

SEQ ID NO: 1725534 - RNA, 19 nt, Artificial Sequence
  Description of Artificial Sequence: Synthetic oligonucleotide
  Antisense strand to SEQ ID NO: 1725533
aguauuauccugcaacacu

SEQ ID NO: 1725535 - RNA, 19 nt, Artificial Sequence
  Description of Artificial Sequence: Synthetic oligonucleotide
  Sense strand starting at position 909 of SEQ ID NO: 1562146
acaaucagauucgucuaca

SEQ ID NO: 1725536 - RNA, 19 nt, Artificial Sequence
  Description of Artificial Sequence: Synthetic oligonucleotide
  Antisense strand to SEQ ID NO: 1725535
uguagacgaaucugauugu

SEQ ID NO: 1725537 - RNA, 19 nt, Artificial Sequence
  Description of Artificial Sequence: Synthetic oligonucleotide
  Sense strand starting at position 912 of SEQ ID NO: 1562146
aucagauucgucuacaucu

SEQ ID NO: 1725538 - RNA, 19 nt, Artificial Sequence
  Description of Artificial Sequence: Synthetic oligonucleotide
  Antisense strand to SEQ ID NO: 1725537
agauguagacgaaucugau

SEQ ID NO: 1725539 - RNA, 19 nt, Artificial Sequence
  Description of Artificial Sequence: Synthetic oligonucleotide
  Sense strand starting at position 923 of SEQ ID NO: 1562146
cuacaucugcgauauuaac

SEQ ID NO: 1725540 - RNA, 19 nt, Artificial Sequence
  Description of Artificial Sequence: Synthetic oligonucleotide
  Antisense strand to SEQ ID NO: 1725539
guuaauaucgcagauguag

SEQ ID NO: 1725541 - RNA, 19 nt, Artificial Sequence
  Description of Artificial Sequence: Synthetic oligonucleotide
  Sense strand starting at position 932 of SEQ ID NO: 1562146
cgauauuaacaagggacuu

SEQ ID NO: 1725542 - RNA, 19 nt, Artificial Sequence
  Description of Artificial Sequence: Synthetic oligonucleotide
  Antisense strand to SEQ ID NO: 1725541
aagucccuuguuaauaucg

SEQ ID NO: 1725543 - RNA, 19 nt, Artificial Sequence
  Description of Artificial Sequence: Synthetic oligonucleotide
  Sense strand starting at position 1139 of SEQ ID NO: 1562146
uggucaauaacguagucau

SEQ ID NO: 1725544 - RNA, 19 nt, Artificial Sequence
  Description of Artificial Sequence: Synthetic oligonucleotide
  Antisense strand to SEQ ID NO: 1725543
augacuacguuauugacca

SEQ ID NO: 1725545 - RNA, 19 nt, Artificial Sequence
  Description of Artificial Sequence: Synthetic oligonucleotide
  Sense strand starting at position 1142 of SEQ ID NO: 1562146
ucaauaacguagucauguu

SEQ ID NO: 1725546 - RNA, 19 nt, Artificial Sequence
  Description of Artificial Sequence: Synthetic oligonucleotide
  Antisense strand to SEQ ID NO: 1725545
aacaugacuacguuauuga

SEQ ID NO: 1725547 - RNA, 19 nt, Artificial Sequence
  Description of Artificial Sequence: Synthetic oligonucleotide
  Sense strand starting at position 1187 of SEQ ID NO: 1562146
gcuggaggguuccuguaau

SEQ ID NO: 1725548 - RNA, 19 nt, Artificial Sequence
  Description of Artificial Sequence: Synthetic oligonucleotide
  Antisense strand to SEQ ID NO: 1725547
auuacaggaacccuccagc

SEQ ID NO: 1725549 - RNA, 19 nt, Artificial Sequence
  Description of Artificial Sequence: Synthetic oligonucleotide
  Sense strand starting at position 2168 of SEQ ID NO: 1562146
ugagcugagagauguuugu

SEQ ID NO: 1725550 - RNA, 19 nt, Artificial Sequence
  Description of Artificial Sequence: Synthetic oligonucleotide
  Antisense strand to SEQ ID NO: 1725549
acaaacaucucucagcuca

SEQ ID NO: 1725551 - RNA, 19 nt, Artificial Sequence
  Description of Artificial Sequence: Synthetic oligonucleotide
  Sense strand starting at position 2303 of SEQ ID NO: 1562146
gauccagcugugugggaua

SEQ ID NO: 1725552 - RNA, 19 nt, Artificial Sequence
  Description of Artificial Sequence: Synthetic oligonucleotide
  Antisense strand to SEQ ID NO: 1725551
uaucccacacagcuggauc

SEQ ID NO: 1725553 - RNA, 19 nt, Artificial Sequence
  Description of Artificial Sequence: Synthetic oligonucleotide
  Sense strand starting at position 2308 of SEQ ID NO: 1562146
agcugugugggauaacagu

SEQ ID NO: 1725554 - RNA, 19 nt, Artificial Sequence
  Description of Artificial Sequence: Synthetic oligonucleotide
  Antisense strand to SEQ ID NO: 1725553
acuguuaucccacacagcu

SEQ ID NO: 1725555 - RNA, 19 nt, Artificial Sequence
  Description of Artificial Sequence: Synthetic oligonucleotide
  Sense strand starting at position 2317 of SEQ ID NO: 1562146
ggauaacaguucucggcaa

SEQ ID NO: 1725556 - RNA, 19 nt, Artificial Sequence
  Description of Artificial Sequence: Synthetic oligonucleotide
  Antisense strand to SEQ ID NO: 1725555
uugccgagaacuguuaucc

SEQ ID NO: 1725557 - RNA, 19 nt, Artificial Sequence
  Description of Artificial Sequence: Synthetic oligonucleotide
  Sense strand starting at position 2319 of SEQ ID NO: 1562146
auaacaguucucggcaaug

SEQ ID NO: 1725558 - RNA, 19 nt, Artificial Sequence
  Description of Artificial Sequence: Synthetic oligonucleotide
  Antisense strand to SEQ ID NO: 1725557
cauugccgagaacuguuau

SEQ ID NO: 1725559 - RNA, 19 nt, Artificial Sequence
  Description of Artificial Sequence: Synthetic oligonucleotide
  Sense strand starting at position 2336 of SEQ ID NO: 1562146
uggguucagcugugauuga

SEQ ID NO: 1725560 - RNA, 19 nt, Artificial Sequence
  Description of Artificial Sequence: Synthetic oligonucleotide
  Antisense strand to SEQ ID NO: 1725559
ucaaucacagcugaaccca

SEQ ID NO: 1725561 - RNA, 19 nt, Artificial Sequence
  Description of Artificial Sequence: Synthetic oligonucleotide
  Sense strand starting at position 2391 of SEQ ID NO: 1562146
gcaguugaaugccuccaaa

SEQ ID NO: 1725562 - RNA, 19 nt, Artificial Sequence
  Description of Artificial Sequence: Synthetic oligonucleotide
  Antisense strand to SEQ ID NO: 1725561
uuuggaggcauucaacugc

SEQ ID NO: 1725563 - RNA, 19 nt, Artificial Sequence
  Description of Artificial Sequence: Synthetic oligonucleotide
  Sense strand starting at position 2462 of SEQ ID NO: 1562146
ccuaacgugucauccuaau

SEQ ID NO: 1725564 - RNA, 19 nt, Artificial Sequence
  Description of Artificial Sequence: Synthetic oligonucleotide
  Antisense strand to SEQ ID NO: 1725563
auuaggaugacacguuagg

SEQ ID NO: 1725565 - RNA, 19 nt, Artificial Sequence
  Description of Artificial Sequence: Synthetic oligonucleotide
  Sense strand starting at position 2557 of SEQ ID NO: 1562146
agaccaauuuggcaaagaa

SEQ ID NO: 1725566 - RNA, 19 nt, Artificial Sequence
  Description of Artificial Sequence: Synthetic oligonucleotide
  Antisense strand to SEQ ID NO: 1725565
uucuuugccaaauuggucu

SEQ ID NO: 1725567 - RNA, 19 nt, Artificial Sequence
  Description of Artificial Sequence: Synthetic oligonucleotide
  Sense strand starting at position 2650 of SEQ ID NO: 1562146
ucguauaaaguuugggaua

SEQ ID NO: 1725568 - RNA, 19 nt, Artificial Sequence
  Description of Artificial Sequence: Synthetic oligonucleotide
  Antisense strand to SEQ ID NO: 1725567
uaucccaaacuuuauacga

SEQ ID NO: 1725569 - RNA, 19 nt, Artificial Sequence
  Description of Artificial Sequence: Synthetic oligonucleotide
  Sense strand starting at position 2977 of SEQ ID NO: 1562146
auguacaacucuccagaga

SEQ ID NO: 1725570 - RNA, 19 nt, Artificial Sequence
  Description of Artificial Sequence: Synthetic oligonucleotide
  Antisense strand to SEQ ID NO: 1725569
ucucuggagaguuguacau

SEQ ID NO: 1725571 - RNA, 19 nt, Artificial Sequence
  Description of Artificial Sequence: Synthetic oligonucleotide
  Sense strand starting at position 2988 of SEQ ID NO: 1562146
uccagagagcggugacauu

SEQ ID NO: 1725572 - RNA, 19 nt, Artificial Sequence
  Description of Artificial Sequence: Synthetic oligonucleotide
  Antisense strand to SEQ ID NO: 1725571
aaugucaccgcucucugga

SEQ ID NO: 1725573 - RNA, 19 nt, Artificial Sequence
  Description of Artificial Sequence: Synthetic oligonucleotide
  Sense strand starting at position 3021 of SEQ ID NO: 1562146
guaacaugacugugaccuu

SEQ ID NO: 1725574 - RNA, 19 nt, Artificial Sequence
  Description of Artificial Sequence: Synthetic oligonucleotide
  Antisense strand to SEQ ID NO: 1725573
aaggucacagucauguuac

SEQ ID NO: 1725575 - RNA, 19 nt, Artificial Sequence
  Description of Artificial Sequence: Synthetic oligonucleotide
  Sense strand starting at position 3193 of SEQ ID NO: 1562146
ggaauugcuuaaucccaaa

SEQ ID NO: 1725576 - RNA, 19 nt, Artificial Sequence
  Description of Artificial Sequence: Synthetic oligonucleotide
  Antisense strand to SEQ ID NO: 1725575
uuugggauuaagcaauucc

SEQ ID NO: 1725577 - RNA, 19 nt, Artificial Sequence
  Description of Artificial Sequence: Synthetic oligonucleotide
  Sense strand starting at position 3598 of SEQ ID NO: 1562146
cguuccugguaauuugaua

SEQ ID NO: 1725578 - RNA, 19 nt, Artificial Sequence
  Description of Artificial Sequence: Synthetic oligonucleotide
  Antisense strand to SEQ ID NO: 1725577
uaucaaauuaccaggaacg

SEQ ID NO: 1725579 - RNA, 19 nt, Artificial Sequence
  Description of Artificial Sequence: Synthetic oligonucleotide
  Sense strand starting at position 3707 of SEQ ID NO: 1562146
uaccaagcacuguguugau

SEQ ID NO: 1725580 - RNA, 19 nt, Artificial Sequence
  Description of Artificial Sequence: Synthetic oligonucleotide
  Antisense strand to SEQ ID NO: 1725579
aucaacacagugcuuggua

SEQ ID NO: 1725581 - RNA, 19 nt, Artificial Sequence
  Description of Artificial Sequence: Synthetic oligonucleotide
  Sense strand starting at position 3719 of SEQ ID NO: 1562146
uguugauggcuuuacauug

SEQ ID NO: 1725582 - RNA, 19 nt, Artificial Sequence
  Description of Artificial Sequence: Synthetic oligonucleotide
  Antisense strand to SEQ ID NO: 1725581
caauguaaagccaucaaca

SEQ ID NO: 1725583 - RNA, 19 nt, Artificial Sequence
  Description of Artificial Sequence: Synthetic oligonucleotide
  Sense strand starting at position 3780 of SEQ ID NO: 1562146
caagguuuauuaccgagga

SEQ ID NO: 1725584 - RNA, 19 nt, Artificial Sequence
  Description of Artificial Sequence: Synthetic oligonucleotide
  Antisense strand to SEQ ID NO: 1725583
uccucgguaauaaaccuug

SEQ ID NO: 1725585 - RNA, 19 nt, Artificial Sequence
  Description of Artificial Sequence: Synthetic oligonucleotide
  Sense strand starting at position 3784 of SEQ ID NO: 1562146
guuuauuaccgaggacaca

SEQ ID NO: 1725586 - RNA, 19 nt, Artificial Sequence
  Description of Artificial Sequence: Synthetic oligonucleotide
  Antisense strand to SEQ ID NO: 1725585
uguguccucgguaauaaac

SEQ ID NO: 1725587 - RNA, 19 nt, Artificial Sequence
  Description of Artificial Sequence: Synthetic oligonucleotide
  Sense strand starting at position 3871 of SEQ ID NO: 1562146
aggcaaucaggugaacuuu

SEQ ID NO: 1725588 - RNA, 19 nt, Artificial Sequence
  Description of Artificial Sequence: Synthetic oligonucleotide
  Antisense strand to SEQ ID NO: 1725587
aaaguucaccugauugccu

SEQ ID NO: 1725589 - RNA, 19 nt, Artificial Sequence
  Description of Artificial Sequence: Synthetic oligonucleotide
  Sense strand starting at position 3 of SEQ ID NO: 1562147
cucaguguccaaggauauu

SEQ ID NO: 1725590 - RNA, 19 nt, Artificial Sequence
  Description of Artificial Sequence: Synthetic oligonucleotide
  Antisense strand to SEQ ID NO: 1725589
aauauccuuggacacugag

SEQ ID NO: 1725591 - RNA, 19 nt, Artificial Sequence
  Description of Artificial Sequence: Synthetic oligonucleotide
  Sense strand starting at position 75 of SEQ ID NO: 1562147
cuuacuuaggagugguuau

SEQ ID NO: 1725592 - RNA, 19 nt, Artificial Sequence
  Description of Artificial Sequence: Synthetic oligonucleotide
  Antisense strand to SEQ ID NO: 1725591
auaaccacuccuaaguaag

SEQ ID NO: 1725593 - RNA, 19 nt, Artificial Sequence
  Description of Artificial Sequence: Synthetic oligonucleotide
  Sense strand starting at position 76 of SEQ ID NO: 1562147
uuacuuaggagugguuaua

SEQ ID NO: 1725594 - RNA, 19 nt, Artificial Sequence
  Description of Artificial Sequence: Synthetic oligonucleotide
  Antisense strand to SEQ ID NO: 1725593
uauaaccacuccuaaguaa

SEQ ID NO: 1725595 - RNA, 19 nt, Artificial Sequence
  Description of Artificial Sequence: Synthetic oligonucleotide
  Sense strand starting at position 89 of SEQ ID NO: 1562147
guuauaacugucuaaguuu

SEQ ID NO: 1725596 - RNA, 19 nt, Artificial Sequence
  Description of Artificial Sequence: Synthetic oligonucleotide
  Antisense strand to SEQ ID NO: 1725595
aaacuuagacaguuauaac

SEQ ID NO: 1725597 - RNA, 19 nt, Artificial Sequence
  Description of Artificial Sequence: Synthetic oligonucleotide
  Sense strand starting at position 92 of SEQ ID NO: 1562147
auaacugucuaaguuucua

SEQ ID NO: 1725598 - RNA, 19 nt, Artificial Sequence
  Description of Artificial Sequence: Synthetic oligonucleotide
  Antisense strand to SEQ ID NO: 1725597
uagaaacuuagacaguuau

SEQ ID NO: 1725599 - RNA, 19 nt, Artificial Sequence
  Description of Artificial Sequence: Synthetic oligonucleotide
  Sense strand starting at position 114 of SEQ ID NO: 1562147
ucauaccucgaaugugauu

SEQ ID NO: 1725600 - RNA, 19 nt, Artificial Sequence
  Description of Artificial Sequence: Synthetic oligonucleotide
  Antisense strand to SEQ ID NO: 1725599
aaucacauucgagguauga

SEQ ID NO: 1725601 - RNA, 19 nt, Artificial Sequence
  Description of Artificial Sequence: Synthetic oligonucleotide
  Sense strand starting at position 175 of SEQ ID NO: 1562147
aggaaucucuucccagaug

SEQ ID NO: 1725602 - RNA, 19 nt, Artificial Sequence
  Description of Artificial Sequence: Synthetic oligonucleotide
  Antisense strand to SEQ ID NO: 1725601
caucugggaagagauuccu

SEQ ID NO: 1725603 - RNA, 19 nt, Artificial Sequence
  Description of Artificial Sequence: Synthetic oligonucleotide
  Sense strand starting at position 230 of SEQ ID NO: 1562147
agaugaauagcuugugagu

SEQ ID NO: 1725604 - RNA, 19 nt, Artificial Sequence
  Description of Artificial Sequence: Synthetic oligonucleotide
  Antisense strand to SEQ ID NO: 1725603
acucacaagcuauucaucu

SEQ ID NO: 1725605 - RNA, 19 nt, Artificial Sequence
  Description of Artificial Sequence: Synthetic oligonucleotide
  Sense strand starting at position 243 of SEQ ID NO: 1562147
gugaguuacaggcauucca

SEQ ID NO: 1725606 - RNA, 19 nt, Artificial Sequence
  Description of Artificial Sequence: Synthetic oligonucleotide
  Antisense strand to SEQ ID NO: 1725605
uggaaugccuguaacucac

SEQ ID NO: 1725607 - RNA, 19 nt, Artificial Sequence
  Description of Artificial Sequence: Synthetic oligonucleotide
  Sense strand starting at position 250 of SEQ ID NO: 1562147
acaggcauuccagaggcaa

SEQ ID NO: 1725608 - RNA, 19 nt, Artificial Sequence
  Description of Artificial Sequence: Synthetic oligonucleotide
  Antisense strand to SEQ ID NO: 1725607
uugccucuggaaugccugu

SEQ ID NO: 1725609 - RNA, 19 nt, Artificial Sequence
  Description of Artificial Sequence: Synthetic oligonucleotide
  Sense strand starting at position 267 of SEQ ID NO: 1562147
aaggaucgucuugaguagu

SEQ ID NO: 1725610 - RNA, 19 nt, Artificial Sequence
  Description of Artificial Sequence: Synthetic oligonucleotide
  Antisense strand to SEQ ID NO: 1725609
acuacucaagacgauccuu

SEQ ID NO: 1725611 - RNA, 19 nt, Artificial Sequence
  Description of Artificial Sequence: Synthetic oligonucleotide
  Sense strand starting at position 283 of SEQ ID NO: 1562147
aguggccugaauugauauu

SEQ ID NO: 1725612 - RNA, 19 nt, Artificial Sequence
  Description of Artificial Sequence: Synthetic oligonucleotide
  Antisense strand to SEQ ID NO: 1725611
aauaucaauucaggccacu

SEQ ID NO: 1725613 - RNA, 19 nt, Artificial Sequence
  Description of Artificial Sequence: Synthetic oligonucleotide
  Sense strand starting at position 308 of SEQ ID NO: 1562147
ugcauaagugguggauauu

SEQ ID NO: 1725614 - RNA, 19 nt, Artificial Sequence
  Description of Artificial Sequence: Synthetic oligonucleotide
  Antisense strand to SEQ ID NO: 1725613
aauauccaccacuuaugca

SEQ ID NO: 1725615 - RNA, 19 nt, Artificial Sequence
  Description of Artificial Sequence: Synthetic oligonucleotide
  Sense strand starting at position 309 of SEQ ID NO: 1562147
gcauaagugguggauauua

SEQ ID NO: 1725616 - RNA, 19 nt, Artificial Sequence
  Description of Artificial Sequence: Synthetic oligonucleotide
  Antisense strand to SEQ ID NO: 1725615
uaauauccaccacuuaugc

SEQ ID NO: 1725617 - RNA, 19 nt, Artificial Sequence
  Description of Artificial Sequence: Synthetic oligonucleotide
  Sense strand starting at position 638 of SEQ ID NO: 1562147
auacuugcucucuggauga

SEQ ID NO: 1725618 - RNA, 19 nt, Artificial Sequence
  Description of Artificial Sequence: Synthetic oligonucleotide
  Antisense strand to SEQ ID NO: 1725617
ucauccagagagcaaguau

SEQ ID NO: 1725619 - RNA, 19 nt, Artificial Sequence
  Description of Artificial Sequence: Synthetic oligonucleotide
  Sense strand starting at position 642 of SEQ ID NO: 1562147
uugcucucuggaugaucaa

SEQ ID NO: 1725620 - RNA, 19 nt, Artificial Sequence
  Description of Artificial Sequence: Synthetic oligonucleotide
  Antisense strand to SEQ ID NO: 1725619
uugaucauccagagagcaa

SEQ ID NO: 1725621 - RNA, 19 nt, Artificial Sequence
  Description of Artificial Sequence: Synthetic oligonucleotide
  Sense strand starting at position 643 of SEQ ID NO: 1562147
ugcucucuggaugaucaaa

SEQ ID NO: 1725622 - RNA, 19 nt, Artificial Sequence
  Description of Artificial Sequence: Synthetic oligonucleotide
  Antisense strand to SEQ ID NO: 1725621
uuugaucauccagagagca

SEQ ID NO: 1725623 - RNA, 19 nt, Artificial Sequence
  Description of Artificial Sequence: Synthetic oligonucleotide
  Sense strand starting at position 711 of SEQ ID NO: 1562147
gaggcuaccuguuugacua

SEQ ID NO: 1725624 - RNA, 19 nt, Artificial Sequence
  Description of Artificial Sequence: Synthetic oligonucleotide
  Antisense strand to SEQ ID NO: 1725623
uagucaaacagguagccuc

SEQ ID NO: 1725625 - RNA, 19 nt, Artificial Sequence
  Description of Artificial Sequence: Synthetic oligonucleotide
  Sense strand starting at position 747 of SEQ ID NO: 1562147
ggcagaugagcucacuucu

SEQ ID NO: 1725626 - RNA, 19 nt, Artificial Sequence
  Description of Artificial Sequence: Synthetic oligonucleotide
  Antisense strand to SEQ ID NO: 1725625
agaagugagcucaucugcc

SEQ ID NO: 1725627 - RNA, 19 nt, Artificial Sequence
  Description of Artificial Sequence: Synthetic oligonucleotide
  Sense strand starting at position 861 of SEQ ID NO: 1562147
cugacaacuuuccucgagu

SEQ ID NO: 1725628 - RNA, 19 nt, Artificial Sequence
  Description of Artificial Sequence: Synthetic oligonucleotide
  Antisense strand to SEQ ID NO: 1725627
acucgaggaaaguugucag

SEQ ID NO: 1725629 - RNA, 19 nt, Artificial Sequence
  Description of Artificial Sequence: Synthetic oligonucleotide
  Sense strand starting at position 862 of SEQ ID NO: 1562147
ugacaacuuuccucgaguu

SEQ ID NO: 1725630 - RNA, 19 nt, Artificial Sequence
  Description of Artificial Sequence: Synthetic oligonucleotide
  Antisense strand to SEQ ID NO: 1725629
aacucgaggaaaguuguca

SEQ ID NO: 1725631 - RNA, 19 nt, Artificial Sequence
  Description of Artificial Sequence: Synthetic oligonucleotide
  Sense strand starting at position 1066 of SEQ ID NO: 1562147
gaaauacuguggccucaaa

SEQ ID NO: 1725632 - RNA, 19 nt, Artificial Sequence
  Description of Artificial Sequence: Synthetic oligonucleotide
  Antisense strand to SEQ ID NO: 1725631
uuugaggccacaguauuuc

SEQ ID NO: 1725633 - RNA, 19 nt, Artificial Sequence
  Description of Artificial Sequence: Synthetic oligonucleotide
  Sense strand starting at position 1281 of SEQ ID NO: 1562147
guuggaacuuucuuaauuc

SEQ ID NO: 1725634 - RNA, 19 nt, Artificial Sequence
  Description of Artificial Sequence: Synthetic oligonucleotide
  Antisense strand to SEQ ID NO: 1725633
gaauuaagaaaguuccaac

SEQ ID NO: 1725635 - RNA, 19 nt, Artificial Sequence
  Description of Artificial Sequence: Synthetic oligonucleotide
  Sense strand starting at position 2102 of SEQ ID NO: 1562147
cucacagagucuucuaagu

SEQ ID NO: 1725636 - RNA, 19 nt, Artificial Sequence
  Description of Artificial Sequence: Synthetic oligonucleotide
  Antisense strand to SEQ ID NO: 1725635
acuuagaagacucugugag

SEQ ID NO: 1725637 - RNA, 19 nt, Artificial Sequence
  Description of Artificial Sequence: Synthetic oligonucleotide
  Sense strand starting at position 2107 of SEQ ID NO: 1562147
agagucuucuaaguaacug

SEQ ID NO: 1725638 - RNA, 19 nt, Artificial Sequence
  Description of Artificial Sequence: Synthetic oligonucleotide
  Antisense strand to SEQ ID NO: 1725637
caguuacuuagaagacucu

SEQ ID NO: 1725639 - RNA, 19 nt, Artificial Sequence
  Description of Artificial Sequence: Synthetic oligonucleotide
  Sense strand starting at position 2115 of SEQ ID NO: 1562147
cuaaguaacugaguucuga

SEQ ID NO: 1725640 - RNA, 19 nt, Artificial Sequence
  Description of Artificial Sequence: Synthetic oligonucleotide
  Antisense strand to SEQ ID NO: 1725639
ucagaacucaguuacuuag

SEQ ID NO: 1725641 - RNA, 19 nt, Artificial Sequence
  Description of Artificial Sequence: Synthetic oligonucleotide
  Sense strand starting at position 2299 of SEQ ID NO: 1562147
gaguuugagcuggagcaga

SEQ ID NO: 1725642 - RNA, 19 nt, Artificial Sequence
  Description of Artificial Sequence: Synthetic oligonucleotide
  Antisense strand to SEQ ID NO: 1725641
ucugcuccagcucaaacuc

SEQ ID NO: 1725643 - RNA, 19 nt, Artificial Sequence
  Description of Artificial Sequence: Synthetic oligonucleotide
  Sense strand starting at position 2325 of SEQ ID NO: 1562147
gguauagugauggaucagu

SEQ ID NO: 1725644 - RNA, 19 nt, Artificial Sequence
  Description of Artificial Sequence: Synthetic oligonucleotide
  Antisense strand to SEQ ID NO: 1725643
acugauccaucacuauacc

SEQ ID NO: 1725645 - RNA, 19 nt, Artificial Sequence
  Description of Artificial Sequence: Synthetic oligonucleotide
  Sense strand starting at position 2330 of SEQ ID NO: 1562147
agugauggaucagugcaca

SEQ ID NO: 1725646 - RNA, 19 nt, Artificial Sequence
  Description of Artificial Sequence: Synthetic oligonucleotide
  Antisense strand to SEQ ID NO: 1725645
ugugcacugauccaucacu

SEQ ID NO: 1725647 - RNA, 19 nt, Artificial Sequence
  Description of Artificial Sequence: Synthetic oligonucleotide
  Sense strand starting at position 2335 of SEQ ID NO: 1562147
uggaucagugcacaacaau

SEQ ID NO: 1725648 - RNA, 19 nt, Artificial Sequence
  Description of Artificial Sequence: Synthetic oligonucleotide
  Antisense strand to SEQ ID NO: 1725647
auuguugugcacugaucca

SEQ ID NO: 1725649 - RNA, 19 nt, Artificial Sequence
  Description of Artificial Sequence: Synthetic oligonucleotide
  Sense strand starting at position 2560 of SEQ ID NO: 1562147
auauuugaugacugcguua

SEQ ID NO: 1725650 - RNA, 19 nt, Artificial Sequence
  Description of Artificial Sequence: Synthetic oligonucleotide
  Antisense strand to SEQ ID NO: 1725649
uaacgcagucaucaaauau

SEQ ID NO: 1725651 - RNA, 19 nt, Artificial Sequence
  Description of Artificial Sequence: Synthetic oligonucleotide
  Sense strand starting at position 2562 of SEQ ID NO: 1562147
auuugaugacugcguuauc

SEQ ID NO: 1725652 - RNA, 19 nt, Artificial Sequence
  Description of Artificial Sequence: Synthetic oligonucleotide
  Antisense strand to SEQ ID NO: 1725651
gauaacgcagucaucaaau

SEQ ID NO: 1725653 - RNA, 19 nt, Artificial Sequence
  Description of Artificial Sequence: Synthetic oligonucleotide
  Sense strand starting at position 2839 of SEQ ID NO: 1562147
gcuggagagucauuacaac

SEQ ID NO: 1725654 - RNA, 19 nt, Artificial Sequence
  Description of Artificial Sequence: Synthetic oligonucleotide
  Antisense strand to SEQ ID NO: 1725653
guuguaaugacucuccagc

SEQ ID NO: 1725655 - RNA, 19 nt, Artificial Sequence
  Description of Artificial Sequence: Synthetic oligonucleotide
  Sense strand starting at position 2899 of SEQ ID NO: 1562147
ucgagacuucuuuagcauc

SEQ ID NO: 1725656 - RNA, 19 nt, Artificial Sequence
  Description of Artificial Sequence: Synthetic oligonucleotide
  Antisense strand to SEQ ID NO: 1725655
gaugcuaaagaagucucga

SEQ ID NO: 1725657 - RNA, 19 nt, Artificial Sequence
  Description of Artificial Sequence: Synthetic oligonucleotide
  Sense strand starting at position 3021 of SEQ ID NO: 1562147
ccucauguccuguaacuca

SEQ ID NO: 1725658 - RNA, 19 nt, Artificial Sequence
  Description of Artificial Sequence: Synthetic oligonucleotide
  Antisense strand to SEQ ID NO: 1725657
ugaguuacaggacaugagg

SEQ ID NO: 1725659 - RNA, 19 nt, Artificial Sequence
  Description of Artificial Sequence: Synthetic oligonucleotide
  Sense strand starting at position 3057 of SEQ ID NO: 1562147
ucaguucuacuccagauua

SEQ ID NO: 1725660 - RNA, 19 nt, Artificial Sequence
  Description of Artificial Sequence: Synthetic oligonucleotide
  Antisense strand to SEQ ID NO: 1725659
uaaucuggaguagaacuga

SEQ ID NO: 1725661 - RNA, 19 nt, Artificial Sequence
  Description of Artificial Sequence: Synthetic oligonucleotide
  Sense strand starting at position 3370 of SEQ ID NO: 1562147
uucuaagauuuaggaaaug

SEQ ID NO: 1725662 - RNA, 19 nt, Artificial Sequence
  Description of Artificial Sequence: Synthetic oligonucleotide
  Antisense strand to SEQ ID NO: 1725661
cauuuccuaaaucuuagaa

SEQ ID NO: 1725663 - RNA, 19 nt, Artificial Sequence
  Description of Artificial Sequence: Synthetic oligonucleotide
  Sense strand starting at position 3758 of SEQ ID NO: 1562147
aagguuagguaaucacaca

SEQ ID NO: 1725664 - RNA, 19 nt, Artificial Sequence
  Description of Artificial Sequence: Synthetic oligonucleotide
  Antisense strand to SEQ ID NO: 1725663
ugugugauuaccuaaccuu

SEQ ID NO: 1725665 - RNA, 19 nt, Artificial Sequence
  Description of Artificial Sequence: Synthetic oligonucleotide
  Sense strand starting at position 3849 of SEQ ID NO: 1562147
gugugcauuguugugugua

SEQ ID NO: 1725666 - RNA, 19 nt, Artificial Sequence
  Description of Artificial Sequence: Synthetic oligonucleotide
  Antisense strand to SEQ ID NO: 1725665
uacacacaacaaugcacac

SEQ ID NO: 1725667 - RNA, 19 nt, Artificial Sequence
  Description of Artificial Sequence: Synthetic oligonucleotide
  Sense strand starting at position 3969 of SEQ ID NO: 1562147
aagaguucuguugaaguca

SEQ ID NO: 1725668 - RNA, 19 nt, Artificial Sequence
  Description of Artificial Sequence: Synthetic oligonucleotide
  Antisense strand to SEQ ID NO: 1725667
ugacuucaacagaacucuu

SEQ ID NO: 1725669 - RNA, 19 nt, Artificial Sequence
  Description of Artificial Sequence: Synthetic oligonucleotide
  Sense strand starting at position 63 of SEQ ID NO: 1562148
cgccgacuggcucagauuu

SEQ ID NO: 1725670 - RNA, 19 nt, Artificial Sequence
  Description of Artificial Sequence: Synthetic oligonucleotide
  Antisense strand to SEQ ID NO: 1725669
aaaucugagccagucggcg

SEQ ID NO: 1725671 - RNA, 19 nt, Artificial Sequence
  Description of Artificial Sequence: Synthetic oligonucleotide
  Sense strand starting at position 899 of SEQ ID NO: 1562148
ucccgaaaucacgauuggu

SEQ ID NO: 1725672 - RNA, 19 nt, Artificial Sequence
  Description of Artificial Sequence: Synthetic oligonucleotide
  Antisense strand to SEQ ID NO: 1725671
accaaucgugauuucggga

SEQ ID NO: 1725673 - RNA, 19 nt, Artificial Sequence
  Description of Artificial Sequence: Synthetic oligonucleotide
  Sense strand starting at position 902 of SEQ ID NO: 1562148
cgaaaucacgauugguaau

SEQ ID NO: 1725674 - RNA, 19 nt, Artificial Sequence
  Description of Artificial Sequence: Synthetic oligonucleotide
  Antisense strand to SEQ ID NO: 1725673
auuaccaaucgugauuucg

SEQ ID NO: 1725675 - RNA, 19 nt, Artificial Sequence
  Description of Artificial Sequence: Synthetic oligonucleotide
  Sense strand starting at position 977 of SEQ ID NO: 1562148
ggucgacuucaggguuuaa

SEQ ID NO: 1725676 - RNA, 19 nt, Artificial Sequence
  Description of Artificial Sequence: Synthetic oligonucleotide
  Antisense strand to SEQ ID NO: 1725675
uuaaacccugaagucgacc

SEQ ID NO: 1725677 - RNA, 19 nt, Artificial Sequence
  Description of Artificial Sequence: Synthetic oligonucleotide
  Sense strand starting at position 987 of SEQ ID NO: 1562148
aggguuuaauccuaaccac

SEQ ID NO: 1725678 - RNA, 19 nt, Artificial Sequence
  Description of Artificial Sequence: Synthetic oligonucleotide
  Antisense strand to SEQ ID NO: 1725677
gugguuaggauuaaacccu

SEQ ID NO: 1725679 - RNA, 19 nt, Artificial Sequence
  Description of Artificial Sequence: Synthetic oligonucleotide
  Sense strand starting at position 1093 of SEQ ID NO: 1562148
ugaccugaguuucucaaag

SEQ ID NO: 1725680 - RNA, 19 nt, Artificial Sequence
  Description of Artificial Sequence: Synthetic oligonucleotide
  Antisense strand to SEQ ID NO: 1725679
cuuugagaaacucagguca

SEQ ID NO: 1725681 - RNA, 19 nt, Artificial Sequence
  Description of Artificial Sequence: Synthetic oligonucleotide
  Sense strand starting at position 1449 of SEQ ID NO: 1562148
cuccuuaccuguccuggaa

SEQ ID NO: 1725682 - RNA, 19 nt, Artificial Sequence
  Description of Artificial Sequence: Synthetic oligonucleotide
  Antisense strand to SEQ ID NO: 1725681
uuccaggacagguaaggag

SEQ ID NO: 1725683 - RNA, 19 nt, Artificial Sequence
  Description of Artificial Sequence: Synthetic oligonucleotide
  Sense strand starting at position 1492 of SEQ ID NO: 1562148
uggguccagcuuuaaauau

SEQ ID NO: 1725684 - RNA, 19 nt, Artificial Sequence
  Description of Artificial Sequence: Synthetic oligonucleotide
  Antisense strand to SEQ ID NO: 1725683
auauuuaaagcuggaccca

SEQ ID NO: 1725685 - RNA, 19 nt, Artificial Sequence
  Description of Artificial Sequence: Synthetic oligonucleotide
  Sense strand starting at position 1586 of SEQ ID NO: 1562148
gcuucuauucccugggcaa

SEQ ID NO: 1725686 - RNA, 19 nt, Artificial Sequence
  Description of Artificial Sequence: Synthetic oligonucleotide
  Antisense strand to SEQ ID NO: 1725685
uugcccagggaauagaagc

SEQ ID NO: 1725687 - RNA, 19 nt, Artificial Sequence
  Description of Artificial Sequence: Synthetic oligonucleotide
  Sense strand starting at position 1587 of SEQ ID NO: 1562148
cuucuauucccugggcaaa

SEQ ID NO: 1725688 - RNA, 19 nt, Artificial Sequence
  Description of Artificial Sequence: Synthetic oligonucleotide
  Antisense strand to SEQ ID NO: 1725687
uuugcccagggaauagaag

SEQ ID NO: 1725689 - RNA, 19 nt, Artificial Sequence
  Description of Artificial Sequence: Synthetic oligonucleotide
  Sense strand starting at position 1695 of SEQ ID NO: 1562148
ugagcaaagccuuacucua

SEQ ID NO: 1725690 - RNA, 19 nt, Artificial Sequence
  Description of Artificial Sequence: Synthetic oligonucleotide
  Antisense strand to SEQ ID NO: 1725689
uagaguaaggcuuugcuca

SEQ ID NO: 1725691 - RNA, 19 nt, Artificial Sequence
  Description of Artificial Sequence: Synthetic oligonucleotide
  Sense strand starting at position 1717 of SEQ ID NO: 1562148
ugaucuagguucgcaucua

SEQ ID NO: 1725692 - RNA, 19 nt, Artificial Sequence
  Description of Artificial Sequence: Synthetic oligonucleotide
  Antisense strand to SEQ ID NO: 1725691
uagaugcgaaccuagauca

SEQ ID NO: 1725693 - RNA, 19 nt, Artificial Sequence
  Description of Artificial Sequence: Synthetic oligonucleotide
  Sense strand starting at position 2228 of SEQ ID NO: 1562148
ucaagaaugucacacugau

SEQ ID NO: 1725694 - RNA, 19 nt, Artificial Sequence
  Description of Artificial Sequence: Synthetic oligonucleotide
  Antisense strand to SEQ ID NO: 1725693
aucagugugacauucuuga

SEQ ID NO: 1725695 - RNA, 19 nt, Artificial Sequence
  Description of Artificial Sequence: Synthetic oligonucleotide
  Sense strand starting at position 2288 of SEQ ID NO: 1562148
aucggaauacgcuaccaau

SEQ ID NO: 1725696 - RNA, 19 nt, Artificial Sequence
  Description of Artificial Sequence: Synthetic oligonucleotide
  Antisense strand to SEQ ID NO: 1725695
auugguagcguauuccgau

SEQ ID NO: 1725697 - RNA, 19 nt, Artificial Sequence
  Description of Artificial Sequence: Synthetic oligonucleotide
  Sense strand starting at position 2321 of SEQ ID NO: 1562148
cuuccagagagcugguuau

SEQ ID NO: 1725698 - RNA, 19 nt, Artificial Sequence
  Description of Artificial Sequence: Synthetic oligonucleotide
  Antisense strand to SEQ ID NO: 1725697
auaaccagcucucuggaag

SEQ ID NO: 1725699 - RNA, 19 nt, Artificial Sequence
  Description of Artificial Sequence: Synthetic oligonucleotide
  Sense strand starting at position 2347 of SEQ ID NO: 1562148
guacgagcacaucacuaaa

SEQ ID NO: 1725700 - RNA, 19 nt, Artificial Sequence
  Description of Artificial Sequence: Synthetic oligonucleotide
  Antisense strand to SEQ ID NO: 1725699
uuuagugaugugcucguac

SEQ ID NO: 1725701 - RNA, 19 nt, Artificial Sequence
  Description of Artificial Sequence: Synthetic oligonucleotide
  Sense strand starting at position 2515 of SEQ ID NO: 1562148
ugcagagugggcuaaagau

SEQ ID NO: 1725702 - RNA, 19 nt, Artificial Sequence
  Description of Artificial Sequence: Synthetic oligonucleotide
  Antisense strand to SEQ ID NO: 1725701
aucuuuagcccacucugca

SEQ ID NO: 1725703 - RNA, 19 nt, Artificial Sequence
  Description of Artificial Sequence: Synthetic oligonucleotide
  Sense strand starting at position 2580 of SEQ ID NO: 1562148
ccgcucagcacaugugaaa

SEQ ID NO: 1725704 - RNA, 19 nt, Artificial Sequence
  Description of Artificial Sequence: Synthetic oligonucleotide
  Antisense strand to SEQ ID NO: 1725703
uuucacaugugcugagcgg

SEQ ID NO: 1725705 - RNA, 19 nt, Artificial Sequence
  Description of Artificial Sequence: Synthetic oligonucleotide
  Sense strand starting at position 2622 of SEQ ID NO: 1562148
augcucuuaucagagagga

SEQ ID NO: 1725706 - RNA, 19 nt, Artificial Sequence
  Description of Artificial Sequence: Synthetic oligonucleotide
  Antisense strand to SEQ ID NO: 1725705
uccucucugauaagagcau

SEQ ID NO: 1725707 - RNA, 19 nt, Artificial Sequence
  Description of Artificial Sequence: Synthetic oligonucleotide
  Sense strand starting at position 2764 of SEQ ID NO: 1562148
uccauuauugagcguuuga

SEQ ID NO: 1725708 - RNA, 19 nt, Artificial Sequence
  Description of Artificial Sequence: Synthetic oligonucleotide
  Antisense strand to SEQ ID NO: 1725707
ucaaacgcucaauaaugga

SEQ ID NO: 1725709 - RNA, 19 nt, Artificial Sequence
  Description of Artificial Sequence: Synthetic oligonucleotide
  Sense strand starting at position 2947 of SEQ ID NO: 1562148
ugcuaaguccguucugagu

SEQ ID NO: 1725710 - RNA, 19 nt, Artificial Sequence
  Description of Artificial Sequence: Synthetic oligonucleotide
  Antisense strand to SEQ ID NO: 1725709
acucagaacggacuuagca

SEQ ID NO: 1725711 - RNA, 19 nt, Artificial Sequence
  Description of Artificial Sequence: Synthetic oligonucleotide
  Sense strand starting at position 3170 of SEQ ID NO: 1562148
uggcaaguuccaggauugu

SEQ ID NO: 1725712 - RNA, 19 nt, Artificial Sequence
  Description of Artificial Sequence: Synthetic oligonucleotide
  Antisense strand to SEQ ID NO: 1725711
acaauccuggaacuugcca

SEQ ID NO: 1725713 - RNA, 19 nt, Artificial Sequence
  Description of Artificial Sequence: Synthetic oligonucleotide
  Sense strand starting at position 3203 of SEQ ID NO: 1562148
cuggucuggccugguagau

SEQ ID NO: 1725714 - RNA, 19 nt, Artificial Sequence
  Description of Artificial Sequence: Synthetic oligonucleotide
  Antisense strand to SEQ ID NO: 1725713
aucuaccaggccagaccag

SEQ ID NO: 1725715 - RNA, 19 nt, Artificial Sequence
  Description of Artificial Sequence: Synthetic oligonucleotide
  Sense strand starting at position 3209 of SEQ ID NO: 1562148
uggccugguagauaaguga

SEQ ID NO: 1725716 - RNA, 19 nt, Artificial Sequence
  Description of Artificial Sequence: Synthetic oligonucleotide
  Antisense strand to SEQ ID NO: 1725715
ucacuuaucuaccaggcca

SEQ ID NO: 1725717 - RNA, 19 nt, Artificial Sequence
  Description of Artificial Sequence: Synthetic oligonucleotide
  Sense strand starting at position 3220 of SEQ ID NO: 1562148
auaagugacucuuugugca

SEQ ID NO: 1725718 - RNA, 19 nt, Artificial Sequence
  Description of Artificial Sequence: Synthetic oligonucleotide
  Antisense strand to SEQ ID NO: 1725717
ugcacaaagagucacuuau

SEQ ID NO: 1725719 - RNA, 19 nt, Artificial Sequence
  Description of Artificial Sequence: Synthetic oligonucleotide
  Sense strand starting at position 3255 of SEQ ID NO: 1562148
acauucuuuguugguaaag

SEQ ID NO: 1725720 - RNA, 19 nt, Artificial Sequence
  Description of Artificial Sequence: Synthetic oligonucleotide
  Antisense strand to SEQ ID NO: 1725719
cuuuaccaacaaagaaugu

SEQ ID NO: 1725721 - RNA, 19 nt, Artificial Sequence
  Description of Artificial Sequence: Synthetic oligonucleotide
  Sense strand starting at position 3272 of SEQ ID NO: 1562148
agcagcaacucauugcuua

SEQ ID NO: 1725722 - RNA, 19 nt, Artificial Sequence
  Description of Artificial Sequence: Synthetic oligonucleotide
  Antisense strand to SEQ ID NO: 1725721
uaagcaaugaguugcugcu

SEQ ID NO: 1725723 - RNA, 19 nt, Artificial Sequence
  Description of Artificial Sequence: Synthetic oligonucleotide
  Sense strand starting at position 3273 of SEQ ID NO: 1562148
gcagcaacucauugcuuaa

SEQ ID NO: 1725724 - RNA, 19 nt, Artificial Sequence
  Description of Artificial Sequence: Synthetic oligonucleotide
  Antisense strand to SEQ ID NO: 1725723
uuaagcaaugaguugcugc

SEQ ID NO: 1725725 - RNA, 19 nt, Artificial Sequence
  Description of Artificial Sequence: Synthetic oligonucleotide
  Sense strand starting at position 3293 of SEQ ID NO: 1562148
uccugcaaaucaucguuaa

SEQ ID NO: 1725726 - RNA, 19 nt, Artificial Sequence
  Description of Artificial Sequence: Synthetic oligonucleotide
  Antisense strand to SEQ ID NO: 1725725
uuaacgaugauuugcagga

SEQ ID NO: 1725727 - RNA, 19 nt, Artificial Sequence
  Description of Artificial Sequence: Synthetic oligonucleotide
  Sense strand starting at position 3294 of SEQ ID NO: 1562148
ccugcaaaucaucguuaau

SEQ ID NO: 1725728 - RNA, 19 nt, Artificial Sequence
  Description of Artificial Sequence: Synthetic oligonucleotide
  Antisense strand to SEQ ID NO: 1725727
auuaacgaugauuugcagg

SEQ ID NO: 1725729 - RNA, 19 nt, Artificial Sequence
  Description of Artificial Sequence: Synthetic oligonucleotide
  Sense strand starting at position 3297 of SEQ ID NO: 1562148
gcaaaucaucguuaaugga

SEQ ID NO: 1725730 - RNA, 19 nt, Artificial Sequence
  Description of Artificial Sequence: Synthetic oligonucleotide
  Antisense strand to SEQ ID NO: 1725729
uccauuaacgaugauuugc

SEQ ID NO: 1725731 - RNA, 19 nt, Artificial Sequence
  Description of Artificial Sequence: Synthetic oligonucleotide
  Sense strand starting at position 3408 of SEQ ID NO: 1562148
gcagaugauagaugcuauu

SEQ ID NO: 1725732 - RNA, 19 nt, Artificial Sequence
  Description of Artificial Sequence: Synthetic oligonucleotide
  Antisense strand to SEQ ID NO: 1725731
aauagcaucuaucaucugc

SEQ ID NO: 1725733 - RNA, 19 nt, Artificial Sequence
  Description of Artificial Sequence: Synthetic oligonucleotide
  Sense strand starting at position 3411 of SEQ ID NO: 1562148
gaugauagaugcuauugac

SEQ ID NO: 1725734 - RNA, 19 nt, Artificial Sequence
  Description of Artificial Sequence: Synthetic oligonucleotide
  Antisense strand to SEQ ID NO: 1725733
gucaauagcaucuaucauc

SEQ ID NO: 1725735 - RNA, 19 nt, Artificial Sequence
  Description of Artificial Sequence: Synthetic oligonucleotide
  Sense strand starting at position 3420 of SEQ ID NO: 1562148
ugcuauugacgucaacauu

SEQ ID NO: 1725736 - RNA, 19 nt, Artificial Sequence
  Description of Artificial Sequence: Synthetic oligonucleotide
  Antisense strand to SEQ ID NO: 1725735
aauguugacgucaauagca

SEQ ID NO: 1725737 - RNA, 19 nt, Artificial Sequence
  Description of Artificial Sequence: Synthetic oligonucleotide
  Sense strand starting at position 3428 of SEQ ID NO: 1562148
acgucaacauugcugagau

SEQ ID NO: 1725738 - RNA, 19 nt, Artificial Sequence
  Description of Artificial Sequence: Synthetic oligonucleotide
  Antisense strand to SEQ ID NO: 1725737
aucucagcaauguugacgu

SEQ ID NO: 1725739 - RNA, 19 nt, Artificial Sequence
  Description of Artificial Sequence: Synthetic oligonucleotide
  Sense strand starting at position 3448 of SEQ ID NO: 1562148
gugagugcugguuguauag

SEQ ID NO: 1725740 - RNA, 19 nt, Artificial Sequence
  Description of Artificial Sequence: Synthetic oligonucleotide
  Antisense strand to SEQ ID NO: 1725739
cuauacaaccagcacucac

SEQ ID NO: 1725741 - RNA, 19 nt, Artificial Sequence
  Description of Artificial Sequence: Synthetic oligonucleotide
  Sense strand starting at position 3597 of SEQ ID NO: 1562148
agaguugucccaugacaug

SEQ ID NO: 1725742 - RNA, 19 nt, Artificial Sequence
  Description of Artificial Sequence: Synthetic oligonucleotide
  Antisense strand to SEQ ID NO: 1725741
caugucaugggacaacucu

SEQ ID NO: 1725743 - RNA, 19 nt, Artificial Sequence
  Description of Artificial Sequence: Synthetic oligonucleotide
  Sense strand starting at position 3795 of SEQ ID NO: 1562148
cugugaguggucuaguuga

SEQ ID NO: 1725744 - RNA, 19 nt, Artificial Sequence
  Description of Artificial Sequence: Synthetic oligonucleotide
  Antisense strand to SEQ ID NO: 1725743
ucaacuagaccacucacag

SEQ ID NO: 1725745 - RNA, 19 nt, Artificial Sequence
  Description of Artificial Sequence: Synthetic oligonucleotide
  Sense strand starting at position 3862 of SEQ ID NO: 1562148
uagccugagucuguggaau

SEQ ID NO: 1725746 - RNA, 19 nt, Artificial Sequence
  Description of Artificial Sequence: Synthetic oligonucleotide
  Antisense strand to SEQ ID NO: 1725745
auuccacagacucaggcua

SEQ ID NO: 1725747 - RNA, 19 nt, Artificial Sequence
  Description of Artificial Sequence: Synthetic oligonucleotide
  Sense strand starting at position 3923 of SEQ ID NO: 1562148
agagaugucgugcugugca

SEQ ID NO: 1725748 - RNA, 19 nt, Artificial Sequence
  Description of Artificial Sequence: Synthetic oligonucleotide
  Antisense strand to SEQ ID NO: 1725747
ugcacagcacgacaucucu

SEQ ID NO: 1725749 - RNA, 19 nt, Artificial Sequence
  Description of Artificial Sequence: Synthetic oligonucleotide
  Sense strand starting at position 22 of SEQ ID NO: 1562149
gacacaguuuaggagcaaa

SEQ ID NO: 1725750 - RNA, 19 nt, Artificial Sequence
  Description of Artificial Sequence: Synthetic oligonucleotide
  Antisense strand to SEQ ID NO: 1725749
uuugcuccuaaacuguguc

SEQ ID NO: 1725751 - RNA, 19 nt, Artificial Sequence
  Description of Artificial Sequence: Synthetic oligonucleotide
  Sense strand starting at position 103 of SEQ ID NO: 1562149
aucauuuccuuggguggaa

SEQ ID NO: 1725752 - RNA, 19 nt, Artificial Sequence
  Description of Artificial Sequence: Synthetic oligonucleotide
  Antisense strand to SEQ ID NO: 1725751
uuccacccaaggaaaugau

SEQ ID NO: 1725753 - RNA, 19 nt, Artificial Sequence
  Description of Artificial Sequence: Synthetic oligonucleotide
  Sense strand starting at position 207 of SEQ ID NO: 1562149
ugcaguccugucuugcgaa

SEQ ID NO: 1725754 - RNA, 19 nt, Artificial Sequence
  Description of Artificial Sequence: Synthetic oligonucleotide
  Antisense strand to SEQ ID NO: 1725753
uucgcaagacaggacugca

SEQ ID NO: 1725755 - RNA, 19 nt, Artificial Sequence
  Description of Artificial Sequence: Synthetic oligonucleotide
  Sense strand starting at position 208 of SEQ ID NO: 1562149
gcaguccugucuugcgaac

SEQ ID NO: 1725756 - RNA, 19 nt, Artificial Sequence
  Description of Artificial Sequence: Synthetic oligonucleotide
  Antisense strand to SEQ ID NO: 1725755
guucgcaagacaggacugc

SEQ ID NO: 1725757 - RNA, 19 nt, Artificial Sequence
  Description of Artificial Sequence: Synthetic oligonucleotide
  Sense strand starting at position 262 of SEQ ID NO: 1562149
gccagacuguggucucuga

SEQ ID NO: 1725758 - RNA, 19 nt, Artificial Sequence
  Description of Artificial Sequence: Synthetic oligonucleotide
  Antisense strand to SEQ ID NO: 1725757
ucagagaccacagucuggc

SEQ ID NO: 1725759 - RNA, 19 nt, Artificial Sequence
  Description of Artificial Sequence: Synthetic oligonucleotide
  Sense strand starting at position 307 of SEQ ID NO: 1562149
acuauagggccuuggucaa

SEQ ID NO: 1725760 - RNA, 19 nt, Artificial Sequence
  Description of Artificial Sequence: Synthetic oligonucleotide
  Antisense strand to SEQ ID NO: 1725759
uugaccaaggcccuauagu

SEQ ID NO: 1725761 - RNA, 19 nt, Artificial Sequence
  Description of Artificial Sequence: Synthetic oligonucleotide
  Sense strand starting at position 607 of SEQ ID NO: 1562149
cagccaauguguccaguga

SEQ ID NO: 1725762 - RNA, 19 nt, Artificial Sequence
  Description of Artificial Sequence: Synthetic oligonucleotide
  Antisense strand to SEQ ID NO: 1725761
ucacuggacacauuggcug

SEQ ID NO: 1725763 - RNA, 19 nt, Artificial Sequence
  Description of Artificial Sequence: Synthetic oligonucleotide
  Sense strand starting at position 608 of SEQ ID NO: 1562149
agccaauguguccagugaa

SEQ ID NO: 1725764 - RNA, 19 nt, Artificial Sequence
  Description of Artificial Sequence: Synthetic oligonucleotide
  Antisense strand to SEQ ID NO: 1725763
uucacuggacacauuggcu

SEQ ID NO: 1725765 - RNA, 19 nt, Artificial Sequence
  Description of Artificial Sequence: Synthetic oligonucleotide
  Sense strand starting at position 611 of SEQ ID NO: 1562149
caauguguccagugaacaa

SEQ ID NO: 1725766 - RNA, 19 nt, Artificial Sequence
  Description of Artificial Sequence: Synthetic oligonucleotide
  Antisense strand to SEQ ID NO: 1725765
uuguucacuggacacauug

SEQ ID NO: 1725767 - RNA, 19 nt, Artificial Sequence
  Description of Artificial Sequence: Synthetic oligonucleotide
  Sense strand starting at position 669 of SEQ ID NO: 1562149
ugcagaagcgcuuagaauc

SEQ ID NO: 1725768 - RNA, 19 nt, Artificial Sequence
  Description of Artificial Sequence: Synthetic oligonucleotide
  Antisense strand to SEQ ID NO: 1725767
gauucuaagcgcuucugca

SEQ ID NO: 1725769 - RNA, 19 nt, Artificial Sequence
  Description of Artificial Sequence: Synthetic oligonucleotide
  Sense strand starting at position 682 of SEQ ID NO: 1562149
agaaucuucgccugaggau

SEQ ID NO: 1725770 - RNA, 19 nt, Artificial Sequence
  Description of Artificial Sequence: Synthetic oligonucleotide
  Antisense strand to SEQ ID NO: 1725769
auccucaggcgaagauucu

SEQ ID NO: 1725771 - RNA, 19 nt, Artificial Sequence
  Description of Artificial Sequence: Synthetic oligonucleotide
  Sense strand starting at position 683 of SEQ ID NO: 1562149
gaaucuucgccugaggauu

SEQ ID NO: 1725772 - RNA, 19 nt, Artificial Sequence
  Description of Artificial Sequence: Synthetic oligonucleotide
  Antisense strand to SEQ ID NO: 1725771
aauccucaggcgaagauuc

SEQ ID NO: 1725773 - RNA, 19 nt, Artificial Sequence
  Description of Artificial Sequence: Synthetic oligonucleotide
  Sense strand starting at position 1125 of SEQ ID NO: 1562149
gcaguugucugaggacaca

SEQ ID NO: 1725774 - RNA, 19 nt, Artificial Sequence
  Description of Artificial Sequence: Synthetic oligonucleotide
  Antisense strand to SEQ ID NO: 1725773
uguguccucagacaacugc

SEQ ID NO: 1725775 - RNA, 19 nt, Artificial Sequence
  Description of Artificial Sequence: Synthetic oligonucleotide
  Sense strand starting at position 1506 of SEQ ID NO: 1562149
cgccgacuggcucagauuu

SEQ ID NO: 1725776 - RNA, 19 nt, Artificial Sequence
  Description of Artificial Sequence: Synthetic oligonucleotide
  Antisense strand to SEQ ID NO: 1725775
aaaucugagccagucggcg

SEQ ID NO: 1725777 - RNA, 19 nt, Artificial Sequence
  Description of Artificial Sequence: Synthetic oligonucleotide
  Sense strand starting at position 2342 of SEQ ID NO: 1562149
ucccgaaaucacgauuggu

SEQ ID NO: 1725778 - RNA, 19 nt, Artificial Sequence
  Description of Artificial Sequence: Synthetic oligonucleotide
  Antisense strand to SEQ ID NO: 1725777
accaaucgugauuucggga

SEQ ID NO: 1725779 - RNA, 19 nt, Artificial Sequence
  Description of Artificial Sequence: Synthetic oligonucleotide
  Sense strand starting at position 2345 of SEQ ID NO: 1562149
cgaaaucacgauugguaau

SEQ ID NO: 1725780 - RNA, 19 nt, Artificial Sequence
  Description of Artificial Sequence: Synthetic oligonucleotide
  Antisense strand to SEQ ID NO: 1725779
auuaccaaucgugauuucg

SEQ ID NO: 1725781 - RNA, 19 nt, Artificial Sequence
  Description of Artificial Sequence: Synthetic oligonucleotide
  Sense strand starting at position 2351 of SEQ ID NO: 1562149
cacgauugguaauaauauc

SEQ ID NO: 1725782 - RNA, 19 nt, Artificial Sequence
  Description of Artificial Sequence: Synthetic oligonucleotide
  Antisense strand to SEQ ID NO: 1725781
gauauuauuaccaaucgug

SEQ ID NO: 1725783 - RNA, 19 nt, Artificial Sequence
  Description of Artificial Sequence: Synthetic oligonucleotide
  Sense strand starting at position 2420 of SEQ ID NO: 1562149
ggucgacuucaggguuuaa

SEQ ID NO: 1725784 - RNA, 19 nt, Artificial Sequence
  Description of Artificial Sequence: Synthetic oligonucleotide
  Antisense strand to SEQ ID NO: 1725783
uuaaacccugaagucgacc

SEQ ID NO: 1725785 - RNA, 19 nt, Artificial Sequence
  Description of Artificial Sequence: Synthetic oligonucleotide
  Sense strand starting at position 2430 of SEQ ID NO: 1562149
aggguuuaauccuaaccac

SEQ ID NO: 1725786 - RNA, 19 nt, Artificial Sequence
  Description of Artificial Sequence: Synthetic oligonucleotide
  Antisense strand to SEQ ID NO: 1725785
gugguuaggauuaaacccu

SEQ ID NO: 1725787 - RNA, 19 nt, Artificial Sequence
  Description of Artificial Sequence: Synthetic oligonucleotide
  Sense strand starting at position 2536 of SEQ ID NO: 1562149
ugaccugaguuucucaaag

SEQ ID NO: 1725788 - RNA, 19 nt, Artificial Sequence
  Description of Artificial Sequence: Synthetic oligonucleotide
  Antisense strand to SEQ ID NO: 1725787
cuuugagaaacucagguca

SEQ ID NO: 1725789 - RNA, 19 nt, Artificial Sequence
  Description of Artificial Sequence: Synthetic oligonucleotide
  Sense strand starting at position 2538 of SEQ ID NO: 1562149
accugaguuucucaaagua

SEQ ID NO: 1725790 - RNA, 19 nt, Artificial Sequence
  Description of Artificial Sequence: Synthetic oligonucleotide
  Antisense strand to SEQ ID NO: 1725789
uacuuugagaaacucaggu

SEQ ID NO: 1725791 - RNA, 19 nt, Artificial Sequence
  Description of Artificial Sequence: Synthetic oligonucleotide
  Sense strand starting at position 2892 of SEQ ID NO: 1562149
cuccuuaccuguccuggaa

SEQ ID NO: 1725792 - RNA, 19 nt, Artificial Sequence
  Description of Artificial Sequence: Synthetic oligonucleotide
  Antisense strand to SEQ ID NO: 1725791
uuccaggacagguaaggag

SEQ ID NO: 1725793 - RNA, 19 nt, Artificial Sequence
  Description of Artificial Sequence: Synthetic oligonucleotide
  Sense strand starting at position 2935 of SEQ ID NO: 1562149
uggguccagcuuuaaauau

SEQ ID NO: 1725794 - RNA, 19 nt, Artificial Sequence
  Description of Artificial Sequence: Synthetic oligonucleotide
  Antisense strand to SEQ ID NO: 1725793
auauuuaaagcuggaccca

SEQ ID NO: 1725795 - RNA, 19 nt, Artificial Sequence
  Description of Artificial Sequence: Synthetic oligonucleotide
  Sense strand starting at position 3029 of SEQ ID NO: 1562149
gcuucuauucccugggcaa

SEQ ID NO: 1725796 - RNA, 19 nt, Artificial Sequence
  Description of Artificial Sequence: Synthetic oligonucleotide
  Antisense strand to SEQ ID NO: 1725795
uugcccagggaauagaagc

SEQ ID NO: 1725797 - RNA, 19 nt, Artificial Sequence
  Description of Artificial Sequence: Synthetic oligonucleotide
  Sense strand starting at position 3030 of SEQ ID NO: 1562149
cuucuauucccugggcaaa

SEQ ID NO: 1725798 - RNA, 19 nt, Artificial Sequence
  Description of Artificial Sequence: Synthetic oligonucleotide
  Antisense strand to SEQ ID NO: 1725797
uuugcccagggaauagaag

SEQ ID NO: 1725799 - RNA, 19 nt, Artificial Sequence
  Description of Artificial Sequence: Synthetic oligonucleotide
  Sense strand starting at position 3138 of SEQ ID NO: 1562149
ugagcaaagccuuacucua

SEQ ID NO: 1725800 - RNA, 19 nt, Artificial Sequence
  Description of Artificial Sequence: Synthetic oligonucleotide
  Antisense strand to SEQ ID NO: 1725799
uagaguaaggcuuugcuca

SEQ ID NO: 1725801 - RNA, 19 nt, Artificial Sequence
  Description of Artificial Sequence: Synthetic oligonucleotide
  Sense strand starting at position 3160 of SEQ ID NO: 1562149
ugaucuagguucgcaucua

SEQ ID NO: 1725802 - RNA, 19 nt, Artificial Sequence
  Description of Artificial Sequence: Synthetic oligonucleotide
  Antisense strand to SEQ ID NO: 1725801
uagaugcgaaccuagauca

SEQ ID NO: 1725803 - RNA, 19 nt, Artificial Sequence
  Description of Artificial Sequence: Synthetic oligonucleotide
  Sense strand starting at position 3526 of SEQ ID NO: 1562149
uuccauuccuuagacaugu

SEQ ID NO: 1725804 - RNA, 19 nt, Artificial Sequence
  Description of Artificial Sequence: Synthetic oligonucleotide
  Antisense strand to SEQ ID NO: 1725803
acaugucuaaggaauggaa

SEQ ID NO: 1725805 - RNA, 19 nt, Artificial Sequence
  Description of Artificial Sequence: Synthetic oligonucleotide
  Sense strand starting at position 3671 of SEQ ID NO: 1562149
ucaagaaugucacacugau

SEQ ID NO: 1725806 - RNA, 19 nt, Artificial Sequence
  Description of Artificial Sequence: Synthetic oligonucleotide
  Antisense strand to SEQ ID NO: 1725805
aucagugugacauucuuga

SEQ ID NO: 1725807 - RNA, 19 nt, Artificial Sequence
  Description of Artificial Sequence: Synthetic oligonucleotide
  Sense strand starting at position 3731 of SEQ ID NO: 1562149
aucggaauacgcuaccaau

SEQ ID NO: 1725808 - RNA, 19 nt, Artificial Sequence
  Description of Artificial Sequence: Synthetic oligonucleotide
  Antisense strand to SEQ ID NO: 1725807
auugguagcguauuccgau

SEQ ID NO: 1725809 - RNA, 19 nt, Artificial Sequence
  Description of Artificial Sequence: Synthetic oligonucleotide
  Sense strand starting at position 3734 of SEQ ID NO: 1562149
ggaauacgcuaccaaucaa

SEQ ID NO: 1725810 - RNA, 19 nt, Artificial Sequence
  Description of Artificial Sequence: Synthetic oligonucleotide
  Antisense strand to SEQ ID NO: 1725809
uugauugguagcguauucc

SEQ ID NO: 1725811 - RNA, 19 nt, Artificial Sequence
  Description of Artificial Sequence: Synthetic oligonucleotide
  Sense strand starting at position 3764 of SEQ ID NO: 1562149
cuuccagagagcugguuau

SEQ ID NO: 1725812 - RNA, 19 nt, Artificial Sequence
  Description of Artificial Sequence: Synthetic oligonucleotide
  Antisense strand to SEQ ID NO: 1725811
auaaccagcucucuggaag

SEQ ID NO: 1725813 - RNA, 19 nt, Artificial Sequence
  Description of Artificial Sequence: Synthetic oligonucleotide
  Sense strand starting at position 3790 of SEQ ID NO: 1562149
guacgagcacaucacuaaa

SEQ ID NO: 1725814 - RNA, 19 nt, Artificial Sequence
  Description of Artificial Sequence: Synthetic oligonucleotide
  Antisense strand to SEQ ID NO: 1725813
uuuagugaugugcucguac

SEQ ID NO: 1725815 - RNA, 19 nt, Artificial Sequence
  Description of Artificial Sequence: Synthetic oligonucleotide
  Sense strand starting at position 3921 of SEQ ID NO: 1562149
cuuugcagauaauguaaga

SEQ ID NO: 1725816 - RNA, 19 nt, Artificial Sequence
  Description of Artificial Sequence: Synthetic oligonucleotide
  Antisense strand to SEQ ID NO: 1725815
ucuuacauuaucugcaaag

SEQ ID NO: 1725817 - RNA, 19 nt, Artificial Sequence
  Description of Artificial Sequence: Synthetic oligonucleotide
  Sense strand starting at position 3958 of SEQ ID NO: 1562149
ugcagagugggcuaaagau

SEQ ID NO: 1725818 - RNA, 19 nt, Artificial Sequence
  Description of Artificial Sequence: Synthetic oligonucleotide
  Antisense strand to SEQ ID NO: 1725817
aucuuuagcccacucugca

SEQ ID NO: 1725819 - RNA, 19 nt, Artificial Sequence
  Description of Artificial Sequence: Synthetic oligonucleotide
  Sense strand starting at position 308 of SEQ ID NO: 1562150
gcaacccucucacguguaa

SEQ ID NO: 1725820 - RNA, 19 nt, Artificial Sequence
  Description of Artificial Sequence: Synthetic oligonucleotide
  Antisense strand to SEQ ID NO: 1725819
uuacacgugagaggguugc

SEQ ID NO: 1725821 - RNA, 19 nt, Artificial Sequence
  Description of Artificial Sequence: Synthetic oligonucleotide
  Sense strand starting at position 363 of SEQ ID NO: 1562150
ggaugagacacagguguuu

SEQ ID NO: 1725822 - RNA, 19 nt, Artificial Sequence
  Description of Artificial Sequence: Synthetic oligonucleotide
  Antisense strand to SEQ ID NO: 1725821
aaacaccugugucucaucc

SEQ ID NO: 1725823 - RNA, 19 nt, Artificial Sequence
  Description of Artificial Sequence: Synthetic oligonucleotide
  Sense strand starting at position 464 of SEQ ID NO: 1562150
agaggaugugucugagguc

SEQ ID NO: 1725824 - RNA, 19 nt, Artificial Sequence
  Description of Artificial Sequence: Synthetic oligonucleotide
  Antisense strand to SEQ ID NO: 1725823
gaccucagacacauccucu

SEQ ID NO: 1725825 - RNA, 19 nt, Artificial Sequence
  Description of Artificial Sequence: Synthetic oligonucleotide
  Sense strand starting at position 465 of SEQ ID NO: 1562150
gaggaugugucugaggucu

SEQ ID NO: 1725826 - RNA, 19 nt, Artificial Sequence
  Description of Artificial Sequence: Synthetic oligonucleotide
  Antisense strand to SEQ ID NO: 1725825
agaccucagacacauccuc

SEQ ID NO: 1725827 - RNA, 19 nt, Artificial Sequence
  Description of Artificial Sequence: Synthetic oligonucleotide
  Sense strand starting at position 467 of SEQ ID NO: 1562150
ggaugugucugaggucucu

SEQ ID NO: 1725828 - RNA, 19 nt, Artificial Sequence
  Description of Artificial Sequence: Synthetic oligonucleotide
  Antisense strand to SEQ ID NO: 1725827
agagaccucagacacaucc

SEQ ID NO: 1725829 - RNA, 19 nt, Artificial Sequence
  Description of Artificial Sequence: Synthetic oligonucleotide
  Sense strand starting at position 514 of SEQ ID NO: 1562150
gcuaaugacaccugagugu

SEQ ID NO: 1725830 - RNA, 19 nt, Artificial Sequence
  Description of Artificial Sequence: Synthetic oligonucleotide
  Antisense strand to SEQ ID NO: 1725829
acacucaggugucauuagc

SEQ ID NO: 1725831 - RNA, 19 nt, Artificial Sequence
  Description of Artificial Sequence: Synthetic oligonucleotide
  Sense strand starting at position 523 of SEQ ID NO: 1562150
accugagugugguuagucu

SEQ ID NO: 1725832 - RNA, 19 nt, Artificial Sequence
  Description of Artificial Sequence: Synthetic oligonucleotide
  Antisense strand to SEQ ID NO: 1725831
agacuaaccacacucaggu

SEQ ID NO: 1725833 - RNA, 19 nt, Artificial Sequence
  Description of Artificial Sequence: Synthetic oligonucleotide
  Sense strand starting at position 558 of SEQ ID NO: 1562150
ggcaaauagucauuagcuu

SEQ ID NO: 1725834 - RNA, 19 nt, Artificial Sequence
  Description of Artificial Sequence: Synthetic oligonucleotide
  Antisense strand to SEQ ID NO: 1725833
aagcuaaugacuauuugcc

SEQ ID NO: 1725835 - RNA, 19 nt, Artificial Sequence
  Description of Artificial Sequence: Synthetic oligonucleotide
  Sense strand starting at position 559 of SEQ ID NO: 1562150
gcaaauagucauuagcuuu

SEQ ID NO: 1725836 - RNA, 19 nt, Artificial Sequence
  Description of Artificial Sequence: Synthetic oligonucleotide
  Antisense strand to SEQ ID NO: 1725835
aaagcuaaugacuauuugc

SEQ ID NO: 1725837 - RNA, 19 nt, Artificial Sequence
  Description of Artificial Sequence: Synthetic oligonucleotide
  Sense strand starting at position 800 of SEQ ID NO: 1562150
ggacgaugugugagugcca

SEQ ID NO: 1725838 - RNA, 19 nt, Artificial Sequence
  Description of Artificial Sequence: Synthetic oligonucleotide
  Antisense strand to SEQ ID NO: 1725837
uggcacucacacaucgucc

SEQ ID NO: 1725839 - RNA, 19 nt, Artificial Sequence
  Description of Artificial Sequence: Synthetic oligonucleotide
  Sense strand starting at position 801 of SEQ ID NO: 1562150
gacgaugugugagugccaa

SEQ ID NO: 1725840 - RNA, 19 nt, Artificial Sequence
  Description of Artificial Sequence: Synthetic oligonucleotide
  Antisense strand to SEQ ID NO: 1725839
uuggcacucacacaucguc

SEQ ID NO: 1725841 - RNA, 19 nt, Artificial Sequence
  Description of Artificial Sequence: Synthetic oligonucleotide
  Sense strand starting at position 1109 of SEQ ID NO: 1562150
cccagaguuccuggagcau

SEQ ID NO: 1725842 - RNA, 19 nt, Artificial Sequence
  Description of Artificial Sequence: Synthetic oligonucleotide
  Antisense strand to SEQ ID NO: 1725841
augcuccaggaacucuggg

SEQ ID NO: 1725843 - RNA, 19 nt, Artificial Sequence
  Description of Artificial Sequence: Synthetic oligonucleotide
  Sense strand starting at position 1456 of SEQ ID NO: 1562150
aucagcugucccugaauga

SEQ ID NO: 1725844 - RNA, 19 nt, Artificial Sequence
  Description of Artificial Sequence: Synthetic oligonucleotide
  Antisense strand to SEQ ID NO: 1725843
ucauucagggacagcugau

SEQ ID NO: 1725845 - RNA, 19 nt, Artificial Sequence
  Description of Artificial Sequence: Synthetic oligonucleotide
  Sense strand starting at position 1457 of SEQ ID NO: 1562150
ucagcugucccugaaugaa

SEQ ID NO: 1725846 - RNA, 19 nt, Artificial Sequence
  Description of Artificial Sequence: Synthetic oligonucleotide
  Antisense strand to SEQ ID NO: 1725845
uucauucagggacagcuga

SEQ ID NO: 1725847 - RNA, 19 nt, Artificial Sequence
  Description of Artificial Sequence: Synthetic oligonucleotide
  Sense strand starting at position 1466 of SEQ ID NO: 1562150
ccugaaugaaugcguggau

SEQ ID NO: 1725848 - RNA, 19 nt, Artificial Sequence
  Description of Artificial Sequence: Synthetic oligonucleotide
  Antisense strand to SEQ ID NO: 1725847
auccacgcauucauucagg

SEQ ID NO: 1725849 - RNA, 19 nt, Artificial Sequence
  Description of Artificial Sequence: Synthetic oligonucleotide
  Sense strand starting at position 1469 of SEQ ID NO: 1562150
gaaugaaugcguggaugaa

SEQ ID NO: 1725850 - RNA, 19 nt, Artificial Sequence
  Description of Artificial Sequence: Synthetic oligonucleotide
  Antisense strand to SEQ ID NO: 1725849
uucauccacgcauucauuc

SEQ ID NO: 1725851 - RNA, 19 nt, Artificial Sequence
  Description of Artificial Sequence: Synthetic oligonucleotide
  Sense strand starting at position 1513 of SEQ ID NO: 1562150
acaugcgauuuccaacuca

SEQ ID NO: 1725852 - RNA, 19 nt, Artificial Sequence
  Description of Artificial Sequence: Synthetic oligonucleotide
  Antisense strand to SEQ ID NO: 1725851
ugaguuggaaaucgcaugu

SEQ ID NO: 1725853 - RNA, 19 nt, Artificial Sequence
  Description of Artificial Sequence: Synthetic oligonucleotide
  Sense strand starting at position 1683 of SEQ ID NO: 1562150
gccugcgugcgaagaugua

SEQ ID NO: 1725854 - RNA, 19 nt, Artificial Sequence
  Description of Artificial Sequence: Synthetic oligonucleotide
  Antisense strand to SEQ ID NO: 1725853
uacaucuucgcacgcaggc

SEQ ID NO: 1725855 - RNA, 19 nt, Artificial Sequence
  Description of Artificial Sequence: Synthetic oligonucleotide
  Sense strand starting at position 1776 of SEQ ID NO: 1562150
agucauagagcgcaaggaa

SEQ ID NO: 1725856 - RNA, 19 nt, Artificial Sequence
  Description of Artificial Sequence: Synthetic oligonucleotide
  Antisense strand to SEQ ID NO: 1725855
uuccuugcgcucuaugacu

SEQ ID NO: 1725857 - RNA, 19 nt, Artificial Sequence
  Description of Artificial Sequence: Synthetic oligonucleotide
  Sense strand starting at position 1899 of SEQ ID NO: 1562150
gccagaucuugucccagaa

SEQ ID NO: 1725858 - RNA, 19 nt, Artificial Sequence
  Description of Artificial Sequence: Synthetic oligonucleotide
  Antisense strand to SEQ ID NO: 1725857
uucugggacaagaucuggc

SEQ ID NO: 1725859 - RNA, 19 nt, Artificial Sequence
  Description of Artificial Sequence: Synthetic oligonucleotide
  Sense strand starting at position 1901 of SEQ ID NO: 1562150
cagaucuugucccagaaga

SEQ ID NO: 1725860 - RNA, 19 nt, Artificial Sequence
  Description of Artificial Sequence: Synthetic oligonucleotide
  Antisense strand to SEQ ID NO: 1725859
ucuucugggacaagaucug

SEQ ID NO: 1725861 - RNA, 19 nt, Artificial Sequence
  Description of Artificial Sequence: Synthetic oligonucleotide
  Sense strand starting at position 2543 of SEQ ID NO: 1562150
uuaaguguuggccagauau

SEQ ID NO: 1725862 - RNA, 19 nt, Artificial Sequence
  Description of Artificial Sequence: Synthetic oligonucleotide
  Antisense strand to SEQ ID NO: 1725861
auaucuggccaacacuuaa

SEQ ID NO: 1725863 - RNA, 19 nt, Artificial Sequence
  Description of Artificial Sequence: Synthetic oligonucleotide
  Sense strand starting at position 2607 of SEQ ID NO: 1562150
gcaguaaauucugaggaca

SEQ ID NO: 1725864 - RNA, 19 nt, Artificial Sequence
  Description of Artificial Sequence: Synthetic oligonucleotide
  Antisense strand to SEQ ID NO: 1725863
uguccucagaauuuacugc

SEQ ID NO: 1725865 - RNA, 19 nt, Artificial Sequence
  Description of Artificial Sequence: Synthetic oligonucleotide
  Sense strand starting at position 2738 of SEQ ID NO: 1562150
cggcuucugagucagucaa

SEQ ID NO: 1725866 - RNA, 19 nt, Artificial Sequence
  Description of Artificial Sequence: Synthetic oligonucleotide
  Antisense strand to SEQ ID NO: 1725865
uugacugacucagaagccg

SEQ ID NO: 1725867 - RNA, 19 nt, Artificial Sequence
  Description of Artificial Sequence: Synthetic oligonucleotide
  Sense strand starting at position 2740 of SEQ ID NO: 1562150
gcuucugagucagucaaug

SEQ ID NO: 1725868 - RNA, 19 nt, Artificial Sequence
  Description of Artificial Sequence: Synthetic oligonucleotide
  Antisense strand to SEQ ID NO: 1725867
cauugacugacucagaagc

SEQ ID NO: 1725869 - RNA, 19 nt, Artificial Sequence
  Description of Artificial Sequence: Synthetic oligonucleotide
  Sense strand starting at position 3369 of SEQ ID NO: 1562150
augggcuucucagaaaccu

SEQ ID NO: 1725870 - RNA, 19 nt, Artificial Sequence
  Description of Artificial Sequence: Synthetic oligonucleotide
  Antisense strand to SEQ ID NO: 1725869
agguuucugagaagcccau

SEQ ID NO: 1725871 - RNA, 19 nt, Artificial Sequence
  Description of Artificial Sequence: Synthetic oligonucleotide
  Sense strand starting at position 3579 of SEQ ID NO: 1562150
uguugagaaauguggagaa

SEQ ID NO: 1725872 - RNA, 19 nt, Artificial Sequence
  Description of Artificial Sequence: Synthetic oligonucleotide
  Antisense strand to SEQ ID NO: 1725871
uucuccacauuucucaaca

SEQ ID NO: 1725873 - RNA, 19 nt, Artificial Sequence
  Description of Artificial Sequence: Synthetic oligonucleotide
  Sense strand starting at position 3589 of SEQ ID NO: 1562150
uguggagaauuguaaauac

SEQ ID NO: 1725874 - RNA, 19 nt, Artificial Sequence
  Description of Artificial Sequence: Synthetic oligonucleotide
  Antisense strand to SEQ ID NO: 1725873
guauuuacaauucuccaca

SEQ ID NO: 1725875 - RNA, 19 nt, Artificial Sequence
  Description of Artificial Sequence: Synthetic oligonucleotide
  Sense strand starting at position 113 of SEQ ID NO: 1562151
acaauuagaugccuuguaa

SEQ ID NO: 1725876 - RNA, 19 nt, Artificial Sequence
  Description of Artificial Sequence: Synthetic oligonucleotide
  Antisense strand to SEQ ID NO: 1725875
uuacaaggcaucuaauugu

SEQ ID NO: 1725877 - RNA, 19 nt, Artificial Sequence
  Description of Artificial Sequence: Synthetic oligonucleotide
  Sense strand starting at position 141 of SEQ ID NO: 1562151
cgcauaaugucuuugaaag

SEQ ID NO: 1725878 - RNA, 19 nt, Artificial Sequence
  Description of Artificial Sequence: Synthetic oligonucleotide
  Antisense strand to SEQ ID NO: 1725877
cuuucaaagacauuaugcg

SEQ ID NO: 1725879 - RNA, 19 nt, Artificial Sequence
  Description of Artificial Sequence: Synthetic oligonucleotide
  Sense strand starting at position 142 of SEQ ID NO: 1562151
gcauaaugucuuugaaagu

SEQ ID NO: 1725880 - RNA, 19 nt, Artificial Sequence
  Description of Artificial Sequence: Synthetic oligonucleotide
  Antisense strand to SEQ ID NO: 1725879
acuuucaaagacauuaugc

SEQ ID NO: 1725881 - RNA, 19 nt, Artificial Sequence
  Description of Artificial Sequence: Synthetic oligonucleotide
  Sense strand starting at position 149 of SEQ ID NO: 1562151
gucuuugaaaguuaguaca

SEQ ID NO: 1725882 - RNA, 19 nt, Artificial Sequence
  Description of Artificial Sequence: Synthetic oligonucleotide
  Antisense strand to SEQ ID NO: 1725881
uguacuaacuuucaaagac

SEQ ID NO: 1725883 - RNA, 19 nt, Artificial Sequence
  Description of Artificial Sequence: Synthetic oligonucleotide
  Sense strand starting at position 151 of SEQ ID NO: 1562151
cuuugaaaguuaguacaaa

SEQ ID NO: 1725884 - RNA, 19 nt, Artificial Sequence
  Description of Artificial Sequence: Synthetic oligonucleotide
  Antisense strand to SEQ ID NO: 1725883
uuuguacuaacuuucaaag

SEQ ID NO: 1725885 - RNA, 19 nt, Artificial Sequence
  Description of Artificial Sequence: Synthetic oligonucleotide
  Sense strand starting at position 190 of SEQ ID NO: 1562151
ggaguaggacuuugcuauu

SEQ ID NO: 1725886 - RNA, 19 nt, Artificial Sequence
  Description of Artificial Sequence: Synthetic oligonucleotide
  Antisense strand to SEQ ID NO: 1725885
aauagcaaaguccuacucc

SEQ ID NO: 1725887 - RNA, 19 nt, Artificial Sequence
  Description of Artificial Sequence: Synthetic oligonucleotide
  Sense strand starting at position 212 of SEQ ID NO: 1562151
uugcuaaaccuucgacaca

SEQ ID NO: 1725888 - RNA, 19 nt, Artificial Sequence
  Description of Artificial Sequence: Synthetic oligonucleotide
  Antisense strand to SEQ ID NO: 1725887
ugugucgaagguuuagcaa

SEQ ID NO: 1725889 - RNA, 19 nt, Artificial Sequence
  Description of Artificial Sequence: Synthetic oligonucleotide
  Sense strand starting at position 309 of SEQ ID NO: 1562151
gagagugacugcuccuuua

SEQ ID NO: 1725890 - RNA, 19 nt, Artificial Sequence
  Description of Artificial Sequence: Synthetic oligonucleotide
  Antisense strand to SEQ ID NO: 1725889
uaaaggagcagucacucuc

SEQ ID NO: 1725891 - RNA, 19 nt, Artificial Sequence
  Description of Artificial Sequence: Synthetic oligonucleotide
  Sense strand starting at position 312 of SEQ ID NO: 1562151
agugacugcuccuuuauuc

SEQ ID NO: 1725892 - RNA, 19 nt, Artificial Sequence
  Description of Artificial Sequence: Synthetic oligonucleotide
  Antisense strand to SEQ ID NO: 1725891
gaauaaaggagcagucacu

SEQ ID NO: 1725893 - RNA, 19 nt, Artificial Sequence
  Description of Artificial Sequence: Synthetic oligonucleotide
  Sense strand starting at position 328 of SEQ ID NO: 1562151
uucgauuuaccucgcuaag

SEQ ID NO: 1725894 - RNA, 19 nt, Artificial Sequence
  Description of Artificial Sequence: Synthetic oligonucleotide
  Antisense strand to SEQ ID NO: 1725893
cuuagcgagguaaaucgaa

SEQ ID NO: 1725895 - RNA, 19 nt, Artificial Sequence
  Description of Artificial Sequence: Synthetic oligonucleotide
  Sense strand starting at position 330 of SEQ ID NO: 1562151
cgauuuaccucgcuaaguu

SEQ ID NO: 1725896 - RNA, 19 nt, Artificial Sequence
  Description of Artificial Sequence: Synthetic oligonucleotide
  Antisense strand to SEQ ID NO: 1725895
aacuuagcgagguaaaucg

SEQ ID NO: 1725897 - RNA, 19 nt, Artificial Sequence
  Description of Artificial Sequence: Synthetic oligonucleotide
  Sense strand starting at position 861 of SEQ ID NO: 1562151
uuagaucuacuuuguggua

SEQ ID NO: 1725898 - RNA, 19 nt, Artificial Sequence
  Description of Artificial Sequence: Synthetic oligonucleotide
  Antisense strand to SEQ ID NO: 1725897
uaccacaaaguagaucuaa

SEQ ID NO: 1725899 - RNA, 19 nt, Artificial Sequence
  Description of Artificial Sequence: Synthetic oligonucleotide
  Sense strand starting at position 1028 of SEQ ID NO: 1562151
ugcacugauagguaaguaa

SEQ ID NO: 1725900 - RNA, 19 nt, Artificial Sequence
  Description of Artificial Sequence: Synthetic oligonucleotide
  Antisense strand to SEQ ID NO: 1725899
uuacuuaccuaucagugca

SEQ ID NO: 1725901 - RNA, 19 nt, Artificial Sequence
  Description of Artificial Sequence: Synthetic oligonucleotide
  Sense strand starting at position 1073 of SEQ ID NO: 1562151
cuuacuuccucugugggaa

SEQ ID NO: 1725902 - RNA, 19 nt, Artificial Sequence
  Description of Artificial Sequence: Synthetic oligonucleotide
  Antisense strand to SEQ ID NO: 1725901
uucccacagaggaaguaag

SEQ ID NO: 1725903 - RNA, 19 nt, Artificial Sequence
  Description of Artificial Sequence: Synthetic oligonucleotide
  Sense strand starting at position 1076 of SEQ ID NO: 1562151
acuuccucugugggaagaa

SEQ ID NO: 1725904 - RNA, 19 nt, Artificial Sequence
  Description of Artificial Sequence: Synthetic oligonucleotide
  Antisense strand to SEQ ID NO: 1725903
uucuucccacagaggaagu

SEQ ID NO: 1725905 - RNA, 19 nt, Artificial Sequence
  Description of Artificial Sequence: Synthetic oligonucleotide
  Sense strand starting at position 1650 of SEQ ID NO: 1562151
ccgcuucuuuccuuggaga

SEQ ID NO: 1725906 - RNA, 19 nt, Artificial Sequence
  Description of Artificial Sequence: Synthetic oligonucleotide
  Antisense strand to SEQ ID NO: 1725905
ucuccaaggaaagaagcgg

SEQ ID NO: 1725907 - RNA, 19 nt, Artificial Sequence
  Description of Artificial Sequence: Synthetic oligonucleotide
  Sense strand starting at position 1652 of SEQ ID NO: 1562151
gcuucuuuccuuggagagu

SEQ ID NO: 1725908 - RNA, 19 nt, Artificial Sequence
  Description of Artificial Sequence: Synthetic oligonucleotide
  Antisense strand to SEQ ID NO: 1725907
acucuccaaggaaagaagc

SEQ ID NO: 1725909 - RNA, 19 nt, Artificial Sequence
  Description of Artificial Sequence: Synthetic oligonucleotide
  Sense strand starting at position 2294 of SEQ ID NO: 1562151
auugguucucgagguuauc

SEQ ID NO: 1725910 - RNA, 19 nt, Artificial Sequence
  Description of Artificial Sequence: Synthetic oligonucleotide
  Antisense strand to SEQ ID NO: 1725909
gauaaccucgagaaccaau

SEQ ID NO: 1725911 - RNA, 19 nt, Artificial Sequence
  Description of Artificial Sequence: Synthetic oligonucleotide
  Sense strand starting at position 2297 of SEQ ID NO: 1562151
gguucucgagguuaucaua

SEQ ID NO: 1725912 - RNA, 19 nt, Artificial Sequence
  Description of Artificial Sequence: Synthetic oligonucleotide
  Antisense strand to SEQ ID NO: 1725911
uaugauaaccucgagaacc

SEQ ID NO: 1725913 - RNA, 19 nt, Artificial Sequence
  Description of Artificial Sequence: Synthetic oligonucleotide
  Sense strand starting at position 2422 of SEQ ID NO: 1562151
gcuugucuuguuucgcaga

SEQ ID NO: 1725914 - RNA, 19 nt, Artificial Sequence
  Description of Artificial Sequence: Synthetic oligonucleotide
  Antisense strand to SEQ ID NO: 1725913
ucugcgaaacaagacaagc

SEQ ID NO: 1725915 - RNA, 19 nt, Artificial Sequence
  Description of Artificial Sequence: Synthetic oligonucleotide
  Sense strand starting at position 2427 of SEQ ID NO: 1562151
ucuuguuucgcagaaucug

SEQ ID NO: 1725916 - RNA, 19 nt, Artificial Sequence
  Description of Artificial Sequence: Synthetic oligonucleotide
  Antisense strand to SEQ ID NO: 1725915
cagauucugcgaaacaaga

SEQ ID NO: 1725917 - RNA, 19 nt, Artificial Sequence
  Description of Artificial Sequence: Synthetic oligonucleotide
  Sense strand starting at position 2597 of SEQ ID NO: 1562151
gcuugacucacuuguggau

SEQ ID NO: 1725918 - RNA, 19 nt, Artificial Sequence
  Description of Artificial Sequence: Synthetic oligonucleotide
  Antisense strand to SEQ ID NO: 1725917
auccacaagugagucaagc

SEQ ID NO: 1725919 - RNA, 19 nt, Artificial Sequence
  Description of Artificial Sequence: Synthetic oligonucleotide
  Sense strand starting at position 2723 of SEQ ID NO: 1562151
uggaaaguccuuuguccca

SEQ ID NO: 1725920 - RNA, 19 nt, Artificial Sequence
  Description of Artificial Sequence: Synthetic oligonucleotide
  Antisense strand to SEQ ID NO: 1725919
ugggacaaaggacuuucca

SEQ ID NO: 1725921 - RNA, 19 nt, Artificial Sequence
  Description of Artificial Sequence: Synthetic oligonucleotide
  Sense strand starting at position 2784 of SEQ ID NO: 1562151
ugaguuuaucaauggagau

SEQ ID NO: 1725922 - RNA, 19 nt, Artificial Sequence
  Description of Artificial Sequence: Synthetic oligonucleotide
  Antisense strand to SEQ ID NO: 1725921
aucuccauugauaaacuca

SEQ ID NO: 1725923 - RNA, 19 nt, Artificial Sequence
  Description of Artificial Sequence: Synthetic oligonucleotide
  Sense strand starting at position 2841 of SEQ ID NO: 1562151
ggaguaaguuuaaguggag

SEQ ID NO: 1725924 - RNA, 19 nt, Artificial Sequence
  Description of Artificial Sequence: Synthetic oligonucleotide
  Antisense strand to SEQ ID NO: 1725923
cuccacuuaaacuuacucc

SEQ ID NO: 1725925 - RNA, 19 nt, Artificial Sequence
  Description of Artificial Sequence: Synthetic oligonucleotide
  Sense strand starting at position 2842 of SEQ ID NO: 1562151
gaguaaguuuaaguggaga

SEQ ID NO: 1725926 - RNA, 19 nt, Artificial Sequence
  Description of Artificial Sequence: Synthetic oligonucleotide
  Antisense strand to SEQ ID NO: 1725925
ucuccacuuaaacuuacuc

SEQ ID NO: 1725927 - RNA, 19 nt, Artificial Sequence
  Description of Artificial Sequence: Synthetic oligonucleotide
  Sense strand starting at position 3004 of SEQ ID NO: 1562151
ggauaucacugagauaaca

SEQ ID NO: 1725928 - RNA, 19 nt, Artificial Sequence
  Description of Artificial Sequence: Synthetic oligonucleotide
  Antisense strand to SEQ ID NO: 1725927
uguuaucucagugauaucc

SEQ ID NO: 1725929 - RNA, 19 nt, Artificial Sequence
  Description of Artificial Sequence: Synthetic oligonucleotide
  Sense strand starting at position 3180 of SEQ ID NO: 1562151
cgugcuuaaaguuagauaa

SEQ ID NO: 1725930 - RNA, 19 nt, Artificial Sequence
  Description of Artificial Sequence: Synthetic oligonucleotide
  Antisense strand to SEQ ID NO: 1725929
uuaucuaacuuuaagcacg

SEQ ID NO: 1725931 - RNA, 19 nt, Artificial Sequence
  Description of Artificial Sequence: Synthetic oligonucleotide
  Sense strand starting at position 3571 of SEQ ID NO: 1562151
acgggaaaguucuccaagu

SEQ ID NO: 1725932 - RNA, 19 nt, Artificial Sequence
  Description of Artificial Sequence: Synthetic oligonucleotide
  Antisense strand to SEQ ID NO: 1725931
acuuggagaacuuucccgu

SEQ ID NO: 1725933 - RNA, 19 nt, Artificial Sequence
  Description of Artificial Sequence: Synthetic oligonucleotide
  Sense strand starting at position 3572 of SEQ ID NO: 1562151
cgggaaaguucuccaaguc

SEQ ID NO: 1725934 - RNA, 19 nt, Artificial Sequence
  Description of Artificial Sequence: Synthetic oligonucleotide
  Antisense strand to SEQ ID NO: 1725933
gacuuggagaacuuucccg

SEQ ID NO: 1725935 - RNA, 19 nt, Artificial Sequence
  Description of Artificial Sequence: Synthetic oligonucleotide
  Sense strand starting at position 3703 of SEQ ID NO: 1562151
ugaagauguuaccuuguau

SEQ ID NO: 1725936 - RNA, 19 nt, Artificial Sequence
  Description of Artificial Sequence: Synthetic oligonucleotide
  Antisense strand to SEQ ID NO: 1725935
auacaagguaacaucuuca

SEQ ID NO: 1725937 - RNA, 19 nt, Artificial Sequence
  Description of Artificial Sequence: Synthetic oligonucleotide
  Sense strand starting at position 3709 of SEQ ID NO: 1562151
uguuaccuuguaugucaaa

SEQ ID NO: 1725938 - RNA, 19 nt, Artificial Sequence
  Description of Artificial Sequence: Synthetic oligonucleotide
  Antisense strand to SEQ ID NO: 1725937
uuugacauacaagguaaca

SEQ ID NO: 1725939 - RNA, 19 nt, Artificial Sequence
  Description of Artificial Sequence: Synthetic oligonucleotide
  Sense strand starting at position 3744 of SEQ ID NO: 1562151
ugauuaaguugagcaucuu

SEQ ID NO: 1725940 - RNA, 19 nt, Artificial Sequence
  Description of Artificial Sequence: Synthetic oligonucleotide
  Antisense strand to SEQ ID NO: 1725939
aagaugcucaacuuaauca

SEQ ID NO: 1725941 - RNA, 19 nt, Artificial Sequence
  Description of Artificial Sequence: Synthetic oligonucleotide
  Sense strand starting at position 3803 of SEQ ID NO: 1562151
ugugaucauaagggugauu

SEQ ID NO: 1725942 - RNA, 19 nt, Artificial Sequence
  Description of Artificial Sequence: Synthetic oligonucleotide
  Antisense strand to SEQ ID NO: 1725941
aaucacccuuaugaucaca

SEQ ID NO: 1725943 - RNA, 19 nt, Artificial Sequence
  Description of Artificial Sequence: Synthetic oligonucleotide
  Sense strand starting at position 3805 of SEQ ID NO: 1562151
ugaucauaagggugauuac

SEQ ID NO: 1725944 - RNA, 19 nt, Artificial Sequence
  Description of Artificial Sequence: Synthetic oligonucleotide
  Antisense strand to SEQ ID NO: 1725943
guaaucacccuuaugauca

SEQ ID NO: 1725945 - RNA, 19 nt, Artificial Sequence
  Description of Artificial Sequence: Synthetic oligonucleotide
  Sense strand starting at position 3886 of SEQ ID NO: 1562151
gucagagugauuggcugua

SEQ ID NO: 1725946 - RNA, 19 nt, Artificial Sequence
  Description of Artificial Sequence: Synthetic oligonucleotide
  Antisense strand to SEQ ID NO: 1725945
uacagccaaucacucugac

SEQ ID NO: 1725947 - RNA, 19 nt, Artificial Sequence
  Description of Artificial Sequence: Synthetic oligonucleotide
  Sense strand starting at position 3888 of SEQ ID NO: 1562151
cagagugauuggcuguaag

SEQ ID NO: 1725948 - RNA, 19 nt, Artificial Sequence
  Description of Artificial Sequence: Synthetic oligonucleotide
  Antisense strand to SEQ ID NO: 1725947
cuuacagccaaucacucug

SEQ ID NO: 1725949 - RNA, 19 nt, Artificial Sequence
  Description of Artificial Sequence: Synthetic oligonucleotide
  Sense strand starting at position 3891 of SEQ ID NO: 1562151
agugauuggcuguaagaaa

SEQ ID NO: 1725950 - RNA, 19 nt, Artificial Sequence
  Description of Artificial Sequence: Synthetic oligonucleotide
  Antisense strand to SEQ ID NO: 1725949
uuucuuacagccaaucacu

SEQ ID NO: 1725951 - RNA, 19 nt, Artificial Sequence
  Description of Artificial Sequence: Synthetic oligonucleotide
  Sense strand starting at position 3918 of SEQ ID NO: 1562151
cgaaguuaauggcuuugaa

SEQ ID NO: 1725952 - RNA, 19 nt, Artificial Sequence
  Description of Artificial Sequence: Synthetic oligonucleotide
  Antisense strand to SEQ ID NO: 1725951
uucaaagccauuaacuucg

SEQ ID NO: 1725953 - RNA, 19 nt, Artificial Sequence
  Description of Artificial Sequence: Synthetic oligonucleotide
  Sense strand starting at position 3921 of SEQ ID NO: 1562151
aguuaauggcuuugaagau

SEQ ID NO: 1725954 - RNA, 19 nt, Artificial Sequence
  Description of Artificial Sequence: Synthetic oligonucleotide
  Antisense strand to SEQ ID NO: 1725953
aucuucaaagccauuaacu

SEQ ID NO: 1725955 - RNA, 19 nt, Artificial Sequence
  Description of Artificial Sequence: Synthetic oligonucleotide
  Sense strand starting at position 388 of SEQ ID NO: 1562152
cuccuaacccgguagggau

SEQ ID NO: 1725956 - RNA, 19 nt, Artificial Sequence
  Description of Artificial Sequence: Synthetic oligonucleotide
  Antisense strand to SEQ ID NO: 1725955
aucccuaccggguuaggag

SEQ ID NO: 1725957 - RNA, 19 nt, Artificial Sequence
  Description of Artificial Sequence: Synthetic oligonucleotide
  Sense strand starting at position 477 of SEQ ID NO: 1562152
agagguucucaacgggaga

SEQ ID NO: 1725958 - RNA, 19 nt, Artificial Sequence
  Description of Artificial Sequence: Synthetic oligonucleotide
  Antisense strand to SEQ ID NO: 1725957
ucucccguugagaaccucu

SEQ ID NO: 1725959 - RNA, 19 nt, Artificial Sequence
  Description of Artificial Sequence: Synthetic oligonucleotide
  Sense strand starting at position 478 of SEQ ID NO: 1562152
gagguucucaacgggagaa

SEQ ID NO: 1725960 - RNA, 19 nt, Artificial Sequence
  Description of Artificial Sequence: Synthetic oligonucleotide
  Antisense strand to SEQ ID NO: 1725959
uucucccguugagaaccuc

SEQ ID NO: 1725961 - RNA, 19 nt, Artificial Sequence
  Description of Artificial Sequence: Synthetic oligonucleotide
  Sense strand starting at position 479 of SEQ ID NO: 1562152
agguucucaacgggagaaa

SEQ ID NO: 1725962 - RNA, 19 nt, Artificial Sequence
  Description of Artificial Sequence: Synthetic oligonucleotide
  Antisense strand to SEQ ID NO: 1725961
uuucucccguugagaaccu

SEQ ID NO: 1725963 - RNA, 19 nt, Artificial Sequence
  Description of Artificial Sequence: Synthetic oligonucleotide
  Sense strand starting at position 662 of SEQ ID NO: 1562152
uaauauaauuucuggugga

SEQ ID NO: 1725964 - RNA, 19 nt, Artificial Sequence
  Description of Artificial Sequence: Synthetic oligonucleotide
  Antisense strand to SEQ ID NO: 1725963
uccaccagaaauuauauua

SEQ ID NO: 1725965 - RNA, 19 nt, Artificial Sequence
  Description of Artificial Sequence: Synthetic oligonucleotide
  Sense strand starting at position 663 of SEQ ID NO: 1562152
aauauaauuucugguggac

SEQ ID NO: 1725966 - RNA, 19 nt, Artificial Sequence
  Description of Artificial Sequence: Synthetic oligonucleotide
  Antisense strand to SEQ ID NO: 1725965
guccaccagaaauuauauu

SEQ ID NO: 1725967 - RNA, 19 nt, Artificial Sequence
  Description of Artificial Sequence: Synthetic oligonucleotide
  Sense strand starting at position 824 of SEQ ID NO: 1562152
cagugaggacacuagugua

SEQ ID NO: 1725968 - RNA, 19 nt, Artificial Sequence
  Description of Artificial Sequence: Synthetic oligonucleotide
  Antisense strand to SEQ ID NO: 1725967
uacacuaguguccucacug

SEQ ID NO: 1725969 - RNA, 19 nt, Artificial Sequence
  Description of Artificial Sequence: Synthetic oligonucleotide
  Sense strand starting at position 838 of SEQ ID NO: 1562152
guguaaauacuaggacuga

SEQ ID NO: 1725970 - RNA, 19 nt, Artificial Sequence
  Description of Artificial Sequence: Synthetic oligonucleotide
  Antisense strand to SEQ ID NO: 1725969
ucaguccuaguauuuacac

SEQ ID NO: 1725971 - RNA, 19 nt, Artificial Sequence
  Description of Artificial Sequence: Synthetic oligonucleotide
  Sense strand starting at position 997 of SEQ ID NO: 1562152
ccagaaucacuccgguauu

SEQ ID NO: 1725972 - RNA, 19 nt, Artificial Sequence
  Description of Artificial Sequence: Synthetic oligonucleotide
  Antisense strand to SEQ ID NO: 1725971
aauaccggagugauucugg

SEQ ID NO: 1725973 - RNA, 19 nt, Artificial Sequence
  Description of Artificial Sequence: Synthetic oligonucleotide
  Sense strand starting at position 1000 of SEQ ID NO: 1562152
gaaucacuccgguauucuu

SEQ ID NO: 1725974 - RNA, 19 nt, Artificial Sequence
  Description of Artificial Sequence: Synthetic oligonucleotide
  Antisense strand to SEQ ID NO: 1725973
aagaauaccggagugauuc

SEQ ID NO: 1725975 - RNA, 19 nt, Artificial Sequence
  Description of Artificial Sequence: Synthetic oligonucleotide
  Sense strand starting at position 1204 of SEQ ID NO: 1562152
gugugaauuccagccgugu

SEQ ID NO: 1725976 - RNA, 19 nt, Artificial Sequence
  Description of Artificial Sequence: Synthetic oligonucleotide
  Antisense strand to SEQ ID NO: 1725975
acacggcuggaauucacac

SEQ ID NO: 1725977 - RNA, 19 nt, Artificial Sequence
  Description of Artificial Sequence: Synthetic oligonucleotide
  Sense strand starting at position 1367 of SEQ ID NO: 1562152
agcguuauaagcguuauca

SEQ ID NO: 1725978 - RNA, 19 nt, Artificial Sequence
  Description of Artificial Sequence: Synthetic oligonucleotide
  Antisense strand to SEQ ID NO: 1725977
ugauaacgcuuauaacgcu

SEQ ID NO: 1725979 - RNA, 19 nt, Artificial Sequence
  Description of Artificial Sequence: Synthetic oligonucleotide
  Sense strand starting at position 1368 of SEQ ID NO: 1562152
gcguuauaagcguuaucau

SEQ ID NO: 1725980 - RNA, 19 nt, Artificial Sequence
  Description of Artificial Sequence: Synthetic oligonucleotide
  Antisense strand to SEQ ID NO: 1725979
augauaacgcuuauaacgc

SEQ ID NO: 1725981 - RNA, 19 nt, Artificial Sequence
  Description of Artificial Sequence: Synthetic oligonucleotide
  Sense strand starting at position 1371 of SEQ ID NO: 1562152
uuauaagcguuaucaucac

SEQ ID NO: 1725982 - RNA, 19 nt, Artificial Sequence
  Description of Artificial Sequence: Synthetic oligonucleotide
  Antisense strand to SEQ ID NO: 1725981
gugaugauaacgcuuauaa

SEQ ID NO: 1725983 - RNA, 19 nt, Artificial Sequence
  Description of Artificial Sequence: Synthetic oligonucleotide
  Sense strand starting at position 1378 of SEQ ID NO: 1562152
cguuaucaucacuacuuua

SEQ ID NO: 1725984 - RNA, 19 nt, Artificial Sequence
  Description of Artificial Sequence: Synthetic oligonucleotide
  Antisense strand to SEQ ID NO: 1725983
uaaaguagugaugauaacg

SEQ ID NO: 1725985 - RNA, 19 nt, Artificial Sequence
  Description of Artificial Sequence: Synthetic oligonucleotide
  Sense strand starting at position 1417 of SEQ ID NO: 1562152
ccuugcucaagugaggaaa

SEQ ID NO: 1725986 - RNA, 19 nt, Artificial Sequence
  Description of Artificial Sequence: Synthetic oligonucleotide
  Antisense strand to SEQ ID NO: 1725985
uuuccucacuugagcaagg

SEQ ID NO: 1725987 - RNA, 19 nt, Artificial Sequence
  Description of Artificial Sequence: Synthetic oligonucleotide
  Sense strand starting at position 2094 of SEQ ID NO: 1562152
gcugacucagggugaguuu

SEQ ID NO: 1725988 - RNA, 19 nt, Artificial Sequence
  Description of Artificial Sequence: Synthetic oligonucleotide
  Antisense strand to SEQ ID NO: 1725987
aaacucacccugagucagc

SEQ ID NO: 1725989 - RNA, 19 nt, Artificial Sequence
  Description of Artificial Sequence: Synthetic oligonucleotide
  Sense strand starting at position 2393 of SEQ ID NO: 1562152
guaugacuguuauucccau

SEQ ID NO: 1725990 - RNA, 19 nt, Artificial Sequence
  Description of Artificial Sequence: Synthetic oligonucleotide
  Antisense strand to SEQ ID NO: 1725989
augggaauaacagucauac

SEQ ID NO: 1725991 - RNA, 19 nt, Artificial Sequence
  Description of Artificial Sequence: Synthetic oligonucleotide
  Sense strand starting at position 2477 of SEQ ID NO: 1562152
ggccgaauccgcguucaaa

SEQ ID NO: 1725992 - RNA, 19 nt, Artificial Sequence
  Description of Artificial Sequence: Synthetic oligonucleotide
  Antisense strand to SEQ ID NO: 1725991
uuugaacgcggauucggcc

SEQ ID NO: 1725993 - RNA, 19 nt, Artificial Sequence
  Description of Artificial Sequence: Synthetic oligonucleotide
  Sense strand starting at position 2478 of SEQ ID NO: 1562152
gccgaauccgcguucaaau

SEQ ID NO: 1725994 - RNA, 19 nt, Artificial Sequence
  Description of Artificial Sequence: Synthetic oligonucleotide
  Antisense strand to SEQ ID NO: 1725993
auuugaacgcggauucggc

SEQ ID NO: 1725995 - RNA, 19 nt, Artificial Sequence
  Description of Artificial Sequence: Synthetic oligonucleotide
  Sense strand starting at position 2637 of SEQ ID NO: 1562152
gugucauuacaacacuacu

SEQ ID NO: 1725996 - RNA, 19 nt, Artificial Sequence
  Description of Artificial Sequence: Synthetic oligonucleotide
  Antisense strand to SEQ ID NO: 1725995
aguaguguuguaaugacac

SEQ ID NO: 1725997 - RNA, 19 nt, Artificial Sequence
  Description of Artificial Sequence: Synthetic oligonucleotide
  Sense strand starting at position 2824 of SEQ ID NO: 1562152
accugaauggcacgaacau

SEQ ID NO: 1725998 - RNA, 19 nt, Artificial Sequence
  Description of Artificial Sequence: Synthetic oligonucleotide
  Antisense strand to SEQ ID NO: 1725997
auguucgugccauucaggu

SEQ ID NO: 1725999 - RNA, 19 nt, Artificial Sequence
  Description of Artificial Sequence: Synthetic oligonucleotide
  Sense strand starting at position 2978 of SEQ ID NO: 1562152
acucaaaguugugugaauu

SEQ ID NO: 1726000 - RNA, 19 nt, Artificial Sequence
  Description of Artificial Sequence: Synthetic oligonucleotide
  Antisense strand to SEQ ID NO: 1725999
aauucacacaacuuugagu

SEQ ID NO: 1726001 - RNA, 19 nt, Artificial Sequence
  Description of Artificial Sequence: Synthetic oligonucleotide
  Sense strand starting at position 2979 of SEQ ID NO: 1562152
cucaaaguugugugaauug

SEQ ID NO: 1726002 - RNA, 19 nt, Artificial Sequence
  Description of Artificial Sequence: Synthetic oligonucleotide
  Antisense strand to SEQ ID NO: 1726001
caauucacacaacuuugag

SEQ ID NO: 1726003 - RNA, 19 nt, Artificial Sequence
  Description of Artificial Sequence: Synthetic oligonucleotide
  Sense strand starting at position 2984 of SEQ ID NO: 1562152
aguugugugaauugagaga

SEQ ID NO: 1726004 - RNA, 19 nt, Artificial Sequence
  Description of Artificial Sequence: Synthetic oligonucleotide
  Antisense strand to SEQ ID NO: 1726003
ucucucaauucacacaacu

SEQ ID NO: 1726005 - RNA, 19 nt, Artificial Sequence
  Description of Artificial Sequence: Synthetic oligonucleotide
  Sense strand starting at position 2995 of SEQ ID NO: 1562152
uugagagagugcucauagu

SEQ ID NO: 1726006 - RNA, 19 nt, Artificial Sequence
  Description of Artificial Sequence: Synthetic oligonucleotide
  Antisense strand to SEQ ID NO: 1726005
acuaugagcacucucucaa

SEQ ID NO: 1726007 - RNA, 19 nt, Artificial Sequence
  Description of Artificial Sequence: Synthetic oligonucleotide
  Sense strand starting at position 3017 of SEQ ID NO: 1562152
cugugaauugcauaacauc

SEQ ID NO: 1726008 - RNA, 19 nt, Artificial Sequence
  Description of Artificial Sequence: Synthetic oligonucleotide
  Antisense strand to SEQ ID NO: 1726007
gauguuaugcaauucacag

SEQ ID NO: 1726009 - RNA, 19 nt, Artificial Sequence
  Description of Artificial Sequence: Synthetic oligonucleotide
  Sense strand starting at position 3039 of SEQ ID NO: 1562152
uuugcuguugaagaucauu

SEQ ID NO: 1726010 - RNA, 19 nt, Artificial Sequence
  Description of Artificial Sequence: Synthetic oligonucleotide
  Antisense strand to SEQ ID NO: 1726009
aaugaucuucaacagcaaa

SEQ ID NO: 1726011 - RNA, 19 nt, Artificial Sequence
  Description of Artificial Sequence: Synthetic oligonucleotide
  Sense strand starting at position 3065 of SEQ ID NO: 1562152
gguucuuagucucucacaa

SEQ ID NO: 1726012 - RNA, 19 nt, Artificial Sequence
  Description of Artificial Sequence: Synthetic oligonucleotide
  Antisense strand to SEQ ID NO: 1726011
uugugagagacuaagaacc

SEQ ID NO: 1726013 - RNA, 19 nt, Artificial Sequence
  Description of Artificial Sequence: Synthetic oligonucleotide
  Sense strand starting at position 3231 of SEQ ID NO: 1562152
gagggaaguuaucccuucu

SEQ ID NO: 1726014 - RNA, 19 nt, Artificial Sequence
  Description of Artificial Sequence: Synthetic oligonucleotide
  Antisense strand to SEQ ID NO: 1726013
agaagggauaacuucccuc

SEQ ID NO: 1726015 - RNA, 19 nt, Artificial Sequence
  Description of Artificial Sequence: Synthetic oligonucleotide
  Sense strand starting at position 3274 of SEQ ID NO: 1562152
guaagaauggcaggauaac

SEQ ID NO: 1726016 - RNA, 19 nt, Artificial Sequence
  Description of Artificial Sequence: Synthetic oligonucleotide
  Antisense strand to SEQ ID NO: 1726015
guuauccugccauucuuac

SEQ ID NO: 1726017 - RNA, 19 nt, Artificial Sequence
  Description of Artificial Sequence: Synthetic oligonucleotide
  Sense strand starting at position 3286 of SEQ ID NO: 1562152
ggauaacaguuucuagagu

SEQ ID NO: 1726018 - RNA, 19 nt, Artificial Sequence
  Description of Artificial Sequence: Synthetic oligonucleotide
  Antisense strand to SEQ ID NO: 1726017
acucuagaaacuguuaucc

SEQ ID NO: 1726019 - RNA, 19 nt, Artificial Sequence
  Description of Artificial Sequence: Synthetic oligonucleotide
  Sense strand starting at position 3314 of SEQ ID NO: 1562152
gagcucuggccugauucua

SEQ ID NO: 1726020 - RNA, 19 nt, Artificial Sequence
  Description of Artificial Sequence: Synthetic oligonucleotide
  Antisense strand to SEQ ID NO: 1726019
uagaaucaggccagagcuc

SEQ ID NO: 1726021 - RNA, 19 nt, Artificial Sequence
  Description of Artificial Sequence: Synthetic oligonucleotide
  Sense strand starting at position 3355 of SEQ ID NO: 1562152
gccucauuuccugguauca

SEQ ID NO: 1726022 - RNA, 19 nt, Artificial Sequence
  Description of Artificial Sequence: Synthetic oligonucleotide
  Antisense strand to SEQ ID NO: 1726021
ugauaccaggaaaugaggc

SEQ ID NO: 1726023 - RNA, 19 nt, Artificial Sequence
  Description of Artificial Sequence: Synthetic oligonucleotide
  Sense strand starting at position 3370 of SEQ ID NO: 1562152
aucaaauucucuguguuaa

SEQ ID NO: 1726024 - RNA, 19 nt, Artificial Sequence
  Description of Artificial Sequence: Synthetic oligonucleotide
  Antisense strand to SEQ ID NO: 1726023
uuaacacagagaauuugau

SEQ ID NO: 1726025 - RNA, 19 nt, Artificial Sequence
  Description of Artificial Sequence: Synthetic oligonucleotide
  Sense strand starting at position 3371 of SEQ ID NO: 1562152
ucaaauucucuguguuaag

SEQ ID NO: 1726026 - RNA, 19 nt, Artificial Sequence
  Description of Artificial Sequence: Synthetic oligonucleotide
  Antisense strand to SEQ ID NO: 1726025
cuuaacacagagaauuuga

SEQ ID NO: 1726027 - RNA, 19 nt, Artificial Sequence
  Description of Artificial Sequence: Synthetic oligonucleotide
  Sense strand starting at position 3385 of SEQ ID NO: 1562152
uuaagauaucuauggccca

SEQ ID NO: 1726028 - RNA, 19 nt, Artificial Sequence
  Description of Artificial Sequence: Synthetic oligonucleotide
  Antisense strand to SEQ ID NO: 1726027
ugggccauagauaucuuaa

SEQ ID NO: 1726029 - RNA, 19 nt, Artificial Sequence
  Description of Artificial Sequence: Synthetic oligonucleotide
  Sense strand starting at position 3388 of SEQ ID NO: 1562152
agauaucuauggcccaauu

SEQ ID NO: 1726030 - RNA, 19 nt, Artificial Sequence
  Description of Artificial Sequence: Synthetic oligonucleotide
  Antisense strand to SEQ ID NO: 1726029
aauugggccauagauaucu

SEQ ID NO: 1726031 - RNA, 19 nt, Artificial Sequence
  Description of Artificial Sequence: Synthetic oligonucleotide
  Sense strand starting at position 3452 of SEQ ID NO: 1562152
aauguuuggagguagguau

SEQ ID NO: 1726032 - RNA, 19 nt, Artificial Sequence
  Description of Artificial Sequence: Synthetic oligonucleotide
  Antisense strand to SEQ ID NO: 1726031
auaccuaccuccaaacauu

SEQ ID NO: 1726033 - RNA, 19 nt, Artificial Sequence
  Description of Artificial Sequence: Synthetic oligonucleotide
  Sense strand starting at position 3470 of SEQ ID NO: 1562152
uguccaagguugguaaaga

SEQ ID NO: 1726034 - RNA, 19 nt, Artificial Sequence
  Description of Artificial Sequence: Synthetic oligonucleotide
  Antisense strand to SEQ ID NO: 1726033
ucuuuaccaaccuuggaca

SEQ ID NO: 1726035 - RNA, 19 nt, Artificial Sequence
  Description of Artificial Sequence: Synthetic oligonucleotide
  Sense strand starting at position 31 of SEQ ID NO: 1562153
cugaguuucugcccaggga

SEQ ID NO: 1726036 - RNA, 19 nt, Artificial Sequence
  Description of Artificial Sequence: Synthetic oligonucleotide
  Antisense strand to SEQ ID NO: 1726035
ucccugggcagaaacucag

SEQ ID NO: 1726037 - RNA, 19 nt, Artificial Sequence
  Description of Artificial Sequence: Synthetic oligonucleotide
  Sense strand starting at position 72 of SEQ ID NO: 1562153
cuuccuuucugaucugaug

SEQ ID NO: 1726038 - RNA, 19 nt, Artificial Sequence
  Description of Artificial Sequence: Synthetic oligonucleotide
  Antisense strand to SEQ ID NO: 1726037
caucagaucagaaaggaag

SEQ ID NO: 1726039 - RNA, 19 nt, Artificial Sequence
  Description of Artificial Sequence: Synthetic oligonucleotide
  Sense strand starting at position 160 of SEQ ID NO: 1562153
agugcaaauaaugggauaa

SEQ ID NO: 1726040 - RNA, 19 nt, Artificial Sequence
  Description of Artificial Sequence: Synthetic oligonucleotide
  Antisense strand to SEQ ID NO: 1726039
uuaucccauuauuugcacu

SEQ ID NO: 1726041 - RNA, 19 nt, Artificial Sequence
  Description of Artificial Sequence: Synthetic oligonucleotide
  Sense strand starting at position 161 of SEQ ID NO: 1562153
gugcaaauaaugggauaaa

SEQ ID NO: 1726042 - RNA, 19 nt, Artificial Sequence
  Description of Artificial Sequence: Synthetic oligonucleotide
  Antisense strand to SEQ ID NO: 1726041
uuuaucccauuauuugcac

SEQ ID NO: 1726043 - RNA, 19 nt, Artificial Sequence
  Description of Artificial Sequence: Synthetic oligonucleotide
  Sense strand starting at position 297 of SEQ ID NO: 1562153
ggccaaauguucccagauc

SEQ ID NO: 1726044 - RNA, 19 nt, Artificial Sequence
  Description of Artificial Sequence: Synthetic oligonucleotide
  Antisense strand to SEQ ID NO: 1726043
gaucugggaacauuuggcc

SEQ ID NO: 1726045 - RNA, 19 nt, Artificial Sequence
  Description of Artificial Sequence: Synthetic oligonucleotide
  Sense strand starting at position 525 of SEQ ID NO: 1562153
uagaacagugucugggaua

SEQ ID NO: 1726046 - RNA, 19 nt, Artificial Sequence
  Description of Artificial Sequence: Synthetic oligonucleotide
  Antisense strand to SEQ ID NO: 1726045
uaucccagacacuguucua

SEQ ID NO: 1726047 - RNA, 19 nt, Artificial Sequence
  Description of Artificial Sequence: Synthetic oligonucleotide
  Sense strand starting at position 553 of SEQ ID NO: 1562153
ccacauaaguguuuacuaa

SEQ ID NO: 1726048 - RNA, 19 nt, Artificial Sequence
  Description of Artificial Sequence: Synthetic oligonucleotide
  Antisense strand to SEQ ID NO: 1726047
uuaguaaacacuuaugugg

SEQ ID NO: 1726049 - RNA, 19 nt, Artificial Sequence
  Description of Artificial Sequence: Synthetic oligonucleotide
  Sense strand starting at position 629 of SEQ ID NO: 1562153
uucagaguuggccaagguu

SEQ ID NO: 1726050 - RNA, 19 nt, Artificial Sequence
  Description of Artificial Sequence: Synthetic oligonucleotide
  Antisense strand to SEQ ID NO: 1726049
aaccuuggccaacucugaa

SEQ ID NO: 1726051 - RNA, 19 nt, Artificial Sequence
  Description of Artificial Sequence: Synthetic oligonucleotide
  Sense strand starting at position 686 of SEQ ID NO: 1562153
cagcaaagguagucucaaa

SEQ ID NO: 1726052 - RNA, 19 nt, Artificial Sequence
  Description of Artificial Sequence: Synthetic oligonucleotide
  Antisense strand to SEQ ID NO: 1726051
uuugagacuaccuuugcug

SEQ ID NO: 1726053 - RNA, 19 nt, Artificial Sequence
  Description of Artificial Sequence: Synthetic oligonucleotide
  Sense strand starting at position 709 of SEQ ID NO: 1562153
gcgauagauuuaggacaac

SEQ ID NO: 1726054 - RNA, 19 nt, Artificial Sequence
  Description of Artificial Sequence: Synthetic oligonucleotide
  Antisense strand to SEQ ID NO: 1726053
guuguccuaaaucuaucgc

SEQ ID NO: 1726055 - RNA, 19 nt, Artificial Sequence
  Description of Artificial Sequence: Synthetic oligonucleotide
  Sense strand starting at position 743 of SEQ ID NO: 1562153
gcacgucaucaaggaauaa

SEQ ID NO: 1726056 - RNA, 19 nt, Artificial Sequence
  Description of Artificial Sequence: Synthetic oligonucleotide
  Antisense strand to SEQ ID NO: 1726055
uuauuccuugaugacgugc

SEQ ID NO: 1726057 - RNA, 19 nt, Artificial Sequence
  Description of Artificial Sequence: Synthetic oligonucleotide
  Sense strand starting at position 892 of SEQ ID NO: 1562153
augucauuccaacagaugu

SEQ ID NO: 1726058 - RNA, 19 nt, Artificial Sequence
  Description of Artificial Sequence: Synthetic oligonucleotide
  Antisense strand to SEQ ID NO: 1726057
acaucuguuggaaugacau

SEQ ID NO: 1726059 - RNA, 19 nt, Artificial Sequence
  Description of Artificial Sequence: Synthetic oligonucleotide
  Sense strand starting at position 1005 of SEQ ID NO: 1562153
aacuuagggcuuuggauaa

SEQ ID NO: 1726060 - RNA, 19 nt, Artificial Sequence
  Description of Artificial Sequence: Synthetic oligonucleotide
  Antisense strand to SEQ ID NO: 1726059
uuauccaaagcccuaaguu

SEQ ID NO: 1726061 - RNA, 19 nt, Artificial Sequence
  Description of Artificial Sequence: Synthetic oligonucleotide
  Sense strand starting at position 1101 of SEQ ID NO: 1562153
gagcaaauccgucaaguuu

SEQ ID NO: 1726062 - RNA, 19 nt, Artificial Sequence
  Description of Artificial Sequence: Synthetic oligonucleotide
  Antisense strand to SEQ ID NO: 1726061
aaacuugacggauuugcuc

SEQ ID NO: 1726063 - RNA, 19 nt, Artificial Sequence
  Description of Artificial Sequence: Synthetic oligonucleotide
  Sense strand starting at position 2997 of SEQ ID NO: 1562153
gggcaacacuuauucucua

SEQ ID NO: 1726064 - RNA, 19 nt, Artificial Sequence
  Description of Artificial Sequence: Synthetic oligonucleotide
  Antisense strand to SEQ ID NO: 1726063
uagagaauaaguguugccc

SEQ ID NO: 1726065 - RNA, 19 nt, Artificial Sequence
  Description of Artificial Sequence: Synthetic oligonucleotide
  Sense strand starting at position 3192 of SEQ ID NO: 1562153
uagugacauuguuugaaac

SEQ ID NO: 1726066 - RNA, 19 nt, Artificial Sequence
  Description of Artificial Sequence: Synthetic oligonucleotide
  Antisense strand to SEQ ID NO: 1726065
guuucaaacaaugucacua

SEQ ID NO: 1726067 - RNA, 19 nt, Artificial Sequence
  Description of Artificial Sequence: Synthetic oligonucleotide
  Sense strand starting at position 3193 of SEQ ID NO: 1562153
agugacauuguuugaaacu

SEQ ID NO: 1726068 - RNA, 19 nt, Artificial Sequence
  Description of Artificial Sequence: Synthetic oligonucleotide
  Antisense strand to SEQ ID NO: 1726067
aguuucaaacaaugucacu

SEQ ID NO: 1726069 - RNA, 19 nt, Artificial Sequence
  Description of Artificial Sequence: Synthetic oligonucleotide
  Sense strand starting at position 3221 of SEQ ID NO: 1562153
accaucaagacgugucagu

SEQ ID NO: 1726070 - RNA, 19 nt, Artificial Sequence
  Description of Artificial Sequence: Synthetic oligonucleotide
  Antisense strand to SEQ ID NO: 1726069
acugacacgucuugauggu

SEQ ID NO: 1726071 - RNA, 19 nt, Artificial Sequence
  Description of Artificial Sequence: Synthetic oligonucleotide
  Sense strand starting at position 3226 of SEQ ID NO: 1562153
caagacgugucaguuuaau

SEQ ID NO: 1726072 - RNA, 19 nt, Artificial Sequence
  Description of Artificial Sequence: Synthetic oligonucleotide
  Antisense strand to SEQ ID NO: 1726071
auuaaacugacacgucuug

SEQ ID NO: 1726073 - RNA, 19 nt, Artificial Sequence
  Description of Artificial Sequence: Synthetic oligonucleotide
  Sense strand starting at position 3232 of SEQ ID NO: 1562153
gugucaguuuaauugguca

SEQ ID NO: 1726074 - RNA, 19 nt, Artificial Sequence
  Description of Artificial Sequence: Synthetic oligonucleotide
  Antisense strand to SEQ ID NO: 1726073
ugaccaauuaaacugacac

SEQ ID NO: 1726075 - RNA, 19 nt, Artificial Sequence
  Description of Artificial Sequence: Synthetic oligonucleotide
  Sense strand starting at position 3234 of SEQ ID NO: 1562153
gucaguuuaauuggucagu

SEQ ID NO: 1726076 - RNA, 19 nt, Artificial Sequence
  Description of Artificial Sequence: Synthetic oligonucleotide
  Antisense strand to SEQ ID NO: 1726075
acugaccaauuaaacugac

SEQ ID NO: 1726077 - RNA, 19 nt, Artificial Sequence
  Description of Artificial Sequence: Synthetic oligonucleotide
  Sense strand starting at position 3236 of SEQ ID NO: 1562153
caguuuaauuggucagucu

SEQ ID NO: 1726078 - RNA, 19 nt, Artificial Sequence
  Description of Artificial Sequence: Synthetic oligonucleotide
  Antisense strand to SEQ ID NO: 1726077
agacugaccaauuaaacug

SEQ ID NO: 1726079 - RNA, 19 nt, Artificial Sequence
  Description of Artificial Sequence: Synthetic oligonucleotide
  Sense strand starting at position 3243 of SEQ ID NO: 1562153
auuggucagucugugagau

SEQ ID NO: 1726080 - RNA, 19 nt, Artificial Sequence
  Description of Artificial Sequence: Synthetic oligonucleotide
  Antisense strand to SEQ ID NO: 1726079
aucucacagacugaccaau

SEQ ID NO: 1726081 - RNA, 19 nt, Artificial Sequence
  Description of Artificial Sequence: Synthetic oligonucleotide
  Sense strand starting at position 3244 of SEQ ID NO: 1562153
uuggucagucugugagauc

SEQ ID NO: 1726082 - RNA, 19 nt, Artificial Sequence
  Description of Artificial Sequence: Synthetic oligonucleotide
  Antisense strand to SEQ ID NO: 1726081
gaucucacagacugaccaa

SEQ ID NO: 1726083 - RNA, 19 nt, Artificial Sequence
  Description of Artificial Sequence: Synthetic oligonucleotide
  Sense strand starting at position 3253 of SEQ ID NO: 1562153
cugugagaucguuauucuu

SEQ ID NO: 1726084 - RNA, 19 nt, Artificial Sequence
  Description of Artificial Sequence: Synthetic oligonucleotide
  Antisense strand to SEQ ID NO: 1726083
aagaauaacgaucucacag

SEQ ID NO: 1726085 - RNA, 19 nt, Artificial Sequence
  Description of Artificial Sequence: Synthetic oligonucleotide
  Sense strand starting at position 3316 of SEQ ID NO: 1562153
acacacgguucuguaaauu

SEQ ID NO: 1726086 - RNA, 19 nt, Artificial Sequence
  Description of Artificial Sequence: Synthetic oligonucleotide
  Antisense strand to SEQ ID NO: 1726085
aauuuacagaaccgugugu

SEQ ID NO: 1726087 - RNA, 19 nt, Artificial Sequence
  Description of Artificial Sequence: Synthetic oligonucleotide
  Sense strand starting at position 3534 of SEQ ID NO: 1562153
gugagucaguaccugagaa

SEQ ID NO: 1726088 - RNA, 19 nt, Artificial Sequence
  Description of Artificial Sequence: Synthetic oligonucleotide
  Antisense strand to SEQ ID NO: 1726087
uucucagguacugacucac

SEQ ID NO: 1726089 - RNA, 19 nt, Artificial Sequence
  Description of Artificial Sequence: Synthetic oligonucleotide
  Sense strand starting at position 3535 of SEQ ID NO: 1562153
ugagucaguaccugagaaa

SEQ ID NO: 1726090 - RNA, 19 nt, Artificial Sequence
  Description of Artificial Sequence: Synthetic oligonucleotide
  Antisense strand to SEQ ID NO: 1726089
uuucucagguacugacuca

SEQ ID NO: 1726091 - RNA, 19 nt, Artificial Sequence
  Description of Artificial Sequence: Synthetic oligonucleotide
  Sense strand starting at position 3651 of SEQ ID NO: 1562153
gugguaagaccuugcagag

SEQ ID NO: 1726092 - RNA, 19 nt, Artificial Sequence
  Description of Artificial Sequence: Synthetic oligonucleotide
  Antisense strand to SEQ ID NO: 1726091
cucugcaaggucuuaccac

SEQ ID NO: 1726093 - RNA, 19 nt, Artificial Sequence
  Description of Artificial Sequence: Synthetic oligonucleotide
  Sense strand starting at position 3666 of SEQ ID NO: 1562153
agaggugcucuuggcauuu

SEQ ID NO: 1726094 - RNA, 19 nt, Artificial Sequence
  Description of Artificial Sequence: Synthetic oligonucleotide
  Antisense strand to SEQ ID NO: 1726093
aaaugccaagagcaccucu

SEQ ID NO: 1726095 - RNA, 19 nt, Artificial Sequence
  Description of Artificial Sequence: Synthetic oligonucleotide
  Sense strand starting at position 3698 of SEQ ID NO: 1562153
cagggacgcugcucaauau

SEQ ID NO: 1726096 - RNA, 19 nt, Artificial Sequence
  Description of Artificial Sequence: Synthetic oligonucleotide
  Antisense strand to SEQ ID NO: 1726095
auauugagcagcgucccug

SEQ ID NO: 1726097 - RNA, 19 nt, Artificial Sequence
  Description of Artificial Sequence: Synthetic oligonucleotide
  Sense strand starting at position 3813 of SEQ ID NO: 1562153
uguuuaucccaaugauggu

SEQ ID NO: 1726098 - RNA, 19 nt, Artificial Sequence
  Description of Artificial Sequence: Synthetic oligonucleotide
  Antisense strand to SEQ ID NO: 1726097
accaucauugggauaaaca

SEQ ID NO: 1726099 - RNA, 19 nt, Artificial Sequence
  Description of Artificial Sequence: Synthetic oligonucleotide
  Sense strand starting at position 3822 of SEQ ID NO: 1562153
caaugaugguucccuuugu

SEQ ID NO: 1726100 - RNA, 19 nt, Artificial Sequence
  Description of Artificial Sequence: Synthetic oligonucleotide
  Antisense strand to SEQ ID NO: 1726099
acaaagggaaccaucauug

SEQ ID NO: 1726101 - RNA, 19 nt, Artificial Sequence
  Description of Artificial Sequence: Synthetic oligonucleotide
  Sense strand starting at position 3823 of SEQ ID NO: 1562153
aaugaugguucccuuuguu

SEQ ID NO: 1726102 - RNA, 19 nt, Artificial Sequence
  Description of Artificial Sequence: Synthetic oligonucleotide
  Antisense strand to SEQ ID NO: 1726101
aacaaagggaaccaucauu

SEQ ID NO: 1726103 - RNA, 19 nt, Artificial Sequence
  Description of Artificial Sequence: Synthetic oligonucleotide
  Sense strand starting at position 3856 of SEQ ID NO: 1562153
gguugacugucagugauug

SEQ ID NO: 1726104 - RNA, 19 nt, Artificial Sequence
  Description of Artificial Sequence: Synthetic oligonucleotide
  Antisense strand to SEQ ID NO: 1726103
caaucacugacagucaacc

SEQ ID NO: 1726105 - RNA, 19 nt, Artificial Sequence
  Description of Artificial Sequence: Synthetic oligonucleotide
  Sense strand starting at position 3858 of SEQ ID NO: 1562153
uugacugucagugauuguu

SEQ ID NO: 1726106 - RNA, 19 nt, Artificial Sequence
  Description of Artificial Sequence: Synthetic oligonucleotide
  Antisense strand to SEQ ID NO: 1726105
aacaaucacugacagucaa

SEQ ID NO: 1726107 - RNA, 19 nt, Artificial Sequence
  Description of Artificial Sequence: Synthetic oligonucleotide
  Sense strand starting at position 3916 of SEQ ID NO: 1562153
ccauaaacaguuugggaua

SEQ ID NO: 1726108 - RNA, 19 nt, Artificial Sequence
  Description of Artificial Sequence: Synthetic oligonucleotide
  Antisense strand to SEQ ID NO: 1726107
uaucccaaacuguuuaugg

SEQ ID NO: 1726109 - RNA, 19 nt, Artificial Sequence
  Description of Artificial Sequence: Synthetic oligonucleotide
  Sense strand starting at position 3919 of SEQ ID NO: 1562153
uaaacaguuugggauaaca

SEQ ID NO: 1726110 - RNA, 19 nt, Artificial Sequence
  Description of Artificial Sequence: Synthetic oligonucleotide
  Antisense strand to SEQ ID NO: 1726109
uguuaucccaaacuguuua

SEQ ID NO: 1726111 - RNA, 19 nt, Artificial Sequence
  Description of Artificial Sequence: Synthetic oligonucleotide
  Sense strand starting at position 3979 of SEQ ID NO: 1562153
auggcugucacaugaguau

SEQ ID NO: 1726112 - RNA, 19 nt, Artificial Sequence
  Description of Artificial Sequence: Synthetic oligonucleotide
  Antisense strand to SEQ ID NO: 1726111
auacucaugugacagccau

SEQ ID NO: 1726113 - RNA, 19 nt, Artificial Sequence
  Description of Artificial Sequence: Synthetic oligonucleotide
  Sense strand starting at position 3983 of SEQ ID NO: 1562153
cugucacaugaguauguca

SEQ ID NO: 1726114 - RNA, 19 nt, Artificial Sequence
  Description of Artificial Sequence: Synthetic oligonucleotide
  Antisense strand to SEQ ID NO: 1726113
ugacauacucaugugacag

SEQ ID NO: 1726115 - RNA, 19 nt, Artificial Sequence
  Description of Artificial Sequence: Synthetic oligonucleotide
  Sense strand starting at position 49 of SEQ ID NO: 1562154
auaggagcuagaugaaguu

SEQ ID NO: 1726116 - RNA, 19 nt, Artificial Sequence
  Description of Artificial Sequence: Synthetic oligonucleotide
  Antisense strand to SEQ ID NO: 1726115
aacuucaucuagcuccuau

SEQ ID NO: 1726117 - RNA, 19 nt, Artificial Sequence
  Description of Artificial Sequence: Synthetic oligonucleotide
  Sense strand starting at position 68 of SEQ ID NO: 1562154
uuuaucaucugcuuuguua

SEQ ID NO: 1726118 - RNA, 19 nt, Artificial Sequence
  Description of Artificial Sequence: Synthetic oligonucleotide
  Antisense strand to SEQ ID NO: 1726117
uaacaaagcagaugauaaa

SEQ ID NO: 1726119 - RNA, 19 nt, Artificial Sequence
  Description of Artificial Sequence: Synthetic oligonucleotide
  Sense strand starting at position 71 of SEQ ID NO: 1562154
aucaucugcuuuguuauua

SEQ ID NO: 1726120 - RNA, 19 nt, Artificial Sequence
  Description of Artificial Sequence: Synthetic oligonucleotide
  Antisense strand to SEQ ID NO: 1726119
uaauaacaaagcagaugau

SEQ ID NO: 1726121 - RNA, 19 nt, Artificial Sequence
  Description of Artificial Sequence: Synthetic oligonucleotide
  Sense strand starting at position 75 of SEQ ID NO: 1562154
ucugcuuuguuauuacuga

SEQ ID NO: 1726122 - RNA, 19 nt, Artificial Sequence
  Description of Artificial Sequence: Synthetic oligonucleotide
  Antisense strand to SEQ ID NO: 1726121
ucaguaauaacaaagcaga

SEQ ID NO: 1726123 - RNA, 19 nt, Artificial Sequence
  Description of Artificial Sequence: Synthetic oligonucleotide
  Sense strand starting at position 82 of SEQ ID NO: 1562154
uguuauuacugaccugguu

SEQ ID NO: 1726124 - RNA, 19 nt, Artificial Sequence
  Description of Artificial Sequence: Synthetic oligonucleotide
  Antisense strand to SEQ ID NO: 1726123
aaccaggucaguaauaaca

SEQ ID NO: 1726125 - RNA, 19 nt, Artificial Sequence
  Description of Artificial Sequence: Synthetic oligonucleotide
  Sense strand starting at position 487 of SEQ ID NO: 1562154
cuucccagcccuugaagaa

SEQ ID NO: 1726126 - RNA, 19 nt, Artificial Sequence
  Description of Artificial Sequence: Synthetic oligonucleotide
  Antisense strand to SEQ ID NO: 1726125
uucuucaagggcugggaag

SEQ ID NO: 1726127 - RNA, 19 nt, Artificial Sequence
  Description of Artificial Sequence: Synthetic oligonucleotide
  Sense strand starting at position 508 of SEQ ID NO: 1562154
gccagagguucaggaauga

SEQ ID NO: 1726128 - RNA, 19 nt, Artificial Sequence
  Description of Artificial Sequence: Synthetic oligonucleotide
  Antisense strand to SEQ ID NO: 1726127
ucauuccugaaccucuggc

SEQ ID NO: 1726129 - RNA, 19 nt, Artificial Sequence
  Description of Artificial Sequence: Synthetic oligonucleotide
  Sense strand starting at position 519 of SEQ ID NO: 1562154
aggaaugauuaauauccua

SEQ ID NO: 1726130 - RNA, 19 nt, Artificial Sequence
  Description of Artificial Sequence: Synthetic oligonucleotide
  Antisense strand to SEQ ID NO: 1726129
uaggauauuaaucauuccu

SEQ ID NO: 1726131 - RNA, 19 nt, Artificial Sequence
  Description of Artificial Sequence: Synthetic oligonucleotide
  Sense strand starting at position 612 of SEQ ID NO: 1562154
gcagaagaguucugacacu

SEQ ID NO: 1726132 - RNA, 19 nt, Artificial Sequence
  Description of Artificial Sequence: Synthetic oligonucleotide
  Antisense strand to SEQ ID NO: 1726131
agugucagaacucuucugc

SEQ ID NO: 1726133 - RNA, 19 nt, Artificial Sequence
  Description of Artificial Sequence: Synthetic oligonucleotide
  Sense strand starting at position 2456 of SEQ ID NO: 1562154
gaguccucccuuuggguaa

SEQ ID NO: 1726134 - RNA, 19 nt, Artificial Sequence
  Description of Artificial Sequence: Synthetic oligonucleotide
  Antisense strand to SEQ ID NO: 1726133
uuacccaaagggaggacuc

SEQ ID NO: 1726135 - RNA, 19 nt, Artificial Sequence
  Description of Artificial Sequence: Synthetic oligonucleotide
  Sense strand starting at position 2457 of SEQ ID NO: 1562154
aguccucccuuuggguaaa

SEQ ID NO: 1726136 - RNA, 19 nt, Artificial Sequence
  Description of Artificial Sequence: Synthetic oligonucleotide
  Antisense strand to SEQ ID NO: 1726135
uuuacccaaagggaggacu

SEQ ID NO: 1726137 - RNA, 19 nt, Artificial Sequence
  Description of Artificial Sequence: Synthetic oligonucleotide
  Sense strand starting at position 2460 of SEQ ID NO: 1562154
ccucccuuuggguaaagau

SEQ ID NO: 1726138 - RNA, 19 nt, Artificial Sequence
  Description of Artificial Sequence: Synthetic oligonucleotide
  Antisense strand to SEQ ID NO: 1726137
aucuuuacccaaagggagg

SEQ ID NO: 1726139 - RNA, 19 nt, Artificial Sequence
  Description of Artificial Sequence: Synthetic oligonucleotide
  Sense strand starting at position 2472 of SEQ ID NO: 1562154
uaaagaugugcccggaacu

SEQ ID NO: 1726140 - RNA, 19 nt, Artificial Sequence
  Description of Artificial Sequence: Synthetic oligonucleotide
  Antisense strand to SEQ ID NO: 1726139
aguuccgggcacaucuuua

SEQ ID NO: 1726141 - RNA, 19 nt, Artificial Sequence
  Description of Artificial Sequence: Synthetic oligonucleotide
  Sense strand starting at position 2553 of SEQ ID NO: 1562154
cuuuaauccucgcgacgac

SEQ ID NO: 1726142 - RNA, 19 nt, Artificial Sequence
  Description of Artificial Sequence: Synthetic oligonucleotide
  Antisense strand to SEQ ID NO: 1726141
gucgucgcgaggauuaaag

SEQ ID NO: 1726143 - RNA, 19 nt, Artificial Sequence
  Description of Artificial Sequence: Synthetic oligonucleotide
  Sense strand starting at position 2763 of SEQ ID NO: 1562154
gugcuaugggcacaaggaa

SEQ ID NO: 1726144 - RNA, 19 nt, Artificial Sequence
  Description of Artificial Sequence: Synthetic oligonucleotide
  Antisense strand to SEQ ID NO: 1726143
uuccuugugcccauagcac

SEQ ID NO: 1726145 - RNA, 19 nt, Artificial Sequence
  Description of Artificial Sequence: Synthetic oligonucleotide
  Sense strand starting at position 2869 of SEQ ID NO: 1562154
ccggacaucucagaaccuu

SEQ ID NO: 1726146 - RNA, 19 nt, Artificial Sequence
  Description of Artificial Sequence: Synthetic oligonucleotide
  Antisense strand to SEQ ID NO: 1726145
aagguucugagauguccgg

SEQ ID NO: 1726147 - RNA, 19 nt, Artificial Sequence
  Description of Artificial Sequence: Synthetic oligonucleotide
  Sense strand starting at position 2964 of SEQ ID NO: 1562154
gucgagaggucgggaaaga

SEQ ID NO: 1726148 - RNA, 19 nt, Artificial Sequence
  Description of Artificial Sequence: Synthetic oligonucleotide
  Antisense strand to SEQ ID NO: 1726147
ucuuucccgaccucucgac

SEQ ID NO: 1726149 - RNA, 19 nt, Artificial Sequence
  Description of Artificial Sequence: Synthetic oligonucleotide
  Sense strand starting at position 2986 of SEQ ID NO: 1562154
ggguuccggccuggaauua

SEQ ID NO: 1726150 - RNA, 19 nt, Artificial Sequence
  Description of Artificial Sequence: Synthetic oligonucleotide
  Antisense strand to SEQ ID NO: 1726149
uaauuccaggccggaaccc

SEQ ID NO: 1726151 - RNA, 19 nt, Artificial Sequence
  Description of Artificial Sequence: Synthetic oligonucleotide
  Sense strand starting at position 3012 of SEQ ID NO: 1562154
ucugcuaaacuccagagau

SEQ ID NO: 1726152 - RNA, 19 nt, Artificial Sequence
  Description of Artificial Sequence: Synthetic oligonucleotide
  Antisense strand to SEQ ID NO: 1726151
aucucuggaguuuagcaga

SEQ ID NO: 1726153 - RNA, 19 nt, Artificial Sequence
  Description of Artificial Sequence: Synthetic oligonucleotide
  Sense strand starting at position 3111 of SEQ ID NO: 1562154
acaggaacguuccugaacu

SEQ ID NO: 1726154 - RNA, 19 nt, Artificial Sequence
  Description of Artificial Sequence: Synthetic oligonucleotide
  Antisense strand to SEQ ID NO: 1726153
aguucaggaacguuccugu

SEQ ID NO: 1726155 - RNA, 19 nt, Artificial Sequence
  Description of Artificial Sequence: Synthetic oligonucleotide
  Sense strand starting at position 3131 of SEQ ID NO: 1562154
gggauuggccugggaaagu

SEQ ID NO: 1726156 - RNA, 19 nt, Artificial Sequence
  Description of Artificial Sequence: Synthetic oligonucleotide
  Antisense strand to SEQ ID NO: 1726155
acuuucccaggccaauccc

SEQ ID NO: 1726157 - RNA, 19 nt, Artificial Sequence
  Description of Artificial Sequence: Synthetic oligonucleotide
  Sense strand starting at position 3140 of SEQ ID NO: 1562154
cugggaaaguuauucuuaa

SEQ ID NO: 1726158 - RNA, 19 nt, Artificial Sequence
  Description of Artificial Sequence: Synthetic oligonucleotide
  Antisense strand to SEQ ID NO: 1726157
uuaagaauaacuuucccag

SEQ ID NO: 1726159 - RNA, 19 nt, Artificial Sequence
  Description of Artificial Sequence: Synthetic oligonucleotide
  Sense strand starting at position 3141 of SEQ ID NO: 1562154
ugggaaaguuauucuuaaa

SEQ ID NO: 1726160 - RNA, 19 nt, Artificial Sequence
  Description of Artificial Sequence: Synthetic oligonucleotide
  Antisense strand to SEQ ID NO: 1726159
uuuaagaauaacuuuccca

SEQ ID NO: 1726161 - RNA, 19 nt, Artificial Sequence
  Description of Artificial Sequence: Synthetic oligonucleotide
  Sense strand starting at position 3246 of SEQ ID NO: 1562154
aggccuuuagugggucuaa

SEQ ID NO: 1726162 - RNA, 19 nt, Artificial Sequence
  Description of Artificial Sequence: Synthetic oligonucleotide
  Antisense strand to SEQ ID NO: 1726161
uuagacccacuaaaggccu

SEQ ID NO: 1726163 - RNA, 19 nt, Artificial Sequence
  Description of Artificial Sequence: Synthetic oligonucleotide
  Sense strand starting at position 3247 of SEQ ID NO: 1562154
ggccuuuagugggucuaaa

SEQ ID NO: 1726164 - RNA, 19 nt, Artificial Sequence
  Description of Artificial Sequence: Synthetic oligonucleotide
  Antisense strand to SEQ ID NO: 1726163
uuuagacccacuaaaggcc

SEQ ID NO: 1726165 - RNA, 19 nt, Artificial Sequence
  Description of Artificial Sequence: Synthetic oligonucleotide
  Sense strand starting at position 3395 of SEQ ID NO: 1562154
uguuuauccagguguggga

SEQ ID NO: 1726166 - RNA, 19 nt, Artificial Sequence
  Description of Artificial Sequence: Synthetic oligonucleotide
  Antisense strand to SEQ ID NO: 1726165
ucccacaccuggauaaaca

SEQ ID NO: 1726167 - RNA, 19 nt, Artificial Sequence
  Description of Artificial Sequence: Synthetic oligonucleotide
  Sense strand starting at position 3491 of SEQ ID NO: 1562154
auagauguauugggaggau

SEQ ID NO: 1726168 - RNA, 19 nt, Artificial Sequence
  Description of Artificial Sequence: Synthetic oligonucleotide
  Antisense strand to SEQ ID NO: 1726167
auccucccaauacaucuau

SEQ ID NO: 1726169 - RNA, 19 nt, Artificial Sequence
  Description of Artificial Sequence: Synthetic oligonucleotide
  Sense strand starting at position 3581 of SEQ ID NO: 1562154
acaucuuuguccuuaagag

SEQ ID NO: 1726170 - RNA, 19 nt, Artificial Sequence
  Description of Artificial Sequence: Synthetic oligonucleotide
  Antisense strand to SEQ ID NO: 1726169
cucuuaaggacaaagaugu

SEQ ID NO: 1726171 - RNA, 19 nt, Artificial Sequence
  Description of Artificial Sequence: Synthetic oligonucleotide
  Sense strand starting at position 3633 of SEQ ID NO: 1562154
gcaccuuugucauucuacu

SEQ ID NO: 1726172 - RNA, 19 nt, Artificial Sequence
  Description of Artificial Sequence: Synthetic oligonucleotide
  Antisense strand to SEQ ID NO: 1726171
aguagaaugacaaaggugc

SEQ ID NO: 1726173 - RNA, 19 nt, Artificial Sequence
  Description of Artificial Sequence: Synthetic oligonucleotide
  Sense strand starting at position 3654 of SEQ ID NO: 1562154
gugccauccuuugguggaa

SEQ ID NO: 1726174 - RNA, 19 nt, Artificial Sequence
  Description of Artificial Sequence: Synthetic oligonucleotide
  Antisense strand to SEQ ID NO: 1726173
uuccaccaaaggauggcac

SEQ ID NO: 1726175 - RNA, 19 nt, Artificial Sequence
  Description of Artificial Sequence: Synthetic oligonucleotide
  Sense strand starting at position 3731 of SEQ ID NO: 1562154
aacccuggucuugggaaga

SEQ ID NO: 1726176 - RNA, 19 nt, Artificial Sequence
  Description of Artificial Sequence: Synthetic oligonucleotide
  Antisense strand to SEQ ID NO: 1726175
ucuucccaagaccaggguu

SEQ ID NO: 1726177 - RNA, 19 nt, Artificial Sequence
  Description of Artificial Sequence: Synthetic oligonucleotide
  Sense strand starting at position 3756 of SEQ ID NO: 1562154
gguggcuccucugcagaua

SEQ ID NO: 1726178 - RNA, 19 nt, Artificial Sequence
  Description of Artificial Sequence: Synthetic oligonucleotide
  Antisense strand to SEQ ID NO: 1726177
uaucugcagaggagccacc

SEQ ID NO: 1726179 - RNA, 19 nt, Artificial Sequence
  Description of Artificial Sequence: Synthetic oligonucleotide
  Sense strand starting at position 3842 of SEQ ID NO: 1562154
guccucucugcccauugaa

SEQ ID NO: 1726180 - RNA, 19 nt, Artificial Sequence
  Description of Artificial Sequence: Synthetic oligonucleotide
  Antisense strand to SEQ ID NO: 1726179
uucaaugggcagagaggac

SEQ ID NO: 1726181 - RNA, 19 nt, Artificial Sequence
  Description of Artificial Sequence: Synthetic oligonucleotide
  Sense strand starting at position 3873 of SEQ ID NO: 1562154
ucccuuuccugagaaagua

SEQ ID NO: 1726182 - RNA, 19 nt, Artificial Sequence
  Description of Artificial Sequence: Synthetic oligonucleotide
  Antisense strand to SEQ ID NO: 1726181
uacuuucucaggaaaggga

SEQ ID NO: 1726183 - RNA, 19 nt, Artificial Sequence
  Description of Artificial Sequence: Synthetic oligonucleotide
  Sense strand starting at position 3900 of SEQ ID NO: 1562154
uguccugccucauguguga

SEQ ID NO: 1726184 - RNA, 19 nt, Artificial Sequence
  Description of Artificial Sequence: Synthetic oligonucleotide
  Antisense strand to SEQ ID NO: 1726183
ucacacaugaggcaggaca

SEQ ID NO: 1726185 - RNA, 19 nt, Artificial Sequence
  Description of Artificial Sequence: Synthetic oligonucleotide
  Sense strand starting at position 75 of SEQ ID NO: 1562155
gccgcauguguguuaagag

SEQ ID NO: 1726186 - RNA, 19 nt, Artificial Sequence
  Description of Artificial Sequence: Synthetic oligonucleotide
  Antisense strand to SEQ ID NO: 1726185
cucuuaacacacaugcggc

SEQ ID NO: 1726187 - RNA, 19 nt, Artificial Sequence
  Description of Artificial Sequence: Synthetic oligonucleotide
  Sense strand starting at position 83 of SEQ ID NO: 1562155
uguguuaagagauggguau

SEQ ID NO: 1726188 - RNA, 19 nt, Artificial Sequence
  Description of Artificial Sequence: Synthetic oligonucleotide
  Antisense strand to SEQ ID NO: 1726187
auacccaucucuuaacaca

SEQ ID NO: 1726189 - RNA, 19 nt, Artificial Sequence
  Description of Artificial Sequence: Synthetic oligonucleotide
  Sense strand starting at position 84 of SEQ ID NO: 1562155
guguuaagagauggguaua

SEQ ID NO: 1726190 - RNA, 19 nt, Artificial Sequence
  Description of Artificial Sequence: Synthetic oligonucleotide
  Antisense strand to SEQ ID NO: 1726189
uauacccaucucuuaacac

SEQ ID NO: 1726191 - RNA, 19 nt, Artificial Sequence
  Description of Artificial Sequence: Synthetic oligonucleotide
  Sense strand starting at position 85 of SEQ ID NO: 1562155
uguuaagagauggguauaa

SEQ ID NO: 1726192 - RNA, 19 nt, Artificial Sequence
  Description of Artificial Sequence: Synthetic oligonucleotide
  Antisense strand to SEQ ID NO: 1726191
uuauacccaucucuuaaca

SEQ ID NO: 1726193 - RNA, 19 nt, Artificial Sequence
  Description of Artificial Sequence: Synthetic oligonucleotide
  Sense strand starting at position 218 of SEQ ID NO: 1562155
aguugcauuuccuuagagu

SEQ ID NO: 1726194 - RNA, 19 nt, Artificial Sequence
  Description of Artificial Sequence: Synthetic oligonucleotide
  Antisense strand to SEQ ID NO: 1726193
acucuaaggaaaugcaacu

SEQ ID NO: 1726195 - RNA, 19 nt, Artificial Sequence
  Description of Artificial Sequence: Synthetic oligonucleotide
  Sense strand starting at position 221 of SEQ ID NO: 1562155
ugcauuuccuuagaguaca

SEQ ID NO: 1726196 - RNA, 19 nt, Artificial Sequence
  Description of Artificial Sequence: Synthetic oligonucleotide
  Antisense strand to SEQ ID NO: 1726195
uguacucuaaggaaaugca

SEQ ID NO: 1726197 - RNA, 19 nt, Artificial Sequence
  Description of Artificial Sequence: Synthetic oligonucleotide
  Sense strand starting at position 488 of SEQ ID NO: 1562155
agagaagugugaccuuaaa

SEQ ID NO: 1726198 - RNA, 19 nt, Artificial Sequence
  Description of Artificial Sequence: Synthetic oligonucleotide
  Antisense strand to SEQ ID NO: 1726197
uuuaaggucacacuucucu

SEQ ID NO: 1726199 - RNA, 19 nt, Artificial Sequence
  Description of Artificial Sequence: Synthetic oligonucleotide
  Sense strand starting at position 551 of SEQ ID NO: 1562155
cguaucuucgcggaacaga

SEQ ID NO: 1726200 - RNA, 19 nt, Artificial Sequence
  Description of Artificial Sequence: Synthetic oligonucleotide
  Antisense strand to SEQ ID NO: 1726199
ucuguuccgcgaagauacg

SEQ ID NO: 1726201 - RNA, 19 nt, Artificial Sequence
  Description of Artificial Sequence: Synthetic oligonucleotide
  Sense strand starting at position 647 of SEQ ID NO: 1562155
ggugaauauaagcaaagcu

SEQ ID NO: 1726202 - RNA, 19 nt, Artificial Sequence
  Description of Artificial Sequence: Synthetic oligonucleotide
  Antisense strand to SEQ ID NO: 1726201
agcuuugcuuauauucacc

SEQ ID NO: 1726203 - RNA, 19 nt, Artificial Sequence
  Description of Artificial Sequence: Synthetic oligonucleotide
  Sense strand starting at position 678 of SEQ ID NO: 1562155
aacuuaucgagguguagag

SEQ ID NO: 1726204 - RNA, 19 nt, Artificial Sequence
  Description of Artificial Sequence: Synthetic oligonucleotide
  Antisense strand to SEQ ID NO: 1726203
cucuacaccucgauaaguu

SEQ ID NO: 1726205 - RNA, 19 nt, Artificial Sequence
  Description of Artificial Sequence: Synthetic oligonucleotide
  Sense strand starting at position 753 of SEQ ID NO: 1562155
cacagcaagugcucuagau

SEQ ID NO: 1726206 - RNA, 19 nt, Artificial Sequence
  Description of Artificial Sequence: Synthetic oligonucleotide
  Antisense strand to SEQ ID NO: 1726205
aucuagagcacuugcugug

SEQ ID NO: 1726207 - RNA, 19 nt, Artificial Sequence
  Description of Artificial Sequence: Synthetic oligonucleotide
  Sense strand starting at position 755 of SEQ ID NO: 1562155
cagcaagugcucuagauag

SEQ ID NO: 1726208 - RNA, 19 nt, Artificial Sequence
  Description of Artificial Sequence: Synthetic oligonucleotide
  Antisense strand to SEQ ID NO: 1726207
cuaucuagagcacuugcug

SEQ ID NO: 1726209 - RNA, 19 nt, Artificial Sequence
  Description of Artificial Sequence: Synthetic oligonucleotide
  Sense strand starting at position 757 of SEQ ID NO: 1562155
gcaagugcucuagauaggu

SEQ ID NO: 1726210 - RNA, 19 nt, Artificial Sequence
  Description of Artificial Sequence: Synthetic oligonucleotide
  Antisense strand to SEQ ID NO: 1726209
accuaucuagagcacuugc

SEQ ID NO: 1726211 - RNA, 19 nt, Artificial Sequence
  Description of Artificial Sequence: Synthetic oligonucleotide
  Sense strand starting at position 765 of SEQ ID NO: 1562155
ucuagauagguuugcucaa

SEQ ID NO: 1726212 - RNA, 19 nt, Artificial Sequence
  Description of Artificial Sequence: Synthetic oligonucleotide
  Antisense strand to SEQ ID NO: 1726211
uugagcaaaccuaucuaga

SEQ ID NO: 1726213 - RNA, 19 nt, Artificial Sequence
  Description of Artificial Sequence: Synthetic oligonucleotide
  Sense strand starting at position 766 of SEQ ID NO: 1562155
cuagauagguuugcucaac

SEQ ID NO: 1726214 - RNA, 19 nt, Artificial Sequence
  Description of Artificial Sequence: Synthetic oligonucleotide
  Antisense strand to SEQ ID NO: 1726213
guugagcaaaccuaucuag

SEQ ID NO: 1726215 - RNA, 19 nt, Artificial Sequence
  Description of Artificial Sequence: Synthetic oligonucleotide
  Sense strand starting at position 767 of SEQ ID NO: 1562155
uagauagguuugcucaacu

SEQ ID NO: 1726216 - RNA, 19 nt, Artificial Sequence
  Description of Artificial Sequence: Synthetic oligonucleotide
  Antisense strand to SEQ ID NO: 1726215
aguugagcaaaccuaucua

SEQ ID NO: 1726217 - RNA, 19 nt, Artificial Sequence
  Description of Artificial Sequence: Synthetic oligonucleotide
  Sense strand starting at position 1131 of SEQ ID NO: 1562155
auaaauuaugcagacgguu

SEQ ID NO: 1726218 - RNA, 19 nt, Artificial Sequence
  Description of Artificial Sequence: Synthetic oligonucleotide
  Antisense strand to SEQ ID NO: 1726217
aaccgucugcauaauuuau

SEQ ID NO: 1726219 - RNA, 19 nt, Artificial Sequence
  Description of Artificial Sequence: Synthetic oligonucleotide
  Sense strand starting at position 1328 of SEQ ID NO: 1562155
ccgugcucuuaaccacuaa

SEQ ID NO: 1726220 - RNA, 19 nt, Artificial Sequence
  Description of Artificial Sequence: Synthetic oligonucleotide
  Antisense strand to SEQ ID NO: 1726219
uuagugguuaagagcacgg

SEQ ID NO: 1726221 - RNA, 19 nt, Artificial Sequence
  Description of Artificial Sequence: Synthetic oligonucleotide
  Sense strand starting at position 1438 of SEQ ID NO: 1562155
cgggaauaacuucggcauc

SEQ ID NO: 1726222 - RNA, 19 nt, Artificial Sequence
  Description of Artificial Sequence: Synthetic oligonucleotide
  Antisense strand to SEQ ID NO: 1726221
gaugccgaaguuauucccg

SEQ ID NO: 1726223 - RNA, 19 nt, Artificial Sequence
  Description of Artificial Sequence: Synthetic oligonucleotide
  Sense strand starting at position 2212 of SEQ ID NO: 1562155
uguaguucuggugggaguu

SEQ ID NO: 1726224 - RNA, 19 nt, Artificial Sequence
  Description of Artificial Sequence: Synthetic oligonucleotide
  Antisense strand to SEQ ID NO: 1726223
aacucccaccagaacuaca

SEQ ID NO: 1726225 - RNA, 19 nt, Artificial Sequence
  Description of Artificial Sequence: Synthetic oligonucleotide
  Sense strand starting at position 2213 of SEQ ID NO: 1562155
guaguucuggugggaguuu

SEQ ID NO: 1726226 - RNA, 19 nt, Artificial Sequence
  Description of Artificial Sequence: Synthetic oligonucleotide
  Antisense strand to SEQ ID NO: 1726225
aaacucccaccagaacuac

SEQ ID NO: 1726227 - RNA, 19 nt, Artificial Sequence
  Description of Artificial Sequence: Synthetic oligonucleotide
  Sense strand starting at position 2397 of SEQ ID NO: 1562155
auuaaaugcuugccauaug

SEQ ID NO: 1726228 - RNA, 19 nt, Artificial Sequence
  Description of Artificial Sequence: Synthetic oligonucleotide
  Antisense strand to SEQ ID NO: 1726227
cauauggcaagcauuuaau

SEQ ID NO: 1726229 - RNA, 19 nt, Artificial Sequence
  Description of Artificial Sequence: Synthetic oligonucleotide
  Sense strand starting at position 2436 of SEQ ID NO: 1562155
uaagaauguaguggugaac

SEQ ID NO: 1726230 - RNA, 19 nt, Artificial Sequence
  Description of Artificial Sequence: Synthetic oligonucleotide
  Antisense strand to SEQ ID NO: 1726229
guucaccacuacauucuua

SEQ ID NO: 1726231 - RNA, 19 nt, Artificial Sequence
  Description of Artificial Sequence: Synthetic oligonucleotide
  Sense strand starting at position 2439 of SEQ ID NO: 1562155
gaauguaguggugaacuga

SEQ ID NO: 1726232 - RNA, 19 nt, Artificial Sequence
  Description of Artificial Sequence: Synthetic oligonucleotide
  Antisense strand to SEQ ID NO: 1726231
ucaguucaccacuacauuc

SEQ ID NO: 1726233 - RNA, 19 nt, Artificial Sequence
  Description of Artificial Sequence: Synthetic oligonucleotide
  Sense strand starting at position 2478 of SEQ ID NO: 1562155
gagcuuacauucuugugua

SEQ ID NO: 1726234 - RNA, 19 nt, Artificial Sequence
  Description of Artificial Sequence: Synthetic oligonucleotide
  Antisense strand to SEQ ID NO: 1726233
uacacaagaauguaagcuc

SEQ ID NO: 1726235 - RNA, 19 nt, Artificial Sequence
  Description of Artificial Sequence: Synthetic oligonucleotide
  Sense strand starting at position 2482 of SEQ ID NO: 1562155
uuacauucuuguguaagua

SEQ ID NO: 1726236 - RNA, 19 nt, Artificial Sequence
  Description of Artificial Sequence: Synthetic oligonucleotide
  Antisense strand to SEQ ID NO: 1726235
uacuuacacaagaauguaa

SEQ ID NO: 1726237 - RNA, 19 nt, Artificial Sequence
  Description of Artificial Sequence: Synthetic oligonucleotide
  Sense strand starting at position 2876 of SEQ ID NO: 1562155
cgagaagugccagauuacu

SEQ ID NO: 1726238 - RNA, 19 nt, Artificial Sequence
  Description of Artificial Sequence: Synthetic oligonucleotide
  Antisense strand to SEQ ID NO: 1726237
aguaaucuggcacuucucg

SEQ ID NO: 1726239 - RNA, 19 nt, Artificial Sequence
  Description of Artificial Sequence: Synthetic oligonucleotide
  Sense strand starting at position 2882 of SEQ ID NO: 1562155
gugccagauuacuauuuau

SEQ ID NO: 1726240 - RNA, 19 nt, Artificial Sequence
  Description of Artificial Sequence: Synthetic oligonucleotide
  Antisense strand to SEQ ID NO: 1726239
auaaauaguaaucuggcac

SEQ ID NO: 1726241 - RNA, 19 nt, Artificial Sequence
  Description of Artificial Sequence: Synthetic oligonucleotide
  Sense strand starting at position 2913 of SEQ ID NO: 1562155
uagauaaacuaagugguuu

SEQ ID NO: 1726242 - RNA, 19 nt, Artificial Sequence
  Description of Artificial Sequence: Synthetic oligonucleotide
  Antisense strand to SEQ ID NO: 1726241
aaaccacuuaguuuaucua

SEQ ID NO: 1726243 - RNA, 19 nt, Artificial Sequence
  Description of Artificial Sequence: Synthetic oligonucleotide
  Sense strand starting at position 2939 of SEQ ID NO: 1562155
cuguauuguaugggagguu

SEQ ID NO: 1726244 - RNA, 19 nt, Artificial Sequence
  Description of Artificial Sequence: Synthetic oligonucleotide
  Antisense strand to SEQ ID NO: 1726243
aaccucccauacaauacag

SEQ ID NO: 1726245 - RNA, 19 nt, Artificial Sequence
  Description of Artificial Sequence: Synthetic oligonucleotide
  Sense strand starting at position 3305 of SEQ ID NO: 1562155
aauuaugcucgcguuguga

SEQ ID NO: 1726246 - RNA, 19 nt, Artificial Sequence
  Description of Artificial Sequence: Synthetic oligonucleotide
  Antisense strand to SEQ ID NO: 1726245
ucacaacgcgagcauaauu

SEQ ID NO: 1726247 - RNA, 19 nt, Artificial Sequence
  Description of Artificial Sequence: Synthetic oligonucleotide
  Sense strand starting at position 3329 of SEQ ID NO: 1562155
ccaagaaacugagaaugaa

SEQ ID NO: 1726248 - RNA, 19 nt, Artificial Sequence
  Description of Artificial Sequence: Synthetic oligonucleotide
  Antisense strand to SEQ ID NO: 1726247
uucauucucaguuucuugg

SEQ ID NO: 1726249 - RNA, 19 nt, Artificial Sequence
  Description of Artificial Sequence: Synthetic oligonucleotide
  Sense strand starting at position 3465 of SEQ ID NO: 1562155
cucucuugccaacggaaua

SEQ ID NO: 1726250 - RNA, 19 nt, Artificial Sequence
  Description of Artificial Sequence: Synthetic oligonucleotide
  Antisense strand to SEQ ID NO: 1726249
uauuccguuggcaagagag

SEQ ID NO: 1726251 - RNA, 19 nt, Artificial Sequence
  Description of Artificial Sequence: Synthetic oligonucleotide
  Sense strand starting at position 3470 of SEQ ID NO: 1562155
uugccaacggaauauaaau

SEQ ID NO: 1726252 - RNA, 19 nt, Artificial Sequence
  Description of Artificial Sequence: Synthetic oligonucleotide
  Antisense strand to SEQ ID NO: 1726251
auuuauauuccguuggcaa

SEQ ID NO: 1726253 - RNA, 19 nt, Artificial Sequence
  Description of Artificial Sequence: Synthetic oligonucleotide
  Sense strand starting at position 3574 of SEQ ID NO: 1562155
uuacauugcuucuugugaa

SEQ ID NO: 1726254 - RNA, 19 nt, Artificial Sequence
  Description of Artificial Sequence: Synthetic oligonucleotide
  Antisense strand to SEQ ID NO: 1726253
uucacaagaagcaauguaa

SEQ ID NO: 1726255 - RNA, 19 nt, Artificial Sequence
  Description of Artificial Sequence: Synthetic oligonucleotide
  Sense strand starting at position 3692 of SEQ ID NO: 1562155
uguccagcccucugcuaaa

SEQ ID NO: 1726256 - RNA, 19 nt, Artificial Sequence
  Description of Artificial Sequence: Synthetic oligonucleotide
  Antisense strand to SEQ ID NO: 1726255
uuuagcagagggcuggaca

SEQ ID NO: 1726257 - RNA, 19 nt, Artificial Sequence
  Description of Artificial Sequence: Synthetic oligonucleotide
  Sense strand starting at position 3747 of SEQ ID NO: 1562155
ucccauaccuccuugggua

SEQ ID NO: 1726258 - RNA, 19 nt, Artificial Sequence
  Description of Artificial Sequence: Synthetic oligonucleotide
  Antisense strand to SEQ ID NO: 1726257
uacccaaggagguauggga

SEQ ID NO: 1726259 - RNA, 19 nt, Artificial Sequence
  Description of Artificial Sequence: Synthetic oligonucleotide
  Sense strand starting at position 3748 of SEQ ID NO: 1562155
cccauaccuccuuggguaa

SEQ ID NO: 1726260 - RNA, 19 nt, Artificial Sequence
  Description of Artificial Sequence: Synthetic oligonucleotide
  Antisense strand to SEQ ID NO: 1726259
uuacccaaggagguauggg

SEQ ID NO: 1726261 - RNA, 19 nt, Artificial Sequence
  Description of Artificial Sequence: Synthetic oligonucleotide
  Sense strand starting at position 3749 of SEQ ID NO: 1562155
ccauaccuccuuggguaaa

SEQ ID NO: 1726262 - RNA, 19 nt, Artificial Sequence
  Description of Artificial Sequence: Synthetic oligonucleotide
  Antisense strand to SEQ ID NO: 1726261
uuuacccaaggagguaugg

SEQ ID NO: 1726263 - RNA, 19 nt, Artificial Sequence
  Description of Artificial Sequence: Synthetic oligonucleotide
  Sense strand starting at position 3815 of SEQ ID NO: 1562155
agacaaucucgucaaaggu

SEQ ID NO: 1726264 - RNA, 19 nt, Artificial Sequence
  Description of Artificial Sequence: Synthetic oligonucleotide
  Antisense strand to SEQ ID NO: 1726263
accuuugacgagauugucu

SEQ ID NO: 1726265 - RNA, 19 nt, Artificial Sequence
  Description of Artificial Sequence: Synthetic oligonucleotide
  Sense strand starting at position 248 of SEQ ID NO: 1562156
gcaauucuugagcacuuau

SEQ ID NO: 1726266 - RNA, 19 nt, Artificial Sequence
  Description of Artificial Sequence: Synthetic oligonucleotide
  Antisense strand to SEQ ID NO: 1726265
auaagugcucaagaauugc

SEQ ID NO: 1726267 - RNA, 19 nt, Artificial Sequence
  Description of Artificial Sequence: Synthetic oligonucleotide
  Sense strand starting at position 274 of SEQ ID NO: 1562156
augguuagcacuuaaacga

SEQ ID NO: 1726268 - RNA, 19 nt, Artificial Sequence
  Description of Artificial Sequence: Synthetic oligonucleotide
  Antisense strand to SEQ ID NO: 1726267
ucguuuaagugcuaaccau

SEQ ID NO: 1726269 - RNA, 19 nt, Artificial Sequence
  Description of Artificial Sequence: Synthetic oligonucleotide
  Sense strand starting at position 324 of SEQ ID NO: 1562156
ggcccagggacugaucuua

SEQ ID NO: 1726270 - RNA, 19 nt, Artificial Sequence
  Description of Artificial Sequence: Synthetic oligonucleotide
  Antisense strand to SEQ ID NO: 1726269
uaagaucagucccugggcc

SEQ ID NO: 1726271 - RNA, 19 nt, Artificial Sequence
  Description of Artificial Sequence: Synthetic oligonucleotide
  Sense strand starting at position 1121 of SEQ ID NO: 1562156
ggcgaaagaaucgguuaaa

SEQ ID NO: 1726272 - RNA, 19 nt, Artificial Sequence
  Description of Artificial Sequence: Synthetic oligonucleotide
  Antisense strand to SEQ ID NO: 1726271
uuuaaccgauucuuucgcc

SEQ ID NO: 1726273 - RNA, 19 nt, Artificial Sequence
  Description of Artificial Sequence: Synthetic oligonucleotide
  Sense strand starting at position 1341 of SEQ ID NO: 1562156
cucuguuagcuugucaugu

SEQ ID NO: 1726274 - RNA, 19 nt, Artificial Sequence
  Description of Artificial Sequence: Synthetic oligonucleotide
  Antisense strand to SEQ ID NO: 1726273
acaugacaagcuaacagag

SEQ ID NO: 1726275 - RNA, 19 nt, Artificial Sequence
  Description of Artificial Sequence: Synthetic oligonucleotide
  Sense strand starting at position 1351 of SEQ ID NO: 1562156
uugucauguagcgauagga

SEQ ID NO: 1726276 - RNA, 19 nt, Artificial Sequence
  Description of Artificial Sequence: Synthetic oligonucleotide
  Antisense strand to SEQ ID NO: 1726275
uccuaucgcuacaugacaa

SEQ ID NO: 1726277 - RNA, 19 nt, Artificial Sequence
  Description of Artificial Sequence: Synthetic oligonucleotide
  Sense strand starting at position 1419 of SEQ ID NO: 1562156
cgauuuggccggcggaaau

SEQ ID NO: 1726278 - RNA, 19 nt, Artificial Sequence
  Description of Artificial Sequence: Synthetic oligonucleotide
  Antisense strand to SEQ ID NO: 1726277
auuuccgccggccaaaucg

SEQ ID NO: 1726279 - RNA, 19 nt, Artificial Sequence
  Description of Artificial Sequence: Synthetic oligonucleotide
  Sense strand starting at position 1489 of SEQ ID NO: 1562156
guguucgcccggguguaaa

SEQ ID NO: 1726280 - RNA, 19 nt, Artificial Sequence
  Description of Artificial Sequence: Synthetic oligonucleotide
  Antisense strand to SEQ ID NO: 1726279
uuuacacccgggcgaacac

SEQ ID NO: 1726281 - RNA, 19 nt, Artificial Sequence
  Description of Artificial Sequence: Synthetic oligonucleotide
  Sense strand starting at position 1501 of SEQ ID NO: 1562156
guguaaacaguccauugaa

SEQ ID NO: 1726282 - RNA, 19 nt, Artificial Sequence
  Description of Artificial Sequence: Synthetic oligonucleotide
  Antisense strand to SEQ ID NO: 1726281
uucaauggacuguuuacac

SEQ ID NO: 1726283 - RNA, 19 nt, Artificial Sequence
  Description of Artificial Sequence: Synthetic oligonucleotide
  Sense strand starting at position 1516 of SEQ ID NO: 1562156
ugaauuaagcccuagcgga

SEQ ID NO: 1726284 - RNA, 19 nt, Artificial Sequence
  Description of Artificial Sequence: Synthetic oligonucleotide
  Antisense strand to SEQ ID NO: 1726283
uccgcuagggcuuaauuca

SEQ ID NO: 1726285 - RNA, 19 nt, Artificial Sequence
  Description of Artificial Sequence: Synthetic oligonucleotide
  Sense strand starting at position 2234 of SEQ ID NO: 1562156
cgcaguaggcgccuaauaa

SEQ ID NO: 1726286 - RNA, 19 nt, Artificial Sequence
  Description of Artificial Sequence: Synthetic oligonucleotide
  Antisense strand to SEQ ID NO: 1726285
uuauuaggcgccuacugcg

SEQ ID NO: 1726287 - RNA, 19 nt, Artificial Sequence
  Description of Artificial Sequence: Synthetic oligonucleotide
  Sense strand starting at position 2251 of SEQ ID NO: 1562156
aaauacugacugggugauu

SEQ ID NO: 1726288 - RNA, 19 nt, Artificial Sequence
  Description of Artificial Sequence: Synthetic oligonucleotide
  Antisense strand to SEQ ID NO: 1726287
aaucacccagucaguauuu

SEQ ID NO: 1726289 - RNA, 19 nt, Artificial Sequence
  Description of Artificial Sequence: Synthetic oligonucleotide
  Sense strand starting at position 2351 of SEQ ID NO: 1562156
agugaucuugugcaaauca

SEQ ID NO: 1726290 - RNA, 19 nt, Artificial Sequence
  Description of Artificial Sequence: Synthetic oligonucleotide
  Antisense strand to SEQ ID NO: 1726289
ugauuugcacaagaucacu

SEQ ID NO: 1726291 - RNA, 19 nt, Artificial Sequence
  Description of Artificial Sequence: Synthetic oligonucleotide
  Sense strand starting at position 2359 of SEQ ID NO: 1562156
ugugcaaaucauugaccca

SEQ ID NO: 1726292 - RNA, 19 nt, Artificial Sequence
  Description of Artificial Sequence: Synthetic oligonucleotide
  Antisense strand to SEQ ID NO: 1726291
ugggucaaugauuugcaca

SEQ ID NO: 1726293 - RNA, 19 nt, Artificial Sequence
  Description of Artificial Sequence: Synthetic oligonucleotide
  Sense strand starting at position 2415 of SEQ ID NO: 1562156
uggauagaaugggcuuuaa

SEQ ID NO: 1726294 - RNA, 19 nt, Artificial Sequence
  Description of Artificial Sequence: Synthetic oligonucleotide
  Antisense strand to SEQ ID NO: 1726293
uuaaagcccauucuaucca

SEQ ID NO: 1726295 - RNA, 19 nt, Artificial Sequence
  Description of Artificial Sequence: Synthetic oligonucleotide
  Sense strand starting at position 2425 of SEQ ID NO: 1562156
gggcuuuaauucccaggaa

SEQ ID NO: 1726296 - RNA, 19 nt, Artificial Sequence
  Description of Artificial Sequence: Synthetic oligonucleotide
  Antisense strand to SEQ ID NO: 1726295
uuccugggaauuaaagccc

SEQ ID NO: 1726297 - RNA, 19 nt, Artificial Sequence
  Description of Artificial Sequence: Synthetic oligonucleotide
  Sense strand starting at position 2428 of SEQ ID NO: 1562156
cuuuaauucccaggaauga

SEQ ID NO: 1726298 - RNA, 19 nt, Artificial Sequence
  Description of Artificial Sequence: Synthetic oligonucleotide
  Antisense strand to SEQ ID NO: 1726297
ucauuccugggaauuaaag

SEQ ID NO: 1726299 - RNA, 19 nt, Artificial Sequence
  Description of Artificial Sequence: Synthetic oligonucleotide
  Sense strand starting at position 2573 of SEQ ID NO: 1562156
gggugcccaguguuuguua

SEQ ID NO: 1726300 - RNA, 19 nt, Artificial Sequence
  Description of Artificial Sequence: Synthetic oligonucleotide
  Antisense strand to SEQ ID NO: 1726299
uaacaaacacugggcaccc

SEQ ID NO: 1726301 - RNA, 19 nt, Artificial Sequence
  Description of Artificial Sequence: Synthetic oligonucleotide
  Sense strand starting at position 2597 of SEQ ID NO: 1562156
aucuacagauguuuauuga

SEQ ID NO: 1726302 - RNA, 19 nt, Artificial Sequence
  Description of Artificial Sequence: Synthetic oligonucleotide
  Antisense strand to SEQ ID NO: 1726301
ucaauaaacaucuguagau

SEQ ID NO: 1726303 - RNA, 19 nt, Artificial Sequence
  Description of Artificial Sequence: Synthetic oligonucleotide
  Sense strand starting at position 2735 of SEQ ID NO: 1562156
gggcaaguuagucaaccuu

SEQ ID NO: 1726304 - RNA, 19 nt, Artificial Sequence
  Description of Artificial Sequence: Synthetic oligonucleotide
  Antisense strand to SEQ ID NO: 1726303
aagguugacuaacuugccc

SEQ ID NO: 1726305 - RNA, 19 nt, Artificial Sequence
  Description of Artificial Sequence: Synthetic oligonucleotide
  Sense strand starting at position 2757 of SEQ ID NO: 1562156
guguauuuguuccuuaccu

SEQ ID NO: 1726306 - RNA, 19 nt, Artificial Sequence
  Description of Artificial Sequence: Synthetic oligonucleotide
  Antisense strand to SEQ ID NO: 1726305
agguaaggaacaaauacac

SEQ ID NO: 1726307 - RNA, 19 nt, Artificial Sequence
  Description of Artificial Sequence: Synthetic oligonucleotide
  Sense strand starting at position 2759 of SEQ ID NO: 1562156
guauuuguuccuuaccugu

SEQ ID NO: 1726308 - RNA, 19 nt, Artificial Sequence
  Description of Artificial Sequence: Synthetic oligonucleotide
  Antisense strand to SEQ ID NO: 1726307
acagguaaggaacaaauac

SEQ ID NO: 1726309 - RNA, 19 nt, Artificial Sequence
  Description of Artificial Sequence: Synthetic oligonucleotide
  Sense strand starting at position 2765 of SEQ ID NO: 1562156
guuccuuaccuguaagaag

SEQ ID NO: 1726310 - RNA, 19 nt, Artificial Sequence
  Description of Artificial Sequence: Synthetic oligonucleotide
  Antisense strand to SEQ ID NO: 1726309
cuucuuacagguaaggaac

SEQ ID NO: 1726311 - RNA, 19 nt, Artificial Sequence
  Description of Artificial Sequence: Synthetic oligonucleotide
  Sense strand starting at position 2792 of SEQ ID NO: 1562156
agguuauacagguaaagca

SEQ ID NO: 1726312 - RNA, 19 nt, Artificial Sequence
  Description of Artificial Sequence: Synthetic oligonucleotide
  Antisense strand to SEQ ID NO: 1726311
ugcuuuaccuguauaaccu

SEQ ID NO: 1726313 - RNA, 19 nt, Artificial Sequence
  Description of Artificial Sequence: Synthetic oligonucleotide
  Sense strand starting at position 2908 of SEQ ID NO: 1562156
aagagugcucacuggauac

SEQ ID NO: 1726314 - RNA, 19 nt, Artificial Sequence
  Description of Artificial Sequence: Synthetic oligonucleotide
  Antisense strand to SEQ ID NO: 1726313
guauccagugagcacucuu

SEQ ID NO: 1726315 - RNA, 19 nt, Artificial Sequence
  Description of Artificial Sequence: Synthetic oligonucleotide
  Sense strand starting at position 2940 of SEQ ID NO: 1562156
uaauguauuuggucgcuga

SEQ ID NO: 1726316 - RNA, 19 nt, Artificial Sequence
  Description of Artificial Sequence: Synthetic oligonucleotide
  Antisense strand to SEQ ID NO: 1726315
ucagcgaccaaauacauua

SEQ ID NO: 1726317 - RNA, 19 nt, Artificial Sequence
  Description of Artificial Sequence: Synthetic oligonucleotide
  Sense strand starting at position 2941 of SEQ ID NO: 1562156
aauguauuuggucgcugaa

SEQ ID NO: 1726318 - RNA, 19 nt, Artificial Sequence
  Description of Artificial Sequence: Synthetic oligonucleotide
  Antisense strand to SEQ ID NO: 1726317
uucagcgaccaaauacauu

SEQ ID NO: 1726319 - RNA, 19 nt, Artificial Sequence
  Description of Artificial Sequence: Synthetic oligonucleotide
  Sense strand starting at position 3120 of SEQ ID NO: 1562156
uguggauaucuauauggua

SEQ ID NO: 1726320 - RNA, 19 nt, Artificial Sequence
  Description of Artificial Sequence: Synthetic oligonucleotide
  Antisense strand to SEQ ID NO: 1726319
uaccauauagauauccaca

SEQ ID NO: 1726321 - RNA, 19 nt, Artificial Sequence
  Description of Artificial Sequence: Synthetic oligonucleotide
  Sense strand starting at position 3161 of SEQ ID NO: 1562156
caguauacgguauauagau

SEQ ID NO: 1726322 - RNA, 19 nt, Artificial Sequence
  Description of Artificial Sequence: Synthetic oligonucleotide
  Antisense strand to SEQ ID NO: 1726321
aucuauauaccguauacug

SEQ ID NO: 1726323 - RNA, 19 nt, Artificial Sequence
  Description of Artificial Sequence: Synthetic oligonucleotide
  Sense strand starting at position 3163 of SEQ ID NO: 1562156
guauacgguauauagauau

SEQ ID NO: 1726324 - RNA, 19 nt, Artificial Sequence
  Description of Artificial Sequence: Synthetic oligonucleotide
  Antisense strand to SEQ ID NO: 1726323
auaucuauauaccguauac

SEQ ID NO: 1726325 - RNA, 19 nt, Artificial Sequence
  Description of Artificial Sequence: Synthetic oligonucleotide
  Sense strand starting at position 3303 of SEQ ID NO: 1562156
gcauaaucucaguacagug

SEQ ID NO: 1726326 - RNA, 19 nt, Artificial Sequence
  Description of Artificial Sequence: Synthetic oligonucleotide
  Antisense strand to SEQ ID NO: 1726325
cacuguacugagauuaugc

SEQ ID NO: 1726327 - RNA, 19 nt, Artificial Sequence
  Description of Artificial Sequence: Synthetic oligonucleotide
  Sense strand starting at position 3451 of SEQ ID NO: 1562156
cguugcacugaguugucau

SEQ ID NO: 1726328 - RNA, 19 nt, Artificial Sequence
  Description of Artificial Sequence: Synthetic oligonucleotide
  Antisense strand to SEQ ID NO: 1726327
augacaacucagugcaacg

SEQ ID NO: 1726329 - RNA, 19 nt, Artificial Sequence
  Description of Artificial Sequence: Synthetic oligonucleotide
  Sense strand starting at position 3549 of SEQ ID NO: 1562156
aagaauacuggcgaguuau

SEQ ID NO: 1726330 - RNA, 19 nt, Artificial Sequence
  Description of Artificial Sequence: Synthetic oligonucleotide
  Antisense strand to SEQ ID NO: 1726329
auaacucgccaguauucuu

SEQ ID NO: 1726331 - RNA, 19 nt, Artificial Sequence
  Description of Artificial Sequence: Synthetic oligonucleotide
  Sense strand starting at position 3568 of SEQ ID NO: 1562156
auuguagaaugucccuaaa

SEQ ID NO: 1726332 - RNA, 19 nt, Artificial Sequence
  Description of Artificial Sequence: Synthetic oligonucleotide
  Antisense strand to SEQ ID NO: 1726331
uuuagggacauucuacaau

SEQ ID NO: 1726333 - RNA, 19 nt, Artificial Sequence
  Description of Artificial Sequence: Synthetic oligonucleotide
  Sense strand starting at position 3661 of SEQ ID NO: 1562156
aucccuugcuauucugaga

SEQ ID NO: 1726334 - RNA, 19 nt, Artificial Sequence
  Description of Artificial Sequence: Synthetic oligonucleotide
  Antisense strand to SEQ ID NO: 1726333
ucucagaauagcaagggau

SEQ ID NO: 1726335 - RNA, 19 nt, Artificial Sequence
  Description of Artificial Sequence: Synthetic oligonucleotide
  Sense strand starting at position 3816 of SEQ ID NO: 1562156
guaguuacacucuaccaua

SEQ ID NO: 1726336 - RNA, 19 nt, Artificial Sequence
  Description of Artificial Sequence: Synthetic oligonucleotide
  Antisense strand to SEQ ID NO: 1726335
uaugguagaguguaacuac

SEQ ID NO: 1726337 - RNA, 19 nt, Artificial Sequence
  Description of Artificial Sequence: Synthetic oligonucleotide
  Sense strand starting at position 3862 of SEQ ID NO: 1562156
uuaaguauucugugggaag

SEQ ID NO: 1726338 - RNA, 19 nt, Artificial Sequence
  Description of Artificial Sequence: Synthetic oligonucleotide
  Antisense strand to SEQ ID NO: 1726337
cuucccacagaauacuuaa

SEQ ID NO: 1726339 - RNA, 19 nt, Artificial Sequence
  Description of Artificial Sequence: Synthetic oligonucleotide
  Sense strand starting at position 3864 of SEQ ID NO: 1562156
aaguauucugugggaagau

SEQ ID NO: 1726340 - RNA, 19 nt, Artificial Sequence
  Description of Artificial Sequence: Synthetic oligonucleotide
  Antisense strand to SEQ ID NO: 1726339
aucuucccacagaauacuu

SEQ ID NO: 1726341 - RNA, 19 nt, Artificial Sequence
  Description of Artificial Sequence: Synthetic oligonucleotide
  Sense strand starting at position 3946 of SEQ ID NO: 1562156
ugauucuugcuugaaacaa

SEQ ID NO: 1726342 - RNA, 19 nt, Artificial Sequence
  Description of Artificial Sequence: Synthetic oligonucleotide
  Antisense strand to SEQ ID NO: 1726341
uuguuucaagcaagaauca

SEQ ID NO: 1726343 - RNA, 19 nt, Artificial Sequence
  Description of Artificial Sequence: Synthetic oligonucleotide
  Sense strand starting at position 3982 of SEQ ID NO: 1562156
uggugaucagaaggucuuu

SEQ ID NO: 1726344 - RNA, 19 nt, Artificial Sequence
  Description of Artificial Sequence: Synthetic oligonucleotide
  Antisense strand to SEQ ID NO: 1726343
aaagaccuucugaucacca

SEQ ID NO: 1726345 - RNA, 19 nt, Artificial Sequence
  Description of Artificial Sequence: Synthetic oligonucleotide
  Sense strand starting at position 606 of SEQ ID NO: 1562157
cgguaagugcaauaugagu

SEQ ID NO: 1726346 - RNA, 19 nt, Artificial Sequence
  Description of Artificial Sequence: Synthetic oligonucleotide
  Antisense strand to SEQ ID NO: 1726345
acucauauugcacuuaccg

SEQ ID NO: 1726347 - RNA, 19 nt, Artificial Sequence
  Description of Artificial Sequence: Synthetic oligonucleotide
  Sense strand starting at position 611 of SEQ ID NO: 1562157
agugcaauaugaguguaau

SEQ ID NO: 1726348 - RNA, 19 nt, Artificial Sequence
  Description of Artificial Sequence: Synthetic oligonucleotide
  Antisense strand to SEQ ID NO: 1726347
auuacacucauauugcacu

SEQ ID NO: 1726349 - RNA, 19 nt, Artificial Sequence
  Description of Artificial Sequence: Synthetic oligonucleotide
  Sense strand starting at position 612 of SEQ ID NO: 1562157
gugcaauaugaguguaaua

SEQ ID NO: 1726350 - RNA, 19 nt, Artificial Sequence
  Description of Artificial Sequence: Synthetic oligonucleotide
  Antisense strand to SEQ ID NO: 1726349
uauuacacucauauugcac

SEQ ID NO: 1726351 - RNA, 19 nt, Artificial Sequence
  Description of Artificial Sequence: Synthetic oligonucleotide
  Sense strand starting at position 711 of SEQ ID NO: 1562157
guuugugcaccucaaacau

SEQ ID NO: 1726352 - RNA, 19 nt, Artificial Sequence
  Description of Artificial Sequence: Synthetic oligonucleotide
  Antisense strand to SEQ ID NO: 1726351
auguuugaggugcacaaac

SEQ ID NO: 1726353 - RNA, 19 nt, Artificial Sequence
  Description of Artificial Sequence: Synthetic oligonucleotide
  Sense strand starting at position 855 of SEQ ID NO: 1562157
gucagacgucucugugaaa

SEQ ID NO: 1726354 - RNA, 19 nt, Artificial Sequence
  Description of Artificial Sequence: Synthetic oligonucleotide
  Antisense strand to SEQ ID NO: 1726353
uuucacagagacgucugac

SEQ ID NO: 1726355 - RNA, 19 nt, Artificial Sequence
  Description of Artificial Sequence: Synthetic oligonucleotide
  Sense strand starting at position 856 of SEQ ID NO: 1562157
ucagacgucucugugaaau

SEQ ID NO: 1726356 - RNA, 19 nt, Artificial Sequence
  Description of Artificial Sequence: Synthetic oligonucleotide
  Antisense strand to SEQ ID NO: 1726355
auuucacagagacgucuga

SEQ ID NO: 1726357 - RNA, 19 nt, Artificial Sequence
  Description of Artificial Sequence: Synthetic oligonucleotide
  Sense strand starting at position 862 of SEQ ID NO: 1562157
gucucugugaaauagaagu

SEQ ID NO: 1726358 - RNA, 19 nt, Artificial Sequence
  Description of Artificial Sequence: Synthetic oligonucleotide
  Antisense strand to SEQ ID NO: 1726357
acuucuauuucacagagac

SEQ ID NO: 1726359 - RNA, 19 nt, Artificial Sequence
  Description of Artificial Sequence: Synthetic oligonucleotide
  Sense strand starting at position 1114 of SEQ ID NO: 1562157
gguucagugacccggagua

SEQ ID NO: 1726360 - RNA, 19 nt, Artificial Sequence
  Description of Artificial Sequence: Synthetic oligonucleotide
  Antisense strand to SEQ ID NO: 1726359
uacuccgggucacugaacc

SEQ ID NO: 1726361 - RNA, 19 nt, Artificial Sequence
  Description of Artificial Sequence: Synthetic oligonucleotide
  Sense strand starting at position 1116 of SEQ ID NO: 1562157
uucagugacccggaguaaa

SEQ ID NO: 1726362 - RNA, 19 nt, Artificial Sequence
  Description of Artificial Sequence: Synthetic oligonucleotide
  Antisense strand to SEQ ID NO: 1726361
uuuacuccgggucacugaa

SEQ ID NO: 1726363 - RNA, 19 nt, Artificial Sequence
  Description of Artificial Sequence: Synthetic oligonucleotide
  Sense strand starting at position 1560 of SEQ ID NO: 1562157
gugagucccugcuuggaua

SEQ ID NO: 1726364 - RNA, 19 nt, Artificial Sequence
  Description of Artificial Sequence: Synthetic oligonucleotide
  Antisense strand to SEQ ID NO: 1726363
uauccaagcagggacucac

SEQ ID NO: 1726365 - RNA, 19 nt, Artificial Sequence
  Description of Artificial Sequence: Synthetic oligonucleotide
  Sense strand starting at position 1657 of SEQ ID NO: 1562157
gcgagugcucccucuaacc

SEQ ID NO: 1726366 - RNA, 19 nt, Artificial Sequence
  Description of Artificial Sequence: Synthetic oligonucleotide
  Antisense strand to SEQ ID NO: 1726365
gguuagagggagcacucgc

SEQ ID NO: 1726367 - RNA, 19 nt, Artificial Sequence
  Description of Artificial Sequence: Synthetic oligonucleotide
  Sense strand starting at position 1684 of SEQ ID NO: 1562157
gucuaaccuccuuagcaga

SEQ ID NO: 1726368 - RNA, 19 nt, Artificial Sequence
  Description of Artificial Sequence: Synthetic oligonucleotide
  Antisense strand to SEQ ID NO: 1726367
ucugcuaaggagguuagac

SEQ ID NO: 1726369 - RNA, 19 nt, Artificial Sequence
  Description of Artificial Sequence: Synthetic oligonucleotide
  Sense strand starting at position 2269 of SEQ ID NO: 1562157
gcgugaagcgccuccuuua

SEQ ID NO: 1726370 - RNA, 19 nt, Artificial Sequence
  Description of Artificial Sequence: Synthetic oligonucleotide
  Antisense strand to SEQ ID NO: 1726369
uaaaggaggcgcuucacgc

SEQ ID NO: 1726371 - RNA, 19 nt, Artificial Sequence
  Description of Artificial Sequence: Synthetic oligonucleotide
  Sense strand starting at position 2272 of SEQ ID NO: 1562157
ugaagcgccuccuuuagaa

SEQ ID NO: 1726372 - RNA, 19 nt, Artificial Sequence
  Description of Artificial Sequence: Synthetic oligonucleotide
  Antisense strand to SEQ ID NO: 1726371
uucuaaaggaggcgcuuca

SEQ ID NO: 1726373 - RNA, 19 nt, Artificial Sequence
  Description of Artificial Sequence: Synthetic oligonucleotide
  Sense strand starting at position 2274 of SEQ ID NO: 1562157
aagcgccuccuuuagaaga

SEQ ID NO: 1726374 - RNA, 19 nt, Artificial Sequence
  Description of Artificial Sequence: Synthetic oligonucleotide
  Antisense strand to SEQ ID NO: 1726373
ucuucuaaaggaggcgcuu

SEQ ID NO: 1726375 - RNA, 19 nt, Artificial Sequence
  Description of Artificial Sequence: Synthetic oligonucleotide
  Sense strand starting at position 2292 of SEQ ID NO: 1562157
agcugacaauucuuagcaa

SEQ ID NO: 1726376 - RNA, 19 nt, Artificial Sequence
  Description of Artificial Sequence: Synthetic oligonucleotide
  Antisense strand to SEQ ID NO: 1726375
uugcuaagaauugucagcu

SEQ ID NO: 1726377 - RNA, 19 nt, Artificial Sequence
  Description of Artificial Sequence: Synthetic oligonucleotide
  Sense strand starting at position 2357 of SEQ ID NO: 1562157
ccuggagguauuugugguu

SEQ ID NO: 1726378 - RNA, 19 nt, Artificial Sequence
  Description of Artificial Sequence: Synthetic oligonucleotide
  Antisense strand to SEQ ID NO: 1726377
aaccacaaauaccuccagg

SEQ ID NO: 1726379 - RNA, 19 nt, Artificial Sequence
  Description of Artificial Sequence: Synthetic oligonucleotide
  Sense strand starting at position 2392 of SEQ ID NO: 1562157
guugaacucuggucccaac

SEQ ID NO: 1726380 - RNA, 19 nt, Artificial Sequence
  Description of Artificial Sequence: Synthetic oligonucleotide
  Antisense strand to SEQ ID NO: 1726379
guugggaccagaguucaac

SEQ ID NO: 1726381 - RNA, 19 nt, Artificial Sequence
  Description of Artificial Sequence: Synthetic oligonucleotide
  Sense strand starting at position 2486 of SEQ ID NO: 1562157
uuaagucaguuugcagaca

SEQ ID NO: 1726382 - RNA, 19 nt, Artificial Sequence
  Description of Artificial Sequence: Synthetic oligonucleotide
  Antisense strand to SEQ ID NO: 1726381
ugucugcaaacugacuuaa

SEQ ID NO: 1726383 - RNA, 19 nt, Artificial Sequence
  Description of Artificial Sequence: Synthetic oligonucleotide
  Sense strand starting at position 2526 of SEQ ID NO: 1562157
aagcauuugccguguacuu

SEQ ID NO: 1726384 - RNA, 19 nt, Artificial Sequence
  Description of Artificial Sequence: Synthetic oligonucleotide
  Antisense strand to SEQ ID NO: 1726383
aaguacacggcaaaugcuu

SEQ ID NO: 1726385 - RNA, 19 nt, Artificial Sequence
  Description of Artificial Sequence: Synthetic oligonucleotide
  Sense strand starting at position 2672 of SEQ ID NO: 1562157
caaccuagacgguauuauu

SEQ ID NO: 1726386 - RNA, 19 nt, Artificial Sequence
  Description of Artificial Sequence: Synthetic oligonucleotide
  Antisense strand to SEQ ID NO: 1726385
aauaauaccgucuagguug

SEQ ID NO: 1726387 - RNA, 19 nt, Artificial Sequence
  Description of Artificial Sequence: Synthetic oligonucleotide
  Sense strand starting at position 2717 of SEQ ID NO: 1562157
aggugaaguaucuagccca

SEQ ID NO: 1726388 - RNA, 19 nt, Artificial Sequence
  Description of Artificial Sequence: Synthetic oligonucleotide
  Antisense strand to SEQ ID NO: 1726387
ugggcuagauacuucaccu

SEQ ID NO: 1726389 - RNA, 19 nt, Artificial Sequence
  Description of Artificial Sequence: Synthetic oligonucleotide
  Sense strand starting at position 2737 of SEQ ID NO: 1562157
ggucacauagcuuagagua

SEQ ID NO: 1726390 - RNA, 19 nt, Artificial Sequence
  Description of Artificial Sequence: Synthetic oligonucleotide
  Antisense strand to SEQ ID NO: 1726389
uacucuaagcuaugugacc

SEQ ID NO: 1726391 - RNA, 19 nt, Artificial Sequence
  Description of Artificial Sequence: Synthetic oligonucleotide
  Sense strand starting at position 2772 of SEQ ID NO: 1562157
aauccaguuuggucugauu

SEQ ID NO: 1726392 - RNA, 19 nt, Artificial Sequence
  Description of Artificial Sequence: Synthetic oligonucleotide
  Antisense strand to SEQ ID NO: 1726391
aaucagaccaaacuggauu

SEQ ID NO: 1726393 - RNA, 19 nt, Artificial Sequence
  Description of Artificial Sequence: Synthetic oligonucleotide
  Sense strand starting at position 2907 of SEQ ID NO: 1562157
ccacuaccaucaguaagua

SEQ ID NO: 1726394 - RNA, 19 nt, Artificial Sequence
  Description of Artificial Sequence: Synthetic oligonucleotide
  Antisense strand to SEQ ID NO: 1726393
uacuuacugaugguagugg

SEQ ID NO: 1726395 - RNA, 19 nt, Artificial Sequence
  Description of Artificial Sequence: Synthetic oligonucleotide
  Sense strand starting at position 2936 of SEQ ID NO: 1562157
ggcagauucuacccaauug

SEQ ID NO: 1726396 - RNA, 19 nt, Artificial Sequence
  Description of Artificial Sequence: Synthetic oligonucleotide
  Antisense strand to SEQ ID NO: 1726395
caauuggguagaaucugcc

SEQ ID NO: 1726397 - RNA, 19 nt, Artificial Sequence
  Description of Artificial Sequence: Synthetic oligonucleotide
  Sense strand starting at position 3105 of SEQ ID NO: 1562157
aggagccauucccugacau

SEQ ID NO: 1726398 - RNA, 19 nt, Artificial Sequence
  Description of Artificial Sequence: Synthetic oligonucleotide
  Antisense strand to SEQ ID NO: 1726397
augucagggaauggcuccu

SEQ ID NO: 1726399 - RNA, 19 nt, Artificial Sequence
  Description of Artificial Sequence: Synthetic oligonucleotide
  Sense strand starting at position 3106 of SEQ ID NO: 1562157
ggagccauucccugacaua

SEQ ID NO: 1726400 - RNA, 19 nt, Artificial Sequence
  Description of Artificial Sequence: Synthetic oligonucleotide
  Antisense strand to SEQ ID NO: 1726399
uaugucagggaauggcucc

SEQ ID NO: 1726401 - RNA, 19 nt, Artificial Sequence
  Description of Artificial Sequence: Synthetic oligonucleotide
  Sense strand starting at position 3107 of SEQ ID NO: 1562157
gagccauucccugacauag

SEQ ID NO: 1726402 - RNA, 19 nt, Artificial Sequence
  Description of Artificial Sequence: Synthetic oligonucleotide
  Antisense strand to SEQ ID NO: 1726401
cuaugucagggaauggcuc

SEQ ID NO: 1726403 - RNA, 19 nt, Artificial Sequence
  Description of Artificial Sequence: Synthetic oligonucleotide
  Sense strand starting at position 3203 of SEQ ID NO: 1562157
ggaagaaguaccuaccguu

SEQ ID NO: 1726404 - RNA, 19 nt, Artificial Sequence
  Description of Artificial Sequence: Synthetic oligonucleotide
  Antisense strand to SEQ ID NO: 1726403
aacgguagguacuucuucc

SEQ ID NO: 1726405 - RNA, 19 nt, Artificial Sequence
  Description of Artificial Sequence: Synthetic oligonucleotide
  Sense strand starting at position 3209 of SEQ ID NO: 1562157
aguaccuaccguuaacaga

SEQ ID NO: 1726406 - RNA, 19 nt, Artificial Sequence
  Description of Artificial Sequence: Synthetic oligonucleotide
  Antisense strand to SEQ ID NO: 1726405
ucuguuaacgguagguacu

SEQ ID NO: 1726407 - RNA, 19 nt, Artificial Sequence
  Description of Artificial Sequence: Synthetic oligonucleotide
  Sense strand starting at position 3234 of SEQ ID NO: 1562157
agcugagacccacgguuua

SEQ ID NO: 1726408 - RNA, 19 nt, Artificial Sequence
  Description of Artificial Sequence: Synthetic oligonucleotide
  Antisense strand to SEQ ID NO: 1726407
uaaaccgugggucucagcu

SEQ ID NO: 1726409 - RNA, 19 nt, Artificial Sequence
  Description of Artificial Sequence: Synthetic oligonucleotide
  Sense strand starting at position 3690 of SEQ ID NO: 1562157
cuuuaaauguggcuagcau

SEQ ID NO: 1726410 - RNA, 19 nt, Artificial Sequence
  Description of Artificial Sequence: Synthetic oligonucleotide
  Antisense strand to SEQ ID NO: 1726409
augcuagccacauuuaaag

SEQ ID NO: 1726411 - RNA, 19 nt, Artificial Sequence
  Description of Artificial Sequence: Synthetic oligonucleotide
  Sense strand starting at position 3691 of SEQ ID NO: 1562157
uuuaaauguggcuagcaua

SEQ ID NO: 1726412 - RNA, 19 nt, Artificial Sequence
  Description of Artificial Sequence: Synthetic oligonucleotide
  Antisense strand to SEQ ID NO: 1726411
uaugcuagccacauuuaaa

SEQ ID NO: 1726413 - RNA, 19 nt, Artificial Sequence
  Description of Artificial Sequence: Synthetic oligonucleotide
  Sense strand starting at position 3770 of SEQ ID NO: 1562157
auaauagcuuaagagagaa

SEQ ID NO: 1726414 - RNA, 19 nt, Artificial Sequence
  Description of Artificial Sequence: Synthetic oligonucleotide
  Antisense strand to SEQ ID NO: 1726413
uucucucuuaagcuauuau

SEQ ID NO: 1726415 - RNA, 19 nt, Artificial Sequence
  Description of Artificial Sequence: Synthetic oligonucleotide
  Sense strand starting at position 3820 of SEQ ID NO: 1562157
uccuauaagcucuggauau

SEQ ID NO: 1726416 - RNA, 19 nt, Artificial Sequence
  Description of Artificial Sequence: Synthetic oligonucleotide
  Antisense strand to SEQ ID NO: 1726415
auauccagagcuuauagga

SEQ ID NO: 1726417 - RNA, 19 nt, Artificial Sequence
  Description of Artificial Sequence: Synthetic oligonucleotide
  Sense strand starting at position 3822 of SEQ ID NO: 1562157
cuauaagcucuggauauac

SEQ ID NO: 1726418 - RNA, 19 nt, Artificial Sequence
  Description of Artificial Sequence: Synthetic oligonucleotide
  Antisense strand to SEQ ID NO: 1726417
guauauccagagcuuauag

SEQ ID NO: 1726419 - RNA, 19 nt, Artificial Sequence
  Description of Artificial Sequence: Synthetic oligonucleotide
  Sense strand starting at position 3838 of SEQ ID NO: 1562157
uacaguugaccugggaaca

SEQ ID NO: 1726420 - RNA, 19 nt, Artificial Sequence
  Description of Artificial Sequence: Synthetic oligonucleotide
  Antisense strand to SEQ ID NO: 1726419
uguucccaggucaacugua

SEQ ID NO: 1726421 - RNA, 19 nt, Artificial Sequence
  Description of Artificial Sequence: Synthetic oligonucleotide
  Sense strand starting at position 3869 of SEQ ID NO: 1562157
gcugcauggguccaccaau

SEQ ID NO: 1726422 - RNA, 19 nt, Artificial Sequence
  Description of Artificial Sequence: Synthetic oligonucleotide
  Antisense strand to SEQ ID NO: 1726421
auugguggacccaugcagc

SEQ ID NO: 1726423 - RNA, 19 nt, Artificial Sequence
  Description of Artificial Sequence: Synthetic oligonucleotide
  Sense strand starting at position 3928 of SEQ ID NO: 1562157
gucagcccucucuaucaga

SEQ ID NO: 1726424 - RNA, 19 nt, Artificial Sequence
  Description of Artificial Sequence: Synthetic oligonucleotide
  Antisense strand to SEQ ID NO: 1726423
ucugauagagagggcugac

SEQ ID NO: 1726425 - RNA, 19 nt, Artificial Sequence
  Description of Artificial Sequence: Synthetic oligonucleotide
  Sense strand starting at position 491 of SEQ ID NO: 1562158
gccucacuucuacagagga

SEQ ID NO: 1726426 - RNA, 19 nt, Artificial Sequence
  Description of Artificial Sequence: Synthetic oligonucleotide
  Antisense strand to SEQ ID NO: 1726425
uccucuguagaagugaggc

SEQ ID NO: 1726427 - RNA, 19 nt, Artificial Sequence
  Description of Artificial Sequence: Synthetic oligonucleotide
  Sense strand starting at position 817 of SEQ ID NO: 1562158
cagaaauguggcuaccaca

SEQ ID NO: 1726428 - RNA, 19 nt, Artificial Sequence
  Description of Artificial Sequence: Synthetic oligonucleotide
  Antisense strand to SEQ ID NO: 1726427
ugugguagccacauuucug

SEQ ID NO: 1726429 - RNA, 19 nt, Artificial Sequence
  Description of Artificial Sequence: Synthetic oligonucleotide
  Sense strand starting at position 899 of SEQ ID NO: 1562158
cugaaauauugaggccuca

SEQ ID NO: 1726430 - RNA, 19 nt, Artificial Sequence
  Description of Artificial Sequence: Synthetic oligonucleotide
  Antisense strand to SEQ ID NO: 1726429
ugaggccucaauauuucag

SEQ ID NO: 1726431 - RNA, 19 nt, Artificial Sequence
  Description of Artificial Sequence: Synthetic oligonucleotide
  Sense strand starting at position 946 of SEQ ID NO: 1562158
cgucaucucuacccagaua

SEQ ID NO: 1726432 - RNA, 19 nt, Artificial Sequence
  Description of Artificial Sequence: Synthetic oligonucleotide
  Antisense strand to SEQ ID NO: 1726431
uaucuggguagagaugacg

SEQ ID NO: 1726433 - RNA, 19 nt, Artificial Sequence
  Description of Artificial Sequence: Synthetic oligonucleotide
  Sense strand starting at position 1601 of SEQ ID NO: 1562158
cucccaaacgucgagugaa

SEQ ID NO: 1726434 - RNA, 19 nt, Artificial Sequence
  Description of Artificial Sequence: Synthetic oligonucleotide
  Antisense strand to SEQ ID NO: 1726433
uucacucgacguuugggag

SEQ ID NO: 1726435 - RNA, 19 nt, Artificial Sequence
  Description of Artificial Sequence: Synthetic oligonucleotide
  Sense strand starting at position 1864 of SEQ ID NO: 1562158
ucuggucuccggaggguuu

SEQ ID NO: 1726436 - RNA, 19 nt, Artificial Sequence
  Description of Artificial Sequence: Synthetic oligonucleotide
  Antisense strand to SEQ ID NO: 1726435
aaacccuccggagaccaga

SEQ ID NO: 1726437 - RNA, 19 nt, Artificial Sequence
  Description of Artificial Sequence: Synthetic oligonucleotide
  Sense strand starting at position 2561 of SEQ ID NO: 1562158
cggaaauggugcuggccau

SEQ ID NO: 1726438 - RNA, 19 nt, Artificial Sequence
  Description of Artificial Sequence: Synthetic oligonucleotide
  Antisense strand to SEQ ID NO: 1726437
auggccagcaccauuuccg

SEQ ID NO: 1726439 - RNA, 19 nt, Artificial Sequence
  Description of Artificial Sequence: Synthetic oligonucleotide
  Sense strand starting at position 3012 of SEQ ID NO: 1562158
cuuugugaggccugagagu

SEQ ID NO: 1726440 - RNA, 19 nt, Artificial Sequence
  Description of Artificial Sequence: Synthetic oligonucleotide
  Antisense strand to SEQ ID NO: 1726439
acucucaggccucacaaag

SEQ ID NO: 1726441 - RNA, 19 nt, Artificial Sequence
  Description of Artificial Sequence: Synthetic oligonucleotide
  Sense strand starting at position 3273 of SEQ ID NO: 1562158
gcaggaucugagcggagaa

SEQ ID NO: 1726442 - RNA, 19 nt, Artificial Sequence
  Description of Artificial Sequence: Synthetic oligonucleotide
  Antisense strand to SEQ ID NO: 1726441
uucuccgcucagauccugc

SEQ ID NO: 1726443 - RNA, 19 nt, Artificial Sequence
  Description of Artificial Sequence: Synthetic oligonucleotide
  Sense strand starting at position 3322 of SEQ ID NO: 1562158
aaggcuuugccgugaaaga

SEQ ID NO: 1726444 - RNA, 19 nt, Artificial Sequence
  Description of Artificial Sequence: Synthetic oligonucleotide
  Antisense strand to SEQ ID NO: 1726443
ucuuucacggcaaagccuu

SEQ ID NO: 1726445 - RNA, 19 nt, Artificial Sequence
  Description of Artificial Sequence: Synthetic oligonucleotide
  Sense strand starting at position 3323 of SEQ ID NO: 1562158
aggcuuugccgugaaagag

SEQ ID NO: 1726446 - RNA, 19 nt, Artificial Sequence
  Description of Artificial Sequence: Synthetic oligonucleotide
  Antisense strand to SEQ ID NO: 1726445
cucuuucacggcaaagccu

SEQ ID NO: 1726447 - RNA, 19 nt, Artificial Sequence
  Description of Artificial Sequence: Synthetic oligonucleotide
  Sense strand starting at position 3482 of SEQ ID NO: 1562158
gguugugcgcacuuaguga

SEQ ID NO: 1726448 - RNA, 19 nt, Artificial Sequence
  Description of Artificial Sequence: Synthetic oligonucleotide
  Antisense strand to SEQ ID NO: 1726447
ucacuaagugcgcacaacc

SEQ ID NO: 1726449 - RNA, 19 nt, Artificial Sequence
  Description of Artificial Sequence: Synthetic oligonucleotide
  Sense strand starting at position 3578 of SEQ ID NO: 1562158
uugccauugcagggaugaa

SEQ ID NO: 1726450 - RNA, 19 nt, Artificial Sequence
  Description of Artificial Sequence: Synthetic oligonucleotide
  Antisense strand to SEQ ID NO: 1726449
uucaucccugcaauggcaa

SEQ ID NO: 1726451 - RNA, 19 nt, Artificial Sequence
  Description of Artificial Sequence: Synthetic oligonucleotide
  Sense strand starting at position 3848 of SEQ ID NO: 1562158
gggugaugcccaggaaugu

SEQ ID NO: 1726452 - RNA, 19 nt, Artificial Sequence
  Description of Artificial Sequence: Synthetic oligonucleotide
  Antisense strand to SEQ ID NO: 1726451
acauuccugggcaucaccc

SEQ ID NO: 1726453 - RNA, 19 nt, Artificial Sequence
  Description of Artificial Sequence: Synthetic oligonucleotide
  Sense strand starting at position 3854 of SEQ ID NO: 1562158
ugcccaggaaugugacauu

SEQ ID NO: 1726454 - RNA, 19 nt, Artificial Sequence
  Description of Artificial Sequence: Synthetic oligonucleotide
  Antisense strand to SEQ ID NO: 1726453
aaugucacauuccugggca

SEQ ID NO: 1726455 - RNA, 19 nt, Artificial Sequence
  Description of Artificial Sequence: Synthetic oligonucleotide
  Sense strand starting at position 3951 of SEQ ID NO: 1562158
guuuccuuugccugguuga

SEQ ID NO: 1726456 - RNA, 19 nt, Artificial Sequence
  Description of Artificial Sequence: Synthetic oligonucleotide
  Antisense strand to SEQ ID NO: 1726455
ucaaccaggcaaaggaaac

SEQ ID NO: 1726457 - RNA, 19 nt, Artificial Sequence
  Description of Artificial Sequence: Synthetic oligonucleotide
  Sense strand starting at position 3952 of SEQ ID NO: 1562158
uuuccuuugccugguugaa

SEQ ID NO: 1726458 - RNA, 19 nt, Artificial Sequence
  Description of Artificial Sequence: Synthetic oligonucleotide
  Antisense strand to SEQ ID NO: 1726457
uucaaccaggcaaaggaaa

SEQ ID NO: 1726459 - RNA, 19 nt, Artificial Sequence
  Description of Artificial Sequence: Synthetic oligonucleotide
  Sense strand starting at position 3954 of SEQ ID NO: 1562158
uccuuugccugguugaaga

SEQ ID NO: 1726460 - RNA, 19 nt, Artificial Sequence
  Description of Artificial Sequence: Synthetic oligonucleotide
  Antisense strand to SEQ ID NO: 1726459
ucuucaaccaggcaaagga

SEQ ID NO: 1726461 - RNA, 19 nt, Artificial Sequence
  Description of Artificial Sequence: Synthetic oligonucleotide
  Sense strand starting at position 3956 of SEQ ID NO: 1562158
cuuugccugguugaagaaa

SEQ ID NO: 1726462 - RNA, 19 nt, Artificial Sequence
  Description of Artificial Sequence: Synthetic oligonucleotide
  Antisense strand to SEQ ID NO: 1726461
uuucuucaaccaggcaaag

SEQ ID NO: 1726463 - RNA, 19 nt, Artificial Sequence
  Description of Artificial Sequence: Synthetic oligonucleotide
  Sense strand starting at position 55 of SEQ ID NO: 1562159
cugaaauauugaggccuca

SEQ ID NO: 1726464 - RNA, 19 nt, Artificial Sequence
  Description of Artificial Sequence: Synthetic oligonucleotide
  Antisense strand to SEQ ID NO: 1726463
ugaggccucaauauuucag

SEQ ID NO: 1726465 - RNA, 19 nt, Artificial Sequence
  Description of Artificial Sequence: Synthetic oligonucleotide
  Sense strand starting at position 102 of SEQ ID NO: 1562159
cgucaucucuacccagaua

SEQ ID NO: 1726466 - RNA, 19 nt, Artificial Sequence
  Description of Artificial Sequence: Synthetic oligonucleotide
  Antisense strand to SEQ ID NO: 1726465
uaucuggguagagaugacg

SEQ ID NO: 1726467 - RNA, 19 nt, Artificial Sequence
  Description of Artificial Sequence: Synthetic oligonucleotide
  Sense strand starting at position 757 of SEQ ID NO: 1562159
cucccaaacgucgagugaa

SEQ ID NO: 1726468 - RNA, 19 nt, Artificial Sequence
  Description of Artificial Sequence: Synthetic oligonucleotide
  Antisense strand to SEQ ID NO: 1726467
uucacucgacguuugggag

SEQ ID NO: 1726469 - RNA, 19 nt, Artificial Sequence
  Description of Artificial Sequence: Synthetic oligonucleotide
  Sense strand starting at position 1020 of SEQ ID NO: 1562159
ucuggucuccggaggguuu

SEQ ID NO: 1726470 - RNA, 19 nt, Artificial Sequence
  Description of Artificial Sequence: Synthetic oligonucleotide
  Antisense strand to SEQ ID NO: 1726469
aaacccuccggagaccaga

SEQ ID NO: 1726471 - RNA, 19 nt, Artificial Sequence
  Description of Artificial Sequence: Synthetic oligonucleotide
  Sense strand starting at position 1717 of SEQ ID NO: 1562159
cggaaauggugcuggccau

SEQ ID NO: 1726472 - RNA, 19 nt, Artificial Sequence
  Description of Artificial Sequence: Synthetic oligonucleotide
  Antisense strand to SEQ ID NO: 1726471
auggccagcaccauuuccg

SEQ ID NO: 1726473 - RNA, 19 nt, Artificial Sequence
  Description of Artificial Sequence: Synthetic oligonucleotide
  Sense strand starting at position 2168 of SEQ ID NO: 1562159
cuuugugaggccugagagu

SEQ ID NO: 1726474 - RNA, 19 nt, Artificial Sequence
  Description of Artificial Sequence: Synthetic oligonucleotide
  Antisense strand to SEQ ID NO: 1726473
acucucaggccucacaaag

SEQ ID NO: 1726475 - RNA, 19 nt, Artificial Sequence
  Description of Artificial Sequence: Synthetic oligonucleotide
  Sense strand starting at position 2429 of SEQ ID NO: 1562159
gcaggaucugagcggagaa

SEQ ID NO: 1726476 - RNA, 19 nt, Artificial Sequence
  Description of Artificial Sequence: Synthetic oligonucleotide
  Antisense strand to SEQ ID NO: 1726475
uucuccgcucagauccugc

SEQ ID NO: 1726477 - RNA, 19 nt, Artificial Sequence
  Description of Artificial Sequence: Synthetic oligonucleotide
  Sense strand starting at position 2478 of SEQ ID NO: 1562159
aaggcuuugccgugaaaga

SEQ ID NO: 1726478 - RNA, 19 nt, Artificial Sequence
  Description of Artificial Sequence: Synthetic oligonucleotide
  Antisense strand to SEQ ID NO: 1726477
ucuuucacggcaaagccuu

SEQ ID NO: 1726479 - RNA, 19 nt, Artificial Sequence
  Description of Artificial Sequence: Synthetic oligonucleotide
  Sense strand starting at position 2479 of SEQ ID NO: 1562159
aggcuuugccgugaaagag

SEQ ID NO: 1726480 - RNA, 19 nt, Artificial Sequence
  Description of Artificial Sequence: Synthetic oligonucleotide
  Antisense strand to SEQ ID NO: 1726479
cucuuucacggcaaagccu

SEQ ID NO: 1726481 - RNA, 19 nt, Artificial Sequence
  Description of Artificial Sequence: Synthetic oligonucleotide
  Sense strand starting at position 2638 of SEQ ID NO: 1562159
gguugugcgcacuuaguga

SEQ ID NO: 1726482 - RNA, 19 nt, Artificial Sequence
  Description of Artificial Sequence: Synthetic oligonucleotide
  Antisense strand to SEQ ID NO: 1726481
ucacuaagugcgcacaacc

SEQ ID NO: 1726483 - RNA, 19 nt, Artificial Sequence
  Description of Artificial Sequence: Synthetic oligonucleotide
  Sense strand starting at position 2734 of SEQ ID NO: 1562159
uugccauugcagggaugaa

SEQ ID NO: 1726484 - RNA, 19 nt, Artificial Sequence
  Description of Artificial Sequence: Synthetic oligonucleotide
  Antisense strand to SEQ ID NO: 1726483
uucaucccugcaauggcaa

SEQ ID NO: 1726485 - RNA, 19 nt, Artificial Sequence
  Description of Artificial Sequence: Synthetic oligonucleotide
  Sense strand starting at position 3004 of SEQ ID NO: 1562159
gggugaugcccaggaaugu

SEQ ID NO: 1726486 - RNA, 19 nt, Artificial Sequence
  Description of Artificial Sequence: Synthetic oligonucleotide
  Antisense strand to SEQ ID NO: 1726485
acauuccugggcaucaccc

SEQ ID NO: 1726487 - RNA, 19 nt, Artificial Sequence
  Description of Artificial Sequence: Synthetic oligonucleotide
  Sense strand starting at position 3010 of SEQ ID NO: 1562159
ugcccaggaaugugacauu

SEQ ID NO: 1726488 - RNA, 19 nt, Artificial Sequence
  Description of Artificial Sequence: Synthetic oligonucleotide
  Antisense strand to SEQ ID NO: 1726487
aaugucacauuccugggca

SEQ ID NO: 1726489 - RNA, 19 nt, Artificial Sequence
  Description of Artificial Sequence: Synthetic oligonucleotide
  Sense strand starting at position 3107 of SEQ ID NO: 1562159
guuuccuuugccugguuga

SEQ ID NO: 1726490 - RNA, 19 nt, Artificial Sequence
  Description of Artificial Sequence: Synthetic oligonucleotide
  Antisense strand to SEQ ID NO: 1726489
ucaaccaggcaaaggaaac

SEQ ID NO: 1726491 - RNA, 19 nt, Artificial Sequence
  Description of Artificial Sequence: Synthetic oligonucleotide
  Sense strand starting at position 3108 of SEQ ID NO: 1562159
uuuccuuugccugguugaa

SEQ ID NO: 1726492 - RNA, 19 nt, Artificial Sequence
  Description of Artificial Sequence: Synthetic oligonucleotide
  Antisense strand to SEQ ID NO: 1726491
uucaaccaggcaaaggaaa

SEQ ID NO: 1726493 - RNA, 19 nt, Artificial Sequence
  Description of Artificial Sequence: Synthetic oligonucleotide
  Sense strand starting at position 3110 of SEQ ID NO: 1562159
uccuuugccugguugaaga

SEQ ID NO: 1726494 - RNA, 19 nt, Artificial Sequence
  Description of Artificial Sequence: Synthetic oligonucleotide
  Antisense strand to SEQ ID NO: 1726493
ucuucaaccaggcaaagga

SEQ ID NO: 1726495 - RNA, 19 nt, Artificial Sequence
  Description of Artificial Sequence: Synthetic oligonucleotide
  Sense strand starting at position 3112 of SEQ ID NO: 1562159
cuuugccugguugaagaaa

SEQ ID NO: 1726496 - RNA, 19 nt, Artificial Sequence
  Description of Artificial Sequence: Synthetic oligonucleotide
  Antisense strand to SEQ ID NO: 1726495
uuucuucaaccaggcaaag

SEQ ID NO: 1726497 - RNA, 19 nt, Artificial Sequence
  Description of Artificial Sequence: Synthetic oligonucleotide
  Sense strand starting at position 3183 of SEQ ID NO: 1562159
guggcaaggaucugagaac

SEQ ID NO: 1726498 - RNA, 19 nt, Artificial Sequence
  Description of Artificial Sequence: Synthetic oligonucleotide
  Antisense strand to SEQ ID NO: 1726497
guucucagauccuugccac

SEQ ID NO: 1726499 - RNA, 19 nt, Artificial Sequence
  Description of Artificial Sequence: Synthetic oligonucleotide
  Sense strand starting at position 3184 of SEQ ID NO: 1562159
uggcaaggaucugagaacu

SEQ ID NO: 1726500 - RNA, 19 nt, Artificial Sequence
  Description of Artificial Sequence: Synthetic oligonucleotide
  Antisense strand to SEQ ID NO: 1726499
aguucucagauccuugcca

SEQ ID NO: 1726501 - RNA, 19 nt, Artificial Sequence
  Description of Artificial Sequence: Synthetic oligonucleotide
  Sense strand starting at position 3338 of SEQ ID NO: 1562159
ugguuucagccuuggguua

SEQ ID NO: 1726502 - RNA, 19 nt, Artificial Sequence
  Description of Artificial Sequence: Synthetic oligonucleotide
  Antisense strand to SEQ ID NO: 1726501
uaacccaaggcugaaacca

SEQ ID NO: 1726503 - RNA, 19 nt, Artificial Sequence
  Description of Artificial Sequence: Synthetic oligonucleotide
  Sense strand starting at position 3345 of SEQ ID NO: 1562159
agccuuggguuacuaagaa

SEQ ID NO: 1726504 - RNA, 19 nt, Artificial Sequence
  Description of Artificial Sequence: Synthetic oligonucleotide
  Antisense strand to SEQ ID NO: 1726503
uucuuaguaacccaaggcu

SEQ ID NO: 1726505 - RNA, 19 nt, Artificial Sequence
  Description of Artificial Sequence: Synthetic oligonucleotide
  Sense strand starting at position 3349 of SEQ ID NO: 1562159
uuggguuacuaagaauuag

SEQ ID NO: 1726506 - RNA, 19 nt, Artificial Sequence
  Description of Artificial Sequence: Synthetic oligonucleotide
  Antisense strand to SEQ ID NO: 1726505
cuaauucuuaguaacccaa

SEQ ID NO: 1726507 - RNA, 19 nt, Artificial Sequence
  Description of Artificial Sequence: Synthetic oligonucleotide
  Sense strand starting at position 3355 of SEQ ID NO: 1562159
uacuaagaauuaggaggua

SEQ ID NO: 1726508 - RNA, 19 nt, Artificial Sequence
  Description of Artificial Sequence: Synthetic oligonucleotide
  Antisense strand to SEQ ID NO: 1726507
uaccuccuaauucuuagua

SEQ ID NO: 1726509 - RNA, 19 nt, Artificial Sequence
  Description of Artificial Sequence: Synthetic oligonucleotide
  Sense strand starting at position 3370 of SEQ ID NO: 1562159
gguaaugaaugagaguugu

SEQ ID NO: 1726510 - RNA, 19 nt, Artificial Sequence
  Description of Artificial Sequence: Synthetic oligonucleotide
  Antisense strand to SEQ ID NO: 1726509
acaacucucauucauuacc

SEQ ID NO: 1726511 - RNA, 19 nt, Artificial Sequence
  Description of Artificial Sequence: Synthetic oligonucleotide
  Sense strand starting at position 3409 of SEQ ID NO: 1562159
gugauuugcuaugaagcca

SEQ ID NO: 1726512 - RNA, 19 nt, Artificial Sequence
  Description of Artificial Sequence: Synthetic oligonucleotide
  Antisense strand to SEQ ID NO: 1726511
uggcuucauagcaaaucac

SEQ ID NO: 1726513 - RNA, 19 nt, Artificial Sequence
  Description of Artificial Sequence: Synthetic oligonucleotide
  Sense strand starting at position 3665 of SEQ ID NO: 1562159
uccagagucuucucaugug

SEQ ID NO: 1726514 - RNA, 19 nt, Artificial Sequence
  Description of Artificial Sequence: Synthetic oligonucleotide
  Antisense strand to SEQ ID NO: 1726513
cacaugagaagacucugga

SEQ ID NO: 1726515 - RNA, 19 nt, Artificial Sequence
  Description of Artificial Sequence: Synthetic oligonucleotide
  Sense strand starting at position 3668 of SEQ ID NO: 1562159
agagucuucucaugugggu

SEQ ID NO: 1726516 - RNA, 19 nt, Artificial Sequence
  Description of Artificial Sequence: Synthetic oligonucleotide
  Antisense strand to SEQ ID NO: 1726515
acccacaugagaagacucu

SEQ ID NO: 1726517 - RNA, 19 nt, Artificial Sequence
  Description of Artificial Sequence: Synthetic oligonucleotide
  Sense strand starting at position 3727 of SEQ ID NO: 1562159
ccucacacucauugugacu

SEQ ID NO: 1726518 - RNA, 19 nt, Artificial Sequence
  Description of Artificial Sequence: Synthetic oligonucleotide
  Antisense strand to SEQ ID NO: 1726517
agucacaaugagugugagg

SEQ ID NO: 1726519 - RNA, 19 nt, Artificial Sequence
  Description of Artificial Sequence: Synthetic oligonucleotide
  Sense strand starting at position 11 of SEQ ID NO: 1562160
gucccuaagaggugaaaug

SEQ ID NO: 1726520 - RNA, 19 nt, Artificial Sequence
  Description of Artificial Sequence: Synthetic oligonucleotide
  Antisense strand to SEQ ID NO: 1726519
cauuucaccucuuagggac

SEQ ID NO: 1726521 - RNA, 19 nt, Artificial Sequence
  Description of Artificial Sequence: Synthetic oligonucleotide
  Sense strand starting at position 205 of SEQ ID NO: 1562160
acgaucacugucugguaua

SEQ ID NO: 1726522 - RNA, 19 nt, Artificial Sequence
  Description of Artificial Sequence: Synthetic oligonucleotide
  Antisense strand to SEQ ID NO: 1726521
uauaccagacagugaucgu

SEQ ID NO: 1726523 - RNA, 19 nt, Artificial Sequence
  Description of Artificial Sequence: Synthetic oligonucleotide
  Sense strand starting at position 206 of SEQ ID NO: 1562160
cgaucacugucugguauag

SEQ ID NO: 1726524 - RNA, 19 nt, Artificial Sequence
  Description of Artificial Sequence: Synthetic oligonucleotide
  Antisense strand to SEQ ID NO: 1726523
cuauaccagacagugaucg

SEQ ID NO: 1726525 - RNA, 19 nt, Artificial Sequence
  Description of Artificial Sequence: Synthetic oligonucleotide
  Sense strand starting at position 208 of SEQ ID NO: 1562160
aucacugucugguauagau

SEQ ID NO: 1726526 - RNA, 19 nt, Artificial Sequence
  Description of Artificial Sequence: Synthetic oligonucleotide
  Antisense strand to SEQ ID NO: 1726525
aucuauaccagacagugau

SEQ ID NO: 1726527 - RNA, 19 nt, Artificial Sequence
  Description of Artificial Sequence: Synthetic oligonucleotide
  Sense strand starting at position 210 of SEQ ID NO: 1562160
cacugucugguauagauca

SEQ ID NO: 1726528 - RNA, 19 nt, Artificial Sequence
  Description of Artificial Sequence: Synthetic oligonucleotide
  Antisense strand to SEQ ID NO: 1726527
ugaucuauaccagacagug

SEQ ID NO: 1726529 - RNA, 19 nt, Artificial Sequence
  Description of Artificial Sequence: Synthetic oligonucleotide
  Sense strand starting at position 217 of SEQ ID NO: 1562160
ugguauagaucauccagac

SEQ ID NO: 1726530 - RNA, 19 nt, Artificial Sequence
  Description of Artificial Sequence: Synthetic oligonucleotide
  Antisense strand to SEQ ID NO: 1726529
gucuggaugaucuauacca

SEQ ID NO: 1726531 - RNA, 19 nt, Artificial Sequence
  Description of Artificial Sequence: Synthetic oligonucleotide
  Sense strand starting at position 358 of SEQ ID NO: 1562160
aacuaaagguugugguuaa

SEQ ID NO: 1726532 - RNA, 19 nt, Artificial Sequence
  Description of Artificial Sequence: Synthetic oligonucleotide
  Antisense strand to SEQ ID NO: 1726531
uuaaccacaaccuuuaguu

SEQ ID NO: 1726533 - RNA, 19 nt, Artificial Sequence
  Description of Artificial Sequence: Synthetic oligonucleotide
  Sense strand starting at position 359 of SEQ ID NO: 1562160
acuaaagguugugguuaau

SEQ ID NO: 1726534 - RNA, 19 nt, Artificial Sequence
  Description of Artificial Sequence: Synthetic oligonucleotide
  Antisense strand to SEQ ID NO: 1726533
auuaaccacaaccuuuagu

SEQ ID NO: 1726535 - RNA, 19 nt, Artificial Sequence
  Description of Artificial Sequence: Synthetic oligonucleotide
  Sense strand starting at position 362 of SEQ ID NO: 1562160
aaagguugugguuaauuaa

SEQ ID NO: 1726536 - RNA, 19 nt, Artificial Sequence
  Description of Artificial Sequence: Synthetic oligonucleotide
  Antisense strand to SEQ ID NO: 1726535
uuaauuaaccacaaccuuu

SEQ ID NO: 1726537 - RNA, 19 nt, Artificial Sequence
  Description of Artificial Sequence: Synthetic oligonucleotide
  Sense strand starting at position 467 of SEQ ID NO: 1562160
aauuuccugucugggaaau

SEQ ID NO: 1726538 - RNA, 19 nt, Artificial Sequence
  Description of Artificial Sequence: Synthetic oligonucleotide
  Antisense strand to SEQ ID NO: 1726537
auuucccagacaggaaauu

SEQ ID NO: 1726539 - RNA, 19 nt, Artificial Sequence
  Description of Artificial Sequence: Synthetic oligonucleotide
  Sense strand starting at position 535 of SEQ ID NO: 1562160
gaagaacagugaggcaauu

SEQ ID NO: 1726540 - RNA, 19 nt, Artificial Sequence
  Description of Artificial Sequence: Synthetic oligonucleotide
  Antisense strand to SEQ ID NO: 1726539
aauugccucacuguucuuc

SEQ ID NO: 1726541 - RNA, 19 nt, Artificial Sequence
  Description of Artificial Sequence: Synthetic oligonucleotide
  Sense strand starting at position 789 of SEQ ID NO: 1562160
gcccaaugcuucccaaugu

SEQ ID NO: 1726542 - RNA, 19 nt, Artificial Sequence
  Description of Artificial Sequence: Synthetic oligonucleotide
  Antisense strand to SEQ ID NO: 1726541
acauugggaagcauugggc

SEQ ID NO: 1726543 - RNA, 19 nt, Artificial Sequence
  Description of Artificial Sequence: Synthetic oligonucleotide
  Sense strand starting at position 798 of SEQ ID NO: 1562160
uucccaauguuagcguuaa

SEQ ID NO: 1726544 - RNA, 19 nt, Artificial Sequence
  Description of Artificial Sequence: Synthetic oligonucleotide
  Antisense strand to SEQ ID NO: 1726543
uuaacgcuaacauugggaa

SEQ ID NO: 1726545 - RNA, 19 nt, Artificial Sequence
  Description of Artificial Sequence: Synthetic oligonucleotide
  Sense strand starting at position 799 of SEQ ID NO: 1562160
ucccaauguuagcguuaaa

SEQ ID NO: 1726546 - RNA, 19 nt, Artificial Sequence
  Description of Artificial Sequence: Synthetic oligonucleotide
  Antisense strand to SEQ ID NO: 1726545
uuuaacgcuaacauuggga

SEQ ID NO: 1726547 - RNA, 19 nt, Artificial Sequence
  Description of Artificial Sequence: Synthetic oligonucleotide
  Sense strand starting at position 1106 of SEQ ID NO: 1562160
ggagacucaccgcagcaau

SEQ ID NO: 1726548 - RNA, 19 nt, Artificial Sequence
  Description of Artificial Sequence: Synthetic oligonucleotide
  Antisense strand to SEQ ID NO: 1726547
auugcugcggugagucucc

SEQ ID NO: 1726549 - RNA, 19 nt, Artificial Sequence
  Description of Artificial Sequence: Synthetic oligonucleotide
  Sense strand starting at position 2278 of SEQ ID NO: 1562160
ggcccuuggucgcugaauu

SEQ ID NO: 1726550 - RNA, 19 nt, Artificial Sequence
  Description of Artificial Sequence: Synthetic oligonucleotide
  Antisense strand to SEQ ID NO: 1726549
aauucagcgaccaagggcc

SEQ ID NO: 1726551 - RNA, 19 nt, Artificial Sequence
  Description of Artificial Sequence: Synthetic oligonucleotide
  Sense strand starting at position 2279 of SEQ ID NO: 1562160
gcccuuggucgcugaauua

SEQ ID NO: 1726552 - RNA, 19 nt, Artificial Sequence
  Description of Artificial Sequence: Synthetic oligonucleotide
  Antisense strand to SEQ ID NO: 1726551
uaauucagcgaccaagggc

SEQ ID NO: 1726553 - RNA, 19 nt, Artificial Sequence
  Description of Artificial Sequence: Synthetic oligonucleotide
  Sense strand starting at position 2289 of SEQ ID NO: 1562160
gcugaauuagaguggaagu

SEQ ID NO: 1726554 - RNA, 19 nt, Artificial Sequence
  Description of Artificial Sequence: Synthetic oligonucleotide
  Antisense strand to SEQ ID NO: 1726553
acuuccacucuaauucagc

SEQ ID NO: 1726555 - RNA, 19 nt, Artificial Sequence
  Description of Artificial Sequence: Synthetic oligonucleotide
  Sense strand starting at position 2290 of SEQ ID NO: 1562160
cugaauuagaguggaaguu

SEQ ID NO: 1726556 - RNA, 19 nt, Artificial Sequence
  Description of Artificial Sequence: Synthetic oligonucleotide
  Antisense strand to SEQ ID NO: 1726555
aacuuccacucuaauucag

SEQ ID NO: 1726557 - RNA, 19 nt, Artificial Sequence
  Description of Artificial Sequence: Synthetic oligonucleotide
  Sense strand starting at position 2467 of SEQ ID NO: 1562160
aaagauguauccgacaaac

SEQ ID NO: 1726558 - RNA, 19 nt, Artificial Sequence
  Description of Artificial Sequence: Synthetic oligonucleotide
  Antisense strand to SEQ ID NO: 1726557
guuugucggauacaucuuu

SEQ ID NO: 1726559 - RNA, 19 nt, Artificial Sequence
  Description of Artificial Sequence: Synthetic oligonucleotide
  Sense strand starting at position 3143 of SEQ ID NO: 1562160
cuuuguuucugcguggaac

SEQ ID NO: 1726560 - RNA, 19 nt, Artificial Sequence
  Description of Artificial Sequence: Synthetic oligonucleotide
  Antisense strand to SEQ ID NO: 1726559
guuccacgcagaaacaaag

SEQ ID NO: 1726561 - RNA, 19 nt, Artificial Sequence
  Description of Artificial Sequence: Synthetic oligonucleotide
  Sense strand starting at position 3144 of SEQ ID NO: 1562160
uuuguuucugcguggaaca

SEQ ID NO: 1726562 - RNA, 19 nt, Artificial Sequence
  Description of Artificial Sequence: Synthetic oligonucleotide
  Antisense strand to SEQ ID NO: 1726561
uguuccacgcagaaacaaa

SEQ ID NO: 1726563 - RNA, 19 nt, Artificial Sequence
  Description of Artificial Sequence: Synthetic oligonucleotide
  Sense strand starting at position 3145 of SEQ ID NO: 1562160
uuguuucugcguggaacaa

SEQ ID NO: 1726564 - RNA, 19 nt, Artificial Sequence
  Description of Artificial Sequence: Synthetic oligonucleotide
  Antisense strand to SEQ ID NO: 1726563
uuguuccacgcagaaacaa

SEQ ID NO: 1726565 - RNA, 19 nt, Artificial Sequence
  Description of Artificial Sequence: Synthetic oligonucleotide
  Sense strand starting at position 3146 of SEQ ID NO: 1562160
uguuucugcguggaacaaa

SEQ ID NO: 1726566 - RNA, 19 nt, Artificial Sequence
  Description of Artificial Sequence: Synthetic oligonucleotide
  Antisense strand to SEQ ID NO: 1726565
uuuguuccacgcagaaaca

SEQ ID NO: 1726567 - RNA, 19 nt, Artificial Sequence
  Description of Artificial Sequence: Synthetic oligonucleotide
  Sense strand starting at position 3188 of SEQ ID NO: 1562160
gaggguuucccgugugcug

SEQ ID NO: 1726568 - RNA, 19 nt, Artificial Sequence
  Description of Artificial Sequence: Synthetic oligonucleotide
  Antisense strand to SEQ ID NO: 1726567
cagcacacgggaaacccuc

SEQ ID NO: 1726569 - RNA, 19 nt, Artificial Sequence
  Description of Artificial Sequence: Synthetic oligonucleotide
  Sense strand starting at position 3200 of SEQ ID NO: 1562160
ugugcugagcgcuugcaaa

SEQ ID NO: 1726570 - RNA, 19 nt, Artificial Sequence
  Description of Artificial Sequence: Synthetic oligonucleotide
  Antisense strand to SEQ ID NO: 1726569
uuugcaagcgcucagcaca

SEQ ID NO: 1726571 - RNA, 19 nt, Artificial Sequence
  Description of Artificial Sequence: Synthetic oligonucleotide
  Sense strand starting at position 3361 of SEQ ID NO: 1562160
uucucucacggagaauguu

SEQ ID NO: 1726572 - RNA, 19 nt, Artificial Sequence
  Description of Artificial Sequence: Synthetic oligonucleotide
  Antisense strand to SEQ ID NO: 1726571
aacauucuccgugagagaa

SEQ ID NO: 1726573 - RNA, 19 nt, Artificial Sequence
  Description of Artificial Sequence: Synthetic oligonucleotide
  Sense strand starting at position 3370 of SEQ ID NO: 1562160
ggagaauguucccgcgcgu

SEQ ID NO: 1726574 - RNA, 19 nt, Artificial Sequence
  Description of Artificial Sequence: Synthetic oligonucleotide
  Antisense strand to SEQ ID NO: 1726573
acgcgcgggaacauucucc

SEQ ID NO: 1726575 - RNA, 19 nt, Artificial Sequence
  Description of Artificial Sequence: Synthetic oligonucleotide
  Sense strand starting at position 3371 of SEQ ID NO: 1562160
gagaauguucccgcgcguu

SEQ ID NO: 1726576 - RNA, 19 nt, Artificial Sequence
  Description of Artificial Sequence: Synthetic oligonucleotide
  Antisense strand to SEQ ID NO: 1726575
aacgcgcgggaacauucuc

SEQ ID NO: 1726577 - RNA, 19 nt, Artificial Sequence
  Description of Artificial Sequence: Synthetic oligonucleotide
  Sense strand starting at position 3383 of SEQ ID NO: 1562160
gcgcguucguugugcaacu

SEQ ID NO: 1726578 - RNA, 19 nt, Artificial Sequence
  Description of Artificial Sequence: Synthetic oligonucleotide
  Antisense strand to SEQ ID NO: 1726577
aguugcacaacgaacgcgc

SEQ ID NO: 1726579 - RNA, 19 nt, Artificial Sequence
  Description of Artificial Sequence: Synthetic oligonucleotide
  Sense strand starting at position 3384 of SEQ ID NO: 1562160
cgcguucguugugcaacua

SEQ ID NO: 1726580 - RNA, 19 nt, Artificial Sequence
  Description of Artificial Sequence: Synthetic oligonucleotide
  Antisense strand to SEQ ID NO: 1726579
uaguugcacaacgaacgcg

SEQ ID NO: 1726581 - RNA, 19 nt, Artificial Sequence
  Description of Artificial Sequence: Synthetic oligonucleotide
  Sense strand starting at position 3385 of SEQ ID NO: 1562160
gcguucguugugcaacuaa

SEQ ID NO: 1726582 - RNA, 19 nt, Artificial Sequence
  Description of Artificial Sequence: Synthetic oligonucleotide
  Antisense strand to SEQ ID NO: 1726581
uuaguugcacaacgaacgc

SEQ ID NO: 1726583 - RNA, 19 nt, Artificial Sequence
  Description of Artificial Sequence: Synthetic oligonucleotide
  Sense strand starting at position 3413 of SEQ ID NO: 1562160
ugaaacauccauugaggca

SEQ ID NO: 1726584 - RNA, 19 nt, Artificial Sequence
  Description of Artificial Sequence: Synthetic oligonucleotide
  Antisense strand to SEQ ID NO: 1726583
ugccucaauggauguuuca

SEQ ID NO: 1726585 - RNA, 19 nt, Artificial Sequence
  Description of Artificial Sequence: Synthetic oligonucleotide
  Sense strand starting at position 3492 of SEQ ID NO: 1562160
gcgaguucacugugaggac

SEQ ID NO: 1726586 - RNA, 19 nt, Artificial Sequence
  Description of Artificial Sequence: Synthetic oligonucleotide
  Antisense strand to SEQ ID NO: 1726585
guccucacagugaacucgc

SEQ ID NO: 1726587 - RNA, 19 nt, Artificial Sequence
  Description of Artificial Sequence: Synthetic oligonucleotide
  Sense strand starting at position 3571 of SEQ ID NO: 1562160
guggaagauucgggcgaca

SEQ ID NO: 1726588 - RNA, 19 nt, Artificial Sequence
  Description of Artificial Sequence: Synthetic oligonucleotide
  Antisense strand to SEQ ID NO: 1726587
ugucgcccgaaucuuccac

SEQ ID NO: 1726589 - RNA, 19 nt, Artificial Sequence
  Description of Artificial Sequence: Synthetic oligonucleotide
  Sense strand starting at position 3854 of SEQ ID NO: 1562160
gcuggucgucgguaggaga

SEQ ID NO: 1726590 - RNA, 19 nt, Artificial Sequence
  Description of Artificial Sequence: Synthetic oligonucleotide
  Antisense strand to SEQ ID NO: 1726589
ucuccuaccgacgaccagc

SEQ ID NO: 1726591 - RNA, 19 nt, Artificial Sequence
  Description of Artificial Sequence: Synthetic oligonucleotide
  Sense strand starting at position 3856 of SEQ ID NO: 1562160
uggucgucgguaggagaau

SEQ ID NO: 1726592 - RNA, 19 nt, Artificial Sequence
  Description of Artificial Sequence: Synthetic oligonucleotide
  Antisense strand to SEQ ID NO: 1726591
auucuccuaccgacgacca

SEQ ID NO: 1726593 - RNA, 19 nt, Artificial Sequence
  Description of Artificial Sequence: Synthetic oligonucleotide
  Sense strand starting at position 3865 of SEQ ID NO: 1562160
guaggagaaucagauuaga

SEQ ID NO: 1726594 - RNA, 19 nt, Artificial Sequence
  Description of Artificial Sequence: Synthetic oligonucleotide
  Antisense strand to SEQ ID NO: 1726593
ucuaaucugauucuccuac

SEQ ID NO: 1726595 - RNA, 19 nt, Artificial Sequence
  Description of Artificial Sequence: Synthetic oligonucleotide
  Sense strand starting at position 3870 of SEQ ID NO: 1562160
agaaucagauuagaaacau

SEQ ID NO: 1726596 - RNA, 19 nt, Artificial Sequence
  Description of Artificial Sequence: Synthetic oligonucleotide
  Antisense strand to SEQ ID NO: 1726595
auguuucuaaucugauucu

SEQ ID NO: 1726597 - RNA, 19 nt, Artificial Sequence
  Description of Artificial Sequence: Synthetic oligonucleotide
  Sense strand starting at position 3977 of SEQ ID NO: 1562160
gcuagaacgugaucuucuu

SEQ ID NO: 1726598 - RNA, 19 nt, Artificial Sequence
  Description of Artificial Sequence: Synthetic oligonucleotide
  Antisense strand to SEQ ID NO: 1726597
aagaagaucacguucuagc

SEQ ID NO: 1726599 - RNA, 19 nt, Artificial Sequence
  Description of Artificial Sequence: Synthetic oligonucleotide
  Sense strand starting at position 8 of SEQ ID NO: 1562161
cgcguuucccuggaacaga

SEQ ID NO: 1726600 - RNA, 19 nt, Artificial Sequence
  Description of Artificial Sequence: Synthetic oligonucleotide
  Antisense strand to SEQ ID NO: 1726599
ucuguuccagggaaacgcg

SEQ ID NO: 1726601 - RNA, 19 nt, Artificial Sequence
  Description of Artificial Sequence: Synthetic oligonucleotide
  Sense strand starting at position 53 of SEQ ID NO: 1562161
uccagaaaugcuuguagaa

SEQ ID NO: 1726602 - RNA, 19 nt, Artificial Sequence
  Description of Artificial Sequence: Synthetic oligonucleotide
  Antisense strand to SEQ ID NO: 1726601
uucuacaagcauuucugga

SEQ ID NO: 1726603 - RNA, 19 nt, Artificial Sequence
  Description of Artificial Sequence: Synthetic oligonucleotide
  Sense strand starting at position 294 of SEQ ID NO: 1562161
ccgaguccugcccggacaa

SEQ ID NO: 1726604 - RNA, 19 nt, Artificial Sequence
  Description of Artificial Sequence: Synthetic oligonucleotide
  Antisense strand to SEQ ID NO: 1726603
uuguccgggcaggacucgg

SEQ ID NO: 1726605 - RNA, 19 nt, Artificial Sequence
  Description of Artificial Sequence: Synthetic oligonucleotide
  Sense strand starting at position 1461 of SEQ ID NO: 1562161
ggcggagaguugaaacaga

SEQ ID NO: 1726606 - RNA, 19 nt, Artificial Sequence
  Description of Artificial Sequence: Synthetic oligonucleotide
  Antisense strand to SEQ ID NO: 1726605
ucuguuucaacucuccgcc

SEQ ID NO: 1726607 - RNA, 19 nt, Artificial Sequence
  Description of Artificial Sequence: Synthetic oligonucleotide
  Sense strand starting at position 1468 of SEQ ID NO: 1562161
aguugaaacagauguggga

SEQ ID NO: 1726608 - RNA, 19 nt, Artificial Sequence
  Description of Artificial Sequence: Synthetic oligonucleotide
  Antisense strand to SEQ ID NO: 1726607
ucccacaucuguuucaacu

SEQ ID NO: 1726609 - RNA, 19 nt, Artificial Sequence
  Description of Artificial Sequence: Synthetic oligonucleotide
  Sense strand starting at position 1742 of SEQ ID NO: 1562161
cucguaaugacacguuaau

SEQ ID NO: 1726610 - RNA, 19 nt, Artificial Sequence
  Description of Artificial Sequence: Synthetic oligonucleotide
  Antisense strand to SEQ ID NO: 1726609
auuaacgugucauuacgag

SEQ ID NO: 1726611 - RNA, 19 nt, Artificial Sequence
  Description of Artificial Sequence: Synthetic oligonucleotide
  Sense strand starting at position 1948 of SEQ ID NO: 1562161
agaaauuaacuucggcuca

SEQ ID NO: 1726612 - RNA, 19 nt, Artificial Sequence
  Description of Artificial Sequence: Synthetic oligonucleotide
  Antisense strand to SEQ ID NO: 1726611
ugagccgaaguuaauuucu

SEQ ID NO: 1726613 - RNA, 19 nt, Artificial Sequence
  Description of Artificial Sequence: Synthetic oligonucleotide
  Sense strand starting at position 1953 of SEQ ID NO: 1562161
uuaacuucggcucaaguga

SEQ ID NO: 1726614 - RNA, 19 nt, Artificial Sequence
  Description of Artificial Sequence: Synthetic oligonucleotide
  Antisense strand to SEQ ID NO: 1726613
ucacuugagccgaaguuaa

SEQ ID NO: 1726615 - RNA, 19 nt, Artificial Sequence
  Description of Artificial Sequence: Synthetic oligonucleotide
  Sense strand starting at position 1976 of SEQ ID NO: 1562161
agcagcuguuguccagaaa

SEQ ID NO: 1726616 - RNA, 19 nt, Artificial Sequence
  Description of Artificial Sequence: Synthetic oligonucleotide
  Antisense strand to SEQ ID NO: 1726615
uuucuggacaacagcugcu

SEQ ID NO: 1726617 - RNA, 19 nt, Artificial Sequence
  Description of Artificial Sequence: Synthetic oligonucleotide
  Sense strand starting at position 1977 of SEQ ID NO: 1562161
gcagcuguuguccagaaau

SEQ ID NO: 1726618 - RNA, 19 nt, Artificial Sequence
  Description of Artificial Sequence: Synthetic oligonucleotide
  Antisense strand to SEQ ID NO: 1726617
auuucuggacaacagcugc

SEQ ID NO: 1726619 - RNA, 19 nt, Artificial Sequence
  Description of Artificial Sequence: Synthetic oligonucleotide
  Sense strand starting at position 1979 of SEQ ID NO: 1562161
agcuguuguccagaaaugg

SEQ ID NO: 1726620 - RNA, 19 nt, Artificial Sequence
  Description of Artificial Sequence: Synthetic oligonucleotide
  Antisense strand to SEQ ID NO: 1726619
ccauuucuggacaacagcu

SEQ ID NO: 1726621 - RNA, 19 nt, Artificial Sequence
  Description of Artificial Sequence: Synthetic oligonucleotide
  Sense strand starting at position 1988 of SEQ ID NO: 1562161
ccagaaauggcccgggagu

SEQ ID NO: 1726622 - RNA, 19 nt, Artificial Sequence
  Description of Artificial Sequence: Synthetic oligonucleotide
  Antisense strand to SEQ ID NO: 1726621
acucccgggccauuucugg

SEQ ID NO: 1726623 - RNA, 19 nt, Artificial Sequence
  Description of Artificial Sequence: Synthetic oligonucleotide
  Sense strand starting at position 2218 of SEQ ID NO: 1562161
ugggaaagcacuuguaaac

SEQ ID NO: 1726624 - RNA, 19 nt, Artificial Sequence
  Description of Artificial Sequence: Synthetic oligonucleotide
  Antisense strand to SEQ ID NO: 1726623
guuuacaagugcuuuccca

SEQ ID NO: 1726625 - RNA, 19 nt, Artificial Sequence
  Description of Artificial Sequence: Synthetic oligonucleotide
  Sense strand starting at position 2230 of SEQ ID NO: 1562161
uguaaacagcaguaacuua

SEQ ID NO: 1726626 - RNA, 19 nt, Artificial Sequence
  Description of Artificial Sequence: Synthetic oligonucleotide
  Antisense strand to SEQ ID NO: 1726625
uaaguuacugcuguuuaca

SEQ ID NO: 1726627 - RNA, 19 nt, Artificial Sequence
  Description of Artificial Sequence: Synthetic oligonucleotide
  Sense strand starting at position 2312 of SEQ ID NO: 1562161
agguuuaguaacuguccga

SEQ ID NO: 1726628 - RNA, 19 nt, Artificial Sequence
  Description of Artificial Sequence: Synthetic oligonucleotide
  Antisense strand to SEQ ID NO: 1726627
ucggacaguuacuaaaccu

SEQ ID NO: 1726629 - RNA, 19 nt, Artificial Sequence
  Description of Artificial Sequence: Synthetic oligonucleotide
  Sense strand starting at position 2315 of SEQ ID NO: 1562161
uuuaguaacuguccgaaga

SEQ ID NO: 1726630 - RNA, 19 nt, Artificial Sequence
  Description of Artificial Sequence: Synthetic oligonucleotide
  Antisense strand to SEQ ID NO: 1726629
ucuucggacaguuacuaaa

SEQ ID NO: 1726631 - RNA, 19 nt, Artificial Sequence
  Description of Artificial Sequence: Synthetic oligonucleotide
  Sense strand starting at position 2316 of SEQ ID NO: 1562161
uuaguaacuguccgaagau

SEQ ID NO: 1726632 - RNA, 19 nt, Artificial Sequence
  Description of Artificial Sequence: Synthetic oligonucleotide
  Antisense strand to SEQ ID NO: 1726631
aucuucggacaguuacuaa

SEQ ID NO: 1726633 - RNA, 19 nt, Artificial Sequence
  Description of Artificial Sequence: Synthetic oligonucleotide
  Sense strand starting at position 2337 of SEQ ID NO: 1562161
cacaguuauaaguggugga

SEQ ID NO: 1726634 - RNA, 19 nt, Artificial Sequence
  Description of Artificial Sequence: Synthetic oligonucleotide
  Antisense strand to SEQ ID NO: 1726633
uccaccacuuauaacugug

SEQ ID NO: 1726635 - RNA, 19 nt, Artificial Sequence
  Description of Artificial Sequence: Synthetic oligonucleotide
  Sense strand starting at position 2338 of SEQ ID NO: 1562161
acaguuauaagugguggau

SEQ ID NO: 1726636 - RNA, 19 nt, Artificial Sequence
  Description of Artificial Sequence: Synthetic oligonucleotide
  Antisense strand to SEQ ID NO: 1726635
auccaccacuuauaacugu

SEQ ID NO: 1726637 - RNA, 19 nt, Artificial Sequence
  Description of Artificial Sequence: Synthetic oligonucleotide
  Sense strand starting at position 2341 of SEQ ID NO: 1562161
guuauaagugguggauccu

SEQ ID NO: 1726638 - RNA, 19 nt, Artificial Sequence
  Description of Artificial Sequence: Synthetic oligonucleotide
  Antisense strand to SEQ ID NO: 1726637
aggauccaccacuuauaac

SEQ ID NO: 1726639 - RNA, 19 nt, Artificial Sequence
  Description of Artificial Sequence: Synthetic oligonucleotide
  Sense strand starting at position 2382 of SEQ ID NO: 1562161
cccggcucaugcucuuaaa

SEQ ID NO: 1726640 - RNA, 19 nt, Artificial Sequence
  Description of Artificial Sequence: Synthetic oligonucleotide
  Antisense strand to SEQ ID NO: 1726639
uuuaagagcaugagccggg

SEQ ID NO: 1726641 - RNA, 19 nt, Artificial Sequence
  Description of Artificial Sequence: Synthetic oligonucleotide
  Sense strand starting at position 2394 of SEQ ID NO: 1562161
ucuuaaauccuaggauguu

SEQ ID NO: 1726642 - RNA, 19 nt, Artificial Sequence
  Description of Artificial Sequence: Synthetic oligonucleotide
  Antisense strand to SEQ ID NO: 1726641
aacauccuaggauuuaaga

SEQ ID NO: 1726643 - RNA, 19 nt, Artificial Sequence
  Description of Artificial Sequence: Synthetic oligonucleotide
  Sense strand starting at position 2446 of SEQ ID NO: 1562161
uaugauccuccaugguaga

SEQ ID NO: 1726644 - RNA, 19 nt, Artificial Sequence
  Description of Artificial Sequence: Synthetic oligonucleotide
  Antisense strand to SEQ ID NO: 1726643
ucuaccauggaggaucaua

SEQ ID NO: 1726645 - RNA, 19 nt, Artificial Sequence
  Description of Artificial Sequence: Synthetic oligonucleotide
  Sense strand starting at position 2457 of SEQ ID NO: 1562161
augguagaguugucagacu

SEQ ID NO: 1726646 - RNA, 19 nt, Artificial Sequence
  Description of Artificial Sequence: Synthetic oligonucleotide
  Antisense strand to SEQ ID NO: 1726645
agucugacaacucuaccau

SEQ ID NO: 1726647 - RNA, 19 nt, Artificial Sequence
  Description of Artificial Sequence: Synthetic oligonucleotide
  Sense strand starting at position 2502 of SEQ ID NO: 1562161
ggaggaaguuaguacuaaa

SEQ ID NO: 1726648 - RNA, 19 nt, Artificial Sequence
  Description of Artificial Sequence: Synthetic oligonucleotide
  Antisense strand to SEQ ID NO: 1726647
uuuaguacuaacuuccucc

SEQ ID NO: 1726649 - RNA, 19 nt, Artificial Sequence
  Description of Artificial Sequence: Synthetic oligonucleotide
  Sense strand starting at position 2720 of SEQ ID NO: 1562161
uucuuugcccugggacaga

SEQ ID NO: 1726650 - RNA, 19 nt, Artificial Sequence
  Description of Artificial Sequence: Synthetic oligonucleotide
  Antisense strand to SEQ ID NO: 1726649
ucugucccagggcaaagaa

SEQ ID NO: 1726651 - RNA, 19 nt, Artificial Sequence
  Description of Artificial Sequence: Synthetic oligonucleotide
  Sense strand starting at position 2790 of SEQ ID NO: 1562161
ccgccucaucucugcagaa

SEQ ID NO: 1726652 - RNA, 19 nt, Artificial Sequence
  Description of Artificial Sequence: Synthetic oligonucleotide
  Antisense strand to SEQ ID NO: 1726651
uucugcagagaugaggcgg

SEQ ID NO: 1726653 - RNA, 19 nt, Artificial Sequence
  Description of Artificial Sequence: Synthetic oligonucleotide
  Sense strand starting at position 3403 of SEQ ID NO: 1562161
cuguuuccaccgggucauu

SEQ ID NO: 1726654 - RNA, 19 nt, Artificial Sequence
  Description of Artificial Sequence: Synthetic oligonucleotide
  Antisense strand to SEQ ID NO: 1726653
aaugacccgguggaaacag

SEQ ID NO: 1726655 - RNA, 19 nt, Artificial Sequence
  Description of Artificial Sequence: Synthetic oligonucleotide
  Sense strand starting at position 3453 of SEQ ID NO: 1562161
aacugaugcucagagagau

SEQ ID NO: 1726656 - RNA, 19 nt, Artificial Sequence
  Description of Artificial Sequence: Synthetic oligonucleotide
  Antisense strand to SEQ ID NO: 1726655
aucucucugagcaucaguu

SEQ ID NO: 1726657 - RNA, 19 nt, Artificial Sequence
  Description of Artificial Sequence: Synthetic oligonucleotide
  Sense strand starting at position 3475 of SEQ ID NO: 1562161
gggucuugccuauagucaa

SEQ ID NO: 1726658 - RNA, 19 nt, Artificial Sequence
  Description of Artificial Sequence: Synthetic oligonucleotide
  Antisense strand to SEQ ID NO: 1726657
uugacuauaggcaagaccc

SEQ ID NO: 1726659 - RNA, 19 nt, Artificial Sequence
  Description of Artificial Sequence: Synthetic oligonucleotide
  Sense strand starting at position 3494 of SEQ ID NO: 1562161
aaacuuggccagugggauu

SEQ ID NO: 1726660 - RNA, 19 nt, Artificial Sequence
  Description of Artificial Sequence: Synthetic oligonucleotide
  Antisense strand to SEQ ID NO: 1726659
aaucccacuggccaaguuu

SEQ ID NO: 1726661 - RNA, 19 nt, Artificial Sequence
  Description of Artificial Sequence: Synthetic oligonucleotide
  Sense strand starting at position 3765 of SEQ ID NO: 1562161
ccucgaguuccugaacaug

SEQ ID NO: 1726662 - RNA, 19 nt, Artificial Sequence
  Description of Artificial Sequence: Synthetic oligonucleotide
  Antisense strand to SEQ ID NO: 1726661
cauguucaggaacucgagg

SEQ ID NO: 1726663 - RNA, 19 nt, Artificial Sequence
  Description of Artificial Sequence: Synthetic oligonucleotide
  Sense strand starting at position 3802 of SEQ ID NO: 1562161
ggauccugcccacaauguu

SEQ ID NO: 1726664 - RNA, 19 nt, Artificial Sequence
  Description of Artificial Sequence: Synthetic oligonucleotide
  Antisense strand to SEQ ID NO: 1726663
aacauugugggcaggaucc

SEQ ID NO: 1726665 - RNA, 19 nt, Artificial Sequence
  Description of Artificial Sequence: Synthetic oligonucleotide
  Sense strand starting at position 3832 of SEQ ID NO: 1562161
uucucugcucgucagguaa

SEQ ID NO: 1726666 - RNA, 19 nt, Artificial Sequence
  Description of Artificial Sequence: Synthetic oligonucleotide
  Antisense strand to SEQ ID NO: 1726665
uuaccugacgagcagagaa

SEQ ID NO: 1726667 - RNA, 19 nt, Artificial Sequence
  Description of Artificial Sequence: Synthetic oligonucleotide
  Sense strand starting at position 3912 of SEQ ID NO: 1562161
guggcauuugcuuaucuuu

SEQ ID NO: 1726668 - RNA, 19 nt, Artificial Sequence
  Description of Artificial Sequence: Synthetic oligonucleotide
  Antisense strand to SEQ ID NO: 1726667
aaagauaagcaaaugccac

SEQ ID NO: 1726669 - RNA, 19 nt, Artificial Sequence
  Description of Artificial Sequence: Synthetic oligonucleotide
  Sense strand starting at position 3931 of SEQ ID NO: 1562161
uuggauauguuguuuccau

SEQ ID NO: 1726670 - RNA, 19 nt, Artificial Sequence
  Description of Artificial Sequence: Synthetic oligonucleotide
  Antisense strand to SEQ ID NO: 1726669
auggaaacaacauauccaa

SEQ ID NO: 1726671 - RNA, 19 nt, Artificial Sequence
  Description of Artificial Sequence: Synthetic oligonucleotide
  Sense strand starting at position 3932 of SEQ ID NO: 1562161
uggauauguuguuuccauu

SEQ ID NO: 1726672 - RNA, 19 nt, Artificial Sequence
  Description of Artificial Sequence: Synthetic oligonucleotide
  Antisense strand to SEQ ID NO: 1726671
aauggaaacaacauaucca

SEQ ID NO: 1726673 - RNA, 19 nt, Artificial Sequence
  Description of Artificial Sequence: Synthetic oligonucleotide
  Sense strand starting at position 3943 of SEQ ID NO: 1562161
uuuccauuguugcuggaca

SEQ ID NO: 1726674 - RNA, 19 nt, Artificial Sequence
  Description of Artificial Sequence: Synthetic oligonucleotide
  Antisense strand to SEQ ID NO: 1726673
uguccagcaacaauggaaa

SEQ ID NO: 1726675 - RNA, 19 nt, Artificial Sequence
  Description of Artificial Sequence: Synthetic oligonucleotide
  Sense strand starting at position 3945 of SEQ ID NO: 1562161
uccauuguugcuggacauu

SEQ ID NO: 1726676 - RNA, 19 nt, Artificial Sequence
  Description of Artificial Sequence: Synthetic oligonucleotide
  Antisense strand to SEQ ID NO: 1726675
aauguccagcaacaaugga

SEQ ID NO: 1726677 - RNA, 19 nt, Artificial Sequence
  Description of Artificial Sequence: Synthetic oligonucleotide
  Sense strand starting at position 3954 of SEQ ID NO: 1562161
gcuggacauuaccaaacau

SEQ ID NO: 1726678 - RNA, 19 nt, Artificial Sequence
  Description of Artificial Sequence: Synthetic oligonucleotide
  Antisense strand to SEQ ID NO: 1726677
auguuugguaauguccagc

SEQ ID NO: 1726679 - RNA, 19 nt, Artificial Sequence
  Description of Artificial Sequence: Synthetic oligonucleotide
  Sense strand starting at position 560 of SEQ ID NO: 1562162
cgcguuucccuggaacaga

SEQ ID NO: 1726680 - RNA, 19 nt, Artificial Sequence
  Description of Artificial Sequence: Synthetic oligonucleotide
  Antisense strand to SEQ ID NO: 1726679
ucuguuccagggaaacgcg

SEQ ID NO: 1726681 - RNA, 19 nt, Artificial Sequence
  Description of Artificial Sequence: Synthetic oligonucleotide
  Sense strand starting at position 605 of SEQ ID NO: 1562162
uccagaaaugcuuguagaa

SEQ ID NO: 1726682 - RNA, 19 nt, Artificial Sequence
  Description of Artificial Sequence: Synthetic oligonucleotide
  Antisense strand to SEQ ID NO: 1726681
uucuacaagcauuucugga

SEQ ID NO: 1726683 - RNA, 19 nt, Artificial Sequence
  Description of Artificial Sequence: Synthetic oligonucleotide
  Sense strand starting at position 678 of SEQ ID NO: 1562162
ccgcuagacuucugaaacc

SEQ ID NO: 1726684 - RNA, 19 nt, Artificial Sequence
  Description of Artificial Sequence: Synthetic oligonucleotide
  Antisense strand to SEQ ID NO: 1726683
gguuucagaagucuagcgg

SEQ ID NO: 1726685 - RNA, 19 nt, Artificial Sequence
  Description of Artificial Sequence: Synthetic oligonucleotide
  Sense strand starting at position 846 of SEQ ID NO: 1562162
ccgaguccugcccggacaa

SEQ ID NO: 1726686 - RNA, 19 nt, Artificial Sequence
  Description of Artificial Sequence: Synthetic oligonucleotide
  Antisense strand to SEQ ID NO: 1726685
uuguccgggcaggacucgg

SEQ ID NO: 1726687 - RNA, 19 nt, Artificial Sequence
  Description of Artificial Sequence: Synthetic oligonucleotide
  Sense strand starting at position 2013 of SEQ ID NO: 1562162
ggcggagaguugaaacaga

SEQ ID NO: 1726688 - RNA, 19 nt, Artificial Sequence
  Description of Artificial Sequence: Synthetic oligonucleotide
  Antisense strand to SEQ ID NO: 1726687
ucuguuucaacucuccgcc

SEQ ID NO: 1726689 - RNA, 19 nt, Artificial Sequence
  Description of Artificial Sequence: Synthetic oligonucleotide
  Sense strand starting at position 2020 of SEQ ID NO: 1562162
aguugaaacagauguggga

SEQ ID NO: 1726690 - RNA, 19 nt, Artificial Sequence
  Description of Artificial Sequence: Synthetic oligonucleotide
  Antisense strand to SEQ ID NO: 1726689
ucccacaucuguuucaacu

SEQ ID NO: 1726691 - RNA, 19 nt, Artificial Sequence
  Description of Artificial Sequence: Synthetic oligonucleotide
  Sense strand starting at position 2120 of SEQ ID NO: 1562162
gggcaucgcuaauaaauca

SEQ ID NO: 1726692 - RNA, 19 nt, Artificial Sequence
  Description of Artificial Sequence: Synthetic oligonucleotide
  Antisense strand to SEQ ID NO: 1726691
ugauuuauuagcgaugccc

SEQ ID NO: 1726693 - RNA, 19 nt, Artificial Sequence
  Description of Artificial Sequence: Synthetic oligonucleotide
  Sense strand starting at position 2294 of SEQ ID NO: 1562162
cucguaaugacacguuaau

SEQ ID NO: 1726694 - RNA, 19 nt, Artificial Sequence
  Description of Artificial Sequence: Synthetic oligonucleotide
  Antisense strand to SEQ ID NO: 1726693
auuaacgugucauuacgag

SEQ ID NO: 1726695 - RNA, 19 nt, Artificial Sequence
  Description of Artificial Sequence: Synthetic oligonucleotide
  Sense strand starting at position 2500 of SEQ ID NO: 1562162
agaaauuaacuucggcuca

SEQ ID NO: 1726696 - RNA, 19 nt, Artificial Sequence
  Description of Artificial Sequence: Synthetic oligonucleotide
  Antisense strand to SEQ ID NO: 1726695
ugagccgaaguuaauuucu

SEQ ID NO: 1726697 - RNA, 19 nt, Artificial Sequence
  Description of Artificial Sequence: Synthetic oligonucleotide
  Sense strand starting at position 2505 of SEQ ID NO: 1562162
uuaacuucggcucaaguga

SEQ ID NO: 1726698 - RNA, 19 nt, Artificial Sequence
  Description of Artificial Sequence: Synthetic oligonucleotide
  Antisense strand to SEQ ID NO: 1726697
ucacuugagccgaaguuaa

SEQ ID NO: 1726699 - RNA, 19 nt, Artificial Sequence
  Description of Artificial Sequence: Synthetic oligonucleotide
  Sense strand starting at position 2528 of SEQ ID NO: 1562162
agcagcuguuguccagaaa

SEQ ID NO: 1726700 - RNA, 19 nt, Artificial Sequence
  Description of Artificial Sequence: Synthetic oligonucleotide
  Antisense strand to SEQ ID NO: 1726699
uuucuggacaacagcugcu

SEQ ID NO: 1726701 - RNA, 19 nt, Artificial Sequence
  Description of Artificial Sequence: Synthetic oligonucleotide
  Sense strand starting at position 2529 of SEQ ID NO: 1562162
gcagcuguuguccagaaau

SEQ ID NO: 1726702 - RNA, 19 nt, Artificial Sequence
  Description of Artificial Sequence: Synthetic oligonucleotide
  Antisense strand to SEQ ID NO: 1726701
auuucuggacaacagcugc

SEQ ID NO: 1726703 - RNA, 19 nt, Artificial Sequence
  Description of Artificial Sequence: Synthetic oligonucleotide
  Sense strand starting at position 2531 of SEQ ID NO: 1562162
agcuguuguccagaaaugg

SEQ ID NO: 1726704 - RNA, 19 nt, Artificial Sequence
  Description of Artificial Sequence: Synthetic oligonucleotide
  Antisense strand to SEQ ID NO: 1726703
ccauuucuggacaacagcu

SEQ ID NO: 1726705 - RNA, 19 nt, Artificial Sequence
  Description of Artificial Sequence: Synthetic oligonucleotide
  Sense strand starting at position 2540 of SEQ ID NO: 1562162
ccagaaauggcccgggagu

SEQ ID NO: 1726706 - RNA, 19 nt, Artificial Sequence
  Description of Artificial Sequence: Synthetic oligonucleotide
  Antisense strand to SEQ ID NO: 1726705
acucccgggccauuucugg

SEQ ID NO: 1726707 - RNA, 19 nt, Artificial Sequence
  Description of Artificial Sequence: Synthetic oligonucleotide
  Sense strand starting at position 2770 of SEQ ID NO: 1562162
ugggaaagcacuuguaaac

SEQ ID NO: 1726708 - RNA, 19 nt, Artificial Sequence
  Description of Artificial Sequence: Synthetic oligonucleotide
  Antisense strand to SEQ ID NO: 1726707
guuuacaagugcuuuccca

SEQ ID NO: 1726709 - RNA, 19 nt, Artificial Sequence
  Description of Artificial Sequence: Synthetic oligonucleotide
  Sense strand starting at position 2782 of SEQ ID NO: 1562162
uguaaacagcaguaacuua

SEQ ID NO: 1726710 - RNA, 19 nt, Artificial Sequence
  Description of Artificial Sequence: Synthetic oligonucleotide
  Antisense strand to SEQ ID NO: 1726709
uaaguuacugcuguuuaca

SEQ ID NO: 1726711 - RNA, 19 nt, Artificial Sequence
  Description of Artificial Sequence: Synthetic oligonucleotide
  Sense strand starting at position 2810 of SEQ ID NO: 1562162
gugacaaucucacacagua

SEQ ID NO: 1726712 - RNA, 19 nt, Artificial Sequence
  Description of Artificial Sequence: Synthetic oligonucleotide
  Antisense strand to SEQ ID NO: 1726711
uacugugugagauugucac

SEQ ID NO: 1726713 - RNA, 19 nt, Artificial Sequence
  Description of Artificial Sequence: Synthetic oligonucleotide
  Sense strand starting at position 2864 of SEQ ID NO: 1562162
agguuuaguaacuguccga

SEQ ID NO: 1726714 - RNA, 19 nt, Artificial Sequence
  Description of Artificial Sequence: Synthetic oligonucleotide
  Antisense strand to SEQ ID NO: 1726713
ucggacaguuacuaaaccu

SEQ ID NO: 1726715 - RNA, 19 nt, Artificial Sequence
  Description of Artificial Sequence: Synthetic oligonucleotide
  Sense strand starting at position 2867 of SEQ ID NO: 1562162
uuuaguaacuguccgaaga

SEQ ID NO: 1726716 - RNA, 19 nt, Artificial Sequence
  Description of Artificial Sequence: Synthetic oligonucleotide
  Antisense strand to SEQ ID NO: 1726715
ucuucggacaguuacuaaa

SEQ ID NO: 1726717 - RNA, 19 nt, Artificial Sequence
  Description of Artificial Sequence: Synthetic oligonucleotide
  Sense strand starting at position 2868 of SEQ ID NO: 1562162
uuaguaacuguccgaagau

SEQ ID NO: 1726718 - RNA, 19 nt, Artificial Sequence
  Description of Artificial Sequence: Synthetic oligonucleotide
  Antisense strand to SEQ ID NO: 1726717
aucuucggacaguuacuaa

SEQ ID NO: 1726719 - RNA, 19 nt, Artificial Sequence
  Description of Artificial Sequence: Synthetic oligonucleotide
  Sense strand starting at position 2869 of SEQ ID NO: 1562162
uaguaacuguccgaagauc

SEQ ID NO: 1726720 - RNA, 19 nt, Artificial Sequence
  Description of Artificial Sequence: Synthetic oligonucleotide
  Antisense strand to SEQ ID NO: 1726719
gaucuucggacaguuacua

SEQ ID NO: 1726721 - RNA, 19 nt, Artificial Sequence
  Description of Artificial Sequence: Synthetic oligonucleotide
  Sense strand starting at position 2889 of SEQ ID NO: 1562162
cacaguuauaaguggugga

SEQ ID NO: 1726722 - RNA, 19 nt, Artificial Sequence
  Description of Artificial Sequence: Synthetic oligonucleotide
  Antisense strand to SEQ ID NO: 1726721
uccaccacuuauaacugug

SEQ ID NO: 1726723 - RNA, 19 nt, Artificial Sequence
  Description of Artificial Sequence: Synthetic oligonucleotide
  Sense strand starting at position 2890 of SEQ ID NO: 1562162
acaguuauaagugguggau

SEQ ID NO: 1726724 - RNA, 19 nt, Artificial Sequence
  Description of Artificial Sequence: Synthetic oligonucleotide
  Antisense strand to SEQ ID NO: 1726723
auccaccacuuauaacugu

SEQ ID NO: 1726725 - RNA, 19 nt, Artificial Sequence
  Description of Artificial Sequence: Synthetic oligonucleotide
  Sense strand starting at position 2893 of SEQ ID NO: 1562162
guuauaagugguggauccu

SEQ ID NO: 1726726 - RNA, 19 nt, Artificial Sequence
  Description of Artificial Sequence: Synthetic oligonucleotide
  Antisense strand to SEQ ID NO: 1726725
aggauccaccacuuauaac

SEQ ID NO: 1726727 - RNA, 19 nt, Artificial Sequence
  Description of Artificial Sequence: Synthetic oligonucleotide
  Sense strand starting at position 2899 of SEQ ID NO: 1562162
agugguggauccugugaag

SEQ ID NO: 1726728 - RNA, 19 nt, Artificial Sequence
  Description of Artificial Sequence: Synthetic oligonucleotide
  Antisense strand to SEQ ID NO: 1726727
cuucacaggauccaccacu

SEQ ID NO: 1726729 - RNA, 19 nt, Artificial Sequence
  Description of Artificial Sequence: Synthetic oligonucleotide
  Sense strand starting at position 2902 of SEQ ID NO: 1562162
gguggauccugugaagcca

SEQ ID NO: 1726730 - RNA, 19 nt, Artificial Sequence
  Description of Artificial Sequence: Synthetic oligonucleotide
  Antisense strand to SEQ ID NO: 1726729
uggcuucacaggauccacc

SEQ ID NO: 1726731 - RNA, 19 nt, Artificial Sequence
  Description of Artificial Sequence: Synthetic oligonucleotide
  Sense strand starting at position 2934 of SEQ ID NO: 1562162
cccggcucaugcucuuaaa

SEQ ID NO: 1726732 - RNA, 19 nt, Artificial Sequence
  Description of Artificial Sequence: Synthetic oligonucleotide
  Antisense strand to SEQ ID NO: 1726731
uuuaagagcaugagccggg

SEQ ID NO: 1726733 - RNA, 19 nt, Artificial Sequence
  Description of Artificial Sequence: Synthetic oligonucleotide
  Sense strand starting at position 2944 of SEQ ID NO: 1562162
gcucuuaaauccuaggaug

SEQ ID NO: 1726734 - RNA, 19 nt, Artificial Sequence
  Description of Artificial Sequence: Synthetic oligonucleotide
  Antisense strand to SEQ ID NO: 1726733
cauccuaggauuuaagagc

SEQ ID NO: 1726735 - RNA, 19 nt, Artificial Sequence
  Description of Artificial Sequence: Synthetic oligonucleotide
  Sense strand starting at position 2946 of SEQ ID NO: 1562162
ucuuaaauccuaggauguu

SEQ ID NO: 1726736 - RNA, 19 nt, Artificial Sequence
  Description of Artificial Sequence: Synthetic oligonucleotide
  Antisense strand to SEQ ID NO: 1726735
aacauccuaggauuuaaga

SEQ ID NO: 1726737 - RNA, 19 nt, Artificial Sequence
  Description of Artificial Sequence: Synthetic oligonucleotide
  Sense strand starting at position 2947 of SEQ ID NO: 1562162
cuuaaauccuaggauguuu

SEQ ID NO: 1726738 - RNA, 19 nt, Artificial Sequence
  Description of Artificial Sequence: Synthetic oligonucleotide
  Antisense strand to SEQ ID NO: 1726737
aaacauccuaggauuuaag

SEQ ID NO: 1726739 - RNA, 19 nt, Artificial Sequence
  Description of Artificial Sequence: Synthetic oligonucleotide
  Sense strand starting at position 2998 of SEQ ID NO: 1562162
uaugauccuccaugguaga

SEQ ID NO: 1726740 - RNA, 19 nt, Artificial Sequence
  Description of Artificial Sequence: Synthetic oligonucleotide
  Antisense strand to SEQ ID NO: 1726739
ucuaccauggaggaucaua

SEQ ID NO: 1726741 - RNA, 19 nt, Artificial Sequence
  Description of Artificial Sequence: Synthetic oligonucleotide
  Sense strand starting at position 3001 of SEQ ID NO: 1562162
gauccuccaugguagaguu

SEQ ID NO: 1726742 - RNA, 19 nt, Artificial Sequence
  Description of Artificial Sequence: Synthetic oligonucleotide
  Antisense strand to SEQ ID NO: 1726741
aacucuaccauggaggauc

SEQ ID NO: 1726743 - RNA, 19 nt, Artificial Sequence
  Description of Artificial Sequence: Synthetic oligonucleotide
  Sense strand starting at position 3009 of SEQ ID NO: 1562162
augguagaguugucagacu

SEQ ID NO: 1726744 - RNA, 19 nt, Artificial Sequence
  Description of Artificial Sequence: Synthetic oligonucleotide
  Antisense strand to SEQ ID NO: 1726743
agucugacaacucuaccau

SEQ ID NO: 1726745 - RNA, 19 nt, Artificial Sequence
  Description of Artificial Sequence: Synthetic oligonucleotide
  Sense strand starting at position 3054 of SEQ ID NO: 1562162
ggaggaaguuaguacuaaa

SEQ ID NO: 1726746 - RNA, 19 nt, Artificial Sequence
  Description of Artificial Sequence: Synthetic oligonucleotide
  Antisense strand to SEQ ID NO: 1726745
uuuaguacuaacuuccucc

SEQ ID NO: 1726747 - RNA, 19 nt, Artificial Sequence
  Description of Artificial Sequence: Synthetic oligonucleotide
  Sense strand starting at position 3150 of SEQ ID NO: 1562162
cucuguuagccacgccaau

SEQ ID NO: 1726748 - RNA, 19 nt, Artificial Sequence
  Description of Artificial Sequence: Synthetic oligonucleotide
  Antisense strand to SEQ ID NO: 1726747
auuggcguggcuaacagag

SEQ ID NO: 1726749 - RNA, 19 nt, Artificial Sequence
  Description of Artificial Sequence: Synthetic oligonucleotide
  Sense strand starting at position 3272 of SEQ ID NO: 1562162
uucuuugcccugggacaga

SEQ ID NO: 1726750 - RNA, 19 nt, Artificial Sequence
  Description of Artificial Sequence: Synthetic oligonucleotide
  Antisense strand to SEQ ID NO: 1726749
ucugucccagggcaaagaa

SEQ ID NO: 1726751 - RNA, 19 nt, Artificial Sequence
  Description of Artificial Sequence: Synthetic oligonucleotide
  Sense strand starting at position 3342 of SEQ ID NO: 1562162
ccgccucaucucugcagaa

SEQ ID NO: 1726752 - RNA, 19 nt, Artificial Sequence
  Description of Artificial Sequence: Synthetic oligonucleotide
  Antisense strand to SEQ ID NO: 1726751
uucugcagagaugaggcgg

SEQ ID NO: 1726753 - RNA, 19 nt, Artificial Sequence
  Description of Artificial Sequence: Synthetic oligonucleotide
  Sense strand starting at position 3849 of SEQ ID NO: 1562162
ugguguacauucuaaacuu

SEQ ID NO: 1726754 - RNA, 19 nt, Artificial Sequence
  Description of Artificial Sequence: Synthetic oligonucleotide
  Antisense strand to SEQ ID NO: 1726753
aaguuuagaauguacacca

SEQ ID NO: 1726755 - RNA, 19 nt, Artificial Sequence
  Description of Artificial Sequence: Synthetic oligonucleotide
  Sense strand starting at position 3954 of SEQ ID NO: 1562162
gcuguuuccaccgggucau

SEQ ID NO: 1726756 - RNA, 19 nt, Artificial Sequence
  Description of Artificial Sequence: Synthetic oligonucleotide
  Antisense strand to SEQ ID NO: 1726755
augacccgguggaaacagc

SEQ ID NO: 1726757 - RNA, 19 nt, Artificial Sequence
  Description of Artificial Sequence: Synthetic oligonucleotide
  Sense strand starting at position 3955 of SEQ ID NO: 1562162
cuguuuccaccgggucauu

SEQ ID NO: 1726758 - RNA, 19 nt, Artificial Sequence
  Description of Artificial Sequence: Synthetic oligonucleotide
  Antisense strand to SEQ ID NO: 1726757
aaugacccgguggaaacag

SEQ ID NO: 1726759 - RNA, 19 nt, Artificial Sequence
  Description of Artificial Sequence: Synthetic oligonucleotide
  Sense strand starting at position 4 of SEQ ID NO: 1562163
uggguagaacuccagaguu

SEQ ID NO: 1726760 - RNA, 19 nt, Artificial Sequence
  Description of Artificial Sequence: Synthetic oligonucleotide
  Antisense strand to SEQ ID NO: 1726759
aacucuggaguucuaccca

SEQ ID NO: 1726761 - RNA, 19 nt, Artificial Sequence
  Description of Artificial Sequence: Synthetic oligonucleotide
  Sense strand starting at position 118 of SEQ ID NO: 1562163
auugaugacgaaggugauu

SEQ ID NO: 1726762 - RNA, 19 nt, Artificial Sequence
  Description of Artificial Sequence: Synthetic oligonucleotide
  Antisense strand to SEQ ID NO: 1726761
aaucaccuucgucaucaau

SEQ ID NO: 1726763 - RNA, 19 nt, Artificial Sequence
  Description of Artificial Sequence: Synthetic oligonucleotide
  Sense strand starting at position 120 of SEQ ID NO: 1562163
ugaugacgaaggugauuau

SEQ ID NO: 1726764 - RNA, 19 nt, Artificial Sequence
  Description of Artificial Sequence: Synthetic oligonucleotide
  Antisense strand to SEQ ID NO: 1726763
auaaucaccuucgucauca

SEQ ID NO: 1726765 - RNA, 19 nt, Artificial Sequence
  Description of Artificial Sequence: Synthetic oligonucleotide
  Sense strand starting at position 123 of SEQ ID NO: 1562163
ugacgaaggugauuauuca

SEQ ID NO: 1726766 - RNA, 19 nt, Artificial Sequence
  Description of Artificial Sequence: Synthetic oligonucleotide
  Antisense strand to SEQ ID NO: 1726765
ugaauaaucaccuucguca

SEQ ID NO: 1726767 - RNA, 19 nt, Artificial Sequence
  Description of Artificial Sequence: Synthetic oligonucleotide
  Sense strand starting at position 222 of SEQ ID NO: 1562163
uugucaucugcagagagca

SEQ ID NO: 1726768 - RNA, 19 nt, Artificial Sequence
  Description of Artificial Sequence: Synthetic oligonucleotide
  Antisense strand to SEQ ID NO: 1726767
ugcucucugcagaugacaa

SEQ ID NO: 1726769 - RNA, 19 nt, Artificial Sequence
  Description of Artificial Sequence: Synthetic oligonucleotide
  Sense strand starting at position 268 of SEQ ID NO: 1562163
uugauuuggugcuugcaga

SEQ ID NO: 1726770 - RNA, 19 nt, Artificial Sequence
  Description of Artificial Sequence: Synthetic oligonucleotide
  Antisense strand to SEQ ID NO: 1726769
ucugcaagcaccaaaucaa

SEQ ID NO: 1726771 - RNA, 19 nt, Artificial Sequence
  Description of Artificial Sequence: Synthetic oligonucleotide
  Sense strand starting at position 383 of SEQ ID NO: 1562163
cccucagcugcccaugaaa

SEQ ID NO: 1726772 - RNA, 19 nt, Artificial Sequence
  Description of Artificial Sequence: Synthetic oligonucleotide
  Antisense strand to SEQ ID NO: 1726771
uuucaugggcagcugaggg

SEQ ID NO: 1726773 - RNA, 19 nt, Artificial Sequence
  Description of Artificial Sequence: Synthetic oligonucleotide
  Sense strand starting at position 528 of SEQ ID NO: 1562163
ggaacauaguguccuugga

SEQ ID NO: 1726774 - RNA, 19 nt, Artificial Sequence
  Description of Artificial Sequence: Synthetic oligonucleotide
  Antisense strand to SEQ ID NO: 1726773
uccaaggacacuauguucc

SEQ ID NO: 1726775 - RNA, 19 nt, Artificial Sequence
  Description of Artificial Sequence: Synthetic oligonucleotide
  Sense strand starting at position 530 of SEQ ID NO: 1562163
aacauaguguccuuggaau

SEQ ID NO: 1726776 - RNA, 19 nt, Artificial Sequence
  Description of Artificial Sequence: Synthetic oligonucleotide
  Antisense strand to SEQ ID NO: 1726775
auuccaaggacacuauguu

SEQ ID NO: 1726777 - RNA, 19 nt, Artificial Sequence
  Description of Artificial Sequence: Synthetic oligonucleotide
  Sense strand starting at position 557 of SEQ ID NO: 1562163
cacguuccagauugggaaa

SEQ ID NO: 1726778 - RNA, 19 nt, Artificial Sequence
  Description of Artificial Sequence: Synthetic oligonucleotide
  Antisense strand to SEQ ID NO: 1726777
uuucccaaucuggaacgug

SEQ ID NO: 1726779 - RNA, 19 nt, Artificial Sequence
  Description of Artificial Sequence: Synthetic oligonucleotide
  Sense strand starting at position 584 of SEQ ID NO: 1562163
cagagaagguuucccaaca

SEQ ID NO: 1726780 - RNA, 19 nt, Artificial Sequence
  Description of Artificial Sequence: Synthetic oligonucleotide
  Antisense strand to SEQ ID NO: 1726779
uguugggaaaccuucucug

SEQ ID NO: 1726781 - RNA, 19 nt, Artificial Sequence
  Description of Artificial Sequence: Synthetic oligonucleotide
  Sense strand starting at position 824 of SEQ ID NO: 1562163
cugugauugguucaagggu

SEQ ID NO: 1726782 - RNA, 19 nt, Artificial Sequence
  Description of Artificial Sequence: Synthetic oligonucleotide
  Antisense strand to SEQ ID NO: 1726781
acccuugaaccaaucacag

SEQ ID NO: 1726783 - RNA, 19 nt, Artificial Sequence
  Description of Artificial Sequence: Synthetic oligonucleotide
  Sense strand starting at position 915 of SEQ ID NO: 1562163
uagguuuaggauuagcuaa

SEQ ID NO: 1726784 - RNA, 19 nt, Artificial Sequence
  Description of Artificial Sequence: Synthetic oligonucleotide
  Antisense strand to SEQ ID NO: 1726783
uuagcuaauccuaaaccua

SEQ ID NO: 1726785 - RNA, 19 nt, Artificial Sequence
  Description of Artificial Sequence: Synthetic oligonucleotide
  Sense strand starting at position 917 of SEQ ID NO: 1562163
gguuuaggauuagcuaaau

SEQ ID NO: 1726786 - RNA, 19 nt, Artificial Sequence
  Description of Artificial Sequence: Synthetic oligonucleotide
  Antisense strand to SEQ ID NO: 1726785
auuuagcuaauccuaaacc

SEQ ID NO: 1726787 - RNA, 19 nt, Artificial Sequence
  Description of Artificial Sequence: Synthetic oligonucleotide
  Sense strand starting at position 977 of SEQ ID NO: 1562163
gccacauuucugcgugaca

SEQ ID NO: 1726788 - RNA, 19 nt, Artificial Sequence
  Description of Artificial Sequence: Synthetic oligonucleotide
  Antisense strand to SEQ ID NO: 1726787
ugucacgcagaaauguggc

SEQ ID NO: 1726789 - RNA, 19 nt, Artificial Sequence
  Description of Artificial Sequence: Synthetic oligonucleotide
  Sense strand starting at position 978 of SEQ ID NO: 1562163
ccacauuucugcgugacac

SEQ ID NO: 1726790 - RNA, 19 nt, Artificial Sequence
  Description of Artificial Sequence: Synthetic oligonucleotide
  Antisense strand to SEQ ID NO: 1726789
gugucacgcagaaaugugg

SEQ ID NO: 1726791 - RNA, 19 nt, Artificial Sequence
  Description of Artificial Sequence: Synthetic oligonucleotide
  Sense strand starting at position 1118 of SEQ ID NO: 1562163
uugggaccucuugauaugu

SEQ ID NO: 1726792 - RNA, 19 nt, Artificial Sequence
  Description of Artificial Sequence: Synthetic oligonucleotide
  Antisense strand to SEQ ID NO: 1726791
acauaucaagaggucccaa

SEQ ID NO: 1726793 - RNA, 19 nt, Artificial Sequence
  Description of Artificial Sequence: Synthetic oligonucleotide
  Sense strand starting at position 1123 of SEQ ID NO: 1562163
accucuugauaugugagau

SEQ ID NO: 1726794 - RNA, 19 nt, Artificial Sequence
  Description of Artificial Sequence: Synthetic oligonucleotide
  Antisense strand to SEQ ID NO: 1726793
aucucacauaucaagaggu

SEQ ID NO: 1726795 - RNA, 19 nt, Artificial Sequence
  Description of Artificial Sequence: Synthetic oligonucleotide
  Sense strand starting at position 1127 of SEQ ID NO: 1562163
cuugauaugugagauuuaa

SEQ ID NO: 1726796 - RNA, 19 nt, Artificial Sequence
  Description of Artificial Sequence: Synthetic oligonucleotide
  Antisense strand to SEQ ID NO: 1726795
uuaaaucucacauaucaag

SEQ ID NO: 1726797 - RNA, 19 nt, Artificial Sequence
  Description of Artificial Sequence: Synthetic oligonucleotide
  Sense strand starting at position 1165 of SEQ ID NO: 1562163
agucaaaggucuuuaaaca

SEQ ID NO: 1726798 - RNA, 19 nt, Artificial Sequence
  Description of Artificial Sequence: Synthetic oligonucleotide
  Antisense strand to SEQ ID NO: 1726797
uguuuaaagaccuuugacu

SEQ ID NO: 1726799 - RNA, 19 nt, Artificial Sequence
  Description of Artificial Sequence: Synthetic oligonucleotide
  Sense strand starting at position 1166 of SEQ ID NO: 1562163
gucaaaggucuuuaaacau

SEQ ID NO: 1726800 - RNA, 19 nt, Artificial Sequence
  Description of Artificial Sequence: Synthetic oligonucleotide
  Antisense strand to SEQ ID NO: 1726799
auguuuaaagaccuuugac

SEQ ID NO: 1726801 - RNA, 19 nt, Artificial Sequence
  Description of Artificial Sequence: Synthetic oligonucleotide
  Sense strand starting at position 1249 of SEQ ID NO: 1562163
guacuaauacauuguuuac

SEQ ID NO: 1726802 - RNA, 19 nt, Artificial Sequence
  Description of Artificial Sequence: Synthetic oligonucleotide
  Antisense strand to SEQ ID NO: 1726801
guaaacaauguauuaguac

SEQ ID NO: 1726803 - RNA, 19 nt, Artificial Sequence
  Description of Artificial Sequence: Synthetic oligonucleotide
  Sense strand starting at position 1281 of SEQ ID NO: 1562163
acagauuuaugguaacauu

SEQ ID NO: 1726804 - RNA, 19 nt, Artificial Sequence
  Description of Artificial Sequence: Synthetic oligonucleotide
  Antisense strand to SEQ ID NO: 1726803
aauguuaccauaaaucugu

SEQ ID NO: 1726805 - RNA, 19 nt, Artificial Sequence
  Description of Artificial Sequence: Synthetic oligonucleotide
  Sense strand starting at position 1289 of SEQ ID NO: 1562163
augguaacauuccugaaua

SEQ ID NO: 1726806 - RNA, 19 nt, Artificial Sequence
  Description of Artificial Sequence: Synthetic oligonucleotide
  Antisense strand to SEQ ID NO: 1726805
uauucaggaauguuaccau

SEQ ID NO: 1726807 - RNA, 19 nt, Artificial Sequence
  Description of Artificial Sequence: Synthetic oligonucleotide
  Sense strand starting at position 1379 of SEQ ID NO: 1562163
uugguauacucucuuggga

SEQ ID NO: 1726808 - RNA, 19 nt, Artificial Sequence
  Description of Artificial Sequence: Synthetic oligonucleotide
  Antisense strand to SEQ ID NO: 1726807
ucccaagagaguauaccaa

SEQ ID NO: 1726809 - RNA, 19 nt, Artificial Sequence
  Description of Artificial Sequence: Synthetic oligonucleotide
  Sense strand starting at position 1382 of SEQ ID NO: 1562163
guauacucucuugggauau

SEQ ID NO: 1726810 - RNA, 19 nt, Artificial Sequence
  Description of Artificial Sequence: Synthetic oligonucleotide
  Antisense strand to SEQ ID NO: 1726809
auaucccaagagaguauac

SEQ ID NO: 1726811 - RNA, 19 nt, Artificial Sequence
  Description of Artificial Sequence: Synthetic oligonucleotide
  Sense strand starting at position 1682 of SEQ ID NO: 1562163
ugggaauaccacugccaaa

SEQ ID NO: 1726812 - RNA, 19 nt, Artificial Sequence
  Description of Artificial Sequence: Synthetic oligonucleotide
  Antisense strand to SEQ ID NO: 1726811
uuuggcagugguauuccca

SEQ ID NO: 1726813 - RNA, 19 nt, Artificial Sequence
  Description of Artificial Sequence: Synthetic oligonucleotide
  Sense strand starting at position 1840 of SEQ ID NO: 1562163
cugggauugugggccacau

SEQ ID NO: 1726814 - RNA, 19 nt, Artificial Sequence
  Description of Artificial Sequence: Synthetic oligonucleotide
  Antisense strand to SEQ ID NO: 1726813
auguggcccacaaucccag

SEQ ID NO: 1726815 - RNA, 19 nt, Artificial Sequence
  Description of Artificial Sequence: Synthetic oligonucleotide
  Sense strand starting at position 2008 of SEQ ID NO: 1562163
ggaaucugccaggaucagu

SEQ ID NO: 1726816 - RNA, 19 nt, Artificial Sequence
  Description of Artificial Sequence: Synthetic oligonucleotide
  Antisense strand to SEQ ID NO: 1726815
acugauccuggcagauucc

SEQ ID NO: 1726817 - RNA, 19 nt, Artificial Sequence
  Description of Artificial Sequence: Synthetic oligonucleotide
  Sense strand starting at position 2348 of SEQ ID NO: 1562163
guggacauugugcauaaca

SEQ ID NO: 1726818 - RNA, 19 nt, Artificial Sequence
  Description of Artificial Sequence: Synthetic oligonucleotide
  Antisense strand to SEQ ID NO: 1726817
uguuaugcacaauguccac

SEQ ID NO: 1726819 - RNA, 19 nt, Artificial Sequence
  Description of Artificial Sequence: Synthetic oligonucleotide
  Sense strand starting at position 2350 of SEQ ID NO: 1562163
ggacauugugcauaacaca

SEQ ID NO: 1726820 - RNA, 19 nt, Artificial Sequence
  Description of Artificial Sequence: Synthetic oligonucleotide
  Antisense strand to SEQ ID NO: 1726819
uguguuaugcacaaugucc

SEQ ID NO: 1726821 - RNA, 19 nt, Artificial Sequence
  Description of Artificial Sequence: Synthetic oligonucleotide
  Sense strand starting at position 2379 of SEQ ID NO: 1562163
gcauguguuguugcuuuaa

SEQ ID NO: 1726822 - RNA, 19 nt, Artificial Sequence
  Description of Artificial Sequence: Synthetic oligonucleotide
  Antisense strand to SEQ ID NO: 1726821
uuaaagcaacaacacaugc

SEQ ID NO: 1726823 - RNA, 19 nt, Artificial Sequence
  Description of Artificial Sequence: Synthetic oligonucleotide
  Sense strand starting at position 2735 of SEQ ID NO: 1562163
agcauaaccgaguggaaau

SEQ ID NO: 1726824 - RNA, 19 nt, Artificial Sequence
  Description of Artificial Sequence: Synthetic oligonucleotide
  Antisense strand to SEQ ID NO: 1726823
auuuccacucgguuaugcu

SEQ ID NO: 1726825 - RNA, 19 nt, Artificial Sequence
  Description of Artificial Sequence: Synthetic oligonucleotide
  Sense strand starting at position 2866 of SEQ ID NO: 1562163
gcuaauuaccaaugggaag

SEQ ID NO: 1726826 - RNA, 19 nt, Artificial Sequence
  Description of Artificial Sequence: Synthetic oligonucleotide
  Antisense strand to SEQ ID NO: 1726825
cuucccauugguaauuagc

SEQ ID NO: 1726827 - RNA, 19 nt, Artificial Sequence
  Description of Artificial Sequence: Synthetic oligonucleotide
  Sense strand starting at position 3024 of SEQ ID NO: 1562163
cuagauuacccaugugggu

SEQ ID NO: 1726828 - RNA, 19 nt, Artificial Sequence
  Description of Artificial Sequence: Synthetic oligonucleotide
  Antisense strand to SEQ ID NO: 1726827
acccacauggguaaucuag

SEQ ID NO: 1726829 - RNA, 19 nt, Artificial Sequence
  Description of Artificial Sequence: Synthetic oligonucleotide
  Sense strand starting at position 3195 of SEQ ID NO: 1562163
guggacaauuccucuccua

SEQ ID NO: 1726830 - RNA, 19 nt, Artificial Sequence
  Description of Artificial Sequence: Synthetic oligonucleotide
  Antisense strand to SEQ ID NO: 1726829
uaggagaggaauuguccac

SEQ ID NO: 1726831 - RNA, 19 nt, Artificial Sequence
  Description of Artificial Sequence: Synthetic oligonucleotide
  Sense strand starting at position 3337 of SEQ ID NO: 1562163
gugauaauacauuauugca

SEQ ID NO: 1726832 - RNA, 19 nt, Artificial Sequence
  Description of Artificial Sequence: Synthetic oligonucleotide
  Antisense strand to SEQ ID NO: 1726831
ugcaauaauguauuaucac

SEQ ID NO: 1726833 - RNA, 19 nt, Artificial Sequence
  Description of Artificial Sequence: Synthetic oligonucleotide
  Sense strand starting at position 3567 of SEQ ID NO: 1562163
gcagaacauucugcauaua

SEQ ID NO: 1726834 - RNA, 19 nt, Artificial Sequence
  Description of Artificial Sequence: Synthetic oligonucleotide
  Antisense strand to SEQ ID NO: 1726833
uauaugcagaauguucugc

SEQ ID NO: 1726835 - RNA, 19 nt, Artificial Sequence
  Description of Artificial Sequence: Synthetic oligonucleotide
  Sense strand starting at position 3649 of SEQ ID NO: 1562163
uggugagaaucucccucuu

SEQ ID NO: 1726836 - RNA, 19 nt, Artificial Sequence
  Description of Artificial Sequence: Synthetic oligonucleotide
  Antisense strand to SEQ ID NO: 1726835
aagagggagauucucacca

SEQ ID NO: 1726837 - RNA, 19 nt, Artificial Sequence
  Description of Artificial Sequence: Synthetic oligonucleotide
  Sense strand starting at position 3787 of SEQ ID NO: 1562163
cugagucugcuguuugcau

SEQ ID NO: 1726838 - RNA, 19 nt, Artificial Sequence
  Description of Artificial Sequence: Synthetic oligonucleotide
  Antisense strand to SEQ ID NO: 1726837
augcaaacagcagacucag

SEQ ID NO: 1726839 - RNA, 19 nt, Artificial Sequence
  Description of Artificial Sequence: Synthetic oligonucleotide
  Sense strand starting at position 27 of SEQ ID NO: 1562164
uuugccuaugccuaugaaa

SEQ ID NO: 1726840 - RNA, 19 nt, Artificial Sequence
  Description of Artificial Sequence: Synthetic oligonucleotide
  Antisense strand to SEQ ID NO: 1726839
uuucauaggcauaggcaaa

SEQ ID NO: 1726841 - RNA, 19 nt, Artificial Sequence
  Description of Artificial Sequence: Synthetic oligonucleotide
  Sense strand starting at position 29 of SEQ ID NO: 1562164
ugccuaugccuaugaaaga

SEQ ID NO: 1726842 - RNA, 19 nt, Artificial Sequence
  Description of Artificial Sequence: Synthetic oligonucleotide
  Antisense strand to SEQ ID NO: 1726841
ucuuucauaggcauaggca

SEQ ID NO: 1726843 - RNA, 19 nt, Artificial Sequence
  Description of Artificial Sequence: Synthetic oligonucleotide
  Sense strand starting at position 81 of SEQ ID NO: 1562164
cuuuacguauguccgaauu

SEQ ID NO: 1726844 - RNA, 19 nt, Artificial Sequence
  Description of Artificial Sequence: Synthetic oligonucleotide
  Antisense strand to SEQ ID NO: 1726843
aauucggacauacguaaag

SEQ ID NO: 1726845 - RNA, 19 nt, Artificial Sequence
  Description of Artificial Sequence: Synthetic oligonucleotide
  Sense strand starting at position 227 of SEQ ID NO: 1562164
gugagcaagugcuuaggua

SEQ ID NO: 1726846 - RNA, 19 nt, Artificial Sequence
  Description of Artificial Sequence: Synthetic oligonucleotide
  Antisense strand to SEQ ID NO: 1726845
uaccuaagcacuugcucac

SEQ ID NO: 1726847 - RNA, 19 nt, Artificial Sequence
  Description of Artificial Sequence: Synthetic oligonucleotide
  Sense strand starting at position 228 of SEQ ID NO: 1562164
ugagcaagugcuuagguaa

SEQ ID NO: 1726848 - RNA, 19 nt, Artificial Sequence
  Description of Artificial Sequence: Synthetic oligonucleotide
  Antisense strand to SEQ ID NO: 1726847
uuaccuaagcacuugcuca

SEQ ID NO: 1726849 - RNA, 19 nt, Artificial Sequence
  Description of Artificial Sequence: Synthetic oligonucleotide
  Sense strand starting at position 290 of SEQ ID NO: 1562164
cacagaugauucuugcaug

SEQ ID NO: 1726850 - RNA, 19 nt, Artificial Sequence
  Description of Artificial Sequence: Synthetic oligonucleotide
  Antisense strand to SEQ ID NO: 1726849
caugcaagaaucaucugug

SEQ ID NO: 1726851 - RNA, 19 nt, Artificial Sequence
  Description of Artificial Sequence: Synthetic oligonucleotide
  Sense strand starting at position 293 of SEQ ID NO: 1562164
agaugauucuugcaugaca

SEQ ID NO: 1726852 - RNA, 19 nt, Artificial Sequence
  Description of Artificial Sequence: Synthetic oligonucleotide
  Antisense strand to SEQ ID NO: 1726851
ugucaugcaagaaucaucu

SEQ ID NO: 1726853 - RNA, 19 nt, Artificial Sequence
  Description of Artificial Sequence: Synthetic oligonucleotide
  Sense strand starting at position 295 of SEQ ID NO: 1562164
augauucuugcaugacaag

SEQ ID NO: 1726854 - RNA, 19 nt, Artificial Sequence
  Description of Artificial Sequence: Synthetic oligonucleotide
  Antisense strand to SEQ ID NO: 1726853
cuugucaugcaagaaucau

SEQ ID NO: 1726855 - RNA, 19 nt, Artificial Sequence
  Description of Artificial Sequence: Synthetic oligonucleotide
  Sense strand starting at position 298 of SEQ ID NO: 1562164
auucuugcaugacaagaua

SEQ ID NO: 1726856 - RNA, 19 nt, Artificial Sequence
  Description of Artificial Sequence: Synthetic oligonucleotide
  Antisense strand to SEQ ID NO: 1726855
uaucuugucaugcaagaau

SEQ ID NO: 1726857 - RNA, 19 nt, Artificial Sequence
  Description of Artificial Sequence: Synthetic oligonucleotide
  Sense strand starting at position 390 of SEQ ID NO: 1562164
agcaaauuagugcacagua

SEQ ID NO: 1726858 - RNA, 19 nt, Artificial Sequence
  Description of Artificial Sequence: Synthetic oligonucleotide
  Antisense strand to SEQ ID NO: 1726857
uacugugcacuaauuugcu

SEQ ID NO: 1726859 - RNA, 19 nt, Artificial Sequence
  Description of Artificial Sequence: Synthetic oligonucleotide
  Sense strand starting at position 434 of SEQ ID NO: 1562164
gaggaacauucuguaguag

SEQ ID NO: 1726860 - RNA, 19 nt, Artificial Sequence
  Description of Artificial Sequence: Synthetic oligonucleotide
  Antisense strand to SEQ ID NO: 1726859
cuacuacagaauguuccuc

SEQ ID NO: 1726861 - RNA, 19 nt, Artificial Sequence
  Description of Artificial Sequence: Synthetic oligonucleotide
  Sense strand starting at position 435 of SEQ ID NO: 1562164
aggaacauucuguaguagu

SEQ ID NO: 1726862 - RNA, 19 nt, Artificial Sequence
  Description of Artificial Sequence: Synthetic oligonucleotide
  Antisense strand to SEQ ID NO: 1726861
acuacuacagaauguuccu

SEQ ID NO: 1726863 - RNA, 19 nt, Artificial Sequence
  Description of Artificial Sequence: Synthetic oligonucleotide
  Sense strand starting at position 509 of SEQ ID NO: 1562164
auggacucuuuagacagua

SEQ ID NO: 1726864 - RNA, 19 nt, Artificial Sequence
  Description of Artificial Sequence: Synthetic oligonucleotide
  Antisense strand to SEQ ID NO: 1726863
uacugucuaaagaguccau

SEQ ID NO: 1726865 - RNA, 19 nt, Artificial Sequence
  Description of Artificial Sequence: Synthetic oligonucleotide
  Sense strand starting at position 514 of SEQ ID NO: 1562164
cucuuuagacaguaagcaa

SEQ ID NO: 1726866 - RNA, 19 nt, Artificial Sequence
  Description of Artificial Sequence: Synthetic oligonucleotide
  Antisense strand to SEQ ID NO: 1726865
uugcuuacugucuaaagag

SEQ ID NO: 1726867 - RNA, 19 nt, Artificial Sequence
  Description of Artificial Sequence: Synthetic oligonucleotide
  Sense strand starting at position 595 of SEQ ID NO: 1562164
aagcaauuccgguguuauu

SEQ ID NO: 1726868 - RNA, 19 nt, Artificial Sequence
  Description of Artificial Sequence: Synthetic oligonucleotide
  Antisense strand to SEQ ID NO: 1726867
aauaacaccggaauugcuu

SEQ ID NO: 1726869 - RNA, 19 nt, Artificial Sequence
  Description of Artificial Sequence: Synthetic oligonucleotide
  Sense strand starting at position 772 of SEQ ID NO: 1562164
cuuagaucauggcugucaa

SEQ ID NO: 1726870 - RNA, 19 nt, Artificial Sequence
  Description of Artificial Sequence: Synthetic oligonucleotide
  Antisense strand to SEQ ID NO: 1726869
uugacagccaugaucuaag

SEQ ID NO: 1726871 - RNA, 19 nt, Artificial Sequence
  Description of Artificial Sequence: Synthetic oligonucleotide
  Sense strand starting at position 773 of SEQ ID NO: 1562164
uuagaucauggcugucaau

SEQ ID NO: 1726872 - RNA, 19 nt, Artificial Sequence
  Description of Artificial Sequence: Synthetic oligonucleotide
  Antisense strand to SEQ ID NO: 1726871
auugacagccaugaucuaa

SEQ ID NO: 1726873 - RNA, 19 nt, Artificial Sequence
  Description of Artificial Sequence: Synthetic oligonucleotide
  Sense strand starting at position 779 of SEQ ID NO: 1562164
cauggcugucaauaguaaa

SEQ ID NO: 1726874 - RNA, 19 nt, Artificial Sequence
  Description of Artificial Sequence: Synthetic oligonucleotide
  Antisense strand to SEQ ID NO: 1726873
uuuacuauugacagccaug

SEQ ID NO: 1726875 - RNA, 19 nt, Artificial Sequence
  Description of Artificial Sequence: Synthetic oligonucleotide
  Sense strand starting at position 898 of SEQ ID NO: 1562164
accaguccaucaucagaua

SEQ ID NO: 1726876 - RNA, 19 nt, Artificial Sequence
  Description of Artificial Sequence: Synthetic oligonucleotide
  Antisense strand to SEQ ID NO: 1726875
uaucugaugauggacuggu

SEQ ID NO: 1726877 - RNA, 19 nt, Artificial Sequence
  Description of Artificial Sequence: Synthetic oligonucleotide
  Sense strand starting at position 990 of SEQ ID NO: 1562164
ggcuuaugucuguaaugcu

SEQ ID NO: 1726878 - RNA, 19 nt, Artificial Sequence
  Description of Artificial Sequence: Synthetic oligonucleotide
  Antisense strand to SEQ ID NO: 1726877
agcauuacagacauaagcc

SEQ ID NO: 1726879 - RNA, 19 nt, Artificial Sequence
  Description of Artificial Sequence: Synthetic oligonucleotide
  Sense strand starting at position 1134 of SEQ ID NO: 1562164
gcagcuguggucuagcuaa

SEQ ID NO: 1726880 - RNA, 19 nt, Artificial Sequence
  Description of Artificial Sequence: Synthetic oligonucleotide
  Antisense strand to SEQ ID NO: 1726879
uuagcuagaccacagcugc

SEQ ID NO: 1726881 - RNA, 19 nt, Artificial Sequence
  Description of Artificial Sequence: Synthetic oligonucleotide
  Sense strand starting at position 1162 of SEQ ID NO: 1562164
ugaagugagguccagguuu

SEQ ID NO: 1726882 - RNA, 19 nt, Artificial Sequence
  Description of Artificial Sequence: Synthetic oligonucleotide
  Antisense strand to SEQ ID NO: 1726881
aaaccuggaccucacuuca

SEQ ID NO: 1726883 - RNA, 19 nt, Artificial Sequence
  Description of Artificial Sequence: Synthetic oligonucleotide
  Sense strand starting at position 1249 of SEQ ID NO: 1562164
ucaucauagccauacaugu

SEQ ID NO: 1726884 - RNA, 19 nt, Artificial Sequence
  Description of Artificial Sequence: Synthetic oligonucleotide
  Antisense strand to SEQ ID NO: 1726883
acauguauggcuaugauga

SEQ ID NO: 1726885 - RNA, 19 nt, Artificial Sequence
  Description of Artificial Sequence: Synthetic oligonucleotide
  Sense strand starting at position 1291 of SEQ ID NO: 1562164
agguguauuugugaaauuu

SEQ ID NO: 1726886 - RNA, 19 nt, Artificial Sequence
  Description of Artificial Sequence: Synthetic oligonucleotide
  Antisense strand to SEQ ID NO: 1726885
aaauuucacaaauacaccu

SEQ ID NO: 1726887 - RNA, 19 nt, Artificial Sequence
  Description of Artificial Sequence: Synthetic oligonucleotide
  Sense strand starting at position 1300 of SEQ ID NO: 1562164
ugugaaauuugagacuauu

SEQ ID NO: 1726888 - RNA, 19 nt, Artificial Sequence
  Description of Artificial Sequence: Synthetic oligonucleotide
  Antisense strand to SEQ ID NO: 1726887
aauagucucaaauuucaca

SEQ ID NO: 1726889 - RNA, 19 nt, Artificial Sequence
  Description of Artificial Sequence: Synthetic oligonucleotide
  Sense strand starting at position 1421 of SEQ ID NO: 1562164
aggcuugcccauuagcuau

SEQ ID NO: 1726890 - RNA, 19 nt, Artificial Sequence
  Description of Artificial Sequence: Synthetic oligonucleotide
  Antisense strand to SEQ ID NO: 1726889
auagcuaaugggcaagccu

SEQ ID NO: 1726891 - RNA, 19 nt, Artificial Sequence
  Description of Artificial Sequence: Synthetic oligonucleotide
  Sense strand starting at position 1427 of SEQ ID NO: 1562164
gcccauuagcuaugcuuua

SEQ ID NO: 1726892 - RNA, 19 nt, Artificial Sequence
  Description of Artificial Sequence: Synthetic oligonucleotide
  Antisense strand to SEQ ID NO: 1726891
uaaagcauagcuaaugggc

SEQ ID NO: 1726893 - RNA, 19 nt, Artificial Sequence
  Description of Artificial Sequence: Synthetic oligonucleotide
  Sense strand starting at position 1727 of SEQ ID NO: 1562164
aguuaacauuugcaaguga

SEQ ID NO: 1726894 - RNA, 19 nt, Artificial Sequence
  Description of Artificial Sequence: Synthetic oligonucleotide
  Antisense strand to SEQ ID NO: 1726893
ucacuugcaaauguuaacu

SEQ ID NO: 1726895 - RNA, 19 nt, Artificial Sequence
  Description of Artificial Sequence: Synthetic oligonucleotide
  Sense strand starting at position 1792 of SEQ ID NO: 1562164
uuuccagccucauaaggaa

SEQ ID NO: 1726896 - RNA, 19 nt, Artificial Sequence
  Description of Artificial Sequence: Synthetic oligonucleotide
  Antisense strand to SEQ ID NO: 1726895
uuccuuaugaggcuggaaa

SEQ ID NO: 1726897 - RNA, 19 nt, Artificial Sequence
  Description of Artificial Sequence: Synthetic oligonucleotide
  Sense strand starting at position 1829 of SEQ ID NO: 1562164
aggaacuacuacuauguaa

SEQ ID NO: 1726898 - RNA, 19 nt, Artificial Sequence
  Description of Artificial Sequence: Synthetic oligonucleotide
  Antisense strand to SEQ ID NO: 1726897
uuacauaguaguaguuccu

SEQ ID NO: 1726899 - RNA, 19 nt, Artificial Sequence
  Description of Artificial Sequence: Synthetic oligonucleotide
  Sense strand starting at position 1900 of SEQ ID NO: 1562164
ggauuuaccugacaaguaa

SEQ ID NO: 1726900 - RNA, 19 nt, Artificial Sequence
  Description of Artificial Sequence: Synthetic oligonucleotide
  Antisense strand to SEQ ID NO: 1726899
uuacuugucagguaaaucc

SEQ ID NO: 1726901 - RNA, 19 nt, Artificial Sequence
  Description of Artificial Sequence: Synthetic oligonucleotide
  Sense strand starting at position 1981 of SEQ ID NO: 1562164
guaagaugaugauugugua

SEQ ID NO: 1726902 - RNA, 19 nt, Artificial Sequence
  Description of Artificial Sequence: Synthetic oligonucleotide
  Antisense strand to SEQ ID NO: 1726901
uacacaaucaucaucuuac

SEQ ID NO: 1726903 - RNA, 19 nt, Artificial Sequence
  Description of Artificial Sequence: Synthetic oligonucleotide
  Sense strand starting at position 1982 of SEQ ID NO: 1562164
uaagaugaugauuguguau

SEQ ID NO: 1726904 - RNA, 19 nt, Artificial Sequence
  Description of Artificial Sequence: Synthetic oligonucleotide
  Antisense strand to SEQ ID NO: 1726903
auacacaaucaucaucuua

SEQ ID NO: 1726905 - RNA, 19 nt, Artificial Sequence
  Description of Artificial Sequence: Synthetic oligonucleotide
  Sense strand starting at position 1994 of SEQ ID NO: 1562164
uguguaucugcaggcagau

SEQ ID NO: 1726906 - RNA, 19 nt, Artificial Sequence
  Description of Artificial Sequence: Synthetic oligonucleotide
  Antisense strand to SEQ ID NO: 1726905
aucugccugcagauacaca

SEQ ID NO: 1726907 - RNA, 19 nt, Artificial Sequence
  Description of Artificial Sequence: Synthetic oligonucleotide
  Sense strand starting at position 1996 of SEQ ID NO: 1562164
uguaucugcaggcagauaa

SEQ ID NO: 1726908 - RNA, 19 nt, Artificial Sequence
  Description of Artificial Sequence: Synthetic oligonucleotide
  Antisense strand to SEQ ID NO: 1726907
uuaucugccugcagauaca

SEQ ID NO: 1726909 - RNA, 19 nt, Artificial Sequence
  Description of Artificial Sequence: Synthetic oligonucleotide
  Sense strand starting at position 2467 of SEQ ID NO: 1562164
gcgagaucgcaccacuaaa

SEQ ID NO: 1726910 - RNA, 19 nt, Artificial Sequence
  Description of Artificial Sequence: Synthetic oligonucleotide
  Antisense strand to SEQ ID NO: 1726909
uuuaguggugcgaucucgc

SEQ ID NO: 1726911 - RNA, 19 nt, Artificial Sequence
  Description of Artificial Sequence: Synthetic oligonucleotide
  Sense strand starting at position 2926 of SEQ ID NO: 1562164
uucagaugucccggagaca

SEQ ID NO: 1726912 - RNA, 19 nt, Artificial Sequence
  Description of Artificial Sequence: Synthetic oligonucleotide
  Antisense strand to SEQ ID NO: 1726911
ugucuccgggacaucugaa

SEQ ID NO: 1726913 - RNA, 19 nt, Artificial Sequence
  Description of Artificial Sequence: Synthetic oligonucleotide
  Sense strand starting at position 3559 of SEQ ID NO: 1562164
gucgauagugcguccaauc

SEQ ID NO: 1726914 - RNA, 19 nt, Artificial Sequence
  Description of Artificial Sequence: Synthetic oligonucleotide
  Antisense strand to SEQ ID NO: 1726913
gauuggacgcacuaucgac

SEQ ID NO: 1726915 - RNA, 19 nt, Artificial Sequence
  Description of Artificial Sequence: Synthetic oligonucleotide
  Sense strand starting at position 3742 of SEQ ID NO: 1562164
cgcgcuaugcucuccugau

SEQ ID NO: 1726916 - RNA, 19 nt, Artificial Sequence
  Description of Artificial Sequence: Synthetic oligonucleotide
  Antisense strand to SEQ ID NO: 1726915
aucaggagagcauagcgcg

SEQ ID NO: 1726917 - RNA, 19 nt, Artificial Sequence
  Description of Artificial Sequence: Synthetic oligonucleotide
  Sense strand starting at position 3746 of SEQ ID NO: 1562164
cuaugcucuccugaugaac

SEQ ID NO: 1726918 - RNA, 19 nt, Artificial Sequence
  Description of Artificial Sequence: Synthetic oligonucleotide
  Antisense strand to SEQ ID NO: 1726917
guucaucaggagagcauag

SEQ ID NO: 1726919 - RNA, 19 nt, Artificial Sequence
  Description of Artificial Sequence: Synthetic oligonucleotide
  Sense strand starting at position 261 of SEQ ID NO: 1562165
cggugucugcugcacuaaa

SEQ ID NO: 1726920 - RNA, 19 nt, Artificial Sequence
  Description of Artificial Sequence: Synthetic oligonucleotide
  Antisense strand to SEQ ID NO: 1726919
uuuagugcagcagacaccg

SEQ ID NO: 1726921 - RNA, 19 nt, Artificial Sequence
  Description of Artificial Sequence: Synthetic oligonucleotide
  Sense strand starting at position 373 of SEQ ID NO: 1562165
ccugaagucugggugccaa

SEQ ID NO: 1726922 - RNA, 19 nt, Artificial Sequence
  Description of Artificial Sequence: Synthetic oligonucleotide
  Antisense strand to SEQ ID NO: 1726921
uuggcacccagacuucagg

SEQ ID NO: 1726923 - RNA, 19 nt, Artificial Sequence
  Description of Artificial Sequence: Synthetic oligonucleotide
  Sense strand starting at position 783 of SEQ ID NO: 1562165
aggucuuguccuggcuaga

SEQ ID NO: 1726924 - RNA, 19 nt, Artificial Sequence
  Description of Artificial Sequence: Synthetic oligonucleotide
  Antisense strand to SEQ ID NO: 1726923
ucuagccaggacaagaccu

SEQ ID NO: 1726925 - RNA, 19 nt, Artificial Sequence
  Description of Artificial Sequence: Synthetic oligonucleotide
  Sense strand starting at position 892 of SEQ ID NO: 1562165
cucggagaauuagucuguu

SEQ ID NO: 1726926 - RNA, 19 nt, Artificial Sequence
  Description of Artificial Sequence: Synthetic oligonucleotide
  Antisense strand to SEQ ID NO: 1726925
aacagacuaauucuccgag

SEQ ID NO: 1726927 - RNA, 19 nt, Artificial Sequence
  Description of Artificial Sequence: Synthetic oligonucleotide
  Sense strand starting at position 895 of SEQ ID NO: 1562165
ggagaauuagucuguuucc

SEQ ID NO: 1726928 - RNA, 19 nt, Artificial Sequence
  Description of Artificial Sequence: Synthetic oligonucleotide
  Antisense strand to SEQ ID NO: 1726927
ggaaacagacuaauucucc

SEQ ID NO: 1726929 - RNA, 19 nt, Artificial Sequence
  Description of Artificial Sequence: Synthetic oligonucleotide
  Sense strand starting at position 1076 of SEQ ID NO: 1562165
cucucaguucucggucuca

SEQ ID NO: 1726930 - RNA, 19 nt, Artificial Sequence
  Description of Artificial Sequence: Synthetic oligonucleotide
  Antisense strand to SEQ ID NO: 1726929
ugagaccgagaacugagag

SEQ ID NO: 1726931 - RNA, 19 nt, Artificial Sequence
  Description of Artificial Sequence: Synthetic oligonucleotide
  Sense strand starting at position 1438 of SEQ ID NO: 1562165
uggacuuaccuccgggaca

SEQ ID NO: 1726932 - RNA, 19 nt, Artificial Sequence
  Description of Artificial Sequence: Synthetic oligonucleotide
  Antisense strand to SEQ ID NO: 1726931
ugucccggagguaagucca

SEQ ID NO: 1726933 - RNA, 19 nt, Artificial Sequence
  Description of Artificial Sequence: Synthetic oligonucleotide
  Sense strand starting at position 1440 of SEQ ID NO: 1562165
gacuuaccuccgggacaag

SEQ ID NO: 1726934 - RNA, 19 nt, Artificial Sequence
  Description of Artificial Sequence: Synthetic oligonucleotide
  Antisense strand to SEQ ID NO: 1726933
cuugucccggagguaaguc

SEQ ID NO: 1726935 - RNA, 19 nt, Artificial Sequence
  Description of Artificial Sequence: Synthetic oligonucleotide
  Sense strand starting at position 2062 of SEQ ID NO: 1562165
ggaauuugcugcccgacua

SEQ ID NO: 1726936 - RNA, 19 nt, Artificial Sequence
  Description of Artificial Sequence: Synthetic oligonucleotide
  Antisense strand to SEQ ID NO: 1726935
uagucgggcagcaaauucc

SEQ ID NO: 1726937 - RNA, 19 nt, Artificial Sequence
  Description of Artificial Sequence: Synthetic oligonucleotide
  Sense strand starting at position 2159 of SEQ ID NO: 1562165
uauggauccggcgaauguu

SEQ ID NO: 1726938 - RNA, 19 nt, Artificial Sequence
  Description of Artificial Sequence: Synthetic oligonucleotide
  Antisense strand to SEQ ID NO: 1726937
aacauucgccggauccaua

SEQ ID NO: 1726939 - RNA, 19 nt, Artificial Sequence
  Description of Artificial Sequence: Synthetic oligonucleotide
  Sense strand starting at position 2319 of SEQ ID NO: 1562165
uaagacagucugcguucua

SEQ ID NO: 1726940 - RNA, 19 nt, Artificial Sequence
  Description of Artificial Sequence: Synthetic oligonucleotide
  Antisense strand to SEQ ID NO: 1726939
uagaacgcagacugucuua

SEQ ID NO: 1726941 - RNA, 19 nt, Artificial Sequence
  Description of Artificial Sequence: Synthetic oligonucleotide
  Sense strand starting at position 2350 of SEQ ID NO: 1562165
gugguguuugcaguguaga

SEQ ID NO: 1726942 - RNA, 19 nt, Artificial Sequence
  Description of Artificial Sequence: Synthetic oligonucleotide
  Antisense strand to SEQ ID NO: 1726941
ucuacacugcaaacaccac

SEQ ID NO: 1726943 - RNA, 19 nt, Artificial Sequence
  Description of Artificial Sequence: Synthetic oligonucleotide
  Sense strand starting at position 2353 of SEQ ID NO: 1562165
guguuugcaguguagauuu

SEQ ID NO: 1726944 - RNA, 19 nt, Artificial Sequence
  Description of Artificial Sequence: Synthetic oligonucleotide
  Antisense strand to SEQ ID NO: 1726943
aaaucuacacugcaaacac

SEQ ID NO: 1726945 - RNA, 19 nt, Artificial Sequence
  Description of Artificial Sequence: Synthetic oligonucleotide
  Sense strand starting at position 2495 of SEQ ID NO: 1562165
guacacugguggucagaga

SEQ ID NO: 1726946 - RNA, 19 nt, Artificial Sequence
  Description of Artificial Sequence: Synthetic oligonucleotide
  Antisense strand to SEQ ID NO: 1726945
ucucugaccaccaguguac

SEQ ID NO: 1726947 - RNA, 19 nt, Artificial Sequence
  Description of Artificial Sequence: Synthetic oligonucleotide
  Sense strand starting at position 2513 of SEQ ID NO: 1562165
aagguuaagcuccagaguu

SEQ ID NO: 1726948 - RNA, 19 nt, Artificial Sequence
  Description of Artificial Sequence: Synthetic oligonucleotide
  Antisense strand to SEQ ID NO: 1726947
aacucuggagcuuaaccuu

SEQ ID NO: 1726949 - RNA, 19 nt, Artificial Sequence
  Description of Artificial Sequence: Synthetic oligonucleotide
  Sense strand starting at position 2706 of SEQ ID NO: 1562165
caaagagaaugcugaaaug

SEQ ID NO: 1726950 - RNA, 19 nt, Artificial Sequence
  Description of Artificial Sequence: Synthetic oligonucleotide
  Antisense strand to SEQ ID NO: 1726949
cauuucagcauucucuuug

SEQ ID NO: 1726951 - RNA, 19 nt, Artificial Sequence
  Description of Artificial Sequence: Synthetic oligonucleotide
  Sense strand starting at position 2819 of SEQ ID NO: 1562165
gcgagacacaccugauguu

SEQ ID NO: 1726952 - RNA, 19 nt, Artificial Sequence
  Description of Artificial Sequence: Synthetic oligonucleotide
  Antisense strand to SEQ ID NO: 1726951
aacaucaggugugucucgc

SEQ ID NO: 1726953 - RNA, 19 nt, Artificial Sequence
  Description of Artificial Sequence: Synthetic oligonucleotide
  Sense strand starting at position 2820 of SEQ ID NO: 1562165
cgagacacaccugauguuu

SEQ ID NO: 1726954 - RNA, 19 nt, Artificial Sequence
  Description of Artificial Sequence: Synthetic oligonucleotide
  Antisense strand to SEQ ID NO: 1726953
aaacaucaggugugucucg

SEQ ID NO: 1726955 - RNA, 19 nt, Artificial Sequence
  Description of Artificial Sequence: Synthetic oligonucleotide
  Sense strand starting at position 2828 of SEQ ID NO: 1562165
accugauguuucuuccuuu

SEQ ID NO: 1726956 - RNA, 19 nt, Artificial Sequence
  Description of Artificial Sequence: Synthetic oligonucleotide
  Antisense strand to SEQ ID NO: 1726955
aaaggaagaaacaucaggu

SEQ ID NO: 1726957 - RNA, 19 nt, Artificial Sequence
  Description of Artificial Sequence: Synthetic oligonucleotide
  Sense strand starting at position 2829 of SEQ ID NO: 1562165
ccugauguuucuuccuuua

SEQ ID NO: 1726958 - RNA, 19 nt, Artificial Sequence
  Description of Artificial Sequence: Synthetic oligonucleotide
  Antisense strand to SEQ ID NO: 1726957
uaaaggaagaaacaucagg

SEQ ID NO: 1726959 - RNA, 19 nt, Artificial Sequence
  Description of Artificial Sequence: Synthetic oligonucleotide
  Sense strand starting at position 2832 of SEQ ID NO: 1562165
gauguuucuuccuuuaggu

SEQ ID NO: 1726960 - RNA, 19 nt, Artificial Sequence
  Description of Artificial Sequence: Synthetic oligonucleotide
  Antisense strand to SEQ ID NO: 1726959
accuaaaggaagaaacauc

SEQ ID NO: 1726961 - RNA, 19 nt, Artificial Sequence
  Description of Artificial Sequence: Synthetic oligonucleotide
  Sense strand starting at position 2865 of SEQ ID NO: 1562165
ggcuguggucuggaacacu

SEQ ID NO: 1726962 - RNA, 19 nt, Artificial Sequence
  Description of Artificial Sequence: Synthetic oligonucleotide
  Antisense strand to SEQ ID NO: 1726961
aguguuccagaccacagcc

SEQ ID NO: 1726963 - RNA, 19 nt, Artificial Sequence
  Description of Artificial Sequence: Synthetic oligonucleotide
  Sense strand starting at position 2976 of SEQ ID NO: 1562165
cggaguccuuuccugaaua

SEQ ID NO: 1726964 - RNA, 19 nt, Artificial Sequence
  Description of Artificial Sequence: Synthetic oligonucleotide
  Antisense strand to SEQ ID NO: 1726963
uauucaggaaaggacuccg

SEQ ID NO: 1726965 - RNA, 19 nt, Artificial Sequence
  Description of Artificial Sequence: Synthetic oligonucleotide
  Sense strand starting at position 3012 of SEQ ID NO: 1562165
agccauuagguugagcaga

SEQ ID NO: 1726966 - RNA, 19 nt, Artificial Sequence
  Description of Artificial Sequence: Synthetic oligonucleotide
  Antisense strand to SEQ ID NO: 1726965
ucugcucaaccuaauggcu

SEQ ID NO: 1726967 - RNA, 19 nt, Artificial Sequence
  Description of Artificial Sequence: Synthetic oligonucleotide
  Sense strand starting at position 3014 of SEQ ID NO: 1562165
ccauuagguugagcagaua

SEQ ID NO: 1726968 - RNA, 19 nt, Artificial Sequence
  Description of Artificial Sequence: Synthetic oligonucleotide
  Antisense strand to SEQ ID NO: 1726967
uaucugcucaaccuaaugg

SEQ ID NO: 1726969 - RNA, 19 nt, Artificial Sequence
  Description of Artificial Sequence: Synthetic oligonucleotide
  Sense strand starting at position 3017 of SEQ ID NO: 1562165
uuagguugagcagauacua

SEQ ID NO: 1726970 - RNA, 19 nt, Artificial Sequence
  Description of Artificial Sequence: Synthetic oligonucleotide
  Antisense strand to SEQ ID NO: 1726969
uaguaucugcucaaccuaa

SEQ ID NO: 1726971 - RNA, 19 nt, Artificial Sequence
  Description of Artificial Sequence: Synthetic oligonucleotide
  Sense strand starting at position 3022 of SEQ ID NO: 1562165
uugagcagauacuauuaga

SEQ ID NO: 1726972 - RNA, 19 nt, Artificial Sequence
  Description of Artificial Sequence: Synthetic oligonucleotide
  Antisense strand to SEQ ID NO: 1726971
ucuaauaguaucugcucaa

SEQ ID NO: 1726973 - RNA, 19 nt, Artificial Sequence
  Description of Artificial Sequence: Synthetic oligonucleotide
  Sense strand starting at position 3054 of SEQ ID NO: 1562165
gagagucauugaucccauu

SEQ ID NO: 1726974 - RNA, 19 nt, Artificial Sequence
  Description of Artificial Sequence: Synthetic oligonucleotide
  Antisense strand to SEQ ID NO: 1726973
aaugggaucaaugacucuc

SEQ ID NO: 1726975 - RNA, 19 nt, Artificial Sequence
  Description of Artificial Sequence: Synthetic oligonucleotide
  Sense strand starting at position 3057 of SEQ ID NO: 1562165
agucauugaucccauuuau

SEQ ID NO: 1726976 - RNA, 19 nt, Artificial Sequence
  Description of Artificial Sequence: Synthetic oligonucleotide
  Antisense strand to SEQ ID NO: 1726975
auaaaugggaucaaugacu

SEQ ID NO: 1726977 - RNA, 19 nt, Artificial Sequence
  Description of Artificial Sequence: Synthetic oligonucleotide
  Sense strand starting at position 3103 of SEQ ID NO: 1562165
gguaauugagauuguguag

SEQ ID NO: 1726978 - RNA, 19 nt, Artificial Sequence
  Description of Artificial Sequence: Synthetic oligonucleotide
  Antisense strand to SEQ ID NO: 1726977
cuacacaaucucaauuacc

SEQ ID NO: 1726979 - RNA, 19 nt, Artificial Sequence
  Description of Artificial Sequence: Synthetic oligonucleotide
  Sense strand starting at position 3106 of SEQ ID NO: 1562165
aauugagauuguguagcca

SEQ ID NO: 1726980 - RNA, 19 nt, Artificial Sequence
  Description of Artificial Sequence: Synthetic oligonucleotide
  Antisense strand to SEQ ID NO: 1726979
uggcuacacaaucucaauu

SEQ ID NO: 1726981 - RNA, 19 nt, Artificial Sequence
  Description of Artificial Sequence: Synthetic oligonucleotide
  Sense strand starting at position 3276 of SEQ ID NO: 1562165
cugggugcuguuugaauuu

SEQ ID NO: 1726982 - RNA, 19 nt, Artificial Sequence
  Description of Artificial Sequence: Synthetic oligonucleotide
  Antisense strand to SEQ ID NO: 1726981
aaauucaaacagcacccag

SEQ ID NO: 1726983 - RNA, 19 nt, Artificial Sequence
  Description of Artificial Sequence: Synthetic oligonucleotide
  Sense strand starting at position 3587 of SEQ ID NO: 1562165
aguuucucuuaccugugau

SEQ ID NO: 1726984 - RNA, 19 nt, Artificial Sequence
  Description of Artificial Sequence: Synthetic oligonucleotide
  Antisense strand to SEQ ID NO: 1726983
aucacagguaagagaaacu

SEQ ID NO: 1726985 - RNA, 19 nt, Artificial Sequence
  Description of Artificial Sequence: Synthetic oligonucleotide
  Sense strand starting at position 3599 of SEQ ID NO: 1562165
cugugauucccuuguugug

SEQ ID NO: 1726986 - RNA, 19 nt, Artificial Sequence
  Description of Artificial Sequence: Synthetic oligonucleotide
  Antisense strand to SEQ ID NO: 1726985
cacaacaagggaaucacag

SEQ ID NO: 1726987 - RNA, 19 nt, Artificial Sequence
  Description of Artificial Sequence: Synthetic oligonucleotide
  Sense strand starting at position 3609 of SEQ ID NO: 1562165
cuuguuguggcuugaaaua

SEQ ID NO: 1726988 - RNA, 19 nt, Artificial Sequence
  Description of Artificial Sequence: Synthetic oligonucleotide
  Antisense strand to SEQ ID NO: 1726987
uauuucaagccacaacaag

SEQ ID NO: 1726989 - RNA, 19 nt, Artificial Sequence
  Description of Artificial Sequence: Synthetic oligonucleotide
  Sense strand starting at position 3619 of SEQ ID NO: 1562165
cuugaaauauuaucuggua

SEQ ID NO: 1726990 - RNA, 19 nt, Artificial Sequence
  Description of Artificial Sequence: Synthetic oligonucleotide
  Antisense strand to SEQ ID NO: 1726989
uaccagauaauauuucaag

SEQ ID NO: 1726991 - RNA, 19 nt, Artificial Sequence
  Description of Artificial Sequence: Synthetic oligonucleotide
  Sense strand starting at position 3631 of SEQ ID NO: 1562165
ucugguaugcugugauaua

SEQ ID NO: 1726992 - RNA, 19 nt, Artificial Sequence
  Description of Artificial Sequence: Synthetic oligonucleotide
  Antisense strand to SEQ ID NO: 1726991
uauaucacagcauaccaga

SEQ ID NO: 1726993 - RNA, 19 nt, Artificial Sequence
  Description of Artificial Sequence: Synthetic oligonucleotide
  Sense strand starting at position 3642 of SEQ ID NO: 1562165
gugauauagcauugaaaua

SEQ ID NO: 1726994 - RNA, 19 nt, Artificial Sequence
  Description of Artificial Sequence: Synthetic oligonucleotide
  Antisense strand to SEQ ID NO: 1726993
uauuucaaugcuauaucac

SEQ ID NO: 1726995 - RNA, 19 nt, Artificial Sequence
  Description of Artificial Sequence: Synthetic oligonucleotide
  Sense strand starting at position 3684 of SEQ ID NO: 1562165
ggagcugucacauauuagg

SEQ ID NO: 1726996 - RNA, 19 nt, Artificial Sequence
  Description of Artificial Sequence: Synthetic oligonucleotide
  Antisense strand to SEQ ID NO: 1726995
ccuaauaugugacagcucc

SEQ ID NO: 1726997 - RNA, 19 nt, Artificial Sequence
  Description of Artificial Sequence: Synthetic oligonucleotide
  Sense strand starting at position 3820 of SEQ ID NO: 1562165
ccuccugugcugggaagaa

SEQ ID NO: 1726998 - RNA, 19 nt, Artificial Sequence
  Description of Artificial Sequence: Synthetic oligonucleotide
  Antisense strand to SEQ ID NO: 1726997
uucuucccagcacaggagg

SEQ ID NO: 1726999 - RNA, 19 nt, Artificial Sequence
  Description of Artificial Sequence: Synthetic oligonucleotide
  Sense strand starting at position 26 of SEQ ID NO: 1562166
cagcucuucccaggagcau

SEQ ID NO: 1727000 - RNA, 19 nt, Artificial Sequence
  Description of Artificial Sequence: Synthetic oligonucleotide
  Antisense strand to SEQ ID NO: 1726999
augcuccugggaagagcug

SEQ ID NO: 1727001 - RNA, 19 nt, Artificial Sequence
  Description of Artificial Sequence: Synthetic oligonucleotide
  Sense strand starting at position 27 of SEQ ID NO: 1562166
agcucuucccaggagcaua

SEQ ID NO: 1727002 - RNA, 19 nt, Artificial Sequence
  Description of Artificial Sequence: Synthetic oligonucleotide
  Antisense strand to SEQ ID NO: 1727001
uaugcuccugggaagagcu

SEQ ID NO: 1727003 - RNA, 19 nt, Artificial Sequence
  Description of Artificial Sequence: Synthetic oligonucleotide
  Sense strand starting at position 44 of SEQ ID NO: 1562166
uagagucuccuacgagacu

SEQ ID NO: 1727004 - RNA, 19 nt, Artificial Sequence
  Description of Artificial Sequence: Synthetic oligonucleotide
  Antisense strand to SEQ ID NO: 1727003
agucucguaggagacucua

SEQ ID NO: 1727005 - RNA, 19 nt, Artificial Sequence
  Description of Artificial Sequence: Synthetic oligonucleotide
  Sense strand starting at position 843 of SEQ ID NO: 1562166
uuauauguuuaggccuaga

SEQ ID NO: 1727006 - RNA, 19 nt, Artificial Sequence
  Description of Artificial Sequence: Synthetic oligonucleotide
  Antisense strand to SEQ ID NO: 1727005
ucuaggccuaaacauauaa

SEQ ID NO: 1727007 - RNA, 19 nt, Artificial Sequence
  Description of Artificial Sequence: Synthetic oligonucleotide
  Sense strand starting at position 848 of SEQ ID NO: 1562166
uguuuaggccuagacugaa

SEQ ID NO: 1727008 - RNA, 19 nt, Artificial Sequence
  Description of Artificial Sequence: Synthetic oligonucleotide
  Antisense strand to SEQ ID NO: 1727007
uucagucuaggccuaaaca

SEQ ID NO: 1727009 - RNA, 19 nt, Artificial Sequence
  Description of Artificial Sequence: Synthetic oligonucleotide
  Sense strand starting at position 1092 of SEQ ID NO: 1562166
cgauguggcaccugagaac

SEQ ID NO: 1727010 - RNA, 19 nt, Artificial Sequence
  Description of Artificial Sequence: Synthetic oligonucleotide
  Antisense strand to SEQ ID NO: 1727009
guucucaggugccacaucg

SEQ ID NO: 1727011 - RNA, 19 nt, Artificial Sequence
  Description of Artificial Sequence: Synthetic oligonucleotide
  Sense strand starting at position 1129 of SEQ ID NO: 1562166
gucacuuucccagaguauc

SEQ ID NO: 1727012 - RNA, 19 nt, Artificial Sequence
  Description of Artificial Sequence: Synthetic oligonucleotide
  Antisense strand to SEQ ID NO: 1727011
gauacucugggaaagugac

SEQ ID NO: 1727013 - RNA, 19 nt, Artificial Sequence
  Description of Artificial Sequence: Synthetic oligonucleotide
  Sense strand starting at position 1137 of SEQ ID NO: 1562166
cccagaguaucagaaagga

SEQ ID NO: 1727014 - RNA, 19 nt, Artificial Sequence
  Description of Artificial Sequence: Synthetic oligonucleotide
  Antisense strand to SEQ ID NO: 1727013
uccuuucugauacucuggg

SEQ ID NO: 1727015 - RNA, 19 nt, Artificial Sequence
  Description of Artificial Sequence: Synthetic oligonucleotide
  Sense strand starting at position 1159 of SEQ ID NO: 1562166
guaucagaguugccuggaa

SEQ ID NO: 1727016 - RNA, 19 nt, Artificial Sequence
  Description of Artificial Sequence: Synthetic oligonucleotide
  Antisense strand to SEQ ID NO: 1727015
uuccaggcaacucugauac

SEQ ID NO: 1727017 - RNA, 19 nt, Artificial Sequence
  Description of Artificial Sequence: Synthetic oligonucleotide
  Sense strand starting at position 1161 of SEQ ID NO: 1562166
aucagaguugccuggaaca

SEQ ID NO: 1727018 - RNA, 19 nt, Artificial Sequence
  Description of Artificial Sequence: Synthetic oligonucleotide
  Antisense strand to SEQ ID NO: 1727017
uguuccaggcaacucugau

SEQ ID NO: 1727019 - RNA, 19 nt, Artificial Sequence
  Description of Artificial Sequence: Synthetic oligonucleotide
  Sense strand starting at position 1163 of SEQ ID NO: 1562166
cagaguugccuggaacaca

SEQ ID NO: 1727020 - RNA, 19 nt, Artificial Sequence
  Description of Artificial Sequence: Synthetic oligonucleotide
  Antisense strand to SEQ ID NO: 1727019
uguguuccaggcaacucug

SEQ ID NO: 1727021 - RNA, 19 nt, Artificial Sequence
  Description of Artificial Sequence: Synthetic oligonucleotide
  Sense strand starting at position 1174 of SEQ ID NO: 1562166
ggaacacagacguguuuau

SEQ ID NO: 1727022 - RNA, 19 nt, Artificial Sequence
  Description of Artificial Sequence: Synthetic oligonucleotide
  Antisense strand to SEQ ID NO: 1727021
auaaacacgucuguguucc

SEQ ID NO: 1727023 - RNA, 19 nt, Artificial Sequence
  Description of Artificial Sequence: Synthetic oligonucleotide
  Sense strand starting at position 1178 of SEQ ID NO: 1562166
cacagacguguuuauugua

SEQ ID NO: 1727024 - RNA, 19 nt, Artificial Sequence
  Description of Artificial Sequence: Synthetic oligonucleotide
  Antisense strand to SEQ ID NO: 1727023
uacaauaaacacgucugug

SEQ ID NO: 1727025 - RNA, 19 nt, Artificial Sequence
  Description of Artificial Sequence: Synthetic oligonucleotide
  Sense strand starting at position 2196 of SEQ ID NO: 1562166
cgguaaugauguuugggaa

SEQ ID NO: 1727026 - RNA, 19 nt, Artificial Sequence
  Description of Artificial Sequence: Synthetic oligonucleotide
  Antisense strand to SEQ ID NO: 1727025
uucccaaacaucauuaccg

SEQ ID NO: 1727027 - RNA, 19 nt, Artificial Sequence
  Description of Artificial Sequence: Synthetic oligonucleotide
  Sense strand starting at position 2197 of SEQ ID NO: 1562166
gguaaugauguuugggaau

SEQ ID NO: 1727028 - RNA, 19 nt, Artificial Sequence
  Description of Artificial Sequence: Synthetic oligonucleotide
  Antisense strand to SEQ ID NO: 1727027
auucccaaacaucauuacc

SEQ ID NO: 1727029 - RNA, 19 nt, Artificial Sequence
  Description of Artificial Sequence: Synthetic oligonucleotide
  Sense strand starting at position 2200 of SEQ ID NO: 1562166
aaugauguuugggaauuaa

SEQ ID NO: 1727030 - RNA, 19 nt, Artificial Sequence
  Description of Artificial Sequence: Synthetic oligonucleotide
  Antisense strand to SEQ ID NO: 1727029
uuaauucccaaacaucauu

SEQ ID NO: 1727031 - RNA, 19 nt, Artificial Sequence
  Description of Artificial Sequence: Synthetic oligonucleotide
  Sense strand starting at position 2210 of SEQ ID NO: 1562166
gggaauuaacgaggugaua

SEQ ID NO: 1727032 - RNA, 19 nt, Artificial Sequence
  Description of Artificial Sequence: Synthetic oligonucleotide
  Antisense strand to SEQ ID NO: 1727031
uaucaccucguuaauuccc

SEQ ID NO: 1727033 - RNA, 19 nt, Artificial Sequence
  Description of Artificial Sequence: Synthetic oligonucleotide
  Sense strand starting at position 2271 of SEQ ID NO: 1562166
cuaguuagagucugauaac

SEQ ID NO: 1727034 - RNA, 19 nt, Artificial Sequence
  Description of Artificial Sequence: Synthetic oligonucleotide
  Antisense strand to SEQ ID NO: 1727033
guuaucagacucuaacuag

SEQ ID NO: 1727035 - RNA, 19 nt, Artificial Sequence
  Description of Artificial Sequence: Synthetic oligonucleotide
  Sense strand starting at position 2314 of SEQ ID NO: 1562166
cacguaggaguuugccaau

SEQ ID NO: 1727036 - RNA, 19 nt, Artificial Sequence
  Description of Artificial Sequence: Synthetic oligonucleotide
  Antisense strand to SEQ ID NO: 1727035
auuggcaaacuccuacgug

SEQ ID NO: 1727037 - RNA, 19 nt, Artificial Sequence
  Description of Artificial Sequence: Synthetic oligonucleotide
  Sense strand starting at position 2405 of SEQ ID NO: 1562166
guagcaaaguaaguauuaa

SEQ ID NO: 1727038 - RNA, 19 nt, Artificial Sequence
  Description of Artificial Sequence: Synthetic oligonucleotide
  Antisense strand to SEQ ID NO: 1727037
uuaauacuuacuuugcuac

SEQ ID NO: 1727039 - RNA, 19 nt, Artificial Sequence
  Description of Artificial Sequence: Synthetic oligonucleotide
  Sense strand starting at position 2756 of SEQ ID NO: 1562166
ucaaguguuuccucaacac

SEQ ID NO: 1727040 - RNA, 19 nt, Artificial Sequence
  Description of Artificial Sequence: Synthetic oligonucleotide
  Antisense strand to SEQ ID NO: 1727039
guguugaggaaacacuuga

SEQ ID NO: 1727041 - RNA, 19 nt, Artificial Sequence
  Description of Artificial Sequence: Synthetic oligonucleotide
  Sense strand starting at position 2760 of SEQ ID NO: 1562166
guguuuccucaacacuaca

SEQ ID NO: 1727042 - RNA, 19 nt, Artificial Sequence
  Description of Artificial Sequence: Synthetic oligonucleotide
  Antisense strand to SEQ ID NO: 1727041
uguaguguugaggaaacac

SEQ ID NO: 1727043 - RNA, 19 nt, Artificial Sequence
  Description of Artificial Sequence: Synthetic oligonucleotide
  Sense strand starting at position 3002 of SEQ ID NO: 1562166
aguggacagucaguaaaua

SEQ ID NO: 1727044 - RNA, 19 nt, Artificial Sequence
  Description of Artificial Sequence: Synthetic oligonucleotide
  Antisense strand to SEQ ID NO: 1727043
uauuuacugacuguccacu

SEQ ID NO: 1727045 - RNA, 19 nt, Artificial Sequence
  Description of Artificial Sequence: Synthetic oligonucleotide
  Sense strand starting at position 3021 of SEQ ID NO: 1562166
uuugcugaaugaguuaaga

SEQ ID NO: 1727046 - RNA, 19 nt, Artificial Sequence
  Description of Artificial Sequence: Synthetic oligonucleotide
  Antisense strand to SEQ ID NO: 1727045
ucuuaacucauucagcaaa

SEQ ID NO: 1727047 - RNA, 19 nt, Artificial Sequence
  Description of Artificial Sequence: Synthetic oligonucleotide
  Sense strand starting at position 3148 of SEQ ID NO: 1562166
gaaguaaguuguuccagga

SEQ ID NO: 1727048 - RNA, 19 nt, Artificial Sequence
  Description of Artificial Sequence: Synthetic oligonucleotide
  Antisense strand to SEQ ID NO: 1727047
uccuggaacaacuuacuuc

SEQ ID NO: 1727049 - RNA, 19 nt, Artificial Sequence
  Description of Artificial Sequence: Synthetic oligonucleotide
  Sense strand starting at position 3238 of SEQ ID NO: 1562166
agcuucccuguuuaugaaa

SEQ ID NO: 1727050 - RNA, 19 nt, Artificial Sequence
  Description of Artificial Sequence: Synthetic oligonucleotide
  Antisense strand to SEQ ID NO: 1727049
uuucauaaacagggaagcu

SEQ ID NO: 1727051 - RNA, 19 nt, Artificial Sequence
  Description of Artificial Sequence: Synthetic oligonucleotide
  Sense strand starting at position 3263 of SEQ ID NO: 1562166
guuggacaugauuaacguu

SEQ ID NO: 1727052 - RNA, 19 nt, Artificial Sequence
  Description of Artificial Sequence: Synthetic oligonucleotide
  Antisense strand to SEQ ID NO: 1727051
aacguuaaucauguccaac

SEQ ID NO: 1727053 - RNA, 19 nt, Artificial Sequence
  Description of Artificial Sequence: Synthetic oligonucleotide
  Sense strand starting at position 3640 of SEQ ID NO: 1562166
aucaaagagccauguaacu

SEQ ID NO: 1727054 - RNA, 19 nt, Artificial Sequence
  Description of Artificial Sequence: Synthetic oligonucleotide
  Antisense strand to SEQ ID NO: 1727053
aguuacauggcucuuugau

SEQ ID NO: 1727055 - RNA, 19 nt, Artificial Sequence
  Description of Artificial Sequence: Synthetic oligonucleotide
  Sense strand starting at position 3671 of SEQ ID NO: 1562166
uucugaacagcuuguggua

SEQ ID NO: 1727056 - RNA, 19 nt, Artificial Sequence
  Description of Artificial Sequence: Synthetic oligonucleotide
  Antisense strand to SEQ ID NO: 1727055
uaccacaagcuguucagaa

SEQ ID NO: 1727057 - RNA, 19 nt, Artificial Sequence
  Description of Artificial Sequence: Synthetic oligonucleotide
  Sense strand starting at position 3683 of SEQ ID NO: 1562166
ugugguagccguguuauca

SEQ ID NO: 1727058 - RNA, 19 nt, Artificial Sequence
  Description of Artificial Sequence: Synthetic oligonucleotide
  Antisense strand to SEQ ID NO: 1727057
ugauaacacggcuaccaca

SEQ ID NO: 1727059 - RNA, 19 nt, Artificial Sequence
  Description of Artificial Sequence: Synthetic oligonucleotide
  Sense strand starting at position 3684 of SEQ ID NO: 1562166
gugguagccguguuaucac

SEQ ID NO: 1727060 - RNA, 19 nt, Artificial Sequence
  Description of Artificial Sequence: Synthetic oligonucleotide
  Antisense strand to SEQ ID NO: 1727059
gugauaacacggcuaccac

SEQ ID NO: 1727061 - RNA, 19 nt, Artificial Sequence
  Description of Artificial Sequence: Synthetic oligonucleotide
  Sense strand starting at position 3693 of SEQ ID NO: 1562166
guguuaucaccuugagcug

SEQ ID NO: 1727062 - RNA, 19 nt, Artificial Sequence
  Description of Artificial Sequence: Synthetic oligonucleotide
  Antisense strand to SEQ ID NO: 1727061
cagcucaaggugauaacac

SEQ ID NO: 1727063 - RNA, 19 nt, Artificial Sequence
  Description of Artificial Sequence: Synthetic oligonucleotide
  Sense strand starting at position 3694 of SEQ ID NO: 1562166
uguuaucaccuugagcuga

SEQ ID NO: 1727064 - RNA, 19 nt, Artificial Sequence
  Description of Artificial Sequence: Synthetic oligonucleotide
  Antisense strand to SEQ ID NO: 1727063
ucagcucaaggugauaaca

SEQ ID NO: 1727065 - RNA, 19 nt, Artificial Sequence
  Description of Artificial Sequence: Synthetic oligonucleotide
  Sense strand starting at position 3696 of SEQ ID NO: 1562166
uuaucaccuugagcugaua

SEQ ID NO: 1727066 - RNA, 19 nt, Artificial Sequence
  Description of Artificial Sequence: Synthetic oligonucleotide
  Antisense strand to SEQ ID NO: 1727065
uaucagcucaaggugauaa

SEQ ID NO: 1727067 - RNA, 19 nt, Artificial Sequence
  Description of Artificial Sequence: Synthetic oligonucleotide
  Sense strand starting at position 3699 of SEQ ID NO: 1562166
ucaccuugagcugauacaa

SEQ ID NO: 1727068 - RNA, 19 nt, Artificial Sequence
  Description of Artificial Sequence: Synthetic oligonucleotide
  Antisense strand to SEQ ID NO: 1727067
uuguaucagcucaagguga

SEQ ID NO: 1727069 - RNA, 19 nt, Artificial Sequence
  Description of Artificial Sequence: Synthetic oligonucleotide
  Sense strand starting at position 3746 of SEQ ID NO: 1562166
cuuuauugagagugugcga

SEQ ID NO: 1727070 - RNA, 19 nt, Artificial Sequence
  Description of Artificial Sequence: Synthetic oligonucleotide
  Antisense strand to SEQ ID NO: 1727069
ucgcacacucucaauaaag

SEQ ID NO: 1727071 - RNA, 19 nt, Artificial Sequence
  Description of Artificial Sequence: Synthetic oligonucleotide
  Sense strand starting at position 3760 of SEQ ID NO: 1562166
ugcgauuguccuuaucauu

SEQ ID NO: 1727072 - RNA, 19 nt, Artificial Sequence
  Description of Artificial Sequence: Synthetic oligonucleotide
  Antisense strand to SEQ ID NO: 1727071
aaugauaaggacaaucgca

SEQ ID NO: 1727073 - RNA, 19 nt, Artificial Sequence
  Description of Artificial Sequence: Synthetic oligonucleotide
  Sense strand starting at position 3820 of SEQ ID NO: 1562166
guuauuaaggcccaaagau

SEQ ID NO: 1727074 - RNA, 19 nt, Artificial Sequence
  Description of Artificial Sequence: Synthetic oligonucleotide
  Antisense strand to SEQ ID NO: 1727073
aucuuugggccuuaauaac

SEQ ID NO: 1727075 - RNA, 19 nt, Artificial Sequence
  Description of Artificial Sequence: Synthetic oligonucleotide
  Sense strand starting at position 3936 of SEQ ID NO: 1562166
gaucuaguguuucugagaa

SEQ ID NO: 1727076 - RNA, 19 nt, Artificial Sequence
  Description of Artificial Sequence: Synthetic oligonucleotide
  Antisense strand to SEQ ID NO: 1727075
uucucagaaacacuagauc

SEQ ID NO: 1727077 - RNA, 19 nt, Artificial Sequence
  Description of Artificial Sequence: Synthetic oligonucleotide
  Sense strand starting at position 3964 of SEQ ID NO: 1562166
uucuuaagugccuacauga

SEQ ID NO: 1727078 - RNA, 19 nt, Artificial Sequence
  Description of Artificial Sequence: Synthetic oligonucleotide
  Antisense strand to SEQ ID NO: 1727077
ucauguaggcacuuaagaa

SEQ ID NO: 1727079 - RNA, 19 nt, Artificial Sequence
  Description of Artificial Sequence: Synthetic oligonucleotide
  Sense strand starting at position 11 of SEQ ID NO: 1562167
ggaacacagacguguuuau

SEQ ID NO: 1727080 - RNA, 19 nt, Artificial Sequence
  Description of Artificial Sequence: Synthetic oligonucleotide
  Antisense strand to SEQ ID NO: 1727079
auaaacacgucuguguucc

SEQ ID NO: 1727081 - RNA, 19 nt, Artificial Sequence
  Description of Artificial Sequence: Synthetic oligonucleotide
  Sense strand starting at position 15 of SEQ ID NO: 1562167
cacagacguguuuauugua

SEQ ID NO: 1727082 - RNA, 19 nt, Artificial Sequence
  Description of Artificial Sequence: Synthetic oligonucleotide
  Antisense strand to SEQ ID NO: 1727081
uacaauaaacacgucugug

SEQ ID NO: 1727083 - RNA, 19 nt, Artificial Sequence
  Description of Artificial Sequence: Synthetic oligonucleotide
  Sense strand starting at position 1033 of SEQ ID NO: 1562167
cgguaaugauguuugggaa

SEQ ID NO: 1727084 - RNA, 19 nt, Artificial Sequence
  Description of Artificial Sequence: Synthetic oligonucleotide
  Antisense strand to SEQ ID NO: 1727083
uucccaaacaucauuaccg

SEQ ID NO: 1727085 - RNA, 19 nt, Artificial Sequence
  Description of Artificial Sequence: Synthetic oligonucleotide
  Sense strand starting at position 1034 of SEQ ID NO: 1562167
gguaaugauguuugggaau

SEQ ID NO: 1727086 - RNA, 19 nt, Artificial Sequence
  Description of Artificial Sequence: Synthetic oligonucleotide
  Antisense strand to SEQ ID NO: 1727085
auucccaaacaucauuacc

SEQ ID NO: 1727087 - RNA, 19 nt, Artificial Sequence
  Description of Artificial Sequence: Synthetic oligonucleotide
  Sense strand starting at position 1037 of SEQ ID NO: 1562167
aaugauguuugggaauuaa

SEQ ID NO: 1727088 - RNA, 19 nt, Artificial Sequence
  Description of Artificial Sequence: Synthetic oligonucleotide
  Antisense strand to SEQ ID NO: 1727087
uuaauucccaaacaucauu

SEQ ID NO: 1727089 - RNA, 19 nt, Artificial Sequence
  Description of Artificial Sequence: Synthetic oligonucleotide
  Sense strand starting at position 1047 of SEQ ID NO: 1562167
gggaauuaacgaggugaua

SEQ ID NO: 1727090 - RNA, 19 nt, Artificial Sequence
  Description of Artificial Sequence: Synthetic oligonucleotide
  Antisense strand to SEQ ID NO: 1727089
uaucaccucguuaauuccc

SEQ ID NO: 1727091 - RNA, 19 nt, Artificial Sequence
  Description of Artificial Sequence: Synthetic oligonucleotide
  Sense strand starting at position 1059 of SEQ ID NO: 1562167
ggugauaaacugugucguu

SEQ ID NO: 1727092 - RNA, 19 nt, Artificial Sequence
  Description of Artificial Sequence: Synthetic oligonucleotide
  Antisense strand to SEQ ID NO: 1727091
aacgacacaguuuaucacc

SEQ ID NO: 1727093 - RNA, 19 nt, Artificial Sequence
  Description of Artificial Sequence: Synthetic oligonucleotide
  Sense strand starting at position 1060 of SEQ ID NO: 1562167
gugauaaacugugucguua

SEQ ID NO: 1727094 - RNA, 19 nt, Artificial Sequence
  Description of Artificial Sequence: Synthetic oligonucleotide
  Antisense strand to SEQ ID NO: 1727093
uaacgacacaguuuaucac

SEQ ID NO: 1727095 - RNA, 19 nt, Artificial Sequence
  Description of Artificial Sequence: Synthetic oligonucleotide
  Sense strand starting at position 1108 of SEQ ID NO: 1562167
cuaguuagagucugauaac

SEQ ID NO: 1727096 - RNA, 19 nt, Artificial Sequence
  Description of Artificial Sequence: Synthetic oligonucleotide
  Antisense strand to SEQ ID NO: 1727095
guuaucagacucuaacuag

SEQ ID NO: 1727097 - RNA, 19 nt, Artificial Sequence
  Description of Artificial Sequence: Synthetic oligonucleotide
  Sense strand starting at position 1151 of SEQ ID NO: 1562167
cacguaggaguuugccaau

SEQ ID NO: 1727098 - RNA, 19 nt, Artificial Sequence
  Description of Artificial Sequence: Synthetic oligonucleotide
  Antisense strand to SEQ ID NO: 1727097
auuggcaaacuccuacgug

SEQ ID NO: 1727099 - RNA, 19 nt, Artificial Sequence
  Description of Artificial Sequence: Synthetic oligonucleotide
  Sense strand starting at position 1242 of SEQ ID NO: 1562167
guagcaaaguaaguauuaa

SEQ ID NO: 1727100 - RNA, 19 nt, Artificial Sequence
  Description of Artificial Sequence: Synthetic oligonucleotide
  Antisense strand to SEQ ID NO: 1727099
uuaauacuuacuuugcuac

SEQ ID NO: 1727101 - RNA, 19 nt, Artificial Sequence
  Description of Artificial Sequence: Synthetic oligonucleotide
  Sense strand starting at position 1338 of SEQ ID NO: 1562167
ugaggucgguguuucgaga

SEQ ID NO: 1727102 - RNA, 19 nt, Artificial Sequence
  Description of Artificial Sequence: Synthetic oligonucleotide
  Antisense strand to SEQ ID NO: 1727101
ucucgaaacaccgaccuca

SEQ ID NO: 1727103 - RNA, 19 nt, Artificial Sequence
  Description of Artificial Sequence: Synthetic oligonucleotide
  Sense strand starting at position 1593 of SEQ ID NO: 1562167
ucaaguguuuccucaacac

SEQ ID NO: 1727104 - RNA, 19 nt, Artificial Sequence
  Description of Artificial Sequence: Synthetic oligonucleotide
  Antisense strand to SEQ ID NO: 1727103
guguugaggaaacacuuga

SEQ ID NO: 1727105 - RNA, 19 nt, Artificial Sequence
  Description of Artificial Sequence: Synthetic oligonucleotide
  Sense strand starting at position 1597 of SEQ ID NO: 1562167
guguuuccucaacacuaca

SEQ ID NO: 1727106 - RNA, 19 nt, Artificial Sequence
  Description of Artificial Sequence: Synthetic oligonucleotide
  Antisense strand to SEQ ID NO: 1727105
uguaguguugaggaaacac

SEQ ID NO: 1727107 - RNA, 19 nt, Artificial Sequence
  Description of Artificial Sequence: Synthetic oligonucleotide
  Sense strand starting at position 1709 of SEQ ID NO: 1562167
ggcagaguaguggguguuu

SEQ ID NO: 1727108 - RNA, 19 nt, Artificial Sequence
  Description of Artificial Sequence: Synthetic oligonucleotide
  Antisense strand to SEQ ID NO: 1727107
aaacacccacuacucugcc

SEQ ID NO: 1727109 - RNA, 19 nt, Artificial Sequence
  Description of Artificial Sequence: Synthetic oligonucleotide
  Sense strand starting at position 1839 of SEQ ID NO: 1562167
aguggacagucaguaaaua

SEQ ID NO: 1727110 - RNA, 19 nt, Artificial Sequence
  Description of Artificial Sequence: Synthetic oligonucleotide
  Antisense strand to SEQ ID NO: 1727109
uauuuacugacuguccacu

SEQ ID NO: 1727111 - RNA, 19 nt, Artificial Sequence
  Description of Artificial Sequence: Synthetic oligonucleotide
  Sense strand starting at position 1858 of SEQ ID NO: 1562167
uuugcugaaugaguuaaga

SEQ ID NO: 1727112 - RNA, 19 nt, Artificial Sequence
  Description of Artificial Sequence: Synthetic oligonucleotide
  Antisense strand to SEQ ID NO: 1727111
ucuuaacucauucagcaaa

SEQ ID NO: 1727113 - RNA, 19 nt, Artificial Sequence
  Description of Artificial Sequence: Synthetic oligonucleotide
  Sense strand starting at position 1985 of SEQ ID NO: 1562167
gaaguaaguuguuccagga

SEQ ID NO: 1727114 - RNA, 19 nt, Artificial Sequence
  Description of Artificial Sequence: Synthetic oligonucleotide
  Antisense strand to SEQ ID NO: 1727113
uccuggaacaacuuacuuc

SEQ ID NO: 1727115 - RNA, 19 nt, Artificial Sequence
  Description of Artificial Sequence: Synthetic oligonucleotide
  Sense strand starting at position 2075 of SEQ ID NO: 1562167
agcuucccuguuuaugaaa

SEQ ID NO: 1727116 - RNA, 19 nt, Artificial Sequence
  Description of Artificial Sequence: Synthetic oligonucleotide
  Antisense strand to SEQ ID NO: 1727115
uuucauaaacagggaagcu

SEQ ID NO: 1727117 - RNA, 19 nt, Artificial Sequence
  Description of Artificial Sequence: Synthetic oligonucleotide
  Sense strand starting at position 2100 of SEQ ID NO: 1562167
guuggacaugauuaacguu

SEQ ID NO: 1727118 - RNA, 19 nt, Artificial Sequence
  Description of Artificial Sequence: Synthetic oligonucleotide
  Antisense strand to SEQ ID NO: 1727117
aacguuaaucauguccaac

SEQ ID NO: 1727119 - RNA, 19 nt, Artificial Sequence
  Description of Artificial Sequence: Synthetic oligonucleotide
  Sense strand starting at position 2477 of SEQ ID NO: 1562167
aucaaagagccauguaacu

SEQ ID NO: 1727120 - RNA, 19 nt, Artificial Sequence
  Description of Artificial Sequence: Synthetic oligonucleotide
  Antisense strand to SEQ ID NO: 1727119
aguuacauggcucuuugau

SEQ ID NO: 1727121 - RNA, 19 nt, Artificial Sequence
  Description of Artificial Sequence: Synthetic oligonucleotide
  Sense strand starting at position 2508 of SEQ ID NO: 1562167
uucugaacagcuuguggua

SEQ ID NO: 1727122 - RNA, 19 nt, Artificial Sequence
  Description of Artificial Sequence: Synthetic oligonucleotide
  Antisense strand to SEQ ID NO: 1727121
uaccacaagcuguucagaa

SEQ ID NO: 1727123 - RNA, 19 nt, Artificial Sequence
  Description of Artificial Sequence: Synthetic oligonucleotide
  Sense strand starting at position 2520 of SEQ ID NO: 1562167
ugugguagccguguuauca

SEQ ID NO: 1727124 - RNA, 19 nt, Artificial Sequence
  Description of Artificial Sequence: Synthetic oligonucleotide
  Antisense strand to SEQ ID NO: 1727123
ugauaacacggcuaccaca

SEQ ID NO: 1727125 - RNA, 19 nt, Artificial Sequence
  Description of Artificial Sequence: Synthetic oligonucleotide
  Sense strand starting at position 2521 of SEQ ID NO: 1562167
gugguagccguguuaucac

SEQ ID NO: 1727126 - RNA, 19 nt, Artificial Sequence
  Description of Artificial Sequence: Synthetic oligonucleotide
  Antisense strand to SEQ ID NO: 1727125
gugauaacacggcuaccac

SEQ ID NO: 1727127 - RNA, 19 nt, Artificial Sequence
  Description of Artificial Sequence: Synthetic oligonucleotide
  Sense strand starting at position 2530 of SEQ ID NO: 1562167
guguuaucaccuugagcug

SEQ ID NO: 1727128 - RNA, 19 nt, Artificial Sequence
  Description of Artificial Sequence: Synthetic oligonucleotide
  Antisense strand to SEQ ID NO: 1727127
cagcucaaggugauaacac

SEQ ID NO: 1727129 - RNA, 19 nt, Artificial Sequence
  Description of Artificial Sequence: Synthetic oligonucleotide
  Sense strand starting at position 2531 of SEQ ID NO: 1562167
uguuaucaccuugagcuga

SEQ ID NO: 1727130 - RNA, 19 nt, Artificial Sequence
  Description of Artificial Sequence: Synthetic oligonucleotide
  Antisense strand to SEQ ID NO: 1727129
ucagcucaaggugauaaca

SEQ ID NO: 1727131 - RNA, 19 nt, Artificial Sequence
  Description of Artificial Sequence: Synthetic oligonucleotide
  Sense strand starting at position 2533 of SEQ ID NO: 1562167
uuaucaccuugagcugaua

SEQ ID NO: 1727132 - RNA, 19 nt, Artificial Sequence
  Description of Artificial Sequence: Synthetic oligonucleotide
  Antisense strand to SEQ ID NO: 1727131
uaucagcucaaggugauaa

SEQ ID NO: 1727133 - RNA, 19 nt, Artificial Sequence
  Description of Artificial Sequence: Synthetic oligonucleotide
  Sense strand starting at position 2536 of SEQ ID NO: 1562167
ucaccuugagcugauacaa

SEQ ID NO: 1727134 - RNA, 19 nt, Artificial Sequence
  Description of Artificial Sequence: Synthetic oligonucleotide
  Antisense strand to SEQ ID NO: 1727133
uuguaucagcucaagguga

SEQ ID NO: 1727135 - RNA, 19 nt, Artificial Sequence
  Description of Artificial Sequence: Synthetic oligonucleotide
  Sense strand starting at position 2583 of SEQ ID NO: 1562167
cuuuauugagagugugcga

SEQ ID NO: 1727136 - RNA, 19 nt, Artificial Sequence
  Description of Artificial Sequence: Synthetic oligonucleotide
  Antisense strand to SEQ ID NO: 1727135
ucgcacacucucaauaaag

SEQ ID NO: 1727137 - RNA, 19 nt, Artificial Sequence
  Description of Artificial Sequence: Synthetic oligonucleotide
  Sense strand starting at position 2597 of SEQ ID NO: 1562167
ugcgauuguccuuaucauu

SEQ ID NO: 1727138 - RNA, 19 nt, Artificial Sequence
  Description of Artificial Sequence: Synthetic oligonucleotide
  Antisense strand to SEQ ID NO: 1727137
aaugauaaggacaaucgca

SEQ ID NO: 1727139 - RNA, 19 nt, Artificial Sequence
  Description of Artificial Sequence: Synthetic oligonucleotide
  Sense strand starting at position 2657 of SEQ ID NO: 1562167
guuauuaaggcccaaagau

SEQ ID NO: 1727140 - RNA, 19 nt, Artificial Sequence
  Description of Artificial Sequence: Synthetic oligonucleotide
  Antisense strand to SEQ ID NO: 1727139
aucuuugggccuuaauaac

SEQ ID NO: 1727141 - RNA, 19 nt, Artificial Sequence
  Description of Artificial Sequence: Synthetic oligonucleotide
  Sense strand starting at position 2773 of SEQ ID NO: 1562167
gaucuaguguuucugagaa

SEQ ID NO: 1727142 - RNA, 19 nt, Artificial Sequence
  Description of Artificial Sequence: Synthetic oligonucleotide
  Antisense strand to SEQ ID NO: 1727141
uucucagaaacacuagauc

SEQ ID NO: 1727143 - RNA, 19 nt, Artificial Sequence
  Description of Artificial Sequence: Synthetic oligonucleotide
  Sense strand starting at position 2801 of SEQ ID NO: 1562167
uucuuaagugccuacauga

SEQ ID NO: 1727144 - RNA, 19 nt, Artificial Sequence
  Description of Artificial Sequence: Synthetic oligonucleotide
  Antisense strand to SEQ ID NO: 1727143
ucauguaggcacuuaagaa

SEQ ID NO: 1727145 - RNA, 19 nt, Artificial Sequence
  Description of Artificial Sequence: Synthetic oligonucleotide
  Sense strand starting at position 2901 of SEQ ID NO: 1562167
ugugacucucuaggucaga

SEQ ID NO: 1727146 - RNA, 19 nt, Artificial Sequence
  Description of Artificial Sequence: Synthetic oligonucleotide
  Antisense strand to SEQ ID NO: 1727145
ucugaccuagagagucaca

SEQ ID NO: 1727147 - RNA, 19 nt, Artificial Sequence
  Description of Artificial Sequence: Synthetic oligonucleotide
  Sense strand starting at position 3591 of SEQ ID NO: 1562167
cgcuguguccagccaagau

SEQ ID NO: 1727148 - RNA, 19 nt, Artificial Sequence
  Description of Artificial Sequence: Synthetic oligonucleotide
  Antisense strand to SEQ ID NO: 1727147
aucuuggcuggacacagcg

SEQ ID NO: 1727149 - RNA, 19 nt, Artificial Sequence
  Description of Artificial Sequence: Synthetic oligonucleotide
  Sense strand starting at position 3724 of SEQ ID NO: 1562167
agugaaucucucugcucag

SEQ ID NO: 1727150 - RNA, 19 nt, Artificial Sequence
  Description of Artificial Sequence: Synthetic oligonucleotide
  Antisense strand to SEQ ID NO: 1727149
cugagcagagagauucacu

SEQ ID NO: 1727151 - RNA, 19 nt, Artificial Sequence
  Description of Artificial Sequence: Synthetic oligonucleotide
  Sense strand starting at position 3725 of SEQ ID NO: 1562167
gugaaucucucugcucagu

SEQ ID NO: 1727152 - RNA, 19 nt, Artificial Sequence
  Description of Artificial Sequence: Synthetic oligonucleotide
  Antisense strand to SEQ ID NO: 1727151
acugagcagagagauucac

SEQ ID NO: 1727153 - RNA, 19 nt, Artificial Sequence
  Description of Artificial Sequence: Synthetic oligonucleotide
  Sense strand starting at position 3795 of SEQ ID NO: 1562167
ggcugcagagguugacaau

SEQ ID NO: 1727154 - RNA, 19 nt, Artificial Sequence
  Description of Artificial Sequence: Synthetic oligonucleotide
  Antisense strand to SEQ ID NO: 1727153
auugucaaccucugcagcc

SEQ ID NO: 1727155 - RNA, 19 nt, Artificial Sequence
  Description of Artificial Sequence: Synthetic oligonucleotide
  Sense strand starting at position 3796 of SEQ ID NO: 1562167
gcugcagagguugacaaua

SEQ ID NO: 1727156 - RNA, 19 nt, Artificial Sequence
  Description of Artificial Sequence: Synthetic oligonucleotide
  Antisense strand to SEQ ID NO: 1727155
uauugucaaccucugcagc

SEQ ID NO: 1727157 - RNA, 19 nt, Artificial Sequence
  Description of Artificial Sequence: Synthetic oligonucleotide
  Sense strand starting at position 3823 of SEQ ID NO: 1562167
agcugucuuccuugcagau

SEQ ID NO: 1727158 - RNA, 19 nt, Artificial Sequence
  Description of Artificial Sequence: Synthetic oligonucleotide
  Antisense strand to SEQ ID NO: 1727157
aucugcaaggaagacagcu

SEQ ID NO: 1727159 - RNA, 19 nt, Artificial Sequence
  Description of Artificial Sequence: Synthetic oligonucleotide
  Sense strand starting at position 10 of SEQ ID NO: 1562168
gcaggaugcgccugacauc

SEQ ID NO: 1727160 - RNA, 19 nt, Artificial Sequence
  Description of Artificial Sequence: Synthetic oligonucleotide
  Antisense strand to SEQ ID NO: 1727159
gaugucaggcgcauccugc

SEQ ID NO: 1727161 - RNA, 19 nt, Artificial Sequence
  Description of Artificial Sequence: Synthetic oligonucleotide
  Sense strand starting at position 348 of SEQ ID NO: 1562168
cacuaagaguccuggcuga

SEQ ID NO: 1727162 - RNA, 19 nt, Artificial Sequence
  Description of Artificial Sequence: Synthetic oligonucleotide
  Antisense strand to SEQ ID NO: 1727161
ucagccaggacucuuagug

SEQ ID NO: 1727163 - RNA, 19 nt, Artificial Sequence
  Description of Artificial Sequence: Synthetic oligonucleotide
  Sense strand starting at position 567 of SEQ ID NO: 1562168
cggagaacuuccuggaacu

SEQ ID NO: 1727164 - RNA, 19 nt, Artificial Sequence
  Description of Artificial Sequence: Synthetic oligonucleotide
  Antisense strand to SEQ ID NO: 1727163
aguuccaggaaguucuccg

SEQ ID NO: 1727165 - RNA, 19 nt, Artificial Sequence
  Description of Artificial Sequence: Synthetic oligonucleotide
  Sense strand starting at position 650 of SEQ ID NO: 1562168
gcuggaaguucuggauguu

SEQ ID NO: 1727166 - RNA, 19 nt, Artificial Sequence
  Description of Artificial Sequence: Synthetic oligonucleotide
  Antisense strand to SEQ ID NO: 1727165
aacauccagaacuuccagc

SEQ ID NO: 1727167 - RNA, 19 nt, Artificial Sequence
  Description of Artificial Sequence: Synthetic oligonucleotide
  Sense strand starting at position 653 of SEQ ID NO: 1562168
ggaaguucuggauguuggu

SEQ ID NO: 1727168 - RNA, 19 nt, Artificial Sequence
  Description of Artificial Sequence: Synthetic oligonucleotide
  Antisense strand to SEQ ID NO: 1727167
accaacauccagaacuucc

SEQ ID NO: 1727169 - RNA, 19 nt, Artificial Sequence
  Description of Artificial Sequence: Synthetic oligonucleotide
  Sense strand starting at position 1949 of SEQ ID NO: 1562168
ccaccucgcuguugaagaa

SEQ ID NO: 1727170 - RNA, 19 nt, Artificial Sequence
  Description of Artificial Sequence: Synthetic oligonucleotide
  Antisense strand to SEQ ID NO: 1727169
uucuucaacagcgaggugg

SEQ ID NO: 1727171 - RNA, 19 nt, Artificial Sequence
  Description of Artificial Sequence: Synthetic oligonucleotide
  Sense strand starting at position 2857 of SEQ ID NO: 1562168
acaggagugucguauaagc

SEQ ID NO: 1727172 - RNA, 19 nt, Artificial Sequence
  Description of Artificial Sequence: Synthetic oligonucleotide
  Antisense strand to SEQ ID NO: 1727171
gcuuauacgacacuccugu

SEQ ID NO: 1727173 - RNA, 19 nt, Artificial Sequence
  Description of Artificial Sequence: Synthetic oligonucleotide
  Sense strand starting at position 2866 of SEQ ID NO: 1562168
ucguauaagcccguaggua

SEQ ID NO: 1727174 - RNA, 19 nt, Artificial Sequence
  Description of Artificial Sequence: Synthetic oligonucleotide
  Antisense strand to SEQ ID NO: 1727173
uaccuacgggcuuauacga

SEQ ID NO: 1727175 - RNA, 19 nt, Artificial Sequence
  Description of Artificial Sequence: Synthetic oligonucleotide
  Sense strand starting at position 2867 of SEQ ID NO: 1562168
cguauaagcccguagguaa

SEQ ID NO: 1727176 - RNA, 19 nt, Artificial Sequence
  Description of Artificial Sequence: Synthetic oligonucleotide
  Antisense strand to SEQ ID NO: 1727175
uuaccuacgggcuuauacg

SEQ ID NO: 1727177 - RNA, 19 nt, Artificial Sequence
  Description of Artificial Sequence: Synthetic oligonucleotide
  Sense strand starting at position 2976 of SEQ ID NO: 1562168
gggaguaaguuaccuaaag

SEQ ID NO: 1727178 - RNA, 19 nt, Artificial Sequence
  Description of Artificial Sequence: Synthetic oligonucleotide
  Antisense strand to SEQ ID NO: 1727177
cuuuagguaacuuacuccc

SEQ ID NO: 1727179 - RNA, 19 nt, Artificial Sequence
  Description of Artificial Sequence: Synthetic oligonucleotide
  Sense strand starting at position 2977 of SEQ ID NO: 1562168
ggaguaaguuaccuaaagu

SEQ ID NO: 1727180 - RNA, 19 nt, Artificial Sequence
  Description of Artificial Sequence: Synthetic oligonucleotide
  Antisense strand to SEQ ID NO: 1727179
acuuuagguaacuuacucc

SEQ ID NO: 1727181 - RNA, 19 nt, Artificial Sequence
  Description of Artificial Sequence: Synthetic oligonucleotide
  Sense strand starting at position 2988 of SEQ ID NO: 1562168
ccuaaaguguucccaagca

SEQ ID NO: 1727182 - RNA, 19 nt, Artificial Sequence
  Description of Artificial Sequence: Synthetic oligonucleotide
  Antisense strand to SEQ ID NO: 1727181
ugcuugggaacacuuuagg

SEQ ID NO: 1727183 - RNA, 19 nt, Artificial Sequence
  Description of Artificial Sequence: Synthetic oligonucleotide
  Sense strand starting at position 3078 of SEQ ID NO: 1562168
gaugguguuauuggacauu

SEQ ID NO: 1727184 - RNA, 19 nt, Artificial Sequence
  Description of Artificial Sequence: Synthetic oligonucleotide
  Antisense strand to SEQ ID NO: 1727183
aauguccaauaacaccauc

SEQ ID NO: 1727185 - RNA, 19 nt, Artificial Sequence
  Description of Artificial Sequence: Synthetic oligonucleotide
  Sense strand starting at position 3253 of SEQ ID NO: 1562168
gaaugacguugcugacaaa

SEQ ID NO: 1727186 - RNA, 19 nt, Artificial Sequence
  Description of Artificial Sequence: Synthetic oligonucleotide
  Antisense strand to SEQ ID NO: 1727185
uuugucagcaacgucauuc

SEQ ID NO: 1727187 - RNA, 19 nt, Artificial Sequence
  Description of Artificial Sequence: Synthetic oligonucleotide
  Sense strand starting at position 3256 of SEQ ID NO: 1562168
ugacguugcugacaaagaa

SEQ ID NO: 1727188 - RNA, 19 nt, Artificial Sequence
  Description of Artificial Sequence: Synthetic oligonucleotide
  Antisense strand to SEQ ID NO: 1727187
uucuuugucagcaacguca

SEQ ID NO: 1727189 - RNA, 19 nt, Artificial Sequence
  Description of Artificial Sequence: Synthetic oligonucleotide
  Sense strand starting at position 3302 of SEQ ID NO: 1562168
ggagacugcuagucucgaa

SEQ ID NO: 1727190 - RNA, 19 nt, Artificial Sequence
  Description of Artificial Sequence: Synthetic oligonucleotide
  Antisense strand to SEQ ID NO: 1727189
uucgagacuagcagucucc

SEQ ID NO: 1727191 - RNA, 19 nt, Artificial Sequence
  Description of Artificial Sequence: Synthetic oligonucleotide
  Sense strand starting at position 3306 of SEQ ID NO: 1562168
acugcuagucucgaaagca

SEQ ID NO: 1727192 - RNA, 19 nt, Artificial Sequence
  Description of Artificial Sequence: Synthetic oligonucleotide
  Antisense strand to SEQ ID NO: 1727191
ugcuuucgagacuagcagu

SEQ ID NO: 1727193 - RNA, 19 nt, Artificial Sequence
  Description of Artificial Sequence: Synthetic oligonucleotide
  Sense strand starting at position 3410 of SEQ ID NO: 1562168
ccaggcuuguuucucgaca

SEQ ID NO: 1727194 - RNA, 19 nt, Artificial Sequence
  Description of Artificial Sequence: Synthetic oligonucleotide
  Antisense strand to SEQ ID NO: 1727193
ugucgagaaacaagccugg

SEQ ID NO: 1727195 - RNA, 19 nt, Artificial Sequence
  Description of Artificial Sequence: Synthetic oligonucleotide
  Sense strand starting at position 3501 of SEQ ID NO: 1562168
gggaaaucacugcaaacgu

SEQ ID NO: 1727196 - RNA, 19 nt, Artificial Sequence
  Description of Artificial Sequence: Synthetic oligonucleotide
  Antisense strand to SEQ ID NO: 1727195
acguuugcagugauuuccc

SEQ ID NO: 1727197 - RNA, 19 nt, Artificial Sequence
  Description of Artificial Sequence: Synthetic oligonucleotide
  Sense strand starting at position 3687 of SEQ ID NO: 1562168
augauuaaaucucgggauu

SEQ ID NO: 1727198 - RNA, 19 nt, Artificial Sequence
  Description of Artificial Sequence: Synthetic oligonucleotide
  Antisense strand to SEQ ID NO: 1727197
aaucccgagauuuaaucau

SEQ ID NO: 1727199 - RNA, 19 nt, Artificial Sequence
  Description of Artificial Sequence: Synthetic oligonucleotide
  Sense strand starting at position 3871 of SEQ ID NO: 1562168
gcaggacucgcaggaaaca

SEQ ID NO: 1727200 - RNA, 19 nt, Artificial Sequence
  Description of Artificial Sequence: Synthetic oligonucleotide
  Antisense strand to SEQ ID NO: 1727199
uguuuccugcgaguccugc

SEQ ID NO: 1727201 - RNA, 19 nt, Artificial Sequence
  Description of Artificial Sequence: Synthetic oligonucleotide
  Sense strand starting at position 563 of SEQ ID NO: 1562169
gaccgaugaugguuaagca

SEQ ID NO: 1727202 - RNA, 19 nt, Artificial Sequence
  Description of Artificial Sequence: Synthetic oligonucleotide
  Antisense strand to SEQ ID NO: 1727201
ugcuuaaccaucaucgguc

SEQ ID NO: 1727203 - RNA, 19 nt, Artificial Sequence
  Description of Artificial Sequence: Synthetic oligonucleotide
  Sense strand starting at position 564 of SEQ ID NO: 1562169
accgaugaugguuaagcaa

SEQ ID NO: 1727204 - RNA, 19 nt, Artificial Sequence
  Description of Artificial Sequence: Synthetic oligonucleotide
  Antisense strand to SEQ ID NO: 1727203
uugcuuaaccaucaucggu

SEQ ID NO: 1727205 - RNA, 19 nt, Artificial Sequence
  Description of Artificial Sequence: Synthetic oligonucleotide
  Sense strand starting at position 697 of SEQ ID NO: 1562169
gaggccauauauucuauga

SEQ ID NO: 1727206 - RNA, 19 nt, Artificial Sequence
  Description of Artificial Sequence: Synthetic oligonucleotide
  Antisense strand to SEQ ID NO: 1727205
ucauagaauauauggccuc

SEQ ID NO: 1727207 - RNA, 19 nt, Artificial Sequence
  Description of Artificial Sequence: Synthetic oligonucleotide
  Sense strand starting at position 815 of SEQ ID NO: 1562169
agugacugucaugaguaua

SEQ ID NO: 1727208 - RNA, 19 nt, Artificial Sequence
  Description of Artificial Sequence: Synthetic oligonucleotide
  Antisense strand to SEQ ID NO: 1727207
uauacucaugacagucacu

SEQ ID NO: 1727209 - RNA, 19 nt, Artificial Sequence
  Description of Artificial Sequence: Synthetic oligonucleotide
  Sense strand starting at position 820 of SEQ ID NO: 1562169
cugucaugaguauaggauu

SEQ ID NO: 1727210 - RNA, 19 nt, Artificial Sequence
  Description of Artificial Sequence: Synthetic oligonucleotide
  Antisense strand to SEQ ID NO: 1727209
aauccuauacucaugacag

SEQ ID NO: 1727211 - RNA, 19 nt, Artificial Sequence
  Description of Artificial Sequence: Synthetic oligonucleotide
  Sense strand starting at position 890 of SEQ ID NO: 1562169
acaacuuugcgauaugaga

SEQ ID NO: 1727212 - RNA, 19 nt, Artificial Sequence
  Description of Artificial Sequence: Synthetic oligonucleotide
  Antisense strand to SEQ ID NO: 1727211
ucucauaucgcaaaguugu

SEQ ID NO: 1727213 - RNA, 19 nt, Artificial Sequence
  Description of Artificial Sequence: Synthetic oligonucleotide
  Sense strand starting at position 950 of SEQ ID NO: 1562169
gugcaugaauaccuuaaua

SEQ ID NO: 1727214 - RNA, 19 nt, Artificial Sequence
  Description of Artificial Sequence: Synthetic oligonucleotide
  Antisense strand to SEQ ID NO: 1727213
uauuaagguauucaugcac

SEQ ID NO: 1727215 - RNA, 19 nt, Artificial Sequence
  Description of Artificial Sequence: Synthetic oligonucleotide
  Sense strand starting at position 991 of SEQ ID NO: 1562169
gacaaucuauccgugcaau

SEQ ID NO: 1727216 - RNA, 19 nt, Artificial Sequence
  Description of Artificial Sequence: Synthetic oligonucleotide
  Antisense strand to SEQ ID NO: 1727215
auugcacggauagauuguc

SEQ ID NO: 1727217 - RNA, 19 nt, Artificial Sequence
  Description of Artificial Sequence: Synthetic oligonucleotide
  Sense strand starting at position 1127 of SEQ ID NO: 1562169
ggcagaacuauaggugauc

SEQ ID NO: 1727218 - RNA, 19 nt, Artificial Sequence
  Description of Artificial Sequence: Synthetic oligonucleotide
  Antisense strand to SEQ ID NO: 1727217
gaucaccuauaguucugcc

SEQ ID NO: 1727219 - RNA, 19 nt, Artificial Sequence
  Description of Artificial Sequence: Synthetic oligonucleotide
  Sense strand starting at position 1169 of SEQ ID NO: 1562169
uccagauguuccuuaguaa

SEQ ID NO: 1727220 - RNA, 19 nt, Artificial Sequence
  Description of Artificial Sequence: Synthetic oligonucleotide
  Antisense strand to SEQ ID NO: 1727219
uuacuaaggaacaucugga

SEQ ID NO: 1727221 - RNA, 19 nt, Artificial Sequence
  Description of Artificial Sequence: Synthetic oligonucleotide
  Sense strand starting at position 1170 of SEQ ID NO: 1562169
ccagauguuccuuaguaag

SEQ ID NO: 1727222 - RNA, 19 nt, Artificial Sequence
  Description of Artificial Sequence: Synthetic oligonucleotide
  Antisense strand to SEQ ID NO: 1727221
cuuacuaaggaacaucugg

SEQ ID NO: 1727223 - RNA, 19 nt, Artificial Sequence
  Description of Artificial Sequence: Synthetic oligonucleotide
  Sense strand starting at position 1536 of SEQ ID NO: 1562169
aggccucuauuacuaagua

SEQ ID NO: 1727224 - RNA, 19 nt, Artificial Sequence
  Description of Artificial Sequence: Synthetic oligonucleotide
  Antisense strand to SEQ ID NO: 1727223
uacuuaguaauagaggccu

SEQ ID NO: 1727225 - RNA, 19 nt, Artificial Sequence
  Description of Artificial Sequence: Synthetic oligonucleotide
  Sense strand starting at position 2228 of SEQ ID NO: 1562169
gcaggaugugauuauaucu

SEQ ID NO: 1727226 - RNA, 19 nt, Artificial Sequence
  Description of Artificial Sequence: Synthetic oligonucleotide
  Antisense strand to SEQ ID NO: 1727225
agauauaaucacauccugc

SEQ ID NO: 1727227 - RNA, 19 nt, Artificial Sequence
  Description of Artificial Sequence: Synthetic oligonucleotide
  Sense strand starting at position 2233 of SEQ ID NO: 1562169
augugauuauaucugagug

SEQ ID NO: 1727228 - RNA, 19 nt, Artificial Sequence
  Description of Artificial Sequence: Synthetic oligonucleotide
  Antisense strand to SEQ ID NO: 1727227
cacucagauauaaucacau

SEQ ID NO: 1727229 - RNA, 19 nt, Artificial Sequence
  Description of Artificial Sequence: Synthetic oligonucleotide
  Sense strand starting at position 2237 of SEQ ID NO: 1562169
gauuauaucugagugguug

SEQ ID NO: 1727230 - RNA, 19 nt, Artificial Sequence
  Description of Artificial Sequence: Synthetic oligonucleotide
  Antisense strand to SEQ ID NO: 1727229
caaccacucagauauaauc

SEQ ID NO: 1727231 - RNA, 19 nt, Artificial Sequence
  Description of Artificial Sequence: Synthetic oligonucleotide
  Sense strand starting at position 2238 of SEQ ID NO: 1562169
auuauaucugagugguuga

SEQ ID NO: 1727232 - RNA, 19 nt, Artificial Sequence
  Description of Artificial Sequence: Synthetic oligonucleotide
  Antisense strand to SEQ ID NO: 1727231
ucaaccacucagauauaau

SEQ ID NO: 1727233 - RNA, 19 nt, Artificial Sequence
  Description of Artificial Sequence: Synthetic oligonucleotide
  Sense strand starting at position 2239 of SEQ ID NO: 1562169
uuauaucugagugguugau

SEQ ID NO: 1727234 - RNA, 19 nt, Artificial Sequence
  Description of Artificial Sequence: Synthetic oligonucleotide
  Antisense strand to SEQ ID NO: 1727233
aucaaccacucagauauaa

SEQ ID NO: 1727235 - RNA, 19 nt, Artificial Sequence
  Description of Artificial Sequence: Synthetic oligonucleotide
  Sense strand starting at position 2245 of SEQ ID NO: 1562169
cugagugguugauugacua

SEQ ID NO: 1727236 - RNA, 19 nt, Artificial Sequence
  Description of Artificial Sequence: Synthetic oligonucleotide
  Antisense strand to SEQ ID NO: 1727235
uagucaaucaaccacucag

SEQ ID NO: 1727237 - RNA, 19 nt, Artificial Sequence
  Description of Artificial Sequence: Synthetic oligonucleotide
  Sense strand starting at position 2249 of SEQ ID NO: 1562169
gugguugauugacuaauac

SEQ ID NO: 1727238 - RNA, 19 nt, Artificial Sequence
  Description of Artificial Sequence: Synthetic oligonucleotide
  Antisense strand to SEQ ID NO: 1727237
guauuagucaaucaaccac

SEQ ID NO: 1727239 - RNA, 19 nt, Artificial Sequence
  Description of Artificial Sequence: Synthetic oligonucleotide
  Sense strand starting at position 2258 of SEQ ID NO: 1562169
ugacuaauacugugaugag

SEQ ID NO: 1727240 - RNA, 19 nt, Artificial Sequence
  Description of Artificial Sequence: Synthetic oligonucleotide
  Antisense strand to SEQ ID NO: 1727239
cucaucacaguauuaguca

SEQ ID NO: 1727241 - RNA, 19 nt, Artificial Sequence
  Description of Artificial Sequence: Synthetic oligonucleotide
  Sense strand starting at position 2338 of SEQ ID NO: 1562169
uccuuagagcacuguuaga

SEQ ID NO: 1727242 - RNA, 19 nt, Artificial Sequence
  Description of Artificial Sequence: Synthetic oligonucleotide
  Antisense strand to SEQ ID NO: 1727241
ucuaacagugcucuaagga

SEQ ID NO: 1727243 - RNA, 19 nt, Artificial Sequence
  Description of Artificial Sequence: Synthetic oligonucleotide
  Sense strand starting at position 2483 of SEQ ID NO: 1562169
uuugaugacccaugacuga

SEQ ID NO: 1727244 - RNA, 19 nt, Artificial Sequence
  Description of Artificial Sequence: Synthetic oligonucleotide
  Antisense strand to SEQ ID NO: 1727243
ucagucaugggucaucaaa

SEQ ID NO: 1727245 - RNA, 19 nt, Artificial Sequence
  Description of Artificial Sequence: Synthetic oligonucleotide
  Sense strand starting at position 2490 of SEQ ID NO: 1562169
acccaugacugauggauuu

SEQ ID NO: 1727246 - RNA, 19 nt, Artificial Sequence
  Description of Artificial Sequence: Synthetic oligonucleotide
  Antisense strand to SEQ ID NO: 1727245
aaauccaucagucaugggu

SEQ ID NO: 1727247 - RNA, 19 nt, Artificial Sequence
  Description of Artificial Sequence: Synthetic oligonucleotide
  Sense strand starting at position 2559 of SEQ ID NO: 1562169
augagaaucuaacuggcuu

SEQ ID NO: 1727248 - RNA, 19 nt, Artificial Sequence
  Description of Artificial Sequence: Synthetic oligonucleotide
  Antisense strand to SEQ ID NO: 1727247
aagccaguuagauucucau

SEQ ID NO: 1727249 - RNA, 19 nt, Artificial Sequence
  Description of Artificial Sequence: Synthetic oligonucleotide
  Sense strand starting at position 3123 of SEQ ID NO: 1562169
uuuggaguguucucuacua

SEQ ID NO: 1727250 - RNA, 19 nt, Artificial Sequence
  Description of Artificial Sequence: Synthetic oligonucleotide
  Antisense strand to SEQ ID NO: 1727249
uaguagagaacacuccaaa

SEQ ID NO: 1727251 - RNA, 19 nt, Artificial Sequence
  Description of Artificial Sequence: Synthetic oligonucleotide
  Sense strand starting at position 3125 of SEQ ID NO: 1562169
uggaguguucucuacuauu

SEQ ID NO: 1727252 - RNA, 19 nt, Artificial Sequence
  Description of Artificial Sequence: Synthetic oligonucleotide
  Antisense strand to SEQ ID NO: 1727251
aauaguagagaacacucca

SEQ ID NO: 1727253 - RNA, 19 nt, Artificial Sequence
  Description of Artificial Sequence: Synthetic oligonucleotide
  Sense strand starting at position 3150 of SEQ ID NO: 1562169
aguauaaagguaugcugaa

SEQ ID NO: 1727254 - RNA, 19 nt, Artificial Sequence
  Description of Artificial Sequence: Synthetic oligonucleotide
  Antisense strand to SEQ ID NO: 1727253
uucagcauaccuuuauacu

SEQ ID NO: 1727255 - RNA, 19 nt, Artificial Sequence
  Description of Artificial Sequence: Synthetic oligonucleotide
  Sense strand starting at position 3151 of SEQ ID NO: 1562169
guauaaagguaugcugaaa

SEQ ID NO: 1727256 - RNA, 19 nt, Artificial Sequence
  Description of Artificial Sequence: Synthetic oligonucleotide
  Antisense strand to SEQ ID NO: 1727255
uuucagcauaccuuuauac

SEQ ID NO: 1727257 - RNA, 19 nt, Artificial Sequence
  Description of Artificial Sequence: Synthetic oligonucleotide
  Sense strand starting at position 3261 of SEQ ID NO: 1562169
accacugacuucuuaggga

SEQ ID NO: 1727258 - RNA, 19 nt, Artificial Sequence
  Description of Artificial Sequence: Synthetic oligonucleotide
  Antisense strand to SEQ ID NO: 1727257
ucccuaagaagucaguggu

SEQ ID NO: 1727259 - RNA, 19 nt, Artificial Sequence
  Description of Artificial Sequence: Synthetic oligonucleotide
  Sense strand starting at position 3530 of SEQ ID NO: 1562169
agcuaaggaagauguuauu

SEQ ID NO: 1727260 - RNA, 19 nt, Artificial Sequence
  Description of Artificial Sequence: Synthetic oligonucleotide
  Antisense strand to SEQ ID NO: 1727259
aauaacaucuuccuuagcu

SEQ ID NO: 1727261 - RNA, 19 nt, Artificial Sequence
  Description of Artificial Sequence: Synthetic oligonucleotide
  Sense strand starting at position 3543 of SEQ ID NO: 1562169
guuauuggaagcuggagaa

SEQ ID NO: 1727262 - RNA, 19 nt, Artificial Sequence
  Description of Artificial Sequence: Synthetic oligonucleotide
  Antisense strand to SEQ ID NO: 1727261
uucuccagcuuccaauaac

SEQ ID NO: 1727263 - RNA, 19 nt, Artificial Sequence
  Description of Artificial Sequence: Synthetic oligonucleotide
  Sense strand starting at position 3576 of SEQ ID NO: 1562169
uauauagugccagaaaguu

SEQ ID NO: 1727264 - RNA, 19 nt, Artificial Sequence
  Description of Artificial Sequence: Synthetic oligonucleotide
  Antisense strand to SEQ ID NO: 1727263
aacuuucuggcacuauaua

SEQ ID NO: 1727265 - RNA, 19 nt, Artificial Sequence
  Description of Artificial Sequence: Synthetic oligonucleotide
  Sense strand starting at position 3588 of SEQ ID NO: 1562169
gaaaguuuggcccaggcau

SEQ ID NO: 1727266 - RNA, 19 nt, Artificial Sequence
  Description of Artificial Sequence: Synthetic oligonucleotide
  Antisense strand to SEQ ID NO: 1727265
augccugggccaaacuuuc

SEQ ID NO: 1727267 - RNA, 19 nt, Artificial Sequence
  Description of Artificial Sequence: Synthetic oligonucleotide
  Sense strand starting at position 3658 of SEQ ID NO: 1562169
cgcagaauccaucagcaua

SEQ ID NO: 1727268 - RNA, 19 nt, Artificial Sequence
  Description of Artificial Sequence: Synthetic oligonucleotide
  Antisense strand to SEQ ID NO: 1727267
uaugcugauggauucugcg

SEQ ID NO: 1727269 - RNA, 19 nt, Artificial Sequence
  Description of Artificial Sequence: Synthetic oligonucleotide
  Sense strand starting at position 3806 of SEQ ID NO: 1562169
gcaacauucuuccuggaau

SEQ ID NO: 1727270 - RNA, 19 nt, Artificial Sequence
  Description of Artificial Sequence: Synthetic oligonucleotide
  Antisense strand to SEQ ID NO: 1727269
auuccaggaagaauguugc

SEQ ID NO: 1727271 - RNA, 19 nt, Artificial Sequence
  Description of Artificial Sequence: Synthetic oligonucleotide
  Sense strand starting at position 3849 of SEQ ID NO: 1562169
cccagugcugcucuguaua

SEQ ID NO: 1727272 - RNA, 19 nt, Artificial Sequence
  Description of Artificial Sequence: Synthetic oligonucleotide
  Antisense strand to SEQ ID NO: 1727271
uauacagagcagcacuggg

SEQ ID NO: 1727273 - RNA, 19 nt, Artificial Sequence
  Description of Artificial Sequence: Synthetic oligonucleotide
  Sense strand starting at position 3906 of SEQ ID NO: 1562169
cauccucugguaggugaau

SEQ ID NO: 1727274 - RNA, 19 nt, Artificial Sequence
  Description of Artificial Sequence: Synthetic oligonucleotide
  Antisense strand to SEQ ID NO: 1727273
auucaccuaccagaggaug

SEQ ID NO: 1727275 - RNA, 19 nt, Artificial Sequence
  Description of Artificial Sequence: Synthetic oligonucleotide
  Sense strand starting at position 3907 of SEQ ID NO: 1562169
auccucugguaggugaaua

SEQ ID NO: 1727276 - RNA, 19 nt, Artificial Sequence
  Description of Artificial Sequence: Synthetic oligonucleotide
  Antisense strand to SEQ ID NO: 1727275
uauucaccuaccagaggau

SEQ ID NO: 1727277 - RNA, 19 nt, Artificial Sequence
  Description of Artificial Sequence: Synthetic oligonucleotide
  Sense strand starting at position 3918 of SEQ ID NO: 1562169
ggugaauacugcucaagua

SEQ ID NO: 1727278 - RNA, 19 nt, Artificial Sequence
  Description of Artificial Sequence: Synthetic oligonucleotide
  Antisense strand to SEQ ID NO: 1727277
uacuugagcaguauucacc

SEQ ID NO: 1727279 - RNA, 19 nt, Artificial Sequence
  Description of Artificial Sequence: Synthetic oligonucleotide
  Sense strand starting at position 3919 of SEQ ID NO: 1562169
gugaauacugcucaaguaa

SEQ ID NO: 1727280 - RNA, 19 nt, Artificial Sequence
  Description of Artificial Sequence: Synthetic oligonucleotide
  Antisense strand to SEQ ID NO: 1727279
uuacuugagcaguauucac

SEQ ID NO: 1727281 - RNA, 19 nt, Artificial Sequence
  Description of Artificial Sequence: Synthetic oligonucleotide
  Sense strand starting at position 12 of SEQ ID NO: 1562170
ggaggucuucauuaguagu

SEQ ID NO: 1727282 - RNA, 19 nt, Artificial Sequence
  Description of Artificial Sequence: Synthetic oligonucleotide
  Antisense strand to SEQ ID NO: 1727281
acuacuaaugaagaccucc

SEQ ID NO: 1727283 - RNA, 19 nt, Artificial Sequence
  Description of Artificial Sequence: Synthetic oligonucleotide
  Sense strand starting at position 54 of SEQ ID NO: 1562170
agcaaagauucuguuaacu

SEQ ID NO: 1727284 - RNA, 19 nt, Artificial Sequence
  Description of Artificial Sequence: Synthetic oligonucleotide
  Antisense strand to SEQ ID NO: 1727283
aguuaacagaaucuuugcu

SEQ ID NO: 1727285 - RNA, 19 nt, Artificial Sequence
  Description of Artificial Sequence: Synthetic oligonucleotide
  Sense strand starting at position 63 of SEQ ID NO: 1562170
ucuguuaacuaccuggaaa

SEQ ID NO: 1727286 - RNA, 19 nt, Artificial Sequence
  Description of Artificial Sequence: Synthetic oligonucleotide
  Antisense strand to SEQ ID NO: 1727285
uuuccagguaguuaacaga

SEQ ID NO: 1727287 - RNA, 19 nt, Artificial Sequence
  Description of Artificial Sequence: Synthetic oligonucleotide
  Sense strand starting at position 170 of SEQ ID NO: 1562170
ggauucuagcauuaguaac

SEQ ID NO: 1727288 - RNA, 19 nt, Artificial Sequence
  Description of Artificial Sequence: Synthetic oligonucleotide
  Antisense strand to SEQ ID NO: 1727287
guuacuaaugcuagaaucc

SEQ ID NO: 1727289 - RNA, 19 nt, Artificial Sequence
  Description of Artificial Sequence: Synthetic oligonucleotide
  Sense strand starting at position 374 of SEQ ID NO: 1562170
acuguuaugccaugaggac

SEQ ID NO: 1727290 - RNA, 19 nt, Artificial Sequence
  Description of Artificial Sequence: Synthetic oligonucleotide
  Antisense strand to SEQ ID NO: 1727289
guccucauggcauaacagu

SEQ ID NO: 1727291 - RNA, 19 nt, Artificial Sequence
  Description of Artificial Sequence: Synthetic oligonucleotide
  Sense strand starting at position 375 of SEQ ID NO: 1562170
cuguuaugccaugaggaca

SEQ ID NO: 1727292 - RNA, 19 nt, Artificial Sequence
  Description of Artificial Sequence: Synthetic oligonucleotide
  Antisense strand to SEQ ID NO: 1727291
uguccucauggcauaacag

SEQ ID NO: 1727293 - RNA, 19 nt, Artificial Sequence
  Description of Artificial Sequence: Synthetic oligonucleotide
  Sense strand starting at position 547 of SEQ ID NO: 1562170
aaauauguggguuguauua

SEQ ID NO: 1727294 - RNA, 19 nt, Artificial Sequence
  Description of Artificial Sequence: Synthetic oligonucleotide
  Antisense strand to SEQ ID NO: 1727293
uaauacaacccacauauuu

SEQ ID NO: 1727295 - RNA, 19 nt, Artificial Sequence
  Description of Artificial Sequence: Synthetic oligonucleotide
  Sense strand starting at position 615 of SEQ ID NO: 1562170
uagggaaagucaccuuagu

SEQ ID NO: 1727296 - RNA, 19 nt, Artificial Sequence
  Description of Artificial Sequence: Synthetic oligonucleotide
  Antisense strand to SEQ ID NO: 1727295
acuaaggugacuuucccua

SEQ ID NO: 1727297 - RNA, 19 nt, Artificial Sequence
  Description of Artificial Sequence: Synthetic oligonucleotide
  Sense strand starting at position 628 of SEQ ID NO: 1562170
cuuagucuuccucaaggaa

SEQ ID NO: 1727298 - RNA, 19 nt, Artificial Sequence
  Description of Artificial Sequence: Synthetic oligonucleotide
  Antisense strand to SEQ ID NO: 1727297
uuccuugaggaagacuaag

SEQ ID NO: 1727299 - RNA, 19 nt, Artificial Sequence
  Description of Artificial Sequence: Synthetic oligonucleotide
  Sense strand starting at position 928 of SEQ ID NO: 1562170
uccagagucguugggauca

SEQ ID NO: 1727300 - RNA, 19 nt, Artificial Sequence
  Description of Artificial Sequence: Synthetic oligonucleotide
  Antisense strand to SEQ ID NO: 1727299
ugaucccaacgacucugga

SEQ ID NO: 1727301 - RNA, 19 nt, Artificial Sequence
  Description of Artificial Sequence: Synthetic oligonucleotide
  Sense strand starting at position 1160 of SEQ ID NO: 1562170
agucgauucgugguugcca

SEQ ID NO: 1727302 - RNA, 19 nt, Artificial Sequence
  Description of Artificial Sequence: Synthetic oligonucleotide
  Antisense strand to SEQ ID NO: 1727301
uggcaaccacgaaucgacu

SEQ ID NO: 1727303 - RNA, 19 nt, Artificial Sequence
  Description of Artificial Sequence: Synthetic oligonucleotide
  Sense strand starting at position 1173 of SEQ ID NO: 1562170
uugccaggcgucgugaaua

SEQ ID NO: 1727304 - RNA, 19 nt, Artificial Sequence
  Description of Artificial Sequence: Synthetic oligonucleotide
  Antisense strand to SEQ ID NO: 1727303
uauucacgacgccuggcaa

SEQ ID NO: 1727305 - RNA, 19 nt, Artificial Sequence
  Description of Artificial Sequence: Synthetic oligonucleotide
  Sense strand starting at position 1209 of SEQ ID NO: 1562170
ccuauuaauggguaagggu

SEQ ID NO: 1727306 - RNA, 19 nt, Artificial Sequence
  Description of Artificial Sequence: Synthetic oligonucleotide
  Antisense strand to SEQ ID NO: 1727305
acccuuacccauuaauagg

SEQ ID NO: 1727307 - RNA, 19 nt, Artificial Sequence
  Description of Artificial Sequence: Synthetic oligonucleotide
  Sense strand starting at position 1305 of SEQ ID NO: 1562170
aaggaagaacuguguggua

SEQ ID NO: 1727308 - RNA, 19 nt, Artificial Sequence
  Description of Artificial Sequence: Synthetic oligonucleotide
  Antisense strand to SEQ ID NO: 1727307
uaccacacaguucuuccuu

SEQ ID NO: 1727309 - RNA, 19 nt, Artificial Sequence
  Description of Artificial Sequence: Synthetic oligonucleotide
  Sense strand starting at position 1307 of SEQ ID NO: 1562170
ggaagaacugugugguaau

SEQ ID NO: 1727310 - RNA, 19 nt, Artificial Sequence
  Description of Artificial Sequence: Synthetic oligonucleotide
  Antisense strand to SEQ ID NO: 1727309
auuaccacacaguucuucc

SEQ ID NO: 1727311 - RNA, 19 nt, Artificial Sequence
  Description of Artificial Sequence: Synthetic oligonucleotide
  Sense strand starting at position 1483 of SEQ ID NO: 1562170
guccucuccagauggaaga

SEQ ID NO: 1727312 - RNA, 19 nt, Artificial Sequence
  Description of Artificial Sequence: Synthetic oligonucleotide
  Antisense strand to SEQ ID NO: 1727311
ucuuccaucuggagaggac

SEQ ID NO: 1727313 - RNA, 19 nt, Artificial Sequence
  Description of Artificial Sequence: Synthetic oligonucleotide
  Sense strand starting at position 2075 of SEQ ID NO: 1562170
gugagcgcucugaggaguu

SEQ ID NO: 1727314 - RNA, 19 nt, Artificial Sequence
  Description of Artificial Sequence: Synthetic oligonucleotide
  Antisense strand to SEQ ID NO: 1727313
aacuccucagagcgcucac

SEQ ID NO: 1727315 - RNA, 19 nt, Artificial Sequence
  Description of Artificial Sequence: Synthetic oligonucleotide
  Sense strand starting at position 2219 of SEQ ID NO: 1562170
uugaacucacaagguuauu

SEQ ID NO: 1727316 - RNA, 19 nt, Artificial Sequence
  Description of Artificial Sequence: Synthetic oligonucleotide
  Antisense strand to SEQ ID NO: 1727315
aauaaccuugugaguucaa

SEQ ID NO: 1727317 - RNA, 19 nt, Artificial Sequence
  Description of Artificial Sequence: Synthetic oligonucleotide
  Sense strand starting at position 2231 of SEQ ID NO: 1562170
gguuauugagaguguuuag

SEQ ID NO: 1727318 - RNA, 19 nt, Artificial Sequence
  Description of Artificial Sequence: Synthetic oligonucleotide
  Antisense strand to SEQ ID NO: 1727317
cuaaacacucucaauaacc

SEQ ID NO: 1727319 - RNA, 19 nt, Artificial Sequence
  Description of Artificial Sequence: Synthetic oligonucleotide
  Sense strand starting at position 2234 of SEQ ID NO: 1562170
uauugagaguguuuagaac

SEQ ID NO: 1727320 - RNA, 19 nt, Artificial Sequence
  Description of Artificial Sequence: Synthetic oligonucleotide
  Antisense strand to SEQ ID NO: 1727319
guucuaaacacucucaaua

SEQ ID NO: 1727321 - RNA, 19 nt, Artificial Sequence
  Description of Artificial Sequence: Synthetic oligonucleotide
  Sense strand starting at position 2295 of SEQ ID NO: 1562170
uuugcuuaccaaggauuau

SEQ ID NO: 1727322 - RNA, 19 nt, Artificial Sequence
  Description of Artificial Sequence: Synthetic oligonucleotide
  Antisense strand to SEQ ID NO: 1727321
auaauccuugguaagcaaa

SEQ ID NO: 1727323 - RNA, 19 nt, Artificial Sequence
  Description of Artificial Sequence: Synthetic oligonucleotide
  Sense strand starting at position 2353 of SEQ ID NO: 1562170
ucaucaguucuuggguacu

SEQ ID NO: 1727324 - RNA, 19 nt, Artificial Sequence
  Description of Artificial Sequence: Synthetic oligonucleotide
  Antisense strand to SEQ ID NO: 1727323
aguacccaagaacugauga

SEQ ID NO: 1727325 - RNA, 19 nt, Artificial Sequence
  Description of Artificial Sequence: Synthetic oligonucleotide
  Sense strand starting at position 2482 of SEQ ID NO: 1562170
cgaaauaguggccacucau

SEQ ID NO: 1727326 - RNA, 19 nt, Artificial Sequence
  Description of Artificial Sequence: Synthetic oligonucleotide
  Antisense strand to SEQ ID NO: 1727325
augaguggccacuauuucg

SEQ ID NO: 1727327 - RNA, 19 nt, Artificial Sequence
  Description of Artificial Sequence: Synthetic oligonucleotide
  Sense strand starting at position 2517 of SEQ ID NO: 1562170
gcuuaucaggucugauuuc

SEQ ID NO: 1727328 - RNA, 19 nt, Artificial Sequence
  Description of Artificial Sequence: Synthetic oligonucleotide
  Antisense strand to SEQ ID NO: 1727327
gaaaucagaccugauaagc

SEQ ID NO: 1727329 - RNA, 19 nt, Artificial Sequence
  Description of Artificial Sequence: Synthetic oligonucleotide
  Sense strand starting at position 2586 of SEQ ID NO: 1562170
uugguuauaucccugauau

SEQ ID NO: 1727330 - RNA, 19 nt, Artificial Sequence
  Description of Artificial Sequence: Synthetic oligonucleotide
  Antisense strand to SEQ ID NO: 1727329
auaucagggauauaaccaa

SEQ ID NO: 1727331 - RNA, 19 nt, Artificial Sequence
  Description of Artificial Sequence: Synthetic oligonucleotide
  Sense strand starting at position 2587 of SEQ ID NO: 1562170
ugguuauaucccugauauu

SEQ ID NO: 1727332 - RNA, 19 nt, Artificial Sequence
  Description of Artificial Sequence: Synthetic oligonucleotide
  Antisense strand to SEQ ID NO: 1727331
aauaucagggauauaacca

SEQ ID NO: 1727333 - RNA, 19 nt, Artificial Sequence
  Description of Artificial Sequence: Synthetic oligonucleotide
  Sense strand starting at position 2588 of SEQ ID NO: 1562170
gguuauaucccugauauug

SEQ ID NO: 1727334 - RNA, 19 nt, Artificial Sequence
  Description of Artificial Sequence: Synthetic oligonucleotide
  Antisense strand to SEQ ID NO: 1727333
caauaucagggauauaacc

SEQ ID NO: 1727335 - RNA, 19 nt, Artificial Sequence
  Description of Artificial Sequence: Synthetic oligonucleotide
  Sense strand starting at position 2711 of SEQ ID NO: 1562170
guucuuuauuauccugaga

SEQ ID NO: 1727336 - RNA, 19 nt, Artificial Sequence
  Description of Artificial Sequence: Synthetic oligonucleotide
  Antisense strand to SEQ ID NO: 1727335
ucucaggauaauaaagaac

SEQ ID NO: 1727337 - RNA, 19 nt, Artificial Sequence
  Description of Artificial Sequence: Synthetic oligonucleotide
  Sense strand starting at position 2859 of SEQ ID NO: 1562170
ucaguuauuuggucccauu

SEQ ID NO: 1727338 - RNA, 19 nt, Artificial Sequence
  Description of Artificial Sequence: Synthetic oligonucleotide
  Antisense strand to SEQ ID NO: 1727337
aaugggaccaaauaacuga

SEQ ID NO: 1727339 - RNA, 19 nt, Artificial Sequence
  Description of Artificial Sequence: Synthetic oligonucleotide
  Sense strand starting at position 3114 of SEQ ID NO: 1562170
guacaagaauaaucuguua

SEQ ID NO: 1727340 - RNA, 19 nt, Artificial Sequence
  Description of Artificial Sequence: Synthetic oligonucleotide
  Antisense strand to SEQ ID NO: 1727339
uaacagauuauucuuguac

SEQ ID NO: 1727341 - RNA, 19 nt, Artificial Sequence
  Description of Artificial Sequence: Synthetic oligonucleotide
  Sense strand starting at position 3418 of SEQ ID NO: 1562170
ugccaagcucuugaaauua

SEQ ID NO: 1727342 - RNA, 19 nt, Artificial Sequence
  Description of Artificial Sequence: Synthetic oligonucleotide
  Antisense strand to SEQ ID NO: 1727341
uaauuucaagagcuuggca

SEQ ID NO: 1727343 - RNA, 19 nt, Artificial Sequence
  Description of Artificial Sequence: Synthetic oligonucleotide
  Sense strand starting at position 3461 of SEQ ID NO: 1562170
guaucacauuuacacagau

SEQ ID NO: 1727344 - RNA, 19 nt, Artificial Sequence
  Description of Artificial Sequence: Synthetic oligonucleotide
  Antisense strand to SEQ ID NO: 1727343
aucuguguaaaugugauac

SEQ ID NO: 1727345 - RNA, 19 nt, Artificial Sequence
  Description of Artificial Sequence: Synthetic oligonucleotide
  Sense strand starting at position 3519 of SEQ ID NO: 1562170
auuucuagucuuuguucua

SEQ ID NO: 1727346 - RNA, 19 nt, Artificial Sequence
  Description of Artificial Sequence: Synthetic oligonucleotide
  Antisense strand to SEQ ID NO: 1727345
uagaacaaagacuagaaau

SEQ ID NO: 1727347 - RNA, 19 nt, Artificial Sequence
  Description of Artificial Sequence: Synthetic oligonucleotide
  Sense strand starting at position 3522 of SEQ ID NO: 1562170
ucuagucuuuguucuaaau

SEQ ID NO: 1727348 - RNA, 19 nt, Artificial Sequence
  Description of Artificial Sequence: Synthetic oligonucleotide
  Antisense strand to SEQ ID NO: 1727347
auuuagaacaaagacuaga

SEQ ID NO: 1727349 - RNA, 19 nt, Artificial Sequence
  Description of Artificial Sequence: Synthetic oligonucleotide
  Sense strand starting at position 3531 of SEQ ID NO: 1562170
uguucuaaaucaucuguga

SEQ ID NO: 1727350 - RNA, 19 nt, Artificial Sequence
  Description of Artificial Sequence: Synthetic oligonucleotide
  Antisense strand to SEQ ID NO: 1727349
ucacagaugauuuagaaca

SEQ ID NO: 1727351 - RNA, 19 nt, Artificial Sequence
  Description of Artificial Sequence: Synthetic oligonucleotide
  Sense strand starting at position 3535 of SEQ ID NO: 1562170
cuaaaucaucugugaggcu

SEQ ID NO: 1727352 - RNA, 19 nt, Artificial Sequence
  Description of Artificial Sequence: Synthetic oligonucleotide
  Antisense strand to SEQ ID NO: 1727351
agccucacagaugauuuag

SEQ ID NO: 1727353 - RNA, 19 nt, Artificial Sequence
  Description of Artificial Sequence: Synthetic oligonucleotide
  Sense strand starting at position 3842 of SEQ ID NO: 1562170
auaaaucaucauugagguu

SEQ ID NO: 1727354 - RNA, 19 nt, Artificial Sequence
  Description of Artificial Sequence: Synthetic oligonucleotide
  Antisense strand to SEQ ID NO: 1727353
aaccucaaugaugauuuau

SEQ ID NO: 1727355 - RNA, 19 nt, Artificial Sequence
  Description of Artificial Sequence: Synthetic oligonucleotide
  Sense strand starting at position 3866 of SEQ ID NO: 1562170
augcuuagugcccacugaa

SEQ ID NO: 1727356 - RNA, 19 nt, Artificial Sequence
  Description of Artificial Sequence: Synthetic oligonucleotide
  Antisense strand to SEQ ID NO: 1727355
uucagugggcacuaagcau

SEQ ID NO: 1727357 - RNA, 19 nt, Artificial Sequence
  Description of Artificial Sequence: Synthetic oligonucleotide
  Sense strand starting at position 3896 of SEQ ID NO: 1562170
gucaucccaguuuaagagu

SEQ ID NO: 1727358 - RNA, 19 nt, Artificial Sequence
  Description of Artificial Sequence: Synthetic oligonucleotide
  Antisense strand to SEQ ID NO: 1727357
acucuuaaacugggaugac

SEQ ID NO: 1727359 - RNA, 19 nt, Artificial Sequence
  Description of Artificial Sequence: Synthetic oligonucleotide
  Sense strand starting at position 3911 of SEQ ID NO: 1562170
gaguaacgugcucaagcaa

SEQ ID NO: 1727360 - RNA, 19 nt, Artificial Sequence
  Description of Artificial Sequence: Synthetic oligonucleotide
  Antisense strand to SEQ ID NO: 1727359
uugcuugagcacguuacuc

SEQ ID NO: 1727361 - RNA, 19 nt, Artificial Sequence
  Description of Artificial Sequence: Synthetic oligonucleotide
  Sense strand starting at position 225 of SEQ ID NO: 1562171
ggcagcauccucuaaagau

SEQ ID NO: 1727362 - RNA, 19 nt, Artificial Sequence
  Description of Artificial Sequence: Synthetic oligonucleotide
  Antisense strand to SEQ ID NO: 1727361
aucuuuagaggaugcugcc

SEQ ID NO: 1727363 - RNA, 19 nt, Artificial Sequence
  Description of Artificial Sequence: Synthetic oligonucleotide
  Sense strand starting at position 237 of SEQ ID NO: 1562171
uaaagaugcuucuguggga

SEQ ID NO: 1727364 - RNA, 19 nt, Artificial Sequence
  Description of Artificial Sequence: Synthetic oligonucleotide
  Antisense strand to SEQ ID NO: 1727363
ucccacagaagcaucuuua

SEQ ID NO: 1727365 - RNA, 19 nt, Artificial Sequence
  Description of Artificial Sequence: Synthetic oligonucleotide
  Sense strand starting at position 519 of SEQ ID NO: 1562171
cgggcuaaguccuggcuaa

SEQ ID NO: 1727366 - RNA, 19 nt, Artificial Sequence
  Description of Artificial Sequence: Synthetic oligonucleotide
  Antisense strand to SEQ ID NO: 1727365
uuagccaggacuuagcccg

SEQ ID NO: 1727367 - RNA, 19 nt, Artificial Sequence
  Description of Artificial Sequence: Synthetic oligonucleotide
  Sense strand starting at position 520 of SEQ ID NO: 1562171
gggcuaaguccuggcuaaa

SEQ ID NO: 1727368 - RNA, 19 nt, Artificial Sequence
  Description of Artificial Sequence: Synthetic oligonucleotide
  Antisense strand to SEQ ID NO: 1727367
uuuagccaggacuuagccc

SEQ ID NO: 1727369 - RNA, 19 nt, Artificial Sequence
  Description of Artificial Sequence: Synthetic oligonucleotide
  Sense strand starting at position 523 of SEQ ID NO: 1562171
cuaaguccuggcuaaagaa

SEQ ID NO: 1727370 - RNA, 19 nt, Artificial Sequence
  Description of Artificial Sequence: Synthetic oligonucleotide
  Antisense strand to SEQ ID NO: 1727369
uucuuuagccaggacuuag

SEQ ID NO: 1727371 - RNA, 19 nt, Artificial Sequence
  Description of Artificial Sequence: Synthetic oligonucleotide
  Sense strand starting at position 557 of SEQ ID NO: 1562171
agagaaaccugguucuugu

SEQ ID NO: 1727372 - RNA, 19 nt, Artificial Sequence
  Description of Artificial Sequence: Synthetic oligonucleotide
  Antisense strand to SEQ ID NO: 1727371
acaagaaccagguuucucu

SEQ ID NO: 1727373 - RNA, 19 nt, Artificial Sequence
  Description of Artificial Sequence: Synthetic oligonucleotide
  Sense strand starting at position 720 of SEQ ID NO: 1562171
aacuguugccggcgacaaa

SEQ ID NO: 1727374 - RNA, 19 nt, Artificial Sequence
  Description of Artificial Sequence: Synthetic oligonucleotide
  Antisense strand to SEQ ID NO: 1727373
uuugucgccggcaacaguu

SEQ ID NO: 1727375 - RNA, 19 nt, Artificial Sequence
  Description of Artificial Sequence: Synthetic oligonucleotide
  Sense strand starting at position 721 of SEQ ID NO: 1562171
acuguugccggcgacaaau

SEQ ID NO: 1727376 - RNA, 19 nt, Artificial Sequence
  Description of Artificial Sequence: Synthetic oligonucleotide
  Antisense strand to SEQ ID NO: 1727375
auuugucgccggcaacagu

SEQ ID NO: 1727377 - RNA, 19 nt, Artificial Sequence
  Description of Artificial Sequence: Synthetic oligonucleotide
  Sense strand starting at position 732 of SEQ ID NO: 1562171
cgacaaaugcuaugggaga

SEQ ID NO: 1727378 - RNA, 19 nt, Artificial Sequence
  Description of Artificial Sequence: Synthetic oligonucleotide
  Antisense strand to SEQ ID NO: 1727377
ucucccauagcauuugucg

SEQ ID NO: 1727379 - RNA, 19 nt, Artificial Sequence
  Description of Artificial Sequence: Synthetic oligonucleotide
  Sense strand starting at position 756 of SEQ ID NO: 1562171
ggugacaaacgcuguaaga

SEQ ID NO: 1727380 - RNA, 19 nt, Artificial Sequence
  Description of Artificial Sequence: Synthetic oligonucleotide
  Antisense strand to SEQ ID NO: 1727379
ucuuacagcguuugucacc

SEQ ID NO: 1727381 - RNA, 19 nt, Artificial Sequence
  Description of Artificial Sequence: Synthetic oligonucleotide
  Sense strand starting at position 758 of SEQ ID NO: 1562171
ugacaaacgcuguaagaga

SEQ ID NO: 1727382 - RNA, 19 nt, Artificial Sequence
  Description of Artificial Sequence: Synthetic oligonucleotide
  Antisense strand to SEQ ID NO: 1727381
ucucuuacagcguuuguca

SEQ ID NO: 1727383 - RNA, 19 nt, Artificial Sequence
  Description of Artificial Sequence: Synthetic oligonucleotide
  Sense strand starting at position 1183 of SEQ ID NO: 1562171
ggucgucuuccggcccuaa

SEQ ID NO: 1727384 - RNA, 19 nt, Artificial Sequence
  Description of Artificial Sequence: Synthetic oligonucleotide
  Antisense strand to SEQ ID NO: 1727383
uuagggccggaagacgacc

SEQ ID NO: 1727385 - RNA, 19 nt, Artificial Sequence
  Description of Artificial Sequence: Synthetic oligonucleotide
  Sense strand starting at position 2218 of SEQ ID NO: 1562171
acaucacaugccugagaac

SEQ ID NO: 1727386 - RNA, 19 nt, Artificial Sequence
  Description of Artificial Sequence: Synthetic oligonucleotide
  Antisense strand to SEQ ID NO: 1727385
guucucaggcaugugaugu

SEQ ID NO: 1727387 - RNA, 19 nt, Artificial Sequence
  Description of Artificial Sequence: Synthetic oligonucleotide
  Sense strand starting at position 2221 of SEQ ID NO: 1562171
ucacaugccugagaacaga

SEQ ID NO: 1727388 - RNA, 19 nt, Artificial Sequence
  Description of Artificial Sequence: Synthetic oligonucleotide
  Antisense strand to SEQ ID NO: 1727387
ucuguucucaggcauguga

SEQ ID NO: 1727389 - RNA, 19 nt, Artificial Sequence
  Description of Artificial Sequence: Synthetic oligonucleotide
  Sense strand starting at position 2268 of SEQ ID NO: 1562171
cauugacauuguuguugga

SEQ ID NO: 1727390 - RNA, 19 nt, Artificial Sequence
  Description of Artificial Sequence: Synthetic oligonucleotide
  Antisense strand to SEQ ID NO: 1727389
uccaacaacaaugucaaug

SEQ ID NO: 1727391 - RNA, 19 nt, Artificial Sequence
  Description of Artificial Sequence: Synthetic oligonucleotide
  Sense strand starting at position 2415 of SEQ ID NO: 1562171
cugggugguuuccuggaga

SEQ ID NO: 1727392 - RNA, 19 nt, Artificial Sequence
  Description of Artificial Sequence: Synthetic oligonucleotide
  Antisense strand to SEQ ID NO: 1727391
ucuccaggaaaccacccag

SEQ ID NO: 1727393 - RNA, 19 nt, Artificial Sequence
  Description of Artificial Sequence: Synthetic oligonucleotide
  Sense strand starting at position 2518 of SEQ ID NO: 1562171
guggaaugggcugagcauu

SEQ ID NO: 1727394 - RNA, 19 nt, Artificial Sequence
  Description of Artificial Sequence: Synthetic oligonucleotide
  Antisense strand to SEQ ID NO: 1727393
aaugcucagcccauuccac

SEQ ID NO: 1727395 - RNA, 19 nt, Artificial Sequence
  Description of Artificial Sequence: Synthetic oligonucleotide
  Sense strand starting at position 2542 of SEQ ID NO: 1562171
ggcugucuguggcacuaau

SEQ ID NO: 1727396 - RNA, 19 nt, Artificial Sequence
  Description of Artificial Sequence: Synthetic oligonucleotide
  Antisense strand to SEQ ID NO: 1727395
auuagugccacagacagcc

SEQ ID NO: 1727397 - RNA, 19 nt, Artificial Sequence
  Description of Artificial Sequence: Synthetic oligonucleotide
  Sense strand starting at position 2613 of SEQ ID NO: 1562171
uuaagagacucaucuuagc

SEQ ID NO: 1727398 - RNA, 19 nt, Artificial Sequence
  Description of Artificial Sequence: Synthetic oligonucleotide
  Antisense strand to SEQ ID NO: 1727397
gcuaagaugagucucuuaa

SEQ ID NO: 1727399 - RNA, 19 nt, Artificial Sequence
  Description of Artificial Sequence: Synthetic oligonucleotide
  Sense strand starting at position 2622 of SEQ ID NO: 1562171
ucaucuuagccgggcaaua

SEQ ID NO: 1727400 - RNA, 19 nt, Artificial Sequence
  Description of Artificial Sequence: Synthetic oligonucleotide
  Antisense strand to SEQ ID NO: 1727399
uauugcccggcuaagauga

SEQ ID NO: 1727401 - RNA, 19 nt, Artificial Sequence
  Description of Artificial Sequence: Synthetic oligonucleotide
  Sense strand starting at position 2624 of SEQ ID NO: 1562171
aucuuagccgggcaauagu

SEQ ID NO: 1727402 - RNA, 19 nt, Artificial Sequence
  Description of Artificial Sequence: Synthetic oligonucleotide
  Antisense strand to SEQ ID NO: 1727401
acuauugcccggcuaagau

SEQ ID NO: 1727403 - RNA, 19 nt, Artificial Sequence
  Description of Artificial Sequence: Synthetic oligonucleotide
  Sense strand starting at position 2938 of SEQ ID NO: 1562171
gacucaucuugguugggca

SEQ ID NO: 1727404 - RNA, 19 nt, Artificial Sequence
  Description of Artificial Sequence: Synthetic oligonucleotide
  Antisense strand to SEQ ID NO: 1727403
ugcccaaccaagaugaguc

SEQ ID NO: 1727405 - RNA, 19 nt, Artificial Sequence
  Description of Artificial Sequence: Synthetic oligonucleotide
  Sense strand starting at position 3833 of SEQ ID NO: 1562171
gagugagacucgucgcaaa

SEQ ID NO: 1727406 - RNA, 19 nt, Artificial Sequence
  Description of Artificial Sequence: Synthetic oligonucleotide
  Antisense strand to SEQ ID NO: 1727405
uuugcgacgagucucacuc

SEQ ID NO: 1727407 - RNA, 19 nt, Artificial Sequence
  Description of Artificial Sequence: Synthetic oligonucleotide
  Sense strand starting at position 3878 of SEQ ID NO: 1562171
agcauagaauuccuuguga

SEQ ID NO: 1727408 - RNA, 19 nt, Artificial Sequence
  Description of Artificial Sequence: Synthetic oligonucleotide
  Antisense strand to SEQ ID NO: 1727407
ucacaaggaauucuaugcu

SEQ ID NO: 1727409 - RNA, 19 nt, Artificial Sequence
  Description of Artificial Sequence: Synthetic oligonucleotide
  Sense strand starting at position 3880 of SEQ ID NO: 1562171
cauagaauuccuugugagg

SEQ ID NO: 1727410 - RNA, 19 nt, Artificial Sequence
  Description of Artificial Sequence: Synthetic oligonucleotide
  Antisense strand to SEQ ID NO: 1727409
ccucacaaggaauucuaug

SEQ ID NO: 1727411 - RNA, 19 nt, Artificial Sequence
  Description of Artificial Sequence: Synthetic oligonucleotide
  Sense strand starting at position 3882 of SEQ ID NO: 1562171
uagaauuccuugugaggag

SEQ ID NO: 1727412 - RNA, 19 nt, Artificial Sequence
  Description of Artificial Sequence: Synthetic oligonucleotide
  Antisense strand to SEQ ID NO: 1727411
cuccucacaaggaauucua

SEQ ID NO: 1727413 - RNA, 19 nt, Artificial Sequence
  Description of Artificial Sequence: Synthetic oligonucleotide
  Sense strand starting at position 3885 of SEQ ID NO: 1562171
aauuccuugugaggagcaa

SEQ ID NO: 1727414 - RNA, 19 nt, Artificial Sequence
  Description of Artificial Sequence: Synthetic oligonucleotide
  Antisense strand to SEQ ID NO: 1727413
uugcuccucacaaggaauu

SEQ ID NO: 1727415 - RNA, 19 nt, Artificial Sequence
  Description of Artificial Sequence: Synthetic oligonucleotide
  Sense strand starting at position 3886 of SEQ ID NO: 1562171
auuccuugugaggagcaaa

SEQ ID NO: 1727416 - RNA, 19 nt, Artificial Sequence
  Description of Artificial Sequence: Synthetic oligonucleotide
  Antisense strand to SEQ ID NO: 1727415
uuugcuccucacaaggaau

SEQ ID NO: 1727417 - RNA, 19 nt, Artificial Sequence
  Description of Artificial Sequence: Synthetic oligonucleotide
  Sense strand starting at position 37 of SEQ ID NO: 1562172
cggcuaauauguuuguauu

SEQ ID NO: 1727418 - RNA, 19 nt, Artificial Sequence
  Description of Artificial Sequence: Synthetic oligonucleotide
  Antisense strand to SEQ ID NO: 1727417
aauacaaacauauuagccg

SEQ ID NO: 1727419 - RNA, 19 nt, Artificial Sequence
  Description of Artificial Sequence: Synthetic oligonucleotide
  Sense strand starting at position 38 of SEQ ID NO: 1562172
ggcuaauauguuuguauuu

SEQ ID NO: 1727420 - RNA, 19 nt, Artificial Sequence
  Description of Artificial Sequence: Synthetic oligonucleotide
  Antisense strand to SEQ ID NO: 1727419
aaauacaaacauauuagcc

SEQ ID NO: 1727421 - RNA, 19 nt, Artificial Sequence
  Description of Artificial Sequence: Synthetic oligonucleotide
  Sense strand starting at position 68 of SEQ ID NO: 1562172
gagguuacaucauauuggu

SEQ ID NO: 1727422 - RNA, 19 nt, Artificial Sequence
  Description of Artificial Sequence: Synthetic oligonucleotide
  Antisense strand to SEQ ID NO: 1727421
accaauaugauguaaccuc

SEQ ID NO: 1727423 - RNA, 19 nt, Artificial Sequence
  Description of Artificial Sequence: Synthetic oligonucleotide
  Sense strand starting at position 74 of SEQ ID NO: 1562172
acaucauauuggugaggcu

SEQ ID NO: 1727424 - RNA, 19 nt, Artificial Sequence
  Description of Artificial Sequence: Synthetic oligonucleotide
  Antisense strand to SEQ ID NO: 1727423
agccucaccaauaugaugu

SEQ ID NO: 1727425 - RNA, 19 nt, Artificial Sequence
  Description of Artificial Sequence: Synthetic oligonucleotide
  Sense strand starting at position 75 of SEQ ID NO: 1562172
caucauauuggugaggcua

SEQ ID NO: 1727426 - RNA, 19 nt, Artificial Sequence
  Description of Artificial Sequence: Synthetic oligonucleotide
  Antisense strand to SEQ ID NO: 1727425
uagccucaccaauaugaug

SEQ ID NO: 1727427 - RNA, 19 nt, Artificial Sequence
  Description of Artificial Sequence: Synthetic oligonucleotide
  Sense strand starting at position 77 of SEQ ID NO: 1562172
ucauauuggugaggcuagu

SEQ ID NO: 1727428 - RNA, 19 nt, Artificial Sequence
  Description of Artificial Sequence: Synthetic oligonucleotide
  Antisense strand to SEQ ID NO: 1727427
acuagccucaccaauauga

SEQ ID NO: 1727429 - RNA, 19 nt, Artificial Sequence
  Description of Artificial Sequence: Synthetic oligonucleotide
  Sense strand starting at position 205 of SEQ ID NO: 1562172
gcagaaaggugucguucgu

SEQ ID NO: 1727430 - RNA, 19 nt, Artificial Sequence
  Description of Artificial Sequence: Synthetic oligonucleotide
  Antisense strand to SEQ ID NO: 1727429
acgaacgacaccuuucugc

SEQ ID NO: 1727431 - RNA, 19 nt, Artificial Sequence
  Description of Artificial Sequence: Synthetic oligonucleotide
  Sense strand starting at position 211 of SEQ ID NO: 1562172
aggugucguucguucaguu

SEQ ID NO: 1727432 - RNA, 19 nt, Artificial Sequence
  Description of Artificial Sequence: Synthetic oligonucleotide
  Antisense strand to SEQ ID NO: 1727431
aacugaacgaacgacaccu

SEQ ID NO: 1727433 - RNA, 19 nt, Artificial Sequence
  Description of Artificial Sequence: Synthetic oligonucleotide
  Sense strand starting at position 212 of SEQ ID NO: 1562172
ggugucguucguucaguua

SEQ ID NO: 1727434 - RNA, 19 nt, Artificial Sequence
  Description of Artificial Sequence: Synthetic oligonucleotide
  Antisense strand to SEQ ID NO: 1727433
uaacugaacgaacgacacc

SEQ ID NO: 1727435 - RNA, 19 nt, Artificial Sequence
  Description of Artificial Sequence: Synthetic oligonucleotide
  Sense strand starting at position 215 of SEQ ID NO: 1562172
gucguucguucaguuauga

SEQ ID NO: 1727436 - RNA, 19 nt, Artificial Sequence
  Description of Artificial Sequence: Synthetic oligonucleotide
  Antisense strand to SEQ ID NO: 1727435
ucauaacugaacgaacgac

SEQ ID NO: 1727437 - RNA, 19 nt, Artificial Sequence
  Description of Artificial Sequence: Synthetic oligonucleotide
  Sense strand starting at position 219 of SEQ ID NO: 1562172
uucguucaguuaugaacga

SEQ ID NO: 1727438 - RNA, 19 nt, Artificial Sequence
  Description of Artificial Sequence: Synthetic oligonucleotide
  Antisense strand to SEQ ID NO: 1727437
ucguucauaacugaacgaa

SEQ ID NO: 1727439 - RNA, 19 nt, Artificial Sequence
  Description of Artificial Sequence: Synthetic oligonucleotide
  Sense strand starting at position 333 of SEQ ID NO: 1562172
gaggcuguucagugaguca

SEQ ID NO: 1727440 - RNA, 19 nt, Artificial Sequence
  Description of Artificial Sequence: Synthetic oligonucleotide
  Antisense strand to SEQ ID NO: 1727439
ugacucacugaacagccuc

SEQ ID NO: 1727441 - RNA, 19 nt, Artificial Sequence
  Description of Artificial Sequence: Synthetic oligonucleotide
  Sense strand starting at position 360 of SEQ ID NO: 1562172
ucagcagauugguaaagaa

SEQ ID NO: 1727442 - RNA, 19 nt, Artificial Sequence
  Description of Artificial Sequence: Synthetic oligonucleotide
  Antisense strand to SEQ ID NO: 1727441
uucuuuaccaaucugcuga

SEQ ID NO: 1727443 - RNA, 19 nt, Artificial Sequence
  Description of Artificial Sequence: Synthetic oligonucleotide
  Sense strand starting at position 416 of SEQ ID NO: 1562172
ugcauaacuguguguuggu

SEQ ID NO: 1727444 - RNA, 19 nt, Artificial Sequence
  Description of Artificial Sequence: Synthetic oligonucleotide
  Antisense strand to SEQ ID NO: 1727443
accaacacacaguuaugca

SEQ ID NO: 1727445 - RNA, 19 nt, Artificial Sequence
  Description of Artificial Sequence: Synthetic oligonucleotide
  Sense strand starting at position 417 of SEQ ID NO: 1562172
gcauaacuguguguuggua

SEQ ID NO: 1727446 - RNA, 19 nt, Artificial Sequence
  Description of Artificial Sequence: Synthetic oligonucleotide
  Antisense strand to SEQ ID NO: 1727445
uaccaacacacaguuaugc

SEQ ID NO: 1727447 - RNA, 19 nt, Artificial Sequence
  Description of Artificial Sequence: Synthetic oligonucleotide
  Sense strand starting at position 419 of SEQ ID NO: 1562172
auaacuguguguugguaga

SEQ ID NO: 1727448 - RNA, 19 nt, Artificial Sequence
  Description of Artificial Sequence: Synthetic oligonucleotide
  Antisense strand to SEQ ID NO: 1727447
ucuaccaacacacaguuau

SEQ ID NO: 1727449 - RNA, 19 nt, Artificial Sequence
  Description of Artificial Sequence: Synthetic oligonucleotide
  Sense strand starting at position 421 of SEQ ID NO: 1562172
aacuguguguugguagaac

SEQ ID NO: 1727450 - RNA, 19 nt, Artificial Sequence
  Description of Artificial Sequence: Synthetic oligonucleotide
  Antisense strand to SEQ ID NO: 1727449
guucuaccaacacacaguu

SEQ ID NO: 1727451 - RNA, 19 nt, Artificial Sequence
  Description of Artificial Sequence: Synthetic oligonucleotide
  Sense strand starting at position 423 of SEQ ID NO: 1562172
cuguguguugguagaacug

SEQ ID NO: 1727452 - RNA, 19 nt, Artificial Sequence
  Description of Artificial Sequence: Synthetic oligonucleotide
  Antisense strand to SEQ ID NO: 1727451
caguucuaccaacacacag

SEQ ID NO: 1727453 - RNA, 19 nt, Artificial Sequence
  Description of Artificial Sequence: Synthetic oligonucleotide
  Sense strand starting at position 432 of SEQ ID NO: 1562172
gguagaacuggcugccuuu

SEQ ID NO: 1727454 - RNA, 19 nt, Artificial Sequence
  Description of Artificial Sequence: Synthetic oligonucleotide
  Antisense strand to SEQ ID NO: 1727453
aaaggcagccaguucuacc

SEQ ID NO: 1727455 - RNA, 19 nt, Artificial Sequence
  Description of Artificial Sequence: Synthetic oligonucleotide
  Sense strand starting at position 466 of SEQ ID NO: 1562172
ccaccuugugcucugugua

SEQ ID NO: 1727456 - RNA, 19 nt, Artificial Sequence
  Description of Artificial Sequence: Synthetic oligonucleotide
  Antisense strand to SEQ ID NO: 1727455
uacacagagcacaaggugg

SEQ ID NO: 1727457 - RNA, 19 nt, Artificial Sequence
  Description of Artificial Sequence: Synthetic oligonucleotide
  Sense strand starting at position 469 of SEQ ID NO: 1562172
ccuugugcucuguguagga

SEQ ID NO: 1727458 - RNA, 19 nt, Artificial Sequence
  Description of Artificial Sequence: Synthetic oligonucleotide
  Antisense strand to SEQ ID NO: 1727457
uccuacacagagcacaagg

SEQ ID NO: 1727459 - RNA, 19 nt, Artificial Sequence
  Description of Artificial Sequence: Synthetic oligonucleotide
  Sense strand starting at position 560 of SEQ ID NO: 1562172
ccuguuuccuccuccauga

SEQ ID NO: 1727460 - RNA, 19 nt, Artificial Sequence
  Description of Artificial Sequence: Synthetic oligonucleotide
  Antisense strand to SEQ ID NO: 1727459
ucauggaggaggaaacagg

SEQ ID NO: 1727461 - RNA, 19 nt, Artificial Sequence
  Description of Artificial Sequence: Synthetic oligonucleotide
  Sense strand starting at position 564 of SEQ ID NO: 1562172
uuuccuccuccaugagaug

SEQ ID NO: 1727462 - RNA, 19 nt, Artificial Sequence
  Description of Artificial Sequence: Synthetic oligonucleotide
  Antisense strand to SEQ ID NO: 1727461
caucucauggaggaggaaa

SEQ ID NO: 1727463 - RNA, 19 nt, Artificial Sequence
  Description of Artificial Sequence: Synthetic oligonucleotide
  Sense strand starting at position 988 of SEQ ID NO: 1562172
gcucuaguccugcguggaa

SEQ ID NO: 1727464 - RNA, 19 nt, Artificial Sequence
  Description of Artificial Sequence: Synthetic oligonucleotide
  Antisense strand to SEQ ID NO: 1727463
uuccacgcaggacuagagc

SEQ ID NO: 1727465 - RNA, 19 nt, Artificial Sequence
  Description of Artificial Sequence: Synthetic oligonucleotide
  Sense strand starting at position 1368 of SEQ ID NO: 1562172
ucuggacuucugggaccuu

SEQ ID NO: 1727466 - RNA, 19 nt, Artificial Sequence
  Description of Artificial Sequence: Synthetic oligonucleotide
  Antisense strand to SEQ ID NO: 1727465
aaggucccagaaguccaga

SEQ ID NO: 1727467 - RNA, 19 nt, Artificial Sequence
  Description of Artificial Sequence: Synthetic oligonucleotide
  Sense strand starting at position 1380 of SEQ ID NO: 1562172
ggaccuugcucagagcauu

SEQ ID NO: 1727468 - RNA, 19 nt, Artificial Sequence
  Description of Artificial Sequence: Synthetic oligonucleotide
  Antisense strand to SEQ ID NO: 1727467
aaugcucugagcaaggucc

SEQ ID NO: 1727469 - RNA, 19 nt, Artificial Sequence
  Description of Artificial Sequence: Synthetic oligonucleotide
  Sense strand starting at position 2147 of SEQ ID NO: 1562172
uaggaauucucugugggca

SEQ ID NO: 1727470 - RNA, 19 nt, Artificial Sequence
  Description of Artificial Sequence: Synthetic oligonucleotide
  Antisense strand to SEQ ID NO: 1727469
ugcccacagagaauuccua

SEQ ID NO: 1727471 - RNA, 19 nt, Artificial Sequence
  Description of Artificial Sequence: Synthetic oligonucleotide
  Sense strand starting at position 2148 of SEQ ID NO: 1562172
aggaauucucugugggcaa

SEQ ID NO: 1727472 - RNA, 19 nt, Artificial Sequence
  Description of Artificial Sequence: Synthetic oligonucleotide
  Antisense strand to SEQ ID NO: 1727471
uugcccacagagaauuccu

SEQ ID NO: 1727473 - RNA, 19 nt, Artificial Sequence
  Description of Artificial Sequence: Synthetic oligonucleotide
  Sense strand starting at position 2149 of SEQ ID NO: 1562172
ggaauucucugugggcaac

SEQ ID NO: 1727474 - RNA, 19 nt, Artificial Sequence
  Description of Artificial Sequence: Synthetic oligonucleotide
  Antisense strand to SEQ ID NO: 1727473
guugcccacagagaauucc

SEQ ID NO: 1727475 - RNA, 19 nt, Artificial Sequence
  Description of Artificial Sequence: Synthetic oligonucleotide
  Sense strand starting at position 2321 of SEQ ID NO: 1562172
uccugaguccaggaaacgu

SEQ ID NO: 1727476 - RNA, 19 nt, Artificial Sequence
  Description of Artificial Sequence: Synthetic oligonucleotide
  Antisense strand to SEQ ID NO: 1727475
acguuuccuggacucagga

SEQ ID NO: 1727477 - RNA, 19 nt, Artificial Sequence
  Description of Artificial Sequence: Synthetic oligonucleotide
  Sense strand starting at position 2329 of SEQ ID NO: 1562172
ccaggaaacgucggaaacu

SEQ ID NO: 1727478 - RNA, 19 nt, Artificial Sequence
  Description of Artificial Sequence: Synthetic oligonucleotide
  Antisense strand to SEQ ID NO: 1727477
aguuuccgacguuuccugg

SEQ ID NO: 1727479 - RNA, 19 nt, Artificial Sequence
  Description of Artificial Sequence: Synthetic oligonucleotide
  Sense strand starting at position 2338 of SEQ ID NO: 1562172
gucggaaacucaggccauu

SEQ ID NO: 1727480 - RNA, 19 nt, Artificial Sequence
  Description of Artificial Sequence: Synthetic oligonucleotide
  Antisense strand to SEQ ID NO: 1727479
aauggccugaguuuccgac

SEQ ID NO: 1727481 - RNA, 19 nt, Artificial Sequence
  Description of Artificial Sequence: Synthetic oligonucleotide
  Sense strand starting at position 3010 of SEQ ID NO: 1562172
ccaggcuugcucuaacaau

SEQ ID NO: 1727482 - RNA, 19 nt, Artificial Sequence
  Description of Artificial Sequence: Synthetic oligonucleotide
  Antisense strand to SEQ ID NO: 1727481
auuguuagagcaagccugg

SEQ ID NO: 1727483 - RNA, 19 nt, Artificial Sequence
  Description of Artificial Sequence: Synthetic oligonucleotide
  Sense strand starting at position 3555 of SEQ ID NO: 1562172
ugcuccucccucugugaaa

SEQ ID NO: 1727484 - RNA, 19 nt, Artificial Sequence
  Description of Artificial Sequence: Synthetic oligonucleotide
  Antisense strand to SEQ ID NO: 1727483
uuucacagagggaggagca

SEQ ID NO: 1727485 - RNA, 19 nt, Artificial Sequence
  Description of Artificial Sequence: Synthetic oligonucleotide
  Sense strand starting at position 3851 of SEQ ID NO: 1562172
caagcaauucgugugccuu

SEQ ID NO: 1727486 - RNA, 19 nt, Artificial Sequence
  Description of Artificial Sequence: Synthetic oligonucleotide
  Antisense strand to SEQ ID NO: 1727485
aaggcacacgaauugcuug

SEQ ID NO: 1727487 - RNA, 19 nt, Artificial Sequence
  Description of Artificial Sequence: Synthetic oligonucleotide
  Sense strand starting at position 3852 of SEQ ID NO: 1562172
aagcaauucgugugccuua

SEQ ID NO: 1727488 - RNA, 19 nt, Artificial Sequence
  Description of Artificial Sequence: Synthetic oligonucleotide
  Antisense strand to SEQ ID NO: 1727487
uaaggcacacgaauugcuu

SEQ ID NO: 1727489 - RNA, 19 nt, Artificial Sequence
  Description of Artificial Sequence: Synthetic oligonucleotide
  Sense strand starting at position 3874 of SEQ ID NO: 1562172
ucccuacuaccugggauua

SEQ ID NO: 1727490 - RNA, 19 nt, Artificial Sequence
  Description of Artificial Sequence: Synthetic oligonucleotide
  Antisense strand to SEQ ID NO: 1727489
uaaucccagguaguaggga

SEQ ID NO: 1727491 - RNA, 19 nt, Artificial Sequence
  Description of Artificial Sequence: Synthetic oligonucleotide
  Sense strand starting at position 3876 of SEQ ID NO: 1562172
ccuacuaccugggauuaca

SEQ ID NO: 1727492 - RNA, 19 nt, Artificial Sequence
  Description of Artificial Sequence: Synthetic oligonucleotide
  Antisense strand to SEQ ID NO: 1727491
uguaaucccagguaguagg

SEQ ID NO: 1727493 - RNA, 19 nt, Artificial Sequence
  Description of Artificial Sequence: Synthetic oligonucleotide
  Sense strand starting at position 60 of SEQ ID NO: 1562173
gcagcuguuggguagcuaa

SEQ ID NO: 1727494 - RNA, 19 nt, Artificial Sequence
  Description of Artificial Sequence: Synthetic oligonucleotide
  Antisense strand to SEQ ID NO: 1727493
uuagcuacccaacagcugc

SEQ ID NO: 1727495 - RNA, 19 nt, Artificial Sequence
  Description of Artificial Sequence: Synthetic oligonucleotide
  Sense strand starting at position 77 of SEQ ID NO: 1562173
aaggguugcuaacuggaau

SEQ ID NO: 1727496 - RNA, 19 nt, Artificial Sequence
  Description of Artificial Sequence: Synthetic oligonucleotide
  Antisense strand to SEQ ID NO: 1727495
auuccaguuagcaacccuu

SEQ ID NO: 1727497 - RNA, 19 nt, Artificial Sequence
  Description of Artificial Sequence: Synthetic oligonucleotide
  Sense strand starting at position 527 of SEQ ID NO: 1562173
uggaauacaaguuguuaga

SEQ ID NO: 1727498 - RNA, 19 nt, Artificial Sequence
  Description of Artificial Sequence: Synthetic oligonucleotide
  Antisense strand to SEQ ID NO: 1727497
ucuaacaacuuguauucca

SEQ ID NO: 1727499 - RNA, 19 nt, Artificial Sequence
  Description of Artificial Sequence: Synthetic oligonucleotide
  Sense strand starting at position 529 of SEQ ID NO: 1562173
gaauacaaguuguuagaca

SEQ ID NO: 1727500 - RNA, 19 nt, Artificial Sequence
  Description of Artificial Sequence: Synthetic oligonucleotide
  Antisense strand to SEQ ID NO: 1727499
ugucuaacaacuuguauuc

SEQ ID NO: 1727501 - RNA, 19 nt, Artificial Sequence
  Description of Artificial Sequence: Synthetic oligonucleotide
  Sense strand starting at position 549 of SEQ ID NO: 1562173
gcuucuuuacuguaggaaa

SEQ ID NO: 1727502 - RNA, 19 nt, Artificial Sequence
  Description of Artificial Sequence: Synthetic oligonucleotide
  Antisense strand to SEQ ID NO: 1727501
uuuccuacaguaaagaagc

SEQ ID NO: 1727503 - RNA, 19 nt, Artificial Sequence
  Description of Artificial Sequence: Synthetic oligonucleotide
  Sense strand starting at position 693 of SEQ ID NO: 1562173
cuuucuugcccaggacaca

SEQ ID NO: 1727504 - RNA, 19 nt, Artificial Sequence
  Description of Artificial Sequence: Synthetic oligonucleotide
  Antisense strand to SEQ ID NO: 1727503
uguguccugggcaagaaag

SEQ ID NO: 1727505 - RNA, 19 nt, Artificial Sequence
  Description of Artificial Sequence: Synthetic oligonucleotide
  Sense strand starting at position 885 of SEQ ID NO: 1562173
uccugcucuuggguuagau

SEQ ID NO: 1727506 - RNA, 19 nt, Artificial Sequence
  Description of Artificial Sequence: Synthetic oligonucleotide
  Antisense strand to SEQ ID NO: 1727505
aucuaacccaagagcagga

SEQ ID NO: 1727507 - RNA, 19 nt, Artificial Sequence
  Description of Artificial Sequence: Synthetic oligonucleotide
  Sense strand starting at position 894 of SEQ ID NO: 1562173
uggguuagaucuuaggaca

SEQ ID NO: 1727508 - RNA, 19 nt, Artificial Sequence
  Description of Artificial Sequence: Synthetic oligonucleotide
  Antisense strand to SEQ ID NO: 1727507
uguccuaagaucuaaccca

SEQ ID NO: 1727509 - RNA, 19 nt, Artificial Sequence
  Description of Artificial Sequence: Synthetic oligonucleotide
  Sense strand starting at position 973 of SEQ ID NO: 1562173
ggcuucccagcugaguaaa

SEQ ID NO: 1727510 - RNA, 19 nt, Artificial Sequence
  Description of Artificial Sequence: Synthetic oligonucleotide
  Antisense strand to SEQ ID NO: 1727509
uuuacucagcugggaagcc

SEQ ID NO: 1727511 - RNA, 19 nt, Artificial Sequence
  Description of Artificial Sequence: Synthetic oligonucleotide
  Sense strand starting at position 1019 of SEQ ID NO: 1562173
cucagauccucaucaggau

SEQ ID NO: 1727512 - RNA, 19 nt, Artificial Sequence
  Description of Artificial Sequence: Synthetic oligonucleotide
  Antisense strand to SEQ ID NO: 1727511
auccugaugaggaucugag

SEQ ID NO: 1727513 - RNA, 19 nt, Artificial Sequence
  Description of Artificial Sequence: Synthetic oligonucleotide
  Sense strand starting at position 1022 of SEQ ID NO: 1562173
agauccucaucaggauaaa

SEQ ID NO: 1727514 - RNA, 19 nt, Artificial Sequence
  Description of Artificial Sequence: Synthetic oligonucleotide
  Antisense strand to SEQ ID NO: 1727513
uuuauccugaugaggaucu

SEQ ID NO: 1727515 - RNA, 19 nt, Artificial Sequence
  Description of Artificial Sequence: Synthetic oligonucleotide
  Sense strand starting at position 1129 of SEQ ID NO: 1562173
aaagaugggucuuuguuac

SEQ ID NO: 1727516 - RNA, 19 nt, Artificial Sequence
  Description of Artificial Sequence: Synthetic oligonucleotide
  Antisense strand to SEQ ID NO: 1727515
guaacaaagacccaucuuu

SEQ ID NO: 1727517 - RNA, 19 nt, Artificial Sequence
  Description of Artificial Sequence: Synthetic oligonucleotide
  Sense strand starting at position 1139 of SEQ ID NO: 1562173
cuuuguuacucaguccuca

SEQ ID NO: 1727518 - RNA, 19 nt, Artificial Sequence
  Description of Artificial Sequence: Synthetic oligonucleotide
  Antisense strand to SEQ ID NO: 1727517
ugaggacugaguaacaaag

SEQ ID NO: 1727519 - RNA, 19 nt, Artificial Sequence
  Description of Artificial Sequence: Synthetic oligonucleotide
  Sense strand starting at position 1281 of SEQ ID NO: 1562173
gcauuaagucagugguucu

SEQ ID NO: 1727520 - RNA, 19 nt, Artificial Sequence
  Description of Artificial Sequence: Synthetic oligonucleotide
  Antisense strand to SEQ ID NO: 1727519
agaaccacugacuuaaugc

SEQ ID NO: 1727521 - RNA, 19 nt, Artificial Sequence
  Description of Artificial Sequence: Synthetic oligonucleotide
  Sense strand starting at position 1701 of SEQ ID NO: 1562173
ccguguucacgcucugagu

SEQ ID NO: 1727522 - RNA, 19 nt, Artificial Sequence
  Description of Artificial Sequence: Synthetic oligonucleotide
  Antisense strand to SEQ ID NO: 1727521
acucagagcgugaacacgg

SEQ ID NO: 1727523 - RNA, 19 nt, Artificial Sequence
  Description of Artificial Sequence: Synthetic oligonucleotide
  Sense strand starting at position 2457 of SEQ ID NO: 1562173
auucuaauccuguaguucu

SEQ ID NO: 1727524 - RNA, 19 nt, Artificial Sequence
  Description of Artificial Sequence: Synthetic oligonucleotide
  Antisense strand to SEQ ID NO: 1727523
agaacuacaggauuagaau

SEQ ID NO: 1727525 - RNA, 19 nt, Artificial Sequence
  Description of Artificial Sequence: Synthetic oligonucleotide
  Sense strand starting at position 2537 of SEQ ID NO: 1562173
cucccauucugauugagca

SEQ ID NO: 1727526 - RNA, 19 nt, Artificial Sequence
  Description of Artificial Sequence: Synthetic oligonucleotide
  Antisense strand to SEQ ID NO: 1727525
ugcucaaucagaaugggag

SEQ ID NO: 1727527 - RNA, 19 nt, Artificial Sequence
  Description of Artificial Sequence: Synthetic oligonucleotide
  Sense strand starting at position 2587 of SEQ ID NO: 1562173
guaacaagccauuggugau

SEQ ID NO: 1727528 - RNA, 19 nt, Artificial Sequence
  Description of Artificial Sequence: Synthetic oligonucleotide
  Antisense strand to SEQ ID NO: 1727527
aucaccaauggcuuguuac

SEQ ID NO: 1727529 - RNA, 19 nt, Artificial Sequence
  Description of Artificial Sequence: Synthetic oligonucleotide
  Sense strand starting at position 2608 of SEQ ID NO: 1562173
uggugguguccguggagaa

SEQ ID NO: 1727530 - RNA, 19 nt, Artificial Sequence
  Description of Artificial Sequence: Synthetic oligonucleotide
  Antisense strand to SEQ ID NO: 1727529
uucuccacggacaccacca

SEQ ID NO: 1727531 - RNA, 19 nt, Artificial Sequence
  Description of Artificial Sequence: Synthetic oligonucleotide
  Sense strand starting at position 2609 of SEQ ID NO: 1562173
ggugguguccguggagaac

SEQ ID NO: 1727532 - RNA, 19 nt, Artificial Sequence
  Description of Artificial Sequence: Synthetic oligonucleotide
  Antisense strand to SEQ ID NO: 1727531
guucuccacggacaccacc

SEQ ID NO: 1727533 - RNA, 19 nt, Artificial Sequence
  Description of Artificial Sequence: Synthetic oligonucleotide
  Sense strand starting at position 2610 of SEQ ID NO: 1562173
gugguguccguggagaaca

SEQ ID NO: 1727534 - RNA, 19 nt, Artificial Sequence
  Description of Artificial Sequence: Synthetic oligonucleotide
  Antisense strand to SEQ ID NO: 1727533
uguucuccacggacaccac

SEQ ID NO: 1727535 - RNA, 19 nt, Artificial Sequence
  Description of Artificial Sequence: Synthetic oligonucleotide
  Sense strand starting at position 2666 of SEQ ID NO: 1562173
gacagugucuugucccuga

SEQ ID NO: 1727536 - RNA, 19 nt, Artificial Sequence
  Description of Artificial Sequence: Synthetic oligonucleotide
  Antisense strand to SEQ ID NO: 1727535
ucagggacaagacacuguc

SEQ ID NO: 1727537 - RNA, 19 nt, Artificial Sequence
  Description of Artificial Sequence: Synthetic oligonucleotide
  Sense strand starting at position 2669 of SEQ ID NO: 1562173
agugucuugucccugaaga

SEQ ID NO: 1727538 - RNA, 19 nt, Artificial Sequence
  Description of Artificial Sequence: Synthetic oligonucleotide
  Antisense strand to SEQ ID NO: 1727537
ucuucagggacaagacacu

SEQ ID NO: 1727539 - RNA, 19 nt, Artificial Sequence
  Description of Artificial Sequence: Synthetic oligonucleotide
  Sense strand starting at position 2670 of SEQ ID NO: 1562173
gugucuugucccugaagac

SEQ ID NO: 1727540 - RNA, 19 nt, Artificial Sequence
  Description of Artificial Sequence: Synthetic oligonucleotide
  Antisense strand to SEQ ID NO: 1727539
gucuucagggacaagacac

SEQ ID NO: 1727541 - RNA, 19 nt, Artificial Sequence
  Description of Artificial Sequence: Synthetic oligonucleotide
  Sense strand starting at position 2671 of SEQ ID NO: 1562173
ugucuugucccugaagaca

SEQ ID NO: 1727542 - RNA, 19 nt, Artificial Sequence
  Description of Artificial Sequence: Synthetic oligonucleotide
  Antisense strand to SEQ ID NO: 1727541
ugucuucagggacaagaca

SEQ ID NO: 1727543 - RNA, 19 nt, Artificial Sequence
  Description of Artificial Sequence: Synthetic oligonucleotide
  Sense strand starting at position 2887 of SEQ ID NO: 1562173
guaccagacucggugcuau

SEQ ID NO: 1727544 - RNA, 19 nt, Artificial Sequence
  Description of Artificial Sequence: Synthetic oligonucleotide
  Antisense strand to SEQ ID NO: 1727543
auagcaccgagucugguac

SEQ ID NO: 1727545 - RNA, 19 nt, Artificial Sequence
  Description of Artificial Sequence: Synthetic oligonucleotide
  Sense strand starting at position 2944 of SEQ ID NO: 1562173
cccugaguuacaggucaga

SEQ ID NO: 1727546 - RNA, 19 nt, Artificial Sequence
  Description of Artificial Sequence: Synthetic oligonucleotide
  Antisense strand to SEQ ID NO: 1727545
ucugaccuguaacucaggg

SEQ ID NO: 1727547 - RNA, 19 nt, Artificial Sequence
  Description of Artificial Sequence: Synthetic oligonucleotide
  Sense strand starting at position 3069 of SEQ ID NO: 1562173
cgggcuaucuuuccucaau

SEQ ID NO: 1727548 - RNA, 19 nt, Artificial Sequence
  Description of Artificial Sequence: Synthetic oligonucleotide
  Antisense strand to SEQ ID NO: 1727547
auugaggaaagauagcccg

SEQ ID NO: 1727549 - RNA, 19 nt, Artificial Sequence
  Description of Artificial Sequence: Synthetic oligonucleotide
  Sense strand starting at position 3070 of SEQ ID NO: 1562173
gggcuaucuuuccucaaug

SEQ ID NO: 1727550 - RNA, 19 nt, Artificial Sequence
  Description of Artificial Sequence: Synthetic oligonucleotide
  Antisense strand to SEQ ID NO: 1727549
cauugaggaaagauagccc

SEQ ID NO: 1727551 - RNA, 19 nt, Artificial Sequence
  Description of Artificial Sequence: Synthetic oligonucleotide
  Sense strand starting at position 3092 of SEQ ID NO: 1562173
gcuugccuucuagaaaccu

SEQ ID NO: 1727552 - RNA, 19 nt, Artificial Sequence
  Description of Artificial Sequence: Synthetic oligonucleotide
  Antisense strand to SEQ ID NO: 1727551
agguuucuagaaggcaagc

SEQ ID NO: 1727553 - RNA, 19 nt, Artificial Sequence
  Description of Artificial Sequence: Synthetic oligonucleotide
  Sense strand starting at position 3139 of SEQ ID NO: 1562173
cagagaauugcugagccaa

SEQ ID NO: 1727554 - RNA, 19 nt, Artificial Sequence
  Description of Artificial Sequence: Synthetic oligonucleotide
  Antisense strand to SEQ ID NO: 1727553
uuggcucagcaauucucug

SEQ ID NO: 1727555 - RNA, 19 nt, Artificial Sequence
  Description of Artificial Sequence: Synthetic oligonucleotide
  Sense strand starting at position 3141 of SEQ ID NO: 1562173
gagaauugcugagccaaag

SEQ ID NO: 1727556 - RNA, 19 nt, Artificial Sequence
  Description of Artificial Sequence: Synthetic oligonucleotide
  Antisense strand to SEQ ID NO: 1727555
cuuuggcucagcaauucuc

SEQ ID NO: 1727557 - RNA, 19 nt, Artificial Sequence
  Description of Artificial Sequence: Synthetic oligonucleotide
  Sense strand starting at position 3387 of SEQ ID NO: 1562173
ccugauccaggccagaauu

SEQ ID NO: 1727558 - RNA, 19 nt, Artificial Sequence
  Description of Artificial Sequence: Synthetic oligonucleotide
  Antisense strand to SEQ ID NO: 1727557
aauucuggccuggaucagg

SEQ ID NO: 1727559 - RNA, 19 nt, Artificial Sequence
  Description of Artificial Sequence: Synthetic oligonucleotide
  Sense strand starting at position 3477 of SEQ ID NO: 1562173
gggagagucuguucccaca

SEQ ID NO: 1727560 - RNA, 19 nt, Artificial Sequence
  Description of Artificial Sequence: Synthetic oligonucleotide
  Antisense strand to SEQ ID NO: 1727559
ugugggaacagacucuccc

SEQ ID NO: 1727561 - RNA, 19 nt, Artificial Sequence
  Description of Artificial Sequence: Synthetic oligonucleotide
  Sense strand starting at position 3629 of SEQ ID NO: 1562173
uccugagccgaugaauuau

SEQ ID NO: 1727562 - RNA, 19 nt, Artificial Sequence
  Description of Artificial Sequence: Synthetic oligonucleotide
  Antisense strand to SEQ ID NO: 1727561
auaauucaucggcucagga

SEQ ID NO: 1727563 - RNA, 19 nt, Artificial Sequence
  Description of Artificial Sequence: Synthetic oligonucleotide
  Sense strand starting at position 3640 of SEQ ID NO: 1562173
ugaauuauuaccgggagau

SEQ ID NO: 1727564 - RNA, 19 nt, Artificial Sequence
  Description of Artificial Sequence: Synthetic oligonucleotide
  Antisense strand to SEQ ID NO: 1727563
aucucccgguaauaauuca

SEQ ID NO: 1727565 - RNA, 19 nt, Artificial Sequence
  Description of Artificial Sequence: Synthetic oligonucleotide
  Sense strand starting at position 3641 of SEQ ID NO: 1562173
gaauuauuaccgggagauu

SEQ ID NO: 1727566 - RNA, 19 nt, Artificial Sequence
  Description of Artificial Sequence: Synthetic oligonucleotide
  Antisense strand to SEQ ID NO: 1727565
aaucucccgguaauaauuc

SEQ ID NO: 1727567 - RNA, 19 nt, Artificial Sequence
  Description of Artificial Sequence: Synthetic oligonucleotide
  Sense strand starting at position 3760 of SEQ ID NO: 1562173
uugaaauuccucuguccag

SEQ ID NO: 1727568 - RNA, 19 nt, Artificial Sequence
  Description of Artificial Sequence: Synthetic oligonucleotide
  Antisense strand to SEQ ID NO: 1727567
cuggacagaggaauuucaa

SEQ ID NO: 1727569 - RNA, 19 nt, Artificial Sequence
  Description of Artificial Sequence: Synthetic oligonucleotide
  Sense strand starting at position 3872 of SEQ ID NO: 1562173
uuuauuugcuccuuaggca

SEQ ID NO: 1727570 - RNA, 19 nt, Artificial Sequence
  Description of Artificial Sequence: Synthetic oligonucleotide
  Antisense strand to SEQ ID NO: 1727569
ugccuaaggagcaaauaaa

SEQ ID NO: 1727571 - RNA, 19 nt, Artificial Sequence
  Description of Artificial Sequence: Synthetic oligonucleotide
  Sense strand starting at position 3968 of SEQ ID NO: 1562173
gaaggcgagcuguaaacaa

SEQ ID NO: 1727572 - RNA, 19 nt, Artificial Sequence
  Description of Artificial Sequence: Synthetic oligonucleotide
  Antisense strand to SEQ ID NO: 1727571
uuguuuacagcucgccuuc

SEQ ID NO: 1727573 - RNA, 19 nt, Artificial Sequence
  Description of Artificial Sequence: Synthetic oligonucleotide
  Sense strand starting at position 251 of SEQ ID NO: 1562174
gguuauuaagcucacugaa

SEQ ID NO: 1727574 - RNA, 19 nt, Artificial Sequence
  Description of Artificial Sequence: Synthetic oligonucleotide
  Antisense strand to SEQ ID NO: 1727573
uucagugagcuuaauaacc

SEQ ID NO: 1727575 - RNA, 19 nt, Artificial Sequence
  Description of Artificial Sequence: Synthetic oligonucleotide
  Sense strand starting at position 357 of SEQ ID NO: 1562174
ccuaccugugucugugaaa

SEQ ID NO: 1727576 - RNA, 19 nt, Artificial Sequence
  Description of Artificial Sequence: Synthetic oligonucleotide
  Antisense strand to SEQ ID NO: 1727575
uuucacagacacagguagg

SEQ ID NO: 1727577 - RNA, 19 nt, Artificial Sequence
  Description of Artificial Sequence: Synthetic oligonucleotide
  Sense strand starting at position 358 of SEQ ID NO: 1562174
cuaccugugucugugaaag

SEQ ID NO: 1727578 - RNA, 19 nt, Artificial Sequence
  Description of Artificial Sequence: Synthetic oligonucleotide
  Antisense strand to SEQ ID NO: 1727577
cuuucacagacacagguag

SEQ ID NO: 1727579 - RNA, 19 nt, Artificial Sequence
  Description of Artificial Sequence: Synthetic oligonucleotide
  Sense strand starting at position 360 of SEQ ID NO: 1562174
accugugucugugaaagau

SEQ ID NO: 1727580 - RNA, 19 nt, Artificial Sequence
  Description of Artificial Sequence: Synthetic oligonucleotide
  Antisense strand to SEQ ID NO: 1727579
aucuuucacagacacaggu

SEQ ID NO: 1727581 - RNA, 19 nt, Artificial Sequence
  Description of Artificial Sequence: Synthetic oligonucleotide
  Sense strand starting at position 364 of SEQ ID NO: 1562174
gugucugugaaagauuaga

SEQ ID NO: 1727582 - RNA, 19 nt, Artificial Sequence
  Description of Artificial Sequence: Synthetic oligonucleotide
  Antisense strand to SEQ ID NO: 1727581
ucuaaucuuucacagacac

SEQ ID NO: 1727583 - RNA, 19 nt, Artificial Sequence
  Description of Artificial Sequence: Synthetic oligonucleotide
  Sense strand starting at position 395 of SEQ ID NO: 1562174
agagcaagcauuuguagua

SEQ ID NO: 1727584 - RNA, 19 nt, Artificial Sequence
  Description of Artificial Sequence: Synthetic oligonucleotide
  Antisense strand to SEQ ID NO: 1727583
uacuacaaaugcuugcucu

SEQ ID NO: 1727585 - RNA, 19 nt, Artificial Sequence
  Description of Artificial Sequence: Synthetic oligonucleotide
  Sense strand starting at position 396 of SEQ ID NO: 1562174
gagcaagcauuuguaguaa

SEQ ID NO: 1727586 - RNA, 19 nt, Artificial Sequence
  Description of Artificial Sequence: Synthetic oligonucleotide
  Antisense strand to SEQ ID NO: 1727585
uuacuacaaaugcuugcuc

SEQ ID NO: 1727587 - RNA, 19 nt, Artificial Sequence
  Description of Artificial Sequence: Synthetic oligonucleotide
  Sense strand starting at position 400 of SEQ ID NO: 1562174
aagcauuuguaguaaacag

SEQ ID NO: 1727588 - RNA, 19 nt, Artificial Sequence
  Description of Artificial Sequence: Synthetic oligonucleotide
  Antisense strand to SEQ ID NO: 1727587
cuguuuacuacaaaugcuu

SEQ ID NO: 1727589 - RNA, 19 nt, Artificial Sequence
  Description of Artificial Sequence: Synthetic oligonucleotide
  Sense strand starting at position 407 of SEQ ID NO: 1562174
uguaguaaacaguggguau

SEQ ID NO: 1727590 - RNA, 19 nt, Artificial Sequence
  Description of Artificial Sequence: Synthetic oligonucleotide
  Antisense strand to SEQ ID NO: 1727589
auacccacuguuuacuaca

SEQ ID NO: 1727591 - RNA, 19 nt, Artificial Sequence
  Description of Artificial Sequence: Synthetic oligonucleotide
  Sense strand starting at position 411 of SEQ ID NO: 1562174
guaaacaguggguauguaa

SEQ ID NO: 1727592 - RNA, 19 nt, Artificial Sequence
  Description of Artificial Sequence: Synthetic oligonucleotide
  Antisense strand to SEQ ID NO: 1727591
uuacauacccacuguuuac

SEQ ID NO: 1727593 - RNA, 19 nt, Artificial Sequence
  Description of Artificial Sequence: Synthetic oligonucleotide
  Sense strand starting at position 414 of SEQ ID NO: 1562174
aacaguggguauguaaauu

SEQ ID NO: 1727594 - RNA, 19 nt, Artificial Sequence
  Description of Artificial Sequence: Synthetic oligonucleotide
  Antisense strand to SEQ ID NO: 1727593
aauuuacauacccacuguu

SEQ ID NO: 1727595 - RNA, 19 nt, Artificial Sequence
  Description of Artificial Sequence: Synthetic oligonucleotide
  Sense strand starting at position 441 of SEQ ID NO: 1562174
guaguuguagccgcaguuu

SEQ ID NO: 1727596 - RNA, 19 nt, Artificial Sequence
  Description of Artificial Sequence: Synthetic oligonucleotide
  Antisense strand to SEQ ID NO: 1727595
aaacugcggcuacaacuac

SEQ ID NO: 1727597 - RNA, 19 nt, Artificial Sequence
  Description of Artificial Sequence: Synthetic oligonucleotide
  Sense strand starting at position 513 of SEQ ID NO: 1562174
aguucagauggaugucgaa

SEQ ID NO: 1727598 - RNA, 19 nt, Artificial Sequence
  Description of Artificial Sequence: Synthetic oligonucleotide
  Antisense strand to SEQ ID NO: 1727597
uucgacauccaucugaacu

SEQ ID NO: 1727599 - RNA, 19 nt, Artificial Sequence
  Description of Artificial Sequence: Synthetic oligonucleotide
  Sense strand starting at position 516 of SEQ ID NO: 1562174
ucagauggaugucgaauga

SEQ ID NO: 1727600 - RNA, 19 nt, Artificial Sequence
  Description of Artificial Sequence: Synthetic oligonucleotide
  Antisense strand to SEQ ID NO: 1727599
ucauucgacauccaucuga

SEQ ID NO: 1727601 - RNA, 19 nt, Artificial Sequence
  Description of Artificial Sequence: Synthetic oligonucleotide
  Sense strand starting at position 520 of SEQ ID NO: 1562174
auggaugucgaaugagagu

SEQ ID NO: 1727602 - RNA, 19 nt, Artificial Sequence
  Description of Artificial Sequence: Synthetic oligonucleotide
  Antisense strand to SEQ ID NO: 1727601
acucucauucgacauccau

SEQ ID NO: 1727603 - RNA, 19 nt, Artificial Sequence
  Description of Artificial Sequence: Synthetic oligonucleotide
  Sense strand starting at position 566 of SEQ ID NO: 1562174
ccagaagugucagcaauac

SEQ ID NO: 1727604 - RNA, 19 nt, Artificial Sequence
  Description of Artificial Sequence: Synthetic oligonucleotide
  Antisense strand to SEQ ID NO: 1727603
guauugcugacacuucugg

SEQ ID NO: 1727605 - RNA, 19 nt, Artificial Sequence
  Description of Artificial Sequence: Synthetic oligonucleotide
  Sense strand starting at position 577 of SEQ ID NO: 1562174
agcaauacguggcagacaa

SEQ ID NO: 1727606 - RNA, 19 nt, Artificial Sequence
  Description of Artificial Sequence: Synthetic oligonucleotide
  Antisense strand to SEQ ID NO: 1727605
uugucugccacguauugcu

SEQ ID NO: 1727607 - RNA, 19 nt, Artificial Sequence
  Description of Artificial Sequence: Synthetic oligonucleotide
  Sense strand starting at position 949 of SEQ ID NO: 1562174
aggcuucccugacauccaa

SEQ ID NO: 1727608 - RNA, 19 nt, Artificial Sequence
  Description of Artificial Sequence: Synthetic oligonucleotide
  Antisense strand to SEQ ID NO: 1727607
uuggaugucagggaagccu

SEQ ID NO: 1727609 - RNA, 19 nt, Artificial Sequence
  Description of Artificial Sequence: Synthetic oligonucleotide
  Sense strand starting at position 982 of SEQ ID NO: 1562174
gcacaugguucccaggaau

SEQ ID NO: 1727610 - RNA, 19 nt, Artificial Sequence
  Description of Artificial Sequence: Synthetic oligonucleotide
  Antisense strand to SEQ ID NO: 1727609
auuccugggaaccaugugc

SEQ ID NO: 1727611 - RNA, 19 nt, Artificial Sequence
  Description of Artificial Sequence: Synthetic oligonucleotide
  Sense strand starting at position 985 of SEQ ID NO: 1562174
caugguucccaggaauucu

SEQ ID NO: 1727612 - RNA, 19 nt, Artificial Sequence
  Description of Artificial Sequence: Synthetic oligonucleotide
  Antisense strand to SEQ ID NO: 1727611
agaauuccugggaaccaug

SEQ ID NO: 1727613 - RNA, 19 nt, Artificial Sequence
  Description of Artificial Sequence: Synthetic oligonucleotide
  Sense strand starting at position 1045 of SEQ ID NO: 1562174
gguguuuaguuucuggaag

SEQ ID NO: 1727614 - RNA, 19 nt, Artificial Sequence
  Description of Artificial Sequence: Synthetic oligonucleotide
  Antisense strand to SEQ ID NO: 1727613
cuuccagaaacuaaacacc

SEQ ID NO: 1727615 - RNA, 19 nt, Artificial Sequence
  Description of Artificial Sequence: Synthetic oligonucleotide
  Sense strand starting at position 2343 of SEQ ID NO: 1562174
uggaaucagcgugauaccu

SEQ ID NO: 1727616 - RNA, 19 nt, Artificial Sequence
  Description of Artificial Sequence: Synthetic oligonucleotide
  Antisense strand to SEQ ID NO: 1727615
agguaucacgcugauucca

SEQ ID NO: 1727617 - RNA, 19 nt, Artificial Sequence
  Description of Artificial Sequence: Synthetic oligonucleotide
  Sense strand starting at position 2426 of SEQ ID NO: 1562174
gaaugaagacguugucaaa

SEQ ID NO: 1727618 - RNA, 19 nt, Artificial Sequence
  Description of Artificial Sequence: Synthetic oligonucleotide
  Antisense strand to SEQ ID NO: 1727617
uuugacaacgucuucauuc

SEQ ID NO: 1727619 - RNA, 19 nt, Artificial Sequence
  Description of Artificial Sequence: Synthetic oligonucleotide
  Sense strand starting at position 2483 of SEQ ID NO: 1562174
uccgcuucauccgcguaaa

SEQ ID NO: 1727620 - RNA, 19 nt, Artificial Sequence
  Description of Artificial Sequence: Synthetic oligonucleotide
  Antisense strand to SEQ ID NO: 1727619
uuuacgcggaugaagcgga

SEQ ID NO: 1727621 - RNA, 19 nt, Artificial Sequence
  Description of Artificial Sequence: Synthetic oligonucleotide
  Sense strand starting at position 2958 of SEQ ID NO: 1562174
ggccuucccuguuaaggga

SEQ ID NO: 1727622 - RNA, 19 nt, Artificial Sequence
  Description of Artificial Sequence: Synthetic oligonucleotide
  Antisense strand to SEQ ID NO: 1727621
ucccuuaacagggaaggcc

SEQ ID NO: 1727623 - RNA, 19 nt, Artificial Sequence
  Description of Artificial Sequence: Synthetic oligonucleotide
  Sense strand starting at position 2981 of SEQ ID NO: 1562174
ugcaauauguggucuuuaa

SEQ ID NO: 1727624 - RNA, 19 nt, Artificial Sequence
  Description of Artificial Sequence: Synthetic oligonucleotide
  Antisense strand to SEQ ID NO: 1727623
uuaaagaccacauauugca

SEQ ID NO: 1727625 - RNA, 19 nt, Artificial Sequence
  Description of Artificial Sequence: Synthetic oligonucleotide
  Sense strand starting at position 2988 of SEQ ID NO: 1562174
uguggucuuuaagagacuu

SEQ ID NO: 1727626 - RNA, 19 nt, Artificial Sequence
  Description of Artificial Sequence: Synthetic oligonucleotide
  Antisense strand to SEQ ID NO: 1727625
aagucucuuaaagaccaca

SEQ ID NO: 1727627 - RNA, 19 nt, Artificial Sequence
  Description of Artificial Sequence: Synthetic oligonucleotide
  Sense strand starting at position 3072 of SEQ ID NO: 1562174
guugucuguucucugucua

SEQ ID NO: 1727628 - RNA, 19 nt, Artificial Sequence
  Description of Artificial Sequence: Synthetic oligonucleotide
  Antisense strand to SEQ ID NO: 1727627
uagacagagaacagacaac

SEQ ID NO: 1727629 - RNA, 19 nt, Artificial Sequence
  Description of Artificial Sequence: Synthetic oligonucleotide
  Sense strand starting at position 3079 of SEQ ID NO: 1562174
guucucugucuaggcauua

SEQ ID NO: 1727630 - RNA, 19 nt, Artificial Sequence
  Description of Artificial Sequence: Synthetic oligonucleotide
  Antisense strand to SEQ ID NO: 1727629
uaaugccuagacagagaac

SEQ ID NO: 1727631 - RNA, 19 nt, Artificial Sequence
  Description of Artificial Sequence: Synthetic oligonucleotide
  Sense strand starting at position 3084 of SEQ ID NO: 1562174
cugucuaggcauuaggaca

SEQ ID NO: 1727632 - RNA, 19 nt, Artificial Sequence
  Description of Artificial Sequence: Synthetic oligonucleotide
  Antisense strand to SEQ ID NO: 1727631
uguccuaaugccuagacag

SEQ ID NO: 1727633 - RNA, 19 nt, Artificial Sequence
  Description of Artificial Sequence: Synthetic oligonucleotide
  Sense strand starting at position 3101 of SEQ ID NO: 1562174
cacuuaaaggccugugacu

SEQ ID NO: 1727634 - RNA, 19 nt, Artificial Sequence
  Description of Artificial Sequence: Synthetic oligonucleotide
  Antisense strand to SEQ ID NO: 1727633
agucacaggccuuuaagug

SEQ ID NO: 1727635 - RNA, 19 nt, Artificial Sequence
  Description of Artificial Sequence: Synthetic oligonucleotide
  Sense strand starting at position 3108 of SEQ ID NO: 1562174
aggccugugacuugcacau

SEQ ID NO: 1727636 - RNA, 19 nt, Artificial Sequence
  Description of Artificial Sequence: Synthetic oligonucleotide
  Antisense strand to SEQ ID NO: 1727635
augugcaagucacaggccu

SEQ ID NO: 1727637 - RNA, 19 nt, Artificial Sequence
  Description of Artificial Sequence: Synthetic oligonucleotide
  Sense strand starting at position 3143 of SEQ ID NO: 1562174
ucugaaucuuucgcucauu

SEQ ID NO: 1727638 - RNA, 19 nt, Artificial Sequence
  Description of Artificial Sequence: Synthetic oligonucleotide
  Antisense strand to SEQ ID NO: 1727637
aaugagcgaaagauucaga

SEQ ID NO: 1727639 - RNA, 19 nt, Artificial Sequence
  Description of Artificial Sequence: Synthetic oligonucleotide
  Sense strand starting at position 3144 of SEQ ID NO: 1562174
cugaaucuuucgcucauuu

SEQ ID NO: 1727640 - RNA, 19 nt, Artificial Sequence
  Description of Artificial Sequence: Synthetic oligonucleotide
  Antisense strand to SEQ ID NO: 1727639
aaaugagcgaaagauucag

SEQ ID NO: 1727641 - RNA, 19 nt, Artificial Sequence
  Description of Artificial Sequence: Synthetic oligonucleotide
  Sense strand starting at position 3347 of SEQ ID NO: 1562174
ggcaacagaagucgucuaa

SEQ ID NO: 1727642 - RNA, 19 nt, Artificial Sequence
  Description of Artificial Sequence: Synthetic oligonucleotide
  Antisense strand to SEQ ID NO: 1727641
uuagacgacuucuguugcc

SEQ ID NO: 1727643 - RNA, 19 nt, Artificial Sequence
  Description of Artificial Sequence: Synthetic oligonucleotide
  Sense strand starting at position 3351 of SEQ ID NO: 1562174
acagaagucgucuaacgua

SEQ ID NO: 1727644 - RNA, 19 nt, Artificial Sequence
  Description of Artificial Sequence: Synthetic oligonucleotide
  Antisense strand to SEQ ID NO: 1727643
uacguuagacgacuucugu

SEQ ID NO: 1727645 - RNA, 19 nt, Artificial Sequence
  Description of Artificial Sequence: Synthetic oligonucleotide
  Sense strand starting at position 3423 of SEQ ID NO: 1562174
cgcuucaagcagugugauu

SEQ ID NO: 1727646 - RNA, 19 nt, Artificial Sequence
  Description of Artificial Sequence: Synthetic oligonucleotide
  Antisense strand to SEQ ID NO: 1727645
aaucacacugcuugaagcg

SEQ ID NO: 1727647 - RNA, 19 nt, Artificial Sequence
  Description of Artificial Sequence: Synthetic oligonucleotide
  Sense strand starting at position 3430 of SEQ ID NO: 1562174
agcagugugauuugaaguc

SEQ ID NO: 1727648 - RNA, 19 nt, Artificial Sequence
  Description of Artificial Sequence: Synthetic oligonucleotide
  Antisense strand to SEQ ID NO: 1727647
gacuucaaaucacacugcu

SEQ ID NO: 1727649 - RNA, 19 nt, Artificial Sequence
  Description of Artificial Sequence: Synthetic oligonucleotide
  Sense strand starting at position 3488 of SEQ ID NO: 1562174
aguaaugauugccagguga

SEQ ID NO: 1727650 - RNA, 19 nt, Artificial Sequence
  Description of Artificial Sequence: Synthetic oligonucleotide
  Antisense strand to SEQ ID NO: 1727649
ucaccuggcaaucauuacu

SEQ ID NO: 1727651 - RNA, 19 nt, Artificial Sequence
  Description of Artificial Sequence: Synthetic oligonucleotide
  Sense strand starting at position 3712 of SEQ ID NO: 1562174
ggagguuucagugaguaga

SEQ ID NO: 1727652 - RNA, 19 nt, Artificial Sequence
  Description of Artificial Sequence: Synthetic oligonucleotide
  Antisense strand to SEQ ID NO: 1727651
ucuacucacugaaaccucc

SEQ ID NO: 1727653 - RNA, 19 nt, Artificial Sequence
  Description of Artificial Sequence: Synthetic oligonucleotide
  Sense strand starting at position 91 of SEQ ID NO: 1562175
uggcgauccuggagggaaa

SEQ ID NO: 1727654 - RNA, 19 nt, Artificial Sequence
  Description of Artificial Sequence: Synthetic oligonucleotide
  Antisense strand to SEQ ID NO: 1727653
uuucccuccaggaucgcca

SEQ ID NO: 1727655 - RNA, 19 nt, Artificial Sequence
  Description of Artificial Sequence: Synthetic oligonucleotide
  Sense strand starting at position 259 of SEQ ID NO: 1562175
cgaggauuucguuguaagc

SEQ ID NO: 1727656 - RNA, 19 nt, Artificial Sequence
  Description of Artificial Sequence: Synthetic oligonucleotide
  Antisense strand to SEQ ID NO: 1727655
gcuuacaacgaaauccucg

SEQ ID NO: 1727657 - RNA, 19 nt, Artificial Sequence
  Description of Artificial Sequence: Synthetic oligonucleotide
  Sense strand starting at position 261 of SEQ ID NO: 1562175
aggauuucguuguaagcaa

SEQ ID NO: 1727658 - RNA, 19 nt, Artificial Sequence
  Description of Artificial Sequence: Synthetic oligonucleotide
  Antisense strand to SEQ ID NO: 1727657
uugcuuacaacgaaauccu

SEQ ID NO: 1727659 - RNA, 19 nt, Artificial Sequence
  Description of Artificial Sequence: Synthetic oligonucleotide
  Sense strand starting at position 293 of SEQ ID NO: 1562175
ggaggagagucuggugaaa

SEQ ID NO: 1727660 - RNA, 19 nt, Artificial Sequence
  Description of Artificial Sequence: Synthetic oligonucleotide
  Antisense strand to SEQ ID NO: 1727659
uuucaccagacucuccucc

SEQ ID NO: 1727661 - RNA, 19 nt, Artificial Sequence
  Description of Artificial Sequence: Synthetic oligonucleotide
  Sense strand starting at position 295 of SEQ ID NO: 1562175
aggagagucuggugaaaga

SEQ ID NO: 1727662 - RNA, 19 nt, Artificial Sequence
  Description of Artificial Sequence: Synthetic oligonucleotide
  Antisense strand to SEQ ID NO: 1727661
ucuuucaccagacucuccu

SEQ ID NO: 1727663 - RNA, 19 nt, Artificial Sequence
  Description of Artificial Sequence: Synthetic oligonucleotide
  Sense strand starting at position 872 of SEQ ID NO: 1562175
cgacucaguuucuaaagga

SEQ ID NO: 1727664 - RNA, 19 nt, Artificial Sequence
  Description of Artificial Sequence: Synthetic oligonucleotide
  Antisense strand to SEQ ID NO: 1727663
uccuuuagaaacugagucg

SEQ ID NO: 1727665 - RNA, 19 nt, Artificial Sequence
  Description of Artificial Sequence: Synthetic oligonucleotide
  Sense strand starting at position 1165 of SEQ ID NO: 1562175
gagcacucgcgagcucuua

SEQ ID NO: 1727666 - RNA, 19 nt, Artificial Sequence
  Description of Artificial Sequence: Synthetic oligonucleotide
  Antisense strand to SEQ ID NO: 1727665
uaagagcucgcgagugcuc

SEQ ID NO: 1727667 - RNA, 19 nt, Artificial Sequence
  Description of Artificial Sequence: Synthetic oligonucleotide
  Sense strand starting at position 1243 of SEQ ID NO: 1562175
agccaaacuucgguuguuu

SEQ ID NO: 1727668 - RNA, 19 nt, Artificial Sequence
  Description of Artificial Sequence: Synthetic oligonucleotide
  Antisense strand to SEQ ID NO: 1727667
aaacaaccgaaguuuggcu

SEQ ID NO: 1727669 - RNA, 19 nt, Artificial Sequence
  Description of Artificial Sequence: Synthetic oligonucleotide
  Sense strand starting at position 1361 of SEQ ID NO: 1562175
gacagagacuucgugcgua

SEQ ID NO: 1727670 - RNA, 19 nt, Artificial Sequence
  Description of Artificial Sequence: Synthetic oligonucleotide
  Antisense strand to SEQ ID NO: 1727669
uacgcacgaagucucuguc

SEQ ID NO: 1727671 - RNA, 19 nt, Artificial Sequence
  Description of Artificial Sequence: Synthetic oligonucleotide
  Sense strand starting at position 1435 of SEQ ID NO: 1562175
ggcuguuugccgcuuagga

SEQ ID NO: 1727672 - RNA, 19 nt, Artificial Sequence
  Description of Artificial Sequence: Synthetic oligonucleotide
  Antisense strand to SEQ ID NO: 1727671
uccuaagcggcaaacagcc

SEQ ID NO: 1727673 - RNA, 19 nt, Artificial Sequence
  Description of Artificial Sequence: Synthetic oligonucleotide
  Sense strand starting at position 1436 of SEQ ID NO: 1562175
gcuguuugccgcuuaggaa

SEQ ID NO: 1727674 - RNA, 19 nt, Artificial Sequence
  Description of Artificial Sequence: Synthetic oligonucleotide
  Antisense strand to SEQ ID NO: 1727673
uuccuaagcggcaaacagc

SEQ ID NO: 1727675 - RNA, 19 nt, Artificial Sequence
  Description of Artificial Sequence: Synthetic oligonucleotide
  Sense strand starting at position 1437 of SEQ ID NO: 1562175
cuguuugccgcuuaggaaa

SEQ ID NO: 1727676 - RNA, 19 nt, Artificial Sequence
  Description of Artificial Sequence: Synthetic oligonucleotide
  Antisense strand to SEQ ID NO: 1727675
uuuccuaagcggcaaacag

SEQ ID NO: 1727677 - RNA, 19 nt, Artificial Sequence
  Description of Artificial Sequence: Synthetic oligonucleotide
  Sense strand starting at position 1472 of SEQ ID NO: 1562175
gugggugggauuugccauu

SEQ ID NO: 1727678 - RNA, 19 nt, Artificial Sequence
  Description of Artificial Sequence: Synthetic oligonucleotide
  Antisense strand to SEQ ID NO: 1727677
aauggcaaaucccacccac

SEQ ID NO: 1727679 - RNA, 19 nt, Artificial Sequence
  Description of Artificial Sequence: Synthetic oligonucleotide
  Sense strand starting at position 2019 of SEQ ID NO: 1562175
gcgccuuaaugagaaggaa

SEQ ID NO: 1727680 - RNA, 19 nt, Artificial Sequence
  Description of Artificial Sequence: Synthetic oligonucleotide
  Antisense strand to SEQ ID NO: 1727679
uuccuucucauuaaggcgc

SEQ ID NO: 1727681 - RNA, 19 nt, Artificial Sequence
  Description of Artificial Sequence: Synthetic oligonucleotide
  Sense strand starting at position 2186 of SEQ ID NO: 1562175
gggcggugccucguugaca

SEQ ID NO: 1727682 - RNA, 19 nt, Artificial Sequence
  Description of Artificial Sequence: Synthetic oligonucleotide
  Antisense strand to SEQ ID NO: 1727681
ugucaacgaggcaccgccc

SEQ ID NO: 1727683 - RNA, 19 nt, Artificial Sequence
  Description of Artificial Sequence: Synthetic oligonucleotide
  Sense strand starting at position 2360 of SEQ ID NO: 1562175
acggaugucaccuggaguu

SEQ ID NO: 1727684 - RNA, 19 nt, Artificial Sequence
  Description of Artificial Sequence: Synthetic oligonucleotide
  Antisense strand to SEQ ID NO: 1727683
aacuccaggugacauccgu

SEQ ID NO: 1727685 - RNA, 19 nt, Artificial Sequence
  Description of Artificial Sequence: Synthetic oligonucleotide
  Sense strand starting at position 2362 of SEQ ID NO: 1562175
ggaugucaccuggaguuaa

SEQ ID NO: 1727686 - RNA, 19 nt, Artificial Sequence
  Description of Artificial Sequence: Synthetic oligonucleotide
  Antisense strand to SEQ ID NO: 1727685
uuaacuccaggugacaucc

SEQ ID NO: 1727687 - RNA, 19 nt, Artificial Sequence
  Description of Artificial Sequence: Synthetic oligonucleotide
  Sense strand starting at position 2472 of SEQ ID NO: 1562175
aggucugagcugggaucau

SEQ ID NO: 1727688 - RNA, 19 nt, Artificial Sequence
  Description of Artificial Sequence: Synthetic oligonucleotide
  Antisense strand to SEQ ID NO: 1727687
augaucccagcucagaccu

SEQ ID NO: 1727689 - RNA, 19 nt, Artificial Sequence
  Description of Artificial Sequence: Synthetic oligonucleotide
  Sense strand starting at position 2809 of SEQ ID NO: 1562175
cucuacucgcccugggaaa

SEQ ID NO: 1727690 - RNA, 19 nt, Artificial Sequence
  Description of Artificial Sequence: Synthetic oligonucleotide
  Antisense strand to SEQ ID NO: 1727689
uuucccagggcgaguagag

SEQ ID NO: 1727691 - RNA, 19 nt, Artificial Sequence
  Description of Artificial Sequence: Synthetic oligonucleotide
  Sense strand starting at position 2908 of SEQ ID NO: 1562175
cagagagcucucgacugga

SEQ ID NO: 1727692 - RNA, 19 nt, Artificial Sequence
  Description of Artificial Sequence: Synthetic oligonucleotide
  Antisense strand to SEQ ID NO: 1727691
uccagucgagagcucucug

SEQ ID NO: 1727693 - RNA, 19 nt, Artificial Sequence
  Description of Artificial Sequence: Synthetic oligonucleotide
  Sense strand starting at position 2914 of SEQ ID NO: 1562175
gcucucgacuggagaggua

SEQ ID NO: 1727694 - RNA, 19 nt, Artificial Sequence
  Description of Artificial Sequence: Synthetic oligonucleotide
  Antisense strand to SEQ ID NO: 1727693
uaccucuccagucgagagc

SEQ ID NO: 1727695 - RNA, 19 nt, Artificial Sequence
  Description of Artificial Sequence: Synthetic oligonucleotide
  Sense strand starting at position 2941 of SEQ ID NO: 1562175
ggucccacauguuuagaca

SEQ ID NO: 1727696 - RNA, 19 nt, Artificial Sequence
  Description of Artificial Sequence: Synthetic oligonucleotide
  Antisense strand to SEQ ID NO: 1727695
ugucuaaacaugugggacc

SEQ ID NO: 1727697 - RNA, 19 nt, Artificial Sequence
  Description of Artificial Sequence: Synthetic oligonucleotide
  Sense strand starting at position 2944 of SEQ ID NO: 1562175
cccacauguuuagacagaa

SEQ ID NO: 1727698 - RNA, 19 nt, Artificial Sequence
  Description of Artificial Sequence: Synthetic oligonucleotide
  Antisense strand to SEQ ID NO: 1727697
uucugucuaaacauguggg

SEQ ID NO: 1727699 - RNA, 19 nt, Artificial Sequence
  Description of Artificial Sequence: Synthetic oligonucleotide
  Sense strand starting at position 3030 of SEQ ID NO: 1562175
agcaaagugcaauacuaau

SEQ ID NO: 1727700 - RNA, 19 nt, Artificial Sequence
  Description of Artificial Sequence: Synthetic oligonucleotide
  Antisense strand to SEQ ID NO: 1727699
auuaguauugcacuuugcu

SEQ ID NO: 1727701 - RNA, 19 nt, Artificial Sequence
  Description of Artificial Sequence: Synthetic oligonucleotide
  Sense strand starting at position 3067 of SEQ ID NO: 1562175
cgaaauucuuuggcccagu

SEQ ID NO: 1727702 - RNA, 19 nt, Artificial Sequence
  Description of Artificial Sequence: Synthetic oligonucleotide
  Antisense strand to SEQ ID NO: 1727701
acugggccaaagaauuucg

SEQ ID NO: 1727703 - RNA, 19 nt, Artificial Sequence
  Description of Artificial Sequence: Synthetic oligonucleotide
  Sense strand starting at position 3068 of SEQ ID NO: 1562175
gaaauucuuuggcccaguu

SEQ ID NO: 1727704 - RNA, 19 nt, Artificial Sequence
  Description of Artificial Sequence: Synthetic oligonucleotide
  Antisense strand to SEQ ID NO: 1727703
aacugggccaaagaauuuc

SEQ ID NO: 1727705 - RNA, 19 nt, Artificial Sequence
  Description of Artificial Sequence: Synthetic oligonucleotide
  Sense strand starting at position 3080 of SEQ ID NO: 1562175
cccaguuauuaugcagcaa

SEQ ID NO: 1727706 - RNA, 19 nt, Artificial Sequence
  Description of Artificial Sequence: Synthetic oligonucleotide
  Antisense strand to SEQ ID NO: 1727705
uugcugcauaauaacuggg

SEQ ID NO: 1727707 - RNA, 19 nt, Artificial Sequence
  Description of Artificial Sequence: Synthetic oligonucleotide
  Sense strand starting at position 3084 of SEQ ID NO: 1562175
guuauuaugcagcaauuga

SEQ ID NO: 1727708 - RNA, 19 nt, Artificial Sequence
  Description of Artificial Sequence: Synthetic oligonucleotide
  Antisense strand to SEQ ID NO: 1727707
ucaauugcugcauaauaac

SEQ ID NO: 1727709 - RNA, 19 nt, Artificial Sequence
  Description of Artificial Sequence: Synthetic oligonucleotide
  Sense strand starting at position 3124 of SEQ ID NO: 1562175
cgcuaauucucgagggcgu

SEQ ID NO: 1727710 - RNA, 19 nt, Artificial Sequence
  Description of Artificial Sequence: Synthetic oligonucleotide
  Antisense strand to SEQ ID NO: 1727709
acgcccucgagaauuagcg

SEQ ID NO: 1727711 - RNA, 19 nt, Artificial Sequence
  Description of Artificial Sequence: Synthetic oligonucleotide
  Sense strand starting at position 3125 of SEQ ID NO: 1562175
gcuaauucucgagggcgua

SEQ ID NO: 1727712 - RNA, 19 nt, Artificial Sequence
  Description of Artificial Sequence: Synthetic oligonucleotide
  Antisense strand to SEQ ID NO: 1727711
uacgcccucgagaauuagc

SEQ ID NO: 1727713 - RNA, 19 nt, Artificial Sequence
  Description of Artificial Sequence: Synthetic oligonucleotide
  Sense strand starting at position 3126 of SEQ ID NO: 1562175
cuaauucucgagggcguau

SEQ ID NO: 1727714 - RNA, 19 nt, Artificial Sequence
  Description of Artificial Sequence: Synthetic oligonucleotide
  Antisense strand to SEQ ID NO: 1727713
auacgcccucgagaauuag

SEQ ID NO: 1727715 - RNA, 19 nt, Artificial Sequence
  Description of Artificial Sequence: Synthetic oligonucleotide
  Sense strand starting at position 3339 of SEQ ID NO: 1562175
ucggguucguuugaacuuu

SEQ ID NO: 1727716 - RNA, 19 nt, Artificial Sequence
  Description of Artificial Sequence: Synthetic oligonucleotide
  Antisense strand to SEQ ID NO: 1727715
aaaguucaaacgaacccga

SEQ ID NO: 1727717 - RNA, 19 nt, Artificial Sequence
  Description of Artificial Sequence: Synthetic oligonucleotide
  Sense strand starting at position 3345 of SEQ ID NO: 1562175
ucguuugaacuuuagcauu

SEQ ID NO: 1727718 - RNA, 19 nt, Artificial Sequence
  Description of Artificial Sequence: Synthetic oligonucleotide
  Antisense strand to SEQ ID NO: 1727717
aaugcuaaaguucaaacga

SEQ ID NO: 1727719 - RNA, 19 nt, Artificial Sequence
  Description of Artificial Sequence: Synthetic oligonucleotide
  Sense strand starting at position 3445 of SEQ ID NO: 1562175
agccaaaucccaggugauu

SEQ ID NO: 1727720 - RNA, 19 nt, Artificial Sequence
  Description of Artificial Sequence: Synthetic oligonucleotide
  Antisense strand to SEQ ID NO: 1727719
aaucaccugggauuuggcu

SEQ ID NO: 1727721 - RNA, 19 nt, Artificial Sequence
  Description of Artificial Sequence: Synthetic oligonucleotide
  Sense strand starting at position 3494 of SEQ ID NO: 1562175
aguugaaaccacugagacu

SEQ ID NO: 1727722 - RNA, 19 nt, Artificial Sequence
  Description of Artificial Sequence: Synthetic oligonucleotide
  Antisense strand to SEQ ID NO: 1727721
agucucagugguuucaacu

SEQ ID NO: 1727723 - RNA, 19 nt, Artificial Sequence
  Description of Artificial Sequence: Synthetic oligonucleotide
  Sense strand starting at position 3545 of SEQ ID NO: 1562175
uaaggagaacagugcauaa

SEQ ID NO: 1727724 - RNA, 19 nt, Artificial Sequence
  Description of Artificial Sequence: Synthetic oligonucleotide
  Antisense strand to SEQ ID NO: 1727723
uuaugcacuguucuccuua

SEQ ID NO: 1727725 - RNA, 19 nt, Artificial Sequence
  Description of Artificial Sequence: Synthetic oligonucleotide
  Sense strand starting at position 3633 of SEQ ID NO: 1562175
agcagcgcuccugguauua

SEQ ID NO: 1727726 - RNA, 19 nt, Artificial Sequence
  Description of Artificial Sequence: Synthetic oligonucleotide
  Antisense strand to SEQ ID NO: 1727725
uaauaccaggagcgcugcu

SEQ ID NO: 1727727 - RNA, 19 nt, Artificial Sequence
  Description of Artificial Sequence: Synthetic oligonucleotide
  Sense strand starting at position 3672 of SEQ ID NO: 1562175
cugccagaagcagaaauua

SEQ ID NO: 1727728 - RNA, 19 nt, Artificial Sequence
  Description of Artificial Sequence: Synthetic oligonucleotide
  Antisense strand to SEQ ID NO: 1727727
uaauuucugcuucuggcag

SEQ ID NO: 1727729 - RNA, 19 nt, Artificial Sequence
  Description of Artificial Sequence: Synthetic oligonucleotide
  Sense strand starting at position 3715 of SEQ ID NO: 1562175
agcacagguccaggaagau

SEQ ID NO: 1727730 - RNA, 19 nt, Artificial Sequence
  Description of Artificial Sequence: Synthetic oligonucleotide
  Antisense strand to SEQ ID NO: 1727729
aucuuccuggaccugugcu

SEQ ID NO: 1727731 - RNA, 19 nt, Artificial Sequence
  Description of Artificial Sequence: Synthetic oligonucleotide
  Sense strand starting at position 3728 of SEQ ID NO: 1562175
gaagauggguccuagacuc

SEQ ID NO: 1727732 - RNA, 19 nt, Artificial Sequence
  Description of Artificial Sequence: Synthetic oligonucleotide
  Antisense strand to SEQ ID NO: 1727731
gagucuaggacccaucuuc

SEQ ID NO: 1727733 - RNA, 19 nt, Artificial Sequence
  Description of Artificial Sequence: Synthetic oligonucleotide
  Sense strand starting at position 13 of SEQ ID NO: 1562176
ggcugugagaaguacucaa

SEQ ID NO: 1727734 - RNA, 19 nt, Artificial Sequence
  Description of Artificial Sequence: Synthetic oligonucleotide
  Antisense strand to SEQ ID NO: 1727733
uugaguacuucucacagcc

SEQ ID NO: 1727735 - RNA, 19 nt, Artificial Sequence
  Description of Artificial Sequence: Synthetic oligonucleotide
  Sense strand starting at position 17 of SEQ ID NO: 1562176
gugagaaguacucaagguu

SEQ ID NO: 1727736 - RNA, 19 nt, Artificial Sequence
  Description of Artificial Sequence: Synthetic oligonucleotide
  Antisense strand to SEQ ID NO: 1727735
aaccuugaguacuucucac

SEQ ID NO: 1727737 - RNA, 19 nt, Artificial Sequence
  Description of Artificial Sequence: Synthetic oligonucleotide
  Sense strand starting at position 20 of SEQ ID NO: 1562176
agaaguacucaagguuauc

SEQ ID NO: 1727738 - RNA, 19 nt, Artificial Sequence
  Description of Artificial Sequence: Synthetic oligonucleotide
  Antisense strand to SEQ ID NO: 1727737
gauaaccuugaguacuucu

SEQ ID NO: 1727739 - RNA, 19 nt, Artificial Sequence
  Description of Artificial Sequence: Synthetic oligonucleotide
  Sense strand starting at position 26 of SEQ ID NO: 1562176
acucaagguuaucuguaca

SEQ ID NO: 1727740 - RNA, 19 nt, Artificial Sequence
  Description of Artificial Sequence: Synthetic oligonucleotide
  Antisense strand to SEQ ID NO: 1727739
uguacagauaaccuugagu

SEQ ID NO: 1727741 - RNA, 19 nt, Artificial Sequence
  Description of Artificial Sequence: Synthetic oligonucleotide
  Sense strand starting at position 31 of SEQ ID NO: 1562176
agguuaucuguacaaauuc

SEQ ID NO: 1727742 - RNA, 19 nt, Artificial Sequence
  Description of Artificial Sequence: Synthetic oligonucleotide
  Antisense strand to SEQ ID NO: 1727741
gaauuuguacagauaaccu

SEQ ID NO: 1727743 - RNA, 19 nt, Artificial Sequence
  Description of Artificial Sequence: Synthetic oligonucleotide
  Sense strand starting at position 169 of SEQ ID NO: 1562176
cugggaggcuucccacaua

SEQ ID NO: 1727744 - RNA, 19 nt, Artificial Sequence
  Description of Artificial Sequence: Synthetic oligonucleotide
  Antisense strand to SEQ ID NO: 1727743
uaugugggaagccucccag

SEQ ID NO: 1727745 - RNA, 19 nt, Artificial Sequence
  Description of Artificial Sequence: Synthetic oligonucleotide
  Sense strand starting at position 423 of SEQ ID NO: 1562176
cgaucucuccgacagggaa

SEQ ID NO: 1727746 - RNA, 19 nt, Artificial Sequence
  Description of Artificial Sequence: Synthetic oligonucleotide
  Antisense strand to SEQ ID NO: 1727745
uucccugucggagagaucg

SEQ ID NO: 1727747 - RNA, 19 nt, Artificial Sequence
  Description of Artificial Sequence: Synthetic oligonucleotide
  Sense strand starting at position 450 of SEQ ID NO: 1562176
gcgucaucacacuaacaau

SEQ ID NO: 1727748 - RNA, 19 nt, Artificial Sequence
  Description of Artificial Sequence: Synthetic oligonucleotide
  Antisense strand to SEQ ID NO: 1727747
auuguuagugugaugacgc

SEQ ID NO: 1727749 - RNA, 19 nt, Artificial Sequence
  Description of Artificial Sequence: Synthetic oligonucleotide
  Sense strand starting at position 941 of SEQ ID NO: 1562176
cggcuuugugcuccgaacu

SEQ ID NO: 1727750 - RNA, 19 nt, Artificial Sequence
  Description of Artificial Sequence: Synthetic oligonucleotide
  Antisense strand to SEQ ID NO: 1727749
aguucggagcacaaagccg

SEQ ID NO: 1727751 - RNA, 19 nt, Artificial Sequence
  Description of Artificial Sequence: Synthetic oligonucleotide
  Sense strand starting at position 1201 of SEQ ID NO: 1562176
gacagaugccucggagaca

SEQ ID NO: 1727752 - RNA, 19 nt, Artificial Sequence
  Description of Artificial Sequence: Synthetic oligonucleotide
  Antisense strand to SEQ ID NO: 1727751
ugucuccgaggcaucuguc

SEQ ID NO: 1727753 - RNA, 19 nt, Artificial Sequence
  Description of Artificial Sequence: Synthetic oligonucleotide
  Sense strand starting at position 1214 of SEQ ID NO: 1562176
gagacagacuuuccuuugu

SEQ ID NO: 1727754 - RNA, 19 nt, Artificial Sequence
  Description of Artificial Sequence: Synthetic oligonucleotide
  Antisense strand to SEQ ID NO: 1727753
acaaaggaaagucugucuc

SEQ ID NO: 1727755 - RNA, 19 nt, Artificial Sequence
  Description of Artificial Sequence: Synthetic oligonucleotide
  Sense strand starting at position 2231 of SEQ ID NO: 1562176
gugggaacuucugcaaauc

SEQ ID NO: 1727756 - RNA, 19 nt, Artificial Sequence
  Description of Artificial Sequence: Synthetic oligonucleotide
  Antisense strand to SEQ ID NO: 1727755
gauuugcagaaguucccac

SEQ ID NO: 1727757 - RNA, 19 nt, Artificial Sequence
  Description of Artificial Sequence: Synthetic oligonucleotide
  Sense strand starting at position 2366 of SEQ ID NO: 1562176
aggacuaggcucugaugga

SEQ ID NO: 1727758 - RNA, 19 nt, Artificial Sequence
  Description of Artificial Sequence: Synthetic oligonucleotide
  Antisense strand to SEQ ID NO: 1727757
uccaucagagccuaguccu

SEQ ID NO: 1727759 - RNA, 19 nt, Artificial Sequence
  Description of Artificial Sequence: Synthetic oligonucleotide
  Sense strand starting at position 2398 of SEQ ID NO: 1562176
accucaauggccuguagaa

SEQ ID NO: 1727760 - RNA, 19 nt, Artificial Sequence
  Description of Artificial Sequence: Synthetic oligonucleotide
  Antisense strand to SEQ ID NO: 1727759
uucuacaggccauugaggu

SEQ ID NO: 1727761 - RNA, 19 nt, Artificial Sequence
  Description of Artificial Sequence: Synthetic oligonucleotide
  Sense strand starting at position 2400 of SEQ ID NO: 1562176
cucaauggccuguagaauc

SEQ ID NO: 1727762 - RNA, 19 nt, Artificial Sequence
  Description of Artificial Sequence: Synthetic oligonucleotide
  Antisense strand to SEQ ID NO: 1727761
gauucuacaggccauugag

SEQ ID NO: 1727763 - RNA, 19 nt, Artificial Sequence
  Description of Artificial Sequence: Synthetic oligonucleotide
  Sense strand starting at position 2530 of SEQ ID NO: 1562176
gugugucaucccgucucau

SEQ ID NO: 1727764 - RNA, 19 nt, Artificial Sequence
  Description of Artificial Sequence: Synthetic oligonucleotide
  Antisense strand to SEQ ID NO: 1727763
augagacgggaugacacac

SEQ ID NO: 1727765 - RNA, 19 nt, Artificial Sequence
  Description of Artificial Sequence: Synthetic oligonucleotide
  Sense strand starting at position 2531 of SEQ ID NO: 1562176
ugugucaucccgucucauc

SEQ ID NO: 1727766 - RNA, 19 nt, Artificial Sequence
  Description of Artificial Sequence: Synthetic oligonucleotide
  Antisense strand to SEQ ID NO: 1727765
gaugagacgggaugacaca

SEQ ID NO: 1727767 - RNA, 19 nt, Artificial Sequence
  Description of Artificial Sequence: Synthetic oligonucleotide
  Sense strand starting at position 2635 of SEQ ID NO: 1562176
acagucaaccgguaucauu

SEQ ID NO: 1727768 - RNA, 19 nt, Artificial Sequence
  Description of Artificial Sequence: Synthetic oligonucleotide
  Antisense strand to SEQ ID NO: 1727767
aaugauaccgguugacugu

SEQ ID NO: 1727769 - RNA, 19 nt, Artificial Sequence
  Description of Artificial Sequence: Synthetic oligonucleotide
  Sense strand starting at position 2704 of SEQ ID NO: 1562176
gccuuaaacgaucagucca

SEQ ID NO: 1727770 - RNA, 19 nt, Artificial Sequence
  Description of Artificial Sequence: Synthetic oligonucleotide
  Antisense strand to SEQ ID NO: 1727769
uggacugaucguuuaaggc

SEQ ID NO: 1727771 - RNA, 19 nt, Artificial Sequence
  Description of Artificial Sequence: Synthetic oligonucleotide
  Sense strand starting at position 2920 of SEQ ID NO: 1562176
cacggcuagguccagauau

SEQ ID NO: 1727772 - RNA, 19 nt, Artificial Sequence
  Description of Artificial Sequence: Synthetic oligonucleotide
  Antisense strand to SEQ ID NO: 1727771
auaucuggaccuagccgug

SEQ ID NO: 1727773 - RNA, 19 nt, Artificial Sequence
  Description of Artificial Sequence: Synthetic oligonucleotide
  Sense strand starting at position 2991 of SEQ ID NO: 1562176
acccuuuagcaauggagaa

SEQ ID NO: 1727774 - RNA, 19 nt, Artificial Sequence
  Description of Artificial Sequence: Synthetic oligonucleotide
  Antisense strand to SEQ ID NO: 1727773
uucuccauugcuaaagggu

SEQ ID NO: 1727775 - RNA, 19 nt, Artificial Sequence
  Description of Artificial Sequence: Synthetic oligonucleotide
  Sense strand starting at position 3004 of SEQ ID NO: 1562176
ggagaacucuaggaacaaa

SEQ ID NO: 1727776 - RNA, 19 nt, Artificial Sequence
  Description of Artificial Sequence: Synthetic oligonucleotide
  Antisense strand to SEQ ID NO: 1727775
uuuguuccuagaguucucc

SEQ ID NO: 1727777 - RNA, 19 nt, Artificial Sequence
  Description of Artificial Sequence: Synthetic oligonucleotide
  Sense strand starting at position 3051 of SEQ ID NO: 1562176
agccaaucagaaugcugau

SEQ ID NO: 1727778 - RNA, 19 nt, Artificial Sequence
  Description of Artificial Sequence: Synthetic oligonucleotide
  Antisense strand to SEQ ID NO: 1727777
aucagcauucugauuggcu

SEQ ID NO: 1727779 - RNA, 19 nt, Artificial Sequence
  Description of Artificial Sequence: Synthetic oligonucleotide
  Sense strand starting at position 3065 of SEQ ID NO: 1562176
cugauuaaagauuguuaag

SEQ ID NO: 1727780 - RNA, 19 nt, Artificial Sequence
  Description of Artificial Sequence: Synthetic oligonucleotide
  Antisense strand to SEQ ID NO: 1727779
cuuaacaaucuuuaaucag

SEQ ID NO: 1727781 - RNA, 19 nt, Artificial Sequence
  Description of Artificial Sequence: Synthetic oligonucleotide
  Sense strand starting at position 3067 of SEQ ID NO: 1562176
gauuaaagauuguuaaggu

SEQ ID NO: 1727782 - RNA, 19 nt, Artificial Sequence
  Description of Artificial Sequence: Synthetic oligonucleotide
  Antisense strand to SEQ ID NO: 1727781
accuuaacaaucuuuaauc

SEQ ID NO: 1727783 - RNA, 19 nt, Artificial Sequence
  Description of Artificial Sequence: Synthetic oligonucleotide
  Sense strand starting at position 3109 of SEQ ID NO: 1562176
ccagacuuccugcaaaugu

SEQ ID NO: 1727784 - RNA, 19 nt, Artificial Sequence
  Description of Artificial Sequence: Synthetic oligonucleotide
  Antisense strand to SEQ ID NO: 1727783
acauuugcaggaagucugg

SEQ ID NO: 1727785 - RNA, 19 nt, Artificial Sequence
  Description of Artificial Sequence: Synthetic oligonucleotide
  Sense strand starting at position 3292 of SEQ ID NO: 1562176
gguugccuuagguaagaaa

SEQ ID NO: 1727786 - RNA, 19 nt, Artificial Sequence
  Description of Artificial Sequence: Synthetic oligonucleotide
  Antisense strand to SEQ ID NO: 1727785
uuucuuaccuaaggcaacc

SEQ ID NO: 1727787 - RNA, 19 nt, Artificial Sequence
  Description of Artificial Sequence: Synthetic oligonucleotide
  Sense strand starting at position 3324 of SEQ ID NO: 1562176
ggccuuggccucuaggaaa

SEQ ID NO: 1727788 - RNA, 19 nt, Artificial Sequence
  Description of Artificial Sequence: Synthetic oligonucleotide
  Antisense strand to SEQ ID NO: 1727787
uuuccuagaggccaaggcc

SEQ ID NO: 1727789 - RNA, 19 nt, Artificial Sequence
  Description of Artificial Sequence: Synthetic oligonucleotide
  Sense strand starting at position 3593 of SEQ ID NO: 1562176
gcuagaugugguugggaaa

SEQ ID NO: 1727790 - RNA, 19 nt, Artificial Sequence
  Description of Artificial Sequence: Synthetic oligonucleotide
  Antisense strand to SEQ ID NO: 1727789
uuucccaaccacaucuagc

SEQ ID NO: 1727791 - RNA, 19 nt, Artificial Sequence
  Description of Artificial Sequence: Synthetic oligonucleotide
  Sense strand starting at position 3643 of SEQ ID NO: 1562176
accugagagcugcauaaca

SEQ ID NO: 1727792 - RNA, 19 nt, Artificial Sequence
  Description of Artificial Sequence: Synthetic oligonucleotide
  Antisense strand to SEQ ID NO: 1727791
uguuaugcagcucucaggu

SEQ ID NO: 1727793 - RNA, 19 nt, Artificial Sequence
  Description of Artificial Sequence: Synthetic oligonucleotide
  Sense strand starting at position 3645 of SEQ ID NO: 1562176
cugagagcugcauaacaaa

SEQ ID NO: 1727794 - RNA, 19 nt, Artificial Sequence
  Description of Artificial Sequence: Synthetic oligonucleotide
  Antisense strand to SEQ ID NO: 1727793
uuuguuaugcagcucucag

SEQ ID NO: 1727795 - RNA, 19 nt, Artificial Sequence
  Description of Artificial Sequence: Synthetic oligonucleotide
  Sense strand starting at position 3715 of SEQ ID NO: 1562176
cugguagccggucagauuu

SEQ ID NO: 1727796 - RNA, 19 nt, Artificial Sequence
  Description of Artificial Sequence: Synthetic oligonucleotide
  Antisense strand to SEQ ID NO: 1727795
aaaucugaccggcuaccag

SEQ ID NO: 1727797 - RNA, 19 nt, Artificial Sequence
  Description of Artificial Sequence: Synthetic oligonucleotide
  Sense strand starting at position 3769 of SEQ ID NO: 1562176
gcaauuagaguuugagaau

SEQ ID NO: 1727798 - RNA, 19 nt, Artificial Sequence
  Description of Artificial Sequence: Synthetic oligonucleotide
  Antisense strand to SEQ ID NO: 1727797
auucucaaacucuaauugc

SEQ ID NO: 1727799 - RNA, 19 nt, Artificial Sequence
  Description of Artificial Sequence: Synthetic oligonucleotide
  Sense strand starting at position 3830 of SEQ ID NO: 1562176
auguguagauucucuaaga

SEQ ID NO: 1727800 - RNA, 19 nt, Artificial Sequence
  Description of Artificial Sequence: Synthetic oligonucleotide
  Antisense strand to SEQ ID NO: 1727799
ucuuagagaaucuacacau

SEQ ID NO: 1727801 - RNA, 19 nt, Artificial Sequence
  Description of Artificial Sequence: Synthetic oligonucleotide
  Sense strand starting at position 3831 of SEQ ID NO: 1562176
uguguagauucucuaagac

SEQ ID NO: 1727802 - RNA, 19 nt, Artificial Sequence
  Description of Artificial Sequence: Synthetic oligonucleotide
  Antisense strand to SEQ ID NO: 1727801
gucuuagagaaucuacaca

SEQ ID NO: 1727803 - RNA, 19 nt, Artificial Sequence
  Description of Artificial Sequence: Synthetic oligonucleotide
  Sense strand starting at position 3883 of SEQ ID NO: 1562176
guagcuguacaacaaagau

SEQ ID NO: 1727804 - RNA, 19 nt, Artificial Sequence
  Description of Artificial Sequence: Synthetic oligonucleotide
  Antisense strand to SEQ ID NO: 1727803
aucuuuguuguacagcuac

SEQ ID NO: 1727805 - RNA, 19 nt, Artificial Sequence
  Description of Artificial Sequence: Synthetic oligonucleotide
  Sense strand starting at position 3907 of SEQ ID NO: 1562176
cuuauagaagauuguucuu

SEQ ID NO: 1727806 - RNA, 19 nt, Artificial Sequence
  Description of Artificial Sequence: Synthetic oligonucleotide
  Antisense strand to SEQ ID NO: 1727805
aagaacaaucuucuauaag

SEQ ID NO: 1727807 - RNA, 19 nt, Artificial Sequence
  Description of Artificial Sequence: Synthetic oligonucleotide
  Sense strand starting at position 3912 of SEQ ID NO: 1562176
agaagauuguucuuugcag

SEQ ID NO: 1727808 - RNA, 19 nt, Artificial Sequence
  Description of Artificial Sequence: Synthetic oligonucleotide
  Antisense strand to SEQ ID NO: 1727807
cugcaaagaacaaucuucu

SEQ ID NO: 1727809 - RNA, 19 nt, Artificial Sequence
  Description of Artificial Sequence: Synthetic oligonucleotide
  Sense strand starting at position 3913 of SEQ ID NO: 1562176
gaagauuguucuuugcaga

SEQ ID NO: 1727810 - RNA, 19 nt, Artificial Sequence
  Description of Artificial Sequence: Synthetic oligonucleotide
  Antisense strand to SEQ ID NO: 1727809
ucugcaaagaacaaucuuc

SEQ ID NO: 1727811 - RNA, 19 nt, Artificial Sequence
  Description of Artificial Sequence: Synthetic oligonucleotide
  Sense strand starting at position 3914 of SEQ ID NO: 1562176
aagauuguucuuugcagaa

SEQ ID NO: 1727812 - RNA, 19 nt, Artificial Sequence
  Description of Artificial Sequence: Synthetic oligonucleotide
  Antisense strand to SEQ ID NO: 1727811
uucugcaaagaacaaucuu

SEQ ID NO: 1727813 - RNA, 19 nt, Artificial Sequence
  Description of Artificial Sequence: Synthetic oligonucleotide
  Sense strand starting at position 163 of SEQ ID NO: 1562177
agaggugagucaucucucu

SEQ ID NO: 1727814 - RNA, 19 nt, Artificial Sequence
  Description of Artificial Sequence: Synthetic oligonucleotide
  Antisense strand to SEQ ID NO: 1727813
agagagaugacucaccucu

SEQ ID NO: 1727815 - RNA, 19 nt, Artificial Sequence
  Description of Artificial Sequence: Synthetic oligonucleotide
  Sense strand starting at position 182 of SEQ ID NO: 1562177
acugguugcuucuuggaca

SEQ ID NO: 1727816 - RNA, 19 nt, Artificial Sequence
  Description of Artificial Sequence: Synthetic oligonucleotide
  Antisense strand to SEQ ID NO: 1727815
uguccaagaagcaaccagu

SEQ ID NO: 1727817 - RNA, 19 nt, Artificial Sequence
  Description of Artificial Sequence: Synthetic oligonucleotide
  Sense strand starting at position 195 of SEQ ID NO: 1562177
uggacauucuccuuuguca

SEQ ID NO: 1727818 - RNA, 19 nt, Artificial Sequence
  Description of Artificial Sequence: Synthetic oligonucleotide
  Antisense strand to SEQ ID NO: 1727817
ugacaaaggagaaugucca

SEQ ID NO: 1727819 - RNA, 19 nt, Artificial Sequence
  Description of Artificial Sequence: Synthetic oligonucleotide
  Sense strand starting at position 218 of SEQ ID NO: 1562177
ccuuuagccugguccuaga

SEQ ID NO: 1727820 - RNA, 19 nt, Artificial Sequence
  Description of Artificial Sequence: Synthetic oligonucleotide
  Antisense strand to SEQ ID NO: 1727819
ucuaggaccaggcuaaagg

SEQ ID NO: 1727821 - RNA, 19 nt, Artificial Sequence
  Description of Artificial Sequence: Synthetic oligonucleotide
  Sense strand starting at position 285 of SEQ ID NO: 1562177
ggcacuguaacuuggacaa

SEQ ID NO: 1727822 - RNA, 19 nt, Artificial Sequence
  Description of Artificial Sequence: Synthetic oligonucleotide
  Antisense strand to SEQ ID NO: 1727821
uuguccaaguuacagugcc

SEQ ID NO: 1727823 - RNA, 19 nt, Artificial Sequence
  Description of Artificial Sequence: Synthetic oligonucleotide
  Sense strand starting at position 779 of SEQ ID NO: 1562177
ggcugaugccaggaucuca

SEQ ID NO: 1727824 - RNA, 19 nt, Artificial Sequence
  Description of Artificial Sequence: Synthetic oligonucleotide
  Antisense strand to SEQ ID NO: 1727823
ugagauccuggcaucagcc

SEQ ID NO: 1727825 - RNA, 19 nt, Artificial Sequence
  Description of Artificial Sequence: Synthetic oligonucleotide
  Sense strand starting at position 1063 of SEQ ID NO: 1562177
gggaucugggcucagugau

SEQ ID NO: 1727826 - RNA, 19 nt, Artificial Sequence
  Description of Artificial Sequence: Synthetic oligonucleotide
  Antisense strand to SEQ ID NO: 1727825
aucacugagcccagauccc

SEQ ID NO: 1727827 - RNA, 19 nt, Artificial Sequence
  Description of Artificial Sequence: Synthetic oligonucleotide
  Sense strand starting at position 1094 of SEQ ID NO: 1562177
ggcugugagaaguacucaa

SEQ ID NO: 1727828 - RNA, 19 nt, Artificial Sequence
  Description of Artificial Sequence: Synthetic oligonucleotide
  Antisense strand to SEQ ID NO: 1727827
uugaguacuucucacagcc

SEQ ID NO: 1727829 - RNA, 19 nt, Artificial Sequence
  Description of Artificial Sequence: Synthetic oligonucleotide
  Sense strand starting at position 1098 of SEQ ID NO: 1562177
gugagaaguacucaagguu

SEQ ID NO: 1727830 - RNA, 19 nt, Artificial Sequence
  Description of Artificial Sequence: Synthetic oligonucleotide
  Antisense strand to SEQ ID NO: 1727829
aaccuugaguacuucucac

SEQ ID NO: 1727831 - RNA, 19 nt, Artificial Sequence
  Description of Artificial Sequence: Synthetic oligonucleotide
  Sense strand starting at position 1101 of SEQ ID NO: 1562177
agaaguacucaagguuauc

SEQ ID NO: 1727832 - RNA, 19 nt, Artificial Sequence
  Description of Artificial Sequence: Synthetic oligonucleotide
  Antisense strand to SEQ ID NO: 1727831
gauaaccuugaguacuucu

SEQ ID NO: 1727833 - RNA, 19 nt, Artificial Sequence
  Description of Artificial Sequence: Synthetic oligonucleotide
  Sense strand starting at position 1107 of SEQ ID NO: 1562177
acucaagguuaucuguaca

SEQ ID NO: 1727834 - RNA, 19 nt, Artificial Sequence
  Description of Artificial Sequence: Synthetic oligonucleotide
  Antisense strand to SEQ ID NO: 1727833
uguacagauaaccuugagu

SEQ ID NO: 1727835 - RNA, 19 nt, Artificial Sequence
  Description of Artificial Sequence: Synthetic oligonucleotide
  Sense strand starting at position 1112 of SEQ ID NO: 1562177
agguuaucuguacaaauuc

SEQ ID NO: 1727836 - RNA, 19 nt, Artificial Sequence
  Description of Artificial Sequence: Synthetic oligonucleotide
  Antisense strand to SEQ ID NO: 1727835
gaauuuguacagauaaccu

SEQ ID NO: 1727837 - RNA, 19 nt, Artificial Sequence
  Description of Artificial Sequence: Synthetic oligonucleotide
  Sense strand starting at position 1250 of SEQ ID NO: 1562177
cugggaggcuucccacaua

SEQ ID NO: 1727838 - RNA, 19 nt, Artificial Sequence
  Description of Artificial Sequence: Synthetic oligonucleotide
  Antisense strand to SEQ ID NO: 1727837
uaugugggaagccucccag

SEQ ID NO: 1727839 - RNA, 19 nt, Artificial Sequence
  Description of Artificial Sequence: Synthetic oligonucleotide
  Sense strand starting at position 1504 of SEQ ID NO: 1562177
cgaucucuccgacagggaa

SEQ ID NO: 1727840 - RNA, 19 nt, Artificial Sequence
  Description of Artificial Sequence: Synthetic oligonucleotide
  Antisense strand to SEQ ID NO: 1727839
uucccugucggagagaucg

SEQ ID NO: 1727841 - RNA, 19 nt, Artificial Sequence
  Description of Artificial Sequence: Synthetic oligonucleotide
  Sense strand starting at position 1531 of SEQ ID NO: 1562177
gcgucaucacacuaacaau

SEQ ID NO: 1727842 - RNA, 19 nt, Artificial Sequence
  Description of Artificial Sequence: Synthetic oligonucleotide
  Antisense strand to SEQ ID NO: 1727841
auuguuagugugaugacgc

SEQ ID NO: 1727843 - RNA, 19 nt, Artificial Sequence
  Description of Artificial Sequence: Synthetic oligonucleotide
  Sense strand starting at position 1646 of SEQ ID NO: 1562177
gcacgaacuuucugacaac

SEQ ID NO: 1727844 - RNA, 19 nt, Artificial Sequence
  Description of Artificial Sequence: Synthetic oligonucleotide
  Antisense strand to SEQ ID NO: 1727843
guugucagaaaguucgugc

SEQ ID NO: 1727845 - RNA, 19 nt, Artificial Sequence
  Description of Artificial Sequence: Synthetic oligonucleotide
  Sense strand starting at position 2022 of SEQ ID NO: 1562177
cggcuuugugcuccgaacu

SEQ ID NO: 1727846 - RNA, 19 nt, Artificial Sequence
  Description of Artificial Sequence: Synthetic oligonucleotide
  Antisense strand to SEQ ID NO: 1727845
aguucggagcacaaagccg

SEQ ID NO: 1727847 - RNA, 19 nt, Artificial Sequence
  Description of Artificial Sequence: Synthetic oligonucleotide
  Sense strand starting at position 2282 of SEQ ID NO: 1562177
gacagaugccucggagaca

SEQ ID NO: 1727848 - RNA, 19 nt, Artificial Sequence
  Description of Artificial Sequence: Synthetic oligonucleotide
  Antisense strand to SEQ ID NO: 1727847
ugucuccgaggcaucuguc

SEQ ID NO: 1727849 - RNA, 19 nt, Artificial Sequence
  Description of Artificial Sequence: Synthetic oligonucleotide
  Sense strand starting at position 2295 of SEQ ID NO: 1562177
gagacagacuuuccuuugu

SEQ ID NO: 1727850 - RNA, 19 nt, Artificial Sequence
  Description of Artificial Sequence: Synthetic oligonucleotide
  Antisense strand to SEQ ID NO: 1727849
acaaaggaaagucugucuc

SEQ ID NO: 1727851 - RNA, 19 nt, Artificial Sequence
  Description of Artificial Sequence: Synthetic oligonucleotide
  Sense strand starting at position 3312 of SEQ ID NO: 1562177
gugggaacuucugcaaauc

SEQ ID NO: 1727852 - RNA, 19 nt, Artificial Sequence
  Description of Artificial Sequence: Synthetic oligonucleotide
  Antisense strand to SEQ ID NO: 1727851
gauuugcagaaguucccac

SEQ ID NO: 1727853 - RNA, 19 nt, Artificial Sequence
  Description of Artificial Sequence: Synthetic oligonucleotide
  Sense strand starting at position 3378 of SEQ ID NO: 1562177
gcgauuggucccguugcuu

SEQ ID NO: 1727854 - RNA, 19 nt, Artificial Sequence
  Description of Artificial Sequence: Synthetic oligonucleotide
  Antisense strand to SEQ ID NO: 1727853
aagcaacgggaccaaucgc

SEQ ID NO: 1727855 - RNA, 19 nt, Artificial Sequence
  Description of Artificial Sequence: Synthetic oligonucleotide
  Sense strand starting at position 3447 of SEQ ID NO: 1562177
aggacuaggcucugaugga

SEQ ID NO: 1727856 - RNA, 19 nt, Artificial Sequence
  Description of Artificial Sequence: Synthetic oligonucleotide
  Antisense strand to SEQ ID NO: 1727855
uccaucagagccuaguccu

SEQ ID NO: 1727857 - RNA, 19 nt, Artificial Sequence
  Description of Artificial Sequence: Synthetic oligonucleotide
  Sense strand starting at position 3479 of SEQ ID NO: 1562177
accucaauggccuguagaa

SEQ ID NO: 1727858 - RNA, 19 nt, Artificial Sequence
  Description of Artificial Sequence: Synthetic oligonucleotide
  Antisense strand to SEQ ID NO: 1727857
uucuacaggccauugaggu

SEQ ID NO: 1727859 - RNA, 19 nt, Artificial Sequence
  Description of Artificial Sequence: Synthetic oligonucleotide
  Sense strand starting at position 3481 of SEQ ID NO: 1562177
cucaauggccuguagaauc

SEQ ID NO: 1727860 - RNA, 19 nt, Artificial Sequence
  Description of Artificial Sequence: Synthetic oligonucleotide
  Antisense strand to SEQ ID NO: 1727859
gauucuacaggccauugag

SEQ ID NO: 1727861 - RNA, 19 nt, Artificial Sequence
  Description of Artificial Sequence: Synthetic oligonucleotide
  Sense strand starting at position 3611 of SEQ ID NO: 1562177
gugugucaucccgucucau

SEQ ID NO: 1727862 - RNA, 19 nt, Artificial Sequence
  Description of Artificial Sequence: Synthetic oligonucleotide
  Antisense strand to SEQ ID NO: 1727861
augagacgggaugacacac

SEQ ID NO: 1727863 - RNA, 19 nt, Artificial Sequence
  Description of Artificial Sequence: Synthetic oligonucleotide
  Sense strand starting at position 3612 of SEQ ID NO: 1562177
ugugucaucccgucucauc

SEQ ID NO: 1727864 - RNA, 19 nt, Artificial Sequence
  Description of Artificial Sequence: Synthetic oligonucleotide
  Antisense strand to SEQ ID NO: 1727863
gaugagacgggaugacaca

SEQ ID NO: 1727865 - RNA, 19 nt, Artificial Sequence
  Description of Artificial Sequence: Synthetic oligonucleotide
  Sense strand starting at position 3622 of SEQ ID NO: 1562177
cgucucauccucgggugau

SEQ ID NO: 1727866 - RNA, 19 nt, Artificial Sequence
  Description of Artificial Sequence: Synthetic oligonucleotide
  Antisense strand to SEQ ID NO: 1727865
aucacccgaggaugagacg

SEQ ID NO: 1727867 - RNA, 19 nt, Artificial Sequence
  Description of Artificial Sequence: Synthetic oligonucleotide
  Sense strand starting at position 3642 of SEQ ID NO: 1562177
ggguauguguuguccuaug

SEQ ID NO: 1727868 - RNA, 19 nt, Artificial Sequence
  Description of Artificial Sequence: Synthetic oligonucleotide
  Antisense strand to SEQ ID NO: 1727867
cauaggacaacacauaccc

SEQ ID NO: 1727869 - RNA, 19 nt, Artificial Sequence
  Description of Artificial Sequence: Synthetic oligonucleotide
  Sense strand starting at position 3647 of SEQ ID NO: 1562177
uguguuguccuauguaagu

SEQ ID NO: 1727870 - RNA, 19 nt, Artificial Sequence
  Description of Artificial Sequence: Synthetic oligonucleotide
  Antisense strand to SEQ ID NO: 1727869
acuuacauaggacaacaca

SEQ ID NO: 1727871 - RNA, 19 nt, Artificial Sequence
  Description of Artificial Sequence: Synthetic oligonucleotide
  Sense strand starting at position 3657 of SEQ ID NO: 1562177
uauguaagucucuggcuua

SEQ ID NO: 1727872 - RNA, 19 nt, Artificial Sequence
  Description of Artificial Sequence: Synthetic oligonucleotide
  Antisense strand to SEQ ID NO: 1727871
uaagccagagacuuacaua

SEQ ID NO: 1727873 - RNA, 19 nt, Artificial Sequence
  Description of Artificial Sequence: Synthetic oligonucleotide
  Sense strand starting at position 3716 of SEQ ID NO: 1562177
acagucaaccgguaucauu

SEQ ID NO: 1727874 - RNA, 19 nt, Artificial Sequence
  Description of Artificial Sequence: Synthetic oligonucleotide
  Antisense strand to SEQ ID NO: 1727873
aaugauaccgguugacugu

SEQ ID NO: 1727875 - RNA, 19 nt, Artificial Sequence
  Description of Artificial Sequence: Synthetic oligonucleotide
  Sense strand starting at position 3740 of SEQ ID NO: 1562177
caggucggucgauagugaa

SEQ ID NO: 1727876 - RNA, 19 nt, Artificial Sequence
  Description of Artificial Sequence: Synthetic oligonucleotide
  Antisense strand to SEQ ID NO: 1727875
uucacuaucgaccgaccug

SEQ ID NO: 1727877 - RNA, 19 nt, Artificial Sequence
  Description of Artificial Sequence: Synthetic oligonucleotide
  Sense strand starting at position 3746 of SEQ ID NO: 1562177
ggucgauagugaagccuga

SEQ ID NO: 1727878 - RNA, 19 nt, Artificial Sequence
  Description of Artificial Sequence: Synthetic oligonucleotide
  Antisense strand to SEQ ID NO: 1727877
ucaggcuucacuaucgacc

SEQ ID NO: 1727879 - RNA, 19 nt, Artificial Sequence
  Description of Artificial Sequence: Synthetic oligonucleotide
  Sense strand starting at position 3753 of SEQ ID NO: 1562177
agugaagccugaucccuua

SEQ ID NO: 1727880 - RNA, 19 nt, Artificial Sequence
  Description of Artificial Sequence: Synthetic oligonucleotide
  Antisense strand to SEQ ID NO: 1727879
uaagggaucaggcuucacu

SEQ ID NO: 1727881 - RNA, 19 nt, Artificial Sequence
  Description of Artificial Sequence: Synthetic oligonucleotide
  Sense strand starting at position 3785 of SEQ ID NO: 1562177
gccuuaaacgaucagucca

SEQ ID NO: 1727882 - RNA, 19 nt, Artificial Sequence
  Description of Artificial Sequence: Synthetic oligonucleotide
  Antisense strand to SEQ ID NO: 1727881
uggacugaucguuuaaggc

SEQ ID NO: 1727883 - RNA, 19 nt, Artificial Sequence
  Description of Artificial Sequence: Synthetic oligonucleotide
  Sense strand starting at position 3812 of SEQ ID NO: 1562177
cggaguuccugucugguuu

SEQ ID NO: 1727884 - RNA, 19 nt, Artificial Sequence
  Description of Artificial Sequence: Synthetic oligonucleotide
  Antisense strand to SEQ ID NO: 1727883
aaaccagacaggaacuccg

SEQ ID NO: 1727885 - RNA, 19 nt, Artificial Sequence
  Description of Artificial Sequence: Synthetic oligonucleotide
  Sense strand starting at position 3925 of SEQ ID NO: 1562177
gguaccacauacugugaua

SEQ ID NO: 1727886 - RNA, 19 nt, Artificial Sequence
  Description of Artificial Sequence: Synthetic oligonucleotide
  Antisense strand to SEQ ID NO: 1727885
uaucacaguaugugguacc

SEQ ID NO: 1727887 - RNA, 19 nt, Artificial Sequence
  Description of Artificial Sequence: Synthetic oligonucleotide
  Sense strand starting at position 3928 of SEQ ID NO: 1562177
accacauacugugauauuu

SEQ ID NO: 1727888 - RNA, 19 nt, Artificial Sequence
  Description of Artificial Sequence: Synthetic oligonucleotide
  Antisense strand to SEQ ID NO: 1727887
aaauaucacaguauguggu

SEQ ID NO: 1727889 - RNA, 19 nt, Artificial Sequence
  Description of Artificial Sequence: Synthetic oligonucleotide
  Sense strand starting at position 3936 of SEQ ID NO: 1562177
cugugauauuucuguuaac

SEQ ID NO: 1727890 - RNA, 19 nt, Artificial Sequence
  Description of Artificial Sequence: Synthetic oligonucleotide
  Antisense strand to SEQ ID NO: 1727889
guuaacagaaauaucacag

SEQ ID NO: 1727891 - RNA, 19 nt, Artificial Sequence
  Description of Artificial Sequence: Synthetic oligonucleotide
  Sense strand starting at position 3939 of SEQ ID NO: 1562177
ugauauuucuguuaaccag

SEQ ID NO: 1727892 - RNA, 19 nt, Artificial Sequence
  Description of Artificial Sequence: Synthetic oligonucleotide
  Antisense strand to SEQ ID NO: 1727891
cugguuaacagaaauauca

SEQ ID NO: 1727893 - RNA, 19 nt, Artificial Sequence
  Description of Artificial Sequence: Synthetic oligonucleotide
  Sense strand starting at position 116 of SEQ ID NO: 1562178
gggaucugggcucagugau

SEQ ID NO: 1727894 - RNA, 19 nt, Artificial Sequence
  Description of Artificial Sequence: Synthetic oligonucleotide
  Antisense strand to SEQ ID NO: 1727893
aucacugagcccagauccc

SEQ ID NO: 1727895 - RNA, 19 nt, Artificial Sequence
  Description of Artificial Sequence: Synthetic oligonucleotide
  Sense strand starting at position 147 of SEQ ID NO: 1562178
ggcugugagaaguacucaa

SEQ ID NO: 1727896 - RNA, 19 nt, Artificial Sequence
  Description of Artificial Sequence: Synthetic oligonucleotide
  Antisense strand to SEQ ID NO: 1727895
uugaguacuucucacagcc

SEQ ID NO: 1727897 - RNA, 19 nt, Artificial Sequence
  Description of Artificial Sequence: Synthetic oligonucleotide
  Sense strand starting at position 151 of SEQ ID NO: 1562178
gugagaaguacucaagguu

SEQ ID NO: 1727898 - RNA, 19 nt, Artificial Sequence
  Description of Artificial Sequence: Synthetic oligonucleotide
  Antisense strand to SEQ ID NO: 1727897
aaccuugaguacuucucac

SEQ ID NO: 1727899 - RNA, 19 nt, Artificial Sequence
  Description of Artificial Sequence: Synthetic oligonucleotide
  Sense strand starting at position 154 of SEQ ID NO: 1562178
agaaguacucaagguuauc

SEQ ID NO: 1727900 - RNA, 19 nt, Artificial Sequence
  Description of Artificial Sequence: Synthetic oligonucleotide
  Antisense strand to SEQ ID NO: 1727899
gauaaccuugaguacuucu

SEQ ID NO: 1727901 - RNA, 19 nt, Artificial Sequence
  Description of Artificial Sequence: Synthetic oligonucleotide
  Sense strand starting at position 160 of SEQ ID NO: 1562178
acucaagguuaucuguaca

SEQ ID NO: 1727902 - RNA, 19 nt, Artificial Sequence
  Description of Artificial Sequence: Synthetic oligonucleotide
  Antisense strand to SEQ ID NO: 1727901
uguacagauaaccuugagu

SEQ ID NO: 1727903 - RNA, 19 nt, Artificial Sequence
  Description of Artificial Sequence: Synthetic oligonucleotide
  Sense strand starting at position 165 of SEQ ID NO: 1562178
agguuaucuguacaaauuc

SEQ ID NO: 1727904 - RNA, 19 nt, Artificial Sequence
  Description of Artificial Sequence: Synthetic oligonucleotide
  Antisense strand to SEQ ID NO: 1727903
gaauuuguacagauaaccu

SEQ ID NO: 1727905 - RNA, 19 nt, Artificial Sequence
  Description of Artificial Sequence: Synthetic oligonucleotide
  Sense strand starting at position 303 of SEQ ID NO: 1562178
cugggaggcuucccacaua

SEQ ID NO: 1727906 - RNA, 19 nt, Artificial Sequence
  Description of Artificial Sequence: Synthetic oligonucleotide
  Antisense strand to SEQ ID NO: 1727905
uaugugggaagccucccag

SEQ ID NO: 1727907 - RNA, 19 nt, Artificial Sequence
  Description of Artificial Sequence: Synthetic oligonucleotide
  Sense strand starting at position 557 of SEQ ID NO: 1562178
cgaucucuccgacagggaa

SEQ ID NO: 1727908 - RNA, 19 nt, Artificial Sequence
  Description of Artificial Sequence: Synthetic oligonucleotide
  Antisense strand to SEQ ID NO: 1727907
uucccugucggagagaucg

SEQ ID NO: 1727909 - RNA, 19 nt, Artificial Sequence
  Description of Artificial Sequence: Synthetic oligonucleotide
  Sense strand starting at position 584 of SEQ ID NO: 1562178
gcgucaucacacuaacaau

SEQ ID NO: 1727910 - RNA, 19 nt, Artificial Sequence
  Description of Artificial Sequence: Synthetic oligonucleotide
  Antisense strand to SEQ ID NO: 1727909
auuguuagugugaugacgc

SEQ ID NO: 1727911 - RNA, 19 nt, Artificial Sequence
  Description of Artificial Sequence: Synthetic oligonucleotide
  Sense strand starting at position 1075 of SEQ ID NO: 1562178
cggcuuugugcuccgaacu

SEQ ID NO: 1727912 - RNA, 19 nt, Artificial Sequence
  Description of Artificial Sequence: Synthetic oligonucleotide
  Antisense strand to SEQ ID NO: 1727911
aguucggagcacaaagccg

SEQ ID NO: 1727913 - RNA, 19 nt, Artificial Sequence
  Description of Artificial Sequence: Synthetic oligonucleotide
  Sense strand starting at position 1335 of SEQ ID NO: 1562178
gacagaugccucggagaca

SEQ ID NO: 1727914 - RNA, 19 nt, Artificial Sequence
  Description of Artificial Sequence: Synthetic oligonucleotide
  Antisense strand to SEQ ID NO: 1727913
ugucuccgaggcaucuguc

SEQ ID NO: 1727915 - RNA, 19 nt, Artificial Sequence
  Description of Artificial Sequence: Synthetic oligonucleotide
  Sense strand starting at position 1348 of SEQ ID NO: 1562178
gagacagacuuuccuuugu

SEQ ID NO: 1727916 - RNA, 19 nt, Artificial Sequence
  Description of Artificial Sequence: Synthetic oligonucleotide
  Antisense strand to SEQ ID NO: 1727915
acaaaggaaagucugucuc

SEQ ID NO: 1727917 - RNA, 19 nt, Artificial Sequence
  Description of Artificial Sequence: Synthetic oligonucleotide
  Sense strand starting at position 2365 of SEQ ID NO: 1562178
gugggaacuucugcaaauc

SEQ ID NO: 1727918 - RNA, 19 nt, Artificial Sequence
  Description of Artificial Sequence: Synthetic oligonucleotide
  Antisense strand to SEQ ID NO: 1727917
gauuugcagaaguucccac

SEQ ID NO: 1727919 - RNA, 19 nt, Artificial Sequence
  Description of Artificial Sequence: Synthetic oligonucleotide
  Sense strand starting at position 2431 of SEQ ID NO: 1562178
gcgauuggucccguugcuu

SEQ ID NO: 1727920 - RNA, 19 nt, Artificial Sequence
  Description of Artificial Sequence: Synthetic oligonucleotide
  Antisense strand to SEQ ID NO: 1727919
aagcaacgggaccaaucgc

SEQ ID NO: 1727921 - RNA, 19 nt, Artificial Sequence
  Description of Artificial Sequence: Synthetic oligonucleotide
  Sense strand starting at position 2500 of SEQ ID NO: 1562178
aggacuaggcucugaugga

SEQ ID NO: 1727922 - RNA, 19 nt, Artificial Sequence
  Description of Artificial Sequence: Synthetic oligonucleotide
  Antisense strand to SEQ ID NO: 1727921
uccaucagagccuaguccu

SEQ ID NO: 1727923 - RNA, 19 nt, Artificial Sequence
  Description of Artificial Sequence: Synthetic oligonucleotide
  Sense strand starting at position 2532 of SEQ ID NO: 1562178
accucaauggccuguagaa

SEQ ID NO: 1727924 - RNA, 19 nt, Artificial Sequence
  Description of Artificial Sequence: Synthetic oligonucleotide
  Antisense strand to SEQ ID NO: 1727923
uucuacaggccauugaggu

SEQ ID NO: 1727925 - RNA, 19 nt, Artificial Sequence
  Description of Artificial Sequence: Synthetic oligonucleotide
  Sense strand starting at position 2534 of SEQ ID NO: 1562178
cucaauggccuguagaauc

SEQ ID NO: 1727926 - RNA, 19 nt, Artificial Sequence
  Description of Artificial Sequence: Synthetic oligonucleotide
  Antisense strand to SEQ ID NO: 1727925
gauucuacaggccauugag

SEQ ID NO: 1727927 - RNA, 19 nt, Artificial Sequence
  Description of Artificial Sequence: Synthetic oligonucleotide
  Sense strand starting at position 2664 of SEQ ID NO: 1562178
gugugucaucccgucucau

SEQ ID NO: 1727928 - RNA, 19 nt, Artificial Sequence
  Description of Artificial Sequence: Synthetic oligonucleotide
  Antisense strand to SEQ ID NO: 1727927
augagacgggaugacacac

SEQ ID NO: 1727929 - RNA, 19 nt, Artificial Sequence
  Description of Artificial Sequence: Synthetic oligonucleotide
  Sense strand starting at position 2665 of SEQ ID NO: 1562178
ugugucaucccgucucauc

SEQ ID NO: 1727930 - RNA, 19 nt, Artificial Sequence
  Description of Artificial Sequence: Synthetic oligonucleotide
  Antisense strand to SEQ ID NO: 1727929
gaugagacgggaugacaca

SEQ ID NO: 1727931 - RNA, 19 nt, Artificial Sequence
  Description of Artificial Sequence: Synthetic oligonucleotide
  Sense strand starting at position 2769 of SEQ ID NO: 1562178
acagucaaccgguaucauu

SEQ ID NO: 1727932 - RNA, 19 nt, Artificial Sequence
  Description of Artificial Sequence: Synthetic oligonucleotide
  Antisense strand to SEQ ID NO: 1727931
aaugauaccgguugacugu

SEQ ID NO: 1727933 - RNA, 19 nt, Artificial Sequence
  Description of Artificial Sequence: Synthetic oligonucleotide
  Sense strand starting at position 2806 of SEQ ID NO: 1562178
agugaagccugaucccuua

SEQ ID NO: 1727934 - RNA, 19 nt, Artificial Sequence
  Description of Artificial Sequence: Synthetic oligonucleotide
  Antisense strand to SEQ ID NO: 1727933
uaagggaucaggcuucacu

SEQ ID NO: 1727935 - RNA, 19 nt, Artificial Sequence
  Description of Artificial Sequence: Synthetic oligonucleotide
  Sense strand starting at position 2838 of SEQ ID NO: 1562178
gccuuaaacgaucagucca

SEQ ID NO: 1727936 - RNA, 19 nt, Artificial Sequence
  Description of Artificial Sequence: Synthetic oligonucleotide
  Antisense strand to SEQ ID NO: 1727935
uggacugaucguuuaaggc

SEQ ID NO: 1727937 - RNA, 19 nt, Artificial Sequence
  Description of Artificial Sequence: Synthetic oligonucleotide
  Sense strand starting at position 3054 of SEQ ID NO: 1562178
cacggcuagguccagauau

SEQ ID NO: 1727938 - RNA, 19 nt, Artificial Sequence
  Description of Artificial Sequence: Synthetic oligonucleotide
  Antisense strand to SEQ ID NO: 1727937
auaucuggaccuagccgug

SEQ ID NO: 1727939 - RNA, 19 nt, Artificial Sequence
  Description of Artificial Sequence: Synthetic oligonucleotide
  Sense strand starting at position 3056 of SEQ ID NO: 1562178
cggcuagguccagauaucu

SEQ ID NO: 1727940 - RNA, 19 nt, Artificial Sequence
  Description of Artificial Sequence: Synthetic oligonucleotide
  Antisense strand to SEQ ID NO: 1727939
agauaucuggaccuagccg

SEQ ID NO: 1727941 - RNA, 19 nt, Artificial Sequence
  Description of Artificial Sequence: Synthetic oligonucleotide
  Sense strand starting at position 3125 of SEQ ID NO: 1562178
acccuuuagcaauggagaa

SEQ ID NO: 1727942 - RNA, 19 nt, Artificial Sequence
  Description of Artificial Sequence: Synthetic oligonucleotide
  Antisense strand to SEQ ID NO: 1727941
uucuccauugcuaaagggu

SEQ ID NO: 1727943 - RNA, 19 nt, Artificial Sequence
  Description of Artificial Sequence: Synthetic oligonucleotide
  Sense strand starting at position 3138 of SEQ ID NO: 1562178
ggagaacucuaggaacaaa

SEQ ID NO: 1727944 - RNA, 19 nt, Artificial Sequence
  Description of Artificial Sequence: Synthetic oligonucleotide
  Antisense strand to SEQ ID NO: 1727943
uuuguuccuagaguucucc

SEQ ID NO: 1727945 - RNA, 19 nt, Artificial Sequence
  Description of Artificial Sequence: Synthetic oligonucleotide
  Sense strand starting at position 3185 of SEQ ID NO: 1562178
agccaaucagaaugcugau

SEQ ID NO: 1727946 - RNA, 19 nt, Artificial Sequence
  Description of Artificial Sequence: Synthetic oligonucleotide
  Antisense strand to SEQ ID NO: 1727945
aucagcauucugauuggcu

SEQ ID NO: 1727947 - RNA, 19 nt, Artificial Sequence
  Description of Artificial Sequence: Synthetic oligonucleotide
  Sense strand starting at position 3199 of SEQ ID NO: 1562178
cugauuaaagauuguuaag

SEQ ID NO: 1727948 - RNA, 19 nt, Artificial Sequence
  Description of Artificial Sequence: Synthetic oligonucleotide
  Antisense strand to SEQ ID NO: 1727947
cuuaacaaucuuuaaucag

SEQ ID NO: 1727949 - RNA, 19 nt, Artificial Sequence
  Description of Artificial Sequence: Synthetic oligonucleotide
  Sense strand starting at position 3201 of SEQ ID NO: 1562178
gauuaaagauuguuaaggu

SEQ ID NO: 1727950 - RNA, 19 nt, Artificial Sequence
  Description of Artificial Sequence: Synthetic oligonucleotide
  Antisense strand to SEQ ID NO: 1727949
accuuaacaaucuuuaauc

SEQ ID NO: 1727951 - RNA, 19 nt, Artificial Sequence
  Description of Artificial Sequence: Synthetic oligonucleotide
  Sense strand starting at position 3243 of SEQ ID NO: 1562178
ccagacuuccugcaaaugu

SEQ ID NO: 1727952 - RNA, 19 nt, Artificial Sequence
  Description of Artificial Sequence: Synthetic oligonucleotide
  Antisense strand to SEQ ID NO: 1727951
acauuugcaggaagucugg

SEQ ID NO: 1727953 - RNA, 19 nt, Artificial Sequence
  Description of Artificial Sequence: Synthetic oligonucleotide
  Sense strand starting at position 3426 of SEQ ID NO: 1562178
gguugccuuagguaagaaa

SEQ ID NO: 1727954 - RNA, 19 nt, Artificial Sequence
  Description of Artificial Sequence: Synthetic oligonucleotide
  Antisense strand to SEQ ID NO: 1727953
uuucuuaccuaaggcaacc

SEQ ID NO: 1727955 - RNA, 19 nt, Artificial Sequence
  Description of Artificial Sequence: Synthetic oligonucleotide
  Sense strand starting at position 3458 of SEQ ID NO: 1562178
ggccuuggccucuaggaaa

SEQ ID NO: 1727956 - RNA, 19 nt, Artificial Sequence
  Description of Artificial Sequence: Synthetic oligonucleotide
  Antisense strand to SEQ ID NO: 1727955
uuuccuagaggccaaggcc

SEQ ID NO: 1727957 - RNA, 19 nt, Artificial Sequence
  Description of Artificial Sequence: Synthetic oligonucleotide
  Sense strand starting at position 3727 of SEQ ID NO: 1562178
gcuagaugugguugggaaa

SEQ ID NO: 1727958 - RNA, 19 nt, Artificial Sequence
  Description of Artificial Sequence: Synthetic oligonucleotide
  Antisense strand to SEQ ID NO: 1727957
uuucccaaccacaucuagc

SEQ ID NO: 1727959 - RNA, 19 nt, Artificial Sequence
  Description of Artificial Sequence: Synthetic oligonucleotide
  Sense strand starting at position 3777 of SEQ ID NO: 1562178
accugagagcugcauaaca

SEQ ID NO: 1727960 - RNA, 19 nt, Artificial Sequence
  Description of Artificial Sequence: Synthetic oligonucleotide
  Antisense strand to SEQ ID NO: 1727959
uguuaugcagcucucaggu

SEQ ID NO: 1727961 - RNA, 19 nt, Artificial Sequence
  Description of Artificial Sequence: Synthetic oligonucleotide
  Sense strand starting at position 3779 of SEQ ID NO: 1562178
cugagagcugcauaacaaa

SEQ ID NO: 1727962 - RNA, 19 nt, Artificial Sequence
  Description of Artificial Sequence: Synthetic oligonucleotide
  Antisense strand to SEQ ID NO: 1727961
uuuguuaugcagcucucag

SEQ ID NO: 1727963 - RNA, 19 nt, Artificial Sequence
  Description of Artificial Sequence: Synthetic oligonucleotide
  Sense strand starting at position 3849 of SEQ ID NO: 1562178
cugguagccggucagauuu

SEQ ID NO: 1727964 - RNA, 19 nt, Artificial Sequence
  Description of Artificial Sequence: Synthetic oligonucleotide
  Antisense strand to SEQ ID NO: 1727963
aaaucugaccggcuaccag

SEQ ID NO: 1727965 - RNA, 19 nt, Artificial Sequence
  Description of Artificial Sequence: Synthetic oligonucleotide
  Sense strand starting at position 3903 of SEQ ID NO: 1562178
gcaauuagaguuugagaau

SEQ ID NO: 1727966 - RNA, 19 nt, Artificial Sequence
  Description of Artificial Sequence: Synthetic oligonucleotide
  Antisense strand to SEQ ID NO: 1727965
auucucaaacucuaauugc

SEQ ID NO: 1727967 - RNA, 19 nt, Artificial Sequence
  Description of Artificial Sequence: Synthetic oligonucleotide
  Sense strand starting at position 3915 of SEQ ID NO: 1562178
ugagaauuaccgugucaag

SEQ ID NO: 1727968 - RNA, 19 nt, Artificial Sequence
  Description of Artificial Sequence: Synthetic oligonucleotide
  Antisense strand to SEQ ID NO: 1727967
cuugacacgguaauucuca

SEQ ID NO: 1727969 - RNA, 19 nt, Artificial Sequence
  Description of Artificial Sequence: Synthetic oligonucleotide
  Sense strand starting at position 3964 of SEQ ID NO: 1562178
auguguagauucucuaaga

SEQ ID NO: 1727970 - RNA, 19 nt, Artificial Sequence
  Description of Artificial Sequence: Synthetic oligonucleotide
  Antisense strand to SEQ ID NO: 1727969
ucuuagagaaucuacacau

SEQ ID NO: 1727971 - RNA, 19 nt, Artificial Sequence
  Description of Artificial Sequence: Synthetic oligonucleotide
  Sense strand starting at position 3965 of SEQ ID NO: 1562178
uguguagauucucuaagac

SEQ ID NO: 1727972 - RNA, 19 nt, Artificial Sequence
  Description of Artificial Sequence: Synthetic oligonucleotide
  Antisense strand to SEQ ID NO: 1727971
gucuuagagaaucuacaca

SEQ ID NO: 1727973 - RNA, 19 nt, Artificial Sequence
  Description of Artificial Sequence: Synthetic oligonucleotide
  Sense strand starting at position 163 of SEQ ID NO: 1562179
agaggugagucaucucucu

SEQ ID NO: 1727974 - RNA, 19 nt, Artificial Sequence
  Description of Artificial Sequence: Synthetic oligonucleotide
  Antisense strand to SEQ ID NO: 1727973
agagagaugacucaccucu

SEQ ID NO: 1727975 - RNA, 19 nt, Artificial Sequence
  Description of Artificial Sequence: Synthetic oligonucleotide
  Sense strand starting at position 182 of SEQ ID NO: 1562179
acugguugcuucuuggaca

SEQ ID NO: 1727976 - RNA, 19 nt, Artificial Sequence
  Description of Artificial Sequence: Synthetic oligonucleotide
  Antisense strand to SEQ ID NO: 1727975
uguccaagaagcaaccagu

SEQ ID NO: 1727977 - RNA, 19 nt, Artificial Sequence
  Description of Artificial Sequence: Synthetic oligonucleotide
  Sense strand starting at position 195 of SEQ ID NO: 1562179
uggacauucuccuuuguca

SEQ ID NO: 1727978 - RNA, 19 nt, Artificial Sequence
  Description of Artificial Sequence: Synthetic oligonucleotide
  Antisense strand to SEQ ID NO: 1727977
ugacaaaggagaaugucca

SEQ ID NO: 1727979 - RNA, 19 nt, Artificial Sequence
  Description of Artificial Sequence: Synthetic oligonucleotide
  Sense strand starting at position 218 of SEQ ID NO: 1562179
ccuuuagccugguccuaga

SEQ ID NO: 1727980 - RNA, 19 nt, Artificial Sequence
  Description of Artificial Sequence: Synthetic oligonucleotide
  Antisense strand to SEQ ID NO: 1727979
ucuaggaccaggcuaaagg

SEQ ID NO: 1727981 - RNA, 19 nt, Artificial Sequence
  Description of Artificial Sequence: Synthetic oligonucleotide
  Sense strand starting at position 285 of SEQ ID NO: 1562179
ggcacuguaacuuggacaa

SEQ ID NO: 1727982 - RNA, 19 nt, Artificial Sequence
  Description of Artificial Sequence: Synthetic oligonucleotide
  Antisense strand to SEQ ID NO: 1727981
uuguccaaguuacagugcc

SEQ ID NO: 1727983 - RNA, 19 nt, Artificial Sequence
  Description of Artificial Sequence: Synthetic oligonucleotide
  Sense strand starting at position 779 of SEQ ID NO: 1562179
ggcugaugccaggaucuca

SEQ ID NO: 1727984 - RNA, 19 nt, Artificial Sequence
  Description of Artificial Sequence: Synthetic oligonucleotide
  Antisense strand to SEQ ID NO: 1727983
ugagauccuggcaucagcc

SEQ ID NO: 1727985 - RNA, 19 nt, Artificial Sequence
  Description of Artificial Sequence: Synthetic oligonucleotide
  Sense strand starting at position 1063 of SEQ ID NO: 1562179
gggaucugggcucagugau

SEQ ID NO: 1727986 - RNA, 19 nt, Artificial Sequence
  Description of Artificial Sequence: Synthetic oligonucleotide
  Antisense strand to SEQ ID NO: 1727985
aucacugagcccagauccc

SEQ ID NO: 1727987 - RNA, 19 nt, Artificial Sequence
  Description of Artificial Sequence: Synthetic oligonucleotide
  Sense strand starting at position 1094 of SEQ ID NO: 1562179
ggcugugagaaguacucaa

SEQ ID NO: 1727988 - RNA, 19 nt, Artificial Sequence
  Description of Artificial Sequence: Synthetic oligonucleotide
  Antisense strand to SEQ ID NO: 1727987
uugaguacuucucacagcc

SEQ ID NO: 1727989 - RNA, 19 nt, Artificial Sequence
  Description of Artificial Sequence: Synthetic oligonucleotide
  Sense strand starting at position 1098 of SEQ ID NO: 1562179
gugagaaguacucaagguu

SEQ ID NO: 1727990 - RNA, 19 nt, Artificial Sequence
  Description of Artificial Sequence: Synthetic oligonucleotide
  Antisense strand to SEQ ID NO: 1727989
aaccuugaguacuucucac

SEQ ID NO: 1727991 - RNA, 19 nt, Artificial Sequence
  Description of Artificial Sequence: Synthetic oligonucleotide
  Sense strand starting at position 1101 of SEQ ID NO: 1562179
agaaguacucaagguuauc

SEQ ID NO: 1727992 - RNA, 19 nt, Artificial Sequence
  Description of Artificial Sequence: Synthetic oligonucleotide
  Antisense strand to SEQ ID NO: 1727991
gauaaccuugaguacuucu

SEQ ID NO: 1727993 - RNA, 19 nt, Artificial Sequence
  Description of Artificial Sequence: Synthetic oligonucleotide
  Sense strand starting at position 1107 of SEQ ID NO: 1562179
acucaagguuaucuguaca

SEQ ID NO: 1727994 - RNA, 19 nt, Artificial Sequence
  Description of Artificial Sequence: Synthetic oligonucleotide
  Antisense strand to SEQ ID NO: 1727993
uguacagauaaccuugagu

SEQ ID NO: 1727995 - RNA, 19 nt, Artificial Sequence
  Description of Artificial Sequence: Synthetic oligonucleotide
  Sense strand starting at position 1112 of SEQ ID NO: 1562179
agguuaucuguacaaauuc

SEQ ID NO: 1727996 - RNA, 19 nt, Artificial Sequence
  Description of Artificial Sequence: Synthetic oligonucleotide
  Antisense strand to SEQ ID NO: 1727995
gaauuuguacagauaaccu

SEQ ID NO: 1727997 - RNA, 19 nt, Artificial Sequence
  Description of Artificial Sequence: Synthetic oligonucleotide
  Sense strand starting at position 1250 of SEQ ID NO: 1562179
cugggaggcuucccacaua

SEQ ID NO: 1727998 - RNA, 19 nt, Artificial Sequence
  Description of Artificial Sequence: Synthetic oligonucleotide
  Antisense strand to SEQ ID NO: 1727997
uaugugggaagccucccag

SEQ ID NO: 1727999 - RNA, 19 nt, Artificial Sequence
  Description of Artificial Sequence: Synthetic oligonucleotide
  Sense strand starting at position 1504 of SEQ ID NO: 1562179
cgaucucuccgacagggaa

SEQ ID NO: 1728000 - RNA, 19 nt, Artificial Sequence
  Description of Artificial Sequence: Synthetic oligonucleotide
  Antisense strand to SEQ ID NO: 1727999
uucccugucggagagaucg

SEQ ID NO: 1728001 - RNA, 19 nt, Artificial Sequence
  Description of Artificial Sequence: Synthetic oligonucleotide
  Sense strand starting at position 1531 of SEQ ID NO: 1562179
gcgucaucacacuaacaau

SEQ ID NO: 1728002 - RNA, 19 nt, Artificial Sequence
  Description of Artificial Sequence: Synthetic oligonucleotide
  Antisense strand to SEQ ID NO: 1728001
auuguuagugugaugacgc

SEQ ID NO: 1728003 - RNA, 19 nt, Artificial Sequence
  Description of Artificial Sequence: Synthetic oligonucleotide
  Sense strand starting at position 1646 of SEQ ID NO: 1562179
gcacgaacuuucugacaac

SEQ ID NO: 1728004 - RNA, 19 nt, Artificial Sequence
  Description of Artificial Sequence: Synthetic oligonucleotide
  Antisense strand to SEQ ID NO: 1728003
guugucagaaaguucgugc

SEQ ID NO: 1728005 - RNA, 19 nt, Artificial Sequence
  Description of Artificial Sequence: Synthetic oligonucleotide
  Sense strand starting at position 2022 of SEQ ID NO: 1562179
cggcuuugugcuccgaacu

SEQ ID NO: 1728006 - RNA, 19 nt, Artificial Sequence
  Description of Artificial Sequence: Synthetic oligonucleotide
  Antisense strand to SEQ ID NO: 1728005
aguucggagcacaaagccg

SEQ ID NO: 1728007 - RNA, 19 nt, Artificial Sequence
  Description of Artificial Sequence: Synthetic oligonucleotide
  Sense strand starting at position 2282 of SEQ ID NO: 1562179
gacagaugccucggagaca

SEQ ID NO: 1728008 - RNA, 19 nt, Artificial Sequence
  Description of Artificial Sequence: Synthetic oligonucleotide
  Antisense strand to SEQ ID NO: 1728007
ugucuccgaggcaucuguc

SEQ ID NO: 1728009 - RNA, 19 nt, Artificial Sequence
  Description of Artificial Sequence: Synthetic oligonucleotide
  Sense strand starting at position 2295 of SEQ ID NO: 1562179
gagacagacuuuccuuugu

SEQ ID NO: 1728010 - RNA, 19 nt, Artificial Sequence
  Description of Artificial Sequence: Synthetic oligonucleotide
  Antisense strand to SEQ ID NO: 1728009
acaaaggaaagucugucuc

SEQ ID NO: 1728011 - RNA, 19 nt, Artificial Sequence
  Description of Artificial Sequence: Synthetic oligonucleotide
  Sense strand starting at position 3312 of SEQ ID NO: 1562179
gugggaacuucugcaaauc

SEQ ID NO: 1728012 - RNA, 19 nt, Artificial Sequence
  Description of Artificial Sequence: Synthetic oligonucleotide
  Antisense strand to SEQ ID NO: 1728011
gauuugcagaaguucccac

SEQ ID NO: 1728013 - RNA, 19 nt, Artificial Sequence
  Description of Artificial Sequence: Synthetic oligonucleotide
  Sense strand starting at position 3378 of SEQ ID NO: 1562179
gcgauuggucccguugcuu

SEQ ID NO: 1728014 - RNA, 19 nt, Artificial Sequence
  Description of Artificial Sequence: Synthetic oligonucleotide
  Antisense strand to SEQ ID NO: 1728013
aagcaacgggaccaaucgc

SEQ ID NO: 1728015 - RNA, 19 nt, Artificial Sequence
  Description of Artificial Sequence: Synthetic oligonucleotide
  Sense strand starting at position 3447 of SEQ ID NO: 1562179
aggacuaggcucugaugga

SEQ ID NO: 1728016 - RNA, 19 nt, Artificial Sequence
  Description of Artificial Sequence: Synthetic oligonucleotide
  Antisense strand to SEQ ID NO: 1728015
uccaucagagccuaguccu

SEQ ID NO: 1728017 - RNA, 19 nt, Artificial Sequence
  Description of Artificial Sequence: Synthetic oligonucleotide
  Sense strand starting at position 3479 of SEQ ID NO: 1562179
accucaauggccuguagaa

SEQ ID NO: 1728018 - RNA, 19 nt, Artificial Sequence
  Description of Artificial Sequence: Synthetic oligonucleotide
  Antisense strand to SEQ ID NO: 1728017
uucuacaggccauugaggu

SEQ ID NO: 1728019 - RNA, 19 nt, Artificial Sequence
  Description of Artificial Sequence: Synthetic oligonucleotide
  Sense strand starting at position 3481 of SEQ ID NO: 1562179
cucaauggccuguagaauc

SEQ ID NO: 1728020 - RNA, 19 nt, Artificial Sequence
  Description of Artificial Sequence: Synthetic oligonucleotide
  Antisense strand to SEQ ID NO: 1728019
gauucuacaggccauugag

SEQ ID NO: 1728021 - RNA, 19 nt, Artificial Sequence
  Description of Artificial Sequence: Synthetic oligonucleotide
  Sense strand starting at position 3611 of SEQ ID NO: 1562179
gugugucaucccgucucau

SEQ ID NO: 1728022 - RNA, 19 nt, Artificial Sequence
  Description of Artificial Sequence: Synthetic oligonucleotide
  Antisense strand to SEQ ID NO: 1728021
augagacgggaugacacac

SEQ ID NO: 1728023 - RNA, 19 nt, Artificial Sequence
  Description of Artificial Sequence: Synthetic oligonucleotide
  Sense strand starting at position 3612 of SEQ ID NO: 1562179
ugugucaucccgucucauc

SEQ ID NO: 1728024 - RNA, 19 nt, Artificial Sequence
  Description of Artificial Sequence: Synthetic oligonucleotide
  Antisense strand to SEQ ID NO: 1728023
gaugagacgggaugacaca

SEQ ID NO: 1728025 - RNA, 19 nt, Artificial Sequence
  Description of Artificial Sequence: Synthetic oligonucleotide
  Sense strand starting at position 3622 of SEQ ID NO: 1562179
cgucucauccucgggugau

SEQ ID NO: 1728026 - RNA, 19 nt, Artificial Sequence
  Description of Artificial Sequence: Synthetic oligonucleotide
  Antisense strand to SEQ ID NO: 1728025
aucacccgaggaugagacg

SEQ ID NO: 1728027 - RNA, 19 nt, Artificial Sequence
  Description of Artificial Sequence: Synthetic oligonucleotide
  Sense strand starting at position 3642 of SEQ ID NO: 1562179
ggguauguguuguccuaug

SEQ ID NO: 1728028 - RNA, 19 nt, Artificial Sequence
  Description of Artificial Sequence: Synthetic oligonucleotide
  Antisense strand to SEQ ID NO: 1728027
cauaggacaacacauaccc

SEQ ID NO: 1728029 - RNA, 19 nt, Artificial Sequence
  Description of Artificial Sequence: Synthetic oligonucleotide
  Sense strand starting at position 3647 of SEQ ID NO: 1562179
uguguuguccuauguaagu

SEQ ID NO: 1728030 - RNA, 19 nt, Artificial Sequence
  Description of Artificial Sequence: Synthetic oligonucleotide
  Antisense strand to SEQ ID NO: 1728029
acuuacauaggacaacaca

SEQ ID NO: 1728031 - RNA, 19 nt, Artificial Sequence
  Description of Artificial Sequence: Synthetic oligonucleotide
  Sense strand starting at position 3657 of SEQ ID NO: 1562179
uauguaagucucuggcuua

SEQ ID NO: 1728032 - RNA, 19 nt, Artificial Sequence
  Description of Artificial Sequence: Synthetic oligonucleotide
  Antisense strand to SEQ ID NO: 1728031
uaagccagagacuuacaua

SEQ ID NO: 1728033 - RNA, 19 nt, Artificial Sequence
  Description of Artificial Sequence: Synthetic oligonucleotide
  Sense strand starting at position 3716 of SEQ ID NO: 1562179
acagucaaccgguaucauu

SEQ ID NO: 1728034 - RNA, 19 nt, Artificial Sequence
  Description of Artificial Sequence: Synthetic oligonucleotide
  Antisense strand to SEQ ID NO: 1728033
aaugauaccgguugacugu

SEQ ID NO: 1728035 - RNA, 19 nt, Artificial Sequence
  Description of Artificial Sequence: Synthetic oligonucleotide
  Sense strand starting at position 3740 of SEQ ID NO: 1562179
caggucggucgauagugaa

SEQ ID NO: 1728036 - RNA, 19 nt, Artificial Sequence
  Description of Artificial Sequence: Synthetic oligonucleotide
  Antisense strand to SEQ ID NO: 1728035
uucacuaucgaccgaccug

SEQ ID NO: 1728037 - RNA, 19 nt, Artificial Sequence
  Description of Artificial Sequence: Synthetic oligonucleotide
  Sense strand starting at position 3746 of SEQ ID NO: 1562179
ggucgauagugaagccuga

SEQ ID NO: 1728038 - RNA, 19 nt, Artificial Sequence
  Description of Artificial Sequence: Synthetic oligonucleotide
  Antisense strand to SEQ ID NO: 1728037
ucaggcuucacuaucgacc

SEQ ID NO: 1728039 - RNA, 19 nt, Artificial Sequence
  Description of Artificial Sequence: Synthetic oligonucleotide
  Sense strand starting at position 3753 of SEQ ID NO: 1562179
agugaagccugaucccuua

SEQ ID NO: 1728040 - RNA, 19 nt, Artificial Sequence
  Description of Artificial Sequence: Synthetic oligonucleotide
  Antisense strand to SEQ ID NO: 1728039
uaagggaucaggcuucacu

SEQ ID NO: 1728041 - RNA, 19 nt, Artificial Sequence
  Description of Artificial Sequence: Synthetic oligonucleotide
  Sense strand starting at position 3785 of SEQ ID NO: 1562179
gccuuaaacgaucagucca

SEQ ID NO: 1728042 - RNA, 19 nt, Artificial Sequence
  Description of Artificial Sequence: Synthetic oligonucleotide
  Antisense strand to SEQ ID NO: 1728041
uggacugaucguuuaaggc

SEQ ID NO: 1728043 - RNA, 19 nt, Artificial Sequence
  Description of Artificial Sequence: Synthetic oligonucleotide
  Sense strand starting at position 3812 of SEQ ID NO: 1562179
cggaguuccugucugguuu

SEQ ID NO: 1728044 - RNA, 19 nt, Artificial Sequence
  Description of Artificial Sequence: Synthetic oligonucleotide
  Antisense strand to SEQ ID NO: 1728043
aaaccagacaggaacuccg

SEQ ID NO: 1728045 - RNA, 19 nt, Artificial Sequence
  Description of Artificial Sequence: Synthetic oligonucleotide
  Sense strand starting at position 3925 of SEQ ID NO: 1562179
gguaccacauacugugaua

SEQ ID NO: 1728046 - RNA, 19 nt, Artificial Sequence
  Description of Artificial Sequence: Synthetic oligonucleotide
  Antisense strand to SEQ ID NO: 1728045
uaucacaguaugugguacc

SEQ ID NO: 1728047 - RNA, 19 nt, Artificial Sequence
  Description of Artificial Sequence: Synthetic oligonucleotide
  Sense strand starting at position 3928 of SEQ ID NO: 1562179
accacauacugugauauuu

SEQ ID NO: 1728048 - RNA, 19 nt, Artificial Sequence
  Description of Artificial Sequence: Synthetic oligonucleotide
  Antisense strand to SEQ ID NO: 1728047
aaauaucacaguauguggu

SEQ ID NO: 1728049 - RNA, 19 nt, Artificial Sequence
  Description of Artificial Sequence: Synthetic oligonucleotide
  Sense strand starting at position 3936 of SEQ ID NO: 1562179
cugugauauuucuguuaac

SEQ ID NO: 1728050 - RNA, 19 nt, Artificial Sequence
  Description of Artificial Sequence: Synthetic oligonucleotide
  Antisense strand to SEQ ID NO: 1728049
guuaacagaaauaucacag

SEQ ID NO: 1728051 - RNA, 19 nt, Artificial Sequence
  Description of Artificial Sequence: Synthetic oligonucleotide
  Sense strand starting at position 3939 of SEQ ID NO: 1562179
ugauauuucuguuaaccag

SEQ ID NO: 1728052 - RNA, 19 nt, Artificial Sequence
  Description of Artificial Sequence: Synthetic oligonucleotide
  Antisense strand to SEQ ID NO: 1728051
cugguuaacagaaauauca

SEQ ID NO: 1728053 - RNA, 19 nt, Artificial Sequence
  Description of Artificial Sequence: Synthetic oligonucleotide
  Sense strand starting at position 112 of SEQ ID NO: 1562180
guaugugaauuaucucgac

SEQ ID NO: 1728054 - RNA, 19 nt, Artificial Sequence
  Description of Artificial Sequence: Synthetic oligonucleotide
  Antisense strand to SEQ ID NO: 1728053
gucgagauaauucacauac

SEQ ID NO: 1728055 - RNA, 19 nt, Artificial Sequence
  Description of Artificial Sequence: Synthetic oligonucleotide
  Sense strand starting at position 116 of SEQ ID NO: 1562180
gugaauuaucucgacuuaa

SEQ ID NO: 1728056 - RNA, 19 nt, Artificial Sequence
  Description of Artificial Sequence: Synthetic oligonucleotide
  Antisense strand to SEQ ID NO: 1728055
uuaagucgagauaauucac

SEQ ID NO: 1728057 - RNA, 19 nt, Artificial Sequence
  Description of Artificial Sequence: Synthetic oligonucleotide
  Sense strand starting at position 241 of SEQ ID NO: 1562180
aauccagagcuguaggauu

SEQ ID NO: 1728058 - RNA, 19 nt, Artificial Sequence
  Description of Artificial Sequence: Synthetic oligonucleotide
  Antisense strand to SEQ ID NO: 1728057
aauccuacagcucuggauu

SEQ ID NO: 1728059 - RNA, 19 nt, Artificial Sequence
  Description of Artificial Sequence: Synthetic oligonucleotide
  Sense strand starting at position 262 of SEQ ID NO: 1562180
guaggauucugcccuggga

SEQ ID NO: 1728060 - RNA, 19 nt, Artificial Sequence
  Description of Artificial Sequence: Synthetic oligonucleotide
  Antisense strand to SEQ ID NO: 1728059
ucccagggcagaauccuac

SEQ ID NO: 1728061 - RNA, 19 nt, Artificial Sequence
  Description of Artificial Sequence: Synthetic oligonucleotide
  Sense strand starting at position 264 of SEQ ID NO: 1562180
aggauucugcccugggaac

SEQ ID NO: 1728062 - RNA, 19 nt, Artificial Sequence
  Description of Artificial Sequence: Synthetic oligonucleotide
  Antisense strand to SEQ ID NO: 1728061
guucccagggcagaauccu

SEQ ID NO: 1728063 - RNA, 19 nt, Artificial Sequence
  Description of Artificial Sequence: Synthetic oligonucleotide
  Sense strand starting at position 509 of SEQ ID NO: 1562180
ggagcuugagcaggaaaga

SEQ ID NO: 1728064 - RNA, 19 nt, Artificial Sequence
  Description of Artificial Sequence: Synthetic oligonucleotide
  Antisense strand to SEQ ID NO: 1728063
ucuuuccugcucaagcucc

SEQ ID NO: 1728065 - RNA, 19 nt, Artificial Sequence
  Description of Artificial Sequence: Synthetic oligonucleotide
  Sense strand starting at position 522 of SEQ ID NO: 1562180
gaaagaggccauuguuguu

SEQ ID NO: 1728066 - RNA, 19 nt, Artificial Sequence
  Description of Artificial Sequence: Synthetic oligonucleotide
  Antisense strand to SEQ ID NO: 1728065
aacaacaauggccucuuuc

SEQ ID NO: 1728067 - RNA, 19 nt, Artificial Sequence
  Description of Artificial Sequence: Synthetic oligonucleotide
  Sense strand starting at position 534 of SEQ ID NO: 1562180
uguuguucccauggaagac

SEQ ID NO: 1728068 - RNA, 19 nt, Artificial Sequence
  Description of Artificial Sequence: Synthetic oligonucleotide
  Antisense strand to SEQ ID NO: 1728067
gucuuccaugggaacaaca

SEQ ID NO: 1728069 - RNA, 19 nt, Artificial Sequence
  Description of Artificial Sequence: Synthetic oligonucleotide
  Sense strand starting at position 600 of SEQ ID NO: 1562180
uccaucuguuguccgaaga

SEQ ID NO: 1728070 - RNA, 19 nt, Artificial Sequence
  Description of Artificial Sequence: Synthetic oligonucleotide
  Antisense strand to SEQ ID NO: 1728069
ucuucggacaacagaugga

SEQ ID NO: 1728071 - RNA, 19 nt, Artificial Sequence
  Description of Artificial Sequence: Synthetic oligonucleotide
  Sense strand starting at position 601 of SEQ ID NO: 1562180
ccaucuguuguccgaagaa

SEQ ID NO: 1728072 - RNA, 19 nt, Artificial Sequence
  Description of Artificial Sequence: Synthetic oligonucleotide
  Antisense strand to SEQ ID NO: 1728071
uucuucggacaacagaugg

SEQ ID NO: 1728073 - RNA, 19 nt, Artificial Sequence
  Description of Artificial Sequence: Synthetic oligonucleotide
  Sense strand starting at position 650 of SEQ ID NO: 1562180
gaugcaggucuagaauugu

SEQ ID NO: 1728074 - RNA, 19 nt, Artificial Sequence
  Description of Artificial Sequence: Synthetic oligonucleotide
  Antisense strand to SEQ ID NO: 1728073
acaauucuagaccugcauc

SEQ ID NO: 1728075 - RNA, 19 nt, Artificial Sequence
  Description of Artificial Sequence: Synthetic oligonucleotide
  Sense strand starting at position 654 of SEQ ID NO: 1562180
caggucuagaauuguagga

SEQ ID NO: 1728076 - RNA, 19 nt, Artificial Sequence
  Description of Artificial Sequence: Synthetic oligonucleotide
  Antisense strand to SEQ ID NO: 1728075
uccuacaauucuagaccug

SEQ ID NO: 1728077 - RNA, 19 nt, Artificial Sequence
  Description of Artificial Sequence: Synthetic oligonucleotide
  Sense strand starting at position 659 of SEQ ID NO: 1562180
cuagaauuguaggauuuau

SEQ ID NO: 1728078 - RNA, 19 nt, Artificial Sequence
  Description of Artificial Sequence: Synthetic oligonucleotide
  Antisense strand to SEQ ID NO: 1728077
auaaauccuacaauucuag

SEQ ID NO: 1728079 - RNA, 19 nt, Artificial Sequence
  Description of Artificial Sequence: Synthetic oligonucleotide
  Sense strand starting at position 733 of SEQ ID NO: 1562180
agaaguggccacugugaca

SEQ ID NO: 1728080 - RNA, 19 nt, Artificial Sequence
  Description of Artificial Sequence: Synthetic oligonucleotide
  Antisense strand to SEQ ID NO: 1728079
ugucacaguggccacuucu

SEQ ID NO: 1728081 - RNA, 19 nt, Artificial Sequence
  Description of Artificial Sequence: Synthetic oligonucleotide
  Sense strand starting at position 756 of SEQ ID NO: 1562180
gcuggaggcucaucauaac

SEQ ID NO: 1728082 - RNA, 19 nt, Artificial Sequence
  Description of Artificial Sequence: Synthetic oligonucleotide
  Antisense strand to SEQ ID NO: 1728081
guuaugaugagccuccagc

SEQ ID NO: 1728083 - RNA, 19 nt, Artificial Sequence
  Description of Artificial Sequence: Synthetic oligonucleotide
  Sense strand starting at position 1076 of SEQ ID NO: 1562180
agugacauccuccauugua

SEQ ID NO: 1728084 - RNA, 19 nt, Artificial Sequence
  Description of Artificial Sequence: Synthetic oligonucleotide
  Antisense strand to SEQ ID NO: 1728083
uacaauggaggaugucacu

SEQ ID NO: 1728085 - RNA, 19 nt, Artificial Sequence
  Description of Artificial Sequence: Synthetic oligonucleotide
  Sense strand starting at position 1117 of SEQ ID NO: 1562180
acgagagugcugcuugugu

SEQ ID NO: 1728086 - RNA, 19 nt, Artificial Sequence
  Description of Artificial Sequence: Synthetic oligonucleotide
  Antisense strand to SEQ ID NO: 1728085
acacaagcagcacucucgu

SEQ ID NO: 1728087 - RNA, 19 nt, Artificial Sequence
  Description of Artificial Sequence: Synthetic oligonucleotide
  Sense strand starting at position 1190 of SEQ ID NO: 1562180
ccucucguuccucacagau

SEQ ID NO: 1728088 - RNA, 19 nt, Artificial Sequence
  Description of Artificial Sequence: Synthetic oligonucleotide
  Antisense strand to SEQ ID NO: 1728087
aucugugaggaacgagagg

SEQ ID NO: 1728089 - RNA, 19 nt, Artificial Sequence
  Description of Artificial Sequence: Synthetic oligonucleotide
  Sense strand starting at position 1309 of SEQ ID NO: 1562180
aggacacuguuguccuuau

SEQ ID NO: 1728090 - RNA, 19 nt, Artificial Sequence
  Description of Artificial Sequence: Synthetic oligonucleotide
  Antisense strand to SEQ ID NO: 1728089
auaaggacaacaguguccu

SEQ ID NO: 1728091 - RNA, 19 nt, Artificial Sequence
  Description of Artificial Sequence: Synthetic oligonucleotide
  Sense strand starting at position 1310 of SEQ ID NO: 1562180
ggacacuguuguccuuauu

SEQ ID NO: 1728092 - RNA, 19 nt, Artificial Sequence
  Description of Artificial Sequence: Synthetic oligonucleotide
  Antisense strand to SEQ ID NO: 1728091
aauaaggacaacagugucc

SEQ ID NO: 1728093 - RNA, 19 nt, Artificial Sequence
  Description of Artificial Sequence: Synthetic oligonucleotide
  Sense strand starting at position 1695 of SEQ ID NO: 1562180
cagggaggcaaggguuaau

SEQ ID NO: 1728094 - RNA, 19 nt, Artificial Sequence
  Description of Artificial Sequence: Synthetic oligonucleotide
  Antisense strand to SEQ ID NO: 1728093
auuaacccuugccucccug

SEQ ID NO: 1728095 - RNA, 19 nt, Artificial Sequence
  Description of Artificial Sequence: Synthetic oligonucleotide
  Sense strand starting at position 1704 of SEQ ID NO: 1562180
aaggguuaaugguuaugca

SEQ ID NO: 1728096 - RNA, 19 nt, Artificial Sequence
  Description of Artificial Sequence: Synthetic oligonucleotide
  Antisense strand to SEQ ID NO: 1728095
ugcauaaccauuaacccuu

SEQ ID NO: 1728097 - RNA, 19 nt, Artificial Sequence
  Description of Artificial Sequence: Synthetic oligonucleotide
  Sense strand starting at position 2591 of SEQ ID NO: 1562180
auagauacagccugacaca

SEQ ID NO: 1728098 - RNA, 19 nt, Artificial Sequence
  Description of Artificial Sequence: Synthetic oligonucleotide
  Antisense strand to SEQ ID NO: 1728097
ugugucaggcuguaucuau

SEQ ID NO: 1728099 - RNA, 19 nt, Artificial Sequence
  Description of Artificial Sequence: Synthetic oligonucleotide
  Sense strand starting at position 2847 of SEQ ID NO: 1562180
ugucccuuccuguagcaaa

SEQ ID NO: 1728100 - RNA, 19 nt, Artificial Sequence
  Description of Artificial Sequence: Synthetic oligonucleotide
  Antisense strand to SEQ ID NO: 1728099
uuugcuacaggaagggaca

SEQ ID NO: 1728101 - RNA, 19 nt, Artificial Sequence
  Description of Artificial Sequence: Synthetic oligonucleotide
  Sense strand starting at position 2867 of SEQ ID NO: 1562180
cccagauaauccuccgauc

SEQ ID NO: 1728102 - RNA, 19 nt, Artificial Sequence
  Description of Artificial Sequence: Synthetic oligonucleotide
  Antisense strand to SEQ ID NO: 1728101
gaucggaggauuaucuggg

SEQ ID NO: 1728103 - RNA, 19 nt, Artificial Sequence
  Description of Artificial Sequence: Synthetic oligonucleotide
  Sense strand starting at position 2892 of SEQ ID NO: 1562180
auccuuguaucugucuaau

SEQ ID NO: 1728104 - RNA, 19 nt, Artificial Sequence
  Description of Artificial Sequence: Synthetic oligonucleotide
  Antisense strand to SEQ ID NO: 1728103
auuagacagauacaaggau

SEQ ID NO: 1728105 - RNA, 19 nt, Artificial Sequence
  Description of Artificial Sequence: Synthetic oligonucleotide
  Sense strand starting at position 2894 of SEQ ID NO: 1562180
ccuuguaucugucuaauca

SEQ ID NO: 1728106 - RNA, 19 nt, Artificial Sequence
  Description of Artificial Sequence: Synthetic oligonucleotide
  Antisense strand to SEQ ID NO: 1728105
ugauuagacagauacaagg

SEQ ID NO: 1728107 - RNA, 19 nt, Artificial Sequence
  Description of Artificial Sequence: Synthetic oligonucleotide
  Sense strand starting at position 2895 of SEQ ID NO: 1562180
cuuguaucugucuaaucag

SEQ ID NO: 1728108 - RNA, 19 nt, Artificial Sequence
  Description of Artificial Sequence: Synthetic oligonucleotide
  Antisense strand to SEQ ID NO: 1728107
cugauuagacagauacaag

SEQ ID NO: 1728109 - RNA, 19 nt, Artificial Sequence
  Description of Artificial Sequence: Synthetic oligonucleotide
  Sense strand starting at position 3100 of SEQ ID NO: 1562180
cuaacuuuccagggacuca

SEQ ID NO: 1728110 - RNA, 19 nt, Artificial Sequence
  Description of Artificial Sequence: Synthetic oligonucleotide
  Antisense strand to SEQ ID NO: 1728109
ugagucccuggaaaguuag

SEQ ID NO: 1728111 - RNA, 19 nt, Artificial Sequence
  Description of Artificial Sequence: Synthetic oligonucleotide
  Sense strand starting at position 3223 of SEQ ID NO: 1562180
ggaaggguucccggagaga

SEQ ID NO: 1728112 - RNA, 19 nt, Artificial Sequence
  Description of Artificial Sequence: Synthetic oligonucleotide
  Antisense strand to SEQ ID NO: 1728111
ucucuccgggaacccuucc

SEQ ID NO: 1728113 - RNA, 19 nt, Artificial Sequence
  Description of Artificial Sequence: Synthetic oligonucleotide
  Sense strand starting at position 3351 of SEQ ID NO: 1562180
auugaugaauuuggaagau

SEQ ID NO: 1728114 - RNA, 19 nt, Artificial Sequence
  Description of Artificial Sequence: Synthetic oligonucleotide
  Antisense strand to SEQ ID NO: 1728113
aucuuccaaauucaucaau

SEQ ID NO: 1728115 - RNA, 19 nt, Artificial Sequence
  Description of Artificial Sequence: Synthetic oligonucleotide
  Sense strand starting at position 3384 of SEQ ID NO: 1562180
ucuccauuccuaggugaca

SEQ ID NO: 1728116 - RNA, 19 nt, Artificial Sequence
  Description of Artificial Sequence: Synthetic oligonucleotide
  Antisense strand to SEQ ID NO: 1728115
ugucaccuaggaauggaga

SEQ ID NO: 1728117 - RNA, 19 nt, Artificial Sequence
  Description of Artificial Sequence: Synthetic oligonucleotide
  Sense strand starting at position 3385 of SEQ ID NO: 1562180
cuccauuccuaggugacau

SEQ ID NO: 1728118 - RNA, 19 nt, Artificial Sequence
  Description of Artificial Sequence: Synthetic oligonucleotide
  Antisense strand to SEQ ID NO: 1728117
augucaccuaggaauggag

SEQ ID NO: 1728119 - RNA, 19 nt, Artificial Sequence
  Description of Artificial Sequence: Synthetic oligonucleotide
  Sense strand starting at position 3387 of SEQ ID NO: 1562180
ccauuccuaggugacauau

SEQ ID NO: 1728120 - RNA, 19 nt, Artificial Sequence
  Description of Artificial Sequence: Synthetic oligonucleotide
  Antisense strand to SEQ ID NO: 1728119
auaugucaccuaggaaugg

SEQ ID NO: 1728121 - RNA, 19 nt, Artificial Sequence
  Description of Artificial Sequence: Synthetic oligonucleotide
  Sense strand starting at position 3469 of SEQ ID NO: 1562180
gcuggagucucagugaaca

SEQ ID NO: 1728122 - RNA, 19 nt, Artificial Sequence
  Description of Artificial Sequence: Synthetic oligonucleotide
  Antisense strand to SEQ ID NO: 1728121
uguucacugagacuccagc

SEQ ID NO: 1728123 - RNA, 19 nt, Artificial Sequence
  Description of Artificial Sequence: Synthetic oligonucleotide
  Sense strand starting at position 3498 of SEQ ID NO: 1562180
gaguguugggcccagcuga

SEQ ID NO: 1728124 - RNA, 19 nt, Artificial Sequence
  Description of Artificial Sequence: Synthetic oligonucleotide
  Antisense strand to SEQ ID NO: 1728123
ucagcugggcccaacacuc

SEQ ID NO: 1728125 - RNA, 19 nt, Artificial Sequence
  Description of Artificial Sequence: Synthetic oligonucleotide
  Sense strand starting at position 3569 of SEQ ID NO: 1562180
uggugaaagcuuggaggaa

SEQ ID NO: 1728126 - RNA, 19 nt, Artificial Sequence
  Description of Artificial Sequence: Synthetic oligonucleotide
  Antisense strand to SEQ ID NO: 1728125
uuccuccaagcuuucacca

SEQ ID NO: 1728127 - RNA, 19 nt, Artificial Sequence
  Description of Artificial Sequence: Synthetic oligonucleotide
  Sense strand starting at position 3599 of SEQ ID NO: 1562180
aggagaaucacccgaccga

SEQ ID NO: 1728128 - RNA, 19 nt, Artificial Sequence
  Description of Artificial Sequence: Synthetic oligonucleotide
  Antisense strand to SEQ ID NO: 1728127
ucggucgggugauucuccu

SEQ ID NO: 1728129 - RNA, 19 nt, Artificial Sequence
  Description of Artificial Sequence: Synthetic oligonucleotide
  Sense strand starting at position 3899 of SEQ ID NO: 1562180
cagucaguucugcagaaca

SEQ ID NO: 1728130 - RNA, 19 nt, Artificial Sequence
  Description of Artificial Sequence: Synthetic oligonucleotide
  Antisense strand to SEQ ID NO: 1728129
uguucugcagaacugacug

SEQ ID NO: 1728131 - RNA, 19 nt, Artificial Sequence
  Description of Artificial Sequence: Synthetic oligonucleotide
  Sense strand starting at position 3901 of SEQ ID NO: 1562180
gucaguucugcagaacaaa

SEQ ID NO: 1728132 - RNA, 19 nt, Artificial Sequence
  Description of Artificial Sequence: Synthetic oligonucleotide
  Antisense strand to SEQ ID NO: 1728131
uuuguucugcagaacugac

SEQ ID NO: 1728133 - RNA, 19 nt, Artificial Sequence
  Description of Artificial Sequence: Synthetic oligonucleotide
  Sense strand starting at position 22 of SEQ ID NO: 1562181
ugucaugcagcuuaauaac

SEQ ID NO: 1728134 - RNA, 19 nt, Artificial Sequence
  Description of Artificial Sequence: Synthetic oligonucleotide
  Antisense strand to SEQ ID NO: 1728133
guuauuaagcugcaugaca

SEQ ID NO: 1728135 - RNA, 19 nt, Artificial Sequence
  Description of Artificial Sequence: Synthetic oligonucleotide
  Sense strand starting at position 219 of SEQ ID NO: 1562181
gaacuuccuggcugaguga

SEQ ID NO: 1728136 - RNA, 19 nt, Artificial Sequence
  Description of Artificial Sequence: Synthetic oligonucleotide
  Antisense strand to SEQ ID NO: 1728135
ucacucagccaggaaguuc

SEQ ID NO: 1728137 - RNA, 19 nt, Artificial Sequence
  Description of Artificial Sequence: Synthetic oligonucleotide
  Sense strand starting at position 358 of SEQ ID NO: 1562181
uuagaacaucucugguugu

SEQ ID NO: 1728138 - RNA, 19 nt, Artificial Sequence
  Description of Artificial Sequence: Synthetic oligonucleotide
  Antisense strand to SEQ ID NO: 1728137
acaaccagagauguucuaa

SEQ ID NO: 1728139 - RNA, 19 nt, Artificial Sequence
  Description of Artificial Sequence: Synthetic oligonucleotide
  Sense strand starting at position 361 of SEQ ID NO: 1562181
gaacaucucugguuguuaa

SEQ ID NO: 1728140 - RNA, 19 nt, Artificial Sequence
  Description of Artificial Sequence: Synthetic oligonucleotide
  Antisense strand to SEQ ID NO: 1728139
uuaacaaccagagauguuc

SEQ ID NO: 1728141 - RNA, 19 nt, Artificial Sequence
  Description of Artificial Sequence: Synthetic oligonucleotide
  Sense strand starting at position 614 of SEQ ID NO: 1562181
acaagcaguuggucacaaa

SEQ ID NO: 1728142 - RNA, 19 nt, Artificial Sequence
  Description of Artificial Sequence: Synthetic oligonucleotide
  Antisense strand to SEQ ID NO: 1728141
uuugugaccaacugcuugu

SEQ ID NO: 1728143 - RNA, 19 nt, Artificial Sequence
  Description of Artificial Sequence: Synthetic oligonucleotide
  Sense strand starting at position 676 of SEQ ID NO: 1562181
agauguuaugugcacuuau

SEQ ID NO: 1728144 - RNA, 19 nt, Artificial Sequence
  Description of Artificial Sequence: Synthetic oligonucleotide
  Antisense strand to SEQ ID NO: 1728143
auaagugcacauaacaucu

SEQ ID NO: 1728145 - RNA, 19 nt, Artificial Sequence
  Description of Artificial Sequence: Synthetic oligonucleotide
  Sense strand starting at position 1008 of SEQ ID NO: 1562181
gcauuuggcucagugaugu

SEQ ID NO: 1728146 - RNA, 19 nt, Artificial Sequence
  Description of Artificial Sequence: Synthetic oligonucleotide
  Antisense strand to SEQ ID NO: 1728145
acaucacugagccaaaugc

SEQ ID NO: 1728147 - RNA, 19 nt, Artificial Sequence
  Description of Artificial Sequence: Synthetic oligonucleotide
  Sense strand starting at position 1022 of SEQ ID NO: 1562181
gaugucuuuggccaaucuu

SEQ ID NO: 1728148 - RNA, 19 nt, Artificial Sequence
  Description of Artificial Sequence: Synthetic oligonucleotide
  Antisense strand to SEQ ID NO: 1728147
aagauuggccaaagacauc

SEQ ID NO: 1728149 - RNA, 19 nt, Artificial Sequence
  Description of Artificial Sequence: Synthetic oligonucleotide
  Sense strand starting at position 1082 of SEQ ID NO: 1562181
acucauaucuuguuuggau

SEQ ID NO: 1728150 - RNA, 19 nt, Artificial Sequence
  Description of Artificial Sequence: Synthetic oligonucleotide
  Antisense strand to SEQ ID NO: 1728149
auccaaacaagauaugagu

SEQ ID NO: 1728151 - RNA, 19 nt, Artificial Sequence
  Description of Artificial Sequence: Synthetic oligonucleotide
  Sense strand starting at position 1187 of SEQ ID NO: 1562181
gcccauauccucgacagua

SEQ ID NO: 1728152 - RNA, 19 nt, Artificial Sequence
  Description of Artificial Sequence: Synthetic oligonucleotide
  Antisense strand to SEQ ID NO: 1728151
uacugucgaggauaugggc

SEQ ID NO: 1728153 - RNA, 19 nt, Artificial Sequence
  Description of Artificial Sequence: Synthetic oligonucleotide
  Sense strand starting at position 1189 of SEQ ID NO: 1562181
ccauauccucgacaguaag

SEQ ID NO: 1728154 - RNA, 19 nt, Artificial Sequence
  Description of Artificial Sequence: Synthetic oligonucleotide
  Antisense strand to SEQ ID NO: 1728153
cuuacugucgaggauaugg

SEQ ID NO: 1728155 - RNA, 19 nt, Artificial Sequence
  Description of Artificial Sequence: Synthetic oligonucleotide
  Sense strand starting at position 1539 of SEQ ID NO: 1562181
acccgaguccugucugcuu

SEQ ID NO: 1728156 - RNA, 19 nt, Artificial Sequence
  Description of Artificial Sequence: Synthetic oligonucleotide
  Antisense strand to SEQ ID NO: 1728155
aagcagacaggacucgggu

SEQ ID NO: 1728157 - RNA, 19 nt, Artificial Sequence
  Description of Artificial Sequence: Synthetic oligonucleotide
  Sense strand starting at position 2089 of SEQ ID NO: 1562181
acagacuugucacccaaug

SEQ ID NO: 1728158 - RNA, 19 nt, Artificial Sequence
  Description of Artificial Sequence: Synthetic oligonucleotide
  Antisense strand to SEQ ID NO: 1728157
cauugggugacaagucugu

SEQ ID NO: 1728159 - RNA, 19 nt, Artificial Sequence
  Description of Artificial Sequence: Synthetic oligonucleotide
  Sense strand starting at position 2260 of SEQ ID NO: 1562181
cugggaaguucucucugaa

SEQ ID NO: 1728160 - RNA, 19 nt, Artificial Sequence
  Description of Artificial Sequence: Synthetic oligonucleotide
  Antisense strand to SEQ ID NO: 1728159
uucagagagaacuucccag

SEQ ID NO: 1728161 - RNA, 19 nt, Artificial Sequence
  Description of Artificial Sequence: Synthetic oligonucleotide
  Sense strand starting at position 2263 of SEQ ID NO: 1562181
ggaaguucucucugaauca

SEQ ID NO: 1728162 - RNA, 19 nt, Artificial Sequence
  Description of Artificial Sequence: Synthetic oligonucleotide
  Antisense strand to SEQ ID NO: 1728161
ugauucagagagaacuucc

SEQ ID NO: 1728163 - RNA, 19 nt, Artificial Sequence
  Description of Artificial Sequence: Synthetic oligonucleotide
  Sense strand starting at position 2319 of SEQ ID NO: 1562181
ugagguccuuucucaugau

SEQ ID NO: 1728164 - RNA, 19 nt, Artificial Sequence
  Description of Artificial Sequence: Synthetic oligonucleotide
  Antisense strand to SEQ ID NO: 1728163
aucaugagaaaggaccuca

SEQ ID NO: 1728165 - RNA, 19 nt, Artificial Sequence
  Description of Artificial Sequence: Synthetic oligonucleotide
  Sense strand starting at position 2323 of SEQ ID NO: 1562181
guccuuucucaugauacac

SEQ ID NO: 1728166 - RNA, 19 nt, Artificial Sequence
  Description of Artificial Sequence: Synthetic oligonucleotide
  Antisense strand to SEQ ID NO: 1728165
guguaucaugagaaaggac

SEQ ID NO: 1728167 - RNA, 19 nt, Artificial Sequence
  Description of Artificial Sequence: Synthetic oligonucleotide
  Sense strand starting at position 2405 of SEQ ID NO: 1562181
uguaguguggcauaaacca

SEQ ID NO: 1728168 - RNA, 19 nt, Artificial Sequence
  Description of Artificial Sequence: Synthetic oligonucleotide
  Antisense strand to SEQ ID NO: 1728167
ugguuuaugccacacuaca

SEQ ID NO: 1728169 - RNA, 19 nt, Artificial Sequence
  Description of Artificial Sequence: Synthetic oligonucleotide
  Sense strand starting at position 2584 of SEQ ID NO: 1562181
augggaaguguaugcauau

SEQ ID NO: 1728170 - RNA, 19 nt, Artificial Sequence
  Description of Artificial Sequence: Synthetic oligonucleotide
  Antisense strand to SEQ ID NO: 1728169
auaugcauacacuucccau

SEQ ID NO: 1728171 - RNA, 19 nt, Artificial Sequence
  Description of Artificial Sequence: Synthetic oligonucleotide
  Sense strand starting at position 2771 of SEQ ID NO: 1562181
ccaccuugacaucaguuua

SEQ ID NO: 1728172 - RNA, 19 nt, Artificial Sequence
  Description of Artificial Sequence: Synthetic oligonucleotide
  Antisense strand to SEQ ID NO: 1728171
uaaacugaugucaaggugg

SEQ ID NO: 1728173 - RNA, 19 nt, Artificial Sequence
  Description of Artificial Sequence: Synthetic oligonucleotide
  Sense strand starting at position 2904 of SEQ ID NO: 1562181
caagguuuacgauggacaa

SEQ ID NO: 1728174 - RNA, 19 nt, Artificial Sequence
  Description of Artificial Sequence: Synthetic oligonucleotide
  Antisense strand to SEQ ID NO: 1728173
uuguccaucguaaaccuug

SEQ ID NO: 1728175 - RNA, 19 nt, Artificial Sequence
  Description of Artificial Sequence: Synthetic oligonucleotide
  Sense strand starting at position 2905 of SEQ ID NO: 1562181
aagguuuacgauggacaaa

SEQ ID NO: 1728176 - RNA, 19 nt, Artificial Sequence
  Description of Artificial Sequence: Synthetic oligonucleotide
  Antisense strand to SEQ ID NO: 1728175
uuuguccaucguaaaccuu

SEQ ID NO: 1728177 - RNA, 19 nt, Artificial Sequence
  Description of Artificial Sequence: Synthetic oligonucleotide
  Sense strand starting at position 2916 of SEQ ID NO: 1562181
uggacaaaggagugaguau

SEQ ID NO: 1728178 - RNA, 19 nt, Artificial Sequence
  Description of Artificial Sequence: Synthetic oligonucleotide
  Antisense strand to SEQ ID NO: 1728177
auacucacuccuuugucca

SEQ ID NO: 1728179 - RNA, 19 nt, Artificial Sequence
  Description of Artificial Sequence: Synthetic oligonucleotide
  Sense strand starting at position 2996 of SEQ ID NO: 1562181
ccagcaucacaguguggaa

SEQ ID NO: 1728180 - RNA, 19 nt, Artificial Sequence
  Description of Artificial Sequence: Synthetic oligonucleotide
  Antisense strand to SEQ ID NO: 1728179
uuccacacugugaugcugg

SEQ ID NO: 1728181 - RNA, 19 nt, Artificial Sequence
  Description of Artificial Sequence: Synthetic oligonucleotide
  Sense strand starting at position 3034 of SEQ ID NO: 1562181
ugacaagguugggucuuua

SEQ ID NO: 1728182 - RNA, 19 nt, Artificial Sequence
  Description of Artificial Sequence: Synthetic oligonucleotide
  Antisense strand to SEQ ID NO: 1728181
uaaagacccaaccuuguca

SEQ ID NO: 1728183 - RNA, 19 nt, Artificial Sequence
  Description of Artificial Sequence: Synthetic oligonucleotide
  Sense strand starting at position 3038 of SEQ ID NO: 1562181
aagguugggucuuuagaga

SEQ ID NO: 1728184 - RNA, 19 nt, Artificial Sequence
  Description of Artificial Sequence: Synthetic oligonucleotide
  Antisense strand to SEQ ID NO: 1728183
ucucuaaagacccaaccuu

SEQ ID NO: 1728185 - RNA, 19 nt, Artificial Sequence
  Description of Artificial Sequence: Synthetic oligonucleotide
  Sense strand starting at position 3058 of SEQ ID NO: 1562181
aagugagaauguuugaucu

SEQ ID NO: 1728186 - RNA, 19 nt, Artificial Sequence
  Description of Artificial Sequence: Synthetic oligonucleotide
  Antisense strand to SEQ ID NO: 1728185
agaucaaacauucucacuu

SEQ ID NO: 1728187 - RNA, 19 nt, Artificial Sequence
  Description of Artificial Sequence: Synthetic oligonucleotide
  Sense strand starting at position 3062 of SEQ ID NO: 1562181
gagaauguuugaucucgag

SEQ ID NO: 1728188 - RNA, 19 nt, Artificial Sequence
  Description of Artificial Sequence: Synthetic oligonucleotide
  Antisense strand to SEQ ID NO: 1728187
cucgagaucaaacauucuc

SEQ ID NO: 1728189 - RNA, 19 nt, Artificial Sequence
  Description of Artificial Sequence: Synthetic oligonucleotide
  Sense strand starting at position 3122 of SEQ ID NO: 1562181
aagagaaaucaguguccuu

SEQ ID NO: 1728190 - RNA, 19 nt, Artificial Sequence
  Description of Artificial Sequence: Synthetic oligonucleotide
  Antisense strand to SEQ ID NO: 1728189
aaggacacugauuucucuu

SEQ ID NO: 1728191 - RNA, 19 nt, Artificial Sequence
  Description of Artificial Sequence: Synthetic oligonucleotide
  Sense strand starting at position 3211 of SEQ ID NO: 1562181
cuggaacuaucuguuuaua

SEQ ID NO: 1728192 - RNA, 19 nt, Artificial Sequence
  Description of Artificial Sequence: Synthetic oligonucleotide
  Antisense strand to SEQ ID NO: 1728191
uauaaacagauaguuccag

SEQ ID NO: 1728193 - RNA, 19 nt, Artificial Sequence
  Description of Artificial Sequence: Synthetic oligonucleotide
  Sense strand starting at position 3213 of SEQ ID NO: 1562181
ggaacuaucuguuuauaua

SEQ ID NO: 1728194 - RNA, 19 nt, Artificial Sequence
  Description of Artificial Sequence: Synthetic oligonucleotide
  Antisense strand to SEQ ID NO: 1728193
uauauaaacagauaguucc

SEQ ID NO: 1728195 - RNA, 19 nt, Artificial Sequence
  Description of Artificial Sequence: Synthetic oligonucleotide
  Sense strand starting at position 3246 of SEQ ID NO: 1562181
gacugagcuccuugaaggu

SEQ ID NO: 1728196 - RNA, 19 nt, Artificial Sequence
  Description of Artificial Sequence: Synthetic oligonucleotide
  Antisense strand to SEQ ID NO: 1728195
accuucaaggagcucaguc

SEQ ID NO: 1728197 - RNA, 19 nt, Artificial Sequence
  Description of Artificial Sequence: Synthetic oligonucleotide
  Sense strand starting at position 3387 of SEQ ID NO: 1562181
ccgauuuagugcuuacuaa

SEQ ID NO: 1728198 - RNA, 19 nt, Artificial Sequence
  Description of Artificial Sequence: Synthetic oligonucleotide
  Antisense strand to SEQ ID NO: 1728197
uuaguaagcacuaaaucgg

SEQ ID NO: 1728199 - RNA, 19 nt, Artificial Sequence
  Description of Artificial Sequence: Synthetic oligonucleotide
  Sense strand starting at position 3416 of SEQ ID NO: 1562181
uugauuuaguguuuacugu

SEQ ID NO: 1728200 - RNA, 19 nt, Artificial Sequence
  Description of Artificial Sequence: Synthetic oligonucleotide
  Antisense strand to SEQ ID NO: 1728199
acaguaaacacuaaaucaa

SEQ ID NO: 1728201 - RNA, 19 nt, Artificial Sequence
  Description of Artificial Sequence: Synthetic oligonucleotide
  Sense strand starting at position 3538 of SEQ ID NO: 1562181
agauuaaccugagucucca

SEQ ID NO: 1728202 - RNA, 19 nt, Artificial Sequence
  Description of Artificial Sequence: Synthetic oligonucleotide
  Antisense strand to SEQ ID NO: 1728201
uggagacucagguuaaucu

SEQ ID NO: 1728203 - RNA, 19 nt, Artificial Sequence
  Description of Artificial Sequence: Synthetic oligonucleotide
  Sense strand starting at position 3575 of SEQ ID NO: 1562181
auauguaaauggcuccaga

SEQ ID NO: 1728204 - RNA, 19 nt, Artificial Sequence
  Description of Artificial Sequence: Synthetic oligonucleotide
  Antisense strand to SEQ ID NO: 1728203
ucuggagccauuuacauau

SEQ ID NO: 1728205 - RNA, 19 nt, Artificial Sequence
  Description of Artificial Sequence: Synthetic oligonucleotide
  Sense strand starting at position 3615 of SEQ ID NO: 1562181
gaggucagcgccuaaauga

SEQ ID NO: 1728206 - RNA, 19 nt, Artificial Sequence
  Description of Artificial Sequence: Synthetic oligonucleotide
  Antisense strand to SEQ ID NO: 1728205
ucauuuaggcgcugaccuc

SEQ ID NO: 1728207 - RNA, 19 nt, Artificial Sequence
  Description of Artificial Sequence: Synthetic oligonucleotide
  Sense strand starting at position 3711 of SEQ ID NO: 1562181
ggcucuggcagaugacuaa

SEQ ID NO: 1728208 - RNA, 19 nt, Artificial Sequence
  Description of Artificial Sequence: Synthetic oligonucleotide
  Antisense strand to SEQ ID NO: 1728207
uuagucaucugccagagcc

SEQ ID NO: 1728209 - RNA, 19 nt, Artificial Sequence
  Description of Artificial Sequence: Synthetic oligonucleotide
  Sense strand starting at position 3895 of SEQ ID NO: 1562181
ugggaugaaugggugugaa

SEQ ID NO: 1728210 - RNA, 19 nt, Artificial Sequence
  Description of Artificial Sequence: Synthetic oligonucleotide
  Antisense strand to SEQ ID NO: 1728209
uucacacccauucauccca

SEQ ID NO: 1728211 - RNA, 19 nt, Artificial Sequence
  Description of Artificial Sequence: Synthetic oligonucleotide
  Sense strand starting at position 3898 of SEQ ID NO: 1562181
gaugaaugggugugaaagu

SEQ ID NO: 1728212 - RNA, 19 nt, Artificial Sequence
  Description of Artificial Sequence: Synthetic oligonucleotide
  Antisense strand to SEQ ID NO: 1728211
acuuucacacccauucauc

SEQ ID NO: 1728213 - RNA, 19 nt, Artificial Sequence
  Description of Artificial Sequence: Synthetic oligonucleotide
  Sense strand starting at position 221 of SEQ ID NO: 1562182
gaccuacugcucugaggaa

SEQ ID NO: 1728214 - RNA, 19 nt, Artificial Sequence
  Description of Artificial Sequence: Synthetic oligonucleotide
  Antisense strand to SEQ ID NO: 1728213
uuccucagagcaguagguc

SEQ ID NO: 1728215 - RNA, 19 nt, Artificial Sequence
  Description of Artificial Sequence: Synthetic oligonucleotide
  Sense strand starting at position 379 of SEQ ID NO: 1562182
ccagcaaguuaguuacaga

SEQ ID NO: 1728216 - RNA, 19 nt, Artificial Sequence
  Description of Artificial Sequence: Synthetic oligonucleotide
  Antisense strand to SEQ ID NO: 1728215
ucuguaacuaacuugcugg

SEQ ID NO: 1728217 - RNA, 19 nt, Artificial Sequence
  Description of Artificial Sequence: Synthetic oligonucleotide
  Sense strand starting at position 406 of SEQ ID NO: 1562182
ugggcaucaucaucaacuu

SEQ ID NO: 1728218 - RNA, 19 nt, Artificial Sequence
  Description of Artificial Sequence: Synthetic oligonucleotide
  Antisense strand to SEQ ID NO: 1728217
aaguugaugaugaugccca

SEQ ID NO: 1728219 - RNA, 19 nt, Artificial Sequence
  Description of Artificial Sequence: Synthetic oligonucleotide
  Sense strand starting at position 407 of SEQ ID NO: 1562182
gggcaucaucaucaacuuu

SEQ ID NO: 1728220 - RNA, 19 nt, Artificial Sequence
  Description of Artificial Sequence: Synthetic oligonucleotide
  Antisense strand to SEQ ID NO: 1728219
aaaguugaugaugaugccc

SEQ ID NO: 1728221 - RNA, 19 nt, Artificial Sequence
  Description of Artificial Sequence: Synthetic oligonucleotide
  Sense strand starting at position 455 of SEQ ID NO: 1562182
ugucaaguuuaagucugau

SEQ ID NO: 1728222 - RNA, 19 nt, Artificial Sequence
  Description of Artificial Sequence: Synthetic oligonucleotide
  Antisense strand to SEQ ID NO: 1728221
aucagacuuaaacuugaca

SEQ ID NO: 1728223 - RNA, 19 nt, Artificial Sequence
  Description of Artificial Sequence: Synthetic oligonucleotide
  Sense strand starting at position 464 of SEQ ID NO: 1562182
uaagucugauagguuauca

SEQ ID NO: 1728224 - RNA, 19 nt, Artificial Sequence
  Description of Artificial Sequence: Synthetic oligonucleotide
  Antisense strand to SEQ ID NO: 1728223
ugauaaccuaucagacuua

SEQ ID NO: 1728225 - RNA, 19 nt, Artificial Sequence
  Description of Artificial Sequence: Synthetic oligonucleotide
  Sense strand starting at position 498 of SEQ ID NO: 1562182
gggaucaucuaggugaacu

SEQ ID NO: 1728226 - RNA, 19 nt, Artificial Sequence
  Description of Artificial Sequence: Synthetic oligonucleotide
  Antisense strand to SEQ ID NO: 1728225
aguucaccuagaugauccc

SEQ ID NO: 1728227 - RNA, 19 nt, Artificial Sequence
  Description of Artificial Sequence: Synthetic oligonucleotide
  Sense strand starting at position 499 of SEQ ID NO: 1562182
ggaucaucuaggugaacuu

SEQ ID NO: 1728228 - RNA, 19 nt, Artificial Sequence
  Description of Artificial Sequence: Synthetic oligonucleotide
  Antisense strand to SEQ ID NO: 1728227
aaguucaccuagaugaucc

SEQ ID NO: 1728229 - RNA, 19 nt, Artificial Sequence
  Description of Artificial Sequence: Synthetic oligonucleotide
  Sense strand starting at position 691 of SEQ ID NO: 1562182
uguuaacugccaggaggaa

SEQ ID NO: 1728230 - RNA, 19 nt, Artificial Sequence
  Description of Artificial Sequence: Synthetic oligonucleotide
  Antisense strand to SEQ ID NO: 1728229
uuccuccuggcaguuaaca

SEQ ID NO: 1728231 - RNA, 19 nt, Artificial Sequence
  Description of Artificial Sequence: Synthetic oligonucleotide
  Sense strand starting at position 844 of SEQ ID NO: 1562182
cuugaauaccugugagugu

SEQ ID NO: 1728232 - RNA, 19 nt, Artificial Sequence
  Description of Artificial Sequence: Synthetic oligonucleotide
  Antisense strand to SEQ ID NO: 1728231
acacucacagguauucaag

SEQ ID NO: 1728233 - RNA, 19 nt, Artificial Sequence
  Description of Artificial Sequence: Synthetic oligonucleotide
  Sense strand starting at position 909 of SEQ ID NO: 1562182
uaagacaaguucuugcaga

SEQ ID NO: 1728234 - RNA, 19 nt, Artificial Sequence
  Description of Artificial Sequence: Synthetic oligonucleotide
  Antisense strand to SEQ ID NO: 1728233
ucugcaagaacuugucuua

SEQ ID NO: 1728235 - RNA, 19 nt, Artificial Sequence
  Description of Artificial Sequence: Synthetic oligonucleotide
  Sense strand starting at position 916 of SEQ ID NO: 1562182
aguucuugcagagggaguu

SEQ ID NO: 1728236 - RNA, 19 nt, Artificial Sequence
  Description of Artificial Sequence: Synthetic oligonucleotide
  Antisense strand to SEQ ID NO: 1728235
aacucccucugcaagaacu

SEQ ID NO: 1728237 - RNA, 19 nt, Artificial Sequence
  Description of Artificial Sequence: Synthetic oligonucleotide
  Sense strand starting at position 930 of SEQ ID NO: 1562182
gaguuugcugcucacuaua

SEQ ID NO: 1728238 - RNA, 19 nt, Artificial Sequence
  Description of Artificial Sequence: Synthetic oligonucleotide
  Antisense strand to SEQ ID NO: 1728237
uauagugagcagcaaacuc

SEQ ID NO: 1728239 - RNA, 19 nt, Artificial Sequence
  Description of Artificial Sequence: Synthetic oligonucleotide
  Sense strand starting at position 961 of SEQ ID NO: 1562182
gggacacauuaucuuacuu

SEQ ID NO: 1728240 - RNA, 19 nt, Artificial Sequence
  Description of Artificial Sequence: Synthetic oligonucleotide
  Antisense strand to SEQ ID NO: 1728239
aaguaagauaauguguccc

SEQ ID NO: 1728241 - RNA, 19 nt, Artificial Sequence
  Description of Artificial Sequence: Synthetic oligonucleotide
  Sense strand starting at position 1284 of SEQ ID NO: 1562182
ugagucuacuguuuacaag

SEQ ID NO: 1728242 - RNA, 19 nt, Artificial Sequence
  Description of Artificial Sequence: Synthetic oligonucleotide
  Antisense strand to SEQ ID NO: 1728241
cuuguaaacaguagacuca

SEQ ID NO: 1728243 - RNA, 19 nt, Artificial Sequence
  Description of Artificial Sequence: Synthetic oligonucleotide
  Sense strand starting at position 1285 of SEQ ID NO: 1562182
gagucuacuguuuacaagu

SEQ ID NO: 1728244 - RNA, 19 nt, Artificial Sequence
  Description of Artificial Sequence: Synthetic oligonucleotide
  Antisense strand to SEQ ID NO: 1728243
acuuguaaacaguagacuc

SEQ ID NO: 1728245 - RNA, 19 nt, Artificial Sequence
  Description of Artificial Sequence: Synthetic oligonucleotide
  Sense strand starting at position 1358 of SEQ ID NO: 1562182
acagcaaggcugugagaua

SEQ ID NO: 1728246 - RNA, 19 nt, Artificial Sequence
  Description of Artificial Sequence: Synthetic oligonucleotide
  Antisense strand to SEQ ID NO: 1728245
uaucucacagccuugcugu

SEQ ID NO: 1728247 - RNA, 19 nt, Artificial Sequence
  Description of Artificial Sequence: Synthetic oligonucleotide
  Sense strand starting at position 1501 of SEQ ID NO: 1562182
gugggaaucaggcgaggau

SEQ ID NO: 1728248 - RNA, 19 nt, Artificial Sequence
  Description of Artificial Sequence: Synthetic oligonucleotide
  Antisense strand to SEQ ID NO: 1728247
auccucgccugauucccac

SEQ ID NO: 1728249 - RNA, 19 nt, Artificial Sequence
  Description of Artificial Sequence: Synthetic oligonucleotide
  Sense strand starting at position 1567 of SEQ ID NO: 1562182
caacuaugcccagaaacgu

SEQ ID NO: 1728250 - RNA, 19 nt, Artificial Sequence
  Description of Artificial Sequence: Synthetic oligonucleotide
  Antisense strand to SEQ ID NO: 1728249
acguuucugggcauaguug

SEQ ID NO: 1728251 - RNA, 19 nt, Artificial Sequence
  Description of Artificial Sequence: Synthetic oligonucleotide
  Sense strand starting at position 1576 of SEQ ID NO: 1562182
ccagaaacgucucuggauc

SEQ ID NO: 1728252 - RNA, 19 nt, Artificial Sequence
  Description of Artificial Sequence: Synthetic oligonucleotide
  Antisense strand to SEQ ID NO: 1728251
gauccagagacguuucugg

SEQ ID NO: 1728253 - RNA, 19 nt, Artificial Sequence
  Description of Artificial Sequence: Synthetic oligonucleotide
  Sense strand starting at position 1788 of SEQ ID NO: 1562182
acacgaagaguucaugugu

SEQ ID NO: 1728254 - RNA, 19 nt, Artificial Sequence
  Description of Artificial Sequence: Synthetic oligonucleotide
  Antisense strand to SEQ ID NO: 1728253
acacaugaacucuucgugu

SEQ ID NO: 1728255 - RNA, 19 nt, Artificial Sequence
  Description of Artificial Sequence: Synthetic oligonucleotide
  Sense strand starting at position 1834 of SEQ ID NO: 1562182
ccuaacaaucgaugaucaa

SEQ ID NO: 1728256 - RNA, 19 nt, Artificial Sequence
  Description of Artificial Sequence: Synthetic oligonucleotide
  Antisense strand to SEQ ID NO: 1728255
uugaucaucgauuguuagg

SEQ ID NO: 1728257 - RNA, 19 nt, Artificial Sequence
  Description of Artificial Sequence: Synthetic oligonucleotide
  Sense strand starting at position 2298 of SEQ ID NO: 1562182
cggauuuaugguuggccau

SEQ ID NO: 1728258 - RNA, 19 nt, Artificial Sequence
  Description of Artificial Sequence: Synthetic oligonucleotide
  Antisense strand to SEQ ID NO: 1728257
auggccaaccauaaauccg

SEQ ID NO: 1728259 - RNA, 19 nt, Artificial Sequence
  Description of Artificial Sequence: Synthetic oligonucleotide
  Sense strand starting at position 2492 of SEQ ID NO: 1562182
ggcagagguccaugauccu

SEQ ID NO: 1728260 - RNA, 19 nt, Artificial Sequence
  Description of Artificial Sequence: Synthetic oligonucleotide
  Antisense strand to SEQ ID NO: 1728259
aggaucauggaccucugcc

SEQ ID NO: 1728261 - RNA, 19 nt, Artificial Sequence
  Description of Artificial Sequence: Synthetic oligonucleotide
  Sense strand starting at position 2522 of SEQ ID NO: 1562182
acuagacuuccuuggugga

SEQ ID NO: 1728262 - RNA, 19 nt, Artificial Sequence
  Description of Artificial Sequence: Synthetic oligonucleotide
  Antisense strand to SEQ ID NO: 1728261
uccaccaaggaagucuagu

SEQ ID NO: 1728263 - RNA, 19 nt, Artificial Sequence
  Description of Artificial Sequence: Synthetic oligonucleotide
  Sense strand starting at position 2524 of SEQ ID NO: 1562182
uagacuuccuugguggaca

SEQ ID NO: 1728264 - RNA, 19 nt, Artificial Sequence
  Description of Artificial Sequence: Synthetic oligonucleotide
  Antisense strand to SEQ ID NO: 1728263
uguccaccaaggaagucua

SEQ ID NO: 1728265 - RNA, 19 nt, Artificial Sequence
  Description of Artificial Sequence: Synthetic oligonucleotide
  Sense strand starting at position 2711 of SEQ ID NO: 1562182
ugguguuucuaccuacaaa

SEQ ID NO: 1728266 - RNA, 19 nt, Artificial Sequence
  Description of Artificial Sequence: Synthetic oligonucleotide
  Antisense strand to SEQ ID NO: 1728265
uuuguagguagaaacacca

SEQ ID NO: 1728267 - RNA, 19 nt, Artificial Sequence
  Description of Artificial Sequence: Synthetic oligonucleotide
  Sense strand starting at position 2779 of SEQ ID NO: 1562182
cuaagauucugggcuugaa

SEQ ID NO: 1728268 - RNA, 19 nt, Artificial Sequence
  Description of Artificial Sequence: Synthetic oligonucleotide
  Antisense strand to SEQ ID NO: 1728267
uucaagcccagaaucuuag

SEQ ID NO: 1728269 - RNA, 19 nt, Artificial Sequence
  Description of Artificial Sequence: Synthetic oligonucleotide
  Sense strand starting at position 2891 of SEQ ID NO: 1562182
ggagaaaugcuuugaugga

SEQ ID NO: 1728270 - RNA, 19 nt, Artificial Sequence
  Description of Artificial Sequence: Synthetic oligonucleotide
  Antisense strand to SEQ ID NO: 1728269
uccaucaaagcauuucucc

SEQ ID NO: 1728271 - RNA, 19 nt, Artificial Sequence
  Description of Artificial Sequence: Synthetic oligonucleotide
  Sense strand starting at position 3094 of SEQ ID NO: 1562182
guuugaugugguuggauuu

SEQ ID NO: 1728272 - RNA, 19 nt, Artificial Sequence
  Description of Artificial Sequence: Synthetic oligonucleotide
  Antisense strand to SEQ ID NO: 1728271
aaauccaaccacaucaaac

SEQ ID NO: 1728273 - RNA, 19 nt, Artificial Sequence
  Description of Artificial Sequence: Synthetic oligonucleotide
  Sense strand starting at position 3105 of SEQ ID NO: 1562182
uuggauuucuuacagaaag

SEQ ID NO: 1728274 - RNA, 19 nt, Artificial Sequence
  Description of Artificial Sequence: Synthetic oligonucleotide
  Antisense strand to SEQ ID NO: 1728273
cuuucuguaagaaauccaa

SEQ ID NO: 1728275 - RNA, 19 nt, Artificial Sequence
  Description of Artificial Sequence: Synthetic oligonucleotide
  Sense strand starting at position 3150 of SEQ ID NO: 1562182
ugguuucacgcagaucaag

SEQ ID NO: 1728276 - RNA, 19 nt, Artificial Sequence
  Description of Artificial Sequence: Synthetic oligonucleotide
  Antisense strand to SEQ ID NO: 1728275
cuugaucugcgugaaacca

SEQ ID NO: 1728277 - RNA, 19 nt, Artificial Sequence
  Description of Artificial Sequence: Synthetic oligonucleotide
  Sense strand starting at position 3158 of SEQ ID NO: 1562182
cgcagaucaagcgucuuua

SEQ ID NO: 1728278 - RNA, 19 nt, Artificial Sequence
  Description of Artificial Sequence: Synthetic oligonucleotide
  Antisense strand to SEQ ID NO: 1728277
uaaagacgcuugaucugcg

SEQ ID NO: 1728279 - RNA, 19 nt, Artificial Sequence
  Description of Artificial Sequence: Synthetic oligonucleotide
  Sense strand starting at position 3162 of SEQ ID NO: 1562182
gaucaagcgucuuuaauga

SEQ ID NO: 1728280 - RNA, 19 nt, Artificial Sequence
  Description of Artificial Sequence: Synthetic oligonucleotide
  Antisense strand to SEQ ID NO: 1728279
ucauuaaagacgcuugauc

SEQ ID NO: 1728281 - RNA, 19 nt, Artificial Sequence
  Description of Artificial Sequence: Synthetic oligonucleotide
  Sense strand starting at position 3329 of SEQ ID NO: 1562182
cccacuaaugauggucuua

SEQ ID NO: 1728282 - RNA, 19 nt, Artificial Sequence
  Description of Artificial Sequence: Synthetic oligonucleotide
  Antisense strand to SEQ ID NO: 1728281
uaagaccaucauuaguggg

SEQ ID NO: 1728283 - RNA, 19 nt, Artificial Sequence
  Description of Artificial Sequence: Synthetic oligonucleotide
  Sense strand starting at position 3758 of SEQ ID NO: 1562182
ggcccauacucaguuuaga

SEQ ID NO: 1728284 - RNA, 19 nt, Artificial Sequence
  Description of Artificial Sequence: Synthetic oligonucleotide
  Antisense strand to SEQ ID NO: 1728283
ucuaaacugaguaugggcc

SEQ ID NO: 1728285 - RNA, 19 nt, Artificial Sequence
  Description of Artificial Sequence: Synthetic oligonucleotide
  Sense strand starting at position 3761 of SEQ ID NO: 1562182
ccauacucaguuuagaagu

SEQ ID NO: 1728286 - RNA, 19 nt, Artificial Sequence
  Description of Artificial Sequence: Synthetic oligonucleotide
  Antisense strand to SEQ ID NO: 1728285
acuucuaaacugaguaugg

SEQ ID NO: 1728287 - RNA, 19 nt, Artificial Sequence
  Description of Artificial Sequence: Synthetic oligonucleotide
  Sense strand starting at position 3771 of SEQ ID NO: 1562182
uuuagaagugagcaucaua

SEQ ID NO: 1728288 - RNA, 19 nt, Artificial Sequence
  Description of Artificial Sequence: Synthetic oligonucleotide
  Antisense strand to SEQ ID NO: 1728287
uaugaugcucacuucuaaa

SEQ ID NO: 1728289 - RNA, 19 nt, Artificial Sequence
  Description of Artificial Sequence: Synthetic oligonucleotide
  Sense strand starting at position 3813 of SEQ ID NO: 1562182
cuguuaucucugggccaaa

SEQ ID NO: 1728290 - RNA, 19 nt, Artificial Sequence
  Description of Artificial Sequence: Synthetic oligonucleotide
  Antisense strand to SEQ ID NO: 1728289
uuuggcccagagauaacag

SEQ ID NO: 1728291 - RNA, 19 nt, Artificial Sequence
  Description of Artificial Sequence: Synthetic oligonucleotide
  Sense strand starting at position 3814 of SEQ ID NO: 1562182
uguuaucucugggccaaac

SEQ ID NO: 1728292 - RNA, 19 nt, Artificial Sequence
  Description of Artificial Sequence: Synthetic oligonucleotide
  Antisense strand to SEQ ID NO: 1728291
guuuggcccagagauaaca

SEQ ID NO: 1728293 - RNA, 19 nt, Artificial Sequence
  Description of Artificial Sequence: Synthetic oligonucleotide
  Sense strand starting at position 31 of SEQ ID NO: 1562183
cagcuaaggugcuuuggua

SEQ ID NO: 1728294 - RNA, 19 nt, Artificial Sequence
  Description of Artificial Sequence: Synthetic oligonucleotide
  Antisense strand to SEQ ID NO: 1728293
uaccaaagcaccuuagcug

SEQ ID NO: 1728295 - RNA, 19 nt, Artificial Sequence
  Description of Artificial Sequence: Synthetic oligonucleotide
  Sense strand starting at position 274 of SEQ ID NO: 1562183
uggagaugccuaugagcaa

SEQ ID NO: 1728296 - RNA, 19 nt, Artificial Sequence
  Description of Artificial Sequence: Synthetic oligonucleotide
  Antisense strand to SEQ ID NO: 1728295
uugcucauaggcaucucca

SEQ ID NO: 1728297 - RNA, 19 nt, Artificial Sequence
  Description of Artificial Sequence: Synthetic oligonucleotide
  Sense strand starting at position 443 of SEQ ID NO: 1562183
gcagaugcacucgaaggua

SEQ ID NO: 1728298 - RNA, 19 nt, Artificial Sequence
  Description of Artificial Sequence: Synthetic oligonucleotide
  Antisense strand to SEQ ID NO: 1728297
uaccuucgagugcaucugc

SEQ ID NO: 1728299 - RNA, 19 nt, Artificial Sequence
  Description of Artificial Sequence: Synthetic oligonucleotide
  Sense strand starting at position 511 of SEQ ID NO: 1562183
cgucgauguccgugcagau

SEQ ID NO: 1728300 - RNA, 19 nt, Artificial Sequence
  Description of Artificial Sequence: Synthetic oligonucleotide
  Antisense strand to SEQ ID NO: 1728299
aucugcacggacaucgacg

SEQ ID NO: 1728301 - RNA, 19 nt, Artificial Sequence
  Description of Artificial Sequence: Synthetic oligonucleotide
  Sense strand starting at position 514 of SEQ ID NO: 1562183
cgauguccgugcagaugaa

SEQ ID NO: 1728302 - RNA, 19 nt, Artificial Sequence
  Description of Artificial Sequence: Synthetic oligonucleotide
  Antisense strand to SEQ ID NO: 1728301
uucaucugcacggacaucg

SEQ ID NO: 1728303 - RNA, 19 nt, Artificial Sequence
  Description of Artificial Sequence: Synthetic oligonucleotide
  Sense strand starting at position 515 of SEQ ID NO: 1562183
gauguccgugcagaugaaa

SEQ ID NO: 1728304 - RNA, 19 nt, Artificial Sequence
  Description of Artificial Sequence: Synthetic oligonucleotide
  Antisense strand to SEQ ID NO: 1728303
uuucaucugcacggacauc

SEQ ID NO: 1728305 - RNA, 19 nt, Artificial Sequence
  Description of Artificial Sequence: Synthetic oligonucleotide
  Sense strand starting at position 603 of SEQ ID NO: 1562183
caggcagucugguugcaaa

SEQ ID NO: 1728306 - RNA, 19 nt, Artificial Sequence
  Description of Artificial Sequence: Synthetic oligonucleotide
  Antisense strand to SEQ ID NO: 1728305
uuugcaaccagacugccug

SEQ ID NO: 1728307 - RNA, 19 nt, Artificial Sequence
  Description of Artificial Sequence: Synthetic oligonucleotide
  Sense strand starting at position 718 of SEQ ID NO: 1562183
cgcaguuggcucugaagca

SEQ ID NO: 1728308 - RNA, 19 nt, Artificial Sequence
  Description of Artificial Sequence: Synthetic oligonucleotide
  Antisense strand to SEQ ID NO: 1728307
ugcuucagagccaacugcg

SEQ ID NO: 1728309 - RNA, 19 nt, Artificial Sequence
  Description of Artificial Sequence: Synthetic oligonucleotide
  Sense strand starting at position 1490 of SEQ ID NO: 1562183
gguguuguugucucccgua

SEQ ID NO: 1728310 - RNA, 19 nt, Artificial Sequence
  Description of Artificial Sequence: Synthetic oligonucleotide
  Antisense strand to SEQ ID NO: 1728309
uacgggagacaacaacacc

SEQ ID NO: 1728311 - RNA, 19 nt, Artificial Sequence
  Description of Artificial Sequence: Synthetic oligonucleotide
  Sense strand starting at position 1495 of SEQ ID NO: 1562183
uguugucucccguaaccca

SEQ ID NO: 1728312 - RNA, 19 nt, Artificial Sequence
  Description of Artificial Sequence: Synthetic oligonucleotide
  Antisense strand to SEQ ID NO: 1728311
uggguuacgggagacaaca

SEQ ID NO: 1728313 - RNA, 19 nt, Artificial Sequence
  Description of Artificial Sequence: Synthetic oligonucleotide
  Sense strand starting at position 1646 of SEQ ID NO: 1562183
cgaggagcgcacugucauu

SEQ ID NO: 1728314 - RNA, 19 nt, Artificial Sequence
  Description of Artificial Sequence: Synthetic oligonucleotide
  Antisense strand to SEQ ID NO: 1728313
aaugacagugcgcuccucg

SEQ ID NO: 1728315 - RNA, 19 nt, Artificial Sequence
  Description of Artificial Sequence: Synthetic oligonucleotide
  Sense strand starting at position 1684 of SEQ ID NO: 1562183
cgcagaucugacuggcauu

SEQ ID NO: 1728316 - RNA, 19 nt, Artificial Sequence
  Description of Artificial Sequence: Synthetic oligonucleotide
  Antisense strand to SEQ ID NO: 1728315
aaugccagucagaucugcg

SEQ ID NO: 1728317 - RNA, 19 nt, Artificial Sequence
  Description of Artificial Sequence: Synthetic oligonucleotide
  Sense strand starting at position 2020 of SEQ ID NO: 1562183
agggcucgaguuuauaagu

SEQ ID NO: 1728318 - RNA, 19 nt, Artificial Sequence
  Description of Artificial Sequence: Synthetic oligonucleotide
  Antisense strand to SEQ ID NO: 1728317
acuuauaaacucgagcccu

SEQ ID NO: 1728319 - RNA, 19 nt, Artificial Sequence
  Description of Artificial Sequence: Synthetic oligonucleotide
  Sense strand starting at position 2376 of SEQ ID NO: 1562183
uugcaagagcucugggaac

SEQ ID NO: 1728320 - RNA, 19 nt, Artificial Sequence
  Description of Artificial Sequence: Synthetic oligonucleotide
  Antisense strand to SEQ ID NO: 1728319
guucccagagcucuugcaa

SEQ ID NO: 1728321 - RNA, 19 nt, Artificial Sequence
  Description of Artificial Sequence: Synthetic oligonucleotide
  Sense strand starting at position 2879 of SEQ ID NO: 1562183
ggcccagcuuccgaaggau

SEQ ID NO: 1728322 - RNA, 19 nt, Artificial Sequence
  Description of Artificial Sequence: Synthetic oligonucleotide
  Antisense strand to SEQ ID NO: 1728321
auccuucggaagcugggcc

SEQ ID NO: 1728323 - RNA, 19 nt, Artificial Sequence
  Description of Artificial Sequence: Synthetic oligonucleotide
  Sense strand starting at position 2997 of SEQ ID NO: 1562183
cguccagaguccgaauuga

SEQ ID NO: 1728324 - RNA, 19 nt, Artificial Sequence
  Description of Artificial Sequence: Synthetic oligonucleotide
  Antisense strand to SEQ ID NO: 1728323
ucaauucggacucuggacg

SEQ ID NO: 1728325 - RNA, 19 nt, Artificial Sequence
  Description of Artificial Sequence: Synthetic oligonucleotide
  Sense strand starting at position 3010 of SEQ ID NO: 1562183
aauugauacccacgugcau

SEQ ID NO: 1728326 - RNA, 19 nt, Artificial Sequence
  Description of Artificial Sequence: Synthetic oligonucleotide
  Antisense strand to SEQ ID NO: 1728325
augcacguggguaucaauu

SEQ ID NO: 1728327 - RNA, 19 nt, Artificial Sequence
  Description of Artificial Sequence: Synthetic oligonucleotide
  Sense strand starting at position 3114 of SEQ ID NO: 1562183
gggaauccgucacuuucga

SEQ ID NO: 1728328 - RNA, 19 nt, Artificial Sequence
  Description of Artificial Sequence: Synthetic oligonucleotide
  Antisense strand to SEQ ID NO: 1728327
ucgaaagugacggauuccc

SEQ ID NO: 1728329 - RNA, 19 nt, Artificial Sequence
  Description of Artificial Sequence: Synthetic oligonucleotide
  Sense strand starting at position 3194 of SEQ ID NO: 1562183
ccauaauggugagaggcaa

SEQ ID NO: 1728330 - RNA, 19 nt, Artificial Sequence
  Description of Artificial Sequence: Synthetic oligonucleotide
  Antisense strand to SEQ ID NO: 1728329
uugccucucaccauuaugg

SEQ ID NO: 1728331 - RNA, 19 nt, Artificial Sequence
  Description of Artificial Sequence: Synthetic oligonucleotide
  Sense strand starting at position 3272 of SEQ ID NO: 1562183
cggcgcugucgagcucuaa

SEQ ID NO: 1728332 - RNA, 19 nt, Artificial Sequence
  Description of Artificial Sequence: Synthetic oligonucleotide
  Antisense strand to SEQ ID NO: 1728331
uuagagcucgacagcgccg

SEQ ID NO: 1728333 - RNA, 19 nt, Artificial Sequence
  Description of Artificial Sequence: Synthetic oligonucleotide
  Sense strand starting at position 3273 of SEQ ID NO: 1562183
ggcgcugucgagcucuaaa

SEQ ID NO: 1728334 - RNA, 19 nt, Artificial Sequence
  Description of Artificial Sequence: Synthetic oligonucleotide
  Antisense strand to SEQ ID NO: 1728333
uuuagagcucgacagcgcc

SEQ ID NO: 1728335 - RNA, 19 nt, Artificial Sequence
  Description of Artificial Sequence: Synthetic oligonucleotide
  Sense strand starting at position 3275 of SEQ ID NO: 1562183
cgcugucgagcucuaaaca

SEQ ID NO: 1728336 - RNA, 19 nt, Artificial Sequence
  Description of Artificial Sequence: Synthetic oligonucleotide
  Antisense strand to SEQ ID NO: 1728335
uguuuagagcucgacagcg

SEQ ID NO: 1728337 - RNA, 19 nt, Artificial Sequence
  Description of Artificial Sequence: Synthetic oligonucleotide
  Sense strand starting at position 3276 of SEQ ID NO: 1562183
gcugucgagcucuaaacaa

SEQ ID NO: 1728338 - RNA, 19 nt, Artificial Sequence
  Description of Artificial Sequence: Synthetic oligonucleotide
  Antisense strand to SEQ ID NO: 1728337
uuguuuagagcucgacagc

SEQ ID NO: 1728339 - RNA, 19 nt, Artificial Sequence
  Description of Artificial Sequence: Synthetic oligonucleotide
  Sense strand starting at position 3307 of SEQ ID NO: 1562183
uggagaaguuucgggcuaa

SEQ ID NO: 1728340 - RNA, 19 nt, Artificial Sequence
  Description of Artificial Sequence: Synthetic oligonucleotide
  Antisense strand to SEQ ID NO: 1728339
uuagcccgaaacuucucca

SEQ ID NO: 1728341 - RNA, 19 nt, Artificial Sequence
  Description of Artificial Sequence: Synthetic oligonucleotide
  Sense strand starting at position 3308 of SEQ ID NO: 1562183
ggagaaguuucgggcuaaa

SEQ ID NO: 1728342 - RNA, 19 nt, Artificial Sequence
  Description of Artificial Sequence: Synthetic oligonucleotide
  Antisense strand to SEQ ID NO: 1728341
uuuagcccgaaacuucucc

SEQ ID NO: 1728343 - RNA, 19 nt, Artificial Sequence
  Description of Artificial Sequence: Synthetic oligonucleotide
  Sense strand starting at position 3432 of SEQ ID NO: 1562183
ccaguagauccugggcuuu

SEQ ID NO: 1728344 - RNA, 19 nt, Artificial Sequence
  Description of Artificial Sequence: Synthetic oligonucleotide
  Antisense strand to SEQ ID NO: 1728343
aaagcccaggaucuacugg

SEQ ID NO: 1728345 - RNA, 19 nt, Artificial Sequence
  Description of Artificial Sequence: Synthetic oligonucleotide
  Sense strand starting at position 3434 of SEQ ID NO: 1562183
aguagauccugggcuuuaa

SEQ ID NO: 1728346 - RNA, 19 nt, Artificial Sequence
  Description of Artificial Sequence: Synthetic oligonucleotide
  Antisense strand to SEQ ID NO: 1728345
uuaaagcccaggaucuacu

SEQ ID NO: 1728347 - RNA, 19 nt, Artificial Sequence
  Description of Artificial Sequence: Synthetic oligonucleotide
  Sense strand starting at position 3649 of SEQ ID NO: 1562183
uugagcucuucgcugggaa

SEQ ID NO: 1728348 - RNA, 19 nt, Artificial Sequence
  Description of Artificial Sequence: Synthetic oligonucleotide
  Antisense strand to SEQ ID NO: 1728347
uucccagcgaagagcucaa

SEQ ID NO: 1728349 - RNA, 19 nt, Artificial Sequence
  Description of Artificial Sequence: Synthetic oligonucleotide
  Sense strand starting at position 3650 of SEQ ID NO: 1562183
ugagcucuucgcugggaag

SEQ ID NO: 1728350 - RNA, 19 nt, Artificial Sequence
  Description of Artificial Sequence: Synthetic oligonucleotide
  Antisense strand to SEQ ID NO: 1728349
cuucccagcgaagagcuca

SEQ ID NO: 1728351 - RNA, 19 nt, Artificial Sequence
  Description of Artificial Sequence: Synthetic oligonucleotide
  Sense strand starting at position 3972 of SEQ ID NO: 1562183
gcugaaaggucucagaaug

SEQ ID NO: 1728352 - RNA, 19 nt, Artificial Sequence
  Description of Artificial Sequence: Synthetic oligonucleotide
  Antisense strand to SEQ ID NO: 1728351
cauucugagaccuuucagc

SEQ ID NO: 1728353 - RNA, 19 nt, Artificial Sequence
  Description of Artificial Sequence: Synthetic oligonucleotide
  Sense strand starting at position 70 of SEQ ID NO: 1562184
uagguuuagggcugaaauu

SEQ ID NO: 1728354 - RNA, 19 nt, Artificial Sequence
  Description of Artificial Sequence: Synthetic oligonucleotide
  Antisense strand to SEQ ID NO: 1728353
aauuucagcccuaaaccua

SEQ ID NO: 1728355 - RNA, 19 nt, Artificial Sequence
  Description of Artificial Sequence: Synthetic oligonucleotide
  Sense strand starting at position 71 of SEQ ID NO: 1562184
agguuuagggcugaaauuc

SEQ ID NO: 1728356 - RNA, 19 nt, Artificial Sequence
  Description of Artificial Sequence: Synthetic oligonucleotide
  Antisense strand to SEQ ID NO: 1728355
gaauuucagcccuaaaccu

SEQ ID NO: 1728357 - RNA, 19 nt, Artificial Sequence
  Description of Artificial Sequence: Synthetic oligonucleotide
  Sense strand starting at position 549 of SEQ ID NO: 1562184
gcgacuugucggucuguuu

SEQ ID NO: 1728358 - RNA, 19 nt, Artificial Sequence
  Description of Artificial Sequence: Synthetic oligonucleotide
  Antisense strand to SEQ ID NO: 1728357
aaacagaccgacaagucgc

SEQ ID NO: 1728359 - RNA, 19 nt, Artificial Sequence
  Description of Artificial Sequence: Synthetic oligonucleotide
  Sense strand starting at position 1065 of SEQ ID NO: 1562184
uucuguguauuucuucuua

SEQ ID NO: 1728360 - RNA, 19 nt, Artificial Sequence
  Description of Artificial Sequence: Synthetic oligonucleotide
  Antisense strand to SEQ ID NO: 1728359
uaagaagaaauacacagaa

SEQ ID NO: 1728361 - RNA, 19 nt, Artificial Sequence
  Description of Artificial Sequence: Synthetic oligonucleotide
  Sense strand starting at position 1069 of SEQ ID NO: 1562184
guguauuucuucuuaucag

SEQ ID NO: 1728362 - RNA, 19 nt, Artificial Sequence
  Description of Artificial Sequence: Synthetic oligonucleotide
  Antisense strand to SEQ ID NO: 1728361
cugauaagaagaaauacac

SEQ ID NO: 1728363 - RNA, 19 nt, Artificial Sequence
  Description of Artificial Sequence: Synthetic oligonucleotide
  Sense strand starting at position 1126 of SEQ ID NO: 1562184
ccaugaagcccgugaaaug

SEQ ID NO: 1728364 - RNA, 19 nt, Artificial Sequence
  Description of Artificial Sequence: Synthetic oligonucleotide
  Antisense strand to SEQ ID NO: 1728363
cauuucacgggcuucaugg

SEQ ID NO: 1728365 - RNA, 19 nt, Artificial Sequence
  Description of Artificial Sequence: Synthetic oligonucleotide
  Sense strand starting at position 1127 of SEQ ID NO: 1562184
caugaagcccgugaaauga

SEQ ID NO: 1728366 - RNA, 19 nt, Artificial Sequence
  Description of Artificial Sequence: Synthetic oligonucleotide
  Antisense strand to SEQ ID NO: 1728365
ucauuucacgggcuucaug

SEQ ID NO: 1728367 - RNA, 19 nt, Artificial Sequence
  Description of Artificial Sequence: Synthetic oligonucleotide
  Sense strand starting at position 1152 of SEQ ID NO: 1562184
cagucauaugugggaucau

SEQ ID NO: 1728368 - RNA, 19 nt, Artificial Sequence
  Description of Artificial Sequence: Synthetic oligonucleotide
  Antisense strand to SEQ ID NO: 1728367
augaucccacauaugacug

SEQ ID NO: 1728369 - RNA, 19 nt, Artificial Sequence
  Description of Artificial Sequence: Synthetic oligonucleotide
  Sense strand starting at position 1162 of SEQ ID NO: 1562184
ugggaucauacauguaggu

SEQ ID NO: 1728370 - RNA, 19 nt, Artificial Sequence
  Description of Artificial Sequence: Synthetic oligonucleotide
  Antisense strand to SEQ ID NO: 1728369
accuacauguaugauccca

SEQ ID NO: 1728371 - RNA, 19 nt, Artificial Sequence
  Description of Artificial Sequence: Synthetic oligonucleotide
  Sense strand starting at position 1164 of SEQ ID NO: 1562184
ggaucauacauguagguuc

SEQ ID NO: 1728372 - RNA, 19 nt, Artificial Sequence
  Description of Artificial Sequence: Synthetic oligonucleotide
  Antisense strand to SEQ ID NO: 1728371
gaaccuacauguaugaucc

SEQ ID NO: 1728373 - RNA, 19 nt, Artificial Sequence
  Description of Artificial Sequence: Synthetic oligonucleotide
  Sense strand starting at position 1204 of SEQ ID NO: 1562184
gcgaauuguguguuggcuu

SEQ ID NO: 1728374 - RNA, 19 nt, Artificial Sequence
  Description of Artificial Sequence: Synthetic oligonucleotide
  Antisense strand to SEQ ID NO: 1728373
aagccaacacacaauucgc

SEQ ID NO: 1728375 - RNA, 19 nt, Artificial Sequence
  Description of Artificial Sequence: Synthetic oligonucleotide
  Sense strand starting at position 1215 of SEQ ID NO: 1562184
guuggcuuggaauagaguu

SEQ ID NO: 1728376 - RNA, 19 nt, Artificial Sequence
  Description of Artificial Sequence: Synthetic oligonucleotide
  Antisense strand to SEQ ID NO: 1728375
aacucuauuccaagccaac

SEQ ID NO: 1728377 - RNA, 19 nt, Artificial Sequence
  Description of Artificial Sequence: Synthetic oligonucleotide
  Sense strand starting at position 1221 of SEQ ID NO: 1562184
uuggaauagaguuguguag

SEQ ID NO: 1728378 - RNA, 19 nt, Artificial Sequence
  Description of Artificial Sequence: Synthetic oligonucleotide
  Antisense strand to SEQ ID NO: 1728377
cuacacaacucuauuccaa

SEQ ID NO: 1728379 - RNA, 19 nt, Artificial Sequence
  Description of Artificial Sequence: Synthetic oligonucleotide
  Sense strand starting at position 1243 of SEQ ID NO: 1562184
caucaauguguggagguau

SEQ ID NO: 1728380 - RNA, 19 nt, Artificial Sequence
  Description of Artificial Sequence: Synthetic oligonucleotide
  Antisense strand to SEQ ID NO: 1728379
auaccuccacacauugaug

SEQ ID NO: 1728381 - RNA, 19 nt, Artificial Sequence
  Description of Artificial Sequence: Synthetic oligonucleotide
  Sense strand starting at position 1251 of SEQ ID NO: 1562184
uguggagguauugagugua

SEQ ID NO: 1728382 - RNA, 19 nt, Artificial Sequence
  Description of Artificial Sequence: Synthetic oligonucleotide
  Antisense strand to SEQ ID NO: 1728381
uacacucaauaccuccaca

SEQ ID NO: 1728383 - RNA, 19 nt, Artificial Sequence
  Description of Artificial Sequence: Synthetic oligonucleotide
  Sense strand starting at position 1254 of SEQ ID NO: 1562184
ggagguauugaguguaaau

SEQ ID NO: 1728384 - RNA, 19 nt, Artificial Sequence
  Description of Artificial Sequence: Synthetic oligonucleotide
  Antisense strand to SEQ ID NO: 1728383
auuuacacucaauaccucc

SEQ ID NO: 1728385 - RNA, 19 nt, Artificial Sequence
  Description of Artificial Sequence: Synthetic oligonucleotide
  Sense strand starting at position 1263 of SEQ ID NO: 1562184
gaguguaaauuuguguuua

SEQ ID NO: 1728386 - RNA, 19 nt, Artificial Sequence
  Description of Artificial Sequence: Synthetic oligonucleotide
  Antisense strand to SEQ ID NO: 1728385
uaaacacaaauuuacacuc

SEQ ID NO: 1728387 - RNA, 19 nt, Artificial Sequence
  Description of Artificial Sequence: Synthetic oligonucleotide
  Sense strand starting at position 1290 of SEQ ID NO: 1562184
uguguuugugugaguugug

SEQ ID NO: 1728388 - RNA, 19 nt, Artificial Sequence
  Description of Artificial Sequence: Synthetic oligonucleotide
  Antisense strand to SEQ ID NO: 1728387
cacaacucacacaaacaca

SEQ ID NO: 1728389 - RNA, 19 nt, Artificial Sequence
  Description of Artificial Sequence: Synthetic oligonucleotide
  Sense strand starting at position 1310 of SEQ ID NO: 1562184
ugguguaaauaucuacauc

SEQ ID NO: 1728390 - RNA, 19 nt, Artificial Sequence
  Description of Artificial Sequence: Synthetic oligonucleotide
  Antisense strand to SEQ ID NO: 1728389
gauguagauauuuacacca

SEQ ID NO: 1728391 - RNA, 19 nt, Artificial Sequence
  Description of Artificial Sequence: Synthetic oligonucleotide
  Sense strand starting at position 1423 of SEQ ID NO: 1562184
ucuguauguguguuugagu

SEQ ID NO: 1728392 - RNA, 19 nt, Artificial Sequence
  Description of Artificial Sequence: Synthetic oligonucleotide
  Antisense strand to SEQ ID NO: 1728391
acucaaacacacauacaga

SEQ ID NO: 1728393 - RNA, 19 nt, Artificial Sequence
  Description of Artificial Sequence: Synthetic oligonucleotide
  Sense strand starting at position 1446 of SEQ ID NO: 1562184
gagugcauuugagugugua

SEQ ID NO: 1728394 - RNA, 19 nt, Artificial Sequence
  Description of Artificial Sequence: Synthetic oligonucleotide
  Antisense strand to SEQ ID NO: 1728393
uacacacucaaaugcacuc

SEQ ID NO: 1728395 - RNA, 19 nt, Artificial Sequence
  Description of Artificial Sequence: Synthetic oligonucleotide
  Sense strand starting at position 1447 of SEQ ID NO: 1562184
agugcauuugaguguguau

SEQ ID NO: 1728396 - RNA, 19 nt, Artificial Sequence
  Description of Artificial Sequence: Synthetic oligonucleotide
  Antisense strand to SEQ ID NO: 1728395
auacacacucaaaugcacu

SEQ ID NO: 1728397 - RNA, 19 nt, Artificial Sequence
  Description of Artificial Sequence: Synthetic oligonucleotide
  Sense strand starting at position 1449 of SEQ ID NO: 1562184
ugcauuugaguguguauga

SEQ ID NO: 1728398 - RNA, 19 nt, Artificial Sequence
  Description of Artificial Sequence: Synthetic oligonucleotide
  Antisense strand to SEQ ID NO: 1728397
ucauacacacucaaaugca

SEQ ID NO: 1728399 - RNA, 19 nt, Artificial Sequence
  Description of Artificial Sequence: Synthetic oligonucleotide
  Sense strand starting at position 1466 of SEQ ID NO: 1562184
gagugcauuugaguguguu

SEQ ID NO: 1728400 - RNA, 19 nt, Artificial Sequence
  Description of Artificial Sequence: Synthetic oligonucleotide
  Antisense strand to SEQ ID NO: 1728399
aacacacucaaaugcacuc

SEQ ID NO: 1728401 - RNA, 19 nt, Artificial Sequence
  Description of Artificial Sequence: Synthetic oligonucleotide
  Sense strand starting at position 1467 of SEQ ID NO: 1562184
agugcauuugaguguguuu

SEQ ID NO: 1728402 - RNA, 19 nt, Artificial Sequence
  Description of Artificial Sequence: Synthetic oligonucleotide
  Antisense strand to SEQ ID NO: 1728401
aaacacacucaaaugcacu

SEQ ID NO: 1728403 - RNA, 19 nt, Artificial Sequence
  Description of Artificial Sequence: Synthetic oligonucleotide
  Sense strand starting at position 1469 of SEQ ID NO: 1562184
ugcauuugaguguguuuga

SEQ ID NO: 1728404 - RNA, 19 nt, Artificial Sequence
  Description of Artificial Sequence: Synthetic oligonucleotide
  Antisense strand to SEQ ID NO: 1728403
ucaaacacacucaaaugca

SEQ ID NO: 1728405 - RNA, 19 nt, Artificial Sequence
  Description of Artificial Sequence: Synthetic oligonucleotide
  Sense strand starting at position 1516 of SEQ ID NO: 1562184
augcgugugaguguguaua

SEQ ID NO: 1728406 - RNA, 19 nt, Artificial Sequence
  Description of Artificial Sequence: Synthetic oligonucleotide
  Antisense strand to SEQ ID NO: 1728405
uauacacacucacacgcau

SEQ ID NO: 1728407 - RNA, 19 nt, Artificial Sequence
  Description of Artificial Sequence: Synthetic oligonucleotide
  Sense strand starting at position 1520 of SEQ ID NO: 1562184
gugugaguguguauauguu

SEQ ID NO: 1728408 - RNA, 19 nt, Artificial Sequence
  Description of Artificial Sequence: Synthetic oligonucleotide
  Antisense strand to SEQ ID NO: 1728407
aacauauacacacucacac

SEQ ID NO: 1728409 - RNA, 19 nt, Artificial Sequence
  Description of Artificial Sequence: Synthetic oligonucleotide
  Sense strand starting at position 1737 of SEQ ID NO: 1562184
gacagagacaucggucugu

SEQ ID NO: 1728410 - RNA, 19 nt, Artificial Sequence
  Description of Artificial Sequence: Synthetic oligonucleotide
  Antisense strand to SEQ ID NO: 1728409
acagaccgaugucucuguc

SEQ ID NO: 1728411 - RNA, 19 nt, Artificial Sequence
  Description of Artificial Sequence: Synthetic oligonucleotide
  Sense strand starting at position 2051 of SEQ ID NO: 1562184
gaaggaagcgcugauaggu

SEQ ID NO: 1728412 - RNA, 19 nt, Artificial Sequence
  Description of Artificial Sequence: Synthetic oligonucleotide
  Antisense strand to SEQ ID NO: 1728411
accuaucagcgcuuccuuc

SEQ ID NO: 1728413 - RNA, 19 nt, Artificial Sequence
  Description of Artificial Sequence: Synthetic oligonucleotide
  Sense strand starting at position 2251 of SEQ ID NO: 1562184
cauagauucugguugcaau

SEQ ID NO: 1728414 - RNA, 19 nt, Artificial Sequence
  Description of Artificial Sequence: Synthetic oligonucleotide
  Antisense strand to SEQ ID NO: 1728413
auugcaaccagaaucuaug

SEQ ID NO: 1728415 - RNA, 19 nt, Artificial Sequence
  Description of Artificial Sequence: Synthetic oligonucleotide
  Sense strand starting at position 2252 of SEQ ID NO: 1562184
auagauucugguugcaauu

SEQ ID NO: 1728416 - RNA, 19 nt, Artificial Sequence
  Description of Artificial Sequence: Synthetic oligonucleotide
  Antisense strand to SEQ ID NO: 1728415
aauugcaaccagaaucuau

SEQ ID NO: 1728417 - RNA, 19 nt, Artificial Sequence
  Description of Artificial Sequence: Synthetic oligonucleotide
  Sense strand starting at position 2370 of SEQ ID NO: 1562184
cccguaugaccuuggauaa

SEQ ID NO: 1728418 - RNA, 19 nt, Artificial Sequence
  Description of Artificial Sequence: Synthetic oligonucleotide
  Antisense strand to SEQ ID NO: 1728417
uuauccaaggucauacggg

SEQ ID NO: 1728419 - RNA, 19 nt, Artificial Sequence
  Description of Artificial Sequence: Synthetic oligonucleotide
  Sense strand starting at position 2371 of SEQ ID NO: 1562184
ccguaugaccuuggauaag

SEQ ID NO: 1728420 - RNA, 19 nt, Artificial Sequence
  Description of Artificial Sequence: Synthetic oligonucleotide
  Antisense strand to SEQ ID NO: 1728419
cuuauccaaggucauacgg

SEQ ID NO: 1728421 - RNA, 19 nt, Artificial Sequence
  Description of Artificial Sequence: Synthetic oligonucleotide
  Sense strand starting at position 2458 of SEQ ID NO: 1562184
gaagacuucgcgggacuga

SEQ ID NO: 1728422 - RNA, 19 nt, Artificial Sequence
  Description of Artificial Sequence: Synthetic oligonucleotide
  Antisense strand to SEQ ID NO: 1728421
ucagucccgcgaagucuuc

SEQ ID NO: 1728423 - RNA, 19 nt, Artificial Sequence
  Description of Artificial Sequence: Synthetic oligonucleotide
  Sense strand starting at position 2513 of SEQ ID NO: 1562184
uguguuagaacagaagcua

SEQ ID NO: 1728424 - RNA, 19 nt, Artificial Sequence
  Description of Artificial Sequence: Synthetic oligonucleotide
  Antisense strand to SEQ ID NO: 1728423
uagcuucuguucuaacaca

SEQ ID NO: 1728425 - RNA, 19 nt, Artificial Sequence
  Description of Artificial Sequence: Synthetic oligonucleotide
  Sense strand starting at position 2539 of SEQ ID NO: 1562184
gcaugccuagacugaaaga

SEQ ID NO: 1728426 - RNA, 19 nt, Artificial Sequence
  Description of Artificial Sequence: Synthetic oligonucleotide
  Antisense strand to SEQ ID NO: 1728425
ucuuucagucuaggcaugc

SEQ ID NO: 1728427 - RNA, 19 nt, Artificial Sequence
  Description of Artificial Sequence: Synthetic oligonucleotide
  Sense strand starting at position 2913 of SEQ ID NO: 1562184
uugcuuugcuugucauuua

SEQ ID NO: 1728428 - RNA, 19 nt, Artificial Sequence
  Description of Artificial Sequence: Synthetic oligonucleotide
  Antisense strand to SEQ ID NO: 1728427
uaaaugacaagcaaagcaa

SEQ ID NO: 1728429 - RNA, 19 nt, Artificial Sequence
  Description of Artificial Sequence: Synthetic oligonucleotide
  Sense strand starting at position 2921 of SEQ ID NO: 1562184
cuugucauuuaacagaaag

SEQ ID NO: 1728430 - RNA, 19 nt, Artificial Sequence
  Description of Artificial Sequence: Synthetic oligonucleotide
  Antisense strand to SEQ ID NO: 1728429
cuuucuguuaaaugacaag

SEQ ID NO: 1728431 - RNA, 19 nt, Artificial Sequence
  Description of Artificial Sequence: Synthetic oligonucleotide
  Sense strand starting at position 3705 of SEQ ID NO: 1562184
uugcaaagggcucacauua

SEQ ID NO: 1728432 - RNA, 19 nt, Artificial Sequence
  Description of Artificial Sequence: Synthetic oligonucleotide
  Antisense strand to SEQ ID NO: 1728431
uaaugugagcccuuugcaa

SEQ ID NO: 1728433 - RNA, 19 nt, Artificial Sequence
  Description of Artificial Sequence: Synthetic oligonucleotide
  Sense strand starting at position 61 of SEQ ID NO: 1562185
agauguguaccacauauau

SEQ ID NO: 1728434 - RNA, 19 nt, Artificial Sequence
  Description of Artificial Sequence: Synthetic oligonucleotide
  Antisense strand to SEQ ID NO: 1728433
auauaugugguacacaucu

SEQ ID NO: 1728435 - RNA, 19 nt, Artificial Sequence
  Description of Artificial Sequence: Synthetic oligonucleotide
  Sense strand starting at position 123 of SEQ ID NO: 1562185
gggauuucccagugcagug

SEQ ID NO: 1728436 - RNA, 19 nt, Artificial Sequence
  Description of Artificial Sequence: Synthetic oligonucleotide
  Antisense strand to SEQ ID NO: 1728435
cacugcacugggaaauccc

SEQ ID NO: 1728437 - RNA, 19 nt, Artificial Sequence
  Description of Artificial Sequence: Synthetic oligonucleotide
  Sense strand starting at position 132 of SEQ ID NO: 1562185
cagugcagugccguaaaua

SEQ ID NO: 1728438 - RNA, 19 nt, Artificial Sequence
  Description of Artificial Sequence: Synthetic oligonucleotide
  Antisense strand to SEQ ID NO: 1728437
uauuuacggcacugcacug

SEQ ID NO: 1728439 - RNA, 19 nt, Artificial Sequence
  Description of Artificial Sequence: Synthetic oligonucleotide
  Sense strand starting at position 329 of SEQ ID NO: 1562185
cagguaaggccaugaaauc

SEQ ID NO: 1728440 - RNA, 19 nt, Artificial Sequence
  Description of Artificial Sequence: Synthetic oligonucleotide
  Antisense strand to SEQ ID NO: 1728439
gauuucauggccuuaccug

SEQ ID NO: 1728441 - RNA, 19 nt, Artificial Sequence
  Description of Artificial Sequence: Synthetic oligonucleotide
  Sense strand starting at position 351 of SEQ ID NO: 1562185
uuaccugaccucugaaguu

SEQ ID NO: 1728442 - RNA, 19 nt, Artificial Sequence
  Description of Artificial Sequence: Synthetic oligonucleotide
  Antisense strand to SEQ ID NO: 1728441
aacuucagaggucagguaa

SEQ ID NO: 1728443 - RNA, 19 nt, Artificial Sequence
  Description of Artificial Sequence: Synthetic oligonucleotide
  Sense strand starting at position 450 of SEQ ID NO: 1562185
auauaucccuguuuggaga

SEQ ID NO: 1728444 - RNA, 19 nt, Artificial Sequence
  Description of Artificial Sequence: Synthetic oligonucleotide
  Antisense strand to SEQ ID NO: 1728443
ucuccaaacagggauauau

SEQ ID NO: 1728445 - RNA, 19 nt, Artificial Sequence
  Description of Artificial Sequence: Synthetic oligonucleotide
  Sense strand starting at position 562 of SEQ ID NO: 1562185
ggacgaaauuaucugcuga

SEQ ID NO: 1728446 - RNA, 19 nt, Artificial Sequence
  Description of Artificial Sequence: Synthetic oligonucleotide
  Antisense strand to SEQ ID NO: 1728445
ucagcagauaauuucgucc

SEQ ID NO: 1728447 - RNA, 19 nt, Artificial Sequence
  Description of Artificial Sequence: Synthetic oligonucleotide
  Sense strand starting at position 934 of SEQ ID NO: 1562185
auauaaucacuagagugcu

SEQ ID NO: 1728448 - RNA, 19 nt, Artificial Sequence
  Description of Artificial Sequence: Synthetic oligonucleotide
  Antisense strand to SEQ ID NO: 1728447
agcacucuagugauuauau

SEQ ID NO: 1728449 - RNA, 19 nt, Artificial Sequence
  Description of Artificial Sequence: Synthetic oligonucleotide
  Sense strand starting at position 940 of SEQ ID NO: 1562185
ucacuagagugcuuauaaa

SEQ ID NO: 1728450 - RNA, 19 nt, Artificial Sequence
  Description of Artificial Sequence: Synthetic oligonucleotide
  Antisense strand to SEQ ID NO: 1728449
uuuauaagcacucuaguga

SEQ ID NO: 1728451 - RNA, 19 nt, Artificial Sequence
  Description of Artificial Sequence: Synthetic oligonucleotide
  Sense strand starting at position 1049 of SEQ ID NO: 1562185
cccuacacaccucgagauu

SEQ ID NO: 1728452 - RNA, 19 nt, Artificial Sequence
  Description of Artificial Sequence: Synthetic oligonucleotide
  Antisense strand to SEQ ID NO: 1728451
aaucucgagguguguaggg

SEQ ID NO: 1728453 - RNA, 19 nt, Artificial Sequence
  Description of Artificial Sequence: Synthetic oligonucleotide
  Sense strand starting at position 1243 of SEQ ID NO: 1562185
cagcuaugaguguaaguga

SEQ ID NO: 1728454 - RNA, 19 nt, Artificial Sequence
  Description of Artificial Sequence: Synthetic oligonucleotide
  Antisense strand to SEQ ID NO: 1728453
ucacuuacacucauagcug

SEQ ID NO: 1728455 - RNA, 19 nt, Artificial Sequence
  Description of Artificial Sequence: Synthetic oligonucleotide
  Sense strand starting at position 2008 of SEQ ID NO: 1562185
cccuuauucccgcugcauu

SEQ ID NO: 1728456 - RNA, 19 nt, Artificial Sequence
  Description of Artificial Sequence: Synthetic oligonucleotide
  Antisense strand to SEQ ID NO: 1728455
aaugcagcgggaauaaggg

SEQ ID NO: 1728457 - RNA, 19 nt, Artificial Sequence
  Description of Artificial Sequence: Synthetic oligonucleotide
  Sense strand starting at position 2114 of SEQ ID NO: 1562185
agaccuugauuugagggaa

SEQ ID NO: 1728458 - RNA, 19 nt, Artificial Sequence
  Description of Artificial Sequence: Synthetic oligonucleotide
  Antisense strand to SEQ ID NO: 1728457
uucccucaaaucaaggucu

SEQ ID NO: 1728459 - RNA, 19 nt, Artificial Sequence
  Description of Artificial Sequence: Synthetic oligonucleotide
  Sense strand starting at position 2157 of SEQ ID NO: 1562185
gcaguacgacuccaagaau

SEQ ID NO: 1728460 - RNA, 19 nt, Artificial Sequence
  Description of Artificial Sequence: Synthetic oligonucleotide
  Antisense strand to SEQ ID NO: 1728459
auucuuggagucguacugc

SEQ ID NO: 1728461 - RNA, 19 nt, Artificial Sequence
  Description of Artificial Sequence: Synthetic oligonucleotide
  Sense strand starting at position 2215 of SEQ ID NO: 1562185
guauuuguuugacuauccu

SEQ ID NO: 1728462 - RNA, 19 nt, Artificial Sequence
  Description of Artificial Sequence: Synthetic oligonucleotide
  Antisense strand to SEQ ID NO: 1728461
aggauagucaaacaaauac

SEQ ID NO: 1728463 - RNA, 19 nt, Artificial Sequence
  Description of Artificial Sequence: Synthetic oligonucleotide
  Sense strand starting at position 2219 of SEQ ID NO: 1562185
uuguuugacuauccuauau

SEQ ID NO: 1728464 - RNA, 19 nt, Artificial Sequence
  Description of Artificial Sequence: Synthetic oligonucleotide
  Antisense strand to SEQ ID NO: 1728463
auauaggauagucaaacaa

SEQ ID NO: 1728465 - RNA, 19 nt, Artificial Sequence
  Description of Artificial Sequence: Synthetic oligonucleotide
  Sense strand starting at position 2231 of SEQ ID NO: 1562185
ccuauauccucuuuaguag

SEQ ID NO: 1728466 - RNA, 19 nt, Artificial Sequence
  Description of Artificial Sequence: Synthetic oligonucleotide
  Antisense strand to SEQ ID NO: 1728465
cuacuaaagaggauauagg

SEQ ID NO: 1728467 - RNA, 19 nt, Artificial Sequence
  Description of Artificial Sequence: Synthetic oligonucleotide
  Sense strand starting at position 2232 of SEQ ID NO: 1562185
cuauauccucuuuaguaga

SEQ ID NO: 1728468 - RNA, 19 nt, Artificial Sequence
  Description of Artificial Sequence: Synthetic oligonucleotide
  Antisense strand to SEQ ID NO: 1728467
ucuacuaaagaggauauag

SEQ ID NO: 1728469 - RNA, 19 nt, Artificial Sequence
  Description of Artificial Sequence: Synthetic oligonucleotide
  Sense strand starting at position 2240 of SEQ ID NO: 1562185
ucuuuaguagacuguaauc

SEQ ID NO: 1728470 - RNA, 19 nt, Artificial Sequence
  Description of Artificial Sequence: Synthetic oligonucleotide
  Antisense strand to SEQ ID NO: 1728469
gauuacagucuacuaaaga

SEQ ID NO: 1728471 - RNA, 19 nt, Artificial Sequence
  Description of Artificial Sequence: Synthetic oligonucleotide
  Sense strand starting at position 2347 of SEQ ID NO: 1562185
ucaucauaggcuugugaug

SEQ ID NO: 1728472 - RNA, 19 nt, Artificial Sequence
  Description of Artificial Sequence: Synthetic oligonucleotide
  Antisense strand to SEQ ID NO: 1728471
caucacaagccuaugauga

SEQ ID NO: 1728473 - RNA, 19 nt, Artificial Sequence
  Description of Artificial Sequence: Synthetic oligonucleotide
  Sense strand starting at position 2353 of SEQ ID NO: 1562185
uaggcuugugaugaggauu

SEQ ID NO: 1728474 - RNA, 19 nt, Artificial Sequence
  Description of Artificial Sequence: Synthetic oligonucleotide
  Antisense strand to SEQ ID NO: 1728473
aauccucaucacaagccua

SEQ ID NO: 1728475 - RNA, 19 nt, Artificial Sequence
  Description of Artificial Sequence: Synthetic oligonucleotide
  Sense strand starting at position 2447 of SEQ ID NO: 1562185
gugguagaugcccaauaca

SEQ ID NO: 1728476 - RNA, 19 nt, Artificial Sequence
  Description of Artificial Sequence: Synthetic oligonucleotide
  Antisense strand to SEQ ID NO: 1728475
uguauugggcaucuaccac

SEQ ID NO: 1728477 - RNA, 19 nt, Artificial Sequence
  Description of Artificial Sequence: Synthetic oligonucleotide
  Sense strand starting at position 2450 of SEQ ID NO: 1562185
guagaugcccaauacauua

SEQ ID NO: 1728478 - RNA, 19 nt, Artificial Sequence
  Description of Artificial Sequence: Synthetic oligonucleotide
  Antisense strand to SEQ ID NO: 1728477
uaauguauugggcaucuac

SEQ ID NO: 1728479 - RNA, 19 nt, Artificial Sequence
  Description of Artificial Sequence: Synthetic oligonucleotide
  Sense strand starting at position 2509 of SEQ ID NO: 1562185
gggagauaucucugaaugu

SEQ ID NO: 1728480 - RNA, 19 nt, Artificial Sequence
  Description of Artificial Sequence: Synthetic oligonucleotide
  Antisense strand to SEQ ID NO: 1728479
acauucagagauaucuccc

SEQ ID NO: 1728481 - RNA, 19 nt, Artificial Sequence
  Description of Artificial Sequence: Synthetic oligonucleotide
  Sense strand starting at position 2626 of SEQ ID NO: 1562185
ugguauuaagguugggaaa

SEQ ID NO: 1728482 - RNA, 19 nt, Artificial Sequence
  Description of Artificial Sequence: Synthetic oligonucleotide
  Antisense strand to SEQ ID NO: 1728481
uuucccaaccuuaauacca

SEQ ID NO: 1728483 - RNA, 19 nt, Artificial Sequence
  Description of Artificial Sequence: Synthetic oligonucleotide
  Sense strand starting at position 2627 of SEQ ID NO: 1562185
gguauuaagguugggaaag

SEQ ID NO: 1728484 - RNA, 19 nt, Artificial Sequence
  Description of Artificial Sequence: Synthetic oligonucleotide
  Antisense strand to SEQ ID NO: 1728483
cuuucccaaccuuaauacc

SEQ ID NO: 1728485 - RNA, 19 nt, Artificial Sequence
  Description of Artificial Sequence: Synthetic oligonucleotide
  Sense strand starting at position 2790 of SEQ ID NO: 1562185
agcacuuagcauuaugcua

SEQ ID NO: 1728486 - RNA, 19 nt, Artificial Sequence
  Description of Artificial Sequence: Synthetic oligonucleotide
  Antisense strand to SEQ ID NO: 1728485
uagcauaaugcuaagugcu

SEQ ID NO: 1728487 - RNA, 19 nt, Artificial Sequence
  Description of Artificial Sequence: Synthetic oligonucleotide
  Sense strand starting at position 2937 of SEQ ID NO: 1562185
gcaugaugagcauacgguu

SEQ ID NO: 1728488 - RNA, 19 nt, Artificial Sequence
  Description of Artificial Sequence: Synthetic oligonucleotide
  Antisense strand to SEQ ID NO: 1728487
aaccguaugcucaucaugc

SEQ ID NO: 1728489 - RNA, 19 nt, Artificial Sequence
  Description of Artificial Sequence: Synthetic oligonucleotide
  Sense strand starting at position 2952 of SEQ ID NO: 1562185
gguuucucuccucaagaga

SEQ ID NO: 1728490 - RNA, 19 nt, Artificial Sequence
  Description of Artificial Sequence: Synthetic oligonucleotide
  Antisense strand to SEQ ID NO: 1728489
ucucuugaggagagaaacc

SEQ ID NO: 1728491 - RNA, 19 nt, Artificial Sequence
  Description of Artificial Sequence: Synthetic oligonucleotide
  Sense strand starting at position 3021 of SEQ ID NO: 1562185
ugaccaauaggaugugcua

SEQ ID NO: 1728492 - RNA, 19 nt, Artificial Sequence
  Description of Artificial Sequence: Synthetic oligonucleotide
  Antisense strand to SEQ ID NO: 1728491
uagcacauccuauugguca

SEQ ID NO: 1728493 - RNA, 19 nt, Artificial Sequence
  Description of Artificial Sequence: Synthetic oligonucleotide
  Sense strand starting at position 3094 of SEQ ID NO: 1562185
uucuaccuucuugguuaua

SEQ ID NO: 1728494 - RNA, 19 nt, Artificial Sequence
  Description of Artificial Sequence: Synthetic oligonucleotide
  Antisense strand to SEQ ID NO: 1728493
uauaaccaagaagguagaa

SEQ ID NO: 1728495 - RNA, 19 nt, Artificial Sequence
  Description of Artificial Sequence: Synthetic oligonucleotide
  Sense strand starting at position 3103 of SEQ ID NO: 1562185
cuugguuauaaagaagugu

SEQ ID NO: 1728496 - RNA, 19 nt, Artificial Sequence
  Description of Artificial Sequence: Synthetic oligonucleotide
  Antisense strand to SEQ ID NO: 1728495
acacuucuuuauaaccaag

SEQ ID NO: 1728497 - RNA, 19 nt, Artificial Sequence
  Description of Artificial Sequence: Synthetic oligonucleotide
  Sense strand starting at position 3415 of SEQ ID NO: 1562185
uccugaagauuggcagauu

SEQ ID NO: 1728498 - RNA, 19 nt, Artificial Sequence
  Description of Artificial Sequence: Synthetic oligonucleotide
  Antisense strand to SEQ ID NO: 1728497
aaucugccaaucuucagga

SEQ ID NO: 1728499 - RNA, 19 nt, Artificial Sequence
  Description of Artificial Sequence: Synthetic oligonucleotide
  Sense strand starting at position 3424 of SEQ ID NO: 1562185
uuggcagauuggcuauuaa

SEQ ID NO: 1728500 - RNA, 19 nt, Artificial Sequence
  Description of Artificial Sequence: Synthetic oligonucleotide
  Antisense strand to SEQ ID NO: 1728499
uuaauagccaaucugccaa

SEQ ID NO: 1728501 - RNA, 19 nt, Artificial Sequence
  Description of Artificial Sequence: Synthetic oligonucleotide
  Sense strand starting at position 3488 of SEQ ID NO: 1562185
gucucauaguuuccagacu

SEQ ID NO: 1728502 - RNA, 19 nt, Artificial Sequence
  Description of Artificial Sequence: Synthetic oligonucleotide
  Antisense strand to SEQ ID NO: 1728501
agucuggaaacuaugagac

SEQ ID NO: 1728503 - RNA, 19 nt, Artificial Sequence
  Description of Artificial Sequence: Synthetic oligonucleotide
  Sense strand starting at position 3584 of SEQ ID NO: 1562185
ggagcaaagcuccauaaau

SEQ ID NO: 1728504 - RNA, 19 nt, Artificial Sequence
  Description of Artificial Sequence: Synthetic oligonucleotide
  Antisense strand to SEQ ID NO: 1728503
auuuauggagcuuugcucc

SEQ ID NO: 1728505 - RNA, 19 nt, Artificial Sequence
  Description of Artificial Sequence: Synthetic oligonucleotide
  Sense strand starting at position 3683 of SEQ ID NO: 1562185
uuuggugacauaugccaga

SEQ ID NO: 1728506 - RNA, 19 nt, Artificial Sequence
  Description of Artificial Sequence: Synthetic oligonucleotide
  Antisense strand to SEQ ID NO: 1728505
ucuggcauaugucaccaaa

SEQ ID NO: 1728507 - RNA, 19 nt, Artificial Sequence
  Description of Artificial Sequence: Synthetic oligonucleotide
  Sense strand starting at position 3688 of SEQ ID NO: 1562185
ugacauaugccagaauccu

SEQ ID NO: 1728508 - RNA, 19 nt, Artificial Sequence
  Description of Artificial Sequence: Synthetic oligonucleotide
  Antisense strand to SEQ ID NO: 1728507
aggauucuggcauauguca

SEQ ID NO: 1728509 - RNA, 19 nt, Artificial Sequence
  Description of Artificial Sequence: Synthetic oligonucleotide
  Sense strand starting at position 3755 of SEQ ID NO: 1562185
ccauaacaugggcaaguuu

SEQ ID NO: 1728510 - RNA, 19 nt, Artificial Sequence
  Description of Artificial Sequence: Synthetic oligonucleotide
  Antisense strand to SEQ ID NO: 1728509
aaacuugcccauguuaugg

SEQ ID NO: 1728511 - RNA, 19 nt, Artificial Sequence
  Description of Artificial Sequence: Synthetic oligonucleotide
  Sense strand starting at position 3875 of SEQ ID NO: 1562185
cccggauucgaacaauuau

SEQ ID NO: 1728512 - RNA, 19 nt, Artificial Sequence
  Description of Artificial Sequence: Synthetic oligonucleotide
  Antisense strand to SEQ ID NO: 1728511
auaauuguucgaauccggg

SEQ ID NO: 1728513 - RNA, 19 nt, Artificial Sequence
  Description of Artificial Sequence: Synthetic oligonucleotide
  Sense strand starting at position 154 of SEQ ID NO: 1562186
ggaggaagguuucucgucu

SEQ ID NO: 1728514 - RNA, 19 nt, Artificial Sequence
  Description of Artificial Sequence: Synthetic oligonucleotide
  Antisense strand to SEQ ID NO: 1728513
agacgagaaaccuuccucc

SEQ ID NO: 1728515 - RNA, 19 nt, Artificial Sequence
  Description of Artificial Sequence: Synthetic oligonucleotide
  Sense strand starting at position 212 of SEQ ID NO: 1562186
ucaucuuuggauugagaua

SEQ ID NO: 1728516 - RNA, 19 nt, Artificial Sequence
  Description of Artificial Sequence: Synthetic oligonucleotide
  Antisense strand to SEQ ID NO: 1728515
uaucucaauccaaagauga

SEQ ID NO: 1728517 - RNA, 19 nt, Artificial Sequence
  Description of Artificial Sequence: Synthetic oligonucleotide
  Sense strand starting at position 611 of SEQ ID NO: 1562186
ccaagauucugguuucuug

SEQ ID NO: 1728518 - RNA, 19 nt, Artificial Sequence
  Description of Artificial Sequence: Synthetic oligonucleotide
  Antisense strand to SEQ ID NO: 1728517
caagaaaccagaaucuugg

SEQ ID NO: 1728519 - RNA, 19 nt, Artificial Sequence
  Description of Artificial Sequence: Synthetic oligonucleotide
  Sense strand starting at position 815 of SEQ ID NO: 1562186
cccacuucuccuggagcaa

SEQ ID NO: 1728520 - RNA, 19 nt, Artificial Sequence
  Description of Artificial Sequence: Synthetic oligonucleotide
  Antisense strand to SEQ ID NO: 1728519
uugcuccaggagaaguggg

SEQ ID NO: 1728521 - RNA, 19 nt, Artificial Sequence
  Description of Artificial Sequence: Synthetic oligonucleotide
  Sense strand starting at position 921 of SEQ ID NO: 1562186
ggagguuaagaguguuccu

SEQ ID NO: 1728522 - RNA, 19 nt, Artificial Sequence
  Description of Artificial Sequence: Synthetic oligonucleotide
  Antisense strand to SEQ ID NO: 1728521
aggaacacucuuaaccucc

SEQ ID NO: 1728523 - RNA, 19 nt, Artificial Sequence
  Description of Artificial Sequence: Synthetic oligonucleotide
  Sense strand starting at position 924 of SEQ ID NO: 1562186
gguuaagaguguuccuccu

SEQ ID NO: 1728524 - RNA, 19 nt, Artificial Sequence
  Description of Artificial Sequence: Synthetic oligonucleotide
  Antisense strand to SEQ ID NO: 1728523
aggaggaacacucuuaacc

SEQ ID NO: 1728525 - RNA, 19 nt, Artificial Sequence
  Description of Artificial Sequence: Synthetic oligonucleotide
  Sense strand starting at position 926 of SEQ ID NO: 1562186
uuaagaguguuccuccuag

SEQ ID NO: 1728526 - RNA, 19 nt, Artificial Sequence
  Description of Artificial Sequence: Synthetic oligonucleotide
  Antisense strand to SEQ ID NO: 1728525
cuaggaggaacacucuuaa

SEQ ID NO: 1728527 - RNA, 19 nt, Artificial Sequence
  Description of Artificial Sequence: Synthetic oligonucleotide
  Sense strand starting at position 1103 of SEQ ID NO: 1562186
accuucucugagugguacu

SEQ ID NO: 1728528 - RNA, 19 nt, Artificial Sequence
  Description of Artificial Sequence: Synthetic oligonucleotide
  Antisense strand to SEQ ID NO: 1728527
aguaccacucagagaaggu

SEQ ID NO: 1728529 - RNA, 19 nt, Artificial Sequence
  Description of Artificial Sequence: Synthetic oligonucleotide
  Sense strand starting at position 1426 of SEQ ID NO: 1562186
cugauuuguggcugccuca

SEQ ID NO: 1728530 - RNA, 19 nt, Artificial Sequence
  Description of Artificial Sequence: Synthetic oligonucleotide
  Antisense strand to SEQ ID NO: 1728529
ugaggcagccacaaaucag

SEQ ID NO: 1728531 - RNA, 19 nt, Artificial Sequence
  Description of Artificial Sequence: Synthetic oligonucleotide
  Sense strand starting at position 1500 of SEQ ID NO: 1562186
ucacauuugucugauacug

SEQ ID NO: 1728532 - RNA, 19 nt, Artificial Sequence
  Description of Artificial Sequence: Synthetic oligonucleotide
  Antisense strand to SEQ ID NO: 1728531
caguaucagacaaauguga

SEQ ID NO: 1728533 - RNA, 19 nt, Artificial Sequence
  Description of Artificial Sequence: Synthetic oligonucleotide
  Sense strand starting at position 1510 of SEQ ID NO: 1562186
cugauacugucagucauga

SEQ ID NO: 1728534 - RNA, 19 nt, Artificial Sequence
  Description of Artificial Sequence: Synthetic oligonucleotide
  Antisense strand to SEQ ID NO: 1728533
ucaugacugacaguaucag

SEQ ID NO: 1728535 - RNA, 19 nt, Artificial Sequence
  Description of Artificial Sequence: Synthetic oligonucleotide
  Sense strand starting at position 1685 of SEQ ID NO: 1562186
cagugcuggccugaacaca

SEQ ID NO: 1728536 - RNA, 19 nt, Artificial Sequence
  Description of Artificial Sequence: Synthetic oligonucleotide
  Antisense strand to SEQ ID NO: 1728535
uguguucaggccagcacug

SEQ ID NO: 1728537 - RNA, 19 nt, Artificial Sequence
  Description of Artificial Sequence: Synthetic oligonucleotide
  Sense strand starting at position 1711 of SEQ ID NO: 1562186
ugcacagguugucuugaau

SEQ ID NO: 1728538 - RNA, 19 nt, Artificial Sequence
  Description of Artificial Sequence: Synthetic oligonucleotide
  Antisense strand to SEQ ID NO: 1728537
auucaagacaaccugugca

SEQ ID NO: 1728539 - RNA, 19 nt, Artificial Sequence
  Description of Artificial Sequence: Synthetic oligonucleotide
  Sense strand starting at position 1720 of SEQ ID NO: 1562186
ugucuugaauccuuccagu

SEQ ID NO: 1728540 - RNA, 19 nt, Artificial Sequence
  Description of Artificial Sequence: Synthetic oligonucleotide
  Antisense strand to SEQ ID NO: 1728539
acuggaaggauucaagaca

SEQ ID NO: 1728541 - RNA, 19 nt, Artificial Sequence
  Description of Artificial Sequence: Synthetic oligonucleotide
  Sense strand starting at position 2114 of SEQ ID NO: 1562186
ggcuucuugguuugagauu

SEQ ID NO: 1728542 - RNA, 19 nt, Artificial Sequence
  Description of Artificial Sequence: Synthetic oligonucleotide
  Antisense strand to SEQ ID NO: 1728541
aaucucaaaccaagaagcc

SEQ ID NO: 1728543 - RNA, 19 nt, Artificial Sequence
  Description of Artificial Sequence: Synthetic oligonucleotide
  Sense strand starting at position 2120 of SEQ ID NO: 1562186
uugguuugagauugaaugu

SEQ ID NO: 1728544 - RNA, 19 nt, Artificial Sequence
  Description of Artificial Sequence: Synthetic oligonucleotide
  Antisense strand to SEQ ID NO: 1728543
acauucaaucucaaaccaa

SEQ ID NO: 1728545 - RNA, 19 nt, Artificial Sequence
  Description of Artificial Sequence: Synthetic oligonucleotide
  Sense strand starting at position 2226 of SEQ ID NO: 1562186
cagguuucccugcaaagag

SEQ ID NO: 1728546 - RNA, 19 nt, Artificial Sequence
  Description of Artificial Sequence: Synthetic oligonucleotide
  Antisense strand to SEQ ID NO: 1728545
cucuuugcagggaaaccug

SEQ ID NO: 1728547 - RNA, 19 nt, Artificial Sequence
  Description of Artificial Sequence: Synthetic oligonucleotide
  Sense strand starting at position 2311 of SEQ ID NO: 1562186
ggcuuaucuccuggcaaug

SEQ ID NO: 1728548 - RNA, 19 nt, Artificial Sequence
  Description of Artificial Sequence: Synthetic oligonucleotide
  Antisense strand to SEQ ID NO: 1728547
cauugccaggagauaagcc

SEQ ID NO: 1728549 - RNA, 19 nt, Artificial Sequence
  Description of Artificial Sequence: Synthetic oligonucleotide
  Sense strand starting at position 2421 of SEQ ID NO: 1562186
gaaauucuagaauguuugu

SEQ ID NO: 1728550 - RNA, 19 nt, Artificial Sequence
  Description of Artificial Sequence: Synthetic oligonucleotide
  Antisense strand to SEQ ID NO: 1728549
acaaacauucuagaauuuc

SEQ ID NO: 1728551 - RNA, 19 nt, Artificial Sequence
  Description of Artificial Sequence: Synthetic oligonucleotide
  Sense strand starting at position 2426 of SEQ ID NO: 1562186
ucuagaauguuuguuuaag

SEQ ID NO: 1728552 - RNA, 19 nt, Artificial Sequence
  Description of Artificial Sequence: Synthetic oligonucleotide
  Antisense strand to SEQ ID NO: 1728551
cuuaaacaaacauucuaga

SEQ ID NO: 1728553 - RNA, 19 nt, Artificial Sequence
  Description of Artificial Sequence: Synthetic oligonucleotide
  Sense strand starting at position 2427 of SEQ ID NO: 1562186
cuagaauguuuguuuaagu

SEQ ID NO: 1728554 - RNA, 19 nt, Artificial Sequence
  Description of Artificial Sequence: Synthetic oligonucleotide
  Antisense strand to SEQ ID NO: 1728553
acuuaaacaaacauucuag

SEQ ID NO: 1728555 - RNA, 19 nt, Artificial Sequence
  Description of Artificial Sequence: Synthetic oligonucleotide
  Sense strand starting at position 2738 of SEQ ID NO: 1562186
agaugaauguucccgcuca

SEQ ID NO: 1728556 - RNA, 19 nt, Artificial Sequence
  Description of Artificial Sequence: Synthetic oligonucleotide
  Antisense strand to SEQ ID NO: 1728555
ugagcgggaacauucaucu

SEQ ID NO: 1728557 - RNA, 19 nt, Artificial Sequence
  Description of Artificial Sequence: Synthetic oligonucleotide
  Sense strand starting at position 2884 of SEQ ID NO: 1562186
uggaguucuuaaucuggag

SEQ ID NO: 1728558 - RNA, 19 nt, Artificial Sequence
  Description of Artificial Sequence: Synthetic oligonucleotide
  Antisense strand to SEQ ID NO: 1728557
cuccagauuaagaacucca

SEQ ID NO: 1728559 - RNA, 19 nt, Artificial Sequence
  Description of Artificial Sequence: Synthetic oligonucleotide
  Sense strand starting at position 2916 of SEQ ID NO: 1562186
cagagcuguggauggaauu

SEQ ID NO: 1728560 - RNA, 19 nt, Artificial Sequence
  Description of Artificial Sequence: Synthetic oligonucleotide
  Antisense strand to SEQ ID NO: 1728559
aauuccauccacagcucug

SEQ ID NO: 1728561 - RNA, 19 nt, Artificial Sequence
  Description of Artificial Sequence: Synthetic oligonucleotide
  Sense strand starting at position 2926 of SEQ ID NO: 1562186
gauggaauucuguggguuu

SEQ ID NO: 1728562 - RNA, 19 nt, Artificial Sequence
  Description of Artificial Sequence: Synthetic oligonucleotide
  Antisense strand to SEQ ID NO: 1728561
aaacccacagaauuccauc

SEQ ID NO: 1728563 - RNA, 19 nt, Artificial Sequence
  Description of Artificial Sequence: Synthetic oligonucleotide
  Sense strand starting at position 2928 of SEQ ID NO: 1562186
uggaauucuguggguuugu

SEQ ID NO: 1728564 - RNA, 19 nt, Artificial Sequence
  Description of Artificial Sequence: Synthetic oligonucleotide
  Antisense strand to SEQ ID NO: 1728563
acaaacccacagaauucca

SEQ ID NO: 1728565 - RNA, 19 nt, Artificial Sequence
  Description of Artificial Sequence: Synthetic oligonucleotide
  Sense strand starting at position 2933 of SEQ ID NO: 1562186
uucuguggguuugugaaua

SEQ ID NO: 1728566 - RNA, 19 nt, Artificial Sequence
  Description of Artificial Sequence: Synthetic oligonucleotide
  Antisense strand to SEQ ID NO: 1728565
uauucacaaacccacagaa

SEQ ID NO: 1728567 - RNA, 19 nt, Artificial Sequence
  Description of Artificial Sequence: Synthetic oligonucleotide
  Sense strand starting at position 2938 of SEQ ID NO: 1562186
uggguuugugaauagugau

SEQ ID NO: 1728568 - RNA, 19 nt, Artificial Sequence
  Description of Artificial Sequence: Synthetic oligonucleotide
  Antisense strand to SEQ ID NO: 1728567
aucacuauucacaaaccca

SEQ ID NO: 1728569 - RNA, 19 nt, Artificial Sequence
  Description of Artificial Sequence: Synthetic oligonucleotide
  Sense strand starting at position 3017 of SEQ ID NO: 1562186
ucaugaauguaagcaaaga

SEQ ID NO: 1728570 - RNA, 19 nt, Artificial Sequence
  Description of Artificial Sequence: Synthetic oligonucleotide
  Antisense strand to SEQ ID NO: 1728569
ucuuugcuuacauucauga

SEQ ID NO: 1728571 - RNA, 19 nt, Artificial Sequence
  Description of Artificial Sequence: Synthetic oligonucleotide
  Sense strand starting at position 3145 of SEQ ID NO: 1562186
agagaccugccaugaaauc

SEQ ID NO: 1728572 - RNA, 19 nt, Artificial Sequence
  Description of Artificial Sequence: Synthetic oligonucleotide
  Antisense strand to SEQ ID NO: 1728571
gauuucauggcaggucucu

SEQ ID NO: 1728573 - RNA, 19 nt, Artificial Sequence
  Description of Artificial Sequence: Synthetic oligonucleotide
  Sense strand starting at position 3237 of SEQ ID NO: 1562186
gaucauuggucuccuuugu

SEQ ID NO: 1728574 - RNA, 19 nt, Artificial Sequence
  Description of Artificial Sequence: Synthetic oligonucleotide
  Antisense strand to SEQ ID NO: 1728573
acaaaggagaccaaugauc

SEQ ID NO: 1728575 - RNA, 19 nt, Artificial Sequence
  Description of Artificial Sequence: Synthetic oligonucleotide
  Sense strand starting at position 3241 of SEQ ID NO: 1562186
auuggucuccuuuguaauc

SEQ ID NO: 1728576 - RNA, 19 nt, Artificial Sequence
  Description of Artificial Sequence: Synthetic oligonucleotide
  Antisense strand to SEQ ID NO: 1728575
gauuacaaaggagaccaau

SEQ ID NO: 1728577 - RNA, 19 nt, Artificial Sequence
  Description of Artificial Sequence: Synthetic oligonucleotide
  Sense strand starting at position 3280 of SEQ ID NO: 1562186
uuuaaugucuauguucuga

SEQ ID NO: 1728578 - RNA, 19 nt, Artificial Sequence
  Description of Artificial Sequence: Synthetic oligonucleotide
  Antisense strand to SEQ ID NO: 1728577
ucagaacauagacauuaaa

SEQ ID NO: 1728579 - RNA, 19 nt, Artificial Sequence
  Description of Artificial Sequence: Synthetic oligonucleotide
  Sense strand starting at position 3381 of SEQ ID NO: 1562186
uugggaguuccggaccagu

SEQ ID NO: 1728580 - RNA, 19 nt, Artificial Sequence
  Description of Artificial Sequence: Synthetic oligonucleotide
  Antisense strand to SEQ ID NO: 1728579
acugguccggaacucccaa

SEQ ID NO: 1728581 - RNA, 19 nt, Artificial Sequence
  Description of Artificial Sequence: Synthetic oligonucleotide
  Sense strand starting at position 3550 of SEQ ID NO: 1562186
cugcacucccugggugaua

SEQ ID NO: 1728582 - RNA, 19 nt, Artificial Sequence
  Description of Artificial Sequence: Synthetic oligonucleotide
  Antisense strand to SEQ ID NO: 1728581
uaucacccagggagugcag

SEQ ID NO: 1728583 - RNA, 19 nt, Artificial Sequence
  Description of Artificial Sequence: Synthetic oligonucleotide
  Sense strand starting at position 3552 of SEQ ID NO: 1562186
gcacucccugggugauaga

SEQ ID NO: 1728584 - RNA, 19 nt, Artificial Sequence
  Description of Artificial Sequence: Synthetic oligonucleotide
  Antisense strand to SEQ ID NO: 1728583
ucuaucacccagggagugc

SEQ ID NO: 1728585 - RNA, 19 nt, Artificial Sequence
  Description of Artificial Sequence: Synthetic oligonucleotide
  Sense strand starting at position 3638 of SEQ ID NO: 1562186
aggauucuaugacacaaca

SEQ ID NO: 1728586 - RNA, 19 nt, Artificial Sequence
  Description of Artificial Sequence: Synthetic oligonucleotide
  Antisense strand to SEQ ID NO: 1728585
uguugugucauagaauccu

SEQ ID NO: 1728587 - RNA, 19 nt, Artificial Sequence
  Description of Artificial Sequence: Synthetic oligonucleotide
  Sense strand starting at position 3704 of SEQ ID NO: 1562186
agaccuagccucugaucau

SEQ ID NO: 1728588 - RNA, 19 nt, Artificial Sequence
  Description of Artificial Sequence: Synthetic oligonucleotide
  Antisense strand to SEQ ID NO: 1728587
augaucagaggcuaggucu

SEQ ID NO: 1728589 - RNA, 19 nt, Artificial Sequence
  Description of Artificial Sequence: Synthetic oligonucleotide
  Sense strand starting at position 3713 of SEQ ID NO: 1562186
cucugaucaugcccaugua

SEQ ID NO: 1728590 - RNA, 19 nt, Artificial Sequence
  Description of Artificial Sequence: Synthetic oligonucleotide
  Antisense strand to SEQ ID NO: 1728589
uacaugggcaugaucagag

SEQ ID NO: 1728591 - RNA, 19 nt, Artificial Sequence
  Description of Artificial Sequence: Synthetic oligonucleotide
  Sense strand starting at position 3716 of SEQ ID NO: 1562186
ugaucaugcccauguacuu

SEQ ID NO: 1728592 - RNA, 19 nt, Artificial Sequence
  Description of Artificial Sequence: Synthetic oligonucleotide
  Antisense strand to SEQ ID NO: 1728591
aaguacaugggcaugauca

SEQ ID NO: 1728593 - RNA, 19 nt, Artificial Sequence
  Description of Artificial Sequence: Synthetic oligonucleotide
  Sense strand starting at position 224 of SEQ ID NO: 1562187
uggcuuggaccaggucaua

SEQ ID NO: 1728594 - RNA, 19 nt, Artificial Sequence
  Description of Artificial Sequence: Synthetic oligonucleotide
  Antisense strand to SEQ ID NO: 1728593
uaugaccugguccaagcca

SEQ ID NO: 1728595 - RNA, 19 nt, Artificial Sequence
  Description of Artificial Sequence: Synthetic oligonucleotide
  Sense strand starting at position 262 of SEQ ID NO: 1562187
ggauguuaacccuggccua

SEQ ID NO: 1728596 - RNA, 19 nt, Artificial Sequence
  Description of Artificial Sequence: Synthetic oligonucleotide
  Antisense strand to SEQ ID NO: 1728595
uaggccaggguuaacaucc

SEQ ID NO: 1728597 - RNA, 19 nt, Artificial Sequence
  Description of Artificial Sequence: Synthetic oligonucleotide
  Sense strand starting at position 325 of SEQ ID NO: 1562187
uggguauaggccugaagaa

SEQ ID NO: 1728598 - RNA, 19 nt, Artificial Sequence
  Description of Artificial Sequence: Synthetic oligonucleotide
  Antisense strand to SEQ ID NO: 1728597
uucuucaggccuauaccca

SEQ ID NO: 1728599 - RNA, 19 nt, Artificial Sequence
  Description of Artificial Sequence: Synthetic oligonucleotide
  Sense strand starting at position 366 of SEQ ID NO: 1562187
gcccaagucaggugugaaa

SEQ ID NO: 1728600 - RNA, 19 nt, Artificial Sequence
  Description of Artificial Sequence: Synthetic oligonucleotide
  Antisense strand to SEQ ID NO: 1728599
uuucacaccugacuugggc

SEQ ID NO: 1728601 - RNA, 19 nt, Artificial Sequence
  Description of Artificial Sequence: Synthetic oligonucleotide
  Sense strand starting at position 394 of SEQ ID NO: 1562187
cagagaauggaguggucua

SEQ ID NO: 1728602 - RNA, 19 nt, Artificial Sequence
  Description of Artificial Sequence: Synthetic oligonucleotide
  Antisense strand to SEQ ID NO: 1728601
uagaccacuccauucucug

SEQ ID NO: 1728603 - RNA, 19 nt, Artificial Sequence
  Description of Artificial Sequence: Synthetic oligonucleotide
  Sense strand starting at position 430 of SEQ ID NO: 1562187
gcaaaugguccguggccau

SEQ ID NO: 1728604 - RNA, 19 nt, Artificial Sequence
  Description of Artificial Sequence: Synthetic oligonucleotide
  Antisense strand to SEQ ID NO: 1728603
auggccacggaccauuugc

SEQ ID NO: 1728605 - RNA, 19 nt, Artificial Sequence
  Description of Artificial Sequence: Synthetic oligonucleotide
  Sense strand starting at position 575 of SEQ ID NO: 1562187
aaggaaggaugucaggaua

SEQ ID NO: 1728606 - RNA, 19 nt, Artificial Sequence
  Description of Artificial Sequence: Synthetic oligonucleotide
  Antisense strand to SEQ ID NO: 1728605
uauccugacauccuuccuu

SEQ ID NO: 1728607 - RNA, 19 nt, Artificial Sequence
  Description of Artificial Sequence: Synthetic oligonucleotide
  Sense strand starting at position 660 of SEQ ID NO: 1562187
ggaguucucaaaggcacuu

SEQ ID NO: 1728608 - RNA, 19 nt, Artificial Sequence
  Description of Artificial Sequence: Synthetic oligonucleotide
  Antisense strand to SEQ ID NO: 1728607
aagugccuuugagaacucc

SEQ ID NO: 1728609 - RNA, 19 nt, Artificial Sequence
  Description of Artificial Sequence: Synthetic oligonucleotide
  Sense strand starting at position 768 of SEQ ID NO: 1562187
gggugcuugcuggagcaua

SEQ ID NO: 1728610 - RNA, 19 nt, Artificial Sequence
  Description of Artificial Sequence: Synthetic oligonucleotide
  Antisense strand to SEQ ID NO: 1728609
uaugcuccagcaagcaccc

SEQ ID NO: 1728611 - RNA, 19 nt, Artificial Sequence
  Description of Artificial Sequence: Synthetic oligonucleotide
  Sense strand starting at position 780 of SEQ ID NO: 1562187
gagcauauacagugagcaa

SEQ ID NO: 1728612 - RNA, 19 nt, Artificial Sequence
  Description of Artificial Sequence: Synthetic oligonucleotide
  Antisense strand to SEQ ID NO: 1728611
uugcucacuguauaugcuc

SEQ ID NO: 1728613 - RNA, 19 nt, Artificial Sequence
  Description of Artificial Sequence: Synthetic oligonucleotide
  Sense strand starting at position 900 of SEQ ID NO: 1562187
agucccaaguccuaaggaa

SEQ ID NO: 1728614 - RNA, 19 nt, Artificial Sequence
  Description of Artificial Sequence: Synthetic oligonucleotide
  Antisense strand to SEQ ID NO: 1728613
uuccuuaggacuugggacu

SEQ ID NO: 1728615 - RNA, 19 nt, Artificial Sequence
  Description of Artificial Sequence: Synthetic oligonucleotide
  Sense strand starting at position 1252 of SEQ ID NO: 1562187
gagguacuaggauguagau

SEQ ID NO: 1728616 - RNA, 19 nt, Artificial Sequence
  Description of Artificial Sequence: Synthetic oligonucleotide
  Antisense strand to SEQ ID NO: 1728615
aucuacauccuaguaccuc

SEQ ID NO: 1728617 - RNA, 19 nt, Artificial Sequence
  Description of Artificial Sequence: Synthetic oligonucleotide
  Sense strand starting at position 1261 of SEQ ID NO: 1562187
ggauguagauuccagaucu

SEQ ID NO: 1728618 - RNA, 19 nt, Artificial Sequence
  Description of Artificial Sequence: Synthetic oligonucleotide
  Antisense strand to SEQ ID NO: 1728617
agaucuggaaucuacaucc

SEQ ID NO: 1728619 - RNA, 19 nt, Artificial Sequence
  Description of Artificial Sequence: Synthetic oligonucleotide
  Sense strand starting at position 1288 of SEQ ID NO: 1562187
caggaugaggugugacuuu

SEQ ID NO: 1728620 - RNA, 19 nt, Artificial Sequence
  Description of Artificial Sequence: Synthetic oligonucleotide
  Antisense strand to SEQ ID NO: 1728619
aaagucacaccucauccug

SEQ ID NO: 1728621 - RNA, 19 nt, Artificial Sequence
  Description of Artificial Sequence: Synthetic oligonucleotide
  Sense strand starting at position 1476 of SEQ ID NO: 1562187
cagggagcucaugguaauu

SEQ ID NO: 1728622 - RNA, 19 nt, Artificial Sequence
  Description of Artificial Sequence: Synthetic oligonucleotide
  Antisense strand to SEQ ID NO: 1728621
aauuaccaugagcucccug

SEQ ID NO: 1728623 - RNA, 19 nt, Artificial Sequence
  Description of Artificial Sequence: Synthetic oligonucleotide
  Sense strand starting at position 1486 of SEQ ID NO: 1562187
augguaauuucuugaucug

SEQ ID NO: 1728624 - RNA, 19 nt, Artificial Sequence
  Description of Artificial Sequence: Synthetic oligonucleotide
  Antisense strand to SEQ ID NO: 1728623
cagaucaagaaauuaccau

SEQ ID NO: 1728625 - RNA, 19 nt, Artificial Sequence
  Description of Artificial Sequence: Synthetic oligonucleotide
  Sense strand starting at position 1709 of SEQ ID NO: 1562187
gaggucuuaccuggcgagu

SEQ ID NO: 1728626 - RNA, 19 nt, Artificial Sequence
  Description of Artificial Sequence: Synthetic oligonucleotide
  Antisense strand to SEQ ID NO: 1728625
acucgccagguaagaccuc

SEQ ID NO: 1728627 - RNA, 19 nt, Artificial Sequence
  Description of Artificial Sequence: Synthetic oligonucleotide
  Sense strand starting at position 1712 of SEQ ID NO: 1562187
gucuuaccuggcgaguaga

SEQ ID NO: 1728628 - RNA, 19 nt, Artificial Sequence
  Description of Artificial Sequence: Synthetic oligonucleotide
  Antisense strand to SEQ ID NO: 1728627
ucuacucgccagguaagac

SEQ ID NO: 1728629 - RNA, 19 nt, Artificial Sequence
  Description of Artificial Sequence: Synthetic oligonucleotide
  Sense strand starting at position 2351 of SEQ ID NO: 1562187
guacgaugcucccuagcga

SEQ ID NO: 1728630 - RNA, 19 nt, Artificial Sequence
  Description of Artificial Sequence: Synthetic oligonucleotide
  Antisense strand to SEQ ID NO: 1728629
ucgcuagggagcaucguac

SEQ ID NO: 1728631 - RNA, 19 nt, Artificial Sequence
  Description of Artificial Sequence: Synthetic oligonucleotide
  Sense strand starting at position 2376 of SEQ ID NO: 1562187
uggagagugggcugguuua

SEQ ID NO: 1728632 - RNA, 19 nt, Artificial Sequence
  Description of Artificial Sequence: Synthetic oligonucleotide
  Antisense strand to SEQ ID NO: 1728631
uaaaccagcccacucucca

SEQ ID NO: 1728633 - RNA, 19 nt, Artificial Sequence
  Description of Artificial Sequence: Synthetic oligonucleotide
  Sense strand starting at position 2377 of SEQ ID NO: 1562187
ggagagugggcugguuuau

SEQ ID NO: 1728634 - RNA, 19 nt, Artificial Sequence
  Description of Artificial Sequence: Synthetic oligonucleotide
  Antisense strand to SEQ ID NO: 1728633
auaaaccagcccacucucc

SEQ ID NO: 1728635 - RNA, 19 nt, Artificial Sequence
  Description of Artificial Sequence: Synthetic oligonucleotide
  Sense strand starting at position 2558 of SEQ ID NO: 1562187
uagggucacuaugagauuu

SEQ ID NO: 1728636 - RNA, 19 nt, Artificial Sequence
  Description of Artificial Sequence: Synthetic oligonucleotide
  Antisense strand to SEQ ID NO: 1728635
aaaucucauagugacccua

SEQ ID NO: 1728637 - RNA, 19 nt, Artificial Sequence
  Description of Artificial Sequence: Synthetic oligonucleotide
  Sense strand starting at position 2570 of SEQ ID NO: 1562187
gagauuugcugagcgcuua

SEQ ID NO: 1728638 - RNA, 19 nt, Artificial Sequence
  Description of Artificial Sequence: Synthetic oligonucleotide
  Antisense strand to SEQ ID NO: 1728637
uaagcgcucagcaaaucuc

SEQ ID NO: 1728639 - RNA, 19 nt, Artificial Sequence
  Description of Artificial Sequence: Synthetic oligonucleotide
  Sense strand starting at position 2571 of SEQ ID NO: 1562187
agauuugcugagcgcuuaa

SEQ ID NO: 1728640 - RNA, 19 nt, Artificial Sequence
  Description of Artificial Sequence: Synthetic oligonucleotide
  Antisense strand to SEQ ID NO: 1728639
uuaagcgcucagcaaaucu

SEQ ID NO: 1728641 - RNA, 19 nt, Artificial Sequence
  Description of Artificial Sequence: Synthetic oligonucleotide
  Sense strand starting at position 2583 of SEQ ID NO: 1562187
cgcuuaauaucugucaggu

SEQ ID NO: 1728642 - RNA, 19 nt, Artificial Sequence
  Description of Artificial Sequence: Synthetic oligonucleotide
  Antisense strand to SEQ ID NO: 1728641
accugacagauauuaagcg

SEQ ID NO: 1728643 - RNA, 19 nt, Artificial Sequence
  Description of Artificial Sequence: Synthetic oligonucleotide
  Sense strand starting at position 2612 of SEQ ID NO: 1562187
gagcuagacgagcaacauu

SEQ ID NO: 1728644 - RNA, 19 nt, Artificial Sequence
  Description of Artificial Sequence: Synthetic oligonucleotide
  Antisense strand to SEQ ID NO: 1728643
aauguugcucgucuagcuc

SEQ ID NO: 1728645 - RNA, 19 nt, Artificial Sequence
  Description of Artificial Sequence: Synthetic oligonucleotide
  Sense strand starting at position 2653 of SEQ ID NO: 1562187
gguauugccuccucagaga

SEQ ID NO: 1728646 - RNA, 19 nt, Artificial Sequence
  Description of Artificial Sequence: Synthetic oligonucleotide
  Antisense strand to SEQ ID NO: 1728645
ucucugaggaggcaauacc

SEQ ID NO: 1728647 - RNA, 19 nt, Artificial Sequence
  Description of Artificial Sequence: Synthetic oligonucleotide
  Sense strand starting at position 2814 of SEQ ID NO: 1562187
gagaacagcuuuguuuaca

SEQ ID NO: 1728648 - RNA, 19 nt, Artificial Sequence
  Description of Artificial Sequence: Synthetic oligonucleotide
  Antisense strand to SEQ ID NO: 1728647
uguaaacaaagcuguucuc

SEQ ID NO: 1728649 - RNA, 19 nt, Artificial Sequence
  Description of Artificial Sequence: Synthetic oligonucleotide
  Sense strand starting at position 2910 of SEQ ID NO: 1562187
gccagaugcgucuaauacu

SEQ ID NO: 1728650 - RNA, 19 nt, Artificial Sequence
  Description of Artificial Sequence: Synthetic oligonucleotide
  Antisense strand to SEQ ID NO: 1728649
aguauuagacgcaucuggc

SEQ ID NO: 1728651 - RNA, 19 nt, Artificial Sequence
  Description of Artificial Sequence: Synthetic oligonucleotide
  Sense strand starting at position 2918 of SEQ ID NO: 1562187
cgucuaauacuucggcaga

SEQ ID NO: 1728652 - RNA, 19 nt, Artificial Sequence
  Description of Artificial Sequence: Synthetic oligonucleotide
  Antisense strand to SEQ ID NO: 1728651
ucugccgaaguauuagacg

SEQ ID NO: 1728653 - RNA, 19 nt, Artificial Sequence
  Description of Artificial Sequence: Synthetic oligonucleotide
  Sense strand starting at position 2920 of SEQ ID NO: 1562187
ucuaauacuucggcagaua

SEQ ID NO: 1728654 - RNA, 19 nt, Artificial Sequence
  Description of Artificial Sequence: Synthetic oligonucleotide
  Antisense strand to SEQ ID NO: 1728653
uaucugccgaaguauuaga

SEQ ID NO: 1728655 - RNA, 19 nt, Artificial Sequence
  Description of Artificial Sequence: Synthetic oligonucleotide
  Sense strand starting at position 2921 of SEQ ID NO: 1562187
cuaauacuucggcagauaa

SEQ ID NO: 1728656 - RNA, 19 nt, Artificial Sequence
  Description of Artificial Sequence: Synthetic oligonucleotide
  Antisense strand to SEQ ID NO: 1728655
uuaucugccgaaguauuag

SEQ ID NO: 1728657 - RNA, 19 nt, Artificial Sequence
  Description of Artificial Sequence: Synthetic oligonucleotide
  Sense strand starting at position 3649 of SEQ ID NO: 1562187
guggaagguccugaaaggu

SEQ ID NO: 1728658 - RNA, 19 nt, Artificial Sequence
  Description of Artificial Sequence: Synthetic oligonucleotide
  Antisense strand to SEQ ID NO: 1728657
accuuucaggaccuuccac

SEQ ID NO: 1728659 - RNA, 19 nt, Artificial Sequence
  Description of Artificial Sequence: Synthetic oligonucleotide
  Sense strand starting at position 3712 of SEQ ID NO: 1562187
agguucucugaggguuuaa

SEQ ID NO: 1728660 - RNA, 19 nt, Artificial Sequence
  Description of Artificial Sequence: Synthetic oligonucleotide
  Antisense strand to SEQ ID NO: 1728659
uuaaacccucagagaaccu

SEQ ID NO: 1728661 - RNA, 19 nt, Artificial Sequence
  Description of Artificial Sequence: Synthetic oligonucleotide
  Sense strand starting at position 3725 of SEQ ID NO: 1562187
guuuaaguccuggauuccu

SEQ ID NO: 1728662 - RNA, 19 nt, Artificial Sequence
  Description of Artificial Sequence: Synthetic oligonucleotide
  Antisense strand to SEQ ID NO: 1728661
aggaauccaggacuuaaac

SEQ ID NO: 1728663 - RNA, 19 nt, Artificial Sequence
  Description of Artificial Sequence: Synthetic oligonucleotide
  Sense strand starting at position 3770 of SEQ ID NO: 1562187
uccugaguguuccuaccau

SEQ ID NO: 1728664 - RNA, 19 nt, Artificial Sequence
  Description of Artificial Sequence: Synthetic oligonucleotide
  Antisense strand to SEQ ID NO: 1728663
augguaggaacacucagga

SEQ ID NO: 1728665 - RNA, 19 nt, Artificial Sequence
  Description of Artificial Sequence: Synthetic oligonucleotide
  Sense strand starting at position 3774 of SEQ ID NO: 1562187
gaguguuccuaccauagac

SEQ ID NO: 1728666 - RNA, 19 nt, Artificial Sequence
  Description of Artificial Sequence: Synthetic oligonucleotide
  Antisense strand to SEQ ID NO: 1728665
gucuaugguaggaacacuc

SEQ ID NO: 1728667 - RNA, 19 nt, Artificial Sequence
  Description of Artificial Sequence: Synthetic oligonucleotide
  Sense strand starting at position 3890 of SEQ ID NO: 1562187
aacccaaguccuggugaau

SEQ ID NO: 1728668 - RNA, 19 nt, Artificial Sequence
  Description of Artificial Sequence: Synthetic oligonucleotide
  Antisense strand to SEQ ID NO: 1728667
auucaccaggacuuggguu

SEQ ID NO: 1728669 - RNA, 19 nt, Artificial Sequence
  Description of Artificial Sequence: Synthetic oligonucleotide
  Sense strand starting at position 3902 of SEQ ID NO: 1562187
ggugaauuccggugaagcu

SEQ ID NO: 1728670 - RNA, 19 nt, Artificial Sequence
  Description of Artificial Sequence: Synthetic oligonucleotide
  Antisense strand to SEQ ID NO: 1728669
agcuucaccggaauucacc

SEQ ID NO: 1728671 - RNA, 19 nt, Artificial Sequence
  Description of Artificial Sequence: Synthetic oligonucleotide
  Sense strand starting at position 3937 of SEQ ID NO: 1562187
guauuaacagcacaguuaa

SEQ ID NO: 1728672 - RNA, 19 nt, Artificial Sequence
  Description of Artificial Sequence: Synthetic oligonucleotide
  Antisense strand to SEQ ID NO: 1728671
uuaacugugcuguuaauac

SEQ ID NO: 1728673 - RNA, 19 nt, Artificial Sequence
  Description of Artificial Sequence: Synthetic oligonucleotide
  Sense strand starting at position 224 of SEQ ID NO: 1562188
uggcuuggaccaggucaua

SEQ ID NO: 1728674 - RNA, 19 nt, Artificial Sequence
  Description of Artificial Sequence: Synthetic oligonucleotide
  Antisense strand to SEQ ID NO: 1728673
uaugaccugguccaagcca

SEQ ID NO: 1728675 - RNA, 19 nt, Artificial Sequence
  Description of Artificial Sequence: Synthetic oligonucleotide
  Sense strand starting at position 262 of SEQ ID NO: 1562188
ggauguuaacccuggccua

SEQ ID NO: 1728676 - RNA, 19 nt, Artificial Sequence
  Description of Artificial Sequence: Synthetic oligonucleotide
  Antisense strand to SEQ ID NO: 1728675
uaggccaggguuaacaucc

SEQ ID NO: 1728677 - RNA, 19 nt, Artificial Sequence
  Description of Artificial Sequence: Synthetic oligonucleotide
  Sense strand starting at position 325 of SEQ ID NO: 1562188
uggguauaggccugaagaa

SEQ ID NO: 1728678 - RNA, 19 nt, Artificial Sequence
  Description of Artificial Sequence: Synthetic oligonucleotide
  Antisense strand to SEQ ID NO: 1728677
uucuucaggccuauaccca

SEQ ID NO: 1728679 - RNA, 19 nt, Artificial Sequence
  Description of Artificial Sequence: Synthetic oligonucleotide
  Sense strand starting at position 366 of SEQ ID NO: 1562188
gcccaagucaggugugaaa

SEQ ID NO: 1728680 - RNA, 19 nt, Artificial Sequence
  Description of Artificial Sequence: Synthetic oligonucleotide
  Antisense strand to SEQ ID NO: 1728679
uuucacaccugacuugggc

SEQ ID NO: 1728681 - RNA, 19 nt, Artificial Sequence
  Description of Artificial Sequence: Synthetic oligonucleotide
  Sense strand starting at position 394 of SEQ ID NO: 1562188
cagagaauggaguggucua

SEQ ID NO: 1728682 - RNA, 19 nt, Artificial Sequence
  Description of Artificial Sequence: Synthetic oligonucleotide
  Antisense strand to SEQ ID NO: 1728681
uagaccacuccauucucug

SEQ ID NO: 1728683 - RNA, 19 nt, Artificial Sequence
  Description of Artificial Sequence: Synthetic oligonucleotide
  Sense strand starting at position 430 of SEQ ID NO: 1562188
gcaaaugguccguggccau

SEQ ID NO: 1728684 - RNA, 19 nt, Artificial Sequence
  Description of Artificial Sequence: Synthetic oligonucleotide
  Antisense strand to SEQ ID NO: 1728683
auggccacggaccauuugc

SEQ ID NO: 1728685 - RNA, 19 nt, Artificial Sequence
  Description of Artificial Sequence: Synthetic oligonucleotide
  Sense strand starting at position 575 of SEQ ID NO: 1562188
aaggaaggaugucaggaua

SEQ ID NO: 1728686 - RNA, 19 nt, Artificial Sequence
  Description of Artificial Sequence: Synthetic oligonucleotide
  Antisense strand to SEQ ID NO: 1728685
uauccugacauccuuccuu

SEQ ID NO: 1728687 - RNA, 19 nt, Artificial Sequence
  Description of Artificial Sequence: Synthetic oligonucleotide
  Sense strand starting at position 660 of SEQ ID NO: 1562188
ggaguucucaaaggcacuu

SEQ ID NO: 1728688 - RNA, 19 nt, Artificial Sequence
  Description of Artificial Sequence: Synthetic oligonucleotide
  Antisense strand to SEQ ID NO: 1728687
aagugccuuugagaacucc

SEQ ID NO: 1728689 - RNA, 19 nt, Artificial Sequence
  Description of Artificial Sequence: Synthetic oligonucleotide
  Sense strand starting at position 768 of SEQ ID NO: 1562188
gggugcuugcuggagcaua

SEQ ID NO: 1728690 - RNA, 19 nt, Artificial Sequence
  Description of Artificial Sequence: Synthetic oligonucleotide
  Antisense strand to SEQ ID NO: 1728689
uaugcuccagcaagcaccc

SEQ ID NO: 1728691 - RNA, 19 nt, Artificial Sequence
  Description of Artificial Sequence: Synthetic oligonucleotide
  Sense strand starting at position 780 of SEQ ID NO: 1562188
gagcauauacagugagcaa

SEQ ID NO: 1728692 - RNA, 19 nt, Artificial Sequence
  Description of Artificial Sequence: Synthetic oligonucleotide
  Antisense strand to SEQ ID NO: 1728691
uugcucacuguauaugcuc

SEQ ID NO: 1728693 - RNA, 19 nt, Artificial Sequence
  Description of Artificial Sequence: Synthetic oligonucleotide
  Sense strand starting at position 900 of SEQ ID NO: 1562188
agucccaaguccuaaggaa

SEQ ID NO: 1728694 - RNA, 19 nt, Artificial Sequence
  Description of Artificial Sequence: Synthetic oligonucleotide
  Antisense strand to SEQ ID NO: 1728693
uuccuuaggacuugggacu

SEQ ID NO: 1728695 - RNA, 19 nt, Artificial Sequence
  Description of Artificial Sequence: Synthetic oligonucleotide
  Sense strand starting at position 1252 of SEQ ID NO: 1562188
gagguacuaggauguagau

SEQ ID NO: 1728696 - RNA, 19 nt, Artificial Sequence
  Description of Artificial Sequence: Synthetic oligonucleotide
  Antisense strand to SEQ ID NO: 1728695
aucuacauccuaguaccuc

SEQ ID NO: 1728697 - RNA, 19 nt, Artificial Sequence
  Description of Artificial Sequence: Synthetic oligonucleotide
  Sense strand starting at position 1261 of SEQ ID NO: 1562188
ggauguagauuccagaucu

SEQ ID NO: 1728698 - RNA, 19 nt, Artificial Sequence
  Description of Artificial Sequence: Synthetic oligonucleotide
  Antisense strand to SEQ ID NO: 1728697
agaucuggaaucuacaucc

SEQ ID NO: 1728699 - RNA, 19 nt, Artificial Sequence
  Description of Artificial Sequence: Synthetic oligonucleotide
  Sense strand starting at position 1288 of SEQ ID NO: 1562188
caggaugaggugugacuuu

SEQ ID NO: 1728700 - RNA, 19 nt, Artificial Sequence
  Description of Artificial Sequence: Synthetic oligonucleotide
  Antisense strand to SEQ ID NO: 1728699
aaagucacaccucauccug

SEQ ID NO: 1728701 - RNA, 19 nt, Artificial Sequence
  Description of Artificial Sequence: Synthetic oligonucleotide
  Sense strand starting at position 1476 of SEQ ID NO: 1562188
cagggagcucaugguaauu

SEQ ID NO: 1728702 - RNA, 19 nt, Artificial Sequence
  Description of Artificial Sequence: Synthetic oligonucleotide
  Antisense strand to SEQ ID NO: 1728701
aauuaccaugagcucccug

SEQ ID NO: 1728703 - RNA, 19 nt, Artificial Sequence
  Description of Artificial Sequence: Synthetic oligonucleotide
  Sense strand starting at position 1486 of SEQ ID NO: 1562188
augguaauuucuugaucug

SEQ ID NO: 1728704 - RNA, 19 nt, Artificial Sequence
  Description of Artificial Sequence: Synthetic oligonucleotide
  Antisense strand to SEQ ID NO: 1728703
cagaucaagaaauuaccau

SEQ ID NO: 1728705 - RNA, 19 nt, Artificial Sequence
  Description of Artificial Sequence: Synthetic oligonucleotide
  Sense strand starting at position 1709 of SEQ ID NO: 1562188
gaggucuuaccuggcgagu

SEQ ID NO: 1728706 - RNA, 19 nt, Artificial Sequence
  Description of Artificial Sequence: Synthetic oligonucleotide
  Antisense strand to SEQ ID NO: 1728705
acucgccagguaagaccuc

SEQ ID NO: 1728707 - RNA, 19 nt, Artificial Sequence
  Description of Artificial Sequence: Synthetic oligonucleotide
  Sense strand starting at position 1712 of SEQ ID NO: 1562188
gucuuaccuggcgaguaga

SEQ ID NO: 1728708 - RNA, 19 nt, Artificial Sequence
  Description of Artificial Sequence: Synthetic oligonucleotide
  Antisense strand to SEQ ID NO: 1728707
ucuacucgccagguaagac

SEQ ID NO: 1728709 - RNA, 19 nt, Artificial Sequence
  Description of Artificial Sequence: Synthetic oligonucleotide
  Sense strand starting at position 2351 of SEQ ID NO: 1562188
guacgaugcucccuagcga

SEQ ID NO: 1728710 - RNA, 19 nt, Artificial Sequence
  Description of Artificial Sequence: Synthetic oligonucleotide
  Antisense strand to SEQ ID NO: 1728709
ucgcuagggagcaucguac

SEQ ID NO: 1728711 - RNA, 19 nt, Artificial Sequence
  Description of Artificial Sequence: Synthetic oligonucleotide
  Sense strand starting at position 2376 of SEQ ID NO: 1562188
uggagagugggcugguuua

SEQ ID NO: 1728712 - RNA, 19 nt, Artificial Sequence
  Description of Artificial Sequence: Synthetic oligonucleotide
  Antisense strand to SEQ ID NO: 1728711
uaaaccagcccacucucca

SEQ ID NO: 1728713 - RNA, 19 nt, Artificial Sequence
  Description of Artificial Sequence: Synthetic oligonucleotide
  Sense strand starting at position 2377 of SEQ ID NO: 1562188
ggagagugggcugguuuau

SEQ ID NO: 1728714 - RNA, 19 nt, Artificial Sequence
  Description of Artificial Sequence: Synthetic oligonucleotide
  Antisense strand to SEQ ID NO: 1728713
auaaaccagcccacucucc

SEQ ID NO: 1728715 - RNA, 19 nt, Artificial Sequence
  Description of Artificial Sequence: Synthetic oligonucleotide
  Sense strand starting at position 2558 of SEQ ID NO: 1562188
uagggucacuaugagauuu

SEQ ID NO: 1728716 - RNA, 19 nt, Artificial Sequence
  Description of Artificial Sequence: Synthetic oligonucleotide
  Antisense strand to SEQ ID NO: 1728715
aaaucucauagugacccua

SEQ ID NO: 1728717 - RNA, 19 nt, Artificial Sequence
  Description of Artificial Sequence: Synthetic oligonucleotide
  Sense strand starting at position 2570 of SEQ ID NO: 1562188
gagauuugcugagcgcuua

SEQ ID NO: 1728718 - RNA, 19 nt, Artificial Sequence
  Description of Artificial Sequence: Synthetic oligonucleotide
  Antisense strand to SEQ ID NO: 1728717
uaagcgcucagcaaaucuc

SEQ ID NO: 1728719 - RNA, 19 nt, Artificial Sequence
  Description of Artificial Sequence: Synthetic oligonucleotide
  Sense strand starting at position 2571 of SEQ ID NO: 1562188
agauuugcugagcgcuuaa

SEQ ID NO: 1728720 - RNA, 19 nt, Artificial Sequence
  Description of Artificial Sequence: Synthetic oligonucleotide
  Antisense strand to SEQ ID NO: 1728719
uuaagcgcucagcaaaucu

SEQ ID NO: 1728721 - RNA, 19 nt, Artificial Sequence
  Description of Artificial Sequence: Synthetic oligonucleotide
  Sense strand starting at position 2583 of SEQ ID NO: 1562188
cgcuuaauaucugucaggu

SEQ ID NO: 1728722 - RNA, 19 nt, Artificial Sequence
  Description of Artificial Sequence: Synthetic oligonucleotide
  Antisense strand to SEQ ID NO: 1728721
accugacagauauuaagcg

SEQ ID NO: 1728723 - RNA, 19 nt, Artificial Sequence
  Description of Artificial Sequence: Synthetic oligonucleotide
  Sense strand starting at position 2612 of SEQ ID NO: 1562188
gagcuagacgagcaacauu

SEQ ID NO: 1728724 - RNA, 19 nt, Artificial Sequence
  Description of Artificial Sequence: Synthetic oligonucleotide
  Antisense strand to SEQ ID NO: 1728723
aauguugcucgucuagcuc

SEQ ID NO: 1728725 - RNA, 19 nt, Artificial Sequence
  Description of Artificial Sequence: Synthetic oligonucleotide
  Sense strand starting at position 2653 of SEQ ID NO: 1562188
gguauugccuccucagaga

SEQ ID NO: 1728726 - RNA, 19 nt, Artificial Sequence
  Description of Artificial Sequence: Synthetic oligonucleotide
  Antisense strand to SEQ ID NO: 1728725
ucucugaggaggcaauacc

SEQ ID NO: 1728727 - RNA, 19 nt, Artificial Sequence
  Description of Artificial Sequence: Synthetic oligonucleotide
  Sense strand starting at position 2814 of SEQ ID NO: 1562188
gagaacagcuuuguuuaca

SEQ ID NO: 1728728 - RNA, 19 nt, Artificial Sequence
  Description of Artificial Sequence: Synthetic oligonucleotide
  Antisense strand to SEQ ID NO: 1728727
uguaaacaaagcuguucuc

SEQ ID NO: 1728729 - RNA, 19 nt, Artificial Sequence
  Description of Artificial Sequence: Synthetic oligonucleotide
  Sense strand starting at position 2910 of SEQ ID NO: 1562188
gccagaugcgucuaauacu

SEQ ID NO: 1728730 - RNA, 19 nt, Artificial Sequence
  Description of Artificial Sequence: Synthetic oligonucleotide
  Antisense strand to SEQ ID NO: 1728729
aguauuagacgcaucuggc

SEQ ID NO: 1728731 - RNA, 19 nt, Artificial Sequence
  Description of Artificial Sequence: Synthetic oligonucleotide
  Sense strand starting at position 2918 of SEQ ID NO: 1562188
cgucuaauacuucggcaga

SEQ ID NO: 1728732 - RNA, 19 nt, Artificial Sequence
  Description of Artificial Sequence: Synthetic oligonucleotide
  Antisense strand to SEQ ID NO: 1728731
ucugccgaaguauuagacg

SEQ ID NO: 1728733 - RNA, 19 nt, Artificial Sequence
  Description of Artificial Sequence: Synthetic oligonucleotide
  Sense strand starting at position 2920 of SEQ ID NO: 1562188
ucuaauacuucggcagaua

SEQ ID NO: 1728734 - RNA, 19 nt, Artificial Sequence
  Description of Artificial Sequence: Synthetic oligonucleotide
  Antisense strand to SEQ ID NO: 1728733
uaucugccgaaguauuaga

SEQ ID NO: 1728735 - RNA, 19 nt, Artificial Sequence
  Description of Artificial Sequence: Synthetic oligonucleotide
  Sense strand starting at position 2921 of SEQ ID NO: 1562188
cuaauacuucggcagauaa

SEQ ID NO: 1728736 - RNA, 19 nt, Artificial Sequence
  Description of Artificial Sequence: Synthetic oligonucleotide
  Antisense strand to SEQ ID NO: 1728735
uuaucugccgaaguauuag

SEQ ID NO: 1728737 - RNA, 19 nt, Artificial Sequence
  Description of Artificial Sequence: Synthetic oligonucleotide
  Sense strand starting at position 3649 of SEQ ID NO: 1562188
guggaagguccugaaaggu

SEQ ID NO: 1728738 - RNA, 19 nt, Artificial Sequence
  Description of Artificial Sequence: Synthetic oligonucleotide
  Antisense strand to SEQ ID NO: 1728737
accuuucaggaccuuccac

SEQ ID NO: 1728739 - RNA, 19 nt, Artificial Sequence
  Description of Artificial Sequence: Synthetic oligonucleotide
  Sense strand starting at position 3712 of SEQ ID NO: 1562188
agguucucugaggguuuaa

SEQ ID NO: 1728740 - RNA, 19 nt, Artificial Sequence
  Description of Artificial Sequence: Synthetic oligonucleotide
  Antisense strand to SEQ ID NO: 1728739
uuaaacccucagagaaccu

SEQ ID NO: 1728741 - RNA, 19 nt, Artificial Sequence
  Description of Artificial Sequence: Synthetic oligonucleotide
  Sense strand starting at position 3725 of SEQ ID NO: 1562188
guuuaaguccuggauuccu

SEQ ID NO: 1728742 - RNA, 19 nt, Artificial Sequence
  Description of Artificial Sequence: Synthetic oligonucleotide
  Antisense strand to SEQ ID NO: 1728741
aggaauccaggacuuaaac

SEQ ID NO: 1728743 - RNA, 19 nt, Artificial Sequence
  Description of Artificial Sequence: Synthetic oligonucleotide
  Sense strand starting at position 3770 of SEQ ID NO: 1562188
uccugaguguuccuaccau

SEQ ID NO: 1728744 - RNA, 19 nt, Artificial Sequence
  Description of Artificial Sequence: Synthetic oligonucleotide
  Antisense strand to SEQ ID NO: 1728743
augguaggaacacucagga

SEQ ID NO: 1728745 - RNA, 19 nt, Artificial Sequence
  Description of Artificial Sequence: Synthetic oligonucleotide
  Sense strand starting at position 3774 of SEQ ID NO: 1562188
gaguguuccuaccauagac

SEQ ID NO: 1728746 - RNA, 19 nt, Artificial Sequence
  Description of Artificial Sequence: Synthetic oligonucleotide
  Antisense strand to SEQ ID NO: 1728745
gucuaugguaggaacacuc

SEQ ID NO: 1728747 - RNA, 19 nt, Artificial Sequence
  Description of Artificial Sequence: Synthetic oligonucleotide
  Sense strand starting at position 3890 of SEQ ID NO: 1562188
aacccaaguccuggugaau

SEQ ID NO: 1728748 - RNA, 19 nt, Artificial Sequence
  Description of Artificial Sequence: Synthetic oligonucleotide
  Antisense strand to SEQ ID NO: 1728747
auucaccaggacuuggguu

SEQ ID NO: 1728749 - RNA, 19 nt, Artificial Sequence
  Description of Artificial Sequence: Synthetic oligonucleotide
  Sense strand starting at position 3902 of SEQ ID NO: 1562188
ggugaauuccggugaagcu

SEQ ID NO: 1728750 - RNA, 19 nt, Artificial Sequence
  Description of Artificial Sequence: Synthetic oligonucleotide
  Antisense strand to SEQ ID NO: 1728749
agcuucaccggaauucacc

SEQ ID NO: 1728751 - RNA, 19 nt, Artificial Sequence
  Description of Artificial Sequence: Synthetic oligonucleotide
  Sense strand starting at position 3937 of SEQ ID NO: 1562188
guauuaacagcacaguuaa

SEQ ID NO: 1728752 - RNA, 19 nt, Artificial Sequence
  Description of Artificial Sequence: Synthetic oligonucleotide
  Antisense strand to SEQ ID NO: 1728751
uuaacugugcuguuaauac

SEQ ID NO: 1728753 - RNA, 19 nt, Artificial Sequence
  Description of Artificial Sequence: Synthetic oligonucleotide
  Sense strand starting at position 148 of SEQ ID NO: 1562189
guaacaaagcuauaugauc

SEQ ID NO: 1728754 - RNA, 19 nt, Artificial Sequence
  Description of Artificial Sequence: Synthetic oligonucleotide
  Antisense strand to SEQ ID NO: 1728753
gaucauauagcuuuguuac

SEQ ID NO: 1728755 - RNA, 19 nt, Artificial Sequence
  Description of Artificial Sequence: Synthetic oligonucleotide
  Sense strand starting at position 654 of SEQ ID NO: 1562189
caauaauggugguuaguac

SEQ ID NO: 1728756 - RNA, 19 nt, Artificial Sequence
  Description of Artificial Sequence: Synthetic oligonucleotide
  Antisense strand to SEQ ID NO: 1728755
guacuaaccaccauuauug

SEQ ID NO: 1728757 - RNA, 19 nt, Artificial Sequence
  Description of Artificial Sequence: Synthetic oligonucleotide
  Sense strand starting at position 661 of SEQ ID NO: 1562189
ggugguuaguacuuaccua

SEQ ID NO: 1728758 - RNA, 19 nt, Artificial Sequence
  Description of Artificial Sequence: Synthetic oligonucleotide
  Antisense strand to SEQ ID NO: 1728757
uagguaaguacuaaccacc

SEQ ID NO: 1728759 - RNA, 19 nt, Artificial Sequence
  Description of Artificial Sequence: Synthetic oligonucleotide
  Sense strand starting at position 669 of SEQ ID NO: 1562189
guacuuaccuagucuuugu

SEQ ID NO: 1728760 - RNA, 19 nt, Artificial Sequence
  Description of Artificial Sequence: Synthetic oligonucleotide
  Antisense strand to SEQ ID NO: 1728759
acaaagacuagguaaguac

SEQ ID NO: 1728761 - RNA, 19 nt, Artificial Sequence
  Description of Artificial Sequence: Synthetic oligonucleotide
  Sense strand starting at position 673 of SEQ ID NO: 1562189
uuaccuagucuuuguuaga

SEQ ID NO: 1728762 - RNA, 19 nt, Artificial Sequence
  Description of Artificial Sequence: Synthetic oligonucleotide
  Antisense strand to SEQ ID NO: 1728761
ucuaacaaagacuagguaa

SEQ ID NO: 1728763 - RNA, 19 nt, Artificial Sequence
  Description of Artificial Sequence: Synthetic oligonucleotide
  Sense strand starting at position 690 of SEQ ID NO: 1562189
gaugccagcuguucuaagu

SEQ ID NO: 1728764 - RNA, 19 nt, Artificial Sequence
  Description of Artificial Sequence: Synthetic oligonucleotide
  Antisense strand to SEQ ID NO: 1728763
acuuagaacagcuggcauc

SEQ ID NO: 1728765 - RNA, 19 nt, Artificial Sequence
  Description of Artificial Sequence: Synthetic oligonucleotide
  Sense strand starting at position 701 of SEQ ID NO: 1562189
uucuaaguacuuuguacau

SEQ ID NO: 1728766 - RNA, 19 nt, Artificial Sequence
  Description of Artificial Sequence: Synthetic oligonucleotide
  Antisense strand to SEQ ID NO: 1728765
auguacaaaguacuuagaa

SEQ ID NO: 1728767 - RNA, 19 nt, Artificial Sequence
  Description of Artificial Sequence: Synthetic oligonucleotide
  Sense strand starting at position 1069 of SEQ ID NO: 1562189
guggcuugcagucaaugua

SEQ ID NO: 1728768 - RNA, 19 nt, Artificial Sequence
  Description of Artificial Sequence: Synthetic oligonucleotide
  Antisense strand to SEQ ID NO: 1728767
uacauugacugcaagccac

SEQ ID NO: 1728769 - RNA, 19 nt, Artificial Sequence
  Description of Artificial Sequence: Synthetic oligonucleotide
  Sense strand starting at position 1143 of SEQ ID NO: 1562189
auuacauccuggucuagaa

SEQ ID NO: 1728770 - RNA, 19 nt, Artificial Sequence
  Description of Artificial Sequence: Synthetic oligonucleotide
  Antisense strand to SEQ ID NO: 1728769
uucuagaccaggauguaau

SEQ ID NO: 1728771 - RNA, 19 nt, Artificial Sequence
  Description of Artificial Sequence: Synthetic oligonucleotide
  Sense strand starting at position 1440 of SEQ ID NO: 1562189
auguuuacucuuggcaaag

SEQ ID NO: 1728772 - RNA, 19 nt, Artificial Sequence
  Description of Artificial Sequence: Synthetic oligonucleotide
  Antisense strand to SEQ ID NO: 1728771
cuuugccaagaguaaacau

SEQ ID NO: 1728773 - RNA, 19 nt, Artificial Sequence
  Description of Artificial Sequence: Synthetic oligonucleotide
  Sense strand starting at position 1441 of SEQ ID NO: 1562189
uguuuacucuuggcaaaga

SEQ ID NO: 1728774 - RNA, 19 nt, Artificial Sequence
  Description of Artificial Sequence: Synthetic oligonucleotide
  Antisense strand to SEQ ID NO: 1728773
ucuuugccaagaguaaaca

SEQ ID NO: 1728775 - RNA, 19 nt, Artificial Sequence
  Description of Artificial Sequence: Synthetic oligonucleotide
  Sense strand starting at position 1622 of SEQ ID NO: 1562189
gcauuacgcgccucuacau

SEQ ID NO: 1728776 - RNA, 19 nt, Artificial Sequence
  Description of Artificial Sequence: Synthetic oligonucleotide
  Antisense strand to SEQ ID NO: 1728775
auguagaggcgcguaaugc

SEQ ID NO: 1728777 - RNA, 19 nt, Artificial Sequence
  Description of Artificial Sequence: Synthetic oligonucleotide
  Sense strand starting at position 1664 of SEQ ID NO: 1562189
agaccuugccagggagaga

SEQ ID NO: 1728778 - RNA, 19 nt, Artificial Sequence
  Description of Artificial Sequence: Synthetic oligonucleotide
  Antisense strand to SEQ ID NO: 1728777
ucucucccuggcaaggucu

SEQ ID NO: 1728779 - RNA, 19 nt, Artificial Sequence
  Description of Artificial Sequence: Synthetic oligonucleotide
  Sense strand starting at position 2039 of SEQ ID NO: 1562189
ggaagcguuugucucuuua

SEQ ID NO: 1728780 - RNA, 19 nt, Artificial Sequence
  Description of Artificial Sequence: Synthetic oligonucleotide
  Antisense strand to SEQ ID NO: 1728779
uaaagagacaaacgcuucc

SEQ ID NO: 1728781 - RNA, 19 nt, Artificial Sequence
  Description of Artificial Sequence: Synthetic oligonucleotide
  Sense strand starting at position 2130 of SEQ ID NO: 1562189
gaaugcuucuucguggguu

SEQ ID NO: 1728782 - RNA, 19 nt, Artificial Sequence
  Description of Artificial Sequence: Synthetic oligonucleotide
  Antisense strand to SEQ ID NO: 1728781
aacccacgaagaagcauuc

SEQ ID NO: 1728783 - RNA, 19 nt, Artificial Sequence
  Description of Artificial Sequence: Synthetic oligonucleotide
  Sense strand starting at position 2581 of SEQ ID NO: 1562189
aaguuagguuuauugaagu

SEQ ID NO: 1728784 - RNA, 19 nt, Artificial Sequence
  Description of Artificial Sequence: Synthetic oligonucleotide
  Antisense strand to SEQ ID NO: 1728783
acuucaauaaaccuaacuu

SEQ ID NO: 1728785 - RNA, 19 nt, Artificial Sequence
  Description of Artificial Sequence: Synthetic oligonucleotide
  Sense strand starting at position 2761 of SEQ ID NO: 1562189
acuacuggacaugguuaau

SEQ ID NO: 1728786 - RNA, 19 nt, Artificial Sequence
  Description of Artificial Sequence: Synthetic oligonucleotide
  Antisense strand to SEQ ID NO: 1728785
auuaaccauguccaguagu

SEQ ID NO: 1728787 - RNA, 19 nt, Artificial Sequence
  Description of Artificial Sequence: Synthetic oligonucleotide
  Sense strand starting at position 2767 of SEQ ID NO: 1562189
ggacaugguuaauucucau

SEQ ID NO: 1728788 - RNA, 19 nt, Artificial Sequence
  Description of Artificial Sequence: Synthetic oligonucleotide
  Antisense strand to SEQ ID NO: 1728787
augagaauuaaccaugucc

SEQ ID NO: 1728789 - RNA, 19 nt, Artificial Sequence
  Description of Artificial Sequence: Synthetic oligonucleotide
  Sense strand starting at position 2933 of SEQ ID NO: 1562189
guauaccuacuuuagugau

SEQ ID NO: 1728790 - RNA, 19 nt, Artificial Sequence
  Description of Artificial Sequence: Synthetic oligonucleotide
  Antisense strand to SEQ ID NO: 1728789
aucacuaaaguagguauac

SEQ ID NO: 1728791 - RNA, 19 nt, Artificial Sequence
  Description of Artificial Sequence: Synthetic oligonucleotide
  Sense strand starting at position 3324 of SEQ ID NO: 1562189
guagcuauuagugggaaug

SEQ ID NO: 1728792 - RNA, 19 nt, Artificial Sequence
  Description of Artificial Sequence: Synthetic oligonucleotide
  Antisense strand to SEQ ID NO: 1728791
cauucccacuaauagcuac

SEQ ID NO: 1728793 - RNA, 19 nt, Artificial Sequence
  Description of Artificial Sequence: Synthetic oligonucleotide
  Sense strand starting at position 3325 of SEQ ID NO: 1562189
uagcuauuagugggaaugu

SEQ ID NO: 1728794 - RNA, 19 nt, Artificial Sequence
  Description of Artificial Sequence: Synthetic oligonucleotide
  Antisense strand to SEQ ID NO: 1728793
acauucccacuaauagcua

SEQ ID NO: 1728795 - RNA, 19 nt, Artificial Sequence
  Description of Artificial Sequence: Synthetic oligonucleotide
  Sense strand starting at position 3392 of SEQ ID NO: 1562189
gauccaacauccguggaau

SEQ ID NO: 1728796 - RNA, 19 nt, Artificial Sequence
  Description of Artificial Sequence: Synthetic oligonucleotide
  Antisense strand to SEQ ID NO: 1728795
auuccacggauguuggauc

SEQ ID NO: 1728797 - RNA, 19 nt, Artificial Sequence
  Description of Artificial Sequence: Synthetic oligonucleotide
  Sense strand starting at position 3393 of SEQ ID NO: 1562189
auccaacauccguggaauu

SEQ ID NO: 1728798 - RNA, 19 nt, Artificial Sequence
  Description of Artificial Sequence: Synthetic oligonucleotide
  Antisense strand to SEQ ID NO: 1728797
aauuccacggauguuggau

SEQ ID NO: 1728799 - RNA, 19 nt, Artificial Sequence
  Description of Artificial Sequence: Synthetic oligonucleotide
  Sense strand starting at position 3403 of SEQ ID NO: 1562189
cguggaauuuaagacaucu

SEQ ID NO: 1728800 - RNA, 19 nt, Artificial Sequence
  Description of Artificial Sequence: Synthetic oligonucleotide
  Antisense strand to SEQ ID NO: 1728799
agaugucuuaaauuccacg

SEQ ID NO: 1728801 - RNA, 19 nt, Artificial Sequence
  Description of Artificial Sequence: Synthetic oligonucleotide
  Sense strand starting at position 3422 of SEQ ID NO: 1562189
ucauccuuugagugaaguu

SEQ ID NO: 1728802 - RNA, 19 nt, Artificial Sequence
  Description of Artificial Sequence: Synthetic oligonucleotide
  Antisense strand to SEQ ID NO: 1728801
aacuucacucaaaggauga

SEQ ID NO: 1728803 - RNA, 19 nt, Artificial Sequence
  Description of Artificial Sequence: Synthetic oligonucleotide
  Sense strand starting at position 3440 of SEQ ID NO: 1562189
ugcaaaguguacuuauacu

SEQ ID NO: 1728804 - RNA, 19 nt, Artificial Sequence
  Description of Artificial Sequence: Synthetic oligonucleotide
  Antisense strand to SEQ ID NO: 1728803
aguauaaguacacuuugca

SEQ ID NO: 1728805 - RNA, 19 nt, Artificial Sequence
  Description of Artificial Sequence: Synthetic oligonucleotide
  Sense strand starting at position 3578 of SEQ ID NO: 1562189
acacgacuuucgguacauu

SEQ ID NO: 1728806 - RNA, 19 nt, Artificial Sequence
  Description of Artificial Sequence: Synthetic oligonucleotide
  Antisense strand to SEQ ID NO: 1728805
aauguaccgaaagucgugu

SEQ ID NO: 1728807 - RNA, 19 nt, Artificial Sequence
  Description of Artificial Sequence: Synthetic oligonucleotide
  Sense strand starting at position 3579 of SEQ ID NO: 1562189
cacgacuuucgguacauua

SEQ ID NO: 1728808 - RNA, 19 nt, Artificial Sequence
  Description of Artificial Sequence: Synthetic oligonucleotide
  Antisense strand to SEQ ID NO: 1728807
uaauguaccgaaagucgug

SEQ ID NO: 1728809 - RNA, 19 nt, Artificial Sequence
  Description of Artificial Sequence: Synthetic oligonucleotide
  Sense strand starting at position 3581 of SEQ ID NO: 1562189
cgacuuucgguacauuaag

SEQ ID NO: 1728810 - RNA, 19 nt, Artificial Sequence
  Description of Artificial Sequence: Synthetic oligonucleotide
  Antisense strand to SEQ ID NO: 1728809
cuuaauguaccgaaagucg

SEQ ID NO: 1728811 - RNA, 19 nt, Artificial Sequence
  Description of Artificial Sequence: Synthetic oligonucleotide
  Sense strand starting at position 3596 of SEQ ID NO: 1562189
uaagcuucugaagaguauu

SEQ ID NO: 1728812 - RNA, 19 nt, Artificial Sequence
  Description of Artificial Sequence: Synthetic oligonucleotide
  Antisense strand to SEQ ID NO: 1728811
aauacucuucagaagcuua

SEQ ID NO: 1728813 - RNA, 19 nt, Artificial Sequence
  Description of Artificial Sequence: Synthetic oligonucleotide
  Sense strand starting at position 3599 of SEQ ID NO: 1562189
gcuucugaagaguauuaau

SEQ ID NO: 1728814 - RNA, 19 nt, Artificial Sequence
  Description of Artificial Sequence: Synthetic oligonucleotide
  Antisense strand to SEQ ID NO: 1728813
auuaauacucuucagaagc

SEQ ID NO: 1728815 - RNA, 19 nt, Artificial Sequence
  Description of Artificial Sequence: Synthetic oligonucleotide
  Sense strand starting at position 3664 of SEQ ID NO: 1562189
cuuguuccuugagcucaaa

SEQ ID NO: 1728816 - RNA, 19 nt, Artificial Sequence
  Description of Artificial Sequence: Synthetic oligonucleotide
  Antisense strand to SEQ ID NO: 1728815
uuugagcucaaggaacaag

SEQ ID NO: 1728817 - RNA, 19 nt, Artificial Sequence
  Description of Artificial Sequence: Synthetic oligonucleotide
  Sense strand starting at position 3667 of SEQ ID NO: 1562189
guuccuugagcucaaauug

SEQ ID NO: 1728818 - RNA, 19 nt, Artificial Sequence
  Description of Artificial Sequence: Synthetic oligonucleotide
  Antisense strand to SEQ ID NO: 1728817
caauuugagcucaaggaac

SEQ ID NO: 1728819 - RNA, 19 nt, Artificial Sequence
  Description of Artificial Sequence: Synthetic oligonucleotide
  Sense strand starting at position 3689 of SEQ ID NO: 1562189
uaacaaguuugacaaguga

SEQ ID NO: 1728820 - RNA, 19 nt, Artificial Sequence
  Description of Artificial Sequence: Synthetic oligonucleotide
  Antisense strand to SEQ ID NO: 1728819
ucacuugucaaacuuguua

SEQ ID NO: 1728821 - RNA, 19 nt, Artificial Sequence
  Description of Artificial Sequence: Synthetic oligonucleotide
  Sense strand starting at position 3722 of SEQ ID NO: 1562189
cuaguaaccuacuguauuu

SEQ ID NO: 1728822 - RNA, 19 nt, Artificial Sequence
  Description of Artificial Sequence: Synthetic oligonucleotide
  Antisense strand to SEQ ID NO: 1728821
aaauacaguagguuacuag

SEQ ID NO: 1728823 - RNA, 19 nt, Artificial Sequence
  Description of Artificial Sequence: Synthetic oligonucleotide
  Sense strand starting at position 3798 of SEQ ID NO: 1562189
gguagcuguagcugggaau

SEQ ID NO: 1728824 - RNA, 19 nt, Artificial Sequence
  Description of Artificial Sequence: Synthetic oligonucleotide
  Antisense strand to SEQ ID NO: 1728823
auucccagcuacagcuacc

SEQ ID NO: 1728825 - RNA, 19 nt, Artificial Sequence
  Description of Artificial Sequence: Synthetic oligonucleotide
  Sense strand starting at position 3799 of SEQ ID NO: 1562189
guagcuguagcugggaauu

SEQ ID NO: 1728826 - RNA, 19 nt, Artificial Sequence
  Description of Artificial Sequence: Synthetic oligonucleotide
  Antisense strand to SEQ ID NO: 1728825
aauucccagcuacagcuac

SEQ ID NO: 1728827 - RNA, 19 nt, Artificial Sequence
  Description of Artificial Sequence: Synthetic oligonucleotide
  Sense strand starting at position 3830 of SEQ ID NO: 1562189
uccaacaguccuggucaaa

SEQ ID NO: 1728828 - RNA, 19 nt, Artificial Sequence
  Description of Artificial Sequence: Synthetic oligonucleotide
  Antisense strand to SEQ ID NO: 1728827
uuugaccaggacuguugga

SEQ ID NO: 1728829 - RNA, 19 nt, Artificial Sequence
  Description of Artificial Sequence: Synthetic oligonucleotide
  Sense strand starting at position 3854 of SEQ ID NO: 1562189
gacacugcccugugauguu

SEQ ID NO: 1728830 - RNA, 19 nt, Artificial Sequence
  Description of Artificial Sequence: Synthetic oligonucleotide
  Antisense strand to SEQ ID NO: 1728829
aacaucacagggcaguguc

SEQ ID NO: 1728831 - RNA, 19 nt, Artificial Sequence
  Description of Artificial Sequence: Synthetic oligonucleotide
  Sense strand starting at position 3861 of SEQ ID NO: 1562189
cccugugauguuugaaauu

SEQ ID NO: 1728832 - RNA, 19 nt, Artificial Sequence
  Description of Artificial Sequence: Synthetic oligonucleotide
  Antisense strand to SEQ ID NO: 1728831
aauuucaaacaucacaggg

SEQ ID NO: 1728833 - RNA, 19 nt, Artificial Sequence
  Description of Artificial Sequence: Synthetic oligonucleotide
  Sense strand starting at position 2 of SEQ ID NO: 1562190
uggauaaaguugucuauca

SEQ ID NO: 1728834 - RNA, 19 nt, Artificial Sequence
  Description of Artificial Sequence: Synthetic oligonucleotide
  Antisense strand to SEQ ID NO: 1728833
ugauagacaacuuuaucca

SEQ ID NO: 1728835 - RNA, 19 nt, Artificial Sequence
  Description of Artificial Sequence: Synthetic oligonucleotide
  Sense strand starting at position 3 of SEQ ID NO: 1562190
ggauaaaguugucuaucau

SEQ ID NO: 1728836 - RNA, 19 nt, Artificial Sequence
  Description of Artificial Sequence: Synthetic oligonucleotide
  Antisense strand to SEQ ID NO: 1728835
augauagacaacuuuaucc

SEQ ID NO: 1728837 - RNA, 19 nt, Artificial Sequence
  Description of Artificial Sequence: Synthetic oligonucleotide
  Sense strand starting at position 4 of SEQ ID NO: 1562190
gauaaaguugucuaucaug

SEQ ID NO: 1728838 - RNA, 19 nt, Artificial Sequence
  Description of Artificial Sequence: Synthetic oligonucleotide
  Antisense strand to SEQ ID NO: 1728837
caugauagacaacuuuauc

SEQ ID NO: 1728839 - RNA, 19 nt, Artificial Sequence
  Description of Artificial Sequence: Synthetic oligonucleotide
  Sense strand starting at position 21 of SEQ ID NO: 1562190
uguaccuuacuugguaauu

SEQ ID NO: 1728840 - RNA, 19 nt, Artificial Sequence
  Description of Artificial Sequence: Synthetic oligonucleotide
  Antisense strand to SEQ ID NO: 1728839
aauuaccaaguaagguaca

SEQ ID NO: 1728841 - RNA, 19 nt, Artificial Sequence
  Description of Artificial Sequence: Synthetic oligonucleotide
  Sense strand starting at position 22 of SEQ ID NO: 1562190
guaccuuacuugguaauua

SEQ ID NO: 1728842 - RNA, 19 nt, Artificial Sequence
  Description of Artificial Sequence: Synthetic oligonucleotide
  Antisense strand to SEQ ID NO: 1728841
uaauuaccaaguaagguac

SEQ ID NO: 1728843 - RNA, 19 nt, Artificial Sequence
  Description of Artificial Sequence: Synthetic oligonucleotide
  Sense strand starting at position 34 of SEQ ID NO: 1562190
guaauuaccgaucacucaa

SEQ ID NO: 1728844 - RNA, 19 nt, Artificial Sequence
  Description of Artificial Sequence: Synthetic oligonucleotide
  Antisense strand to SEQ ID NO: 1728843
uugagugaucgguaauuac

SEQ ID NO: 1728845 - RNA, 19 nt, Artificial Sequence
  Description of Artificial Sequence: Synthetic oligonucleotide
  Sense strand starting at position 425 of SEQ ID NO: 1562190
aucuuaugcgccuacagaa

SEQ ID NO: 1728846 - RNA, 19 nt, Artificial Sequence
  Description of Artificial Sequence: Synthetic oligonucleotide
  Antisense strand to SEQ ID NO: 1728845
uucuguaggcgcauaagau

SEQ ID NO: 1728847 - RNA, 19 nt, Artificial Sequence
  Description of Artificial Sequence: Synthetic oligonucleotide
  Sense strand starting at position 438 of SEQ ID NO: 1562190
acagaaaguucuuagagcu

SEQ ID NO: 1728848 - RNA, 19 nt, Artificial Sequence
  Description of Artificial Sequence: Synthetic oligonucleotide
  Antisense strand to SEQ ID NO: 1728847
agcucuaagaacuuucugu

SEQ ID NO: 1728849 - RNA, 19 nt, Artificial Sequence
  Description of Artificial Sequence: Synthetic oligonucleotide
  Sense strand starting at position 506 of SEQ ID NO: 1562190
agauauugucuuugacuca

SEQ ID NO: 1728850 - RNA, 19 nt, Artificial Sequence
  Description of Artificial Sequence: Synthetic oligonucleotide
  Antisense strand to SEQ ID NO: 1728849
ugagucaaagacaauaucu

SEQ ID NO: 1728851 - RNA, 19 nt, Artificial Sequence
  Description of Artificial Sequence: Synthetic oligonucleotide
  Sense strand starting at position 596 of SEQ ID NO: 1562190
uuguguaagugggugaaau

SEQ ID NO: 1728852 - RNA, 19 nt, Artificial Sequence
  Description of Artificial Sequence: Synthetic oligonucleotide
  Antisense strand to SEQ ID NO: 1728851
auuucacccacuuacacaa

SEQ ID NO: 1728853 - RNA, 19 nt, Artificial Sequence
  Description of Artificial Sequence: Synthetic oligonucleotide
  Sense strand starting at position 597 of SEQ ID NO: 1562190
uguguaagugggugaaaug

SEQ ID NO: 1728854 - RNA, 19 nt, Artificial Sequence
  Description of Artificial Sequence: Synthetic oligonucleotide
  Antisense strand to SEQ ID NO: 1728853
cauuucacccacuuacaca

SEQ ID NO: 1728855 - RNA, 19 nt, Artificial Sequence
  Description of Artificial Sequence: Synthetic oligonucleotide
  Sense strand starting at position 647 of SEQ ID NO: 1562190
uugggauucuuagagagug

SEQ ID NO: 1728856 - RNA, 19 nt, Artificial Sequence
  Description of Artificial Sequence: Synthetic oligonucleotide
  Antisense strand to SEQ ID NO: 1728855
cacucucuaagaaucccaa

SEQ ID NO: 1728857 - RNA, 19 nt, Artificial Sequence
  Description of Artificial Sequence: Synthetic oligonucleotide
  Sense strand starting at position 689 of SEQ ID NO: 1562190
uggcccauuucucagacuu

SEQ ID NO: 1728858 - RNA, 19 nt, Artificial Sequence
  Description of Artificial Sequence: Synthetic oligonucleotide
  Antisense strand to SEQ ID NO: 1728857
aagucugagaaaugggcca

SEQ ID NO: 1728859 - RNA, 19 nt, Artificial Sequence
  Description of Artificial Sequence: Synthetic oligonucleotide
  Sense strand starting at position 855 of SEQ ID NO: 1562190
gucugugguucuccuggaa

SEQ ID NO: 1728860 - RNA, 19 nt, Artificial Sequence
  Description of Artificial Sequence: Synthetic oligonucleotide
  Antisense strand to SEQ ID NO: 1728859
uuccaggagaaccacagac

SEQ ID NO: 1728861 - RNA, 19 nt, Artificial Sequence
  Description of Artificial Sequence: Synthetic oligonucleotide
  Sense strand starting at position 912 of SEQ ID NO: 1562190
gugguacccagguagaagu

SEQ ID NO: 1728862 - RNA, 19 nt, Artificial Sequence
  Description of Artificial Sequence: Synthetic oligonucleotide
  Antisense strand to SEQ ID NO: 1728861
acuucuaccuggguaccac

SEQ ID NO: 1728863 - RNA, 19 nt, Artificial Sequence
  Description of Artificial Sequence: Synthetic oligonucleotide
  Sense strand starting at position 922 of SEQ ID NO: 1562190
gguagaaguucucagugag

SEQ ID NO: 1728864 - RNA, 19 nt, Artificial Sequence
  Description of Artificial Sequence: Synthetic oligonucleotide
  Antisense strand to SEQ ID NO: 1728863
cucacugagaacuucuacc

SEQ ID NO: 1728865 - RNA, 19 nt, Artificial Sequence
  Description of Artificial Sequence: Synthetic oligonucleotide
  Sense strand starting at position 925 of SEQ ID NO: 1562190
agaaguucucagugagucu

SEQ ID NO: 1728866 - RNA, 19 nt, Artificial Sequence
  Description of Artificial Sequence: Synthetic oligonucleotide
  Antisense strand to SEQ ID NO: 1728865
agacucacugagaacuucu

SEQ ID NO: 1728867 - RNA, 19 nt, Artificial Sequence
  Description of Artificial Sequence: Synthetic oligonucleotide
  Sense strand starting at position 928 of SEQ ID NO: 1562190
aguucucagugagucugaa

SEQ ID NO: 1728868 - RNA, 19 nt, Artificial Sequence
  Description of Artificial Sequence: Synthetic oligonucleotide
  Antisense strand to SEQ ID NO: 1728867
uucagacucacugagaacu

SEQ ID NO: 1728869 - RNA, 19 nt, Artificial Sequence
  Description of Artificial Sequence: Synthetic oligonucleotide
  Sense strand starting at position 1005 of SEQ ID NO: 1562190
cggguaucaucacauccau

SEQ ID NO: 1728870 - RNA, 19 nt, Artificial Sequence
  Description of Artificial Sequence: Synthetic oligonucleotide
  Antisense strand to SEQ ID NO: 1728869
auggaugugaugauacccg

SEQ ID NO: 1728871 - RNA, 19 nt, Artificial Sequence
  Description of Artificial Sequence: Synthetic oligonucleotide
  Sense strand starting at position 1020 of SEQ ID NO: 1562190
ccauaugggcgcuaucagu

SEQ ID NO: 1728872 - RNA, 19 nt, Artificial Sequence
  Description of Artificial Sequence: Synthetic oligonucleotide
  Antisense strand to SEQ ID NO: 1728871
acugauagcgcccauaugg

SEQ ID NO: 1728873 - RNA, 19 nt, Artificial Sequence
  Description of Artificial Sequence: Synthetic oligonucleotide
  Sense strand starting at position 1031 of SEQ ID NO: 1562190
cuaucaguggcuuggucaa

SEQ ID NO: 1728874 - RNA, 19 nt, Artificial Sequence
  Description of Artificial Sequence: Synthetic oligonucleotide
  Antisense strand to SEQ ID NO: 1728873
uugaccaagccacugauag

SEQ ID NO: 1728875 - RNA, 19 nt, Artificial Sequence
  Description of Artificial Sequence: Synthetic oligonucleotide
  Sense strand starting at position 1143 of SEQ ID NO: 1562190
gcagcauugacuugaggaa

SEQ ID NO: 1728876 - RNA, 19 nt, Artificial Sequence
  Description of Artificial Sequence: Synthetic oligonucleotide
  Antisense strand to SEQ ID NO: 1728875
uuccucaagucaaugcugc

SEQ ID NO: 1728877 - RNA, 19 nt, Artificial Sequence
  Description of Artificial Sequence: Synthetic oligonucleotide
  Sense strand starting at position 1809 of SEQ ID NO: 1562190
ugaagaugccugggaccuu

SEQ ID NO: 1728878 - RNA, 19 nt, Artificial Sequence
  Description of Artificial Sequence: Synthetic oligonucleotide
  Antisense strand to SEQ ID NO: 1728877
aaggucccaggcaucuuca

SEQ ID NO: 1728879 - RNA, 19 nt, Artificial Sequence
  Description of Artificial Sequence: Synthetic oligonucleotide
  Sense strand starting at position 2143 of SEQ ID NO: 1562190
agauguaguuucucaugcu

SEQ ID NO: 1728880 - RNA, 19 nt, Artificial Sequence
  Description of Artificial Sequence: Synthetic oligonucleotide
  Antisense strand to SEQ ID NO: 1728879
agcaugagaaacuacaucu

SEQ ID NO: 1728881 - RNA, 19 nt, Artificial Sequence
  Description of Artificial Sequence: Synthetic oligonucleotide
  Sense strand starting at position 2248 of SEQ ID NO: 1562190
gcaagucuuucugucugga

SEQ ID NO: 1728882 - RNA, 19 nt, Artificial Sequence
  Description of Artificial Sequence: Synthetic oligonucleotide
  Antisense strand to SEQ ID NO: 1728881
uccagacagaaagacuugc

SEQ ID NO: 1728883 - RNA, 19 nt, Artificial Sequence
  Description of Artificial Sequence: Synthetic oligonucleotide
  Sense strand starting at position 2374 of SEQ ID NO: 1562190
uucucuugcugcccaaaga

SEQ ID NO: 1728884 - RNA, 19 nt, Artificial Sequence
  Description of Artificial Sequence: Synthetic oligonucleotide
  Antisense strand to SEQ ID NO: 1728883
ucuuugggcagcaagagaa

SEQ ID NO: 1728885 - RNA, 19 nt, Artificial Sequence
  Description of Artificial Sequence: Synthetic oligonucleotide
  Sense strand starting at position 2391 of SEQ ID NO: 1562190
gacucagauccagguaucu

SEQ ID NO: 1728886 - RNA, 19 nt, Artificial Sequence
  Description of Artificial Sequence: Synthetic oligonucleotide
  Antisense strand to SEQ ID NO: 1728885
agauaccuggaucugaguc

SEQ ID NO: 1728887 - RNA, 19 nt, Artificial Sequence
  Description of Artificial Sequence: Synthetic oligonucleotide
  Sense strand starting at position 2400 of SEQ ID NO: 1562190
ccagguaucugauaccuau

SEQ ID NO: 1728888 - RNA, 19 nt, Artificial Sequence
  Description of Artificial Sequence: Synthetic oligonucleotide
  Antisense strand to SEQ ID NO: 1728887
auagguaucagauaccugg

SEQ ID NO: 1728889 - RNA, 19 nt, Artificial Sequence
  Description of Artificial Sequence: Synthetic oligonucleotide
  Sense strand starting at position 2403 of SEQ ID NO: 1562190
gguaucugauaccuauauu

SEQ ID NO: 1728890 - RNA, 19 nt, Artificial Sequence
  Description of Artificial Sequence: Synthetic oligonucleotide
  Antisense strand to SEQ ID NO: 1728889
aauauagguaucagauacc

SEQ ID NO: 1728891 - RNA, 19 nt, Artificial Sequence
  Description of Artificial Sequence: Synthetic oligonucleotide
  Sense strand starting at position 2419 of SEQ ID NO: 1562190
auuauaggacugugagguu

SEQ ID NO: 1728892 - RNA, 19 nt, Artificial Sequence
  Description of Artificial Sequence: Synthetic oligonucleotide
  Antisense strand to SEQ ID NO: 1728891
aaccucacaguccuauaau

SEQ ID NO: 1728893 - RNA, 19 nt, Artificial Sequence
  Description of Artificial Sequence: Synthetic oligonucleotide
  Sense strand starting at position 2434 of SEQ ID NO: 1562190
gguucaggcugggaagaaa

SEQ ID NO: 1728894 - RNA, 19 nt, Artificial Sequence
  Description of Artificial Sequence: Synthetic oligonucleotide
  Antisense strand to SEQ ID NO: 1728893
uuucuucccagccugaacc

SEQ ID NO: 1728895 - RNA, 19 nt, Artificial Sequence
  Description of Artificial Sequence: Synthetic oligonucleotide
  Sense strand starting at position 2499 of SEQ ID NO: 1562190
gaugaagaaggguggucau

SEQ ID NO: 1728896 - RNA, 19 nt, Artificial Sequence
  Description of Artificial Sequence: Synthetic oligonucleotide
  Antisense strand to SEQ ID NO: 1728895
augaccacccuucuucauc

SEQ ID NO: 1728897 - RNA, 19 nt, Artificial Sequence
  Description of Artificial Sequence: Synthetic oligonucleotide
  Sense strand starting at position 3536 of SEQ ID NO: 1562190
ggaucugaguugucaggaa

SEQ ID NO: 1728898 - RNA, 19 nt, Artificial Sequence
  Description of Artificial Sequence: Synthetic oligonucleotide
  Antisense strand to SEQ ID NO: 1728897
uuccugacaacucagaucc

SEQ ID NO: 1728899 - RNA, 19 nt, Artificial Sequence
  Description of Artificial Sequence: Synthetic oligonucleotide
  Sense strand starting at position 3540 of SEQ ID NO: 1562190
cugaguugucaggaaggca

SEQ ID NO: 1728900 - RNA, 19 nt, Artificial Sequence
  Description of Artificial Sequence: Synthetic oligonucleotide
  Antisense strand to SEQ ID NO: 1728899
ugccuuccugacaacucag

SEQ ID NO: 1728901 - RNA, 19 nt, Artificial Sequence
  Description of Artificial Sequence: Synthetic oligonucleotide
  Sense strand starting at position 3578 of SEQ ID NO: 1562190
ugggcaucuguccaaggga

SEQ ID NO: 1728902 - RNA, 19 nt, Artificial Sequence
  Description of Artificial Sequence: Synthetic oligonucleotide
  Antisense strand to SEQ ID NO: 1728901
ucccuuggacagaugccca

SEQ ID NO: 1728903 - RNA, 19 nt, Artificial Sequence
  Description of Artificial Sequence: Synthetic oligonucleotide
  Sense strand starting at position 3928 of SEQ ID NO: 1562190
cuuauuagagguuaagguu

SEQ ID NO: 1728904 - RNA, 19 nt, Artificial Sequence
  Description of Artificial Sequence: Synthetic oligonucleotide
  Antisense strand to SEQ ID NO: 1728903
aaccuuaaccucuaauaag

SEQ ID NO: 1728905 - RNA, 19 nt, Artificial Sequence
  Description of Artificial Sequence: Synthetic oligonucleotide
  Sense strand starting at position 3941 of SEQ ID NO: 1562190
aagguuacagucugagaau

SEQ ID NO: 1728906 - RNA, 19 nt, Artificial Sequence
  Description of Artificial Sequence: Synthetic oligonucleotide
  Antisense strand to SEQ ID NO: 1728905
auucucagacuguaaccuu

SEQ ID NO: 1728907 - RNA, 19 nt, Artificial Sequence
  Description of Artificial Sequence: Synthetic oligonucleotide
  Sense strand starting at position 3942 of SEQ ID NO: 1562190
agguuacagucugagaaug

SEQ ID NO: 1728908 - RNA, 19 nt, Artificial Sequence
  Description of Artificial Sequence: Synthetic oligonucleotide
  Antisense strand to SEQ ID NO: 1728907
cauucucagacuguaaccu

SEQ ID NO: 1728909 - RNA, 19 nt, Artificial Sequence
  Description of Artificial Sequence: Synthetic oligonucleotide
  Sense strand starting at position 3944 of SEQ ID NO: 1562190
guuacagucugagaaugga

SEQ ID NO: 1728910 - RNA, 19 nt, Artificial Sequence
  Description of Artificial Sequence: Synthetic oligonucleotide
  Antisense strand to SEQ ID NO: 1728909
uccauucucagacuguaac

SEQ ID NO: 1728911 - RNA, 19 nt, Artificial Sequence
  Description of Artificial Sequence: Synthetic oligonucleotide
  Sense strand starting at position 3948 of SEQ ID NO: 1562190
cagucugagaauggaguua

SEQ ID NO: 1728912 - RNA, 19 nt, Artificial Sequence
  Description of Artificial Sequence: Synthetic oligonucleotide
  Antisense strand to SEQ ID NO: 1728911
uaacuccauucucagacug

SEQ ID NO: 1728913 - RNA, 19 nt, Artificial Sequence
  Description of Artificial Sequence: Synthetic oligonucleotide
  Sense strand starting at position 98 of SEQ ID NO: 1562191
gagccaugacuaggucaaa

SEQ ID NO: 1728914 - RNA, 19 nt, Artificial Sequence
  Description of Artificial Sequence: Synthetic oligonucleotide
  Antisense strand to SEQ ID NO: 1728913
uuugaccuagucauggcuc

SEQ ID NO: 1728915 - RNA, 19 nt, Artificial Sequence
  Description of Artificial Sequence: Synthetic oligonucleotide
  Sense strand starting at position 117 of SEQ ID NO: 1562191
gccaaaugccuuuauguaa

SEQ ID NO: 1728916 - RNA, 19 nt, Artificial Sequence
  Description of Artificial Sequence: Synthetic oligonucleotide
  Antisense strand to SEQ ID NO: 1728915
uuacauaaaggcauuuggc

SEQ ID NO: 1728917 - RNA, 19 nt, Artificial Sequence
  Description of Artificial Sequence: Synthetic oligonucleotide
  Sense strand starting at position 278 of SEQ ID NO: 1562191
gugcauucccgcugaagga

SEQ ID NO: 1728918 - RNA, 19 nt, Artificial Sequence
  Description of Artificial Sequence: Synthetic oligonucleotide
  Antisense strand to SEQ ID NO: 1728917
uccuucagcgggaaugcac

SEQ ID NO: 1728919 - RNA, 19 nt, Artificial Sequence
  Description of Artificial Sequence: Synthetic oligonucleotide
  Sense strand starting at position 279 of SEQ ID NO: 1562191
ugcauucccgcugaaggau

SEQ ID NO: 1728920 - RNA, 19 nt, Artificial Sequence
  Description of Artificial Sequence: Synthetic oligonucleotide
  Antisense strand to SEQ ID NO: 1728919
auccuucagcgggaaugca

SEQ ID NO: 1728921 - RNA, 19 nt, Artificial Sequence
  Description of Artificial Sequence: Synthetic oligonucleotide
  Sense strand starting at position 374 of SEQ ID NO: 1562191
uuuggugaauuaguugcaa

SEQ ID NO: 1728922 - RNA, 19 nt, Artificial Sequence
  Description of Artificial Sequence: Synthetic oligonucleotide
  Antisense strand to SEQ ID NO: 1728921
uugcaacuaauucaccaaa

SEQ ID NO: 1728923 - RNA, 19 nt, Artificial Sequence
  Description of Artificial Sequence: Synthetic oligonucleotide
  Sense strand starting at position 376 of SEQ ID NO: 1562191
uggugaauuaguugcaaau

SEQ ID NO: 1728924 - RNA, 19 nt, Artificial Sequence
  Description of Artificial Sequence: Synthetic oligonucleotide
  Antisense strand to SEQ ID NO: 1728923
auuugcaacuaauucacca

SEQ ID NO: 1728925 - RNA, 19 nt, Artificial Sequence
  Description of Artificial Sequence: Synthetic oligonucleotide
  Sense strand starting at position 497 of SEQ ID NO: 1562191
guaacacucgccuggaguu

SEQ ID NO: 1728926 - RNA, 19 nt, Artificial Sequence
  Description of Artificial Sequence: Synthetic oligonucleotide
  Antisense strand to SEQ ID NO: 1728925
aacuccaggcgaguguuac

SEQ ID NO: 1728927 - RNA, 19 nt, Artificial Sequence
  Description of Artificial Sequence: Synthetic oligonucleotide
  Sense strand starting at position 584 of SEQ ID NO: 1562191
uggcaugugucauuccuaa

SEQ ID NO: 1728928 - RNA, 19 nt, Artificial Sequence
  Description of Artificial Sequence: Synthetic oligonucleotide
  Antisense strand to SEQ ID NO: 1728927
uuaggaaugacacaugcca

SEQ ID NO: 1728929 - RNA, 19 nt, Artificial Sequence
  Description of Artificial Sequence: Synthetic oligonucleotide
  Sense strand starting at position 606 of SEQ ID NO: 1562191
acagcagaacugcaucauu

SEQ ID NO: 1728930 - RNA, 19 nt, Artificial Sequence
  Description of Artificial Sequence: Synthetic oligonucleotide
  Antisense strand to SEQ ID NO: 1728929
aaugaugcaguucugcugu

SEQ ID NO: 1728931 - RNA, 19 nt, Artificial Sequence
  Description of Artificial Sequence: Synthetic oligonucleotide
  Sense strand starting at position 614 of SEQ ID NO: 1562191
acugcaucauuccuuguau

SEQ ID NO: 1728932 - RNA, 19 nt, Artificial Sequence
  Description of Artificial Sequence: Synthetic oligonucleotide
  Antisense strand to SEQ ID NO: 1728931
auacaaggaaugaugcagu

SEQ ID NO: 1728933 - RNA, 19 nt, Artificial Sequence
  Description of Artificial Sequence: Synthetic oligonucleotide
  Sense strand starting at position 615 of SEQ ID NO: 1562191
cugcaucauuccuuguaua

SEQ ID NO: 1728934 - RNA, 19 nt, Artificial Sequence
  Description of Artificial Sequence: Synthetic oligonucleotide
  Antisense strand to SEQ ID NO: 1728933
uauacaaggaaugaugcag

SEQ ID NO: 1728935 - RNA, 19 nt, Artificial Sequence
  Description of Artificial Sequence: Synthetic oligonucleotide
  Sense strand starting at position 616 of SEQ ID NO: 1562191
ugcaucauuccuuguauac

SEQ ID NO: 1728936 - RNA, 19 nt, Artificial Sequence
  Description of Artificial Sequence: Synthetic oligonucleotide
  Antisense strand to SEQ ID NO: 1728935
guauacaaggaaugaugca

SEQ ID NO: 1728937 - RNA, 19 nt, Artificial Sequence
  Description of Artificial Sequence: Synthetic oligonucleotide
  Sense strand starting at position 758 of SEQ ID NO: 1562191
acacgauucucugcauucu

SEQ ID NO: 1728938 - RNA, 19 nt, Artificial Sequence
  Description of Artificial Sequence: Synthetic oligonucleotide
  Antisense strand to SEQ ID NO: 1728937
agaaugcagagaaucgugu

SEQ ID NO: 1728939 - RNA, 19 nt, Artificial Sequence
  Description of Artificial Sequence: Synthetic oligonucleotide
  Sense strand starting at position 771 of SEQ ID NO: 1562191
cauucucaugccggaguuu

SEQ ID NO: 1728940 - RNA, 19 nt, Artificial Sequence
  Description of Artificial Sequence: Synthetic oligonucleotide
  Antisense strand to SEQ ID NO: 1728939
aaacuccggcaugagaaug

SEQ ID NO: 1728941 - RNA, 19 nt, Artificial Sequence
  Description of Artificial Sequence: Synthetic oligonucleotide
  Sense strand starting at position 772 of SEQ ID NO: 1562191
auucucaugccggaguuua

SEQ ID NO: 1728942 - RNA, 19 nt, Artificial Sequence
  Description of Artificial Sequence: Synthetic oligonucleotide
  Antisense strand to SEQ ID NO: 1728941
uaaacuccggcaugagaau

SEQ ID NO: 1728943 - RNA, 19 nt, Artificial Sequence
  Description of Artificial Sequence: Synthetic oligonucleotide
  Sense strand starting at position 784 of SEQ ID NO: 1562191
gaguuuauucuccagugca

SEQ ID NO: 1728944 - RNA, 19 nt, Artificial Sequence
  Description of Artificial Sequence: Synthetic oligonucleotide
  Antisense strand to SEQ ID NO: 1728943
ugcacuggagaauaaacuc

SEQ ID NO: 1728945 - RNA, 19 nt, Artificial Sequence
  Description of Artificial Sequence: Synthetic oligonucleotide
  Sense strand starting at position 859 of SEQ ID NO: 1562191
guguaaauaugagcaaaug

SEQ ID NO: 1728946 - RNA, 19 nt, Artificial Sequence
  Description of Artificial Sequence: Synthetic oligonucleotide
  Antisense strand to SEQ ID NO: 1728945
cauuugcucauauuuacac

SEQ ID NO: 1728947 - RNA, 19 nt, Artificial Sequence
  Description of Artificial Sequence: Synthetic oligonucleotide
  Sense strand starting at position 1062 of SEQ ID NO: 1562191
cuacgucucucuuuccaga

SEQ ID NO: 1728948 - RNA, 19 nt, Artificial Sequence
  Description of Artificial Sequence: Synthetic oligonucleotide
  Antisense strand to SEQ ID NO: 1728947
ucuggaaagagagacguag

SEQ ID NO: 1728949 - RNA, 19 nt, Artificial Sequence
  Description of Artificial Sequence: Synthetic oligonucleotide
  Sense strand starting at position 1081 of SEQ ID NO: 1562191
gucucaauuuaguaaaugu

SEQ ID NO: 1728950 - RNA, 19 nt, Artificial Sequence
  Description of Artificial Sequence: Synthetic oligonucleotide
  Antisense strand to SEQ ID NO: 1728949
acauuuacuaaauugagac

SEQ ID NO: 1728951 - RNA, 19 nt, Artificial Sequence
  Description of Artificial Sequence: Synthetic oligonucleotide
  Sense strand starting at position 1089 of SEQ ID NO: 1562191
uuaguaaauguuuaccaag

SEQ ID NO: 1728952 - RNA, 19 nt, Artificial Sequence
  Description of Artificial Sequence: Synthetic oligonucleotide
  Antisense strand to SEQ ID NO: 1728951
cuugguaaacauuuacuaa

SEQ ID NO: 1728953 - RNA, 19 nt, Artificial Sequence
  Description of Artificial Sequence: Synthetic oligonucleotide
  Sense strand starting at position 1091 of SEQ ID NO: 1562191
aguaaauguuuaccaagca

SEQ ID NO: 1728954 - RNA, 19 nt, Artificial Sequence
  Description of Artificial Sequence: Synthetic oligonucleotide
  Antisense strand to SEQ ID NO: 1728953
ugcuugguaaacauuuacu

SEQ ID NO: 1728955 - RNA, 19 nt, Artificial Sequence
  Description of Artificial Sequence: Synthetic oligonucleotide
  Sense strand starting at position 1148 of SEQ ID NO: 1562191
aggaguaucucauaucacc

SEQ ID NO: 1728956 - RNA, 19 nt, Artificial Sequence
  Description of Artificial Sequence: Synthetic oligonucleotide
  Antisense strand to SEQ ID NO: 1728955
ggugauaugagauacuccu

SEQ ID NO: 1728957 - RNA, 19 nt, Artificial Sequence
  Description of Artificial Sequence: Synthetic oligonucleotide
  Sense strand starting at position 1185 of SEQ ID NO: 1562191
cggaauuacugucucuauu

SEQ ID NO: 1728958 - RNA, 19 nt, Artificial Sequence
  Description of Artificial Sequence: Synthetic oligonucleotide
  Antisense strand to SEQ ID NO: 1728957
aauagagacaguaauuccg

SEQ ID NO: 1728959 - RNA, 19 nt, Artificial Sequence
  Description of Artificial Sequence: Synthetic oligonucleotide
  Sense strand starting at position 1251 of SEQ ID NO: 1562191
acaggaguugaaugcagau

SEQ ID NO: 1728960 - RNA, 19 nt, Artificial Sequence
  Description of Artificial Sequence: Synthetic oligonucleotide
  Antisense strand to SEQ ID NO: 1728959
aucugcauucaacuccugu

SEQ ID NO: 1728961 - RNA, 19 nt, Artificial Sequence
  Description of Artificial Sequence: Synthetic oligonucleotide
  Sense strand starting at position 1384 of SEQ ID NO: 1562191
uccagcuguuuaucagcaa

SEQ ID NO: 1728962 - RNA, 19 nt, Artificial Sequence
  Description of Artificial Sequence: Synthetic oligonucleotide
  Antisense strand to SEQ ID NO: 1728961
uugcugauaaacagcugga

SEQ ID NO: 1728963 - RNA, 19 nt, Artificial Sequence
  Description of Artificial Sequence: Synthetic oligonucleotide
  Sense strand starting at position 1388 of SEQ ID NO: 1562191
gcuguuuaucagcaaccgu

SEQ ID NO: 1728964 - RNA, 19 nt, Artificial Sequence
  Description of Artificial Sequence: Synthetic oligonucleotide
  Antisense strand to SEQ ID NO: 1728963
acgguugcugauaaacagc

SEQ ID NO: 1728965 - RNA, 19 nt, Artificial Sequence
  Description of Artificial Sequence: Synthetic oligonucleotide
  Sense strand starting at position 1472 of SEQ ID NO: 1562191
uuuacuuuccagugaauag

SEQ ID NO: 1728966 - RNA, 19 nt, Artificial Sequence
  Description of Artificial Sequence: Synthetic oligonucleotide
  Antisense strand to SEQ ID NO: 1728965
cuauucacuggaaaguaaa

SEQ ID NO: 1728967 - RNA, 19 nt, Artificial Sequence
  Description of Artificial Sequence: Synthetic oligonucleotide
  Sense strand starting at position 1499 of SEQ ID NO: 1562191
aagagauguguuuguuggu

SEQ ID NO: 1728968 - RNA, 19 nt, Artificial Sequence
  Description of Artificial Sequence: Synthetic oligonucleotide
  Antisense strand to SEQ ID NO: 1728967
accaacaaacacaucucuu

SEQ ID NO: 1728969 - RNA, 19 nt, Artificial Sequence
  Description of Artificial Sequence: Synthetic oligonucleotide
  Sense strand starting at position 1500 of SEQ ID NO: 1562191
agagauguguuuguugguu

SEQ ID NO: 1728970 - RNA, 19 nt, Artificial Sequence
  Description of Artificial Sequence: Synthetic oligonucleotide
  Antisense strand to SEQ ID NO: 1728969
aaccaacaaacacaucucu

SEQ ID NO: 1728971 - RNA, 19 nt, Artificial Sequence
  Description of Artificial Sequence: Synthetic oligonucleotide
  Sense strand starting at position 1725 of SEQ ID NO: 1562191
cccaaauucugggagcaga

SEQ ID NO: 1728972 - RNA, 19 nt, Artificial Sequence
  Description of Artificial Sequence: Synthetic oligonucleotide
  Antisense strand to SEQ ID NO: 1728971
ucugcucccagaauuuggg

SEQ ID NO: 1728973 - RNA, 19 nt, Artificial Sequence
  Description of Artificial Sequence: Synthetic oligonucleotide
  Sense strand starting at position 2330 of SEQ ID NO: 1562191
gcacgaguuguacacaaag

SEQ ID NO: 1728974 - RNA, 19 nt, Artificial Sequence
  Description of Artificial Sequence: Synthetic oligonucleotide
  Antisense strand to SEQ ID NO: 1728973
cuuuguguacaacucgugc

SEQ ID NO: 1728975 - RNA, 19 nt, Artificial Sequence
  Description of Artificial Sequence: Synthetic oligonucleotide
  Sense strand starting at position 2383 of SEQ ID NO: 1562191
cgcuguuguacccaaaguu

SEQ ID NO: 1728976 - RNA, 19 nt, Artificial Sequence
  Description of Artificial Sequence: Synthetic oligonucleotide
  Antisense strand to SEQ ID NO: 1728975
aacuuuggguacaacagcg

SEQ ID NO: 1728977 - RNA, 19 nt, Artificial Sequence
  Description of Artificial Sequence: Synthetic oligonucleotide
  Sense strand starting at position 3711 of SEQ ID NO: 1562191
gucucugacggucgugauu

SEQ ID NO: 1728978 - RNA, 19 nt, Artificial Sequence
  Description of Artificial Sequence: Synthetic oligonucleotide
  Antisense strand to SEQ ID NO: 1728977
aaucacgaccgucagagac

SEQ ID NO: 1728979 - RNA, 19 nt, Artificial Sequence
  Description of Artificial Sequence: Synthetic oligonucleotide
  Sense strand starting at position 3781 of SEQ ID NO: 1562191
acccaugucugaucaccua

SEQ ID NO: 1728980 - RNA, 19 nt, Artificial Sequence
  Description of Artificial Sequence: Synthetic oligonucleotide
  Antisense strand to SEQ ID NO: 1728979
uaggugaucagacaugggu

SEQ ID NO: 1728981 - RNA, 19 nt, Artificial Sequence
  Description of Artificial Sequence: Synthetic oligonucleotide
  Sense strand starting at position 3818 of SEQ ID NO: 1562191
gggugaacaggcugugaaa

SEQ ID NO: 1728982 - RNA, 19 nt, Artificial Sequence
  Description of Artificial Sequence: Synthetic oligonucleotide
  Antisense strand to SEQ ID NO: 1728981
uuucacagccuguucaccc

SEQ ID NO: 1728983 - RNA, 19 nt, Artificial Sequence
  Description of Artificial Sequence: Synthetic oligonucleotide
  Sense strand starting at position 3875 of SEQ ID NO: 1562191
uuaagaugaguccagcgaa

SEQ ID NO: 1728984 - RNA, 19 nt, Artificial Sequence
  Description of Artificial Sequence: Synthetic oligonucleotide
  Antisense strand to SEQ ID NO: 1728983
uucgcuggacucaucuuaa

SEQ ID NO: 1728985 - RNA, 19 nt, Artificial Sequence
  Description of Artificial Sequence: Synthetic oligonucleotide
  Sense strand starting at position 3878 of SEQ ID NO: 1562191
agaugaguccagcgaagug

SEQ ID NO: 1728986 - RNA, 19 nt, Artificial Sequence
  Description of Artificial Sequence: Synthetic oligonucleotide
  Antisense strand to SEQ ID NO: 1728985
cacuucgcuggacucaucu

SEQ ID NO: 1728987 - RNA, 19 nt, Artificial Sequence
  Description of Artificial Sequence: Synthetic oligonucleotide
  Sense strand starting at position 3887 of SEQ ID NO: 1562191
cagcgaagugccuagagua

SEQ ID NO: 1728988 - RNA, 19 nt, Artificial Sequence
  Description of Artificial Sequence: Synthetic oligonucleotide
  Antisense strand to SEQ ID NO: 1728987
uacucuaggcacuucgcug

SEQ ID NO: 1728989 - RNA, 19 nt, Artificial Sequence
  Description of Artificial Sequence: Synthetic oligonucleotide
  Sense strand starting at position 3954 of SEQ ID NO: 1562191
gagacagcuuuggucugaa

SEQ ID NO: 1728990 - RNA, 19 nt, Artificial Sequence
  Description of Artificial Sequence: Synthetic oligonucleotide
  Antisense strand to SEQ ID NO: 1728989
uucagaccaaagcugucuc

SEQ ID NO: 1728991 - RNA, 19 nt, Artificial Sequence
  Description of Artificial Sequence: Synthetic oligonucleotide
  Sense strand starting at position 3966 of SEQ ID NO: 1562191
gucugaaucgugcagguuc

SEQ ID NO: 1728992 - RNA, 19 nt, Artificial Sequence
  Description of Artificial Sequence: Synthetic oligonucleotide
  Antisense strand to SEQ ID NO: 1728991
gaaccugcacgauucagac

SEQ ID NO: 1728993 - RNA, 19 nt, Artificial Sequence
  Description of Artificial Sequence: Synthetic oligonucleotide
  Sense strand starting at position 55 of SEQ ID NO: 1562192
ugucuacaguucccuuuaa

SEQ ID NO: 1728994 - RNA, 19 nt, Artificial Sequence
  Description of Artificial Sequence: Synthetic oligonucleotide
  Antisense strand to SEQ ID NO: 1728993
uuaaagggaacuguagaca

SEQ ID NO: 1728995 - RNA, 19 nt, Artificial Sequence
  Description of Artificial Sequence: Synthetic oligonucleotide
  Sense strand starting at position 56 of SEQ ID NO: 1562192
gucuacaguucccuuuaau

SEQ ID NO: 1728996 - RNA, 19 nt, Artificial Sequence
  Description of Artificial Sequence: Synthetic oligonucleotide
  Antisense strand to SEQ ID NO: 1728995
auuaaagggaacuguagac

SEQ ID NO: 1728997 - RNA, 19 nt, Artificial Sequence
  Description of Artificial Sequence: Synthetic oligonucleotide
  Sense strand starting at position 90 of SEQ ID NO: 1562192
uuaugauaccaaggguauu

SEQ ID NO: 1728998 - RNA, 19 nt, Artificial Sequence
  Description of Artificial Sequence: Synthetic oligonucleotide
  Antisense strand to SEQ ID NO: 1728997
aauacccuugguaucauaa

SEQ ID NO: 1728999 - RNA, 19 nt, Artificial Sequence
  Description of Artificial Sequence: Synthetic oligonucleotide
  Sense strand starting at position 132 of SEQ ID NO: 1562192
ccuucuuugugacuaagag

SEQ ID NO: 1729000 - RNA, 19 nt, Artificial Sequence
  Description of Artificial Sequence: Synthetic oligonucleotide
  Antisense strand to SEQ ID NO: 1728999
cucuuagucacaaagaagg

SEQ ID NO: 1729001 - RNA, 19 nt, Artificial Sequence
  Description of Artificial Sequence: Synthetic oligonucleotide
  Sense strand starting at position 138 of SEQ ID NO: 1562192
uugugacuaagagguaaau

SEQ ID NO: 1729002 - RNA, 19 nt, Artificial Sequence
  Description of Artificial Sequence: Synthetic oligonucleotide
  Antisense strand to SEQ ID NO: 1729001
auuuaccucuuagucacaa

SEQ ID NO: 1729003 - RNA, 19 nt, Artificial Sequence
  Description of Artificial Sequence: Synthetic oligonucleotide
  Sense strand starting at position 170 of SEQ ID NO: 1562192
ggugauaugccuuauguuc

SEQ ID NO: 1729004 - RNA, 19 nt, Artificial Sequence
  Description of Artificial Sequence: Synthetic oligonucleotide
  Antisense strand to SEQ ID NO: 1729003
gaacauaaggcauaucacc

SEQ ID NO: 1729005 - RNA, 19 nt, Artificial Sequence
  Description of Artificial Sequence: Synthetic oligonucleotide
  Sense strand starting at position 183 of SEQ ID NO: 1562192
auguucuucgagcaaugua

SEQ ID NO: 1729006 - RNA, 19 nt, Artificial Sequence
  Description of Artificial Sequence: Synthetic oligonucleotide
  Antisense strand to SEQ ID NO: 1729005
uacauugcucgaagaacau

SEQ ID NO: 1729007 - RNA, 19 nt, Artificial Sequence
  Description of Artificial Sequence: Synthetic oligonucleotide
  Sense strand starting at position 292 of SEQ ID NO: 1562192
aaacuuggucuuggauaaa

SEQ ID NO: 1729008 - RNA, 19 nt, Artificial Sequence
  Description of Artificial Sequence: Synthetic oligonucleotide
  Antisense strand to SEQ ID NO: 1729007
uuuauccaagaccaaguuu

SEQ ID NO: 1729009 - RNA, 19 nt, Artificial Sequence
  Description of Artificial Sequence: Synthetic oligonucleotide
  Sense strand starting at position 364 of SEQ ID NO: 1562192
uaguauacagauugccaga

SEQ ID NO: 1729010 - RNA, 19 nt, Artificial Sequence
  Description of Artificial Sequence: Synthetic oligonucleotide
  Antisense strand to SEQ ID NO: 1729009
ucuggcaaucuguauacua

SEQ ID NO: 1729011 - RNA, 19 nt, Artificial Sequence
  Description of Artificial Sequence: Synthetic oligonucleotide
  Sense strand starting at position 366 of SEQ ID NO: 1562192
guauacagauugccagaaa

SEQ ID NO: 1729012 - RNA, 19 nt, Artificial Sequence
  Description of Artificial Sequence: Synthetic oligonucleotide
  Antisense strand to SEQ ID NO: 1729011
uuucuggcaaucuguauac

SEQ ID NO: 1729013 - RNA, 19 nt, Artificial Sequence
  Description of Artificial Sequence: Synthetic oligonucleotide
  Sense strand starting at position 391 of SEQ ID NO: 1562192
gcuaaagagauguggcaau

SEQ ID NO: 1729014 - RNA, 19 nt, Artificial Sequence
  Description of Artificial Sequence: Synthetic oligonucleotide
  Antisense strand to SEQ ID NO: 1729013
auugccacaucucuuuagc

SEQ ID NO: 1729015 - RNA, 19 nt, Artificial Sequence
  Description of Artificial Sequence: Synthetic oligonucleotide
  Sense strand starting at position 462 of SEQ ID NO: 1562192
guggaaaggaguuguggga

SEQ ID NO: 1729016 - RNA, 19 nt, Artificial Sequence
  Description of Artificial Sequence: Synthetic oligonucleotide
  Antisense strand to SEQ ID NO: 1729015
ucccacaacuccuuuccac

SEQ ID NO: 1729017 - RNA, 19 nt, Artificial Sequence
  Description of Artificial Sequence: Synthetic oligonucleotide
  Sense strand starting at position 2086 of SEQ ID NO: 1562192
aacguugccuaaguuagaa

SEQ ID NO: 1729018 - RNA, 19 nt, Artificial Sequence
  Description of Artificial Sequence: Synthetic oligonucleotide
  Antisense strand to SEQ ID NO: 1729017
uucuaacuuaggcaacguu

SEQ ID NO: 1729019 - RNA, 19 nt, Artificial Sequence
  Description of Artificial Sequence: Synthetic oligonucleotide
  Sense strand starting at position 2148 of SEQ ID NO: 1562192
gcgugugggcuucucuaaa

SEQ ID NO: 1729020 - RNA, 19 nt, Artificial Sequence
  Description of Artificial Sequence: Synthetic oligonucleotide
  Antisense strand to SEQ ID NO: 1729019
uuuagagaagcccacacgc

SEQ ID NO: 1729021 - RNA, 19 nt, Artificial Sequence
  Description of Artificial Sequence: Synthetic oligonucleotide
  Sense strand starting at position 2166 of SEQ ID NO: 1562192
agggaaacauggccaguaa

SEQ ID NO: 1729022 - RNA, 19 nt, Artificial Sequence
  Description of Artificial Sequence: Synthetic oligonucleotide
  Antisense strand to SEQ ID NO: 1729021
uuacuggccauguuucccu

SEQ ID NO: 1729023 - RNA, 19 nt, Artificial Sequence
  Description of Artificial Sequence: Synthetic oligonucleotide
  Sense strand starting at position 2238 of SEQ ID NO: 1562192
aagguacacguauguuuaa

SEQ ID NO: 1729024 - RNA, 19 nt, Artificial Sequence
  Description of Artificial Sequence: Synthetic oligonucleotide
  Antisense strand to SEQ ID NO: 1729023
uuaaacauacguguaccuu

SEQ ID NO: 1729025 - RNA, 19 nt, Artificial Sequence
  Description of Artificial Sequence: Synthetic oligonucleotide
  Sense strand starting at position 2280 of SEQ ID NO: 1562192
guaucuccugcugaagaga

SEQ ID NO: 1729026 - RNA, 19 nt, Artificial Sequence
  Description of Artificial Sequence: Synthetic oligonucleotide
  Antisense strand to SEQ ID NO: 1729025
ucucuucagcaggagauac

SEQ ID NO: 1729027 - RNA, 19 nt, Artificial Sequence
  Description of Artificial Sequence: Synthetic oligonucleotide
  Sense strand starting at position 2306 of SEQ ID NO: 1562192
auuuaaguacucugcaugu

SEQ ID NO: 1729028 - RNA, 19 nt, Artificial Sequence
  Description of Artificial Sequence: Synthetic oligonucleotide
  Antisense strand to SEQ ID NO: 1729027
acaugcagaguacuuaaau

SEQ ID NO: 1729029 - RNA, 19 nt, Artificial Sequence
  Description of Artificial Sequence: Synthetic oligonucleotide
  Sense strand starting at position 2316 of SEQ ID NO: 1562192
ucugcauguguauauugaa

SEQ ID NO: 1729030 - RNA, 19 nt, Artificial Sequence
  Description of Artificial Sequence: Synthetic oligonucleotide
  Antisense strand to SEQ ID NO: 1729029
uucaauauacacaugcaga

SEQ ID NO: 1729031 - RNA, 19 nt, Artificial Sequence
  Description of Artificial Sequence: Synthetic oligonucleotide
  Sense strand starting at position 2357 of SEQ ID NO: 1562192
augaaacuagccuaugcaa

SEQ ID NO: 1729032 - RNA, 19 nt, Artificial Sequence
  Description of Artificial Sequence: Synthetic oligonucleotide
  Antisense strand to SEQ ID NO: 1729031
uugcauaggcuaguuucau

SEQ ID NO: 1729033 - RNA, 19 nt, Artificial Sequence
  Description of Artificial Sequence: Synthetic oligonucleotide
  Sense strand starting at position 2425 of SEQ ID NO: 1562192
auggguacuagccgauaaa

SEQ ID NO: 1729034 - RNA, 19 nt, Artificial Sequence
  Description of Artificial Sequence: Synthetic oligonucleotide
  Antisense strand to SEQ ID NO: 1729033
uuuaucggcuaguacccau

SEQ ID NO: 1729035 - RNA, 19 nt, Artificial Sequence
  Description of Artificial Sequence: Synthetic oligonucleotide
  Sense strand starting at position 2568 of SEQ ID NO: 1562192
uuagaugaaucuguaccuu

SEQ ID NO: 1729036 - RNA, 19 nt, Artificial Sequence
  Description of Artificial Sequence: Synthetic oligonucleotide
  Antisense strand to SEQ ID NO: 1729035
aagguacagauucaucuaa

SEQ ID NO: 1729037 - RNA, 19 nt, Artificial Sequence
  Description of Artificial Sequence: Synthetic oligonucleotide
  Sense strand starting at position 2634 of SEQ ID NO: 1562192
ugaggaagcuuucucaaag

SEQ ID NO: 1729038 - RNA, 19 nt, Artificial Sequence
  Description of Artificial Sequence: Synthetic oligonucleotide
  Antisense strand to SEQ ID NO: 1729037
cuuugagaaagcuuccuca

SEQ ID NO: 1729039 - RNA, 19 nt, Artificial Sequence
  Description of Artificial Sequence: Synthetic oligonucleotide
  Sense strand starting at position 2635 of SEQ ID NO: 1562192
gaggaagcuuucucaaagg

SEQ ID NO: 1729040 - RNA, 19 nt, Artificial Sequence
  Description of Artificial Sequence: Synthetic oligonucleotide
  Antisense strand to SEQ ID NO: 1729039
ccuuugagaaagcuuccuc

SEQ ID NO: 1729041 - RNA, 19 nt, Artificial Sequence
  Description of Artificial Sequence: Synthetic oligonucleotide
  Sense strand starting at position 2669 of SEQ ID NO: 1562192
uuacuaguugugcaaacca

SEQ ID NO: 1729042 - RNA, 19 nt, Artificial Sequence
  Description of Artificial Sequence: Synthetic oligonucleotide
  Antisense strand to SEQ ID NO: 1729041
ugguuugcacaacuaguaa

SEQ ID NO: 1729043 - RNA, 19 nt, Artificial Sequence
  Description of Artificial Sequence: Synthetic oligonucleotide
  Sense strand starting at position 2685 of SEQ ID NO: 1562192
ccaugaaccucgguaaugu

SEQ ID NO: 1729044 - RNA, 19 nt, Artificial Sequence
  Description of Artificial Sequence: Synthetic oligonucleotide
  Antisense strand to SEQ ID NO: 1729043
acauuaccgagguucaugg

SEQ ID NO: 1729045 - RNA, 19 nt, Artificial Sequence
  Description of Artificial Sequence: Synthetic oligonucleotide
  Sense strand starting at position 2694 of SEQ ID NO: 1562192
ucgguaaugugguuaauag

SEQ ID NO: 1729046 - RNA, 19 nt, Artificial Sequence
  Description of Artificial Sequence: Synthetic oligonucleotide
  Antisense strand to SEQ ID NO: 1729045
cuauuaaccacauuaccga

SEQ ID NO: 1729047 - RNA, 19 nt, Artificial Sequence
  Description of Artificial Sequence: Synthetic oligonucleotide
  Sense strand starting at position 2695 of SEQ ID NO: 1562192
cgguaaugugguuaauaga

SEQ ID NO: 1729048 - RNA, 19 nt, Artificial Sequence
  Description of Artificial Sequence: Synthetic oligonucleotide
  Antisense strand to SEQ ID NO: 1729047
ucuauuaaccacauuaccg

SEQ ID NO: 1729049 - RNA, 19 nt, Artificial Sequence
  Description of Artificial Sequence: Synthetic oligonucleotide
  Sense strand starting at position 2845 of SEQ ID NO: 1562192
gaagaucuggccugcauua

SEQ ID NO: 1729050 - RNA, 19 nt, Artificial Sequence
  Description of Artificial Sequence: Synthetic oligonucleotide
  Antisense strand to SEQ ID NO: 1729049
uaaugcaggccagaucuuc

SEQ ID NO: 1729051 - RNA, 19 nt, Artificial Sequence
  Description of Artificial Sequence: Synthetic oligonucleotide
  Sense strand starting at position 2857 of SEQ ID NO: 1562192
ugcauuaugcauuaauuag

SEQ ID NO: 1729052 - RNA, 19 nt, Artificial Sequence
  Description of Artificial Sequence: Synthetic oligonucleotide
  Antisense strand to SEQ ID NO: 1729051
cuaauuaaugcauaaugca

SEQ ID NO: 1729053 - RNA, 19 nt, Artificial Sequence
  Description of Artificial Sequence: Synthetic oligonucleotide
  Sense strand starting at position 2895 of SEQ ID NO: 1562192
ggaccuagcccuuaucauu

SEQ ID NO: 1729054 - RNA, 19 nt, Artificial Sequence
  Description of Artificial Sequence: Synthetic oligonucleotide
  Antisense strand to SEQ ID NO: 1729053
aaugauaagggcuaggucc

SEQ ID NO: 1729055 - RNA, 19 nt, Artificial Sequence
  Description of Artificial Sequence: Synthetic oligonucleotide
  Sense strand starting at position 3103 of SEQ ID NO: 1562192
auagaaugauguguagaau

SEQ ID NO: 1729056 - RNA, 19 nt, Artificial Sequence
  Description of Artificial Sequence: Synthetic oligonucleotide
  Antisense strand to SEQ ID NO: 1729055
auucuacacaucauucuau

SEQ ID NO: 1729057 - RNA, 19 nt, Artificial Sequence
  Description of Artificial Sequence: Synthetic oligonucleotide
  Sense strand starting at position 3189 of SEQ ID NO: 1562192
caacaucagucaguguuga

SEQ ID NO: 1729058 - RNA, 19 nt, Artificial Sequence
  Description of Artificial Sequence: Synthetic oligonucleotide
  Antisense strand to SEQ ID NO: 1729057
ucaacacugacugauguug

SEQ ID NO: 1729059 - RNA, 19 nt, Artificial Sequence
  Description of Artificial Sequence: Synthetic oligonucleotide
  Sense strand starting at position 3190 of SEQ ID NO: 1562192
aacaucagucaguguugaa

SEQ ID NO: 1729060 - RNA, 19 nt, Artificial Sequence
  Description of Artificial Sequence: Synthetic oligonucleotide
  Antisense strand to SEQ ID NO: 1729059
uucaacacugacugauguu

SEQ ID NO: 1729061 - RNA, 19 nt, Artificial Sequence
  Description of Artificial Sequence: Synthetic oligonucleotide
  Sense strand starting at position 3194 of SEQ ID NO: 1562192
ucagucaguguugaagcua

SEQ ID NO: 1729062 - RNA, 19 nt, Artificial Sequence
  Description of Artificial Sequence: Synthetic oligonucleotide
  Antisense strand to SEQ ID NO: 1729061
uagcuucaacacugacuga

SEQ ID NO: 1729063 - RNA, 19 nt, Artificial Sequence
  Description of Artificial Sequence: Synthetic oligonucleotide
  Sense strand starting at position 3364 of SEQ ID NO: 1562192
uaaggaugguaggaagaaa

SEQ ID NO: 1729064 - RNA, 19 nt, Artificial Sequence
  Description of Artificial Sequence: Synthetic oligonucleotide
  Antisense strand to SEQ ID NO: 1729063
uuucuuccuaccauccuua

SEQ ID NO: 1729065 - RNA, 19 nt, Artificial Sequence
  Description of Artificial Sequence: Synthetic oligonucleotide
  Sense strand starting at position 3481 of SEQ ID NO: 1562192
acuuccuagccaugugauu

SEQ ID NO: 1729066 - RNA, 19 nt, Artificial Sequence
  Description of Artificial Sequence: Synthetic oligonucleotide
  Antisense strand to SEQ ID NO: 1729065
aaucacauggcuaggaagu

SEQ ID NO: 1729067 - RNA, 19 nt, Artificial Sequence
  Description of Artificial Sequence: Synthetic oligonucleotide
  Sense strand starting at position 3923 of SEQ ID NO: 1562192
ucuccaguuguccagugaa

SEQ ID NO: 1729068 - RNA, 19 nt, Artificial Sequence
  Description of Artificial Sequence: Synthetic oligonucleotide
  Antisense strand to SEQ ID NO: 1729067
uucacuggacaacuggaga

SEQ ID NO: 1729069 - RNA, 19 nt, Artificial Sequence
  Description of Artificial Sequence: Synthetic oligonucleotide
  Sense strand starting at position 3926 of SEQ ID NO: 1562192
ccaguuguccagugaauca

SEQ ID NO: 1729070 - RNA, 19 nt, Artificial Sequence
  Description of Artificial Sequence: Synthetic oligonucleotide
  Antisense strand to SEQ ID NO: 1729069
ugauucacuggacaacugg

SEQ ID NO: 1729071 - RNA, 19 nt, Artificial Sequence
  Description of Artificial Sequence: Synthetic oligonucleotide
  Sense strand starting at position 3956 of SEQ ID NO: 1562192
ucauguaguccacacugua

SEQ ID NO: 1729072 - RNA, 19 nt, Artificial Sequence
  Description of Artificial Sequence: Synthetic oligonucleotide
  Antisense strand to SEQ ID NO: 1729071
uacaguguggacuacauga

SEQ ID NO: 1729073 - RNA, 19 nt, Artificial Sequence
  Description of Artificial Sequence: Synthetic oligonucleotide
  Sense strand starting at position 478 of SEQ ID NO: 1562193
gagagaaaucccugugcag

SEQ ID NO: 1729074 - RNA, 19 nt, Artificial Sequence
  Description of Artificial Sequence: Synthetic oligonucleotide
  Antisense strand to SEQ ID NO: 1729073
cugcacagggauuucucuc

SEQ ID NO: 1729075 - RNA, 19 nt, Artificial Sequence
  Description of Artificial Sequence: Synthetic oligonucleotide
  Sense strand starting at position 480 of SEQ ID NO: 1562193
gagaaaucccugugcagug

SEQ ID NO: 1729076 - RNA, 19 nt, Artificial Sequence
  Description of Artificial Sequence: Synthetic oligonucleotide
  Antisense strand to SEQ ID NO: 1729075
cacugcacagggauuucuc

SEQ ID NO: 1729077 - RNA, 19 nt, Artificial Sequence
  Description of Artificial Sequence: Synthetic oligonucleotide
  Sense strand starting at position 544 of SEQ ID NO: 1562193
gcaggagccuucggucaga

SEQ ID NO: 1729078 - RNA, 19 nt, Artificial Sequence
  Description of Artificial Sequence: Synthetic oligonucleotide
  Antisense strand to SEQ ID NO: 1729077
ucugaccgaaggcuccugc

SEQ ID NO: 1729079 - RNA, 19 nt, Artificial Sequence
  Description of Artificial Sequence: Synthetic oligonucleotide
  Sense strand starting at position 557 of SEQ ID NO: 1562193
gucagagagcuggagcaaa

SEQ ID NO: 1729080 - RNA, 19 nt, Artificial Sequence
  Description of Artificial Sequence: Synthetic oligonucleotide
  Antisense strand to SEQ ID NO: 1729079
uuugcuccagcucucugac

SEQ ID NO: 1729081 - RNA, 19 nt, Artificial Sequence
  Description of Artificial Sequence: Synthetic oligonucleotide
  Sense strand starting at position 669 of SEQ ID NO: 1562193
cgaguugggaccugcagau

SEQ ID NO: 1729082 - RNA, 19 nt, Artificial Sequence
  Description of Artificial Sequence: Synthetic oligonucleotide
  Antisense strand to SEQ ID NO: 1729081
aucugcaggucccaacucg

SEQ ID NO: 1729083 - RNA, 19 nt, Artificial Sequence
  Description of Artificial Sequence: Synthetic oligonucleotide
  Sense strand starting at position 692 of SEQ ID NO: 1562193
cggaccugacuugauguua

SEQ ID NO: 1729084 - RNA, 19 nt, Artificial Sequence
  Description of Artificial Sequence: Synthetic oligonucleotide
  Antisense strand to SEQ ID NO: 1729083
uaacaucaagucagguccg

SEQ ID NO: 1729085 - RNA, 19 nt, Artificial Sequence
  Description of Artificial Sequence: Synthetic oligonucleotide
  Sense strand starting at position 725 of SEQ ID NO: 1562193
cccugugacuucucaacag

SEQ ID NO: 1729086 - RNA, 19 nt, Artificial Sequence
  Description of Artificial Sequence: Synthetic oligonucleotide
  Antisense strand to SEQ ID NO: 1729085
cuguugagaagucacaggg

SEQ ID NO: 1729087 - RNA, 19 nt, Artificial Sequence
  Description of Artificial Sequence: Synthetic oligonucleotide
  Sense strand starting at position 729 of SEQ ID NO: 1562193
gugacuucucaacaguggu

SEQ ID NO: 1729088 - RNA, 19 nt, Artificial Sequence
  Description of Artificial Sequence: Synthetic oligonucleotide
  Antisense strand to SEQ ID NO: 1729087
accacuguugagaagucac

SEQ ID NO: 1729089 - RNA, 19 nt, Artificial Sequence
  Description of Artificial Sequence: Synthetic oligonucleotide
  Sense strand starting at position 732 of SEQ ID NO: 1562193
acuucucaacagugguuaa

SEQ ID NO: 1729090 - RNA, 19 nt, Artificial Sequence
  Description of Artificial Sequence: Synthetic oligonucleotide
  Antisense strand to SEQ ID NO: 1729089
uuaaccacuguugagaagu

SEQ ID NO: 1729091 - RNA, 19 nt, Artificial Sequence
  Description of Artificial Sequence: Synthetic oligonucleotide
  Sense strand starting at position 735 of SEQ ID NO: 1562193
ucucaacagugguuaacau

SEQ ID NO: 1729092 - RNA, 19 nt, Artificial Sequence
  Description of Artificial Sequence: Synthetic oligonucleotide
  Antisense strand to SEQ ID NO: 1729091
auguuaaccacuguugaga

SEQ ID NO: 1729093 - RNA, 19 nt, Artificial Sequence
  Description of Artificial Sequence: Synthetic oligonucleotide
  Sense strand starting at position 736 of SEQ ID NO: 1562193
cucaacagugguuaacauu

SEQ ID NO: 1729094 - RNA, 19 nt, Artificial Sequence
  Description of Artificial Sequence: Synthetic oligonucleotide
  Antisense strand to SEQ ID NO: 1729093
aauguuaaccacuguugag

SEQ ID NO: 1729095 - RNA, 19 nt, Artificial Sequence
  Description of Artificial Sequence: Synthetic oligonucleotide
  Sense strand starting at position 810 of SEQ ID NO: 1562193
gagaguuaccaucaggccu

SEQ ID NO: 1729096 - RNA, 19 nt, Artificial Sequence
  Description of Artificial Sequence: Synthetic oligonucleotide
  Antisense strand to SEQ ID NO: 1729095
aggccugaugguaacucuc

SEQ ID NO: 1729097 - RNA, 19 nt, Artificial Sequence
  Description of Artificial Sequence: Synthetic oligonucleotide
  Sense strand starting at position 877 of SEQ ID NO: 1562193
ggagauugcugcccacuuu

SEQ ID NO: 1729098 - RNA, 19 nt, Artificial Sequence
  Description of Artificial Sequence: Synthetic oligonucleotide
  Antisense strand to SEQ ID NO: 1729097
aaagugggcagcaaucucc

SEQ ID NO: 1729099 - RNA, 19 nt, Artificial Sequence
  Description of Artificial Sequence: Synthetic oligonucleotide
  Sense strand starting at position 2014 of SEQ ID NO: 1562193
gcugcugcccuacauauau

SEQ ID NO: 1729100 - RNA, 19 nt, Artificial Sequence
  Description of Artificial Sequence: Synthetic oligonucleotide
  Antisense strand to SEQ ID NO: 1729099
auauauguagggcagcagc

SEQ ID NO: 1729101 - RNA, 19 nt, Artificial Sequence
  Description of Artificial Sequence: Synthetic oligonucleotide
  Sense strand starting at position 2309 of SEQ ID NO: 1562193
gaggaaguacagugucaca

SEQ ID NO: 1729102 - RNA, 19 nt, Artificial Sequence
  Description of Artificial Sequence: Synthetic oligonucleotide
  Antisense strand to SEQ ID NO: 1729101
ugugacacuguacuuccuc

SEQ ID NO: 1729103 - RNA, 19 nt, Artificial Sequence
  Description of Artificial Sequence: Synthetic oligonucleotide
  Sense strand starting at position 2864 of SEQ ID NO: 1562193
auccuagaggccugugaga

SEQ ID NO: 1729104 - RNA, 19 nt, Artificial Sequence
  Description of Artificial Sequence: Synthetic oligonucleotide
  Antisense strand to SEQ ID NO: 1729103
ucucacaggccucuaggau

SEQ ID NO: 1729105 - RNA, 19 nt, Artificial Sequence
  Description of Artificial Sequence: Synthetic oligonucleotide
  Sense strand starting at position 2866 of SEQ ID NO: 1562193
ccuagaggccugugagaca

SEQ ID NO: 1729106 - RNA, 19 nt, Artificial Sequence
  Description of Artificial Sequence: Synthetic oligonucleotide
  Antisense strand to SEQ ID NO: 1729105
ugucucacaggccucuagg

SEQ ID NO: 1729107 - RNA, 19 nt, Artificial Sequence
  Description of Artificial Sequence: Synthetic oligonucleotide
  Sense strand starting at position 709 of SEQ ID NO: 1562194
ugaccuuaggcacgucaau

SEQ ID NO: 1729108 - RNA, 19 nt, Artificial Sequence
  Description of Artificial Sequence: Synthetic oligonucleotide
  Antisense strand to SEQ ID NO: 1729107
auugacgugccuaagguca

SEQ ID NO: 1729109 - RNA, 19 nt, Artificial Sequence
  Description of Artificial Sequence: Synthetic oligonucleotide
  Sense strand starting at position 781 of SEQ ID NO: 1562194
gugaaagggcuuuguaaag

SEQ ID NO: 1729110 - RNA, 19 nt, Artificial Sequence
  Description of Artificial Sequence: Synthetic oligonucleotide
  Antisense strand to SEQ ID NO: 1729109
cuuuacaaagcccuuucac

SEQ ID NO: 1729111 - RNA, 19 nt, Artificial Sequence
  Description of Artificial Sequence: Synthetic oligonucleotide
  Sense strand starting at position 848 of SEQ ID NO: 1562194
ggugcccgguacuuuaaua

SEQ ID NO: 1729112 - RNA, 19 nt, Artificial Sequence
  Description of Artificial Sequence: Synthetic oligonucleotide
  Antisense strand to SEQ ID NO: 1729111
uauuaaaguaccgggcacc

SEQ ID NO: 1729113 - RNA, 19 nt, Artificial Sequence
  Description of Artificial Sequence: Synthetic oligonucleotide
  Sense strand starting at position 856 of SEQ ID NO: 1562194
guacuuuaauaguugcuca

SEQ ID NO: 1729114 - RNA, 19 nt, Artificial Sequence
  Description of Artificial Sequence: Synthetic oligonucleotide
  Antisense strand to SEQ ID NO: 1729113
ugagcaacuauuaaaguac

SEQ ID NO: 1729115 - RNA, 19 nt, Artificial Sequence
  Description of Artificial Sequence: Synthetic oligonucleotide
  Sense strand starting at position 912 of SEQ ID NO: 1562194
caaaguuauugaguacuug

SEQ ID NO: 1729116 - RNA, 19 nt, Artificial Sequence
  Description of Artificial Sequence: Synthetic oligonucleotide
  Antisense strand to SEQ ID NO: 1729115
caaguacucaauaacuuug

SEQ ID NO: 1729117 - RNA, 19 nt, Artificial Sequence
  Description of Artificial Sequence: Synthetic oligonucleotide
  Sense strand starting at position 922 of SEQ ID NO: 1562194
gaguacuugcugcauguca

SEQ ID NO: 1729118 - RNA, 19 nt, Artificial Sequence
  Description of Artificial Sequence: Synthetic oligonucleotide
  Antisense strand to SEQ ID NO: 1729117
ugacaugcagcaaguacuc

SEQ ID NO: 1729119 - RNA, 19 nt, Artificial Sequence
  Description of Artificial Sequence: Synthetic oligonucleotide
  Sense strand starting at position 1023 of SEQ ID NO: 1562194
gcugucagcuuccuucuua

SEQ ID NO: 1729120 - RNA, 19 nt, Artificial Sequence
  Description of Artificial Sequence: Synthetic oligonucleotide
  Antisense strand to SEQ ID NO: 1729119
uaagaaggaagcugacagc

SEQ ID NO: 1729121 - RNA, 19 nt, Artificial Sequence
  Description of Artificial Sequence: Synthetic oligonucleotide
  Sense strand starting at position 1100 of SEQ ID NO: 1562194
acaugaaagugagauuucu

SEQ ID NO: 1729122 - RNA, 19 nt, Artificial Sequence
  Description of Artificial Sequence: Synthetic oligonucleotide
  Antisense strand to SEQ ID NO: 1729121
agaaaucucacuuucaugu

SEQ ID NO: 1729123 - RNA, 19 nt, Artificial Sequence
  Description of Artificial Sequence: Synthetic oligonucleotide
  Sense strand starting at position 1334 of SEQ ID NO: 1562194
ggaucuaguuacuccuuga

SEQ ID NO: 1729124 - RNA, 19 nt, Artificial Sequence
  Description of Artificial Sequence: Synthetic oligonucleotide
  Antisense strand to SEQ ID NO: 1729123
ucaaggaguaacuagaucc

SEQ ID NO: 1729125 - RNA, 19 nt, Artificial Sequence
  Description of Artificial Sequence: Synthetic oligonucleotide
  Sense strand starting at position 1337 of SEQ ID NO: 1562194
ucuaguuacuccuugaagu

SEQ ID NO: 1729126 - RNA, 19 nt, Artificial Sequence
  Description of Artificial Sequence: Synthetic oligonucleotide
  Antisense strand to SEQ ID NO: 1729125
acuucaaggaguaacuaga

SEQ ID NO: 1729127 - RNA, 19 nt, Artificial Sequence
  Description of Artificial Sequence: Synthetic oligonucleotide
  Sense strand starting at position 1338 of SEQ ID NO: 1562194
cuaguuacuccuugaagug

SEQ ID NO: 1729128 - RNA, 19 nt, Artificial Sequence
  Description of Artificial Sequence: Synthetic oligonucleotide
  Antisense strand to SEQ ID NO: 1729127
cacuucaaggaguaacuag

SEQ ID NO: 1729129 - RNA, 19 nt, Artificial Sequence
  Description of Artificial Sequence: Synthetic oligonucleotide
  Sense strand starting at position 1339 of SEQ ID NO: 1562194
uaguuacuccuugaaguga

SEQ ID NO: 1729130 - RNA, 19 nt, Artificial Sequence
  Description of Artificial Sequence: Synthetic oligonucleotide
  Antisense strand to SEQ ID NO: 1729129
ucacuucaaggaguaacua

SEQ ID NO: 1729131 - RNA, 19 nt, Artificial Sequence
  Description of Artificial Sequence: Synthetic oligonucleotide
  Sense strand starting at position 1718 of SEQ ID NO: 1562194
gucagcaagccuuaaggau

SEQ ID NO: 1729132 - RNA, 19 nt, Artificial Sequence
  Description of Artificial Sequence: Synthetic oligonucleotide
  Antisense strand to SEQ ID NO: 1729131
auccuuaaggcuugcugac

SEQ ID NO: 1729133 - RNA, 19 nt, Artificial Sequence
  Description of Artificial Sequence: Synthetic oligonucleotide
  Sense strand starting at position 1733 of SEQ ID NO: 1562194
ggaucaaucucuggaauau

SEQ ID NO: 1729134 - RNA, 19 nt, Artificial Sequence
  Description of Artificial Sequence: Synthetic oligonucleotide
  Antisense strand to SEQ ID NO: 1729133
auauuccagagauugaucc

SEQ ID NO: 1729135 - RNA, 19 nt, Artificial Sequence
  Description of Artificial Sequence: Synthetic oligonucleotide
  Sense strand starting at position 1887 of SEQ ID NO: 1562194
gagugcucccgugaguaaa

SEQ ID NO: 1729136 - RNA, 19 nt, Artificial Sequence
  Description of Artificial Sequence: Synthetic oligonucleotide
  Antisense strand to SEQ ID NO: 1729135
uuuacucacgggagcacuc

SEQ ID NO: 1729137 - RNA, 19 nt, Artificial Sequence
  Description of Artificial Sequence: Synthetic oligonucleotide
  Sense strand starting at position 2149 of SEQ ID NO: 1562194
agggcccuugcagagaaau

SEQ ID NO: 1729138 - RNA, 19 nt, Artificial Sequence
  Description of Artificial Sequence: Synthetic oligonucleotide
  Antisense strand to SEQ ID NO: 1729137
auuucucugcaagggcccu

SEQ ID NO: 1729139 - RNA, 19 nt, Artificial Sequence
  Description of Artificial Sequence: Synthetic oligonucleotide
  Sense strand starting at position 2193 of SEQ ID NO: 1562194
cuugacguccuagauucuu

SEQ ID NO: 1729140 - RNA, 19 nt, Artificial Sequence
  Description of Artificial Sequence: Synthetic oligonucleotide
  Antisense strand to SEQ ID NO: 1729139
aagaaucuaggacgucaag

SEQ ID NO: 1729141 - RNA, 19 nt, Artificial Sequence
  Description of Artificial Sequence: Synthetic oligonucleotide
  Sense strand starting at position 2202 of SEQ ID NO: 1562194
cuagauucuugugaggaag

SEQ ID NO: 1729142 - RNA, 19 nt, Artificial Sequence
  Description of Artificial Sequence: Synthetic oligonucleotide
  Antisense strand to SEQ ID NO: 1729141
cuuccucacaagaaucuag

SEQ ID NO: 1729143 - RNA, 19 nt, Artificial Sequence
  Description of Artificial Sequence: Synthetic oligonucleotide
  Sense strand starting at position 2275 of SEQ ID NO: 1562194
ccaagaugguaaggaugau

SEQ ID NO: 1729144 - RNA, 19 nt, Artificial Sequence
  Description of Artificial Sequence: Synthetic oligonucleotide
  Antisense strand to SEQ ID NO: 1729143
aucauccuuaccaucuugg

SEQ ID NO: 1729145 - RNA, 19 nt, Artificial Sequence
  Description of Artificial Sequence: Synthetic oligonucleotide
  Sense strand starting at position 2281 of SEQ ID NO: 1562194
ugguaaggaugaucagagu

SEQ ID NO: 1729146 - RNA, 19 nt, Artificial Sequence
  Description of Artificial Sequence: Synthetic oligonucleotide
  Antisense strand to SEQ ID NO: 1729145
acucugaucauccuuacca

SEQ ID NO: 1729147 - RNA, 19 nt, Artificial Sequence
  Description of Artificial Sequence: Synthetic oligonucleotide
  Sense strand starting at position 2284 of SEQ ID NO: 1562194
uaaggaugaucagaguagu

SEQ ID NO: 1729148 - RNA, 19 nt, Artificial Sequence
  Description of Artificial Sequence: Synthetic oligonucleotide
  Antisense strand to SEQ ID NO: 1729147
acuacucugaucauccuua

SEQ ID NO: 1729149 - RNA, 19 nt, Artificial Sequence
  Description of Artificial Sequence: Synthetic oligonucleotide
  Sense strand starting at position 2437 of SEQ ID NO: 1562194
ugggauuggaccugucugu

SEQ ID NO: 1729150 - RNA, 19 nt, Artificial Sequence
  Description of Artificial Sequence: Synthetic oligonucleotide
  Antisense strand to SEQ ID NO: 1729149
acagacagguccaauccca

SEQ ID NO: 1729151 - RNA, 19 nt, Artificial Sequence
  Description of Artificial Sequence: Synthetic oligonucleotide
  Sense strand starting at position 2487 of SEQ ID NO: 1562194
ugggaacccggguauaagu

SEQ ID NO: 1729152 - RNA, 19 nt, Artificial Sequence
  Description of Artificial Sequence: Synthetic oligonucleotide
  Antisense strand to SEQ ID NO: 1729151
acuuauacccggguuccca

SEQ ID NO: 1729153 - RNA, 19 nt, Artificial Sequence
  Description of Artificial Sequence: Synthetic oligonucleotide
  Sense strand starting at position 2496 of SEQ ID NO: 1562194
ggguauaagucaccuagcu

SEQ ID NO: 1729154 - RNA, 19 nt, Artificial Sequence
  Description of Artificial Sequence: Synthetic oligonucleotide
  Antisense strand to SEQ ID NO: 1729153
agcuaggugacuuauaccc

SEQ ID NO: 1729155 - RNA, 19 nt, Artificial Sequence
  Description of Artificial Sequence: Synthetic oligonucleotide
  Sense strand starting at position 2535 of SEQ ID NO: 1562194
ggugcuuggcaagaggaau

SEQ ID NO: 1729156 - RNA, 19 nt, Artificial Sequence
  Description of Artificial Sequence: Synthetic oligonucleotide
  Antisense strand to SEQ ID NO: 1729155
auuccucuugccaagcacc

SEQ ID NO: 1729157 - RNA, 19 nt, Artificial Sequence
  Description of Artificial Sequence: Synthetic oligonucleotide
  Sense strand starting at position 2557 of SEQ ID NO: 1562194
ccgucuuugaaccauggua

SEQ ID NO: 1729158 - RNA, 19 nt, Artificial Sequence
  Description of Artificial Sequence: Synthetic oligonucleotide
  Antisense strand to SEQ ID NO: 1729157
uaccaugguucaaagacgg

SEQ ID NO: 1729159 - RNA, 19 nt, Artificial Sequence
  Description of Artificial Sequence: Synthetic oligonucleotide
  Sense strand starting at position 2559 of SEQ ID NO: 1562194
gucuuugaaccaugguaag

SEQ ID NO: 1729160 - RNA, 19 nt, Artificial Sequence
  Description of Artificial Sequence: Synthetic oligonucleotide
  Antisense strand to SEQ ID NO: 1729159
cuuaccaugguucaaagac

SEQ ID NO: 1729161 - RNA, 19 nt, Artificial Sequence
  Description of Artificial Sequence: Synthetic oligonucleotide
  Sense strand starting at position 2678 of SEQ ID NO: 1562194
gugcuccuccuaugaggua

SEQ ID NO: 1729162 - RNA, 19 nt, Artificial Sequence
  Description of Artificial Sequence: Synthetic oligonucleotide
  Antisense strand to SEQ ID NO: 1729161
uaccucauaggaggagcac

SEQ ID NO: 1729163 - RNA, 19 nt, Artificial Sequence
  Description of Artificial Sequence: Synthetic oligonucleotide
  Sense strand starting at position 2717 of SEQ ID NO: 1562194
acugcagagcuuuguaaau

SEQ ID NO: 1729164 - RNA, 19 nt, Artificial Sequence
  Description of Artificial Sequence: Synthetic oligonucleotide
  Antisense strand to SEQ ID NO: 1729163
auuuacaaagcucugcagu

SEQ ID NO: 1729165 - RNA, 19 nt, Artificial Sequence
  Description of Artificial Sequence: Synthetic oligonucleotide
  Sense strand starting at position 2772 of SEQ ID NO: 1562194
ugugcaguggugcuauuau

SEQ ID NO: 1729166 - RNA, 19 nt, Artificial Sequence
  Description of Artificial Sequence: Synthetic oligonucleotide
  Antisense strand to SEQ ID NO: 1729165
auaauagcaccacugcaca

SEQ ID NO: 1729167 - RNA, 19 nt, Artificial Sequence
  Description of Artificial Sequence: Synthetic oligonucleotide
  Sense strand starting at position 3022 of SEQ ID NO: 1562194
ccauguugaugauucuuau

SEQ ID NO: 1729168 - RNA, 19 nt, Artificial Sequence
  Description of Artificial Sequence: Synthetic oligonucleotide
  Antisense strand to SEQ ID NO: 1729167
auaagaaucaucaacaugg

SEQ ID NO: 1729169 - RNA, 19 nt, Artificial Sequence
  Description of Artificial Sequence: Synthetic oligonucleotide
  Sense strand starting at position 3084 of SEQ ID NO: 1562194
ggcaccuguccagauggaa

SEQ ID NO: 1729170 - RNA, 19 nt, Artificial Sequence
  Description of Artificial Sequence: Synthetic oligonucleotide
  Antisense strand to SEQ ID NO: 1729169
uuccaucuggacaggugcc

SEQ ID NO: 1729171 - RNA, 19 nt, Artificial Sequence
  Description of Artificial Sequence: Synthetic oligonucleotide
  Sense strand starting at position 3185 of SEQ ID NO: 1562194
uuaccuucuccagggaaag

SEQ ID NO: 1729172 - RNA, 19 nt, Artificial Sequence
  Description of Artificial Sequence: Synthetic oligonucleotide
  Antisense strand to SEQ ID NO: 1729171
cuuucccuggagaagguaa

SEQ ID NO: 1729173 - RNA, 19 nt, Artificial Sequence
  Description of Artificial Sequence: Synthetic oligonucleotide
  Sense strand starting at position 3197 of SEQ ID NO: 1562194
gggaaaggguguuuggauu

SEQ ID NO: 1729174 - RNA, 19 nt, Artificial Sequence
  Description of Artificial Sequence: Synthetic oligonucleotide
  Antisense strand to SEQ ID NO: 1729173
aauccaaacacccuuuccc

SEQ ID NO: 1729175 - RNA, 19 nt, Artificial Sequence
  Description of Artificial Sequence: Synthetic oligonucleotide
  Sense strand starting at position 3247 of SEQ ID NO: 1562194
aagguucuuuaagugguaa

SEQ ID NO: 1729176 - RNA, 19 nt, Artificial Sequence
  Description of Artificial Sequence: Synthetic oligonucleotide
  Antisense strand to SEQ ID NO: 1729175
uuaccacuuaaagaaccuu

SEQ ID NO: 1729177 - RNA, 19 nt, Artificial Sequence
  Description of Artificial Sequence: Synthetic oligonucleotide
  Sense strand starting at position 3248 of SEQ ID NO: 1562194
agguucuuuaagugguaaa

SEQ ID NO: 1729178 - RNA, 19 nt, Artificial Sequence
  Description of Artificial Sequence: Synthetic oligonucleotide
  Antisense strand to SEQ ID NO: 1729177
uuuaccacuuaaagaaccu

SEQ ID NO: 1729179 - RNA, 19 nt, Artificial Sequence
  Description of Artificial Sequence: Synthetic oligonucleotide
  Sense strand starting at position 3281 of SEQ ID NO: 1562194
cuuccuagagcucagugaa

SEQ ID NO: 1729180 - RNA, 19 nt, Artificial Sequence
  Description of Artificial Sequence: Synthetic oligonucleotide
  Antisense strand to SEQ ID NO: 1729179
uucacugagcucuaggaag

SEQ ID NO: 1729181 - RNA, 19 nt, Artificial Sequence
  Description of Artificial Sequence: Synthetic oligonucleotide
  Sense strand starting at position 3284 of SEQ ID NO: 1562194
ccuagagcucagugaagaa

SEQ ID NO: 1729182 - RNA, 19 nt, Artificial Sequence
  Description of Artificial Sequence: Synthetic oligonucleotide
  Antisense strand to SEQ ID NO: 1729181
uucuucacugagcucuagg

SEQ ID NO: 1729183 - RNA, 19 nt, Artificial Sequence
  Description of Artificial Sequence: Synthetic oligonucleotide
  Sense strand starting at position 3294 of SEQ ID NO: 1562194
agugaagaaaucuggucau

SEQ ID NO: 1729184 - RNA, 19 nt, Artificial Sequence
  Description of Artificial Sequence: Synthetic oligonucleotide
  Antisense strand to SEQ ID NO: 1729183
augaccagauuucuucacu

SEQ ID NO: 1729185 - RNA, 19 nt, Artificial Sequence
  Description of Artificial Sequence: Synthetic oligonucleotide
  Sense strand starting at position 3297 of SEQ ID NO: 1562194
gaagaaaucuggucaucug

SEQ ID NO: 1729186 - RNA, 19 nt, Artificial Sequence
  Description of Artificial Sequence: Synthetic oligonucleotide
  Antisense strand to SEQ ID NO: 1729185
cagaugaccagauuucuuc

SEQ ID NO: 1729187 - RNA, 19 nt, Artificial Sequence
  Description of Artificial Sequence: Synthetic oligonucleotide
  Sense strand starting at position 118 of SEQ ID NO: 1562195
agcucucuucgugaucaag

SEQ ID NO: 1729188 - RNA, 19 nt, Artificial Sequence
  Description of Artificial Sequence: Synthetic oligonucleotide
  Antisense strand to SEQ ID NO: 1729187
cuugaucacgaagagagcu

SEQ ID NO: 1729189 - RNA, 19 nt, Artificial Sequence
  Description of Artificial Sequence: Synthetic oligonucleotide
  Sense strand starting at position 120 of SEQ ID NO: 1562195
cucucuucgugaucaagaa

SEQ ID NO: 1729190 - RNA, 19 nt, Artificial Sequence
  Description of Artificial Sequence: Synthetic oligonucleotide
  Antisense strand to SEQ ID NO: 1729189
uucuugaucacgaagagag

SEQ ID NO: 1729191 - RNA, 19 nt, Artificial Sequence
  Description of Artificial Sequence: Synthetic oligonucleotide
  Sense strand starting at position 121 of SEQ ID NO: 1562195
ucucuucgugaucaagaag

SEQ ID NO: 1729192 - RNA, 19 nt, Artificial Sequence
  Description of Artificial Sequence: Synthetic oligonucleotide
  Antisense strand to SEQ ID NO: 1729191
cuucuugaucacgaagaga

SEQ ID NO: 1729193 - RNA, 19 nt, Artificial Sequence
  Description of Artificial Sequence: Synthetic oligonucleotide
  Sense strand starting at position 124 of SEQ ID NO: 1562195
cuucgugaucaagaagacu

SEQ ID NO: 1729194 - RNA, 19 nt, Artificial Sequence
  Description of Artificial Sequence: Synthetic oligonucleotide
  Antisense strand to SEQ ID NO: 1729193
agucuucuugaucacgaag

SEQ ID NO: 1729195 - RNA, 19 nt, Artificial Sequence
  Description of Artificial Sequence: Synthetic oligonucleotide
  Sense strand starting at position 421 of SEQ ID NO: 1562195
aaaggaguggcuugaaacu

SEQ ID NO: 1729196 - RNA, 19 nt, Artificial Sequence
  Description of Artificial Sequence: Synthetic oligonucleotide
  Antisense strand to SEQ ID NO: 1729195
aguuucaagccacuccuuu

SEQ ID NO: 1729197 - RNA, 19 nt, Artificial Sequence
  Description of Artificial Sequence: Synthetic oligonucleotide
  Sense strand starting at position 712 of SEQ ID NO: 1562195
aagagaugcuagccaagaa

SEQ ID NO: 1729198 - RNA, 19 nt, Artificial Sequence
  Description of Artificial Sequence: Synthetic oligonucleotide
  Antisense strand to SEQ ID NO: 1729197
uucuuggcuagcaucucuu

SEQ ID NO: 1729199 - RNA, 19 nt, Artificial Sequence
  Description of Artificial Sequence: Synthetic oligonucleotide
  Sense strand starting at position 818 of SEQ ID NO: 1562195
ggcuuuaaccaaugagggu

SEQ ID NO: 1729200 - RNA, 19 nt, Artificial Sequence
  Description of Artificial Sequence: Synthetic oligonucleotide
  Antisense strand to SEQ ID NO: 1729199
acccucauugguuaaagcc

SEQ ID NO: 1729201 - RNA, 19 nt, Artificial Sequence
  Description of Artificial Sequence: Synthetic oligonucleotide
  Sense strand starting at position 819 of SEQ ID NO: 1562195
gcuuuaaccaaugaggguu

SEQ ID NO: 1729202 - RNA, 19 nt, Artificial Sequence
  Description of Artificial Sequence: Synthetic oligonucleotide
  Antisense strand to SEQ ID NO: 1729201
aacccucauugguuaaagc

SEQ ID NO: 1729203 - RNA, 19 nt, Artificial Sequence
  Description of Artificial Sequence: Synthetic oligonucleotide
  Sense strand starting at position 831 of SEQ ID NO: 1562195
gaggguuucugauuaaguc

SEQ ID NO: 1729204 - RNA, 19 nt, Artificial Sequence
  Description of Artificial Sequence: Synthetic oligonucleotide
  Antisense strand to SEQ ID NO: 1729203
gacuuaaucagaaacccuc

SEQ ID NO: 1729205 - RNA, 19 nt, Artificial Sequence
  Description of Artificial Sequence: Synthetic oligonucleotide
  Sense strand starting at position 832 of SEQ ID NO: 1562195
aggguuucugauuaaguca

SEQ ID NO: 1729206 - RNA, 19 nt, Artificial Sequence
  Description of Artificial Sequence: Synthetic oligonucleotide
  Antisense strand to SEQ ID NO: 1729205
ugacuuaaucagaaacccu

SEQ ID NO: 1729207 - RNA, 19 nt, Artificial Sequence
  Description of Artificial Sequence: Synthetic oligonucleotide
  Sense strand starting at position 839 of SEQ ID NO: 1562195
cugauuaagucacccugga

SEQ ID NO: 1729208 - RNA, 19 nt, Artificial Sequence
  Description of Artificial Sequence: Synthetic oligonucleotide
  Antisense strand to SEQ ID NO: 1729207
uccagggugacuuaaucag

SEQ ID NO: 1729209 - RNA, 19 nt, Artificial Sequence
  Description of Artificial Sequence: Synthetic oligonucleotide
  Sense strand starting at position 843 of SEQ ID NO: 1562195
uuaagucacccuggagaag

SEQ ID NO: 1729210 - RNA, 19 nt, Artificial Sequence
  Description of Artificial Sequence: Synthetic oligonucleotide
  Antisense strand to SEQ ID NO: 1729209
cuucuccagggugacuuaa

SEQ ID NO: 1729211 - RNA, 19 nt, Artificial Sequence
  Description of Artificial Sequence: Synthetic oligonucleotide
  Sense strand starting at position 988 of SEQ ID NO: 1562195
uccaguuuggcaugaaauc

SEQ ID NO: 1729212 - RNA, 19 nt, Artificial Sequence
  Description of Artificial Sequence: Synthetic oligonucleotide
  Antisense strand to SEQ ID NO: 1729211
gauuucaugccaaacugga

SEQ ID NO: 1729213 - RNA, 19 nt, Artificial Sequence
  Description of Artificial Sequence: Synthetic oligonucleotide
  Sense strand starting at position 1004 of SEQ ID NO: 1562195
auccgaacuccuuagcaga

SEQ ID NO: 1729214 - RNA, 19 nt, Artificial Sequence
  Description of Artificial Sequence: Synthetic oligonucleotide
  Antisense strand to SEQ ID NO: 1729213
ucugcuaaggaguucggau

SEQ ID NO: 1729215 - RNA, 19 nt, Artificial Sequence
  Description of Artificial Sequence: Synthetic oligonucleotide
  Sense strand starting at position 1311 of SEQ ID NO: 1562195
cugauuaucccacaggucu

SEQ ID NO: 1729216 - RNA, 19 nt, Artificial Sequence
  Description of Artificial Sequence: Synthetic oligonucleotide
  Antisense strand to SEQ ID NO: 1729215
agaccugugggauaaucag

SEQ ID NO: 1729217 - RNA, 19 nt, Artificial Sequence
  Description of Artificial Sequence: Synthetic oligonucleotide
  Sense strand starting at position 1422 of SEQ ID NO: 1562195
uuacacaggcgguauauaa

SEQ ID NO: 1729218 - RNA, 19 nt, Artificial Sequence
  Description of Artificial Sequence: Synthetic oligonucleotide
  Antisense strand to SEQ ID NO: 1729217
uuauauaccgccuguguaa

SEQ ID NO: 1729219 - RNA, 19 nt, Artificial Sequence
  Description of Artificial Sequence: Synthetic oligonucleotide
  Sense strand starting at position 2134 of SEQ ID NO: 1562195
cccgcuaucagggagauua

SEQ ID NO: 1729220 - RNA, 19 nt, Artificial Sequence
  Description of Artificial Sequence: Synthetic oligonucleotide
  Antisense strand to SEQ ID NO: 1729219
uaaucucccugauagcggg

SEQ ID NO: 1729221 - RNA, 19 nt, Artificial Sequence
  Description of Artificial Sequence: Synthetic oligonucleotide
  Sense strand starting at position 2136 of SEQ ID NO: 1562195
cgcuaucagggagauuaug

SEQ ID NO: 1729222 - RNA, 19 nt, Artificial Sequence
  Description of Artificial Sequence: Synthetic oligonucleotide
  Antisense strand to SEQ ID NO: 1729221
cauaaucucccugauagcg

SEQ ID NO: 1729223 - RNA, 19 nt, Artificial Sequence
  Description of Artificial Sequence: Synthetic oligonucleotide
  Sense strand starting at position 2144 of SEQ ID NO: 1562195
gggagauuauguccuagug

SEQ ID NO: 1729224 - RNA, 19 nt, Artificial Sequence
  Description of Artificial Sequence: Synthetic oligonucleotide
  Antisense strand to SEQ ID NO: 1729223
cacuaggacauaaucuccc

SEQ ID NO: 1729225 - RNA, 19 nt, Artificial Sequence
  Description of Artificial Sequence: Synthetic oligonucleotide
  Sense strand starting at position 2242 of SEQ ID NO: 1562195
ggauaaugcaauggaaagu

SEQ ID NO: 1729226 - RNA, 19 nt, Artificial Sequence
  Description of Artificial Sequence: Synthetic oligonucleotide
  Antisense strand to SEQ ID NO: 1729225
acuuuccauugcauuaucc

SEQ ID NO: 1729227 - RNA, 19 nt, Artificial Sequence
  Description of Artificial Sequence: Synthetic oligonucleotide
  Sense strand starting at position 2314 of SEQ ID NO: 1562195
gguaauaguugagcugaga

SEQ ID NO: 1729228 - RNA, 19 nt, Artificial Sequence
  Description of Artificial Sequence: Synthetic oligonucleotide
  Antisense strand to SEQ ID NO: 1729227
ucucagcucaacuauuacc

SEQ ID NO: 1729229 - RNA, 19 nt, Artificial Sequence
  Description of Artificial Sequence: Synthetic oligonucleotide
  Sense strand starting at position 2366 of SEQ ID NO: 1562195
gagggaugguaagugcaaa

SEQ ID NO: 1729230 - RNA, 19 nt, Artificial Sequence
  Description of Artificial Sequence: Synthetic oligonucleotide
  Antisense strand to SEQ ID NO: 1729229
uuugcacuuaccaucccuc

SEQ ID NO: 1729231 - RNA, 19 nt, Artificial Sequence
  Description of Artificial Sequence: Synthetic oligonucleotide
  Sense strand starting at position 2386 of SEQ ID NO: 1562195
guuccaaggcuagaaagua

SEQ ID NO: 1729232 - RNA, 19 nt, Artificial Sequence
  Description of Artificial Sequence: Synthetic oligonucleotide
  Antisense strand to SEQ ID NO: 1729231
uacuuucuagccuuggaac

SEQ ID NO: 1729233 - RNA, 19 nt, Artificial Sequence
  Description of Artificial Sequence: Synthetic oligonucleotide
  Sense strand starting at position 2412 of SEQ ID NO: 1562195
ccuagugcucuauagauau

SEQ ID NO: 1729234 - RNA, 19 nt, Artificial Sequence
  Description of Artificial Sequence: Synthetic oligonucleotide
  Antisense strand to SEQ ID NO: 1729233
auaucuauagagcacuagg

SEQ ID NO: 1729235 - RNA, 19 nt, Artificial Sequence
  Description of Artificial Sequence: Synthetic oligonucleotide
  Sense strand starting at position 2585 of SEQ ID NO: 1562195
agagaagguuuggagauuu

SEQ ID NO: 1729236 - RNA, 19 nt, Artificial Sequence
  Description of Artificial Sequence: Synthetic oligonucleotide
  Antisense strand to SEQ ID NO: 1729235
aaaucuccaaaccuucucu

SEQ ID NO: 1729237 - RNA, 19 nt, Artificial Sequence
  Description of Artificial Sequence: Synthetic oligonucleotide
  Sense strand starting at position 2642 of SEQ ID NO: 1562195
guuuacaggcacuaguaaa

SEQ ID NO: 1729238 - RNA, 19 nt, Artificial Sequence
  Description of Artificial Sequence: Synthetic oligonucleotide
  Antisense strand to SEQ ID NO: 1729237
uuuacuagugccuguaaac

SEQ ID NO: 1729239 - RNA, 19 nt, Artificial Sequence
  Description of Artificial Sequence: Synthetic oligonucleotide
  Sense strand starting at position 2698 of SEQ ID NO: 1562195
uugauugguaagugauagu

SEQ ID NO: 1729240 - RNA, 19 nt, Artificial Sequence
  Description of Artificial Sequence: Synthetic oligonucleotide
  Antisense strand to SEQ ID NO: 1729239
acuaucacuuaccaaucaa

SEQ ID NO: 1729241 - RNA, 19 nt, Artificial Sequence
  Description of Artificial Sequence: Synthetic oligonucleotide
  Sense strand starting at position 2705 of SEQ ID NO: 1562195
guaagugauagugguggau

SEQ ID NO: 1729242 - RNA, 19 nt, Artificial Sequence
  Description of Artificial Sequence: Synthetic oligonucleotide
  Antisense strand to SEQ ID NO: 1729241
auccaccacuaucacuuac

SEQ ID NO: 1729243 - RNA, 19 nt, Artificial Sequence
  Description of Artificial Sequence: Synthetic oligonucleotide
  Sense strand starting at position 2708 of SEQ ID NO: 1562195
agugauagugguggauaaa

SEQ ID NO: 1729244 - RNA, 19 nt, Artificial Sequence
  Description of Artificial Sequence: Synthetic oligonucleotide
  Antisense strand to SEQ ID NO: 1729243
uuuauccaccacuaucacu

SEQ ID NO: 1729245 - RNA, 19 nt, Artificial Sequence
  Description of Artificial Sequence: Synthetic oligonucleotide
  Sense strand starting at position 2837 of SEQ ID NO: 1562195
guuauaugcccugaguauu

SEQ ID NO: 1729246 - RNA, 19 nt, Artificial Sequence
  Description of Artificial Sequence: Synthetic oligonucleotide
  Antisense strand to SEQ ID NO: 1729245
aauacucagggcauauaac

SEQ ID NO: 1729247 - RNA, 19 nt, Artificial Sequence
  Description of Artificial Sequence: Synthetic oligonucleotide
  Sense strand starting at position 2873 of SEQ ID NO: 1562195
aauucugucuuaguuggau

SEQ ID NO: 1729248 - RNA, 19 nt, Artificial Sequence
  Description of Artificial Sequence: Synthetic oligonucleotide
  Antisense strand to SEQ ID NO: 1729247
auccaacuaagacagaauu

SEQ ID NO: 1729249 - RNA, 19 nt, Artificial Sequence
  Description of Artificial Sequence: Synthetic oligonucleotide
  Sense strand starting at position 2879 of SEQ ID NO: 1562195
gucuuaguuggauaugaca

SEQ ID NO: 1729250 - RNA, 19 nt, Artificial Sequence
  Description of Artificial Sequence: Synthetic oligonucleotide
  Antisense strand to SEQ ID NO: 1729249
ugucauauccaacuaagac

SEQ ID NO: 1729251 - RNA, 19 nt, Artificial Sequence
  Description of Artificial Sequence: Synthetic oligonucleotide
  Sense strand starting at position 2904 of SEQ ID NO: 1562195
acccaauucguaugaucag

SEQ ID NO: 1729252 - RNA, 19 nt, Artificial Sequence
  Description of Artificial Sequence: Synthetic oligonucleotide
  Antisense strand to SEQ ID NO: 1729251
cugaucauacgaauugggu

SEQ ID NO: 1729253 - RNA, 19 nt, Artificial Sequence
  Description of Artificial Sequence: Synthetic oligonucleotide
  Sense strand starting at position 2975 of SEQ ID NO: 1562195
gccucaucugacgacucua

SEQ ID NO: 1729254 - RNA, 19 nt, Artificial Sequence
  Description of Artificial Sequence: Synthetic oligonucleotide
  Antisense strand to SEQ ID NO: 1729253
uagagucgucagaugaggc

SEQ ID NO: 1729255 - RNA, 19 nt, Artificial Sequence
  Description of Artificial Sequence: Synthetic oligonucleotide
  Sense strand starting at position 3340 of SEQ ID NO: 1562195
gggucuggcauccaauaaa

SEQ ID NO: 1729256 - RNA, 19 nt, Artificial Sequence
  Description of Artificial Sequence: Synthetic oligonucleotide
  Antisense strand to SEQ ID NO: 1729255
uuuauuggaugccagaccc

SEQ ID NO: 1729257 - RNA, 19 nt, Artificial Sequence
  Description of Artificial Sequence: Synthetic oligonucleotide
  Sense strand starting at position 3631 of SEQ ID NO: 1562195
gugaaucaggauugcucua

SEQ ID NO: 1729258 - RNA, 19 nt, Artificial Sequence
  Description of Artificial Sequence: Synthetic oligonucleotide
  Antisense strand to SEQ ID NO: 1729257
uagagcaauccugauucac

SEQ ID NO: 1729259 - RNA, 19 nt, Artificial Sequence
  Description of Artificial Sequence: Synthetic oligonucleotide
  Sense strand starting at position 3633 of SEQ ID NO: 1562195
gaaucaggauugcucuaag

SEQ ID NO: 1729260 - RNA, 19 nt, Artificial Sequence
  Description of Artificial Sequence: Synthetic oligonucleotide
  Antisense strand to SEQ ID NO: 1729259
cuuagagcaauccugauuc

SEQ ID NO: 1729261 - RNA, 19 nt, Artificial Sequence
  Description of Artificial Sequence: Synthetic oligonucleotide
  Sense strand starting at position 3636 of SEQ ID NO: 1562195
ucaggauugcucuaagcca

SEQ ID NO: 1729262 - RNA, 19 nt, Artificial Sequence
  Description of Artificial Sequence: Synthetic oligonucleotide
  Antisense strand to SEQ ID NO: 1729261
uggcuuagagcaauccuga

SEQ ID NO: 1729263 - RNA, 19 nt, Artificial Sequence
  Description of Artificial Sequence: Synthetic oligonucleotide
  Sense strand starting at position 3693 of SEQ ID NO: 1562195
aagggaugcacaugugaug

SEQ ID NO: 1729264 - RNA, 19 nt, Artificial Sequence
  Description of Artificial Sequence: Synthetic oligonucleotide
  Antisense strand to SEQ ID NO: 1729263
caucacaugugcaucccuu

SEQ ID NO: 1729265 - RNA, 19 nt, Artificial Sequence
  Description of Artificial Sequence: Synthetic oligonucleotide
  Sense strand starting at position 3713 of SEQ ID NO: 1562195
ugaucugggcaaugagaua

SEQ ID NO: 1729266 - RNA, 19 nt, Artificial Sequence
  Description of Artificial Sequence: Synthetic oligonucleotide
  Antisense strand to SEQ ID NO: 1729265
uaucucauugcccagauca

SEQ ID NO: 1729267 - RNA, 19 nt, Artificial Sequence
  Description of Artificial Sequence: Synthetic oligonucleotide
  Sense strand starting at position 126 of SEQ ID NO: 1562196
cucaauugagcaggauuau

SEQ ID NO: 1729268 - RNA, 19 nt, Artificial Sequence
  Description of Artificial Sequence: Synthetic oligonucleotide
  Antisense strand to SEQ ID NO: 1729267
auaauccugcucaauugag

SEQ ID NO: 1729269 - RNA, 19 nt, Artificial Sequence
  Description of Artificial Sequence: Synthetic oligonucleotide
  Sense strand starting at position 199 of SEQ ID NO: 1562196
ucaacaggguuguucgaaa

SEQ ID NO: 1729270 - RNA, 19 nt, Artificial Sequence
  Description of Artificial Sequence: Synthetic oligonucleotide
  Antisense strand to SEQ ID NO: 1729269
uuucgaacaacccuguuga

SEQ ID NO: 1729271 - RNA, 19 nt, Artificial Sequence
  Description of Artificial Sequence: Synthetic oligonucleotide
  Sense strand starting at position 211 of SEQ ID NO: 1562196
uucgaaagccugcaaggau

SEQ ID NO: 1729272 - RNA, 19 nt, Artificial Sequence
  Description of Artificial Sequence: Synthetic oligonucleotide
  Antisense strand to SEQ ID NO: 1729271
auccuugcaggcuuucgaa

SEQ ID NO: 1729273 - RNA, 19 nt, Artificial Sequence
  Description of Artificial Sequence: Synthetic oligonucleotide
  Sense strand starting at position 243 of SEQ ID NO: 1562196
gaggacucuucccugggua

SEQ ID NO: 1729274 - RNA, 19 nt, Artificial Sequence
  Description of Artificial Sequence: Synthetic oligonucleotide
  Antisense strand to SEQ ID NO: 1729273
uacccagggaagaguccuc

SEQ ID NO: 1729275 - RNA, 19 nt, Artificial Sequence
  Description of Artificial Sequence: Synthetic oligonucleotide
  Sense strand starting at position 244 of SEQ ID NO: 1562196
aggacucuucccuggguaa

SEQ ID NO: 1729276 - RNA, 19 nt, Artificial Sequence
  Description of Artificial Sequence: Synthetic oligonucleotide
  Antisense strand to SEQ ID NO: 1729275
uuacccagggaagaguccu

SEQ ID NO: 1729277 - RNA, 19 nt, Artificial Sequence
  Description of Artificial Sequence: Synthetic oligonucleotide
  Sense strand starting at position 245 of SEQ ID NO: 1562196
ggacucuucccuggguaac

SEQ ID NO: 1729278 - RNA, 19 nt, Artificial Sequence
  Description of Artificial Sequence: Synthetic oligonucleotide
  Antisense strand to SEQ ID NO: 1729277
guuacccagggaagagucc

SEQ ID NO: 1729279 - RNA, 19 nt, Artificial Sequence
  Description of Artificial Sequence: Synthetic oligonucleotide
  Sense strand starting at position 246 of SEQ ID NO: 1562196
gacucuucccuggguaacu

SEQ ID NO: 1729280 - RNA, 19 nt, Artificial Sequence
  Description of Artificial Sequence: Synthetic oligonucleotide
  Antisense strand to SEQ ID NO: 1729279
aguuacccagggaagaguc

SEQ ID NO: 1729281 - RNA, 19 nt, Artificial Sequence
  Description of Artificial Sequence: Synthetic oligonucleotide
  Sense strand starting at position 257 of SEQ ID NO: 1562196
ggguaacugaaguggaaau

SEQ ID NO: 1729282 - RNA, 19 nt, Artificial Sequence
  Description of Artificial Sequence: Synthetic oligonucleotide
  Antisense strand to SEQ ID NO: 1729281
auuuccacuucaguuaccc

SEQ ID NO: 1729283 - RNA, 19 nt, Artificial Sequence
  Description of Artificial Sequence: Synthetic oligonucleotide
  Sense strand starting at position 533 of SEQ ID NO: 1562196
uaaacugcguuuccagaaa

SEQ ID NO: 1729284 - RNA, 19 nt, Artificial Sequence
  Description of Artificial Sequence: Synthetic oligonucleotide
  Antisense strand to SEQ ID NO: 1729283
uuucuggaaacgcaguuua

SEQ ID NO: 1729285 - RNA, 19 nt, Artificial Sequence
  Description of Artificial Sequence: Synthetic oligonucleotide
  Sense strand starting at position 585 of SEQ ID NO: 1562196
aguuccagugacuaacaua

SEQ ID NO: 1729286 - RNA, 19 nt, Artificial Sequence
  Description of Artificial Sequence: Synthetic oligonucleotide
  Antisense strand to SEQ ID NO: 1729285
uauguuagucacuggaacu

SEQ ID NO: 1729287 - RNA, 19 nt, Artificial Sequence
  Description of Artificial Sequence: Synthetic oligonucleotide
  Sense strand starting at position 650 of SEQ ID NO: 1562196
ugcaaacuuucuuuaggga

SEQ ID NO: 1729288 - RNA, 19 nt, Artificial Sequence
  Description of Artificial Sequence: Synthetic oligonucleotide
  Antisense strand to SEQ ID NO: 1729287
ucccuaaagaaaguuugca

SEQ ID NO: 1729289 - RNA, 19 nt, Artificial Sequence
  Description of Artificial Sequence: Synthetic oligonucleotide
  Sense strand starting at position 672 of SEQ ID NO: 1562196
acugcuaccuuugcaaaga

SEQ ID NO: 1729290 - RNA, 19 nt, Artificial Sequence
  Description of Artificial Sequence: Synthetic oligonucleotide
  Antisense strand to SEQ ID NO: 1729289
ucuuugcaaagguagcagu

SEQ ID NO: 1729291 - RNA, 19 nt, Artificial Sequence
  Description of Artificial Sequence: Synthetic oligonucleotide
  Sense strand starting at position 733 of SEQ ID NO: 1562196
caaagcguggcuuuaguuu

SEQ ID NO: 1729292 - RNA, 19 nt, Artificial Sequence
  Description of Artificial Sequence: Synthetic oligonucleotide
  Antisense strand to SEQ ID NO: 1729291
aaacuaaagccacgcuuug

SEQ ID NO: 1729293 - RNA, 19 nt, Artificial Sequence
  Description of Artificial Sequence: Synthetic oligonucleotide
  Sense strand starting at position 795 of SEQ ID NO: 1562196
uuaacaguugcuuaaggaa

SEQ ID NO: 1729294 - RNA, 19 nt, Artificial Sequence
  Description of Artificial Sequence: Synthetic oligonucleotide
  Antisense strand to SEQ ID NO: 1729293
uuccuuaagcaacuguuaa

SEQ ID NO: 1729295 - RNA, 19 nt, Artificial Sequence
  Description of Artificial Sequence: Synthetic oligonucleotide
  Sense strand starting at position 913 of SEQ ID NO: 1562196
ucccucucuggugaaguau

SEQ ID NO: 1729296 - RNA, 19 nt, Artificial Sequence
  Description of Artificial Sequence: Synthetic oligonucleotide
  Antisense strand to SEQ ID NO: 1729295
auacuucaccagagaggga

SEQ ID NO: 1729297 - RNA, 19 nt, Artificial Sequence
  Description of Artificial Sequence: Synthetic oligonucleotide
  Sense strand starting at position 930 of SEQ ID NO: 1562196
augugauuuauacggcuuu

SEQ ID NO: 1729298 - RNA, 19 nt, Artificial Sequence
  Description of Artificial Sequence: Synthetic oligonucleotide
  Antisense strand to SEQ ID NO: 1729297
aaagccguauaaaucacau

SEQ ID NO: 1729299 - RNA, 19 nt, Artificial Sequence
  Description of Artificial Sequence: Synthetic oligonucleotide
  Sense strand starting at position 1082 of SEQ ID NO: 1562196
cgacuuucccgggaggaau

SEQ ID NO: 1729300 - RNA, 19 nt, Artificial Sequence
  Description of Artificial Sequence: Synthetic oligonucleotide
  Antisense strand to SEQ ID NO: 1729299
auuccucccgggaaagucg

SEQ ID NO: 1729301 - RNA, 19 nt, Artificial Sequence
  Description of Artificial Sequence: Synthetic oligonucleotide
  Sense strand starting at position 1406 of SEQ ID NO: 1562196
aggagagaauaucaaacaa

SEQ ID NO: 1729302 - RNA, 19 nt, Artificial Sequence
  Description of Artificial Sequence: Synthetic oligonucleotide
  Antisense strand to SEQ ID NO: 1729301
uuguuugauauucucuccu

SEQ ID NO: 1729303 - RNA, 19 nt, Artificial Sequence
  Description of Artificial Sequence: Synthetic oligonucleotide
  Sense strand starting at position 1716 of SEQ ID NO: 1562196
gccguaccugggaaucguu

SEQ ID NO: 1729304 - RNA, 19 nt, Artificial Sequence
  Description of Artificial Sequence: Synthetic oligonucleotide
  Antisense strand to SEQ ID NO: 1729303
aacgauucccagguacggc

SEQ ID NO: 1729305 - RNA, 19 nt, Artificial Sequence
  Description of Artificial Sequence: Synthetic oligonucleotide
  Sense strand starting at position 2152 of SEQ ID NO: 1562196
uccgcugugauuugcauaa

SEQ ID NO: 1729306 - RNA, 19 nt, Artificial Sequence
  Description of Artificial Sequence: Synthetic oligonucleotide
  Antisense strand to SEQ ID NO: 1729305
uuaugcaaaucacagcgga

SEQ ID NO: 1729307 - RNA, 19 nt, Artificial Sequence
  Description of Artificial Sequence: Synthetic oligonucleotide
  Sense strand starting at position 2347 of SEQ ID NO: 1562196
cccagcaaucuugggcaga

SEQ ID NO: 1729308 - RNA, 19 nt, Artificial Sequence
  Description of Artificial Sequence: Synthetic oligonucleotide
  Antisense strand to SEQ ID NO: 1729307
ucugcccaagauugcuggg

SEQ ID NO: 1729309 - RNA, 19 nt, Artificial Sequence
  Description of Artificial Sequence: Synthetic oligonucleotide
  Sense strand starting at position 2675 of SEQ ID NO: 1562196
ccgcuaugagcccaggaau

SEQ ID NO: 1729310 - RNA, 19 nt, Artificial Sequence
  Description of Artificial Sequence: Synthetic oligonucleotide
  Antisense strand to SEQ ID NO: 1729309
auuccugggcucauagcgg

SEQ ID NO: 1729311 - RNA, 19 nt, Artificial Sequence
  Description of Artificial Sequence: Synthetic oligonucleotide
  Sense strand starting at position 2678 of SEQ ID NO: 1562196
cuaugagcccaggaauugu

SEQ ID NO: 1729312 - RNA, 19 nt, Artificial Sequence
  Description of Artificial Sequence: Synthetic oligonucleotide
  Antisense strand to SEQ ID NO: 1729311
acaauuccugggcucauag

SEQ ID NO: 1729313 - RNA, 19 nt, Artificial Sequence
  Description of Artificial Sequence: Synthetic oligonucleotide
  Sense strand starting at position 2804 of SEQ ID NO: 1562196
ccguuuauagagcaucuau

SEQ ID NO: 1729314 - RNA, 19 nt, Artificial Sequence
  Description of Artificial Sequence: Synthetic oligonucleotide
  Antisense strand to SEQ ID NO: 1729313
auagaugcucuauaaacgg

SEQ ID NO: 1729315 - RNA, 19 nt, Artificial Sequence
  Description of Artificial Sequence: Synthetic oligonucleotide
  Sense strand starting at position 2855 of SEQ ID NO: 1562196
cugugaggucgccuguauu

SEQ ID NO: 1729316 - RNA, 19 nt, Artificial Sequence
  Description of Artificial Sequence: Synthetic oligonucleotide
  Antisense strand to SEQ ID NO: 1729315
aauacaggcgaccucacag

SEQ ID NO: 1729317 - RNA, 19 nt, Artificial Sequence
  Description of Artificial Sequence: Synthetic oligonucleotide
  Sense strand starting at position 2921 of SEQ ID NO: 1562196
uugcaucuauaguuggaua

SEQ ID NO: 1729318 - RNA, 19 nt, Artificial Sequence
  Description of Artificial Sequence: Synthetic oligonucleotide
  Antisense strand to SEQ ID NO: 1729317
uauccaacuauagaugcaa

SEQ ID NO: 1729319 - RNA, 19 nt, Artificial Sequence
  Description of Artificial Sequence: Synthetic oligonucleotide
  Sense strand starting at position 2942 of SEQ ID NO: 1562196
ucucaagcuucucugggaa

SEQ ID NO: 1729320 - RNA, 19 nt, Artificial Sequence
  Description of Artificial Sequence: Synthetic oligonucleotide
  Antisense strand to SEQ ID NO: 1729319
uucccagagaagcuugaga

SEQ ID NO: 1729321 - RNA, 19 nt, Artificial Sequence
  Description of Artificial Sequence: Synthetic oligonucleotide
  Sense strand starting at position 2945 of SEQ ID NO: 1562196
caagcuucucugggaauga

SEQ ID NO: 1729322 - RNA, 19 nt, Artificial Sequence
  Description of Artificial Sequence: Synthetic oligonucleotide
  Antisense strand to SEQ ID NO: 1729321
ucauucccagagaagcuug

SEQ ID NO: 1729323 - RNA, 19 nt, Artificial Sequence
  Description of Artificial Sequence: Synthetic oligonucleotide
  Sense strand starting at position 3073 of SEQ ID NO: 1562196
cccauaagccuuugaaguc

SEQ ID NO: 1729324 - RNA, 19 nt, Artificial Sequence
  Description of Artificial Sequence: Synthetic oligonucleotide
  Antisense strand to SEQ ID NO: 1729323
gacuucaaaggcuuauggg

SEQ ID NO: 1729325 - RNA, 19 nt, Artificial Sequence
  Description of Artificial Sequence: Synthetic oligonucleotide
  Sense strand starting at position 3091 of SEQ ID NO: 1562196
cugcguucuccugcuugga

SEQ ID NO: 1729326 - RNA, 19 nt, Artificial Sequence
  Description of Artificial Sequence: Synthetic oligonucleotide
  Antisense strand to SEQ ID NO: 1729325
uccaagcaggagaacgcag

SEQ ID NO: 1729327 - RNA, 19 nt, Artificial Sequence
  Description of Artificial Sequence: Synthetic oligonucleotide
  Sense strand starting at position 3092 of SEQ ID NO: 1562196
ugcguucuccugcuuggau

SEQ ID NO: 1729328 - RNA, 19 nt, Artificial Sequence
  Description of Artificial Sequence: Synthetic oligonucleotide
  Antisense strand to SEQ ID NO: 1729327
auccaagcaggagaacgca

SEQ ID NO: 1729329 - RNA, 19 nt, Artificial Sequence
  Description of Artificial Sequence: Synthetic oligonucleotide
  Sense strand starting at position 3099 of SEQ ID NO: 1562196
uccugcuuggauuaauaca

SEQ ID NO: 1729330 - RNA, 19 nt, Artificial Sequence
  Description of Artificial Sequence: Synthetic oligonucleotide
  Antisense strand to SEQ ID NO: 1729329
uguauuaauccaagcagga

SEQ ID NO: 1729331 - RNA, 19 nt, Artificial Sequence
  Description of Artificial Sequence: Synthetic oligonucleotide
  Sense strand starting at position 3107 of SEQ ID NO: 1562196
ggauuaauacaaugugcug

SEQ ID NO: 1729332 - RNA, 19 nt, Artificial Sequence
  Description of Artificial Sequence: Synthetic oligonucleotide
  Antisense strand to SEQ ID NO: 1729331
cagcacauuguauuaaucc

SEQ ID NO: 1729333 - RNA, 19 nt, Artificial Sequence
  Description of Artificial Sequence: Synthetic oligonucleotide
  Sense strand starting at position 3374 of SEQ ID NO: 1562196
cagagugagaccugguuua

SEQ ID NO: 1729334 - RNA, 19 nt, Artificial Sequence
  Description of Artificial Sequence: Synthetic oligonucleotide
  Antisense strand to SEQ ID NO: 1729333
uaaaccaggucucacucug

SEQ ID NO: 1729335 - RNA, 19 nt, Artificial Sequence
  Description of Artificial Sequence: Synthetic oligonucleotide
  Sense strand starting at position 3536 of SEQ ID NO: 1562196
ccauuacuccuuuguggau

SEQ ID NO: 1729336 - RNA, 19 nt, Artificial Sequence
  Description of Artificial Sequence: Synthetic oligonucleotide
  Antisense strand to SEQ ID NO: 1729335
auccacaaaggaguaaugg

SEQ ID NO: 1729337 - RNA, 19 nt, Artificial Sequence
  Description of Artificial Sequence: Synthetic oligonucleotide
  Sense strand starting at position 3550 of SEQ ID NO: 1562196
uggauauugccacaucuau

SEQ ID NO: 1729338 - RNA, 19 nt, Artificial Sequence
  Description of Artificial Sequence: Synthetic oligonucleotide
  Antisense strand to SEQ ID NO: 1729337
auagauguggcaauaucca

SEQ ID NO: 1729339 - RNA, 19 nt, Artificial Sequence
  Description of Artificial Sequence: Synthetic oligonucleotide
  Sense strand starting at position 3656 of SEQ ID NO: 1562196
augaaaucauuuggaagua

SEQ ID NO: 1729340 - RNA, 19 nt, Artificial Sequence
  Description of Artificial Sequence: Synthetic oligonucleotide
  Antisense strand to SEQ ID NO: 1729339
uacuuccaaaugauuucau

SEQ ID NO: 1729341 - RNA, 19 nt, Artificial Sequence
  Description of Artificial Sequence: Synthetic oligonucleotide
  Sense strand starting at position 3657 of SEQ ID NO: 1562196
ugaaaucauuuggaaguaa

SEQ ID NO: 1729342 - RNA, 19 nt, Artificial Sequence
  Description of Artificial Sequence: Synthetic oligonucleotide
  Antisense strand to SEQ ID NO: 1729341
uuacuuccaaaugauuuca

SEQ ID NO: 1729343 - RNA, 19 nt, Artificial Sequence
  Description of Artificial Sequence: Synthetic oligonucleotide
  Sense strand starting at position 3748 of SEQ ID NO: 1562196
auuagauguguuuaccaca

SEQ ID NO: 1729344 - RNA, 19 nt, Artificial Sequence
  Description of Artificial Sequence: Synthetic oligonucleotide
  Antisense strand to SEQ ID NO: 1729343
ugugguaaacacaucuaau

SEQ ID NO: 1729345 - RNA, 19 nt, Artificial Sequence
  Description of Artificial Sequence: Synthetic oligonucleotide
  Sense strand starting at position 3907 of SEQ ID NO: 1562196
uugggaggucaauguggau

SEQ ID NO: 1729346 - RNA, 19 nt, Artificial Sequence
  Description of Artificial Sequence: Synthetic oligonucleotide
  Antisense strand to SEQ ID NO: 1729345
auccacauugaccucccaa

SEQ ID NO: 1729347 - RNA, 19 nt, Artificial Sequence
  Description of Artificial Sequence: Synthetic oligonucleotide
  Sense strand starting at position 109 of SEQ ID NO: 1562197
gccucaucuuuguuccuua

SEQ ID NO: 1729348 - RNA, 19 nt, Artificial Sequence
  Description of Artificial Sequence: Synthetic oligonucleotide
  Antisense strand to SEQ ID NO: 1729347
uaaggaacaaagaugaggc

SEQ ID NO: 1729349 - RNA, 19 nt, Artificial Sequence
  Description of Artificial Sequence: Synthetic oligonucleotide
  Sense strand starting at position 123 of SEQ ID NO: 1562197
ccuuacuugcuguguaauc

SEQ ID NO: 1729350 - RNA, 19 nt, Artificial Sequence
  Description of Artificial Sequence: Synthetic oligonucleotide
  Antisense strand to SEQ ID NO: 1729349
gauuacacagcaaguaagg

SEQ ID NO: 1729351 - RNA, 19 nt, Artificial Sequence
  Description of Artificial Sequence: Synthetic oligonucleotide
  Sense strand starting at position 124 of SEQ ID NO: 1562197
cuuacuugcuguguaaucu

SEQ ID NO: 1729352 - RNA, 19 nt, Artificial Sequence
  Description of Artificial Sequence: Synthetic oligonucleotide
  Antisense strand to SEQ ID NO: 1729351
agauuacacagcaaguaag

SEQ ID NO: 1729353 - RNA, 19 nt, Artificial Sequence
  Description of Artificial Sequence: Synthetic oligonucleotide
  Sense strand starting at position 128 of SEQ ID NO: 1562197
cuugcuguguaaucuguga

SEQ ID NO: 1729354 - RNA, 19 nt, Artificial Sequence
  Description of Artificial Sequence: Synthetic oligonucleotide
  Antisense strand to SEQ ID NO: 1729353
ucacagauuacacagcaag

SEQ ID NO: 1729355 - RNA, 19 nt, Artificial Sequence
  Description of Artificial Sequence: Synthetic oligonucleotide
  Sense strand starting at position 132 of SEQ ID NO: 1562197
cuguguaaucugugaguua

SEQ ID NO: 1729356 - RNA, 19 nt, Artificial Sequence
  Description of Artificial Sequence: Synthetic oligonucleotide
  Antisense strand to SEQ ID NO: 1729355
uaacucacagauuacacag

SEQ ID NO: 1729357 - RNA, 19 nt, Artificial Sequence
  Description of Artificial Sequence: Synthetic oligonucleotide
  Sense strand starting at position 135 of SEQ ID NO: 1562197
uguaaucugugaguuacac

SEQ ID NO: 1729358 - RNA, 19 nt, Artificial Sequence
  Description of Artificial Sequence: Synthetic oligonucleotide
  Antisense strand to SEQ ID NO: 1729357
guguaacucacagauuaca

SEQ ID NO: 1729359 - RNA, 19 nt, Artificial Sequence
  Description of Artificial Sequence: Synthetic oligonucleotide
  Sense strand starting at position 145 of SEQ ID NO: 1562197
gaguuacacuccucuguga

SEQ ID NO: 1729360 - RNA, 19 nt, Artificial Sequence
  Description of Artificial Sequence: Synthetic oligonucleotide
  Antisense strand to SEQ ID NO: 1729359
ucacagaggaguguaacuc

SEQ ID NO: 1729361 - RNA, 19 nt, Artificial Sequence
  Description of Artificial Sequence: Synthetic oligonucleotide
  Sense strand starting at position 147 of SEQ ID NO: 1562197
guuacacuccucugugacu

SEQ ID NO: 1729362 - RNA, 19 nt, Artificial Sequence
  Description of Artificial Sequence: Synthetic oligonucleotide
  Antisense strand to SEQ ID NO: 1729361
agucacagaggaguguaac

SEQ ID NO: 1729363 - RNA, 19 nt, Artificial Sequence
  Description of Artificial Sequence: Synthetic oligonucleotide
  Sense strand starting at position 199 of SEQ ID NO: 1562197
gaccaaugguucccagcau

SEQ ID NO: 1729364 - RNA, 19 nt, Artificial Sequence
  Description of Artificial Sequence: Synthetic oligonucleotide
  Antisense strand to SEQ ID NO: 1729363
augcugggaaccauugguc

SEQ ID NO: 1729365 - RNA, 19 nt, Artificial Sequence
  Description of Artificial Sequence: Synthetic oligonucleotide
  Sense strand starting at position 223 of SEQ ID NO: 1562197
cacagauccugggagccau

SEQ ID NO: 1729366 - RNA, 19 nt, Artificial Sequence
  Description of Artificial Sequence: Synthetic oligonucleotide
  Antisense strand to SEQ ID NO: 1729365
auggcucccaggaucugug

SEQ ID NO: 1729367 - RNA, 19 nt, Artificial Sequence
  Description of Artificial Sequence: Synthetic oligonucleotide
  Sense strand starting at position 440 of SEQ ID NO: 1562197
caaccaauguucgugacuu

SEQ ID NO: 1729368 - RNA, 19 nt, Artificial Sequence
  Description of Artificial Sequence: Synthetic oligonucleotide
  Antisense strand to SEQ ID NO: 1729367
aagucacgaacauugguug

SEQ ID NO: 1729369 - RNA, 19 nt, Artificial Sequence
  Description of Artificial Sequence: Synthetic oligonucleotide
  Sense strand starting at position 444 of SEQ ID NO: 1562197
caauguucgugacuuuggu

SEQ ID NO: 1729370 - RNA, 19 nt, Artificial Sequence
  Description of Artificial Sequence: Synthetic oligonucleotide
  Antisense strand to SEQ ID NO: 1729369
accaaagucacgaacauug

SEQ ID NO: 1729371 - RNA, 19 nt, Artificial Sequence
  Description of Artificial Sequence: Synthetic oligonucleotide
  Sense strand starting at position 450 of SEQ ID NO: 1562197
ucgugacuuugguuuaaag

SEQ ID NO: 1729372 - RNA, 19 nt, Artificial Sequence
  Description of Artificial Sequence: Synthetic oligonucleotide
  Antisense strand to SEQ ID NO: 1729371
cuuuaaaccaaagucacga

SEQ ID NO: 1729373 - RNA, 19 nt, Artificial Sequence
  Description of Artificial Sequence: Synthetic oligonucleotide
  Sense strand starting at position 452 of SEQ ID NO: 1562197
gugacuuugguuuaaagag

SEQ ID NO: 1729374 - RNA, 19 nt, Artificial Sequence
  Description of Artificial Sequence: Synthetic oligonucleotide
  Antisense strand to SEQ ID NO: 1729373
cucuuuaaaccaaagucac

SEQ ID NO: 1729375 - RNA, 19 nt, Artificial Sequence
  Description of Artificial Sequence: Synthetic oligonucleotide
  Sense strand starting at position 461 of SEQ ID NO: 1562197
guuuaaagaggcugggaau

SEQ ID NO: 1729376 - RNA, 19 nt, Artificial Sequence
  Description of Artificial Sequence: Synthetic oligonucleotide
  Antisense strand to SEQ ID NO: 1729375
auucccagccucuuuaaac

SEQ ID NO: 1729377 - RNA, 19 nt, Artificial Sequence
  Description of Artificial Sequence: Synthetic oligonucleotide
  Sense strand starting at position 472 of SEQ ID NO: 1562197
cugggaaucucuguguaga

SEQ ID NO: 1729378 - RNA, 19 nt, Artificial Sequence
  Description of Artificial Sequence: Synthetic oligonucleotide
  Antisense strand to SEQ ID NO: 1729377
ucuacacagagauucccag

SEQ ID NO: 1729379 - RNA, 19 nt, Artificial Sequence
  Description of Artificial Sequence: Synthetic oligonucleotide
  Sense strand starting at position 473 of SEQ ID NO: 1562197
ugggaaucucuguguagag

SEQ ID NO: 1729380 - RNA, 19 nt, Artificial Sequence
  Description of Artificial Sequence: Synthetic oligonucleotide
  Antisense strand to SEQ ID NO: 1729379
cucuacacagagauuccca

SEQ ID NO: 1729381 - RNA, 19 nt, Artificial Sequence
  Description of Artificial Sequence: Synthetic oligonucleotide
  Sense strand starting at position 578 of SEQ ID NO: 1562197
cgggcaucacuugggcaaa

SEQ ID NO: 1729382 - RNA, 19 nt, Artificial Sequence
  Description of Artificial Sequence: Synthetic oligonucleotide
  Antisense strand to SEQ ID NO: 1729381
uuugcccaagugaugcccg

SEQ ID NO: 1729383 - RNA, 19 nt, Artificial Sequence
  Description of Artificial Sequence: Synthetic oligonucleotide
  Sense strand starting at position 591 of SEQ ID NO: 1562197
ggcaaaugcuugcccuuau

SEQ ID NO: 1729384 - RNA, 19 nt, Artificial Sequence
  Description of Artificial Sequence: Synthetic oligonucleotide
  Antisense strand to SEQ ID NO: 1729383
auaagggcaagcauuugcc

SEQ ID NO: 1729385 - RNA, 19 nt, Artificial Sequence
  Description of Artificial Sequence: Synthetic oligonucleotide
  Sense strand starting at position 598 of SEQ ID NO: 1562197
gcuugcccuuauguauaua

SEQ ID NO: 1729386 - RNA, 19 nt, Artificial Sequence
  Description of Artificial Sequence: Synthetic oligonucleotide
  Antisense strand to SEQ ID NO: 1729385
uauauacauaagggcaagc

SEQ ID NO: 1729387 - RNA, 19 nt, Artificial Sequence
  Description of Artificial Sequence: Synthetic oligonucleotide
  Sense strand starting at position 762 of SEQ ID NO: 1562197
agcuuugauagugacuagu

SEQ ID NO: 1729388 - RNA, 19 nt, Artificial Sequence
  Description of Artificial Sequence: Synthetic oligonucleotide
  Antisense strand to SEQ ID NO: 1729387
acuagucacuaucaaagcu

SEQ ID NO: 1729389 - RNA, 19 nt, Artificial Sequence
  Description of Artificial Sequence: Synthetic oligonucleotide
  Sense strand starting at position 764 of SEQ ID NO: 1562197
cuuugauagugacuagugu

SEQ ID NO: 1729390 - RNA, 19 nt, Artificial Sequence
  Description of Artificial Sequence: Synthetic oligonucleotide
  Antisense strand to SEQ ID NO: 1729389
acacuagucacuaucaaag

SEQ ID NO: 1729391 - RNA, 19 nt, Artificial Sequence
  Description of Artificial Sequence: Synthetic oligonucleotide
  Sense strand starting at position 765 of SEQ ID NO: 1562197
uuugauagugacuagugua

SEQ ID NO: 1729392 - RNA, 19 nt, Artificial Sequence
  Description of Artificial Sequence: Synthetic oligonucleotide
  Antisense strand to SEQ ID NO: 1729391
uacacuagucacuaucaaa

SEQ ID NO: 1729393 - RNA, 19 nt, Artificial Sequence
  Description of Artificial Sequence: Synthetic oligonucleotide
  Sense strand starting at position 770 of SEQ ID NO: 1562197
uagugacuaguguaaaggu

SEQ ID NO: 1729394 - RNA, 19 nt, Artificial Sequence
  Description of Artificial Sequence: Synthetic oligonucleotide
  Antisense strand to SEQ ID NO: 1729393
accuuuacacuagucacua

SEQ ID NO: 1729395 - RNA, 19 nt, Artificial Sequence
  Description of Artificial Sequence: Synthetic oligonucleotide
  Sense strand starting at position 824 of SEQ ID NO: 1562197
uccacuucuugagccagaa

SEQ ID NO: 1729396 - RNA, 19 nt, Artificial Sequence
  Description of Artificial Sequence: Synthetic oligonucleotide
  Antisense strand to SEQ ID NO: 1729395
uucuggcucaagaagugga

SEQ ID NO: 1729397 - RNA, 19 nt, Artificial Sequence
  Description of Artificial Sequence: Synthetic oligonucleotide
  Sense strand starting at position 991 of SEQ ID NO: 1562197
aggacugaguagcagauuu

SEQ ID NO: 1729398 - RNA, 19 nt, Artificial Sequence
  Description of Artificial Sequence: Synthetic oligonucleotide
  Antisense strand to SEQ ID NO: 1729397
aaaucugcuacucaguccu

SEQ ID NO: 1729399 - RNA, 19 nt, Artificial Sequence
  Description of Artificial Sequence: Synthetic oligonucleotide
  Sense strand starting at position 1096 of SEQ ID NO: 1562197
uggacacauccucagcuau

SEQ ID NO: 1729400 - RNA, 19 nt, Artificial Sequence
  Description of Artificial Sequence: Synthetic oligonucleotide
  Antisense strand to SEQ ID NO: 1729399
auagcugaggaugugucca

SEQ ID NO: 1729401 - RNA, 19 nt, Artificial Sequence
  Description of Artificial Sequence: Synthetic oligonucleotide
  Sense strand starting at position 1183 of SEQ ID NO: 1562197
ggcccuucccggcgagauu

SEQ ID NO: 1729402 - RNA, 19 nt, Artificial Sequence
  Description of Artificial Sequence: Synthetic oligonucleotide
  Antisense strand to SEQ ID NO: 1729401
aaucucgccgggaagggcc

SEQ ID NO: 1729403 - RNA, 19 nt, Artificial Sequence
  Description of Artificial Sequence: Synthetic oligonucleotide
  Sense strand starting at position 1194 of SEQ ID NO: 1562197
gcgagauucgcacagguuc

SEQ ID NO: 1729404 - RNA, 19 nt, Artificial Sequence
  Description of Artificial Sequence: Synthetic oligonucleotide
  Antisense strand to SEQ ID NO: 1729403
gaaccugugcgaaucucgc

SEQ ID NO: 1729405 - RNA, 19 nt, Artificial Sequence
  Description of Artificial Sequence: Synthetic oligonucleotide
  Sense strand starting at position 1216 of SEQ ID NO: 1562197
ugcugagucagagguuuac

SEQ ID NO: 1729406 - RNA, 19 nt, Artificial Sequence
  Description of Artificial Sequence: Synthetic oligonucleotide
  Antisense strand to SEQ ID NO: 1729405
guaaaccucugacucagca

SEQ ID NO: 1729407 - RNA, 19 nt, Artificial Sequence
  Description of Artificial Sequence: Synthetic oligonucleotide
  Sense strand starting at position 1308 of SEQ ID NO: 1562197
uggcgagauuuauagaaac

SEQ ID NO: 1729408 - RNA, 19 nt, Artificial Sequence
  Description of Artificial Sequence: Synthetic oligonucleotide
  Antisense strand to SEQ ID NO: 1729407
guuucuauaaaucucgcca

SEQ ID NO: 1729409 - RNA, 19 nt, Artificial Sequence
  Description of Artificial Sequence: Synthetic oligonucleotide
  Sense strand starting at position 1572 of SEQ ID NO: 1562197
cggccuucuccugaggcua

SEQ ID NO: 1729410 - RNA, 19 nt, Artificial Sequence
  Description of Artificial Sequence: Synthetic oligonucleotide
  Antisense strand to SEQ ID NO: 1729409
uagccucaggagaaggccg

SEQ ID NO: 1729411 - RNA, 19 nt, Artificial Sequence
  Description of Artificial Sequence: Synthetic oligonucleotide
  Sense strand starting at position 2089 of SEQ ID NO: 1562197
ccuaacuaaguuugaaagu

SEQ ID NO: 1729412 - RNA, 19 nt, Artificial Sequence
  Description of Artificial Sequence: Synthetic oligonucleotide
  Antisense strand to SEQ ID NO: 1729411
acuuucaaacuuaguuagg

SEQ ID NO: 1729413 - RNA, 19 nt, Artificial Sequence
  Description of Artificial Sequence: Synthetic oligonucleotide
  Sense strand starting at position 2648 of SEQ ID NO: 1562197
gggcgacuucuuuguguga

SEQ ID NO: 1729414 - RNA, 19 nt, Artificial Sequence
  Description of Artificial Sequence: Synthetic oligonucleotide
  Antisense strand to SEQ ID NO: 1729413
ucacacaaagaagucgccc

SEQ ID NO: 1729415 - RNA, 19 nt, Artificial Sequence
  Description of Artificial Sequence: Synthetic oligonucleotide
  Sense strand starting at position 2652 of SEQ ID NO: 1562197
gacuucuuugugugacugu

SEQ ID NO: 1729416 - RNA, 19 nt, Artificial Sequence
  Description of Artificial Sequence: Synthetic oligonucleotide
  Antisense strand to SEQ ID NO: 1729415
acagucacacaaagaaguc

SEQ ID NO: 1729417 - RNA, 19 nt, Artificial Sequence
  Description of Artificial Sequence: Synthetic oligonucleotide
  Sense strand starting at position 2783 of SEQ ID NO: 1562197
uugcgugucguuguguaua

SEQ ID NO: 1729418 - RNA, 19 nt, Artificial Sequence
  Description of Artificial Sequence: Synthetic oligonucleotide
  Antisense strand to SEQ ID NO: 1729417
uauacacaacgacacgcaa

SEQ ID NO: 1729419 - RNA, 19 nt, Artificial Sequence
  Description of Artificial Sequence: Synthetic oligonucleotide
  Sense strand starting at position 2788 of SEQ ID NO: 1562197
ugucguuguguauaaguga

SEQ ID NO: 1729420 - RNA, 19 nt, Artificial Sequence
  Description of Artificial Sequence: Synthetic oligonucleotide
  Antisense strand to SEQ ID NO: 1729419
ucacuuauacacaacgaca

SEQ ID NO: 1729421 - RNA, 19 nt, Artificial Sequence
  Description of Artificial Sequence: Synthetic oligonucleotide
  Sense strand starting at position 2964 of SEQ ID NO: 1562197
gaugacuucugcccgcgau

SEQ ID NO: 1729422 - RNA, 19 nt, Artificial Sequence
  Description of Artificial Sequence: Synthetic oligonucleotide
  Antisense strand to SEQ ID NO: 1729421
aucgcgggcagaagucauc

SEQ ID NO: 1729423 - RNA, 19 nt, Artificial Sequence
  Description of Artificial Sequence: Synthetic oligonucleotide
  Sense strand starting at position 3793 of SEQ ID NO: 1562197
ucgucucacugaucugagu

SEQ ID NO: 1729424 - RNA, 19 nt, Artificial Sequence
  Description of Artificial Sequence: Synthetic oligonucleotide
  Antisense strand to SEQ ID NO: 1729423
acucagaucagugagacga

SEQ ID NO: 1729425 - RNA, 19 nt, Artificial Sequence
  Description of Artificial Sequence: Synthetic oligonucleotide
  Sense strand starting at position 3832 of SEQ ID NO: 1562197
gagauugccgcgcuuaaac

SEQ ID NO: 1729426 - RNA, 19 nt, Artificial Sequence
  Description of Artificial Sequence: Synthetic oligonucleotide
  Antisense strand to SEQ ID NO: 1729425
guuuaagcgcggcaaucuc

SEQ ID NO: 1729427 - RNA, 19 nt, Artificial Sequence
  Description of Artificial Sequence: Synthetic oligonucleotide
  Sense strand starting at position 18 of SEQ ID NO: 1562198
uggcgagauuuauagaaac

SEQ ID NO: 1729428 - RNA, 19 nt, Artificial Sequence
  Description of Artificial Sequence: Synthetic oligonucleotide
  Antisense strand to SEQ ID NO: 1729427
guuucuauaaaucucgcca

SEQ ID NO: 1729429 - RNA, 19 nt, Artificial Sequence
  Description of Artificial Sequence: Synthetic oligonucleotide
  Sense strand starting at position 282 of SEQ ID NO: 1562198
cggccuucuccugaggcua

SEQ ID NO: 1729430 - RNA, 19 nt, Artificial Sequence
  Description of Artificial Sequence: Synthetic oligonucleotide
  Antisense strand to SEQ ID NO: 1729429
uagccucaggagaaggccg

SEQ ID NO: 1729431 - RNA, 19 nt, Artificial Sequence
  Description of Artificial Sequence: Synthetic oligonucleotide
  Sense strand starting at position 799 of SEQ ID NO: 1562198
ccuaacuaaguuugaaagu

SEQ ID NO: 1729432 - RNA, 19 nt, Artificial Sequence
  Description of Artificial Sequence: Synthetic oligonucleotide
  Antisense strand to SEQ ID NO: 1729431
acuuucaaacuuaguuagg

SEQ ID NO: 1729433 - RNA, 19 nt, Artificial Sequence
  Description of Artificial Sequence: Synthetic oligonucleotide
  Sense strand starting at position 1362 of SEQ ID NO: 1562198
gacuucuuugugugacugu

SEQ ID NO: 1729434 - RNA, 19 nt, Artificial Sequence
  Description of Artificial Sequence: Synthetic oligonucleotide
  Antisense strand to SEQ ID NO: 1729433
acagucacacaaagaaguc

SEQ ID NO: 1729435 - RNA, 19 nt, Artificial Sequence
  Description of Artificial Sequence: Synthetic oligonucleotide
  Sense strand starting at position 1493 of SEQ ID NO: 1562198
uugcgugucguuguguaua

SEQ ID NO: 1729436 - RNA, 19 nt, Artificial Sequence
  Description of Artificial Sequence: Synthetic oligonucleotide
  Antisense strand to SEQ ID NO: 1729435
uauacacaacgacacgcaa

SEQ ID NO: 1729437 - RNA, 19 nt, Artificial Sequence
  Description of Artificial Sequence: Synthetic oligonucleotide
  Sense strand starting at position 2503 of SEQ ID NO: 1562198
ucgucucacugaucugagu

SEQ ID NO: 1729438 - RNA, 19 nt, Artificial Sequence
  Description of Artificial Sequence: Synthetic oligonucleotide
  Antisense strand to SEQ ID NO: 1729437
acucagaucagugagacga

SEQ ID NO: 1729439 - RNA, 19 nt, Artificial Sequence
  Description of Artificial Sequence: Synthetic oligonucleotide
  Sense strand starting at position 2542 of SEQ ID NO: 1562198
gagauugccgcgcuuaaac

SEQ ID NO: 1729440 - RNA, 19 nt, Artificial Sequence
  Description of Artificial Sequence: Synthetic oligonucleotide
  Antisense strand to SEQ ID NO: 1729439
guuuaagcgcggcaaucuc

SEQ ID NO: 1729441 - RNA, 19 nt, Artificial Sequence
  Description of Artificial Sequence: Synthetic oligonucleotide
  Sense strand starting at position 2776 of SEQ ID NO: 1562198
ggucucuuggagugaggaa

SEQ ID NO: 1729442 - RNA, 19 nt, Artificial Sequence
  Description of Artificial Sequence: Synthetic oligonucleotide
  Antisense strand to SEQ ID NO: 1729441
uuccucacuccaagagacc

SEQ ID NO: 1729443 - RNA, 19 nt, Artificial Sequence
  Description of Artificial Sequence: Synthetic oligonucleotide
  Sense strand starting at position 2815 of SEQ ID NO: 1562198
augggauggcucugauggu

SEQ ID NO: 1729444 - RNA, 19 nt, Artificial Sequence
  Description of Artificial Sequence: Synthetic oligonucleotide
  Antisense strand to SEQ ID NO: 1729443
accaucagagccaucccau

SEQ ID NO: 1729445 - RNA, 19 nt, Artificial Sequence
  Description of Artificial Sequence: Synthetic oligonucleotide
  Sense strand starting at position 2837 of SEQ ID NO: 1562198
ucagaaaggugacugugaa

SEQ ID NO: 1729446 - RNA, 19 nt, Artificial Sequence
  Description of Artificial Sequence: Synthetic oligonucleotide
  Antisense strand to SEQ ID NO: 1729445
uucacagucaccuuucuga

SEQ ID NO: 1729447 - RNA, 19 nt, Artificial Sequence
  Description of Artificial Sequence: Synthetic oligonucleotide
  Sense strand starting at position 2890 of SEQ ID NO: 1562198
acccucuaguucuugauau

SEQ ID NO: 1729448 - RNA, 19 nt, Artificial Sequence
  Description of Artificial Sequence: Synthetic oligonucleotide
  Antisense strand to SEQ ID NO: 1729447
auaucaagaacuagagggu

SEQ ID NO: 1729449 - RNA, 19 nt, Artificial Sequence
  Description of Artificial Sequence: Synthetic oligonucleotide
  Sense strand starting at position 2892 of SEQ ID NO: 1562198
ccucuaguucuugauauca

SEQ ID NO: 1729450 - RNA, 19 nt, Artificial Sequence
  Description of Artificial Sequence: Synthetic oligonucleotide
  Antisense strand to SEQ ID NO: 1729449
ugauaucaagaacuagagg

SEQ ID NO: 1729451 - RNA, 19 nt, Artificial Sequence
  Description of Artificial Sequence: Synthetic oligonucleotide
  Sense strand starting at position 2952 of SEQ ID NO: 1562198
augcaagaauugucuacac

SEQ ID NO: 1729452 - RNA, 19 nt, Artificial Sequence
  Description of Artificial Sequence: Synthetic oligonucleotide
  Antisense strand to SEQ ID NO: 1729451
guguagacaauucuugcau

SEQ ID NO: 1729453 - RNA, 19 nt, Artificial Sequence
  Description of Artificial Sequence: Synthetic oligonucleotide
  Sense strand starting at position 2954 of SEQ ID NO: 1562198
gcaagaauugucuacacua

SEQ ID NO: 1729454 - RNA, 19 nt, Artificial Sequence
  Description of Artificial Sequence: Synthetic oligonucleotide
  Antisense strand to SEQ ID NO: 1729453
uaguguagacaauucuugc

SEQ ID NO: 1729455 - RNA, 19 nt, Artificial Sequence
  Description of Artificial Sequence: Synthetic oligonucleotide
  Sense strand starting at position 3000 of SEQ ID NO: 1562198
cacugacugcuccagguau

SEQ ID NO: 1729456 - RNA, 19 nt, Artificial Sequence
  Description of Artificial Sequence: Synthetic oligonucleotide
  Antisense strand to SEQ ID NO: 1729455
auaccuggagcagucagug

SEQ ID NO: 1729457 - RNA, 19 nt, Artificial Sequence
  Description of Artificial Sequence: Synthetic oligonucleotide
  Sense strand starting at position 3002 of SEQ ID NO: 1562198
cugacugcuccagguaugu

SEQ ID NO: 1729458 - RNA, 19 nt, Artificial Sequence
  Description of Artificial Sequence: Synthetic oligonucleotide
  Antisense strand to SEQ ID NO: 1729457
acauaccuggagcagucag

SEQ ID NO: 1729459 - RNA, 19 nt, Artificial Sequence
  Description of Artificial Sequence: Synthetic oligonucleotide
  Sense strand starting at position 3041 of SEQ ID NO: 1562198
ggcgaagucagccagaaug

SEQ ID NO: 1729460 - RNA, 19 nt, Artificial Sequence
  Description of Artificial Sequence: Synthetic oligonucleotide
  Antisense strand to SEQ ID NO: 1729459
cauucuggcugacuucgcc

SEQ ID NO: 1729461 - RNA, 19 nt, Artificial Sequence
  Description of Artificial Sequence: Synthetic oligonucleotide
  Sense strand starting at position 3083 of SEQ ID NO: 1562198
auaggaugccauugggaga

SEQ ID NO: 1729462 - RNA, 19 nt, Artificial Sequence
  Description of Artificial Sequence: Synthetic oligonucleotide
  Antisense strand to SEQ ID NO: 1729461
ucucccaauggcauccuau

SEQ ID NO: 1729463 - RNA, 19 nt, Artificial Sequence
  Description of Artificial Sequence: Synthetic oligonucleotide
  Sense strand starting at position 3244 of SEQ ID NO: 1562198
cacugaaggcuugggaaca

SEQ ID NO: 1729464 - RNA, 19 nt, Artificial Sequence
  Description of Artificial Sequence: Synthetic oligonucleotide
  Antisense strand to SEQ ID NO: 1729463
uguucccaagccuucagug

SEQ ID NO: 1729465 - RNA, 19 nt, Artificial Sequence
  Description of Artificial Sequence: Synthetic oligonucleotide
  Sense strand starting at position 3312 of SEQ ID NO: 1562198
agcagucauuguuucuaga

SEQ ID NO: 1729466 - RNA, 19 nt, Artificial Sequence
  Description of Artificial Sequence: Synthetic oligonucleotide
  Antisense strand to SEQ ID NO: 1729465
ucuagaaacaaugacugcu

SEQ ID NO: 1729467 - RNA, 19 nt, Artificial Sequence
  Description of Artificial Sequence: Synthetic oligonucleotide
  Sense strand starting at position 3477 of SEQ ID NO: 1562198
caaugcuaacauugucgua

SEQ ID NO: 1729468 - RNA, 19 nt, Artificial Sequence
  Description of Artificial Sequence: Synthetic oligonucleotide
  Antisense strand to SEQ ID NO: 1729467
uacgacaauguuagcauug

SEQ ID NO: 1729469 - RNA, 19 nt, Artificial Sequence
  Description of Artificial Sequence: Synthetic oligonucleotide
  Sense strand starting at position 3479 of SEQ ID NO: 1562198
augcuaacauugucguaaa

SEQ ID NO: 1729470 - RNA, 19 nt, Artificial Sequence
  Description of Artificial Sequence: Synthetic oligonucleotide
  Antisense strand to SEQ ID NO: 1729469
uuuacgacaauguuagcau

SEQ ID NO: 1729471 - RNA, 19 nt, Artificial Sequence
  Description of Artificial Sequence: Synthetic oligonucleotide
  Sense strand starting at position 3491 of SEQ ID NO: 1562198
ucguaaaucaaguagucga

SEQ ID NO: 1729472 - RNA, 19 nt, Artificial Sequence
  Description of Artificial Sequence: Synthetic oligonucleotide
  Antisense strand to SEQ ID NO: 1729471
ucgacuacuugauuuacga

SEQ ID NO: 1729473 - RNA, 19 nt, Artificial Sequence
  Description of Artificial Sequence: Synthetic oligonucleotide
  Sense strand starting at position 3494 of SEQ ID NO: 1562198
uaaaucaaguagucgauau

SEQ ID NO: 1729474 - RNA, 19 nt, Artificial Sequence
  Description of Artificial Sequence: Synthetic oligonucleotide
  Antisense strand to SEQ ID NO: 1729473
auaucgacuacuugauuua

SEQ ID NO: 1729475 - RNA, 19 nt, Artificial Sequence
  Description of Artificial Sequence: Synthetic oligonucleotide
  Sense strand starting at position 3496 of SEQ ID NO: 1562198
aaucaaguagucgauaugu

SEQ ID NO: 1729476 - RNA, 19 nt, Artificial Sequence
  Description of Artificial Sequence: Synthetic oligonucleotide
  Antisense strand to SEQ ID NO: 1729475
acauaucgacuacuugauu

SEQ ID NO: 1729477 - RNA, 19 nt, Artificial Sequence
  Description of Artificial Sequence: Synthetic oligonucleotide
  Sense strand starting at position 3501 of SEQ ID NO: 1562198
aguagucgauaugugcaua

SEQ ID NO: 1729478 - RNA, 19 nt, Artificial Sequence
  Description of Artificial Sequence: Synthetic oligonucleotide
  Antisense strand to SEQ ID NO: 1729477
uaugcacauaucgacuacu

SEQ ID NO: 1729479 - RNA, 19 nt, Artificial Sequence
  Description of Artificial Sequence: Synthetic oligonucleotide
  Sense strand starting at position 3504 of SEQ ID NO: 1562198
agucgauaugugcauaaga

SEQ ID NO: 1729480 - RNA, 19 nt, Artificial Sequence
  Description of Artificial Sequence: Synthetic oligonucleotide
  Antisense strand to SEQ ID NO: 1729479
ucuuaugcacauaucgacu

SEQ ID NO: 1729481 - RNA, 19 nt, Artificial Sequence
  Description of Artificial Sequence: Synthetic oligonucleotide
  Sense strand starting at position 3506 of SEQ ID NO: 1562198
ucgauaugugcauaagacu

SEQ ID NO: 1729482 - RNA, 19 nt, Artificial Sequence
  Description of Artificial Sequence: Synthetic oligonucleotide
  Antisense strand to SEQ ID NO: 1729481
agucuuaugcacauaucga

SEQ ID NO: 1729483 - RNA, 19 nt, Artificial Sequence
  Description of Artificial Sequence: Synthetic oligonucleotide
  Sense strand starting at position 3515 of SEQ ID NO: 1562198
gcauaagacuguuccugaa

SEQ ID NO: 1729484 - RNA, 19 nt, Artificial Sequence
  Description of Artificial Sequence: Synthetic oligonucleotide
  Antisense strand to SEQ ID NO: 1729483
uucaggaacagucuuaugc

SEQ ID NO: 1729485 - RNA, 19 nt, Artificial Sequence
  Description of Artificial Sequence: Synthetic oligonucleotide
  Sense strand starting at position 3517 of SEQ ID NO: 1562198
auaagacuguuccugaauu

SEQ ID NO: 1729486 - RNA, 19 nt, Artificial Sequence
  Description of Artificial Sequence: Synthetic oligonucleotide
  Antisense strand to SEQ ID NO: 1729485
aauucaggaacagucuuau

SEQ ID NO: 1729487 - RNA, 19 nt, Artificial Sequence
  Description of Artificial Sequence: Synthetic oligonucleotide
  Sense strand starting at position 3578 of SEQ ID NO: 1562198
uuaucacaaugucuggauu

SEQ ID NO: 1729488 - RNA, 19 nt, Artificial Sequence
  Description of Artificial Sequence: Synthetic oligonucleotide
  Antisense strand to SEQ ID NO: 1729487
aauccagacauugugauaa

SEQ ID NO: 1729489 - RNA, 19 nt, Artificial Sequence
  Description of Artificial Sequence: Synthetic oligonucleotide
  Sense strand starting at position 3581 of SEQ ID NO: 1562198
ucacaaugucuggauuacu

SEQ ID NO: 1729490 - RNA, 19 nt, Artificial Sequence
  Description of Artificial Sequence: Synthetic oligonucleotide
  Antisense strand to SEQ ID NO: 1729489
aguaauccagacauuguga

SEQ ID NO: 1729491 - RNA, 19 nt, Artificial Sequence
  Description of Artificial Sequence: Synthetic oligonucleotide
  Sense strand starting at position 3591 of SEQ ID NO: 1562198
uggauuacugugggcuuau

SEQ ID NO: 1729492 - RNA, 19 nt, Artificial Sequence
  Description of Artificial Sequence: Synthetic oligonucleotide
  Antisense strand to SEQ ID NO: 1729491
auaagcccacaguaaucca

SEQ ID NO: 1729493 - RNA, 19 nt, Artificial Sequence
  Description of Artificial Sequence: Synthetic oligonucleotide
  Sense strand starting at position 3592 of SEQ ID NO: 1562198
ggauuacugugggcuuaua

SEQ ID NO: 1729494 - RNA, 19 nt, Artificial Sequence
  Description of Artificial Sequence: Synthetic oligonucleotide
  Antisense strand to SEQ ID NO: 1729493
uauaagcccacaguaaucc

SEQ ID NO: 1729495 - RNA, 19 nt, Artificial Sequence
  Description of Artificial Sequence: Synthetic oligonucleotide
  Sense strand starting at position 3600 of SEQ ID NO: 1562198
gugggcuuauaagucuaaa

SEQ ID NO: 1729496 - RNA, 19 nt, Artificial Sequence
  Description of Artificial Sequence: Synthetic oligonucleotide
  Antisense strand to SEQ ID NO: 1729495
uuuagacuuauaagcccac

SEQ ID NO: 1729497 - RNA, 19 nt, Artificial Sequence
  Description of Artificial Sequence: Synthetic oligonucleotide
  Sense strand starting at position 3603 of SEQ ID NO: 1562198
ggcuuauaagucuaaaugu

SEQ ID NO: 1729498 - RNA, 19 nt, Artificial Sequence
  Description of Artificial Sequence: Synthetic oligonucleotide
  Antisense strand to SEQ ID NO: 1729497
acauuuagacuuauaagcc

SEQ ID NO: 1729499 - RNA, 19 nt, Artificial Sequence
  Description of Artificial Sequence: Synthetic oligonucleotide
  Sense strand starting at position 3660 of SEQ ID NO: 1562198
ugcauuggcuauucuugau

SEQ ID NO: 1729500 - RNA, 19 nt, Artificial Sequence
  Description of Artificial Sequence: Synthetic oligonucleotide
  Antisense strand to SEQ ID NO: 1729499
aucaagaauagccaaugca

SEQ ID NO: 1729501 - RNA, 19 nt, Artificial Sequence
  Description of Artificial Sequence: Synthetic oligonucleotide
  Sense strand starting at position 3664 of SEQ ID NO: 1562198
uuggcuauucuugauguuu

SEQ ID NO: 1729502 - RNA, 19 nt, Artificial Sequence
  Description of Artificial Sequence: Synthetic oligonucleotide
  Antisense strand to SEQ ID NO: 1729501
aaacaucaagaauagccaa

SEQ ID NO: 1729503 - RNA, 19 nt, Artificial Sequence
  Description of Artificial Sequence: Synthetic oligonucleotide
  Sense strand starting at position 3700 of SEQ ID NO: 1562198
uuggaaucagcauaccuau

SEQ ID NO: 1729504 - RNA, 19 nt, Artificial Sequence
  Description of Artificial Sequence: Synthetic oligonucleotide
  Antisense strand to SEQ ID NO: 1729503
auagguaugcugauuccaa

SEQ ID NO: 1729505 - RNA, 19 nt, Artificial Sequence
  Description of Artificial Sequence: Synthetic oligonucleotide
  Sense strand starting at position 3768 of SEQ ID NO: 1562198
uugguaucacuuugaaccu

SEQ ID NO: 1729506 - RNA, 19 nt, Artificial Sequence
  Description of Artificial Sequence: Synthetic oligonucleotide
  Antisense strand to SEQ ID NO: 1729505
agguucaaagugauaccaa

SEQ ID NO: 1729507 - RNA, 19 nt, Artificial Sequence
  Description of Artificial Sequence: Synthetic oligonucleotide
  Sense strand starting at position 138 of SEQ ID NO: 1562199
agugguauucaguaaguug

SEQ ID NO: 1729508 - RNA, 19 nt, Artificial Sequence
  Description of Artificial Sequence: Synthetic oligonucleotide
  Antisense strand to SEQ ID NO: 1729507
caacuuacugaauaccacu

SEQ ID NO: 1729509 - RNA, 19 nt, Artificial Sequence
  Description of Artificial Sequence: Synthetic oligonucleotide
  Sense strand starting at position 364 of SEQ ID NO: 1562199
aagagagcucccuggauca

SEQ ID NO: 1729510 - RNA, 19 nt, Artificial Sequence
  Description of Artificial Sequence: Synthetic oligonucleotide
  Antisense strand to SEQ ID NO: 1729509
ugauccagggagcucucuu

SEQ ID NO: 1729511 - RNA, 19 nt, Artificial Sequence
  Description of Artificial Sequence: Synthetic oligonucleotide
  Sense strand starting at position 567 of SEQ ID NO: 1562199
acacguaaaugcuuauaca

SEQ ID NO: 1729512 - RNA, 19 nt, Artificial Sequence
  Description of Artificial Sequence: Synthetic oligonucleotide
  Antisense strand to SEQ ID NO: 1729511
uguauaagcauuuacgugu

SEQ ID NO: 1729513 - RNA, 19 nt, Artificial Sequence
  Description of Artificial Sequence: Synthetic oligonucleotide
  Sense strand starting at position 660 of SEQ ID NO: 1562199
aggaacuugcccuauguca

SEQ ID NO: 1729514 - RNA, 19 nt, Artificial Sequence
  Description of Artificial Sequence: Synthetic oligonucleotide
  Antisense strand to SEQ ID NO: 1729513
ugacauagggcaaguuccu

SEQ ID NO: 1729515 - RNA, 19 nt, Artificial Sequence
  Description of Artificial Sequence: Synthetic oligonucleotide
  Sense strand starting at position 685 of SEQ ID NO: 1562199
guauuuauggccgagcuga

SEQ ID NO: 1729516 - RNA, 19 nt, Artificial Sequence
  Description of Artificial Sequence: Synthetic oligonucleotide
  Antisense strand to SEQ ID NO: 1729515
ucagcucggccauaaauac

SEQ ID NO: 1729517 - RNA, 19 nt, Artificial Sequence
  Description of Artificial Sequence: Synthetic oligonucleotide
  Sense strand starting at position 907 of SEQ ID NO: 1562199
ggauguuccaaaugacgga

SEQ ID NO: 1729518 - RNA, 19 nt, Artificial Sequence
  Description of Artificial Sequence: Synthetic oligonucleotide
  Antisense strand to SEQ ID NO: 1729517
uccgucauuuggaacaucc

SEQ ID NO: 1729519 - RNA, 19 nt, Artificial Sequence
  Description of Artificial Sequence: Synthetic oligonucleotide
  Sense strand starting at position 1220 of SEQ ID NO: 1562199
guugcuguccuuucuucua

SEQ ID NO: 1729520 - RNA, 19 nt, Artificial Sequence
  Description of Artificial Sequence: Synthetic oligonucleotide
  Antisense strand to SEQ ID NO: 1729519
uagaagaaaggacagcaac

SEQ ID NO: 1729521 - RNA, 19 nt, Artificial Sequence
  Description of Artificial Sequence: Synthetic oligonucleotide
  Sense strand starting at position 1567 of SEQ ID NO: 1562199
gggugugcugaaugaauga

SEQ ID NO: 1729522 - RNA, 19 nt, Artificial Sequence
  Description of Artificial Sequence: Synthetic oligonucleotide
  Antisense strand to SEQ ID NO: 1729521
ucauucauucagcacaccc

SEQ ID NO: 1729523 - RNA, 19 nt, Artificial Sequence
  Description of Artificial Sequence: Synthetic oligonucleotide
  Sense strand starting at position 1596 of SEQ ID NO: 1562199
gaaugauccugagcagccu

SEQ ID NO: 1729524 - RNA, 19 nt, Artificial Sequence
  Description of Artificial Sequence: Synthetic oligonucleotide
  Antisense strand to SEQ ID NO: 1729523
aggcugcucaggaucauuc

SEQ ID NO: 1729525 - RNA, 19 nt, Artificial Sequence
  Description of Artificial Sequence: Synthetic oligonucleotide
  Sense strand starting at position 2095 of SEQ ID NO: 1562199
auucguauaaggugaaaug

SEQ ID NO: 1729526 - RNA, 19 nt, Artificial Sequence
  Description of Artificial Sequence: Synthetic oligonucleotide
  Antisense strand to SEQ ID NO: 1729525
cauuucaccuuauacgaau

SEQ ID NO: 1729527 - RNA, 19 nt, Artificial Sequence
  Description of Artificial Sequence: Synthetic oligonucleotide
  Sense strand starting at position 2259 of SEQ ID NO: 1562199
cgucauuuguggcuuaaga

SEQ ID NO: 1729528 - RNA, 19 nt, Artificial Sequence
  Description of Artificial Sequence: Synthetic oligonucleotide
  Antisense strand to SEQ ID NO: 1729527
ucuuaagccacaaaugacg

SEQ ID NO: 1729529 - RNA, 19 nt, Artificial Sequence
  Description of Artificial Sequence: Synthetic oligonucleotide
  Sense strand starting at position 2310 of SEQ ID NO: 1562199
ggguguugcacuggaagag

SEQ ID NO: 1729530 - RNA, 19 nt, Artificial Sequence
  Description of Artificial Sequence: Synthetic oligonucleotide
  Antisense strand to SEQ ID NO: 1729529
cucuuccagugcaacaccc

SEQ ID NO: 1729531 - RNA, 19 nt, Artificial Sequence
  Description of Artificial Sequence: Synthetic oligonucleotide
  Sense strand starting at position 2406 of SEQ ID NO: 1562199
gcauccauccugcagaaau

SEQ ID NO: 1729532 - RNA, 19 nt, Artificial Sequence
  Description of Artificial Sequence: Synthetic oligonucleotide
  Antisense strand to SEQ ID NO: 1729531
auuucugcaggauggaugc

SEQ ID NO: 1729533 - RNA, 19 nt, Artificial Sequence
  Description of Artificial Sequence: Synthetic oligonucleotide
  Sense strand starting at position 2461 of SEQ ID NO: 1562199
uugcuuguuacagagagaa

SEQ ID NO: 1729534 - RNA, 19 nt, Artificial Sequence
  Description of Artificial Sequence: Synthetic oligonucleotide
  Antisense strand to SEQ ID NO: 1729533
uucucucuguaacaagcaa

SEQ ID NO: 1729535 - RNA, 19 nt, Artificial Sequence
  Description of Artificial Sequence: Synthetic oligonucleotide
  Sense strand starting at position 2463 of SEQ ID NO: 1562199
gcuuguuacagagagaauu

SEQ ID NO: 1729536 - RNA, 19 nt, Artificial Sequence
  Description of Artificial Sequence: Synthetic oligonucleotide
  Antisense strand to SEQ ID NO: 1729535
aauucucucuguaacaagc

SEQ ID NO: 1729537 - RNA, 19 nt, Artificial Sequence
  Description of Artificial Sequence: Synthetic oligonucleotide
  Sense strand starting at position 2505 of SEQ ID NO: 1562199
cagggucugguugaauaca

SEQ ID NO: 1729538 - RNA, 19 nt, Artificial Sequence
  Description of Artificial Sequence: Synthetic oligonucleotide
  Antisense strand to SEQ ID NO: 1729537
uguauucaaccagacccug

SEQ ID NO: 1729539 - RNA, 19 nt, Artificial Sequence
  Description of Artificial Sequence: Synthetic oligonucleotide
  Sense strand starting at position 2544 of SEQ ID NO: 1562199
ugaggaagguguguaggua

SEQ ID NO: 1729540 - RNA, 19 nt, Artificial Sequence
  Description of Artificial Sequence: Synthetic oligonucleotide
  Antisense strand to SEQ ID NO: 1729539
uaccuacacaccuuccuca

SEQ ID NO: 1729541 - RNA, 19 nt, Artificial Sequence
  Description of Artificial Sequence: Synthetic oligonucleotide
  Sense strand starting at position 2567 of SEQ ID NO: 1562199
cuuggaacugccugcaaga

SEQ ID NO: 1729542 - RNA, 19 nt, Artificial Sequence
  Description of Artificial Sequence: Synthetic oligonucleotide
  Antisense strand to SEQ ID NO: 1729541
ucuugcaggcaguuccaag

SEQ ID NO: 1729543 - RNA, 19 nt, Artificial Sequence
  Description of Artificial Sequence: Synthetic oligonucleotide
  Sense strand starting at position 2569 of SEQ ID NO: 1562199
uggaacugccugcaagaaa

SEQ ID NO: 1729544 - RNA, 19 nt, Artificial Sequence
  Description of Artificial Sequence: Synthetic oligonucleotide
  Antisense strand to SEQ ID NO: 1729543
uuucuugcaggcaguucca

SEQ ID NO: 1729545 - RNA, 19 nt, Artificial Sequence
  Description of Artificial Sequence: Synthetic oligonucleotide
  Sense strand starting at position 2617 of SEQ ID NO: 1562199
aaacaauaacgguguauau

SEQ ID NO: 1729546 - RNA, 19 nt, Artificial Sequence
  Description of Artificial Sequence: Synthetic oligonucleotide
  Antisense strand to SEQ ID NO: 1729545
auauacaccguuauuguuu

SEQ ID NO: 1729547 - RNA, 19 nt, Artificial Sequence
  Description of Artificial Sequence: Synthetic oligonucleotide
  Sense strand starting at position 2619 of SEQ ID NO: 1562199
acaauaacgguguauaugu

SEQ ID NO: 1729548 - RNA, 19 nt, Artificial Sequence
  Description of Artificial Sequence: Synthetic oligonucleotide
  Antisense strand to SEQ ID NO: 1729547
acauauacaccguuauugu

SEQ ID NO: 1729549 - RNA, 19 nt, Artificial Sequence
  Description of Artificial Sequence: Synthetic oligonucleotide
  Sense strand starting at position 2626 of SEQ ID NO: 1562199
cgguguauauguauguguu

SEQ ID NO: 1729550 - RNA, 19 nt, Artificial Sequence
  Description of Artificial Sequence: Synthetic oligonucleotide
  Antisense strand to SEQ ID NO: 1729549
aacacauacauauacaccg

SEQ ID NO: 1729551 - RNA, 19 nt, Artificial Sequence
  Description of Artificial Sequence: Synthetic oligonucleotide
  Sense strand starting at position 2661 of SEQ ID NO: 1562199
aagauaccaggcuguuaau

SEQ ID NO: 1729552 - RNA, 19 nt, Artificial Sequence
  Description of Artificial Sequence: Synthetic oligonucleotide
  Antisense strand to SEQ ID NO: 1729551
auuaacagccugguaucuu

SEQ ID NO: 1729553 - RNA, 19 nt, Artificial Sequence
  Description of Artificial Sequence: Synthetic oligonucleotide
  Sense strand starting at position 2754 of SEQ ID NO: 1562199
accacaagcguguauuaca

SEQ ID NO: 1729554 - RNA, 19 nt, Artificial Sequence
  Description of Artificial Sequence: Synthetic oligonucleotide
  Antisense strand to SEQ ID NO: 1729553
uguaauacacgcuuguggu

SEQ ID NO: 1729555 - RNA, 19 nt, Artificial Sequence
  Description of Artificial Sequence: Synthetic oligonucleotide
  Sense strand starting at position 2868 of SEQ ID NO: 1562199
cuugaucgggcuugggaua

SEQ ID NO: 1729556 - RNA, 19 nt, Artificial Sequence
  Description of Artificial Sequence: Synthetic oligonucleotide
  Antisense strand to SEQ ID NO: 1729555
uaucccaagcccgaucaag

SEQ ID NO: 1729557 - RNA, 19 nt, Artificial Sequence
  Description of Artificial Sequence: Synthetic oligonucleotide
  Sense strand starting at position 3086 of SEQ ID NO: 1562199
uuaagugucauguacuaug

SEQ ID NO: 1729558 - RNA, 19 nt, Artificial Sequence
  Description of Artificial Sequence: Synthetic oligonucleotide
  Antisense strand to SEQ ID NO: 1729557
cauaguacaugacacuuaa

SEQ ID NO: 1729559 - RNA, 19 nt, Artificial Sequence
  Description of Artificial Sequence: Synthetic oligonucleotide
  Sense strand starting at position 3265 of SEQ ID NO: 1562199
gagagaacggccugggaau

SEQ ID NO: 1729560 - RNA, 19 nt, Artificial Sequence
  Description of Artificial Sequence: Synthetic oligonucleotide
  Antisense strand to SEQ ID NO: 1729559
auucccaggccguucucuc

SEQ ID NO: 1729561 - RNA, 19 nt, Artificial Sequence
  Description of Artificial Sequence: Synthetic oligonucleotide
  Sense strand starting at position 3266 of SEQ ID NO: 1562199
agagaacggccugggaaua

SEQ ID NO: 1729562 - RNA, 19 nt, Artificial Sequence
  Description of Artificial Sequence: Synthetic oligonucleotide
  Antisense strand to SEQ ID NO: 1729561
uauucccaggccguucucu

SEQ ID NO: 1729563 - RNA, 19 nt, Artificial Sequence
  Description of Artificial Sequence: Synthetic oligonucleotide
  Sense strand starting at position 3278 of SEQ ID NO: 1562199
gggaauagcaaaugucaug

SEQ ID NO: 1729564 - RNA, 19 nt, Artificial Sequence
  Description of Artificial Sequence: Synthetic oligonucleotide
  Antisense strand to SEQ ID NO: 1729563
caugacauuugcuauuccc

SEQ ID NO: 1729565 - RNA, 19 nt, Artificial Sequence
  Description of Artificial Sequence: Synthetic oligonucleotide
  Sense strand starting at position 3478 of SEQ ID NO: 1562199
uccagcucugcucaaagau

SEQ ID NO: 1729566 - RNA, 19 nt, Artificial Sequence
  Description of Artificial Sequence: Synthetic oligonucleotide
  Antisense strand to SEQ ID NO: 1729565
aucuuugagcagagcugga

SEQ ID NO: 1729567 - RNA, 19 nt, Artificial Sequence
  Description of Artificial Sequence: Synthetic oligonucleotide
  Sense strand starting at position 3540 of SEQ ID NO: 1562199
ugaguuacuuuguccauag

SEQ ID NO: 1729568 - RNA, 19 nt, Artificial Sequence
  Description of Artificial Sequence: Synthetic oligonucleotide
  Antisense strand to SEQ ID NO: 1729567
cuauggacaaaguaacuca

SEQ ID NO: 1729569 - RNA, 19 nt, Artificial Sequence
  Description of Artificial Sequence: Synthetic oligonucleotide
  Sense strand starting at position 3542 of SEQ ID NO: 1562199
aguuacuuuguccauagca

SEQ ID NO: 1729570 - RNA, 19 nt, Artificial Sequence
  Description of Artificial Sequence: Synthetic oligonucleotide
  Antisense strand to SEQ ID NO: 1729569
ugcuauggacaaaguaacu

SEQ ID NO: 1729571 - RNA, 19 nt, Artificial Sequence
  Description of Artificial Sequence: Synthetic oligonucleotide
  Sense strand starting at position 3544 of SEQ ID NO: 1562199
uuacuuuguccauagcaca

SEQ ID NO: 1729572 - RNA, 19 nt, Artificial Sequence
  Description of Artificial Sequence: Synthetic oligonucleotide
  Antisense strand to SEQ ID NO: 1729571
ugugcuauggacaaaguaa

SEQ ID NO: 1729573 - RNA, 19 nt, Artificial Sequence
  Description of Artificial Sequence: Synthetic oligonucleotide
  Sense strand starting at position 3761 of SEQ ID NO: 1562199
acaugacacucgucucaag

SEQ ID NO: 1729574 - RNA, 19 nt, Artificial Sequence
  Description of Artificial Sequence: Synthetic oligonucleotide
  Antisense strand to SEQ ID NO: 1729573
cuugagacgagugucaugu

SEQ ID NO: 1729575 - RNA, 19 nt, Artificial Sequence
  Description of Artificial Sequence: Synthetic oligonucleotide
  Sense strand starting at position 3803 of SEQ ID NO: 1562199
ccgcgauacaaagauggau

SEQ ID NO: 1729576 - RNA, 19 nt, Artificial Sequence
  Description of Artificial Sequence: Synthetic oligonucleotide
  Antisense strand to SEQ ID NO: 1729575
auccaucuuuguaucgcgg

SEQ ID NO: 1729577 - RNA, 19 nt, Artificial Sequence
  Description of Artificial Sequence: Synthetic oligonucleotide
  Sense strand starting at position 3882 of SEQ ID NO: 1562199
gcaagaggaaauuguccau

SEQ ID NO: 1729578 - RNA, 19 nt, Artificial Sequence
  Description of Artificial Sequence: Synthetic oligonucleotide
  Antisense strand to SEQ ID NO: 1729577
auggacaauuuccucuugc

SEQ ID NO: 1729579 - RNA, 19 nt, Artificial Sequence
  Description of Artificial Sequence: Synthetic oligonucleotide
  Sense strand starting at position 3888 of SEQ ID NO: 1562199
ggaaauuguccaugaauau

SEQ ID NO: 1729580 - RNA, 19 nt, Artificial Sequence
  Description of Artificial Sequence: Synthetic oligonucleotide
  Antisense strand to SEQ ID NO: 1729579
auauucauggacaauuucc

SEQ ID NO: 1729581 - RNA, 19 nt, Artificial Sequence
  Description of Artificial Sequence: Synthetic oligonucleotide
  Sense strand starting at position 3929 of SEQ ID NO: 1562199
agaacuuucuaggcucaaa

SEQ ID NO: 1729582 - RNA, 19 nt, Artificial Sequence
  Description of Artificial Sequence: Synthetic oligonucleotide
  Antisense strand to SEQ ID NO: 1729581
uuugagccuagaaaguucu

SEQ ID NO: 1729583 - RNA, 19 nt, Artificial Sequence
  Description of Artificial Sequence: Synthetic oligonucleotide
  Sense strand starting at position 3942 of SEQ ID NO: 1562199
cucaaauucguguggacaa

SEQ ID NO: 1729584 - RNA, 19 nt, Artificial Sequence
  Description of Artificial Sequence: Synthetic oligonucleotide
  Antisense strand to SEQ ID NO: 1729583
uuguccacacgaauuugag

SEQ ID NO: 1729585 - RNA, 19 nt, Artificial Sequence
  Description of Artificial Sequence: Synthetic oligonucleotide
  Sense strand starting at position 3949 of SEQ ID NO: 1562199
ucguguggacaaggauauu

SEQ ID NO: 1729586 - RNA, 19 nt, Artificial Sequence
  Description of Artificial Sequence: Synthetic oligonucleotide
  Antisense strand to SEQ ID NO: 1729585
aauauccuuguccacacga

SEQ ID NO: 1729587 - RNA, 19 nt, Artificial Sequence
  Description of Artificial Sequence: Synthetic oligonucleotide
  Sense strand starting at position 221 of SEQ ID NO: 1562200
gguuacuggcaccaagauu

SEQ ID NO: 1729588 - RNA, 19 nt, Artificial Sequence
  Description of Artificial Sequence: Synthetic oligonucleotide
  Antisense strand to SEQ ID NO: 1729587
aaucuuggugccaguaacc

SEQ ID NO: 1729589 - RNA, 19 nt, Artificial Sequence
  Description of Artificial Sequence: Synthetic oligonucleotide
  Sense strand starting at position 487 of SEQ ID NO: 1562200
aguucugcuccagggagaa

SEQ ID NO: 1729590 - RNA, 19 nt, Artificial Sequence
  Description of Artificial Sequence: Synthetic oligonucleotide
  Antisense strand to SEQ ID NO: 1729589
uucucccuggagcagaacu

SEQ ID NO: 1729591 - RNA, 19 nt, Artificial Sequence
  Description of Artificial Sequence: Synthetic oligonucleotide
  Sense strand starting at position 526 of SEQ ID NO: 1562200
agcagcucugcccagaaua

SEQ ID NO: 1729592 - RNA, 19 nt, Artificial Sequence
  Description of Artificial Sequence: Synthetic oligonucleotide
  Antisense strand to SEQ ID NO: 1729591
uauucugggcagagcugcu

SEQ ID NO: 1729593 - RNA, 19 nt, Artificial Sequence
  Description of Artificial Sequence: Synthetic oligonucleotide
  Sense strand starting at position 545 of SEQ ID NO: 1562200
gcauuugugcccuaagcca

SEQ ID NO: 1729594 - RNA, 19 nt, Artificial Sequence
  Description of Artificial Sequence: Synthetic oligonucleotide
  Antisense strand to SEQ ID NO: 1729593
uggcuuagggcacaaaugc

SEQ ID NO: 1729595 - RNA, 19 nt, Artificial Sequence
  Description of Artificial Sequence: Synthetic oligonucleotide
  Sense strand starting at position 588 of SEQ ID NO: 1562200
gcaaacucccagcaggaau

SEQ ID NO: 1729596 - RNA, 19 nt, Artificial Sequence
  Description of Artificial Sequence: Synthetic oligonucleotide
  Antisense strand to SEQ ID NO: 1729595
auuccugcugggaguuugc

SEQ ID NO: 1729597 - RNA, 19 nt, Artificial Sequence
  Description of Artificial Sequence: Synthetic oligonucleotide
  Sense strand starting at position 635 of SEQ ID NO: 1562200
uccacuuguuaagucagaa

SEQ ID NO: 1729598 - RNA, 19 nt, Artificial Sequence
  Description of Artificial Sequence: Synthetic oligonucleotide
  Antisense strand to SEQ ID NO: 1729597
uucugacuuaacaagugga

SEQ ID NO: 1729599 - RNA, 19 nt, Artificial Sequence
  Description of Artificial Sequence: Synthetic oligonucleotide
  Sense strand starting at position 863 of SEQ ID NO: 1562200
ugacucaccucucugugau

SEQ ID NO: 1729600 - RNA, 19 nt, Artificial Sequence
  Description of Artificial Sequence: Synthetic oligonucleotide
  Antisense strand to SEQ ID NO: 1729599
aucacagagaggugaguca

SEQ ID NO: 1729601 - RNA, 19 nt, Artificial Sequence
  Description of Artificial Sequence: Synthetic oligonucleotide
  Sense strand starting at position 1023 of SEQ ID NO: 1562200
ccuaucaaaccgugauaag

SEQ ID NO: 1729602 - RNA, 19 nt, Artificial Sequence
  Description of Artificial Sequence: Synthetic oligonucleotide
  Antisense strand to SEQ ID NO: 1729601
cuuaucacgguuugauagg

SEQ ID NO: 1729603 - RNA, 19 nt, Artificial Sequence
  Description of Artificial Sequence: Synthetic oligonucleotide
  Sense strand starting at position 1069 of SEQ ID NO: 1562200
gaaggaggauguguaucuu

SEQ ID NO: 1729604 - RNA, 19 nt, Artificial Sequence
  Description of Artificial Sequence: Synthetic oligonucleotide
  Antisense strand to SEQ ID NO: 1729603
aagauacacauccuccuuc

SEQ ID NO: 1729605 - RNA, 19 nt, Artificial Sequence
  Description of Artificial Sequence: Synthetic oligonucleotide
  Sense strand starting at position 1073 of SEQ ID NO: 1562200
gaggauguguaucuuacca

SEQ ID NO: 1729606 - RNA, 19 nt, Artificial Sequence
  Description of Artificial Sequence: Synthetic oligonucleotide
  Antisense strand to SEQ ID NO: 1729605
ugguaagauacacauccuc

SEQ ID NO: 1729607 - RNA, 19 nt, Artificial Sequence
  Description of Artificial Sequence: Synthetic oligonucleotide
  Sense strand starting at position 1147 of SEQ ID NO: 1562200
cagugagcaugacucuaau

SEQ ID NO: 1729608 - RNA, 19 nt, Artificial Sequence
  Description of Artificial Sequence: Synthetic oligonucleotide
  Antisense strand to SEQ ID NO: 1729607
auuagagucaugcucacug

SEQ ID NO: 1729609 - RNA, 19 nt, Artificial Sequence
  Description of Artificial Sequence: Synthetic oligonucleotide
  Sense strand starting at position 1153 of SEQ ID NO: 1562200
gcaugacucuaauugguua

SEQ ID NO: 1729610 - RNA, 19 nt, Artificial Sequence
  Description of Artificial Sequence: Synthetic oligonucleotide
  Antisense strand to SEQ ID NO: 1729609
uaaccaauuagagucaugc

SEQ ID NO: 1729611 - RNA, 19 nt, Artificial Sequence
  Description of Artificial Sequence: Synthetic oligonucleotide
  Sense strand starting at position 1158 of SEQ ID NO: 1562200
acucuaauugguuauguga

SEQ ID NO: 1729612 - RNA, 19 nt, Artificial Sequence
  Description of Artificial Sequence: Synthetic oligonucleotide
  Antisense strand to SEQ ID NO: 1729611
ucacauaaccaauuagagu

SEQ ID NO: 1729613 - RNA, 19 nt, Artificial Sequence
  Description of Artificial Sequence: Synthetic oligonucleotide
  Sense strand starting at position 1169 of SEQ ID NO: 1562200
uuaugugaccucgagagag

SEQ ID NO: 1729614 - RNA, 19 nt, Artificial Sequence
  Description of Artificial Sequence: Synthetic oligonucleotide
  Antisense strand to SEQ ID NO: 1729613
cucucucgaggucacauaa

SEQ ID NO: 1729615 - RNA, 19 nt, Artificial Sequence
  Description of Artificial Sequence: Synthetic oligonucleotide
  Sense strand starting at position 1293 of SEQ ID NO: 1562200
ggauuaggaggauguuauu

SEQ ID NO: 1729616 - RNA, 19 nt, Artificial Sequence
  Description of Artificial Sequence: Synthetic oligonucleotide
  Antisense strand to SEQ ID NO: 1729615
aauaacauccuccuaaucc

SEQ ID NO: 1729617 - RNA, 19 nt, Artificial Sequence
  Description of Artificial Sequence: Synthetic oligonucleotide
  Sense strand starting at position 1299 of SEQ ID NO: 1562200
ggaggauguuauucuguua

SEQ ID NO: 1729618 - RNA, 19 nt, Artificial Sequence
  Description of Artificial Sequence: Synthetic oligonucleotide
  Antisense strand to SEQ ID NO: 1729617
uaacagaauaacauccucc

SEQ ID NO: 1729619 - RNA, 19 nt, Artificial Sequence
  Description of Artificial Sequence: Synthetic oligonucleotide
  Sense strand starting at position 1302 of SEQ ID NO: 1562200
ggauguuauucuguuaguc

SEQ ID NO: 1729620 - RNA, 19 nt, Artificial Sequence
  Description of Artificial Sequence: Synthetic oligonucleotide
  Antisense strand to SEQ ID NO: 1729619
gacuaacagaauaacaucc

SEQ ID NO: 1729621 - RNA, 19 nt, Artificial Sequence
  Description of Artificial Sequence: Synthetic oligonucleotide
  Sense strand starting at position 1507 of SEQ ID NO: 1562200
uggauaagccuaggaaauc

SEQ ID NO: 1729622 - RNA, 19 nt, Artificial Sequence
  Description of Artificial Sequence: Synthetic oligonucleotide
  Antisense strand to SEQ ID NO: 1729621
gauuuccuaggcuuaucca

SEQ ID NO: 1729623 - RNA, 19 nt, Artificial Sequence
  Description of Artificial Sequence: Synthetic oligonucleotide
  Sense strand starting at position 2183 of SEQ ID NO: 1562200
cgggaaacguucucggaac

SEQ ID NO: 1729624 - RNA, 19 nt, Artificial Sequence
  Description of Artificial Sequence: Synthetic oligonucleotide
  Antisense strand to SEQ ID NO: 1729623
guuccgagaacguuucccg

SEQ ID NO: 1729625 - RNA, 19 nt, Artificial Sequence
  Description of Artificial Sequence: Synthetic oligonucleotide
  Sense strand starting at position 2309 of SEQ ID NO: 1562200
uccugauucuucccggauc

SEQ ID NO: 1729626 - RNA, 19 nt, Artificial Sequence
  Description of Artificial Sequence: Synthetic oligonucleotide
  Antisense strand to SEQ ID NO: 1729625
gauccgggaagaaucagga

SEQ ID NO: 1729627 - RNA, 19 nt, Artificial Sequence
  Description of Artificial Sequence: Synthetic oligonucleotide
  Sense strand starting at position 2312 of SEQ ID NO: 1562200
ugauucuucccggaucgca

SEQ ID NO: 1729628 - RNA, 19 nt, Artificial Sequence
  Description of Artificial Sequence: Synthetic oligonucleotide
  Antisense strand to SEQ ID NO: 1729627
ugcgauccgggaagaauca

SEQ ID NO: 1729629 - RNA, 19 nt, Artificial Sequence
  Description of Artificial Sequence: Synthetic oligonucleotide
  Sense strand starting at position 2616 of SEQ ID NO: 1562200
acgugaaauuucgcagagu

SEQ ID NO: 1729630 - RNA, 19 nt, Artificial Sequence
  Description of Artificial Sequence: Synthetic oligonucleotide
  Antisense strand to SEQ ID NO: 1729629
acucugcgaaauuucacgu

SEQ ID NO: 1729631 - RNA, 19 nt, Artificial Sequence
  Description of Artificial Sequence: Synthetic oligonucleotide
  Sense strand starting at position 2645 of SEQ ID NO: 1562200
gaggaauugcccugggcug

SEQ ID NO: 1729632 - RNA, 19 nt, Artificial Sequence
  Description of Artificial Sequence: Synthetic oligonucleotide
  Antisense strand to SEQ ID NO: 1729631
cagcccagggcaauuccuc

SEQ ID NO: 1729633 - RNA, 19 nt, Artificial Sequence
  Description of Artificial Sequence: Synthetic oligonucleotide
  Sense strand starting at position 2689 of SEQ ID NO: 1562200
cgcgcuugaacguuuacau

SEQ ID NO: 1729634 - RNA, 19 nt, Artificial Sequence
  Description of Artificial Sequence: Synthetic oligonucleotide
  Antisense strand to SEQ ID NO: 1729633
auguaaacguucaagcgcg

SEQ ID NO: 1729635 - RNA, 19 nt, Artificial Sequence
  Description of Artificial Sequence: Synthetic oligonucleotide
  Sense strand starting at position 2690 of SEQ ID NO: 1562200
gcgcuugaacguuuacaua

SEQ ID NO: 1729636 - RNA, 19 nt, Artificial Sequence
  Description of Artificial Sequence: Synthetic oligonucleotide
  Antisense strand to SEQ ID NO: 1729635
uauguaaacguucaagcgc

SEQ ID NO: 1729637 - RNA, 19 nt, Artificial Sequence
  Description of Artificial Sequence: Synthetic oligonucleotide
  Sense strand starting at position 2760 of SEQ ID NO: 1562200
gacugauuaugaguccuga

SEQ ID NO: 1729638 - RNA, 19 nt, Artificial Sequence
  Description of Artificial Sequence: Synthetic oligonucleotide
  Antisense strand to SEQ ID NO: 1729637
ucaggacucauaaucaguc

SEQ ID NO: 1729639 - RNA, 19 nt, Artificial Sequence
  Description of Artificial Sequence: Synthetic oligonucleotide
  Sense strand starting at position 2764 of SEQ ID NO: 1562200
gauuaugaguccugauuua

SEQ ID NO: 1729640 - RNA, 19 nt, Artificial Sequence
  Description of Artificial Sequence: Synthetic oligonucleotide
  Antisense strand to SEQ ID NO: 1729639
uaaaucaggacucauaauc

SEQ ID NO: 1729641 - RNA, 19 nt, Artificial Sequence
  Description of Artificial Sequence: Synthetic oligonucleotide
  Sense strand starting at position 2976 of SEQ ID NO: 1562200
uauugucccguuuaacagu

SEQ ID NO: 1729642 - RNA, 19 nt, Artificial Sequence
  Description of Artificial Sequence: Synthetic oligonucleotide
  Antisense strand to SEQ ID NO: 1729641
acuguuaaacgggacaaua

SEQ ID NO: 1729643 - RNA, 19 nt, Artificial Sequence
  Description of Artificial Sequence: Synthetic oligonucleotide
  Sense strand starting at position 2983 of SEQ ID NO: 1562200
ccguuuaacaguugaggaa

SEQ ID NO: 1729644 - RNA, 19 nt, Artificial Sequence
  Description of Artificial Sequence: Synthetic oligonucleotide
  Antisense strand to SEQ ID NO: 1729643
uuccucaacuguuaaacgg

SEQ ID NO: 1729645 - RNA, 19 nt, Artificial Sequence
  Description of Artificial Sequence: Synthetic oligonucleotide
  Sense strand starting at position 2984 of SEQ ID NO: 1562200
cguuuaacaguugaggaaa

SEQ ID NO: 1729646 - RNA, 19 nt, Artificial Sequence
  Description of Artificial Sequence: Synthetic oligonucleotide
  Antisense strand to SEQ ID NO: 1729645
uuuccucaacuguuaaacg

SEQ ID NO: 1729647 - RNA, 19 nt, Artificial Sequence
  Description of Artificial Sequence: Synthetic oligonucleotide
  Sense strand starting at position 3017 of SEQ ID NO: 1562200
ucaagugacuuucuuaggu

SEQ ID NO: 1729648 - RNA, 19 nt, Artificial Sequence
  Description of Artificial Sequence: Synthetic oligonucleotide
  Antisense strand to SEQ ID NO: 1729647
accuaagaaagucacuuga

SEQ ID NO: 1729649 - RNA, 19 nt, Artificial Sequence
  Description of Artificial Sequence: Synthetic oligonucleotide
  Sense strand starting at position 3022 of SEQ ID NO: 1562200
ugacuuucuuaggucacaa

SEQ ID NO: 1729650 - RNA, 19 nt, Artificial Sequence
  Description of Artificial Sequence: Synthetic oligonucleotide
  Antisense strand to SEQ ID NO: 1729649
uugugaccuaagaaaguca

SEQ ID NO: 1729651 - RNA, 19 nt, Artificial Sequence
  Description of Artificial Sequence: Synthetic oligonucleotide
  Sense strand starting at position 3171 of SEQ ID NO: 1562200
cugacugugcccuagacuu

SEQ ID NO: 1729652 - RNA, 19 nt, Artificial Sequence
  Description of Artificial Sequence: Synthetic oligonucleotide
  Antisense strand to SEQ ID NO: 1729651
aagucuagggcacagucag

SEQ ID NO: 1729653 - RNA, 19 nt, Artificial Sequence
  Description of Artificial Sequence: Synthetic oligonucleotide
  Sense strand starting at position 3195 of SEQ ID NO: 1562200
gugaccucaagucauguua

SEQ ID NO: 1729654 - RNA, 19 nt, Artificial Sequence
  Description of Artificial Sequence: Synthetic oligonucleotide
  Antisense strand to SEQ ID NO: 1729653
uaacaugacuugaggucac

SEQ ID NO: 1729655 - RNA, 19 nt, Artificial Sequence
  Description of Artificial Sequence: Synthetic oligonucleotide
  Sense strand starting at position 3220 of SEQ ID NO: 1562200
ugggucucaguuugucaaa

SEQ ID NO: 1729656 - RNA, 19 nt, Artificial Sequence
  Description of Artificial Sequence: Synthetic oligonucleotide
  Antisense strand to SEQ ID NO: 1729655
uuugacaaacugagaccca

SEQ ID NO: 1729657 - RNA, 19 nt, Artificial Sequence
  Description of Artificial Sequence: Synthetic oligonucleotide
  Sense strand starting at position 3222 of SEQ ID NO: 1562200
ggucucaguuugucaaaca

SEQ ID NO: 1729658 - RNA, 19 nt, Artificial Sequence
  Description of Artificial Sequence: Synthetic oligonucleotide
  Antisense strand to SEQ ID NO: 1729657
uguuugacaaacugagacc

SEQ ID NO: 1729659 - RNA, 19 nt, Artificial Sequence
  Description of Artificial Sequence: Synthetic oligonucleotide
  Sense strand starting at position 3261 of SEQ ID NO: 1562200
uagagcugccauuguaaga

SEQ ID NO: 1729660 - RNA, 19 nt, Artificial Sequence
  Description of Artificial Sequence: Synthetic oligonucleotide
  Antisense strand to SEQ ID NO: 1729659
ucuuacaauggcagcucua

SEQ ID NO: 1729661 - RNA, 19 nt, Artificial Sequence
  Description of Artificial Sequence: Synthetic oligonucleotide
  Sense strand starting at position 3289 of SEQ ID NO: 1562200
acucucugcccucaggauu

SEQ ID NO: 1729662 - RNA, 19 nt, Artificial Sequence
  Description of Artificial Sequence: Synthetic oligonucleotide
  Antisense strand to SEQ ID NO: 1729661
aauccugagggcagagagu

SEQ ID NO: 1729663 - RNA, 19 nt, Artificial Sequence
  Description of Artificial Sequence: Synthetic oligonucleotide
  Sense strand starting at position 3481 of SEQ ID NO: 1562200
ugaccuaggccagagguua

SEQ ID NO: 1729664 - RNA, 19 nt, Artificial Sequence
  Description of Artificial Sequence: Synthetic oligonucleotide
  Antisense strand to SEQ ID NO: 1729663
uaaccucuggccuagguca

SEQ ID NO: 1729665 - RNA, 19 nt, Artificial Sequence
  Description of Artificial Sequence: Synthetic oligonucleotide
  Sense strand starting at position 3492 of SEQ ID NO: 1562200
agagguuaaugaucuagug

SEQ ID NO: 1729666 - RNA, 19 nt, Artificial Sequence
  Description of Artificial Sequence: Synthetic oligonucleotide
  Antisense strand to SEQ ID NO: 1729665
cacuagaucauuaaccucu

SEQ ID NO: 1729667 - RNA, 19 nt, Artificial Sequence
  Description of Artificial Sequence: Synthetic oligonucleotide
  Sense strand starting at position 259 of SEQ ID NO: 1562201
ucaucuucguagucagaga

SEQ ID NO: 1729668 - RNA, 19 nt, Artificial Sequence
  Description of Artificial Sequence: Synthetic oligonucleotide
  Antisense strand to SEQ ID NO: 1729667
ucucugacuacgaagauga

SEQ ID NO: 1729669 - RNA, 19 nt, Artificial Sequence
  Description of Artificial Sequence: Synthetic oligonucleotide
  Sense strand starting at position 305 of SEQ ID NO: 1562201
ucuuauuaguugucuaauc

SEQ ID NO: 1729670 - RNA, 19 nt, Artificial Sequence
  Description of Artificial Sequence: Synthetic oligonucleotide
  Antisense strand to SEQ ID NO: 1729669
gauuagacaacuaauaaga

SEQ ID NO: 1729671 - RNA, 19 nt, Artificial Sequence
  Description of Artificial Sequence: Synthetic oligonucleotide
  Sense strand starting at position 306 of SEQ ID NO: 1562201
cuuauuaguugucuaaucu

SEQ ID NO: 1729672 - RNA, 19 nt, Artificial Sequence
  Description of Artificial Sequence: Synthetic oligonucleotide
  Antisense strand to SEQ ID NO: 1729671
agauuagacaacuaauaag

SEQ ID NO: 1729673 - RNA, 19 nt, Artificial Sequence
  Description of Artificial Sequence: Synthetic oligonucleotide
  Sense strand starting at position 310 of SEQ ID NO: 1562201
uuaguugucuaaucuaauc

SEQ ID NO: 1729674 - RNA, 19 nt, Artificial Sequence
  Description of Artificial Sequence: Synthetic oligonucleotide
  Antisense strand to SEQ ID NO: 1729673
gauuagauuagacaacuaa

SEQ ID NO: 1729675 - RNA, 19 nt, Artificial Sequence
  Description of Artificial Sequence: Synthetic oligonucleotide
  Sense strand starting at position 499 of SEQ ID NO: 1562201
acaaucucugcuuaacgaa

SEQ ID NO: 1729676 - RNA, 19 nt, Artificial Sequence
  Description of Artificial Sequence: Synthetic oligonucleotide
  Antisense strand to SEQ ID NO: 1729675
uucguuaagcagagauugu

SEQ ID NO: 1729677 - RNA, 19 nt, Artificial Sequence
  Description of Artificial Sequence: Synthetic oligonucleotide
  Sense strand starting at position 570 of SEQ ID NO: 1562201
aucuuaagucucugaaagg

SEQ ID NO: 1729678 - RNA, 19 nt, Artificial Sequence
  Description of Artificial Sequence: Synthetic oligonucleotide
  Antisense strand to SEQ ID NO: 1729677
ccuuucagagacuuaagau

SEQ ID NO: 1729679 - RNA, 19 nt, Artificial Sequence
  Description of Artificial Sequence: Synthetic oligonucleotide
  Sense strand starting at position 728 of SEQ ID NO: 1562201
uucugagucagaggcauaa

SEQ ID NO: 1729680 - RNA, 19 nt, Artificial Sequence
  Description of Artificial Sequence: Synthetic oligonucleotide
  Antisense strand to SEQ ID NO: 1729679
uuaugccucugacucagaa

SEQ ID NO: 1729681 - RNA, 19 nt, Artificial Sequence
  Description of Artificial Sequence: Synthetic oligonucleotide
  Sense strand starting at position 772 of SEQ ID NO: 1562201
uuaguaaccguguaaccuu

SEQ ID NO: 1729682 - RNA, 19 nt, Artificial Sequence
  Description of Artificial Sequence: Synthetic oligonucleotide
  Antisense strand to SEQ ID NO: 1729681
aagguuacacgguuacuaa

SEQ ID NO: 1729683 - RNA, 19 nt, Artificial Sequence
  Description of Artificial Sequence: Synthetic oligonucleotide
  Sense strand starting at position 853 of SEQ ID NO: 1562201
gcacaaugauguuuaauga

SEQ ID NO: 1729684 - RNA, 19 nt, Artificial Sequence
  Description of Artificial Sequence: Synthetic oligonucleotide
  Antisense strand to SEQ ID NO: 1729683
ucauuaaacaucauugugc

SEQ ID NO: 1729685 - RNA, 19 nt, Artificial Sequence
  Description of Artificial Sequence: Synthetic oligonucleotide
  Sense strand starting at position 977 of SEQ ID NO: 1562201
ucccuaugacauggauacu

SEQ ID NO: 1729686 - RNA, 19 nt, Artificial Sequence
  Description of Artificial Sequence: Synthetic oligonucleotide
  Antisense strand to SEQ ID NO: 1729685
aguauccaugucauaggga

SEQ ID NO: 1729687 - RNA, 19 nt, Artificial Sequence
  Description of Artificial Sequence: Synthetic oligonucleotide
  Sense strand starting at position 996 of SEQ ID NO: 1562201
gcuacuaugucucccauuu

SEQ ID NO: 1729688 - RNA, 19 nt, Artificial Sequence
  Description of Artificial Sequence: Synthetic oligonucleotide
  Antisense strand to SEQ ID NO: 1729687
aaaugggagacauaguagc

SEQ ID NO: 1729689 - RNA, 19 nt, Artificial Sequence
  Description of Artificial Sequence: Synthetic oligonucleotide
  Sense strand starting at position 1119 of SEQ ID NO: 1562201
aguacuugucauuacaugu

SEQ ID NO: 1729690 - RNA, 19 nt, Artificial Sequence
  Description of Artificial Sequence: Synthetic oligonucleotide
  Antisense strand to SEQ ID NO: 1729689
acauguaaugacaaguacu

SEQ ID NO: 1729691 - RNA, 19 nt, Artificial Sequence
  Description of Artificial Sequence: Synthetic oligonucleotide
  Sense strand starting at position 1126 of SEQ ID NO: 1562201
gucauuacauguuucuuaa

SEQ ID NO: 1729692 - RNA, 19 nt, Artificial Sequence
  Description of Artificial Sequence: Synthetic oligonucleotide
  Antisense strand to SEQ ID NO: 1729691
uuaagaaacauguaaugac

SEQ ID NO: 1729693 - RNA, 19 nt, Artificial Sequence
  Description of Artificial Sequence: Synthetic oligonucleotide
  Sense strand starting at position 1304 of SEQ ID NO: 1562201
ccacgugguuucuuaagac

SEQ ID NO: 1729694 - RNA, 19 nt, Artificial Sequence
  Description of Artificial Sequence: Synthetic oligonucleotide
  Antisense strand to SEQ ID NO: 1729693
gucuuaagaaaccacgugg

SEQ ID NO: 1729695 - RNA, 19 nt, Artificial Sequence
  Description of Artificial Sequence: Synthetic oligonucleotide
  Sense strand starting at position 1390 of SEQ ID NO: 1562201
aggagaaacugagggaaau

SEQ ID NO: 1729696 - RNA, 19 nt, Artificial Sequence
  Description of Artificial Sequence: Synthetic oligonucleotide
  Antisense strand to SEQ ID NO: 1729695
auuucccucaguuucuccu

SEQ ID NO: 1729697 - RNA, 19 nt, Artificial Sequence
  Description of Artificial Sequence: Synthetic oligonucleotide
  Sense strand starting at position 1845 of SEQ ID NO: 1562201
uucggaaauccugggacuu

SEQ ID NO: 1729698 - RNA, 19 nt, Artificial Sequence
  Description of Artificial Sequence: Synthetic oligonucleotide
  Antisense strand to SEQ ID NO: 1729697
aagucccaggauuuccgaa

SEQ ID NO: 1729699 - RNA, 19 nt, Artificial Sequence
  Description of Artificial Sequence: Synthetic oligonucleotide
  Sense strand starting at position 1846 of SEQ ID NO: 1562201
ucggaaauccugggacuuc

SEQ ID NO: 1729700 - RNA, 19 nt, Artificial Sequence
  Description of Artificial Sequence: Synthetic oligonucleotide
  Antisense strand to SEQ ID NO: 1729699
gaagucccaggauuuccga

SEQ ID NO: 1729701 - RNA, 19 nt, Artificial Sequence
  Description of Artificial Sequence: Synthetic oligonucleotide
  Sense strand starting at position 1855 of SEQ ID NO: 1562201
cugggacuucuucggcaau

SEQ ID NO: 1729702 - RNA, 19 nt, Artificial Sequence
  Description of Artificial Sequence: Synthetic oligonucleotide
  Antisense strand to SEQ ID NO: 1729701
auugccgaagaagucccag

SEQ ID NO: 1729703 - RNA, 19 nt, Artificial Sequence
  Description of Artificial Sequence: Synthetic oligonucleotide
  Sense strand starting at position 1858 of SEQ ID NO: 1562201
ggacuucuucggcaauccu

SEQ ID NO: 1729704 - RNA, 19 nt, Artificial Sequence
  Description of Artificial Sequence: Synthetic oligonucleotide
  Antisense strand to SEQ ID NO: 1729703
aggauugccgaagaagucc

SEQ ID NO: 1729705 - RNA, 19 nt, Artificial Sequence
  Description of Artificial Sequence: Synthetic oligonucleotide
  Sense strand starting at position 2065 of SEQ ID NO: 1562201
cuccuuggcucuccggaaa

SEQ ID NO: 1729706 - RNA, 19 nt, Artificial Sequence
  Description of Artificial Sequence: Synthetic oligonucleotide
  Antisense strand to SEQ ID NO: 1729705
uuuccggagagccaaggag

SEQ ID NO: 1729707 - RNA, 19 nt, Artificial Sequence
  Description of Artificial Sequence: Synthetic oligonucleotide
  Sense strand starting at position 2068 of SEQ ID NO: 1562201
cuuggcucuccggaaaucu

SEQ ID NO: 1729708 - RNA, 19 nt, Artificial Sequence
  Description of Artificial Sequence: Synthetic oligonucleotide
  Antisense strand to SEQ ID NO: 1729707
agauuuccggagagccaag

SEQ ID NO: 1729709 - RNA, 19 nt, Artificial Sequence
  Description of Artificial Sequence: Synthetic oligonucleotide
  Sense strand starting at position 2078 of SEQ ID NO: 1562201
cggaaaucuucggugacuc

SEQ ID NO: 1729710 - RNA, 19 nt, Artificial Sequence
  Description of Artificial Sequence: Synthetic oligonucleotide
  Antisense strand to SEQ ID NO: 1729709
gagucaccgaagauuuccg

SEQ ID NO: 1729711 - RNA, 19 nt, Artificial Sequence
  Description of Artificial Sequence: Synthetic oligonucleotide
  Sense strand starting at position 2079 of SEQ ID NO: 1562201
ggaaaucuucggugacucu

SEQ ID NO: 1729712 - RNA, 19 nt, Artificial Sequence
  Description of Artificial Sequence: Synthetic oligonucleotide
  Antisense strand to SEQ ID NO: 1729711
agagucaccgaagauuucc

SEQ ID NO: 1729713 - RNA, 19 nt, Artificial Sequence
  Description of Artificial Sequence: Synthetic oligonucleotide
  Sense strand starting at position 2194 of SEQ ID NO: 1562201
ucagaagucucuuccggga

SEQ ID NO: 1729714 - RNA, 19 nt, Artificial Sequence
  Description of Artificial Sequence: Synthetic oligonucleotide
  Antisense strand to SEQ ID NO: 1729713
ucccggaagagacuucuga

SEQ ID NO: 1729715 - RNA, 19 nt, Artificial Sequence
  Description of Artificial Sequence: Synthetic oligonucleotide
  Sense strand starting at position 2214 of SEQ ID NO: 1562201
agcuguacccucuaguagu

SEQ ID NO: 1729716 - RNA, 19 nt, Artificial Sequence
  Description of Artificial Sequence: Synthetic oligonucleotide
  Antisense strand to SEQ ID NO: 1729715
acuacuagaggguacagcu

SEQ ID NO: 1729717 - RNA, 19 nt, Artificial Sequence
  Description of Artificial Sequence: Synthetic oligonucleotide
  Sense strand starting at position 2317 of SEQ ID NO: 1562201
ugaaccauguuuccgacau

SEQ ID NO: 1729718 - RNA, 19 nt, Artificial Sequence
  Description of Artificial Sequence: Synthetic oligonucleotide
  Antisense strand to SEQ ID NO: 1729717
augucggaaacaugguuca

SEQ ID NO: 1729719 - RNA, 19 nt, Artificial Sequence
  Description of Artificial Sequence: Synthetic oligonucleotide
  Sense strand starting at position 2338 of SEQ ID NO: 1562201
ucuuaagugcuaggauaac

SEQ ID NO: 1729720 - RNA, 19 nt, Artificial Sequence
  Description of Artificial Sequence: Synthetic oligonucleotide
  Antisense strand to SEQ ID NO: 1729719
guuauccuagcacuuaaga

SEQ ID NO: 1729721 - RNA, 19 nt, Artificial Sequence
  Description of Artificial Sequence: Synthetic oligonucleotide
  Sense strand starting at position 2664 of SEQ ID NO: 1562201
guuaguuucuuuccagaau

SEQ ID NO: 1729722 - RNA, 19 nt, Artificial Sequence
  Description of Artificial Sequence: Synthetic oligonucleotide
  Antisense strand to SEQ ID NO: 1729721
auucuggaaagaaacuaac

SEQ ID NO: 1729723 - RNA, 19 nt, Artificial Sequence
  Description of Artificial Sequence: Synthetic oligonucleotide
  Sense strand starting at position 2886 of SEQ ID NO: 1562201
guuuguuguuucucaggaa

SEQ ID NO: 1729724 - RNA, 19 nt, Artificial Sequence
  Description of Artificial Sequence: Synthetic oligonucleotide
  Antisense strand to SEQ ID NO: 1729723
uuccugagaaacaacaaac

SEQ ID NO: 1729725 - RNA, 19 nt, Artificial Sequence
  Description of Artificial Sequence: Synthetic oligonucleotide
  Sense strand starting at position 2966 of SEQ ID NO: 1562201
gccagaugaagacguacau

SEQ ID NO: 1729726 - RNA, 19 nt, Artificial Sequence
  Description of Artificial Sequence: Synthetic oligonucleotide
  Antisense strand to SEQ ID NO: 1729725
auguacgucuucaucuggc

SEQ ID NO: 1729727 - RNA, 19 nt, Artificial Sequence
  Description of Artificial Sequence: Synthetic oligonucleotide
  Sense strand starting at position 3008 of SEQ ID NO: 1562201
guuuaucguaaguaacaug

SEQ ID NO: 1729728 - RNA, 19 nt, Artificial Sequence
  Description of Artificial Sequence: Synthetic oligonucleotide
  Antisense strand to SEQ ID NO: 1729727
cauguuacuuacgauaaac

SEQ ID NO: 1729729 - RNA, 19 nt, Artificial Sequence
  Description of Artificial Sequence: Synthetic oligonucleotide
  Sense strand starting at position 3065 of SEQ ID NO: 1562201
gcuaguuaacguuaccuaa

SEQ ID NO: 1729730 - RNA, 19 nt, Artificial Sequence
  Description of Artificial Sequence: Synthetic oligonucleotide
  Antisense strand to SEQ ID NO: 1729729
uuagguaacguuaacuagc

SEQ ID NO: 1729731 - RNA, 19 nt, Artificial Sequence
  Description of Artificial Sequence: Synthetic oligonucleotide
  Sense strand starting at position 3068 of SEQ ID NO: 1562201
aguuaacguuaccuaacau

SEQ ID NO: 1729732 - RNA, 19 nt, Artificial Sequence
  Description of Artificial Sequence: Synthetic oligonucleotide
  Antisense strand to SEQ ID NO: 1729731
auguuagguaacguuaacu

SEQ ID NO: 1729733 - RNA, 19 nt, Artificial Sequence
  Description of Artificial Sequence: Synthetic oligonucleotide
  Sense strand starting at position 3171 of SEQ ID NO: 1562201
caccaugucgugcaauaga

SEQ ID NO: 1729734 - RNA, 19 nt, Artificial Sequence
  Description of Artificial Sequence: Synthetic oligonucleotide
  Antisense strand to SEQ ID NO: 1729733
ucuauugcacgacauggug

SEQ ID NO: 1729735 - RNA, 19 nt, Artificial Sequence
  Description of Artificial Sequence: Synthetic oligonucleotide
  Sense strand starting at position 3465 of SEQ ID NO: 1562201
ucccauuguguauauaaau

SEQ ID NO: 1729736 - RNA, 19 nt, Artificial Sequence
  Description of Artificial Sequence: Synthetic oligonucleotide
  Antisense strand to SEQ ID NO: 1729735
auuuauauacacaauggga

SEQ ID NO: 1729737 - RNA, 19 nt, Artificial Sequence
  Description of Artificial Sequence: Synthetic oligonucleotide
  Sense strand starting at position 3528 of SEQ ID NO: 1562201
gagaauugugaaugaugcu

SEQ ID NO: 1729738 - RNA, 19 nt, Artificial Sequence
  Description of Artificial Sequence: Synthetic oligonucleotide
  Antisense strand to SEQ ID NO: 1729737
agcaucauucacaauucuc

SEQ ID NO: 1729739 - RNA, 19 nt, Artificial Sequence
  Description of Artificial Sequence: Synthetic oligonucleotide
  Sense strand starting at position 3680 of SEQ ID NO: 1562201
guccauaaugucuguacua

SEQ ID NO: 1729740 - RNA, 19 nt, Artificial Sequence
  Description of Artificial Sequence: Synthetic oligonucleotide
  Antisense strand to SEQ ID NO: 1729739
uaguacagacauuauggac

SEQ ID NO: 1729741 - RNA, 19 nt, Artificial Sequence
  Description of Artificial Sequence: Synthetic oligonucleotide
  Sense strand starting at position 3785 of SEQ ID NO: 1562201
gcgauucuaacaggucaga

SEQ ID NO: 1729742 - RNA, 19 nt, Artificial Sequence
  Description of Artificial Sequence: Synthetic oligonucleotide
  Antisense strand to SEQ ID NO: 1729741
ucugaccuguuagaaucgc

SEQ ID NO: 1729743 - RNA, 19 nt, Artificial Sequence
  Description of Artificial Sequence: Synthetic oligonucleotide
  Sense strand starting at position 3964 of SEQ ID NO: 1562201
auuggauuguauuccuuau

SEQ ID NO: 1729744 - RNA, 19 nt, Artificial Sequence
  Description of Artificial Sequence: Synthetic oligonucleotide
  Antisense strand to SEQ ID NO: 1729743
auaaggaauacaauccaau

SEQ ID NO: 1729745 - RNA, 19 nt, Artificial Sequence
  Description of Artificial Sequence: Synthetic oligonucleotide
  Sense strand starting at position 3966 of SEQ ID NO: 1562201
uggauuguauuccuuauau

SEQ ID NO: 1729746 - RNA, 19 nt, Artificial Sequence
  Description of Artificial Sequence: Synthetic oligonucleotide
  Antisense strand to SEQ ID NO: 1729745
auauaaggaauacaaucca

SEQ ID NO: 1729747 - RNA, 19 nt, Artificial Sequence
  Description of Artificial Sequence: Synthetic oligonucleotide
  Sense strand starting at position 529 of SEQ ID NO: 1562202
ggugacucucuggguuaua

SEQ ID NO: 1729748 - RNA, 19 nt, Artificial Sequence
  Description of Artificial Sequence: Synthetic oligonucleotide
  Antisense strand to SEQ ID NO: 1729747
uauaacccagagagucacc

SEQ ID NO: 1729749 - RNA, 19 nt, Artificial Sequence
  Description of Artificial Sequence: Synthetic oligonucleotide
  Sense strand starting at position 530 of SEQ ID NO: 1562202
gugacucucuggguuauau

SEQ ID NO: 1729750 - RNA, 19 nt, Artificial Sequence
  Description of Artificial Sequence: Synthetic oligonucleotide
  Antisense strand to SEQ ID NO: 1729749
auauaacccagagagucac

SEQ ID NO: 1729751 - RNA, 19 nt, Artificial Sequence
  Description of Artificial Sequence: Synthetic oligonucleotide
  Sense strand starting at position 540 of SEQ ID NO: 1562202
ggguuauauugacuugcag

SEQ ID NO: 1729752 - RNA, 19 nt, Artificial Sequence
  Description of Artificial Sequence: Synthetic oligonucleotide
  Antisense strand to SEQ ID NO: 1729751
cugcaagucaauauaaccc

SEQ ID NO: 1729753 - RNA, 19 nt, Artificial Sequence
  Description of Artificial Sequence: Synthetic oligonucleotide
  Sense strand starting at position 569 of SEQ ID NO: 1562202
ggaggaguaaccugucugu

SEQ ID NO: 1729754 - RNA, 19 nt, Artificial Sequence
  Description of Artificial Sequence: Synthetic oligonucleotide
  Antisense strand to SEQ ID NO: 1729753
acagacagguuacuccucc

SEQ ID NO: 1729755 - RNA, 19 nt, Artificial Sequence
  Description of Artificial Sequence: Synthetic oligonucleotide
  Sense strand starting at position 573 of SEQ ID NO: 1562202
gaguaaccugucugucuca

SEQ ID NO: 1729756 - RNA, 19 nt, Artificial Sequence
  Description of Artificial Sequence: Synthetic oligonucleotide
  Antisense strand to SEQ ID NO: 1729755
ugagacagacagguuacuc

SEQ ID NO: 1729757 - RNA, 19 nt, Artificial Sequence
  Description of Artificial Sequence: Synthetic oligonucleotide
  Sense strand starting at position 695 of SEQ ID NO: 1562202
cuuaucaguugaguuaacu

SEQ ID NO: 1729758 - RNA, 19 nt, Artificial Sequence
  Description of Artificial Sequence: Synthetic oligonucleotide
  Antisense strand to SEQ ID NO: 1729757
aguuaacucaacugauaag

SEQ ID NO: 1729759 - RNA, 19 nt, Artificial Sequence
  Description of Artificial Sequence: Synthetic oligonucleotide
  Sense strand starting at position 701 of SEQ ID NO: 1562202
aguugaguuaacugaauga

SEQ ID NO: 1729760 - RNA, 19 nt, Artificial Sequence
  Description of Artificial Sequence: Synthetic oligonucleotide
  Antisense strand to SEQ ID NO: 1729759
ucauucaguuaacucaacu

SEQ ID NO: 1729761 - RNA, 19 nt, Artificial Sequence
  Description of Artificial Sequence: Synthetic oligonucleotide
  Sense strand starting at position 808 of SEQ ID NO: 1562202
agacuuguucucuaaaugc

SEQ ID NO: 1729762 - RNA, 19 nt, Artificial Sequence
  Description of Artificial Sequence: Synthetic oligonucleotide
  Antisense strand to SEQ ID NO: 1729761
gcauuuagagaacaagucu

SEQ ID NO: 1729763 - RNA, 19 nt, Artificial Sequence
  Description of Artificial Sequence: Synthetic oligonucleotide
  Sense strand starting at position 905 of SEQ ID NO: 1562202
ugcggagaaucuuuggaac

SEQ ID NO: 1729764 - RNA, 19 nt, Artificial Sequence
  Description of Artificial Sequence: Synthetic oligonucleotide
  Antisense strand to SEQ ID NO: 1729763
guuccaaagauucuccgca

SEQ ID NO: 1729765 - RNA, 19 nt, Artificial Sequence
  Description of Artificial Sequence: Synthetic oligonucleotide
  Sense strand starting at position 908 of SEQ ID NO: 1562202
ggagaaucuuuggaacacu

SEQ ID NO: 1729766 - RNA, 19 nt, Artificial Sequence
  Description of Artificial Sequence: Synthetic oligonucleotide
  Antisense strand to SEQ ID NO: 1729765
aguguuccaaagauucucc

SEQ ID NO: 1729767 - RNA, 19 nt, Artificial Sequence
  Description of Artificial Sequence: Synthetic oligonucleotide
  Sense strand starting at position 978 of SEQ ID NO: 1562202
gcgguuugagcucuugagu

SEQ ID NO: 1729768 - RNA, 19 nt, Artificial Sequence
  Description of Artificial Sequence: Synthetic oligonucleotide
  Antisense strand to SEQ ID NO: 1729767
acucaagagcucaaaccgc

SEQ ID NO: 1729769 - RNA, 19 nt, Artificial Sequence
  Description of Artificial Sequence: Synthetic oligonucleotide
  Sense strand starting at position 1164 of SEQ ID NO: 1562202
gcaguacugcaugaguaua

SEQ ID NO: 1729770 - RNA, 19 nt, Artificial Sequence
  Description of Artificial Sequence: Synthetic oligonucleotide
  Antisense strand to SEQ ID NO: 1729769
uauacucaugcaguacugc

SEQ ID NO: 1729771 - RNA, 19 nt, Artificial Sequence
  Description of Artificial Sequence: Synthetic oligonucleotide
  Sense strand starting at position 1213 of SEQ ID NO: 1562202
gcgucucaccguucucaga

SEQ ID NO: 1729772 - RNA, 19 nt, Artificial Sequence
  Description of Artificial Sequence: Synthetic oligonucleotide
  Antisense strand to SEQ ID NO: 1729771
ucugagaacggugagacgc

SEQ ID NO: 1729773 - RNA, 19 nt, Artificial Sequence
  Description of Artificial Sequence: Synthetic oligonucleotide
  Sense strand starting at position 1230 of SEQ ID NO: 1562202
gacgguuccgcucaauuac

SEQ ID NO: 1729774 - RNA, 19 nt, Artificial Sequence
  Description of Artificial Sequence: Synthetic oligonucleotide
  Antisense strand to SEQ ID NO: 1729773
guaauugagcggaaccguc

SEQ ID NO: 1729775 - RNA, 19 nt, Artificial Sequence
  Description of Artificial Sequence: Synthetic oligonucleotide
  Sense strand starting at position 1286 of SEQ ID NO: 1562202
ucaucuugcaucugaggga

SEQ ID NO: 1729776 - RNA, 19 nt, Artificial Sequence
  Description of Artificial Sequence: Synthetic oligonucleotide
  Antisense strand to SEQ ID NO: 1729775
ucccucagaugcaagauga

SEQ ID NO: 1729777 - RNA, 19 nt, Artificial Sequence
  Description of Artificial Sequence: Synthetic oligonucleotide
  Sense strand starting at position 1330 of SEQ ID NO: 1562202
agaggaaucagccaggugu

SEQ ID NO: 1729778 - RNA, 19 nt, Artificial Sequence
  Description of Artificial Sequence: Synthetic oligonucleotide
  Antisense strand to SEQ ID NO: 1729777
acaccuggcugauuccucu

SEQ ID NO: 1729779 - RNA, 19 nt, Artificial Sequence
  Description of Artificial Sequence: Synthetic oligonucleotide
  Sense strand starting at position 1662 of SEQ ID NO: 1562202
cugagcaugguuugaccaa

SEQ ID NO: 1729780 - RNA, 19 nt, Artificial Sequence
  Description of Artificial Sequence: Synthetic oligonucleotide
  Antisense strand to SEQ ID NO: 1729779
uuggucaaaccaugcucag

SEQ ID NO: 1729781 - RNA, 19 nt, Artificial Sequence
  Description of Artificial Sequence: Synthetic oligonucleotide
  Sense strand starting at position 1806 of SEQ ID NO: 1562202
caugguggauucuuuguua

SEQ ID NO: 1729782 - RNA, 19 nt, Artificial Sequence
  Description of Artificial Sequence: Synthetic oligonucleotide
  Antisense strand to SEQ ID NO: 1729781
uaacaaagaauccaccaug

SEQ ID NO: 1729783 - RNA, 19 nt, Artificial Sequence
  Description of Artificial Sequence: Synthetic oligonucleotide
  Sense strand starting at position 1809 of SEQ ID NO: 1562202
gguggauucuuuguuaagg

SEQ ID NO: 1729784 - RNA, 19 nt, Artificial Sequence
  Description of Artificial Sequence: Synthetic oligonucleotide
  Antisense strand to SEQ ID NO: 1729783
ccuuaacaaagaauccacc

SEQ ID NO: 1729785 - RNA, 19 nt, Artificial Sequence
  Description of Artificial Sequence: Synthetic oligonucleotide
  Sense strand starting at position 1810 of SEQ ID NO: 1562202
guggauucuuuguuaaggu

SEQ ID NO: 1729786 - RNA, 19 nt, Artificial Sequence
  Description of Artificial Sequence: Synthetic oligonucleotide
  Antisense strand to SEQ ID NO: 1729785
accuuaacaaagaauccac

SEQ ID NO: 1729787 - RNA, 19 nt, Artificial Sequence
  Description of Artificial Sequence: Synthetic oligonucleotide
  Sense strand starting at position 1862 of SEQ ID NO: 1562202
caagucugaccuuggaaac

SEQ ID NO: 1729788 - RNA, 19 nt, Artificial Sequence
  Description of Artificial Sequence: Synthetic oligonucleotide
  Antisense strand to SEQ ID NO: 1729787
guuuccaaggucagacuug

SEQ ID NO: 1729789 - RNA, 19 nt, Artificial Sequence
  Description of Artificial Sequence: Synthetic oligonucleotide
  Sense strand starting at position 2217 of SEQ ID NO: 1562202
ugaggaagccaggguucaa

SEQ ID NO: 1729790 - RNA, 19 nt, Artificial Sequence
  Description of Artificial Sequence: Synthetic oligonucleotide
  Antisense strand to SEQ ID NO: 1729789
uugaacccuggcuuccuca

SEQ ID NO: 1729791 - RNA, 19 nt, Artificial Sequence
  Description of Artificial Sequence: Synthetic oligonucleotide
  Sense strand starting at position 2303 of SEQ ID NO: 1562202
cuaaccaaggucugauagu

SEQ ID NO: 1729792 - RNA, 19 nt, Artificial Sequence
  Description of Artificial Sequence: Synthetic oligonucleotide
  Antisense strand to SEQ ID NO: 1729791
acuaucagaccuugguuag

SEQ ID NO: 1729793 - RNA, 19 nt, Artificial Sequence
  Description of Artificial Sequence: Synthetic oligonucleotide
  Sense strand starting at position 2742 of SEQ ID NO: 1562202
uucuaagugcuagaauaac

SEQ ID NO: 1729794 - RNA, 19 nt, Artificial Sequence
  Description of Artificial Sequence: Synthetic oligonucleotide
  Antisense strand to SEQ ID NO: 1729793
guuauucuagcacuuagaa

SEQ ID NO: 1729795 - RNA, 19 nt, Artificial Sequence
  Description of Artificial Sequence: Synthetic oligonucleotide
  Sense strand starting at position 2995 of SEQ ID NO: 1562202
gccaaccuaugguuguaau

SEQ ID NO: 1729796 - RNA, 19 nt, Artificial Sequence
  Description of Artificial Sequence: Synthetic oligonucleotide
  Antisense strand to SEQ ID NO: 1729795
auuacaaccauagguuggc

SEQ ID NO: 1729797 - RNA, 19 nt, Artificial Sequence
  Description of Artificial Sequence: Synthetic oligonucleotide
  Sense strand starting at position 3147 of SEQ ID NO: 1562202
gcugaauuagaccauaguu

SEQ ID NO: 1729798 - RNA, 19 nt, Artificial Sequence
  Description of Artificial Sequence: Synthetic oligonucleotide
  Antisense strand to SEQ ID NO: 1729797
aacuauggucuaauucagc

SEQ ID NO: 1729799 - RNA, 19 nt, Artificial Sequence
  Description of Artificial Sequence: Synthetic oligonucleotide
  Sense strand starting at position 3206 of SEQ ID NO: 1562202
uuuacaaucgaauagcuau

SEQ ID NO: 1729800 - RNA, 19 nt, Artificial Sequence
  Description of Artificial Sequence: Synthetic oligonucleotide
  Antisense strand to SEQ ID NO: 1729799
auagcuauucgauuguaaa

SEQ ID NO: 1729801 - RNA, 19 nt, Artificial Sequence
  Description of Artificial Sequence: Synthetic oligonucleotide
  Sense strand starting at position 3229 of SEQ ID NO: 1562202
aggacacuugcuuauguuu

SEQ ID NO: 1729802 - RNA, 19 nt, Artificial Sequence
  Description of Artificial Sequence: Synthetic oligonucleotide
  Antisense strand to SEQ ID NO: 1729801
aaacauaagcaaguguccu

SEQ ID NO: 1729803 - RNA, 19 nt, Artificial Sequence
  Description of Artificial Sequence: Synthetic oligonucleotide
  Sense strand starting at position 3386 of SEQ ID NO: 1562202
aagugacaaguuuaagcau

SEQ ID NO: 1729804 - RNA, 19 nt, Artificial Sequence
  Description of Artificial Sequence: Synthetic oligonucleotide
  Antisense strand to SEQ ID NO: 1729803
augcuuaaacuugucacuu

SEQ ID NO: 1729805 - RNA, 19 nt, Artificial Sequence
  Description of Artificial Sequence: Synthetic oligonucleotide
  Sense strand starting at position 3493 of SEQ ID NO: 1562202
gcagaauuccuagaagugu

SEQ ID NO: 1729806 - RNA, 19 nt, Artificial Sequence
  Description of Artificial Sequence: Synthetic oligonucleotide
  Antisense strand to SEQ ID NO: 1729805
acacuucuaggaauucugc

SEQ ID NO: 1729807 - RNA, 19 nt, Artificial Sequence
  Description of Artificial Sequence: Synthetic oligonucleotide
  Sense strand starting at position 3499 of SEQ ID NO: 1562202
uuccuagaaguguaacagu

SEQ ID NO: 1729808 - RNA, 19 nt, Artificial Sequence
  Description of Artificial Sequence: Synthetic oligonucleotide
  Antisense strand to SEQ ID NO: 1729807
acuguuacacuucuaggaa

SEQ ID NO: 1729809 - RNA, 19 nt, Artificial Sequence
  Description of Artificial Sequence: Synthetic oligonucleotide
  Sense strand starting at position 3516 of SEQ ID NO: 1562202
guagacuugugagcccuua

SEQ ID NO: 1729810 - RNA, 19 nt, Artificial Sequence
  Description of Artificial Sequence: Synthetic oligonucleotide
  Antisense strand to SEQ ID NO: 1729809
uaagggcucacaagucuac

SEQ ID NO: 1729811 - RNA, 19 nt, Artificial Sequence
  Description of Artificial Sequence: Synthetic oligonucleotide
  Sense strand starting at position 3550 of SEQ ID NO: 1562202
acgccaaugcuacaucaga

SEQ ID NO: 1729812 - RNA, 19 nt, Artificial Sequence
  Description of Artificial Sequence: Synthetic oligonucleotide
  Antisense strand to SEQ ID NO: 1729811
ucugauguagcauuggcgu

SEQ ID NO: 1729813 - RNA, 19 nt, Artificial Sequence
  Description of Artificial Sequence: Synthetic oligonucleotide
  Sense strand starting at position 3558 of SEQ ID NO: 1562202
gcuacaucagauggaaaua

SEQ ID NO: 1729814 - RNA, 19 nt, Artificial Sequence
  Description of Artificial Sequence: Synthetic oligonucleotide
  Antisense strand to SEQ ID NO: 1729813
uauuuccaucugauguagc

SEQ ID NO: 1729815 - RNA, 19 nt, Artificial Sequence
  Description of Artificial Sequence: Synthetic oligonucleotide
  Sense strand starting at position 3570 of SEQ ID NO: 1562202
ggaaauaagugccuggaga

SEQ ID NO: 1729816 - RNA, 19 nt, Artificial Sequence
  Description of Artificial Sequence: Synthetic oligonucleotide
  Antisense strand to SEQ ID NO: 1729815
ucuccaggcacuuauuucc

SEQ ID NO: 1729817 - RNA, 19 nt, Artificial Sequence
  Description of Artificial Sequence: Synthetic oligonucleotide
  Sense strand starting at position 3571 of SEQ ID NO: 1562202
gaaauaagugccuggagaa

SEQ ID NO: 1729818 - RNA, 19 nt, Artificial Sequence
  Description of Artificial Sequence: Synthetic oligonucleotide
  Antisense strand to SEQ ID NO: 1729817
uucuccaggcacuuauuuc

SEQ ID NO: 1729819 - RNA, 19 nt, Artificial Sequence
  Description of Artificial Sequence: Synthetic oligonucleotide
  Sense strand starting at position 3572 of SEQ ID NO: 1562202
aaauaagugccuggagaac

SEQ ID NO: 1729820 - RNA, 19 nt, Artificial Sequence
  Description of Artificial Sequence: Synthetic oligonucleotide
  Antisense strand to SEQ ID NO: 1729819
guucuccaggcacuuauuu

SEQ ID NO: 1729821 - RNA, 19 nt, Artificial Sequence
  Description of Artificial Sequence: Synthetic oligonucleotide
  Sense strand starting at position 3762 of SEQ ID NO: 1562202
guggguuaggcagaucaca

SEQ ID NO: 1729822 - RNA, 19 nt, Artificial Sequence
  Description of Artificial Sequence: Synthetic oligonucleotide
  Antisense strand to SEQ ID NO: 1729821
ugugaucugccuaacccac

SEQ ID NO: 1729823 - RNA, 19 nt, Artificial Sequence
  Description of Artificial Sequence: Synthetic oligonucleotide
  Sense strand starting at position 3829 of SEQ ID NO: 1562202
gcugcaucagaauaguaug

SEQ ID NO: 1729824 - RNA, 19 nt, Artificial Sequence
  Description of Artificial Sequence: Synthetic oligonucleotide
  Antisense strand to SEQ ID NO: 1729823
cauacuauucugaugcagc

SEQ ID NO: 1729825 - RNA, 19 nt, Artificial Sequence
  Description of Artificial Sequence: Synthetic oligonucleotide
  Sense strand starting at position 3843 of SEQ ID NO: 1562202
guaugaagagcuugugaaa

SEQ ID NO: 1729826 - RNA, 19 nt, Artificial Sequence
  Description of Artificial Sequence: Synthetic oligonucleotide
  Antisense strand to SEQ ID NO: 1729825
uuucacaagcucuucauac

SEQ ID NO: 1729827 - RNA, 19 nt, Artificial Sequence
  Description of Artificial Sequence: Synthetic oligonucleotide
  Sense strand starting at position 205 of SEQ ID NO: 1562203
ccaugaucgcgccauugua

SEQ ID NO: 1729828 - RNA, 19 nt, Artificial Sequence
  Description of Artificial Sequence: Synthetic oligonucleotide
  Antisense strand to SEQ ID NO: 1729827
uacaauggcgcgaucaugg

SEQ ID NO: 1729829 - RNA, 19 nt, Artificial Sequence
  Description of Artificial Sequence: Synthetic oligonucleotide
  Sense strand starting at position 301 of SEQ ID NO: 1562203
gugcgccuguagucuuaua

SEQ ID NO: 1729830 - RNA, 19 nt, Artificial Sequence
  Description of Artificial Sequence: Synthetic oligonucleotide
  Antisense strand to SEQ ID NO: 1729829
uauaagacuacaggcgcac

SEQ ID NO: 1729831 - RNA, 19 nt, Artificial Sequence
  Description of Artificial Sequence: Synthetic oligonucleotide
  Sense strand starting at position 303 of SEQ ID NO: 1562203
gcgccuguagucuuauagu

SEQ ID NO: 1729832 - RNA, 19 nt, Artificial Sequence
  Description of Artificial Sequence: Synthetic oligonucleotide
  Antisense strand to SEQ ID NO: 1729831
acuauaagacuacaggcgc

SEQ ID NO: 1729833 - RNA, 19 nt, Artificial Sequence
  Description of Artificial Sequence: Synthetic oligonucleotide
  Sense strand starting at position 312 of SEQ ID NO: 1562203
gucuuauagucccagcuac

SEQ ID NO: 1729834 - RNA, 19 nt, Artificial Sequence
  Description of Artificial Sequence: Synthetic oligonucleotide
  Antisense strand to SEQ ID NO: 1729833
guagcugggacuauaagac

SEQ ID NO: 1729835 - RNA, 19 nt, Artificial Sequence
  Description of Artificial Sequence: Synthetic oligonucleotide
  Sense strand starting at position 366 of SEQ ID NO: 1562203
ggaguugaagauugcagua

SEQ ID NO: 1729836 - RNA, 19 nt, Artificial Sequence
  Description of Artificial Sequence: Synthetic oligonucleotide
  Antisense strand to SEQ ID NO: 1729835
uacugcaaucuucaacucc

SEQ ID NO: 1729837 - RNA, 19 nt, Artificial Sequence
  Description of Artificial Sequence: Synthetic oligonucleotide
  Sense strand starting at position 371 of SEQ ID NO: 1562203
ugaagauugcaguaagcua

SEQ ID NO: 1729838 - RNA, 19 nt, Artificial Sequence
  Description of Artificial Sequence: Synthetic oligonucleotide
  Antisense strand to SEQ ID NO: 1729837
uagcuuacugcaaucuuca

SEQ ID NO: 1729839 - RNA, 19 nt, Artificial Sequence
  Description of Artificial Sequence: Synthetic oligonucleotide
  Sense strand starting at position 551 of SEQ ID NO: 1562203
gaccgucauggcuaacagu

SEQ ID NO: 1729840 - RNA, 19 nt, Artificial Sequence
  Description of Artificial Sequence: Synthetic oligonucleotide
  Antisense strand to SEQ ID NO: 1729839
acuguuagccaugacgguc

SEQ ID NO: 1729841 - RNA, 19 nt, Artificial Sequence
  Description of Artificial Sequence: Synthetic oligonucleotide
  Sense strand starting at position 554 of SEQ ID NO: 1562203
cgucauggcuaacagugaa

SEQ ID NO: 1729842 - RNA, 19 nt, Artificial Sequence
  Description of Artificial Sequence: Synthetic oligonucleotide
  Antisense strand to SEQ ID NO: 1729841
uucacuguuagccaugacg

SEQ ID NO: 1729843 - RNA, 19 nt, Artificial Sequence
  Description of Artificial Sequence: Synthetic oligonucleotide
  Sense strand starting at position 1256 of SEQ ID NO: 1562203
ggagacuguucuggaaaca

SEQ ID NO: 1729844 - RNA, 19 nt, Artificial Sequence
  Description of Artificial Sequence: Synthetic oligonucleotide
  Antisense strand to SEQ ID NO: 1729843
uguuuccagaacagucucc

SEQ ID NO: 1729845 - RNA, 19 nt, Artificial Sequence
  Description of Artificial Sequence: Synthetic oligonucleotide
  Sense strand starting at position 2045 of SEQ ID NO: 1562203
agugauauccaaugagagu

SEQ ID NO: 1729846 - RNA, 19 nt, Artificial Sequence
  Description of Artificial Sequence: Synthetic oligonucleotide
  Antisense strand to SEQ ID NO: 1729845
acucucauuggauaucacu

SEQ ID NO: 1729847 - RNA, 19 nt, Artificial Sequence
  Description of Artificial Sequence: Synthetic oligonucleotide
  Sense strand starting at position 2078 of SEQ ID NO: 1562203
ccugguuuacccgacucaa

SEQ ID NO: 1729848 - RNA, 19 nt, Artificial Sequence
  Description of Artificial Sequence: Synthetic oligonucleotide
  Antisense strand to SEQ ID NO: 1729847
uugagucggguaaaccagg

SEQ ID NO: 1729849 - RNA, 19 nt, Artificial Sequence
  Description of Artificial Sequence: Synthetic oligonucleotide
  Sense strand starting at position 2135 of SEQ ID NO: 1562203
ggcgugguucggcgggaau

SEQ ID NO: 1729850 - RNA, 19 nt, Artificial Sequence
  Description of Artificial Sequence: Synthetic oligonucleotide
  Antisense strand to SEQ ID NO: 1729849
auucccgccgaaccacgcc

SEQ ID NO: 1729851 - RNA, 19 nt, Artificial Sequence
  Description of Artificial Sequence: Synthetic oligonucleotide
  Sense strand starting at position 2176 of SEQ ID NO: 1562203
gcgagaaucacagguagaa

SEQ ID NO: 1729852 - RNA, 19 nt, Artificial Sequence
  Description of Artificial Sequence: Synthetic oligonucleotide
  Antisense strand to SEQ ID NO: 1729851
uucuaccugugauucucgc

SEQ ID NO: 1729853 - RNA, 19 nt, Artificial Sequence
  Description of Artificial Sequence: Synthetic oligonucleotide
  Sense strand starting at position 3120 of SEQ ID NO: 1562203
ccuacuugcucccggaaga

SEQ ID NO: 1729854 - RNA, 19 nt, Artificial Sequence
  Description of Artificial Sequence: Synthetic oligonucleotide
  Antisense strand to SEQ ID NO: 1729853
ucuuccgggagcaaguagg

SEQ ID NO: 1729855 - RNA, 19 nt, Artificial Sequence
  Description of Artificial Sequence: Synthetic oligonucleotide
  Sense strand starting at position 3121 of SEQ ID NO: 1562203
cuacuugcucccggaagaa

SEQ ID NO: 1729856 - RNA, 19 nt, Artificial Sequence
  Description of Artificial Sequence: Synthetic oligonucleotide
  Antisense strand to SEQ ID NO: 1729855
uucuuccgggagcaaguag

SEQ ID NO: 1729857 - RNA, 19 nt, Artificial Sequence
  Description of Artificial Sequence: Synthetic oligonucleotide
  Sense strand starting at position 3213 of SEQ ID NO: 1562203
gguacuggucccuaggcau

SEQ ID NO: 1729858 - RNA, 19 nt, Artificial Sequence
  Description of Artificial Sequence: Synthetic oligonucleotide
  Antisense strand to SEQ ID NO: 1729857
augccuagggaccaguacc

SEQ ID NO: 1729859 - RNA, 19 nt, Artificial Sequence
  Description of Artificial Sequence: Synthetic oligonucleotide
  Sense strand starting at position 3282 of SEQ ID NO: 1562203
gugucuuccugguacucuu

SEQ ID NO: 1729860 - RNA, 19 nt, Artificial Sequence
  Description of Artificial Sequence: Synthetic oligonucleotide
  Antisense strand to SEQ ID NO: 1729859
aagaguaccaggaagacac

SEQ ID NO: 1729861 - RNA, 19 nt, Artificial Sequence
  Description of Artificial Sequence: Synthetic oligonucleotide
  Sense strand starting at position 3339 of SEQ ID NO: 1562203
gcucucgugcucucaguaa

SEQ ID NO: 1729862 - RNA, 19 nt, Artificial Sequence
  Description of Artificial Sequence: Synthetic oligonucleotide
  Antisense strand to SEQ ID NO: 1729861
uuacugagagcacgagagc

SEQ ID NO: 1729863 - RNA, 19 nt, Artificial Sequence
  Description of Artificial Sequence: Synthetic oligonucleotide
  Sense strand starting at position 3343 of SEQ ID NO: 1562203
ucgugcucucaguaauguu

SEQ ID NO: 1729864 - RNA, 19 nt, Artificial Sequence
  Description of Artificial Sequence: Synthetic oligonucleotide
  Antisense strand to SEQ ID NO: 1729863
aacauuacugagagcacga

SEQ ID NO: 1729865 - RNA, 19 nt, Artificial Sequence
  Description of Artificial Sequence: Synthetic oligonucleotide
  Sense strand starting at position 3388 of SEQ ID NO: 1562203
uccagagauucuugcucaa

SEQ ID NO: 1729866 - RNA, 19 nt, Artificial Sequence
  Description of Artificial Sequence: Synthetic oligonucleotide
  Antisense strand to SEQ ID NO: 1729865
uugagcaagaaucucugga

SEQ ID NO: 1729867 - RNA, 19 nt, Artificial Sequence
  Description of Artificial Sequence: Synthetic oligonucleotide
  Sense strand starting at position 3522 of SEQ ID NO: 1562203
gucccauucuguguugcau

SEQ ID NO: 1729868 - RNA, 19 nt, Artificial Sequence
  Description of Artificial Sequence: Synthetic oligonucleotide
  Antisense strand to SEQ ID NO: 1729867
augcaacacagaaugggac

SEQ ID NO: 1729869 - RNA, 19 nt, Artificial Sequence
  Description of Artificial Sequence: Synthetic oligonucleotide
  Sense strand starting at position 3615 of SEQ ID NO: 1562203
guguaucuguagccucaca

SEQ ID NO: 1729870 - RNA, 19 nt, Artificial Sequence
  Description of Artificial Sequence: Synthetic oligonucleotide
  Antisense strand to SEQ ID NO: 1729869
ugugaggcuacagauacac

SEQ ID NO: 1729871 - RNA, 19 nt, Artificial Sequence
  Description of Artificial Sequence: Synthetic oligonucleotide
  Sense strand starting at position 3639 of SEQ ID NO: 1562203
ccaugugagucugcaaucu

SEQ ID NO: 1729872 - RNA, 19 nt, Artificial Sequence
  Description of Artificial Sequence: Synthetic oligonucleotide
  Antisense strand to SEQ ID NO: 1729871
agauugcagacucacaugg

SEQ ID NO: 1729873 - RNA, 19 nt, Artificial Sequence
  Description of Artificial Sequence: Synthetic oligonucleotide
  Sense strand starting at position 3648 of SEQ ID NO: 1562203
ucugcaaucugucugugaa

SEQ ID NO: 1729874 - RNA, 19 nt, Artificial Sequence
  Description of Artificial Sequence: Synthetic oligonucleotide
  Antisense strand to SEQ ID NO: 1729873
uucacagacagauugcaga

SEQ ID NO: 1729875 - RNA, 19 nt, Artificial Sequence
  Description of Artificial Sequence: Synthetic oligonucleotide
  Sense strand starting at position 3649 of SEQ ID NO: 1562203
cugcaaucugucugugaau

SEQ ID NO: 1729876 - RNA, 19 nt, Artificial Sequence
  Description of Artificial Sequence: Synthetic oligonucleotide
  Antisense strand to SEQ ID NO: 1729875
auucacagacagauugcag

SEQ ID NO: 1729877 - RNA, 19 nt, Artificial Sequence
  Description of Artificial Sequence: Synthetic oligonucleotide
  Sense strand starting at position 3650 of SEQ ID NO: 1562203
ugcaaucugucugugaaug

SEQ ID NO: 1729878 - RNA, 19 nt, Artificial Sequence
  Description of Artificial Sequence: Synthetic oligonucleotide
  Antisense strand to SEQ ID NO: 1729877
cauucacagacagauugca

SEQ ID NO: 1729879 - RNA, 19 nt, Artificial Sequence
  Description of Artificial Sequence: Synthetic oligonucleotide
  Sense strand starting at position 3660 of SEQ ID NO: 1562203
cugugaaugcccuggugua

SEQ ID NO: 1729880 - RNA, 19 nt, Artificial Sequence
  Description of Artificial Sequence: Synthetic oligonucleotide
  Antisense strand to SEQ ID NO: 1729879
uacaccagggcauucacag

SEQ ID NO: 1729881 - RNA, 19 nt, Artificial Sequence
  Description of Artificial Sequence: Synthetic oligonucleotide
  Sense strand starting at position 3716 of SEQ ID NO: 1562203
aaugauagccagugcuaac

SEQ ID NO: 1729882 - RNA, 19 nt, Artificial Sequence
  Description of Artificial Sequence: Synthetic oligonucleotide
  Antisense strand to SEQ ID NO: 1729881
guuagcacuggcuaucauu

SEQ ID NO: 1729883 - RNA, 19 nt, Artificial Sequence
  Description of Artificial Sequence: Synthetic oligonucleotide
  Sense strand starting at position 3726 of SEQ ID NO: 1562203
agugcuaacuccugggaau

SEQ ID NO: 1729884 - RNA, 19 nt, Artificial Sequence
  Description of Artificial Sequence: Synthetic oligonucleotide
  Antisense strand to SEQ ID NO: 1729883
auucccaggaguuagcacu

SEQ ID NO: 1729885 - RNA, 19 nt, Artificial Sequence
  Description of Artificial Sequence: Synthetic oligonucleotide
  Sense strand starting at position 3849 of SEQ ID NO: 1562203
ggagccauccuguaaccca

SEQ ID NO: 1729886 - RNA, 19 nt, Artificial Sequence
  Description of Artificial Sequence: Synthetic oligonucleotide
  Antisense strand to SEQ ID NO: 1729885
uggguuacaggauggcucc

SEQ ID NO: 1729887 - RNA, 19 nt, Artificial Sequence
  Description of Artificial Sequence: Synthetic oligonucleotide
  Sense strand starting at position 29 of SEQ ID NO: 1562204
ggacaaacuuaauugcaau

SEQ ID NO: 1729888 - RNA, 19 nt, Artificial Sequence
  Description of Artificial Sequence: Synthetic oligonucleotide
  Antisense strand to SEQ ID NO: 1729887
auugcaauuaaguuugucc

SEQ ID NO: 1729889 - RNA, 19 nt, Artificial Sequence
  Description of Artificial Sequence: Synthetic oligonucleotide
  Sense strand starting at position 84 of SEQ ID NO: 1562204
ugcauaagguuggccaaau

SEQ ID NO: 1729890 - RNA, 19 nt, Artificial Sequence
  Description of Artificial Sequence: Synthetic oligonucleotide
  Antisense strand to SEQ ID NO: 1729889
auuuggccaaccuuaugca

SEQ ID NO: 1729891 - RNA, 19 nt, Artificial Sequence
  Description of Artificial Sequence: Synthetic oligonucleotide
  Sense strand starting at position 85 of SEQ ID NO: 1562204
gcauaagguuggccaaaua

SEQ ID NO: 1729892 - RNA, 19 nt, Artificial Sequence
  Description of Artificial Sequence: Synthetic oligonucleotide
  Antisense strand to SEQ ID NO: 1729891
uauuuggccaaccuuaugc

SEQ ID NO: 1729893 - RNA, 19 nt, Artificial Sequence
  Description of Artificial Sequence: Synthetic oligonucleotide
  Sense strand starting at position 233 of SEQ ID NO: 1562204
uuuagugggugauuccuau

SEQ ID NO: 1729894 - RNA, 19 nt, Artificial Sequence
  Description of Artificial Sequence: Synthetic oligonucleotide
  Antisense strand to SEQ ID NO: 1729893
auaggaaucacccacuaaa

SEQ ID NO: 1729895 - RNA, 19 nt, Artificial Sequence
  Description of Artificial Sequence: Synthetic oligonucleotide
  Sense strand starting at position 239 of SEQ ID NO: 1562204
gggugauuccuaugcacua

SEQ ID NO: 1729896 - RNA, 19 nt, Artificial Sequence
  Description of Artificial Sequence: Synthetic oligonucleotide
  Antisense strand to SEQ ID NO: 1729895
uagugcauaggaaucaccc

SEQ ID NO: 1729897 - RNA, 19 nt, Artificial Sequence
  Description of Artificial Sequence: Synthetic oligonucleotide
  Sense strand starting at position 240 of SEQ ID NO: 1562204
ggugauuccuaugcacuag

SEQ ID NO: 1729898 - RNA, 19 nt, Artificial Sequence
  Description of Artificial Sequence: Synthetic oligonucleotide
  Antisense strand to SEQ ID NO: 1729897
cuagugcauaggaaucacc

SEQ ID NO: 1729899 - RNA, 19 nt, Artificial Sequence
  Description of Artificial Sequence: Synthetic oligonucleotide
  Sense strand starting at position 244 of SEQ ID NO: 1562204
auuccuaugcacuaggauu

SEQ ID NO: 1729900 - RNA, 19 nt, Artificial Sequence
  Description of Artificial Sequence: Synthetic oligonucleotide
  Antisense strand to SEQ ID NO: 1729899
aauccuagugcauaggaau

SEQ ID NO: 1729901 - RNA, 19 nt, Artificial Sequence
  Description of Artificial Sequence: Synthetic oligonucleotide
  Sense strand starting at position 480 of SEQ ID NO: 1562204
aacguuugaguacaucaua

SEQ ID NO: 1729902 - RNA, 19 nt, Artificial Sequence
  Description of Artificial Sequence: Synthetic oligonucleotide
  Antisense strand to SEQ ID NO: 1729901
uaugauguacucaaacguu

SEQ ID NO: 1729903 - RNA, 19 nt, Artificial Sequence
  Description of Artificial Sequence: Synthetic oligonucleotide
  Sense strand starting at position 483 of SEQ ID NO: 1562204
guuugaguacaucauauau

SEQ ID NO: 1729904 - RNA, 19 nt, Artificial Sequence
  Description of Artificial Sequence: Synthetic oligonucleotide
  Antisense strand to SEQ ID NO: 1729903
auauaugauguacucaaac

SEQ ID NO: 1729905 - RNA, 19 nt, Artificial Sequence
  Description of Artificial Sequence: Synthetic oligonucleotide
  Sense strand starting at position 553 of SEQ ID NO: 1562204
caacuaaauggcugaguua

SEQ ID NO: 1729906 - RNA, 19 nt, Artificial Sequence
  Description of Artificial Sequence: Synthetic oligonucleotide
  Antisense strand to SEQ ID NO: 1729905
uaacucagccauuuaguug

SEQ ID NO: 1729907 - RNA, 19 nt, Artificial Sequence
  Description of Artificial Sequence: Synthetic oligonucleotide
  Sense strand starting at position 571 of SEQ ID NO: 1562204
agcugacagccacauaauu

SEQ ID NO: 1729908 - RNA, 19 nt, Artificial Sequence
  Description of Artificial Sequence: Synthetic oligonucleotide
  Antisense strand to SEQ ID NO: 1729907
aauuauguggcugucagcu

SEQ ID NO: 1729909 - RNA, 19 nt, Artificial Sequence
  Description of Artificial Sequence: Synthetic oligonucleotide
  Sense strand starting at position 732 of SEQ ID NO: 1562204
gacaacauuugaugaguga

SEQ ID NO: 1729910 - RNA, 19 nt, Artificial Sequence
  Description of Artificial Sequence: Synthetic oligonucleotide
  Antisense strand to SEQ ID NO: 1729909
ucacucaucaaauguuguc

SEQ ID NO: 1729911 - RNA, 19 nt, Artificial Sequence
  Description of Artificial Sequence: Synthetic oligonucleotide
  Sense strand starting at position 971 of SEQ ID NO: 1562204
auuauaaccugguuugguu

SEQ ID NO: 1729912 - RNA, 19 nt, Artificial Sequence
  Description of Artificial Sequence: Synthetic oligonucleotide
  Antisense strand to SEQ ID NO: 1729911
aaccaaaccagguuauaau

SEQ ID NO: 1729913 - RNA, 19 nt, Artificial Sequence
  Description of Artificial Sequence: Synthetic oligonucleotide
  Sense strand starting at position 1268 of SEQ ID NO: 1562204
gcuacuguaucacccauuu

SEQ ID NO: 1729914 - RNA, 19 nt, Artificial Sequence
  Description of Artificial Sequence: Synthetic oligonucleotide
  Antisense strand to SEQ ID NO: 1729913
aaaugggugauacaguagc

SEQ ID NO: 1729915 - RNA, 19 nt, Artificial Sequence
  Description of Artificial Sequence: Synthetic oligonucleotide
  Sense strand starting at position 1336 of SEQ ID NO: 1562204
uccucaguuucugucaaga

SEQ ID NO: 1729916 - RNA, 19 nt, Artificial Sequence
  Description of Artificial Sequence: Synthetic oligonucleotide
  Antisense strand to SEQ ID NO: 1729915
ucuugacagaaacugagga

SEQ ID NO: 1729917 - RNA, 19 nt, Artificial Sequence
  Description of Artificial Sequence: Synthetic oligonucleotide
  Sense strand starting at position 1381 of SEQ ID NO: 1562204
uggcuuggcgaggaaauua

SEQ ID NO: 1729918 - RNA, 19 nt, Artificial Sequence
  Description of Artificial Sequence: Synthetic oligonucleotide
  Antisense strand to SEQ ID NO: 1729917
uaauuuccucgccaagcca

SEQ ID NO: 1729919 - RNA, 19 nt, Artificial Sequence
  Description of Artificial Sequence: Synthetic oligonucleotide
  Sense strand starting at position 1466 of SEQ ID NO: 1562204
aauaauuaucguuaccguu

SEQ ID NO: 1729920 - RNA, 19 nt, Artificial Sequence
  Description of Artificial Sequence: Synthetic oligonucleotide
  Antisense strand to SEQ ID NO: 1729919
aacgguaacgauaauuauu

SEQ ID NO: 1729921 - RNA, 19 nt, Artificial Sequence
  Description of Artificial Sequence: Synthetic oligonucleotide
  Sense strand starting at position 2007 of SEQ ID NO: 1562204
agcucuuaggaguacguua

SEQ ID NO: 1729922 - RNA, 19 nt, Artificial Sequence
  Description of Artificial Sequence: Synthetic oligonucleotide
  Antisense strand to SEQ ID NO: 1729921
uaacguacuccuaagagcu

SEQ ID NO: 1729923 - RNA, 19 nt, Artificial Sequence
  Description of Artificial Sequence: Synthetic oligonucleotide
  Sense strand starting at position 2012 of SEQ ID NO: 1562204
uuaggaguacguuauuaca

SEQ ID NO: 1729924 - RNA, 19 nt, Artificial Sequence
  Description of Artificial Sequence: Synthetic oligonucleotide
  Antisense strand to SEQ ID NO: 1729923
uguaauaacguacuccuaa

SEQ ID NO: 1729925 - RNA, 19 nt, Artificial Sequence
  Description of Artificial Sequence: Synthetic oligonucleotide
  Sense strand starting at position 2014 of SEQ ID NO: 1562204
aggaguacguuauuacaaa

SEQ ID NO: 1729926 - RNA, 19 nt, Artificial Sequence
  Description of Artificial Sequence: Synthetic oligonucleotide
  Antisense strand to SEQ ID NO: 1729925
uuuguaauaacguacuccu

SEQ ID NO: 1729927 - RNA, 19 nt, Artificial Sequence
  Description of Artificial Sequence: Synthetic oligonucleotide
  Sense strand starting at position 2039 of SEQ ID NO: 1562204
agugcucugcuccaaacua

SEQ ID NO: 1729928 - RNA, 19 nt, Artificial Sequence
  Description of Artificial Sequence: Synthetic oligonucleotide
  Antisense strand to SEQ ID NO: 1729927
uaguuuggagcagagcacu

SEQ ID NO: 1729929 - RNA, 19 nt, Artificial Sequence
  Description of Artificial Sequence: Synthetic oligonucleotide
  Sense strand starting at position 2051 of SEQ ID NO: 1562204
caaacuauuugggaaaggu

SEQ ID NO: 1729930 - RNA, 19 nt, Artificial Sequence
  Description of Artificial Sequence: Synthetic oligonucleotide
  Antisense strand to SEQ ID NO: 1729929
accuuucccaaauaguuug

SEQ ID NO: 1729931 - RNA, 19 nt, Artificial Sequence
  Description of Artificial Sequence: Synthetic oligonucleotide
  Sense strand starting at position 2122 of SEQ ID NO: 1562204
ccuggaccucuccaaguuu

SEQ ID NO: 1729932 - RNA, 19 nt, Artificial Sequence
  Description of Artificial Sequence: Synthetic oligonucleotide
  Antisense strand to SEQ ID NO: 1729931
aaacuuggagagguccagg

SEQ ID NO: 1729933 - RNA, 19 nt, Artificial Sequence
  Description of Artificial Sequence: Synthetic oligonucleotide
  Sense strand starting at position 2167 of SEQ ID NO: 1562204
aauuauucucguuaugguu

SEQ ID NO: 1729934 - RNA, 19 nt, Artificial Sequence
  Description of Artificial Sequence: Synthetic oligonucleotide
  Antisense strand to SEQ ID NO: 1729933
aaccauaacgagaauaauu

SEQ ID NO: 1729935 - RNA, 19 nt, Artificial Sequence
  Description of Artificial Sequence: Synthetic oligonucleotide
  Sense strand starting at position 2174 of SEQ ID NO: 1562204
cucguuaugguugugcauu

SEQ ID NO: 1729936 - RNA, 19 nt, Artificial Sequence
  Description of Artificial Sequence: Synthetic oligonucleotide
  Antisense strand to SEQ ID NO: 1729935
aaugcacaaccauaacgag

SEQ ID NO: 1729937 - RNA, 19 nt, Artificial Sequence
  Description of Artificial Sequence: Synthetic oligonucleotide
  Sense strand starting at position 2185 of SEQ ID NO: 1562204
ugugcauuaucccuugaag

SEQ ID NO: 1729938 - RNA, 19 nt, Artificial Sequence
  Description of Artificial Sequence: Synthetic oligonucleotide
  Antisense strand to SEQ ID NO: 1729937
cuucaagggauaaugcaca

SEQ ID NO: 1729939 - RNA, 19 nt, Artificial Sequence
  Description of Artificial Sequence: Synthetic oligonucleotide
  Sense strand starting at position 2188 of SEQ ID NO: 1562204
gcauuaucccuugaagguu

SEQ ID NO: 1729940 - RNA, 19 nt, Artificial Sequence
  Description of Artificial Sequence: Synthetic oligonucleotide
  Antisense strand to SEQ ID NO: 1729939
aaccuucaagggauaaugc

SEQ ID NO: 1729941 - RNA, 19 nt, Artificial Sequence
  Description of Artificial Sequence: Synthetic oligonucleotide
  Sense strand starting at position 2262 of SEQ ID NO: 1562204
cguagcguccuucccaaua

SEQ ID NO: 1729942 - RNA, 19 nt, Artificial Sequence
  Description of Artificial Sequence: Synthetic oligonucleotide
  Antisense strand to SEQ ID NO: 1729941
uauugggaaggacgcuacg

SEQ ID NO: 1729943 - RNA, 19 nt, Artificial Sequence
  Description of Artificial Sequence: Synthetic oligonucleotide
  Sense strand starting at position 2275 of SEQ ID NO: 1562204
ccaauagugcaggagucuu

SEQ ID NO: 1729944 - RNA, 19 nt, Artificial Sequence
  Description of Artificial Sequence: Synthetic oligonucleotide
  Antisense strand to SEQ ID NO: 1729943
aagacuccugcacuauugg

SEQ ID NO: 1729945 - RNA, 19 nt, Artificial Sequence
  Description of Artificial Sequence: Synthetic oligonucleotide
  Sense strand starting at position 2337 of SEQ ID NO: 1562204
cgguucguugggagcuuua

SEQ ID NO: 1729946 - RNA, 19 nt, Artificial Sequence
  Description of Artificial Sequence: Synthetic oligonucleotide
  Antisense strand to SEQ ID NO: 1729945
uaaagcucccaacgaaccg

SEQ ID NO: 1729947 - RNA, 19 nt, Artificial Sequence
  Description of Artificial Sequence: Synthetic oligonucleotide
  Sense strand starting at position 2482 of SEQ ID NO: 1562204
uuaagaaggucuguucuuu

SEQ ID NO: 1729948 - RNA, 19 nt, Artificial Sequence
  Description of Artificial Sequence: Synthetic oligonucleotide
  Antisense strand to SEQ ID NO: 1729947
aaagaacagaccuucuuaa

SEQ ID NO: 1729949 - RNA, 19 nt, Artificial Sequence
  Description of Artificial Sequence: Synthetic oligonucleotide
  Sense strand starting at position 2537 of SEQ ID NO: 1562204
cguggcgcucaccuauaau

SEQ ID NO: 1729950 - RNA, 19 nt, Artificial Sequence
  Description of Artificial Sequence: Synthetic oligonucleotide
  Antisense strand to SEQ ID NO: 1729949
auuauaggugagcgccacg

SEQ ID NO: 1729951 - RNA, 19 nt, Artificial Sequence
  Description of Artificial Sequence: Synthetic oligonucleotide
  Sense strand starting at position 3665 of SEQ ID NO: 1562204
ccuuguguuguagagauac

SEQ ID NO: 1729952 - RNA, 19 nt, Artificial Sequence
  Description of Artificial Sequence: Synthetic oligonucleotide
  Antisense strand to SEQ ID NO: 1729951
guaucucuacaacacaagg

SEQ ID NO: 1729953 - RNA, 19 nt, Artificial Sequence
  Description of Artificial Sequence: Synthetic oligonucleotide
  Sense strand starting at position 3667 of SEQ ID NO: 1562204
uuguguuguagagauacau

SEQ ID NO: 1729954 - RNA, 19 nt, Artificial Sequence
  Description of Artificial Sequence: Synthetic oligonucleotide
  Antisense strand to SEQ ID NO: 1729953
auguaucucuacaacacaa

SEQ ID NO: 1729955 - RNA, 19 nt, Artificial Sequence
  Description of Artificial Sequence: Synthetic oligonucleotide
  Sense strand starting at position 3699 of SEQ ID NO: 1562204
ggaugaaauuacucuggca

SEQ ID NO: 1729956 - RNA, 19 nt, Artificial Sequence
  Description of Artificial Sequence: Synthetic oligonucleotide
  Antisense strand to SEQ ID NO: 1729955
ugccagaguaauuucaucc

SEQ ID NO: 1729957 - RNA, 19 nt, Artificial Sequence
  Description of Artificial Sequence: Synthetic oligonucleotide
  Sense strand starting at position 3701 of SEQ ID NO: 1562204
augaaauuacucuggcacu

SEQ ID NO: 1729958 - RNA, 19 nt, Artificial Sequence
  Description of Artificial Sequence: Synthetic oligonucleotide
  Antisense strand to SEQ ID NO: 1729957
agugccagaguaauuucau

SEQ ID NO: 1729959 - RNA, 19 nt, Artificial Sequence
  Description of Artificial Sequence: Synthetic oligonucleotide
  Sense strand starting at position 3735 of SEQ ID NO: 1562204
gggaguaggcagugaagau

SEQ ID NO: 1729960 - RNA, 19 nt, Artificial Sequence
  Description of Artificial Sequence: Synthetic oligonucleotide
  Antisense strand to SEQ ID NO: 1729959
aucuucacugccuacuccc

SEQ ID NO: 1729961 - RNA, 19 nt, Artificial Sequence
  Description of Artificial Sequence: Synthetic oligonucleotide
  Sense strand starting at position 3811 of SEQ ID NO: 1562204
uggugauggguucaugaua

SEQ ID NO: 1729962 - RNA, 19 nt, Artificial Sequence
  Description of Artificial Sequence: Synthetic oligonucleotide
  Antisense strand to SEQ ID NO: 1729961
uaucaugaacccaucacca

SEQ ID NO: 1729963 - RNA, 19 nt, Artificial Sequence
  Description of Artificial Sequence: Synthetic oligonucleotide
  Sense strand starting at position 3847 of SEQ ID NO: 1562204
acucuuguaugaguuugaa

SEQ ID NO: 1729964 - RNA, 19 nt, Artificial Sequence
  Description of Artificial Sequence: Synthetic oligonucleotide
  Antisense strand to SEQ ID NO: 1729963
uucaaacucauacaagagu

SEQ ID NO: 1729965 - RNA, 19 nt, Artificial Sequence
  Description of Artificial Sequence: Synthetic oligonucleotide
  Sense strand starting at position 3850 of SEQ ID NO: 1562204
cuuguaugaguuugaaauu

SEQ ID NO: 1729966 - RNA, 19 nt, Artificial Sequence
  Description of Artificial Sequence: Synthetic oligonucleotide
  Antisense strand to SEQ ID NO: 1729965
aauuucaaacucauacaag

SEQ ID NO: 1729967 - RNA, 19 nt, Artificial Sequence
  Description of Artificial Sequence: Synthetic oligonucleotide
  Sense strand starting at position 14 of SEQ ID NO: 1562205
cagggcugguuacauaaau

SEQ ID NO: 1729968 - RNA, 19 nt, Artificial Sequence
  Description of Artificial Sequence: Synthetic oligonucleotide
  Antisense strand to SEQ ID NO: 1729967
auuuauguaaccagcccug

SEQ ID NO: 1729969 - RNA, 19 nt, Artificial Sequence
  Description of Artificial Sequence: Synthetic oligonucleotide
  Sense strand starting at position 76 of SEQ ID NO: 1562205
gguugaggaugcucuuuau

SEQ ID NO: 1729970 - RNA, 19 nt, Artificial Sequence
  Description of Artificial Sequence: Synthetic oligonucleotide
  Antisense strand to SEQ ID NO: 1729969
auaaagagcauccucaacc

SEQ ID NO: 1729971 - RNA, 19 nt, Artificial Sequence
  Description of Artificial Sequence: Synthetic oligonucleotide
  Sense strand starting at position 79 of SEQ ID NO: 1562205
ugaggaugcucuuuauagg

SEQ ID NO: 1729972 - RNA, 19 nt, Artificial Sequence
  Description of Artificial Sequence: Synthetic oligonucleotide
  Antisense strand to SEQ ID NO: 1729971
ccuauaaagagcauccuca

SEQ ID NO: 1729973 - RNA, 19 nt, Artificial Sequence
  Description of Artificial Sequence: Synthetic oligonucleotide
  Sense strand starting at position 82 of SEQ ID NO: 1562205
ggaugcucuuuauagggua

SEQ ID NO: 1729974 - RNA, 19 nt, Artificial Sequence
  Description of Artificial Sequence: Synthetic oligonucleotide
  Antisense strand to SEQ ID NO: 1729973
uacccuauaaagagcaucc

SEQ ID NO: 1729975 - RNA, 19 nt, Artificial Sequence
  Description of Artificial Sequence: Synthetic oligonucleotide
  Sense strand starting at position 96 of SEQ ID NO: 1562205
ggguaauuggaaggaucuc

SEQ ID NO: 1729976 - RNA, 19 nt, Artificial Sequence
  Description of Artificial Sequence: Synthetic oligonucleotide
  Antisense strand to SEQ ID NO: 1729975
gagauccuuccaauuaccc

SEQ ID NO: 1729977 - RNA, 19 nt, Artificial Sequence
  Description of Artificial Sequence: Synthetic oligonucleotide
  Sense strand starting at position 102 of SEQ ID NO: 1562205
uuggaaggaucuccagagu

SEQ ID NO: 1729978 - RNA, 19 nt, Artificial Sequence
  Description of Artificial Sequence: Synthetic oligonucleotide
  Antisense strand to SEQ ID NO: 1729977
acucuggagauccuuccaa

SEQ ID NO: 1729979 - RNA, 19 nt, Artificial Sequence
  Description of Artificial Sequence: Synthetic oligonucleotide
  Sense strand starting at position 113 of SEQ ID NO: 1562205
uccagagugaacuguuaag

SEQ ID NO: 1729980 - RNA, 19 nt, Artificial Sequence
  Description of Artificial Sequence: Synthetic oligonucleotide
  Antisense strand to SEQ ID NO: 1729979
cuuaacaguucacucugga

SEQ ID NO: 1729981 - RNA, 19 nt, Artificial Sequence
  Description of Artificial Sequence: Synthetic oligonucleotide
  Sense strand starting at position 170 of SEQ ID NO: 1562205
gugugugguggcugaagga

SEQ ID NO: 1729982 - RNA, 19 nt, Artificial Sequence
  Description of Artificial Sequence: Synthetic oligonucleotide
  Antisense strand to SEQ ID NO: 1729981
uccuucagccaccacacac

SEQ ID NO: 1729983 - RNA, 19 nt, Artificial Sequence
  Description of Artificial Sequence: Synthetic oligonucleotide
  Sense strand starting at position 218 of SEQ ID NO: 1562205
ggguucucucuagaaccca

SEQ ID NO: 1729984 - RNA, 19 nt, Artificial Sequence
  Description of Artificial Sequence: Synthetic oligonucleotide
  Antisense strand to SEQ ID NO: 1729983
uggguucuagagagaaccc

SEQ ID NO: 1729985 - RNA, 19 nt, Artificial Sequence
  Description of Artificial Sequence: Synthetic oligonucleotide
  Sense strand starting at position 285 of SEQ ID NO: 1562205
ugggcauuggugcgagaga

SEQ ID NO: 1729986 - RNA, 19 nt, Artificial Sequence
  Description of Artificial Sequence: Synthetic oligonucleotide
  Antisense strand to SEQ ID NO: 1729985
ucucucgcaccaaugccca

SEQ ID NO: 1729987 - RNA, 19 nt, Artificial Sequence
  Description of Artificial Sequence: Synthetic oligonucleotide
  Sense strand starting at position 301 of SEQ ID NO: 1562205
agaccucagccugguuaaa

SEQ ID NO: 1729988 - RNA, 19 nt, Artificial Sequence
  Description of Artificial Sequence: Synthetic oligonucleotide
  Antisense strand to SEQ ID NO: 1729987
uuuaaccaggcugaggucu

SEQ ID NO: 1729989 - RNA, 19 nt, Artificial Sequence
  Description of Artificial Sequence: Synthetic oligonucleotide
  Sense strand starting at position 303 of SEQ ID NO: 1562205
accucagccugguuaaaga

SEQ ID NO: 1729990 - RNA, 19 nt, Artificial Sequence
  Description of Artificial Sequence: Synthetic oligonucleotide
  Antisense strand to SEQ ID NO: 1729989
ucuuuaaccaggcugaggu

SEQ ID NO: 1729991 - RNA, 19 nt, Artificial Sequence
  Description of Artificial Sequence: Synthetic oligonucleotide
  Sense strand starting at position 359 of SEQ ID NO: 1562205
augagucaguuaccagaca

SEQ ID NO: 1729992 - RNA, 19 nt, Artificial Sequence
  Description of Artificial Sequence: Synthetic oligonucleotide
  Antisense strand to SEQ ID NO: 1729991
ugucugguaacugacucau

SEQ ID NO: 1729993 - RNA, 19 nt, Artificial Sequence
  Description of Artificial Sequence: Synthetic oligonucleotide
  Sense strand starting at position 450 of SEQ ID NO: 1562205
gugaaaggucaugacuuug

SEQ ID NO: 1729994 - RNA, 19 nt, Artificial Sequence
  Description of Artificial Sequence: Synthetic oligonucleotide
  Antisense strand to SEQ ID NO: 1729993
caaagucaugaccuuucac

SEQ ID NO: 1729995 - RNA, 19 nt, Artificial Sequence
  Description of Artificial Sequence: Synthetic oligonucleotide
  Sense strand starting at position 458 of SEQ ID NO: 1562205
ucaugacuuuggcuuggua

SEQ ID NO: 1729996 - RNA, 19 nt, Artificial Sequence
  Description of Artificial Sequence: Synthetic oligonucleotide
  Antisense strand to SEQ ID NO: 1729995
uaccaagccaaagucauga

SEQ ID NO: 1729997 - RNA, 19 nt, Artificial Sequence
  Description of Artificial Sequence: Synthetic oligonucleotide
  Sense strand starting at position 460 of SEQ ID NO: 1562205
augacuuuggcuugguaag

SEQ ID NO: 1729998 - RNA, 19 nt, Artificial Sequence
  Description of Artificial Sequence: Synthetic oligonucleotide
  Antisense strand to SEQ ID NO: 1729997
cuuaccaagccaaagucau

SEQ ID NO: 1729999 - RNA, 19 nt, Artificial Sequence
  Description of Artificial Sequence: Synthetic oligonucleotide
  Sense strand starting at position 461 of SEQ ID NO: 1562205
ugacuuuggcuugguaaga

SEQ ID NO: 1730000 - RNA, 19 nt, Artificial Sequence
  Description of Artificial Sequence: Synthetic oligonucleotide
  Antisense strand to SEQ ID NO: 1729999
ucuuaccaagccaaaguca

SEQ ID NO: 1730001 - RNA, 19 nt, Artificial Sequence
  Description of Artificial Sequence: Synthetic oligonucleotide
  Sense strand starting at position 462 of SEQ ID NO: 1562205
gacuuuggcuugguaagaa

SEQ ID NO: 1730002 - RNA, 19 nt, Artificial Sequence
  Description of Artificial Sequence: Synthetic oligonucleotide
  Antisense strand to SEQ ID NO: 1730001
uucuuaccaagccaaaguc

SEQ ID NO: 1730003 - RNA, 19 nt, Artificial Sequence
  Description of Artificial Sequence: Synthetic oligonucleotide
  Sense strand starting at position 488 of SEQ ID NO: 1562205
aggaguggcuguagucaga

SEQ ID NO: 1730004 - RNA, 19 nt, Artificial Sequence
  Description of Artificial Sequence: Synthetic oligonucleotide
  Antisense strand to SEQ ID NO: 1730003
ucugacuacagccacuccu

SEQ ID NO: 1730005 - RNA, 19 nt, Artificial Sequence
  Description of Artificial Sequence: Synthetic oligonucleotide
  Sense strand starting at position 491 of SEQ ID NO: 1562205
aguggcuguagucagauau

SEQ ID NO: 1730006 - RNA, 19 nt, Artificial Sequence
  Description of Artificial Sequence: Synthetic oligonucleotide
  Antisense strand to SEQ ID NO: 1730005
auaucugacuacagccacu

SEQ ID NO: 1730007 - RNA, 19 nt, Artificial Sequence
  Description of Artificial Sequence: Synthetic oligonucleotide
  Sense strand starting at position 502 of SEQ ID NO: 1562205
ucagauauuccuggguucu

SEQ ID NO: 1730008 - RNA, 19 nt, Artificial Sequence
  Description of Artificial Sequence: Synthetic oligonucleotide
  Antisense strand to SEQ ID NO: 1730007
agaacccaggaauaucuga

SEQ ID NO: 1730009 - RNA, 19 nt, Artificial Sequence
  Description of Artificial Sequence: Synthetic oligonucleotide
  Sense strand starting at position 503 of SEQ ID NO: 1562205
cagauauuccuggguucua

SEQ ID NO: 1730010 - RNA, 19 nt, Artificial Sequence
  Description of Artificial Sequence: Synthetic oligonucleotide
  Antisense strand to SEQ ID NO: 1730009
uagaacccaggaauaucug

SEQ ID NO: 1730011 - RNA, 19 nt, Artificial Sequence
  Description of Artificial Sequence: Synthetic oligonucleotide
  Sense strand starting at position 504 of SEQ ID NO: 1562205
agauauuccuggguucuaa

SEQ ID NO: 1730012 - RNA, 19 nt, Artificial Sequence
  Description of Artificial Sequence: Synthetic oligonucleotide
  Antisense strand to SEQ ID NO: 1730011
uuagaacccaggaauaucu

SEQ ID NO: 1730013 - RNA, 19 nt, Artificial Sequence
  Description of Artificial Sequence: Synthetic oligonucleotide
  Sense strand starting at position 560 of SEQ ID NO: 1562205
ggucaaguuccucaagcuu

SEQ ID NO: 1730014 - RNA, 19 nt, Artificial Sequence
  Description of Artificial Sequence: Synthetic oligonucleotide
  Antisense strand to SEQ ID NO: 1730013
aagcuugaggaacuugacc

SEQ ID NO: 1730015 - RNA, 19 nt, Artificial Sequence
  Description of Artificial Sequence: Synthetic oligonucleotide
  Sense strand starting at position 582 of SEQ ID NO: 1562205
gagccucaguuccuguaaa

SEQ ID NO: 1730016 - RNA, 19 nt, Artificial Sequence
  Description of Artificial Sequence: Synthetic oligonucleotide
  Antisense strand to SEQ ID NO: 1730015
uuuacaggaacugaggcuc

SEQ ID NO: 1730017 - RNA, 19 nt, Artificial Sequence
  Description of Artificial Sequence: Synthetic oligonucleotide
  Sense strand starting at position 1003 of SEQ ID NO: 1562205
ugcgguaacugagucuaua

SEQ ID NO: 1730018 - RNA, 19 nt, Artificial Sequence
  Description of Artificial Sequence: Synthetic oligonucleotide
  Antisense strand to SEQ ID NO: 1730017
uauagacucaguuaccgca

SEQ ID NO: 1730019 - RNA, 19 nt, Artificial Sequence
  Description of Artificial Sequence: Synthetic oligonucleotide
  Sense strand starting at position 1006 of SEQ ID NO: 1562205
gguaacugagucuauacau

SEQ ID NO: 1730020 - RNA, 19 nt, Artificial Sequence
  Description of Artificial Sequence: Synthetic oligonucleotide
  Antisense strand to SEQ ID NO: 1730019
auguauagacucaguuacc

SEQ ID NO: 1730021 - RNA, 19 nt, Artificial Sequence
  Description of Artificial Sequence: Synthetic oligonucleotide
  Sense strand starting at position 1056 of SEQ ID NO: 1562205
agaauagaaucugugaugu

SEQ ID NO: 1730022 - RNA, 19 nt, Artificial Sequence
  Description of Artificial Sequence: Synthetic oligonucleotide
  Antisense strand to SEQ ID NO: 1730021
acaucacagauucuauucu

SEQ ID NO: 1730023 - RNA, 19 nt, Artificial Sequence
  Description of Artificial Sequence: Synthetic oligonucleotide
  Sense strand starting at position 1060 of SEQ ID NO: 1562205
uagaaucugugauguggaa

SEQ ID NO: 1730024 - RNA, 19 nt, Artificial Sequence
  Description of Artificial Sequence: Synthetic oligonucleotide
  Antisense strand to SEQ ID NO: 1730023
uuccacaucacagauucua

SEQ ID NO: 1730025 - RNA, 19 nt, Artificial Sequence
  Description of Artificial Sequence: Synthetic oligonucleotide
  Sense strand starting at position 1062 of SEQ ID NO: 1562205
gaaucugugauguggaaug

SEQ ID NO: 1730026 - RNA, 19 nt, Artificial Sequence
  Description of Artificial Sequence: Synthetic oligonucleotide
  Antisense strand to SEQ ID NO: 1730025
cauuccacaucacagauuc

SEQ ID NO: 1730027 - RNA, 19 nt, Artificial Sequence
  Description of Artificial Sequence: Synthetic oligonucleotide
  Sense strand starting at position 1316 of SEQ ID NO: 1562205
ggguguccgagucagaagu

SEQ ID NO: 1730028 - RNA, 19 nt, Artificial Sequence
  Description of Artificial Sequence: Synthetic oligonucleotide
  Antisense strand to SEQ ID NO: 1730027
acuucugacucggacaccc

SEQ ID NO: 1730029 - RNA, 19 nt, Artificial Sequence
  Description of Artificial Sequence: Synthetic oligonucleotide
  Sense strand starting at position 1317 of SEQ ID NO: 1562205
gguguccgagucagaaguu

SEQ ID NO: 1730030 - RNA, 19 nt, Artificial Sequence
  Description of Artificial Sequence: Synthetic oligonucleotide
  Antisense strand to SEQ ID NO: 1730029
aacuucugacucggacacc

SEQ ID NO: 1730031 - RNA, 19 nt, Artificial Sequence
  Description of Artificial Sequence: Synthetic oligonucleotide
  Sense strand starting at position 3164 of SEQ ID NO: 1562205
ggacuuaagagcugacucu

SEQ ID NO: 1730032 - RNA, 19 nt, Artificial Sequence
  Description of Artificial Sequence: Synthetic oligonucleotide
  Antisense strand to SEQ ID NO: 1730031
agagucagcucuuaagucc

SEQ ID NO: 1730033 - RNA, 19 nt, Artificial Sequence
  Description of Artificial Sequence: Synthetic oligonucleotide
  Sense strand starting at position 3173 of SEQ ID NO: 1562205
agcugacucugggcucaaa

SEQ ID NO: 1730034 - RNA, 19 nt, Artificial Sequence
  Description of Artificial Sequence: Synthetic oligonucleotide
  Antisense strand to SEQ ID NO: 1730033
uuugagcccagagucagcu

SEQ ID NO: 1730035 - RNA, 19 nt, Artificial Sequence
  Description of Artificial Sequence: Synthetic oligonucleotide
  Sense strand starting at position 3392 of SEQ ID NO: 1562205
gcucauaauugcgcucacu

SEQ ID NO: 1730036 - RNA, 19 nt, Artificial Sequence
  Description of Artificial Sequence: Synthetic oligonucleotide
  Antisense strand to SEQ ID NO: 1730035
agugagcgcaauuaugagc

SEQ ID NO: 1730037 - RNA, 19 nt, Artificial Sequence
  Description of Artificial Sequence: Synthetic oligonucleotide
  Sense strand starting at position 3447 of SEQ ID NO: 1562205
guguaagacgcuuagaaca

SEQ ID NO: 1730038 - RNA, 19 nt, Artificial Sequence
  Description of Artificial Sequence: Synthetic oligonucleotide
  Antisense strand to SEQ ID NO: 1730037
uguucuaagcgucuuacac

SEQ ID NO: 1730039 - RNA, 19 nt, Artificial Sequence
  Description of Artificial Sequence: Synthetic oligonucleotide
  Sense strand starting at position 3487 of SEQ ID NO: 1562205
cucaguggaguguaaacaa

SEQ ID NO: 1730040 - RNA, 19 nt, Artificial Sequence
  Description of Artificial Sequence: Synthetic oligonucleotide
  Antisense strand to SEQ ID NO: 1730039
uuguuuacacuccacugag

SEQ ID NO: 1730041 - RNA, 19 nt, Artificial Sequence
  Description of Artificial Sequence: Synthetic oligonucleotide
  Sense strand starting at position 3642 of SEQ ID NO: 1562205
ggcagaguuucacucguug

SEQ ID NO: 1730042 - RNA, 19 nt, Artificial Sequence
  Description of Artificial Sequence: Synthetic oligonucleotide
  Antisense strand to SEQ ID NO: 1730041
caacgagugaaacucugcc

SEQ ID NO: 1730043 - RNA, 19 nt, Artificial Sequence
  Description of Artificial Sequence: Synthetic oligonucleotide
  Sense strand starting at position 3651 of SEQ ID NO: 1562205
ucacucguugcccaggauu

SEQ ID NO: 1730044 - RNA, 19 nt, Artificial Sequence
  Description of Artificial Sequence: Synthetic oligonucleotide
  Antisense strand to SEQ ID NO: 1730043
aauccugggcaacgaguga

SEQ ID NO: 1730045 - RNA, 19 nt, Artificial Sequence
  Description of Artificial Sequence: Synthetic oligonucleotide
  Sense strand starting at position 3653 of SEQ ID NO: 1562205
acucguugcccaggauuga

SEQ ID NO: 1730046 - RNA, 19 nt, Artificial Sequence
  Description of Artificial Sequence: Synthetic oligonucleotide
  Antisense strand to SEQ ID NO: 1730045
ucaauccugggcaacgagu

SEQ ID NO: 1730047 - RNA, 19 nt, Artificial Sequence
  Description of Artificial Sequence: Synthetic oligonucleotide
  Sense strand starting at position 26 of SEQ ID NO: 1562206
agaaauaauuggcugucua

SEQ ID NO: 1730048 - RNA, 19 nt, Artificial Sequence
  Description of Artificial Sequence: Synthetic oligonucleotide
  Antisense strand to SEQ ID NO: 1730047
uagacagccaauuauuucu

SEQ ID NO: 1730049 - RNA, 19 nt, Artificial Sequence
  Description of Artificial Sequence: Synthetic oligonucleotide
  Sense strand starting at position 27 of SEQ ID NO: 1562206
gaaauaauuggcugucuau

SEQ ID NO: 1730050 - RNA, 19 nt, Artificial Sequence
  Description of Artificial Sequence: Synthetic oligonucleotide
  Antisense strand to SEQ ID NO: 1730049
auagacagccaauuauuuc

SEQ ID NO: 1730051 - RNA, 19 nt, Artificial Sequence
  Description of Artificial Sequence: Synthetic oligonucleotide
  Sense strand starting at position 30 of SEQ ID NO: 1562206
auaauuggcugucuauaau

SEQ ID NO: 1730052 - RNA, 19 nt, Artificial Sequence
  Description of Artificial Sequence: Synthetic oligonucleotide
  Antisense strand to SEQ ID NO: 1730051
auuauagacagccaauuau

SEQ ID NO: 1730053 - RNA, 19 nt, Artificial Sequence
  Description of Artificial Sequence: Synthetic oligonucleotide
  Sense strand starting at position 113 of SEQ ID NO: 1562206
gguugaggaugcucuuuau

SEQ ID NO: 1730054 - RNA, 19 nt, Artificial Sequence
  Description of Artificial Sequence: Synthetic oligonucleotide
  Antisense strand to SEQ ID NO: 1730053
auaaagagcauccucaacc

SEQ ID NO: 1730055 - RNA, 19 nt, Artificial Sequence
  Description of Artificial Sequence: Synthetic oligonucleotide
  Sense strand starting at position 116 of SEQ ID NO: 1562206
ugaggaugcucuuuauagg

SEQ ID NO: 1730056 - RNA, 19 nt, Artificial Sequence
  Description of Artificial Sequence: Synthetic oligonucleotide
  Antisense strand to SEQ ID NO: 1730055
ccuauaaagagcauccuca

SEQ ID NO: 1730057 - RNA, 19 nt, Artificial Sequence
  Description of Artificial Sequence: Synthetic oligonucleotide
  Sense strand starting at position 133 of SEQ ID NO: 1562206
ggguaauuggaaggaucuc

SEQ ID NO: 1730058 - RNA, 19 nt, Artificial Sequence
  Description of Artificial Sequence: Synthetic oligonucleotide
  Antisense strand to SEQ ID NO: 1730057
gagauccuuccaauuaccc

SEQ ID NO: 1730059 - RNA, 19 nt, Artificial Sequence
  Description of Artificial Sequence: Synthetic oligonucleotide
  Sense strand starting at position 139 of SEQ ID NO: 1562206
uuggaaggaucuccagagu

SEQ ID NO: 1730060 - RNA, 19 nt, Artificial Sequence
  Description of Artificial Sequence: Synthetic oligonucleotide
  Antisense strand to SEQ ID NO: 1730059
acucuggagauccuuccaa

SEQ ID NO: 1730061 - RNA, 19 nt, Artificial Sequence
  Description of Artificial Sequence: Synthetic oligonucleotide
  Sense strand starting at position 150 of SEQ ID NO: 1562206
uccagagugaacuguuaag

SEQ ID NO: 1730062 - RNA, 19 nt, Artificial Sequence
  Description of Artificial Sequence: Synthetic oligonucleotide
  Antisense strand to SEQ ID NO: 1730061
cuuaacaguucacucugga

SEQ ID NO: 1730063 - RNA, 19 nt, Artificial Sequence
  Description of Artificial Sequence: Synthetic oligonucleotide
  Sense strand starting at position 207 of SEQ ID NO: 1562206
gugugugguggcugaagga

SEQ ID NO: 1730064 - RNA, 19 nt, Artificial Sequence
  Description of Artificial Sequence: Synthetic oligonucleotide
  Antisense strand to SEQ ID NO: 1730063
uccuucagccaccacacac

SEQ ID NO: 1730065 - RNA, 19 nt, Artificial Sequence
  Description of Artificial Sequence: Synthetic oligonucleotide
  Sense strand starting at position 255 of SEQ ID NO: 1562206
ggguucucucuagaaccca

SEQ ID NO: 1730066 - RNA, 19 nt, Artificial Sequence
  Description of Artificial Sequence: Synthetic oligonucleotide
  Antisense strand to SEQ ID NO: 1730065
uggguucuagagagaaccc

SEQ ID NO: 1730067 - RNA, 19 nt, Artificial Sequence
  Description of Artificial Sequence: Synthetic oligonucleotide
  Sense strand starting at position 322 of SEQ ID NO: 1562206
ugggcauuggugcgagaga

SEQ ID NO: 1730068 - RNA, 19 nt, Artificial Sequence
  Description of Artificial Sequence: Synthetic oligonucleotide
  Antisense strand to SEQ ID NO: 1730067
ucucucgcaccaaugccca

SEQ ID NO: 1730069 - RNA, 19 nt, Artificial Sequence
  Description of Artificial Sequence: Synthetic oligonucleotide
  Sense strand starting at position 338 of SEQ ID NO: 1562206
agaccucagccugguuaaa

SEQ ID NO: 1730070 - RNA, 19 nt, Artificial Sequence
  Description of Artificial Sequence: Synthetic oligonucleotide
  Antisense strand to SEQ ID NO: 1730069
uuuaaccaggcugaggucu

SEQ ID NO: 1730071 - RNA, 19 nt, Artificial Sequence
  Description of Artificial Sequence: Synthetic oligonucleotide
  Sense strand starting at position 340 of SEQ ID NO: 1562206
accucagccugguuaaaga

SEQ ID NO: 1730072 - RNA, 19 nt, Artificial Sequence
  Description of Artificial Sequence: Synthetic oligonucleotide
  Antisense strand to SEQ ID NO: 1730071
ucuuuaaccaggcugaggu

SEQ ID NO: 1730073 - RNA, 19 nt, Artificial Sequence
  Description of Artificial Sequence: Synthetic oligonucleotide
  Sense strand starting at position 396 of SEQ ID NO: 1562206
augagucaguuaccagaca

SEQ ID NO: 1730074 - RNA, 19 nt, Artificial Sequence
  Description of Artificial Sequence: Synthetic oligonucleotide
  Antisense strand to SEQ ID NO: 1730073
ugucugguaacugacucau

SEQ ID NO: 1730075 - RNA, 19 nt, Artificial Sequence
  Description of Artificial Sequence: Synthetic oligonucleotide
  Sense strand starting at position 487 of SEQ ID NO: 1562206
gugaaaggucaugacuuug

SEQ ID NO: 1730076 - RNA, 19 nt, Artificial Sequence
  Description of Artificial Sequence: Synthetic oligonucleotide
  Antisense strand to SEQ ID NO: 1730075
caaagucaugaccuuucac

SEQ ID NO: 1730077 - RNA, 19 nt, Artificial Sequence
  Description of Artificial Sequence: Synthetic oligonucleotide
  Sense strand starting at position 495 of SEQ ID NO: 1562206
ucaugacuuuggcuuggua

SEQ ID NO: 1730078 - RNA, 19 nt, Artificial Sequence
  Description of Artificial Sequence: Synthetic oligonucleotide
  Antisense strand to SEQ ID NO: 1730077
uaccaagccaaagucauga

SEQ ID NO: 1730079 - RNA, 19 nt, Artificial Sequence
  Description of Artificial Sequence: Synthetic oligonucleotide
  Sense strand starting at position 497 of SEQ ID NO: 1562206
augacuuuggcuugguaag

SEQ ID NO: 1730080 - RNA, 19 nt, Artificial Sequence
  Description of Artificial Sequence: Synthetic oligonucleotide
  Antisense strand to SEQ ID NO: 1730079
cuuaccaagccaaagucau

SEQ ID NO: 1730081 - RNA, 19 nt, Artificial Sequence
  Description of Artificial Sequence: Synthetic oligonucleotide
  Sense strand starting at position 498 of SEQ ID NO: 1562206
ugacuuuggcuugguaaga

SEQ ID NO: 1730082 - RNA, 19 nt, Artificial Sequence
  Description of Artificial Sequence: Synthetic oligonucleotide
  Antisense strand to SEQ ID NO: 1730081
ucuuaccaagccaaaguca

SEQ ID NO: 1730083 - RNA, 19 nt, Artificial Sequence
  Description of Artificial Sequence: Synthetic oligonucleotide
  Sense strand starting at position 499 of SEQ ID NO: 1562206
gacuuuggcuugguaagaa

SEQ ID NO: 1730084 - RNA, 19 nt, Artificial Sequence
  Description of Artificial Sequence: Synthetic oligonucleotide
  Antisense strand to SEQ ID NO: 1730083
uucuuaccaagccaaaguc

SEQ ID NO: 1730085 - RNA, 19 nt, Artificial Sequence
  Description of Artificial Sequence: Synthetic oligonucleotide
  Sense strand starting at position 525 of SEQ ID NO: 1562206
aggaguggcuguagucaga

SEQ ID NO: 1730086 - RNA, 19 nt, Artificial Sequence
  Description of Artificial Sequence: Synthetic oligonucleotide
  Antisense strand to SEQ ID NO: 1730085
ucugacuacagccacuccu

SEQ ID NO: 1730087 - RNA, 19 nt, Artificial Sequence
  Description of Artificial Sequence: Synthetic oligonucleotide
  Sense strand starting at position 528 of SEQ ID NO: 1562206
aguggcuguagucagauau

SEQ ID NO: 1730088 - RNA, 19 nt, Artificial Sequence
  Description of Artificial Sequence: Synthetic oligonucleotide
  Antisense strand to SEQ ID NO: 1730087
auaucugacuacagccacu

SEQ ID NO: 1730089 - RNA, 19 nt, Artificial Sequence
  Description of Artificial Sequence: Synthetic oligonucleotide
  Sense strand starting at position 539 of SEQ ID NO: 1562206
ucagauauuccuggguucu

SEQ ID NO: 1730090 - RNA, 19 nt, Artificial Sequence
  Description of Artificial Sequence: Synthetic oligonucleotide
  Antisense strand to SEQ ID NO: 1730089
agaacccaggaauaucuga

SEQ ID NO: 1730091 - RNA, 19 nt, Artificial Sequence
  Description of Artificial Sequence: Synthetic oligonucleotide
  Sense strand starting at position 540 of SEQ ID NO: 1562206
cagauauuccuggguucua

SEQ ID NO: 1730092 - RNA, 19 nt, Artificial Sequence
  Description of Artificial Sequence: Synthetic oligonucleotide
  Antisense strand to SEQ ID NO: 1730091
uagaacccaggaauaucug

SEQ ID NO: 1730093 - RNA, 19 nt, Artificial Sequence
  Description of Artificial Sequence: Synthetic oligonucleotide
  Sense strand starting at position 541 of SEQ ID NO: 1562206
agauauuccuggguucuaa

SEQ ID NO: 1730094 - RNA, 19 nt, Artificial Sequence
  Description of Artificial Sequence: Synthetic oligonucleotide
  Antisense strand to SEQ ID NO: 1730093
uuagaacccaggaauaucu

SEQ ID NO: 1730095 - RNA, 19 nt, Artificial Sequence
  Description of Artificial Sequence: Synthetic oligonucleotide
  Sense strand starting at position 597 of SEQ ID NO: 1562206
ggucaaguuccucaagcuu

SEQ ID NO: 1730096 - RNA, 19 nt, Artificial Sequence
  Description of Artificial Sequence: Synthetic oligonucleotide
  Antisense strand to SEQ ID NO: 1730095
aagcuugaggaacuugacc

SEQ ID NO: 1730097 - RNA, 19 nt, Artificial Sequence
  Description of Artificial Sequence: Synthetic oligonucleotide
  Sense strand starting at position 619 of SEQ ID NO: 1562206
gagccucaguuccuguaaa

SEQ ID NO: 1730098 - RNA, 19 nt, Artificial Sequence
  Description of Artificial Sequence: Synthetic oligonucleotide
  Antisense strand to SEQ ID NO: 1730097
uuuacaggaacugaggcuc

SEQ ID NO: 1730099 - RNA, 19 nt, Artificial Sequence
  Description of Artificial Sequence: Synthetic oligonucleotide
  Sense strand starting at position 1040 of SEQ ID NO: 1562206
ugcgguaacugagucuaua

SEQ ID NO: 1730100 - RNA, 19 nt, Artificial Sequence
  Description of Artificial Sequence: Synthetic oligonucleotide
  Antisense strand to SEQ ID NO: 1730099
uauagacucaguuaccgca

SEQ ID NO: 1730101 - RNA, 19 nt, Artificial Sequence
  Description of Artificial Sequence: Synthetic oligonucleotide
  Sense strand starting at position 1043 of SEQ ID NO: 1562206
gguaacugagucuauacau

SEQ ID NO: 1730102 - RNA, 19 nt, Artificial Sequence
  Description of Artificial Sequence: Synthetic oligonucleotide
  Antisense strand to SEQ ID NO: 1730101
auguauagacucaguuacc

SEQ ID NO: 1730103 - RNA, 19 nt, Artificial Sequence
  Description of Artificial Sequence: Synthetic oligonucleotide
  Sense strand starting at position 1093 of SEQ ID NO: 1562206
agaauagaaucugugaugu

SEQ ID NO: 1730104 - RNA, 19 nt, Artificial Sequence
  Description of Artificial Sequence: Synthetic oligonucleotide
  Antisense strand to SEQ ID NO: 1730103
acaucacagauucuauucu

SEQ ID NO: 1730105 - RNA, 19 nt, Artificial Sequence
  Description of Artificial Sequence: Synthetic oligonucleotide
  Sense strand starting at position 1099 of SEQ ID NO: 1562206
gaaucugugauguggaaug

SEQ ID NO: 1730106 - RNA, 19 nt, Artificial Sequence
  Description of Artificial Sequence: Synthetic oligonucleotide
  Antisense strand to SEQ ID NO: 1730105
cauuccacaucacagauuc

SEQ ID NO: 1730107 - RNA, 19 nt, Artificial Sequence
  Description of Artificial Sequence: Synthetic oligonucleotide
  Sense strand starting at position 1353 of SEQ ID NO: 1562206
ggguguccgagucagaagu

SEQ ID NO: 1730108 - RNA, 19 nt, Artificial Sequence
  Description of Artificial Sequence: Synthetic oligonucleotide
  Antisense strand to SEQ ID NO: 1730107
acuucugacucggacaccc

SEQ ID NO: 1730109 - RNA, 19 nt, Artificial Sequence
  Description of Artificial Sequence: Synthetic oligonucleotide
  Sense strand starting at position 1354 of SEQ ID NO: 1562206
gguguccgagucagaaguu

SEQ ID NO: 1730110 - RNA, 19 nt, Artificial Sequence
  Description of Artificial Sequence: Synthetic oligonucleotide
  Antisense strand to SEQ ID NO: 1730109
aacuucugacucggacacc

SEQ ID NO: 1730111 - RNA, 19 nt, Artificial Sequence
  Description of Artificial Sequence: Synthetic oligonucleotide
  Sense strand starting at position 3201 of SEQ ID NO: 1562206
ggacuuaagagcugacucu

SEQ ID NO: 1730112 - RNA, 19 nt, Artificial Sequence
  Description of Artificial Sequence: Synthetic oligonucleotide
  Antisense strand to SEQ ID NO: 1730111
agagucagcucuuaagucc

SEQ ID NO: 1730113 - RNA, 19 nt, Artificial Sequence
  Description of Artificial Sequence: Synthetic oligonucleotide
  Sense strand starting at position 3210 of SEQ ID NO: 1562206
agcugacucugggcucaaa

SEQ ID NO: 1730114 - RNA, 19 nt, Artificial Sequence
  Description of Artificial Sequence: Synthetic oligonucleotide
  Antisense strand to SEQ ID NO: 1730113
uuugagcccagagucagcu

SEQ ID NO: 1730115 - RNA, 19 nt, Artificial Sequence
  Description of Artificial Sequence: Synthetic oligonucleotide
  Sense strand starting at position 3429 of SEQ ID NO: 1562206
gcucauaauugcgcucacu

SEQ ID NO: 1730116 - RNA, 19 nt, Artificial Sequence
  Description of Artificial Sequence: Synthetic oligonucleotide
  Antisense strand to SEQ ID NO: 1730115
agugagcgcaauuaugagc

SEQ ID NO: 1730117 - RNA, 19 nt, Artificial Sequence
  Description of Artificial Sequence: Synthetic oligonucleotide
  Sense strand starting at position 3484 of SEQ ID NO: 1562206
guguaagacgcuuagaaca

SEQ ID NO: 1730118 - RNA, 19 nt, Artificial Sequence
  Description of Artificial Sequence: Synthetic oligonucleotide
  Antisense strand to SEQ ID NO: 1730117
uguucuaagcgucuuacac

SEQ ID NO: 1730119 - RNA, 19 nt, Artificial Sequence
  Description of Artificial Sequence: Synthetic oligonucleotide
  Sense strand starting at position 3524 of SEQ ID NO: 1562206
cucaguggaguguaaacaa

SEQ ID NO: 1730120 - RNA, 19 nt, Artificial Sequence
  Description of Artificial Sequence: Synthetic oligonucleotide
  Antisense strand to SEQ ID NO: 1730119
uuguuuacacuccacugag

SEQ ID NO: 1730121 - RNA, 19 nt, Artificial Sequence
  Description of Artificial Sequence: Synthetic oligonucleotide
  Sense strand starting at position 3679 of SEQ ID NO: 1562206
ggcagaguuucacucguug

SEQ ID NO: 1730122 - RNA, 19 nt, Artificial Sequence
  Description of Artificial Sequence: Synthetic oligonucleotide
  Antisense strand to SEQ ID NO: 1730121
caacgagugaaacucugcc

SEQ ID NO: 1730123 - RNA, 19 nt, Artificial Sequence
  Description of Artificial Sequence: Synthetic oligonucleotide
  Sense strand starting at position 3688 of SEQ ID NO: 1562206
ucacucguugcccaggauu

SEQ ID NO: 1730124 - RNA, 19 nt, Artificial Sequence
  Description of Artificial Sequence: Synthetic oligonucleotide
  Antisense strand to SEQ ID NO: 1730123
aauccugggcaacgaguga

SEQ ID NO: 1730125 - RNA, 19 nt, Artificial Sequence
  Description of Artificial Sequence: Synthetic oligonucleotide
  Sense strand starting at position 3690 of SEQ ID NO: 1562206
acucguugcccaggauuga

SEQ ID NO: 1730126 - RNA, 19 nt, Artificial Sequence
  Description of Artificial Sequence: Synthetic oligonucleotide
  Antisense strand to SEQ ID NO: 1730125
ucaauccugggcaacgagu

SEQ ID NO: 1730127 - RNA, 19 nt, Artificial Sequence
  Description of Artificial Sequence: Synthetic oligonucleotide
  Sense strand starting at position 3 of SEQ ID NO: 1562207
cagggcugguuacauaaau

SEQ ID NO: 1730128 - RNA, 19 nt, Artificial Sequence
  Description of Artificial Sequence: Synthetic oligonucleotide
  Antisense strand to SEQ ID NO: 1730127
auuuauguaaccagcccug

SEQ ID NO: 1730129 - RNA, 19 nt, Artificial Sequence
  Description of Artificial Sequence: Synthetic oligonucleotide
  Sense strand starting at position 65 of SEQ ID NO: 1562207
gguugaggaugcucuuuau

SEQ ID NO: 1730130 - RNA, 19 nt, Artificial Sequence
  Description of Artificial Sequence: Synthetic oligonucleotide
  Antisense strand to SEQ ID NO: 1730129
auaaagagcauccucaacc

SEQ ID NO: 1730131 - RNA, 19 nt, Artificial Sequence
  Description of Artificial Sequence: Synthetic oligonucleotide
  Sense strand starting at position 68 of SEQ ID NO: 1562207
ugaggaugcucuuuauagg

SEQ ID NO: 1730132 - RNA, 19 nt, Artificial Sequence
  Description of Artificial Sequence: Synthetic oligonucleotide
  Antisense strand to SEQ ID NO: 1730131
ccuauaaagagcauccuca

SEQ ID NO: 1730133 - RNA, 19 nt, Artificial Sequence
  Description of Artificial Sequence: Synthetic oligonucleotide
  Sense strand starting at position 71 of SEQ ID NO: 1562207
ggaugcucuuuauagggua

SEQ ID NO: 1730134 - RNA, 19 nt, Artificial Sequence
  Description of Artificial Sequence: Synthetic oligonucleotide
  Antisense strand to SEQ ID NO: 1730133
uacccuauaaagagcaucc

SEQ ID NO: 1730135 - RNA, 19 nt, Artificial Sequence
  Description of Artificial Sequence: Synthetic oligonucleotide
  Sense strand starting at position 85 of SEQ ID NO: 1562207
ggguaauuggaaggaucuc

SEQ ID NO: 1730136 - RNA, 19 nt, Artificial Sequence
  Description of Artificial Sequence: Synthetic oligonucleotide
  Antisense strand to SEQ ID NO: 1730135
gagauccuuccaauuaccc

SEQ ID NO: 1730137 - RNA, 19 nt, Artificial Sequence
  Description of Artificial Sequence: Synthetic oligonucleotide
  Sense strand starting at position 91 of SEQ ID NO: 1562207
uuggaaggaucuccagagu

SEQ ID NO: 1730138 - RNA, 19 nt, Artificial Sequence
  Description of Artificial Sequence: Synthetic oligonucleotide
  Antisense strand to SEQ ID NO: 1730137
acucuggagauccuuccaa

SEQ ID NO: 1730139 - RNA, 19 nt, Artificial Sequence
  Description of Artificial Sequence: Synthetic oligonucleotide
  Sense strand starting at position 102 of SEQ ID NO: 1562207
uccagagugaacuguuaag

SEQ ID NO: 1730140 - RNA, 19 nt, Artificial Sequence
  Description of Artificial Sequence: Synthetic oligonucleotide
  Antisense strand to SEQ ID NO: 1730139
cuuaacaguucacucugga

SEQ ID NO: 1730141 - RNA, 19 nt, Artificial Sequence
  Description of Artificial Sequence: Synthetic oligonucleotide
  Sense strand starting at position 159 of SEQ ID NO: 1562207
gugugugguggcugaagga

SEQ ID NO: 1730142 - RNA, 19 nt, Artificial Sequence
  Description of Artificial Sequence: Synthetic oligonucleotide
  Antisense strand to SEQ ID NO: 1730141
uccuucagccaccacacac

SEQ ID NO: 1730143 - RNA, 19 nt, Artificial Sequence
  Description of Artificial Sequence: Synthetic oligonucleotide
  Sense strand starting at position 207 of SEQ ID NO: 1562207
ggguucucucuagaaccca

SEQ ID NO: 1730144 - RNA, 19 nt, Artificial Sequence
  Description of Artificial Sequence: Synthetic oligonucleotide
  Antisense strand to SEQ ID NO: 1730143
uggguucuagagagaaccc

SEQ ID NO: 1730145 - RNA, 19 nt, Artificial Sequence
  Description of Artificial Sequence: Synthetic oligonucleotide
  Sense strand starting at position 274 of SEQ ID NO: 1562207
ugggcauuggugcgagaga

SEQ ID NO: 1730146 - RNA, 19 nt, Artificial Sequence
  Description of Artificial Sequence: Synthetic oligonucleotide
  Antisense strand to SEQ ID NO: 1730145
ucucucgcaccaaugccca

SEQ ID NO: 1730147 - RNA, 19 nt, Artificial Sequence
  Description of Artificial Sequence: Synthetic oligonucleotide
  Sense strand starting at position 290 of SEQ ID NO: 1562207
agaccucagccugguuaaa

SEQ ID NO: 1730148 - RNA, 19 nt, Artificial Sequence
  Description of Artificial Sequence: Synthetic oligonucleotide
  Antisense strand to SEQ ID NO: 1730147
uuuaaccaggcugaggucu

SEQ ID NO: 1730149 - RNA, 19 nt, Artificial Sequence
  Description of Artificial Sequence: Synthetic oligonucleotide
  Sense strand starting at position 292 of SEQ ID NO: 1562207
accucagccugguuaaaga

SEQ ID NO: 1730150 - RNA, 19 nt, Artificial Sequence
  Description of Artificial Sequence: Synthetic oligonucleotide
  Antisense strand to SEQ ID NO: 1730149
ucuuuaaccaggcugaggu

SEQ ID NO: 1730151 - RNA, 19 nt, Artificial Sequence
  Description of Artificial Sequence: Synthetic oligonucleotide
  Sense strand starting at position 348 of SEQ ID NO: 1562207
augagucaguuaccagaca

SEQ ID NO: 1730152 - RNA, 19 nt, Artificial Sequence
  Description of Artificial Sequence: Synthetic oligonucleotide
  Antisense strand to SEQ ID NO: 1730151
ugucugguaacugacucau

SEQ ID NO: 1730153 - RNA, 19 nt, Artificial Sequence
  Description of Artificial Sequence: Synthetic oligonucleotide
  Sense strand starting at position 439 of SEQ ID NO: 1562207
gugaaaggucaugacuuug

SEQ ID NO: 1730154 - RNA, 19 nt, Artificial Sequence
  Description of Artificial Sequence: Synthetic oligonucleotide
  Antisense strand to SEQ ID NO: 1730153
caaagucaugaccuuucac

SEQ ID NO: 1730155 - RNA, 19 nt, Artificial Sequence
  Description of Artificial Sequence: Synthetic oligonucleotide
  Sense strand starting at position 447 of SEQ ID NO: 1562207
ucaugacuuuggcuuggua

SEQ ID NO: 1730156 - RNA, 19 nt, Artificial Sequence
  Description of Artificial Sequence: Synthetic oligonucleotide
  Antisense strand to SEQ ID NO: 1730155
uaccaagccaaagucauga

SEQ ID NO: 1730157 - RNA, 19 nt, Artificial Sequence
  Description of Artificial Sequence: Synthetic oligonucleotide
  Sense strand starting at position 449 of SEQ ID NO: 1562207
augacuuuggcuugguaag

SEQ ID NO: 1730158 - RNA, 19 nt, Artificial Sequence
  Description of Artificial Sequence: Synthetic oligonucleotide
  Antisense strand to SEQ ID NO: 1730157
cuuaccaagccaaagucau

SEQ ID NO: 1730159 - RNA, 19 nt, Artificial Sequence
  Description of Artificial Sequence: Synthetic oligonucleotide
  Sense strand starting at position 450 of SEQ ID NO: 1562207
ugacuuuggcuugguaaga

SEQ ID NO: 1730160 - RNA, 19 nt, Artificial Sequence
  Description of Artificial Sequence: Synthetic oligonucleotide
  Antisense strand to SEQ ID NO: 1730159
ucuuaccaagccaaaguca

SEQ ID NO: 1730161 - RNA, 19 nt, Artificial Sequence
  Description of Artificial Sequence: Synthetic oligonucleotide
  Sense strand starting at position 451 of SEQ ID NO: 1562207
gacuuuggcuugguaagaa

SEQ ID NO: 1730162 - RNA, 19 nt, Artificial Sequence
  Description of Artificial Sequence: Synthetic oligonucleotide
  Antisense strand to SEQ ID NO: 1730161
uucuuaccaagccaaaguc

SEQ ID NO: 1730163 - RNA, 19 nt, Artificial Sequence
  Description of Artificial Sequence: Synthetic oligonucleotide
  Sense strand starting at position 477 of SEQ ID NO: 1562207
aggaguggcuguagucaga

SEQ ID NO: 1730164 - RNA, 19 nt, Artificial Sequence
  Description of Artificial Sequence: Synthetic oligonucleotide
  Antisense strand to SEQ ID NO: 1730163
ucugacuacagccacuccu

SEQ ID NO: 1730165 - RNA, 19 nt, Artificial Sequence
  Description of Artificial Sequence: Synthetic oligonucleotide
  Sense strand starting at position 480 of SEQ ID NO: 1562207
aguggcuguagucagauau

SEQ ID NO: 1730166 - RNA, 19 nt, Artificial Sequence
  Description of Artificial Sequence: Synthetic oligonucleotide
  Antisense strand to SEQ ID NO: 1730165
auaucugacuacagccacu

SEQ ID NO: 1730167 - RNA, 19 nt, Artificial Sequence
  Description of Artificial Sequence: Synthetic oligonucleotide
  Sense strand starting at position 491 of SEQ ID NO: 1562207
ucagauauuccuggguucu

SEQ ID NO: 1730168 - RNA, 19 nt, Artificial Sequence
  Description of Artificial Sequence: Synthetic oligonucleotide
  Antisense strand to SEQ ID NO: 1730167
agaacccaggaauaucuga

SEQ ID NO: 1730169 - RNA, 19 nt, Artificial Sequence
  Description of Artificial Sequence: Synthetic oligonucleotide
  Sense strand starting at position 492 of SEQ ID NO: 1562207
cagauauuccuggguucua

SEQ ID NO: 1730170 - RNA, 19 nt, Artificial Sequence
  Description of Artificial Sequence: Synthetic oligonucleotide
  Antisense strand to SEQ ID NO: 1730169
uagaacccaggaauaucug

SEQ ID NO: 1730171 - RNA, 19 nt, Artificial Sequence
  Description of Artificial Sequence: Synthetic oligonucleotide
  Sense strand starting at position 493 of SEQ ID NO: 1562207
agauauuccuggguucuaa

SEQ ID NO: 1730172 - RNA, 19 nt, Artificial Sequence
  Description of Artificial Sequence: Synthetic oligonucleotide
  Antisense strand to SEQ ID NO: 1730171
uuagaacccaggaauaucu

SEQ ID NO: 1730173 - RNA, 19 nt, Artificial Sequence
  Description of Artificial Sequence: Synthetic oligonucleotide
  Sense strand starting at position 549 of SEQ ID NO: 1562207
ggucaaguuccucaagcuu

SEQ ID NO: 1730174 - RNA, 19 nt, Artificial Sequence
  Description of Artificial Sequence: Synthetic oligonucleotide
  Antisense strand to SEQ ID NO: 1730173
aagcuugaggaacuugacc

SEQ ID NO: 1730175 - RNA, 19 nt, Artificial Sequence
  Description of Artificial Sequence: Synthetic oligonucleotide
  Sense strand starting at position 571 of SEQ ID NO: 1562207
gagccucaguuccuguaaa

SEQ ID NO: 1730176 - RNA, 19 nt, Artificial Sequence
  Description of Artificial Sequence: Synthetic oligonucleotide
  Antisense strand to SEQ ID NO: 1730175
uuuacaggaacugaggcuc

SEQ ID NO: 1730177 - RNA, 19 nt, Artificial Sequence
  Description of Artificial Sequence: Synthetic oligonucleotide
  Sense strand starting at position 992 of SEQ ID NO: 1562207
ugcgguaacugagucuaua

SEQ ID NO: 1730178 - RNA, 19 nt, Artificial Sequence
  Description of Artificial Sequence: Synthetic oligonucleotide
  Antisense strand to SEQ ID NO: 1730177
uauagacucaguuaccgca

SEQ ID NO: 1730179 - RNA, 19 nt, Artificial Sequence
  Description of Artificial Sequence: Synthetic oligonucleotide
  Sense strand starting at position 995 of SEQ ID NO: 1562207
gguaacugagucuauacau

SEQ ID NO: 1730180 - RNA, 19 nt, Artificial Sequence
  Description of Artificial Sequence: Synthetic oligonucleotide
  Antisense strand to SEQ ID NO: 1730179
auguauagacucaguuacc

SEQ ID NO: 1730181 - RNA, 19 nt, Artificial Sequence
  Description of Artificial Sequence: Synthetic oligonucleotide
  Sense strand starting at position 1045 of SEQ ID NO: 1562207
agaauagaaucugugaugu

SEQ ID NO: 1730182 - RNA, 19 nt, Artificial Sequence
  Description of Artificial Sequence: Synthetic oligonucleotide
  Antisense strand to SEQ ID NO: 1730181
acaucacagauucuauucu

SEQ ID NO: 1730183 - RNA, 19 nt, Artificial Sequence
  Description of Artificial Sequence: Synthetic oligonucleotide
  Sense strand starting at position 1049 of SEQ ID NO: 1562207
uagaaucugugauguggaa

SEQ ID NO: 1730184 - RNA, 19 nt, Artificial Sequence
  Description of Artificial Sequence: Synthetic oligonucleotide
  Antisense strand to SEQ ID NO: 1730183
uuccacaucacagauucua

SEQ ID NO: 1730185 - RNA, 19 nt, Artificial Sequence
  Description of Artificial Sequence: Synthetic oligonucleotide
  Sense strand starting at position 1051 of SEQ ID NO: 1562207
gaaucugugauguggaaug

SEQ ID NO: 1730186 - RNA, 19 nt, Artificial Sequence
  Description of Artificial Sequence: Synthetic oligonucleotide
  Antisense strand to SEQ ID NO: 1730185
cauuccacaucacagauuc

SEQ ID NO: 1730187 - RNA, 19 nt, Artificial Sequence
  Description of Artificial Sequence: Synthetic oligonucleotide
  Sense strand starting at position 1305 of SEQ ID NO: 1562207
ggguguccgagucagaagu

SEQ ID NO: 1730188 - RNA, 19 nt, Artificial Sequence
  Description of Artificial Sequence: Synthetic oligonucleotide
  Antisense strand to SEQ ID NO: 1730187
acuucugacucggacaccc

SEQ ID NO: 1730189 - RNA, 19 nt, Artificial Sequence
  Description of Artificial Sequence: Synthetic oligonucleotide
  Sense strand starting at position 1306 of SEQ ID NO: 1562207
gguguccgagucagaaguu

SEQ ID NO: 1730190 - RNA, 19 nt, Artificial Sequence
  Description of Artificial Sequence: Synthetic oligonucleotide
  Antisense strand to SEQ ID NO: 1730189
aacuucugacucggacacc

SEQ ID NO: 1730191 - RNA, 19 nt, Artificial Sequence
  Description of Artificial Sequence: Synthetic oligonucleotide
  Sense strand starting at position 3153 of SEQ ID NO: 1562207
ggacuuaagagcugacucu

SEQ ID NO: 1730192 - RNA, 19 nt, Artificial Sequence
  Description of Artificial Sequence: Synthetic oligonucleotide
  Antisense strand to SEQ ID NO: 1730191
agagucagcucuuaagucc

SEQ ID NO: 1730193 - RNA, 19 nt, Artificial Sequence
  Description of Artificial Sequence: Synthetic oligonucleotide
  Sense strand starting at position 3162 of SEQ ID NO: 1562207
agcugacucugggcucaaa

SEQ ID NO: 1730194 - RNA, 19 nt, Artificial Sequence
  Description of Artificial Sequence: Synthetic oligonucleotide
  Antisense strand to SEQ ID NO: 1730193
uuugagcccagagucagcu

SEQ ID NO: 1730195 - RNA, 19 nt, Artificial Sequence
  Description of Artificial Sequence: Synthetic oligonucleotide
  Sense strand starting at position 3381 of SEQ ID NO: 1562207
gcucauaauugcgcucacu

SEQ ID NO: 1730196 - RNA, 19 nt, Artificial Sequence
  Description of Artificial Sequence: Synthetic oligonucleotide
  Antisense strand to SEQ ID NO: 1730195
agugagcgcaauuaugagc

SEQ ID NO: 1730197 - RNA, 19 nt, Artificial Sequence
  Description of Artificial Sequence: Synthetic oligonucleotide
  Sense strand starting at position 3436 of SEQ ID NO: 1562207
guguaagacgcuuagaaca

SEQ ID NO: 1730198 - RNA, 19 nt, Artificial Sequence
  Description of Artificial Sequence: Synthetic oligonucleotide
  Antisense strand to SEQ ID NO: 1730197
uguucuaagcgucuuacac

SEQ ID NO: 1730199 - RNA, 19 nt, Artificial Sequence
  Description of Artificial Sequence: Synthetic oligonucleotide
  Sense strand starting at position 3476 of SEQ ID NO: 1562207
cucaguggaguguaaacaa

SEQ ID NO: 1730200 - RNA, 19 nt, Artificial Sequence
  Description of Artificial Sequence: Synthetic oligonucleotide
  Antisense strand to SEQ ID NO: 1730199
uuguuuacacuccacugag

SEQ ID NO: 1730201 - RNA, 19 nt, Artificial Sequence
  Description of Artificial Sequence: Synthetic oligonucleotide
  Sense strand starting at position 3631 of SEQ ID NO: 1562207
ggcagaguuucacucguug

SEQ ID NO: 1730202 - RNA, 19 nt, Artificial Sequence
  Description of Artificial Sequence: Synthetic oligonucleotide
  Antisense strand to SEQ ID NO: 1730201
caacgagugaaacucugcc

SEQ ID NO: 1730203 - RNA, 19 nt, Artificial Sequence
  Description of Artificial Sequence: Synthetic oligonucleotide
  Sense strand starting at position 3640 of SEQ ID NO: 1562207
ucacucguugcccaggauu

SEQ ID NO: 1730204 - RNA, 19 nt, Artificial Sequence
  Description of Artificial Sequence: Synthetic oligonucleotide
  Antisense strand to SEQ ID NO: 1730203
aauccugggcaacgaguga

SEQ ID NO: 1730205 - RNA, 19 nt, Artificial Sequence
  Description of Artificial Sequence: Synthetic oligonucleotide
  Sense strand starting at position 3642 of SEQ ID NO: 1562207
acucguugcccaggauuga

SEQ ID NO: 1730206 - RNA, 19 nt, Artificial Sequence
  Description of Artificial Sequence: Synthetic oligonucleotide
  Antisense strand to SEQ ID NO: 1730205
ucaauccugggcaacgagu

SEQ ID NO: 1730207 - RNA, 19 nt, Artificial Sequence
  Description of Artificial Sequence: Synthetic oligonucleotide
  Sense strand starting at position 326 of SEQ ID NO: 1562208
ugcgguaacugagucuaua

SEQ ID NO: 1730208 - RNA, 19 nt, Artificial Sequence
  Description of Artificial Sequence: Synthetic oligonucleotide
  Antisense strand to SEQ ID NO: 1730207
uauagacucaguuaccgca

SEQ ID NO: 1730209 - RNA, 19 nt, Artificial Sequence
  Description of Artificial Sequence: Synthetic oligonucleotide
  Sense strand starting at position 329 of SEQ ID NO: 1562208
gguaacugagucuauacau

SEQ ID NO: 1730210 - RNA, 19 nt, Artificial Sequence
  Description of Artificial Sequence: Synthetic oligonucleotide
  Antisense strand to SEQ ID NO: 1730209
auguauagacucaguuacc

SEQ ID NO: 1730211 - RNA, 19 nt, Artificial Sequence
  Description of Artificial Sequence: Synthetic oligonucleotide
  Sense strand starting at position 338 of SEQ ID NO: 1562208
gucuauacaucuugggcaa

SEQ ID NO: 1730212 - RNA, 19 nt, Artificial Sequence
  Description of Artificial Sequence: Synthetic oligonucleotide
  Antisense strand to SEQ ID NO: 1730211
uugcccaagauguauagac

SEQ ID NO: 1730213 - RNA, 19 nt, Artificial Sequence
  Description of Artificial Sequence: Synthetic oligonucleotide
  Sense strand starting at position 379 of SEQ ID NO: 1562208
agaauagaaucugugaugu

SEQ ID NO: 1730214 - RNA, 19 nt, Artificial Sequence
  Description of Artificial Sequence: Synthetic oligonucleotide
  Antisense strand to SEQ ID NO: 1730213
acaucacagauucuauucu

SEQ ID NO: 1730215 - RNA, 19 nt, Artificial Sequence
  Description of Artificial Sequence: Synthetic oligonucleotide
  Sense strand starting at position 383 of SEQ ID NO: 1562208
uagaaucugugauguggaa

SEQ ID NO: 1730216 - RNA, 19 nt, Artificial Sequence
  Description of Artificial Sequence: Synthetic oligonucleotide
  Antisense strand to SEQ ID NO: 1730215
uuccacaucacagauucua

SEQ ID NO: 1730217 - RNA, 19 nt, Artificial Sequence
  Description of Artificial Sequence: Synthetic oligonucleotide
  Sense strand starting at position 385 of SEQ ID NO: 1562208
gaaucugugauguggaaug

SEQ ID NO: 1730218 - RNA, 19 nt, Artificial Sequence
  Description of Artificial Sequence: Synthetic oligonucleotide
  Antisense strand to SEQ ID NO: 1730217
cauuccacaucacagauuc

SEQ ID NO: 1730219 - RNA, 19 nt, Artificial Sequence
  Description of Artificial Sequence: Synthetic oligonucleotide
  Sense strand starting at position 639 of SEQ ID NO: 1562208
ggguguccgagucagaagu

SEQ ID NO: 1730220 - RNA, 19 nt, Artificial Sequence
  Description of Artificial Sequence: Synthetic oligonucleotide
  Antisense strand to SEQ ID NO: 1730219
acuucugacucggacaccc

SEQ ID NO: 1730221 - RNA, 19 nt, Artificial Sequence
  Description of Artificial Sequence: Synthetic oligonucleotide
  Sense strand starting at position 640 of SEQ ID NO: 1562208
gguguccgagucagaaguu

SEQ ID NO: 1730222 - RNA, 19 nt, Artificial Sequence
  Description of Artificial Sequence: Synthetic oligonucleotide
  Antisense strand to SEQ ID NO: 1730221
aacuucugacucggacacc

SEQ ID NO: 1730223 - RNA, 19 nt, Artificial Sequence
  Description of Artificial Sequence: Synthetic oligonucleotide
  Sense strand starting at position 641 of SEQ ID NO: 1562208
guguccgagucagaaguuu

SEQ ID NO: 1730224 - RNA, 19 nt, Artificial Sequence
  Description of Artificial Sequence: Synthetic oligonucleotide
  Antisense strand to SEQ ID NO: 1730223
aaacuucugacucggacac

SEQ ID NO: 1730225 - RNA, 19 nt, Artificial Sequence
  Description of Artificial Sequence: Synthetic oligonucleotide
  Sense strand starting at position 2455 of SEQ ID NO: 1562208
gcaagugguucagaagcuu

SEQ ID NO: 1730226 - RNA, 19 nt, Artificial Sequence
  Description of Artificial Sequence: Synthetic oligonucleotide
  Antisense strand to SEQ ID NO: 1730225
aagcuucugaaccacuugc

SEQ ID NO: 1730227 - RNA, 19 nt, Artificial Sequence
  Description of Artificial Sequence: Synthetic oligonucleotide
  Sense strand starting at position 2487 of SEQ ID NO: 1562208
ggacuuaagagcugacucu

SEQ ID NO: 1730228 - RNA, 19 nt, Artificial Sequence
  Description of Artificial Sequence: Synthetic oligonucleotide
  Antisense strand to SEQ ID NO: 1730227
agagucagcucuuaagucc

SEQ ID NO: 1730229 - RNA, 19 nt, Artificial Sequence
  Description of Artificial Sequence: Synthetic oligonucleotide
  Sense strand starting at position 2496 of SEQ ID NO: 1562208
agcugacucugggcucaaa

SEQ ID NO: 1730230 - RNA, 19 nt, Artificial Sequence
  Description of Artificial Sequence: Synthetic oligonucleotide
  Antisense strand to SEQ ID NO: 1730229
uuugagcccagagucagcu

SEQ ID NO: 1730231 - RNA, 19 nt, Artificial Sequence
  Description of Artificial Sequence: Synthetic oligonucleotide
  Sense strand starting at position 2715 of SEQ ID NO: 1562208
gcucauaauugcgcucacu

SEQ ID NO: 1730232 - RNA, 19 nt, Artificial Sequence
  Description of Artificial Sequence: Synthetic oligonucleotide
  Antisense strand to SEQ ID NO: 1730231
agugagcgcaauuaugagc

SEQ ID NO: 1730233 - RNA, 19 nt, Artificial Sequence
  Description of Artificial Sequence: Synthetic oligonucleotide
  Sense strand starting at position 2770 of SEQ ID NO: 1562208
guguaagacgcuuagaaca

SEQ ID NO: 1730234 - RNA, 19 nt, Artificial Sequence
  Description of Artificial Sequence: Synthetic oligonucleotide
  Antisense strand to SEQ ID NO: 1730233
uguucuaagcgucuuacac

SEQ ID NO: 1730235 - RNA, 19 nt, Artificial Sequence
  Description of Artificial Sequence: Synthetic oligonucleotide
  Sense strand starting at position 2772 of SEQ ID NO: 1562208
guaagacgcuuagaacagu

SEQ ID NO: 1730236 - RNA, 19 nt, Artificial Sequence
  Description of Artificial Sequence: Synthetic oligonucleotide
  Antisense strand to SEQ ID NO: 1730235
acuguucuaagcgucuuac

SEQ ID NO: 1730237 - RNA, 19 nt, Artificial Sequence
  Description of Artificial Sequence: Synthetic oligonucleotide
  Sense strand starting at position 2810 of SEQ ID NO: 1562208
cucaguggaguguaaacaa

SEQ ID NO: 1730238 - RNA, 19 nt, Artificial Sequence
  Description of Artificial Sequence: Synthetic oligonucleotide
  Antisense strand to SEQ ID NO: 1730237
uuguuuacacuccacugag

SEQ ID NO: 1730239 - RNA, 19 nt, Artificial Sequence
  Description of Artificial Sequence: Synthetic oligonucleotide
  Sense strand starting at position 2965 of SEQ ID NO: 1562208
ggcagaguuucacucguug

SEQ ID NO: 1730240 - RNA, 19 nt, Artificial Sequence
  Description of Artificial Sequence: Synthetic oligonucleotide
  Antisense strand to SEQ ID NO: 1730239
caacgagugaaacucugcc

SEQ ID NO: 1730241 - RNA, 19 nt, Artificial Sequence
  Description of Artificial Sequence: Synthetic oligonucleotide
  Sense strand starting at position 2974 of SEQ ID NO: 1562208
ucacucguugcccaggauu

SEQ ID NO: 1730242 - RNA, 19 nt, Artificial Sequence
  Description of Artificial Sequence: Synthetic oligonucleotide
  Antisense strand to SEQ ID NO: 1730241
aauccugggcaacgaguga

SEQ ID NO: 1730243 - RNA, 19 nt, Artificial Sequence
  Description of Artificial Sequence: Synthetic oligonucleotide
  Sense strand starting at position 2976 of SEQ ID NO: 1562208
acucguugcccaggauuga

SEQ ID NO: 1730244 - RNA, 19 nt, Artificial Sequence
  Description of Artificial Sequence: Synthetic oligonucleotide
  Antisense strand to SEQ ID NO: 1730243
ucaauccugggcaacgagu

SEQ ID NO: 1730245 - RNA, 19 nt, Artificial Sequence
  Description of Artificial Sequence: Synthetic oligonucleotide
  Sense strand starting at position 3388 of SEQ ID NO: 1562208
uugagaacagccuggauga

SEQ ID NO: 1730246 - RNA, 19 nt, Artificial Sequence
  Description of Artificial Sequence: Synthetic oligonucleotide
  Antisense strand to SEQ ID NO: 1730245
ucauccaggcuguucucaa

SEQ ID NO: 1730247 - RNA, 19 nt, Artificial Sequence
  Description of Artificial Sequence: Synthetic oligonucleotide
  Sense strand starting at position 3520 of SEQ ID NO: 1562208
ucagguuacagugaaacgu

SEQ ID NO: 1730248 - RNA, 19 nt, Artificial Sequence
  Description of Artificial Sequence: Synthetic oligonucleotide
  Antisense strand to SEQ ID NO: 1730247
acguuucacuguaaccuga

SEQ ID NO: 1730249 - RNA, 19 nt, Artificial Sequence
  Description of Artificial Sequence: Synthetic oligonucleotide
  Sense strand starting at position 3524 of SEQ ID NO: 1562208
guuacagugaaacgugauu

SEQ ID NO: 1730250 - RNA, 19 nt, Artificial Sequence
  Description of Artificial Sequence: Synthetic oligonucleotide
  Antisense strand to SEQ ID NO: 1730249
aaucacguuucacuguaac

SEQ ID NO: 1730251 - RNA, 19 nt, Artificial Sequence
  Description of Artificial Sequence: Synthetic oligonucleotide
  Sense strand starting at position 3526 of SEQ ID NO: 1562208
uacagugaaacgugauugu

SEQ ID NO: 1730252 - RNA, 19 nt, Artificial Sequence
  Description of Artificial Sequence: Synthetic oligonucleotide
  Antisense strand to SEQ ID NO: 1730251
acaaucacguuucacugua

SEQ ID NO: 1730253 - RNA, 19 nt, Artificial Sequence
  Description of Artificial Sequence: Synthetic oligonucleotide
  Sense strand starting at position 3530 of SEQ ID NO: 1562208
gugaaacgugauugugcca

SEQ ID NO: 1730254 - RNA, 19 nt, Artificial Sequence
  Description of Artificial Sequence: Synthetic oligonucleotide
  Antisense strand to SEQ ID NO: 1730253
uggcacaaucacguuucac

SEQ ID NO: 1730255 - RNA, 19 nt, Artificial Sequence
  Description of Artificial Sequence: Synthetic oligonucleotide
  Sense strand starting at position 3573 of SEQ ID NO: 1562208
gugagauccuguguaauaa

SEQ ID NO: 1730256 - RNA, 19 nt, Artificial Sequence
  Description of Artificial Sequence: Synthetic oligonucleotide
  Antisense strand to SEQ ID NO: 1730255
uuauuacacaggaucucac

SEQ ID NO: 1730257 - RNA, 19 nt, Artificial Sequence
  Description of Artificial Sequence: Synthetic oligonucleotide
  Sense strand starting at position 270 of SEQ ID NO: 1562209
cuugguuaucaccagcuua

SEQ ID NO: 1730258 - RNA, 19 nt, Artificial Sequence
  Description of Artificial Sequence: Synthetic oligonucleotide
  Antisense strand to SEQ ID NO: 1730257
uaagcuggugauaaccaag

SEQ ID NO: 1730259 - RNA, 19 nt, Artificial Sequence
  Description of Artificial Sequence: Synthetic oligonucleotide
  Sense strand starting at position 285 of SEQ ID NO: 1562209
cuuagugcucuggagacuu

SEQ ID NO: 1730260 - RNA, 19 nt, Artificial Sequence
  Description of Artificial Sequence: Synthetic oligonucleotide
  Antisense strand to SEQ ID NO: 1730259
aagucuccagagcacuaag

SEQ ID NO: 1730261 - RNA, 19 nt, Artificial Sequence
  Description of Artificial Sequence: Synthetic oligonucleotide
  Sense strand starting at position 296 of SEQ ID NO: 1562209
ggagacuuguuucuugacu

SEQ ID NO: 1730262 - RNA, 19 nt, Artificial Sequence
  Description of Artificial Sequence: Synthetic oligonucleotide
  Antisense strand to SEQ ID NO: 1730261
agucaagaaacaagucucc

SEQ ID NO: 1730263 - RNA, 19 nt, Artificial Sequence
  Description of Artificial Sequence: Synthetic oligonucleotide
  Sense strand starting at position 297 of SEQ ID NO: 1562209
gagacuuguuucuugacua

SEQ ID NO: 1730264 - RNA, 19 nt, Artificial Sequence
  Description of Artificial Sequence: Synthetic oligonucleotide
  Antisense strand to SEQ ID NO: 1730263
uagucaagaaacaagucuc

SEQ ID NO: 1730265 - RNA, 19 nt, Artificial Sequence
  Description of Artificial Sequence: Synthetic oligonucleotide
  Sense strand starting at position 346 of SEQ ID NO: 1562209
agucaacaguuugcuuaaa

SEQ ID NO: 1730266 - RNA, 19 nt, Artificial Sequence
  Description of Artificial Sequence: Synthetic oligonucleotide
  Antisense strand to SEQ ID NO: 1730265
uuuaagcaaacuguugacu

SEQ ID NO: 1730267 - RNA, 19 nt, Artificial Sequence
  Description of Artificial Sequence: Synthetic oligonucleotide
  Sense strand starting at position 356 of SEQ ID NO: 1562209
uugcuuaaaccaggaguaa

SEQ ID NO: 1730268 - RNA, 19 nt, Artificial Sequence
  Description of Artificial Sequence: Synthetic oligonucleotide
  Antisense strand to SEQ ID NO: 1730267
uuacuccugguuuaagcaa

SEQ ID NO: 1730269 - RNA, 19 nt, Artificial Sequence
  Description of Artificial Sequence: Synthetic oligonucleotide
  Sense strand starting at position 436 of SEQ ID NO: 1562209
gaaagcuguucuccugaca

SEQ ID NO: 1730270 - RNA, 19 nt, Artificial Sequence
  Description of Artificial Sequence: Synthetic oligonucleotide
  Antisense strand to SEQ ID NO: 1730269
ugucaggagaacagcuuuc

SEQ ID NO: 1730271 - RNA, 19 nt, Artificial Sequence
  Description of Artificial Sequence: Synthetic oligonucleotide
  Sense strand starting at position 439 of SEQ ID NO: 1562209
agcuguucuccugacauug

SEQ ID NO: 1730272 - RNA, 19 nt, Artificial Sequence
  Description of Artificial Sequence: Synthetic oligonucleotide
  Antisense strand to SEQ ID NO: 1730271
caaugucaggagaacagcu

SEQ ID NO: 1730273 - RNA, 19 nt, Artificial Sequence
  Description of Artificial Sequence: Synthetic oligonucleotide
  Sense strand starting at position 818 of SEQ ID NO: 1562209
gugguuguauuucucagau

SEQ ID NO: 1730274 - RNA, 19 nt, Artificial Sequence
  Description of Artificial Sequence: Synthetic oligonucleotide
  Antisense strand to SEQ ID NO: 1730273
aucugagaaauacaaccac

SEQ ID NO: 1730275 - RNA, 19 nt, Artificial Sequence
  Description of Artificial Sequence: Synthetic oligonucleotide
  Sense strand starting at position 820 of SEQ ID NO: 1562209
gguuguauuucucagauaa

SEQ ID NO: 1730276 - RNA, 19 nt, Artificial Sequence
  Description of Artificial Sequence: Synthetic oligonucleotide
  Antisense strand to SEQ ID NO: 1730275
uuaucugagaaauacaacc

SEQ ID NO: 1730277 - RNA, 19 nt, Artificial Sequence
  Description of Artificial Sequence: Synthetic oligonucleotide
  Sense strand starting at position 901 of SEQ ID NO: 1562209
ccagcccuuccagaaaguu

SEQ ID NO: 1730278 - RNA, 19 nt, Artificial Sequence
  Description of Artificial Sequence: Synthetic oligonucleotide
  Antisense strand to SEQ ID NO: 1730277
aacuuucuggaagggcugg

SEQ ID NO: 1730279 - RNA, 19 nt, Artificial Sequence
  Description of Artificial Sequence: Synthetic oligonucleotide
  Sense strand starting at position 998 of SEQ ID NO: 1562209
uucugaggccuugagcaaa

SEQ ID NO: 1730280 - RNA, 19 nt, Artificial Sequence
  Description of Artificial Sequence: Synthetic oligonucleotide
  Antisense strand to SEQ ID NO: 1730279
uuugcucaaggccucagaa

SEQ ID NO: 1730281 - RNA, 19 nt, Artificial Sequence
  Description of Artificial Sequence: Synthetic oligonucleotide
  Sense strand starting at position 1042 of SEQ ID NO: 1562209
uugaauccuuuggugagua

SEQ ID NO: 1730282 - RNA, 19 nt, Artificial Sequence
  Description of Artificial Sequence: Synthetic oligonucleotide
  Antisense strand to SEQ ID NO: 1730281
uacucaccaaaggauucaa

SEQ ID NO: 1730283 - RNA, 19 nt, Artificial Sequence
  Description of Artificial Sequence: Synthetic oligonucleotide
  Sense strand starting at position 1125 of SEQ ID NO: 1562209
uauccugcuuggguagaga

SEQ ID NO: 1730284 - RNA, 19 nt, Artificial Sequence
  Description of Artificial Sequence: Synthetic oligonucleotide
  Antisense strand to SEQ ID NO: 1730283
ucucuacccaagcaggaua

SEQ ID NO: 1730285 - RNA, 19 nt, Artificial Sequence
  Description of Artificial Sequence: Synthetic oligonucleotide
  Sense strand starting at position 1392 of SEQ ID NO: 1562209
gcacccuagggccaagaau

SEQ ID NO: 1730286 - RNA, 19 nt, Artificial Sequence
  Description of Artificial Sequence: Synthetic oligonucleotide
  Antisense strand to SEQ ID NO: 1730285
auucuuggcccuagggugc

SEQ ID NO: 1730287 - RNA, 19 nt, Artificial Sequence
  Description of Artificial Sequence: Synthetic oligonucleotide
  Sense strand starting at position 1520 of SEQ ID NO: 1562209
gauuaugagguucgaagac

SEQ ID NO: 1730288 - RNA, 19 nt, Artificial Sequence
  Description of Artificial Sequence: Synthetic oligonucleotide
  Antisense strand to SEQ ID NO: 1730287
gucuucgaaccucauaauc

SEQ ID NO: 1730289 - RNA, 19 nt, Artificial Sequence
  Description of Artificial Sequence: Synthetic oligonucleotide
  Sense strand starting at position 2039 of SEQ ID NO: 1562209
uggccaaacuccuugauug

SEQ ID NO: 1730290 - RNA, 19 nt, Artificial Sequence
  Description of Artificial Sequence: Synthetic oligonucleotide
  Antisense strand to SEQ ID NO: 1730289
caaucaaggaguuuggcca

SEQ ID NO: 1730291 - RNA, 19 nt, Artificial Sequence
  Description of Artificial Sequence: Synthetic oligonucleotide
  Sense strand starting at position 2597 of SEQ ID NO: 1562209
uauugucucguuugagaag

SEQ ID NO: 1730292 - RNA, 19 nt, Artificial Sequence
  Description of Artificial Sequence: Synthetic oligonucleotide
  Antisense strand to SEQ ID NO: 1730291
cuucucaaacgagacaaua

SEQ ID NO: 1730293 - RNA, 19 nt, Artificial Sequence
  Description of Artificial Sequence: Synthetic oligonucleotide
  Sense strand starting at position 2676 of SEQ ID NO: 1562209
cuguacugucgacaaacaa

SEQ ID NO: 1730294 - RNA, 19 nt, Artificial Sequence
  Description of Artificial Sequence: Synthetic oligonucleotide
  Antisense strand to SEQ ID NO: 1730293
uuguuugucgacaguacag

SEQ ID NO: 1730295 - RNA, 19 nt, Artificial Sequence
  Description of Artificial Sequence: Synthetic oligonucleotide
  Sense strand starting at position 2713 of SEQ ID NO: 1562209
ugcuuaauuucuuugagca

SEQ ID NO: 1730296 - RNA, 19 nt, Artificial Sequence
  Description of Artificial Sequence: Synthetic oligonucleotide
  Antisense strand to SEQ ID NO: 1730295
ugcucaaagaaauuaagca

SEQ ID NO: 1730297 - RNA, 19 nt, Artificial Sequence
  Description of Artificial Sequence: Synthetic oligonucleotide
  Sense strand starting at position 2714 of SEQ ID NO: 1562209
gcuuaauuucuuugagcau

SEQ ID NO: 1730298 - RNA, 19 nt, Artificial Sequence
  Description of Artificial Sequence: Synthetic oligonucleotide
  Antisense strand to SEQ ID NO: 1730297
augcucaaagaaauuaagc

SEQ ID NO: 1730299 - RNA, 19 nt, Artificial Sequence
  Description of Artificial Sequence: Synthetic oligonucleotide
  Sense strand starting at position 2743 of SEQ ID NO: 1562209
auguguaaugccuaauuau

SEQ ID NO: 1730300 - RNA, 19 nt, Artificial Sequence
  Description of Artificial Sequence: Synthetic oligonucleotide
  Antisense strand to SEQ ID NO: 1730299
auaauuaggcauuacacau

SEQ ID NO: 1730301 - RNA, 19 nt, Artificial Sequence
  Description of Artificial Sequence: Synthetic oligonucleotide
  Sense strand starting at position 2765 of SEQ ID NO: 1562209
agcccugucaugccguuaa

SEQ ID NO: 1730302 - RNA, 19 nt, Artificial Sequence
  Description of Artificial Sequence: Synthetic oligonucleotide
  Antisense strand to SEQ ID NO: 1730301
uuaacggcaugacagggcu

SEQ ID NO: 1730303 - RNA, 19 nt, Artificial Sequence
  Description of Artificial Sequence: Synthetic oligonucleotide
  Sense strand starting at position 2777 of SEQ ID NO: 1562209
ccguuaaaucgugaacuuu

SEQ ID NO: 1730304 - RNA, 19 nt, Artificial Sequence
  Description of Artificial Sequence: Synthetic oligonucleotide
  Antisense strand to SEQ ID NO: 1730303
aaaguucacgauuuaacgg

SEQ ID NO: 1730305 - RNA, 19 nt, Artificial Sequence
  Description of Artificial Sequence: Synthetic oligonucleotide
  Sense strand starting at position 2833 of SEQ ID NO: 1562209
aaguaaggauuuggguaga

SEQ ID NO: 1730306 - RNA, 19 nt, Artificial Sequence
  Description of Artificial Sequence: Synthetic oligonucleotide
  Antisense strand to SEQ ID NO: 1730305
ucuacccaaauccuuacuu

SEQ ID NO: 1730307 - RNA, 19 nt, Artificial Sequence
  Description of Artificial Sequence: Synthetic oligonucleotide
  Sense strand starting at position 2846 of SEQ ID NO: 1562209
gguagaguauuugauaaug

SEQ ID NO: 1730308 - RNA, 19 nt, Artificial Sequence
  Description of Artificial Sequence: Synthetic oligonucleotide
  Antisense strand to SEQ ID NO: 1730307
cauuaucaaauacucuacc

SEQ ID NO: 1730309 - RNA, 19 nt, Artificial Sequence
  Description of Artificial Sequence: Synthetic oligonucleotide
  Sense strand starting at position 2897 of SEQ ID NO: 1562209
uuacuuguauacuuaggau

SEQ ID NO: 1730310 - RNA, 19 nt, Artificial Sequence
  Description of Artificial Sequence: Synthetic oligonucleotide
  Antisense strand to SEQ ID NO: 1730309
auccuaaguauacaaguaa

SEQ ID NO: 1730311 - RNA, 19 nt, Artificial Sequence
  Description of Artificial Sequence: Synthetic oligonucleotide
  Sense strand starting at position 3004 of SEQ ID NO: 1562209
gauugacuguauguaagaa

SEQ ID NO: 1730312 - RNA, 19 nt, Artificial Sequence
  Description of Artificial Sequence: Synthetic oligonucleotide
  Antisense strand to SEQ ID NO: 1730311
uucuuacauacagucaauc

SEQ ID NO: 1730313 - RNA, 19 nt, Artificial Sequence
  Description of Artificial Sequence: Synthetic oligonucleotide
  Sense strand starting at position 3028 of SEQ ID NO: 1562209
gaugauguaucccuagugu

SEQ ID NO: 1730314 - RNA, 19 nt, Artificial Sequence
  Description of Artificial Sequence: Synthetic oligonucleotide
  Antisense strand to SEQ ID NO: 1730313
acacuagggauacaucauc

SEQ ID NO: 1730315 - RNA, 19 nt, Artificial Sequence
  Description of Artificial Sequence: Synthetic oligonucleotide
  Sense strand starting at position 3046 of SEQ ID NO: 1562209
ucucacaggccagaauuau

SEQ ID NO: 1730316 - RNA, 19 nt, Artificial Sequence
  Description of Artificial Sequence: Synthetic oligonucleotide
  Antisense strand to SEQ ID NO: 1730315
auaauucuggccugugaga

SEQ ID NO: 1730317 - RNA, 19 nt, Artificial Sequence
  Description of Artificial Sequence: Synthetic oligonucleotide
  Sense strand starting at position 3073 of SEQ ID NO: 1562209
uguccugcccuauaauaag

SEQ ID NO: 1730318 - RNA, 19 nt, Artificial Sequence
  Description of Artificial Sequence: Synthetic oligonucleotide
  Antisense strand to SEQ ID NO: 1730317
cuuauuauagggcaggaca

SEQ ID NO: 1730319 - RNA, 19 nt, Artificial Sequence
  Description of Artificial Sequence: Synthetic oligonucleotide
  Sense strand starting at position 3163 of SEQ ID NO: 1562209
cuuguaaacagguacagua

SEQ ID NO: 1730320 - RNA, 19 nt, Artificial Sequence
  Description of Artificial Sequence: Synthetic oligonucleotide
  Antisense strand to SEQ ID NO: 1730319
uacuguaccuguuuacaag

SEQ ID NO: 1730321 - RNA, 19 nt, Artificial Sequence
  Description of Artificial Sequence: Synthetic oligonucleotide
  Sense strand starting at position 3309 of SEQ ID NO: 1562209
guaucauagcuguacaacu

SEQ ID NO: 1730322 - RNA, 19 nt, Artificial Sequence
  Description of Artificial Sequence: Synthetic oligonucleotide
  Antisense strand to SEQ ID NO: 1730321
aguuguacagcuaugauac

SEQ ID NO: 1730323 - RNA, 19 nt, Artificial Sequence
  Description of Artificial Sequence: Synthetic oligonucleotide
  Sense strand starting at position 3327 of SEQ ID NO: 1562209
uuugcaagccuguuugcua

SEQ ID NO: 1730324 - RNA, 19 nt, Artificial Sequence
  Description of Artificial Sequence: Synthetic oligonucleotide
  Antisense strand to SEQ ID NO: 1730323
uagcaaacaggcuugcaaa

SEQ ID NO: 1730325 - RNA, 19 nt, Artificial Sequence
  Description of Artificial Sequence: Synthetic oligonucleotide
  Sense strand starting at position 3608 of SEQ ID NO: 1562209
aggugaggucaaugauugu

SEQ ID NO: 1730326 - RNA, 19 nt, Artificial Sequence
  Description of Artificial Sequence: Synthetic oligonucleotide
  Antisense strand to SEQ ID NO: 1730325
acaaucauugaccucaccu

SEQ ID NO: 1730327 - RNA, 19 nt, Artificial Sequence
  Description of Artificial Sequence: Synthetic oligonucleotide
  Sense strand starting at position 3668 of SEQ ID NO: 1562209
caaggcgguuuaucucaua

SEQ ID NO: 1730328 - RNA, 19 nt, Artificial Sequence
  Description of Artificial Sequence: Synthetic oligonucleotide
  Antisense strand to SEQ ID NO: 1730327
uaugagauaaaccgccuug

SEQ ID NO: 1730329 - RNA, 19 nt, Artificial Sequence
  Description of Artificial Sequence: Synthetic oligonucleotide
  Sense strand starting at position 3787 of SEQ ID NO: 1562209
agagucucauuuggaaaga

SEQ ID NO: 1730330 - RNA, 19 nt, Artificial Sequence
  Description of Artificial Sequence: Synthetic oligonucleotide
  Antisense strand to SEQ ID NO: 1730329
ucuuuccaaaugagacucu

SEQ ID NO: 1730331 - RNA, 19 nt, Artificial Sequence
  Description of Artificial Sequence: Synthetic oligonucleotide
  Sense strand starting at position 3788 of SEQ ID NO: 1562209
gagucucauuuggaaagag

SEQ ID NO: 1730332 - RNA, 19 nt, Artificial Sequence
  Description of Artificial Sequence: Synthetic oligonucleotide
  Antisense strand to SEQ ID NO: 1730331
cucuuuccaaaugagacuc

SEQ ID NO: 1730333 - RNA, 19 nt, Artificial Sequence
  Description of Artificial Sequence: Synthetic oligonucleotide
  Sense strand starting at position 3832 of SEQ ID NO: 1562209
uguuucuacuaaccuagua

SEQ ID NO: 1730334 - RNA, 19 nt, Artificial Sequence
  Description of Artificial Sequence: Synthetic oligonucleotide
  Antisense strand to SEQ ID NO: 1730333
uacuagguuaguagaaaca

SEQ ID NO: 1730335 - RNA, 19 nt, Artificial Sequence
  Description of Artificial Sequence: Synthetic oligonucleotide
  Sense strand starting at position 3955 of SEQ ID NO: 1562209
cuuuauuucucugaaggua

SEQ ID NO: 1730336 - RNA, 19 nt, Artificial Sequence
  Description of Artificial Sequence: Synthetic oligonucleotide
  Antisense strand to SEQ ID NO: 1730335
uaccuucagagaaauaaag

SEQ ID NO: 1730337 - RNA, 19 nt, Artificial Sequence
  Description of Artificial Sequence: Synthetic oligonucleotide
  Sense strand starting at position 63 of SEQ ID NO: 1562210
agucuugaagcauaacuca

SEQ ID NO: 1730338 - RNA, 19 nt, Artificial Sequence
  Description of Artificial Sequence: Synthetic oligonucleotide
  Antisense strand to SEQ ID NO: 1730337
ugaguuaugcuucaagacu

SEQ ID NO: 1730339 - RNA, 19 nt, Artificial Sequence
  Description of Artificial Sequence: Synthetic oligonucleotide
  Sense strand starting at position 131 of SEQ ID NO: 1562210
aagguuaugugcucacuaa

SEQ ID NO: 1730340 - RNA, 19 nt, Artificial Sequence
  Description of Artificial Sequence: Synthetic oligonucleotide
  Antisense strand to SEQ ID NO: 1730339
uuagugagcacauaaccuu

SEQ ID NO: 1730341 - RNA, 19 nt, Artificial Sequence
  Description of Artificial Sequence: Synthetic oligonucleotide
  Sense strand starting at position 132 of SEQ ID NO: 1562210
agguuaugugcucacuaaa

SEQ ID NO: 1730342 - RNA, 19 nt, Artificial Sequence
  Description of Artificial Sequence: Synthetic oligonucleotide
  Antisense strand to SEQ ID NO: 1730341
uuuagugagcacauaaccu

SEQ ID NO: 1730343 - RNA, 19 nt, Artificial Sequence
  Description of Artificial Sequence: Synthetic oligonucleotide
  Sense strand starting at position 192 of SEQ ID NO: 1562210
uaagguaucuuagcuuaag

SEQ ID NO: 1730344 - RNA, 19 nt, Artificial Sequence
  Description of Artificial Sequence: Synthetic oligonucleotide
  Antisense strand to SEQ ID NO: 1730343
cuuaagcuaagauaccuua

SEQ ID NO: 1730345 - RNA, 19 nt, Artificial Sequence
  Description of Artificial Sequence: Synthetic oligonucleotide
  Sense strand starting at position 193 of SEQ ID NO: 1562210
aagguaucuuagcuuaaga

SEQ ID NO: 1730346 - RNA, 19 nt, Artificial Sequence
  Description of Artificial Sequence: Synthetic oligonucleotide
  Antisense strand to SEQ ID NO: 1730345
ucuuaagcuaagauaccuu

SEQ ID NO: 1730347 - RNA, 19 nt, Artificial Sequence
  Description of Artificial Sequence: Synthetic oligonucleotide
  Sense strand starting at position 195 of SEQ ID NO: 1562210
gguaucuuagcuuaagaag

SEQ ID NO: 1730348 - RNA, 19 nt, Artificial Sequence
  Description of Artificial Sequence: Synthetic oligonucleotide
  Antisense strand to SEQ ID NO: 1730347
cuucuuaagcuaagauacc

SEQ ID NO: 1730349 - RNA, 19 nt, Artificial Sequence
  Description of Artificial Sequence: Synthetic oligonucleotide
  Sense strand starting at position 198 of SEQ ID NO: 1562210
aucuuagcuuaagaaggaa

SEQ ID NO: 1730350 - RNA, 19 nt, Artificial Sequence
  Description of Artificial Sequence: Synthetic oligonucleotide
  Antisense strand to SEQ ID NO: 1730349
uuccuucuuaagcuaagau

SEQ ID NO: 1730351 - RNA, 19 nt, Artificial Sequence
  Description of Artificial Sequence: Synthetic oligonucleotide
  Sense strand starting at position 496 of SEQ ID NO: 1562210
cucaucuaugguuguguga

SEQ ID NO: 1730352 - RNA, 19 nt, Artificial Sequence
  Description of Artificial Sequence: Synthetic oligonucleotide
  Antisense strand to SEQ ID NO: 1730351
ucacacaaccauagaugag

SEQ ID NO: 1730353 - RNA, 19 nt, Artificial Sequence
  Description of Artificial Sequence: Synthetic oligonucleotide
  Sense strand starting at position 507 of SEQ ID NO: 1562210
uugugugauggccaggaaa

SEQ ID NO: 1730354 - RNA, 19 nt, Artificial Sequence
  Description of Artificial Sequence: Synthetic oligonucleotide
  Antisense strand to SEQ ID NO: 1730353
uuuccuggccaucacacaa

SEQ ID NO: 1730355 - RNA, 19 nt, Artificial Sequence
  Description of Artificial Sequence: Synthetic oligonucleotide
  Sense strand starting at position 723 of SEQ ID NO: 1562210
cuuuaucaguuucuugagu

SEQ ID NO: 1730356 - RNA, 19 nt, Artificial Sequence
  Description of Artificial Sequence: Synthetic oligonucleotide
  Antisense strand to SEQ ID NO: 1730355
acucaagaaacugauaaag

SEQ ID NO: 1730357 - RNA, 19 nt, Artificial Sequence
  Description of Artificial Sequence: Synthetic oligonucleotide
  Sense strand starting at position 724 of SEQ ID NO: 1562210
uuuaucaguuucuugagua

SEQ ID NO: 1730358 - RNA, 19 nt, Artificial Sequence
  Description of Artificial Sequence: Synthetic oligonucleotide
  Antisense strand to SEQ ID NO: 1730357
uacucaagaaacugauaaa

SEQ ID NO: 1730359 - RNA, 19 nt, Artificial Sequence
  Description of Artificial Sequence: Synthetic oligonucleotide
  Sense strand starting at position 857 of SEQ ID NO: 1562210
ccugguuuacccuaaagca

SEQ ID NO: 1730360 - RNA, 19 nt, Artificial Sequence
  Description of Artificial Sequence: Synthetic oligonucleotide
  Antisense strand to SEQ ID NO: 1730359
ugcuuuaggguaaaccagg

SEQ ID NO: 1730361 - RNA, 19 nt, Artificial Sequence
  Description of Artificial Sequence: Synthetic oligonucleotide
  Sense strand starting at position 962 of SEQ ID NO: 1562210
cuuaguaugcaccagaaau

SEQ ID NO: 1730362 - RNA, 19 nt, Artificial Sequence
  Description of Artificial Sequence: Synthetic oligonucleotide
  Antisense strand to SEQ ID NO: 1730361
auuucuggugcauacuaag

SEQ ID NO: 1730363 - RNA, 19 nt, Artificial Sequence
  Description of Artificial Sequence: Synthetic oligonucleotide
  Sense strand starting at position 973 of SEQ ID NO: 1562210
ccagaaaugcacuaaugcu

SEQ ID NO: 1730364 - RNA, 19 nt, Artificial Sequence
  Description of Artificial Sequence: Synthetic oligonucleotide
  Antisense strand to SEQ ID NO: 1730363
agcauuagugcauuucugg

SEQ ID NO: 1730365 - RNA, 19 nt, Artificial Sequence
  Description of Artificial Sequence: Synthetic oligonucleotide
  Sense strand starting at position 1034 of SEQ ID NO: 1562210
guagguuacuaauucucau

SEQ ID NO: 1730366 - RNA, 19 nt, Artificial Sequence
  Description of Artificial Sequence: Synthetic oligonucleotide
  Antisense strand to SEQ ID NO: 1730365
augagaauuaguaaccuac

SEQ ID NO: 1730367 - RNA, 19 nt, Artificial Sequence
  Description of Artificial Sequence: Synthetic oligonucleotide
  Sense strand starting at position 1293 of SEQ ID NO: 1562210
aacgaauucgcggcuguga

SEQ ID NO: 1730368 - RNA, 19 nt, Artificial Sequence
  Description of Artificial Sequence: Synthetic oligonucleotide
  Antisense strand to SEQ ID NO: 1730367
ucacagccgcgaauucguu

SEQ ID NO: 1730369 - RNA, 19 nt, Artificial Sequence
  Description of Artificial Sequence: Synthetic oligonucleotide
  Sense strand starting at position 1347 of SEQ ID NO: 1562210
aggaaagagugucaaggaa

SEQ ID NO: 1730370 - RNA, 19 nt, Artificial Sequence
  Description of Artificial Sequence: Synthetic oligonucleotide
  Antisense strand to SEQ ID NO: 1730369
uuccuugacacucuuuccu

SEQ ID NO: 1730371 - RNA, 19 nt, Artificial Sequence
  Description of Artificial Sequence: Synthetic oligonucleotide
  Sense strand starting at position 1385 of SEQ ID NO: 1562210
uuaugaaaugcucgggaac

SEQ ID NO: 1730372 - RNA, 19 nt, Artificial Sequence
  Description of Artificial Sequence: Synthetic oligonucleotide
  Antisense strand to SEQ ID NO: 1730371
guucccgagcauuucauaa

SEQ ID NO: 1730373 - RNA, 19 nt, Artificial Sequence
  Description of Artificial Sequence: Synthetic oligonucleotide
  Sense strand starting at position 1388 of SEQ ID NO: 1562210
ugaaaugcucgggaaccau

SEQ ID NO: 1730374 - RNA, 19 nt, Artificial Sequence
  Description of Artificial Sequence: Synthetic oligonucleotide
  Antisense strand to SEQ ID NO: 1730373
augguucccgagcauuuca

SEQ ID NO: 1730375 - RNA, 19 nt, Artificial Sequence
  Description of Artificial Sequence: Synthetic oligonucleotide
  Sense strand starting at position 2201 of SEQ ID NO: 1562210
cccagcauuucggcgaaau

SEQ ID NO: 1730376 - RNA, 19 nt, Artificial Sequence
  Description of Artificial Sequence: Synthetic oligonucleotide
  Antisense strand to SEQ ID NO: 1730375
auuucgccgaaaugcuggg

SEQ ID NO: 1730377 - RNA, 19 nt, Artificial Sequence
  Description of Artificial Sequence: Synthetic oligonucleotide
  Sense strand starting at position 2202 of SEQ ID NO: 1562210
ccagcauuucggcgaaauc

SEQ ID NO: 1730378 - RNA, 19 nt, Artificial Sequence
  Description of Artificial Sequence: Synthetic oligonucleotide
  Antisense strand to SEQ ID NO: 1730377
gauuucgccgaaaugcugg

SEQ ID NO: 1730379 - RNA, 19 nt, Artificial Sequence
  Description of Artificial Sequence: Synthetic oligonucleotide
  Sense strand starting at position 2203 of SEQ ID NO: 1562210
cagcauuucggcgaaaucu

SEQ ID NO: 1730380 - RNA, 19 nt, Artificial Sequence
  Description of Artificial Sequence: Synthetic oligonucleotide
  Antisense strand to SEQ ID NO: 1730379
agauuucgccgaaaugcug

SEQ ID NO: 1730381 - RNA, 19 nt, Artificial Sequence
  Description of Artificial Sequence: Synthetic oligonucleotide
  Sense strand starting at position 2272 of SEQ ID NO: 1562210
gcagcuggccaagaaauga

SEQ ID NO: 1730382 - RNA, 19 nt, Artificial Sequence
  Description of Artificial Sequence: Synthetic oligonucleotide
  Antisense strand to SEQ ID NO: 1730381
ucauuucuuggccagcugc

SEQ ID NO: 1730383 - RNA, 19 nt, Artificial Sequence
  Description of Artificial Sequence: Synthetic oligonucleotide
  Sense strand starting at position 2506 of SEQ ID NO: 1562210
ggagggugucugggauaca

SEQ ID NO: 1730384 - RNA, 19 nt, Artificial Sequence
  Description of Artificial Sequence: Synthetic oligonucleotide
  Antisense strand to SEQ ID NO: 1730383
uguaucccagacacccucc

SEQ ID NO: 1730385 - RNA, 19 nt, Artificial Sequence
  Description of Artificial Sequence: Synthetic oligonucleotide
  Sense strand starting at position 2543 of SEQ ID NO: 1562210
ugggauccuuuaucacgaa

SEQ ID NO: 1730386 - RNA, 19 nt, Artificial Sequence
  Description of Artificial Sequence: Synthetic oligonucleotide
  Antisense strand to SEQ ID NO: 1730385
uucgugauaaaggauccca

SEQ ID NO: 1730387 - RNA, 19 nt, Artificial Sequence
  Description of Artificial Sequence: Synthetic oligonucleotide
  Sense strand starting at position 2555 of SEQ ID NO: 1562210
ucacgaaaugcagguuaca

SEQ ID NO: 1730388 - RNA, 19 nt, Artificial Sequence
  Description of Artificial Sequence: Synthetic oligonucleotide
  Antisense strand to SEQ ID NO: 1730387
uguaaccugcauuucguga

SEQ ID NO: 1730389 - RNA, 19 nt, Artificial Sequence
  Description of Artificial Sequence: Synthetic oligonucleotide
  Sense strand starting at position 2618 of SEQ ID NO: 1562210
uggauaaguuguguaacug

SEQ ID NO: 1730390 - RNA, 19 nt, Artificial Sequence
  Description of Artificial Sequence: Synthetic oligonucleotide
  Antisense strand to SEQ ID NO: 1730389
caguuacacaacuuaucca

SEQ ID NO: 1730391 - RNA, 19 nt, Artificial Sequence
  Description of Artificial Sequence: Synthetic oligonucleotide
  Sense strand starting at position 2622 of SEQ ID NO: 1562210
uaaguuguguaacugggua

SEQ ID NO: 1730392 - RNA, 19 nt, Artificial Sequence
  Description of Artificial Sequence: Synthetic oligonucleotide
  Antisense strand to SEQ ID NO: 1730391
uacccaguuacacaacuua

SEQ ID NO: 1730393 - RNA, 19 nt, Artificial Sequence
  Description of Artificial Sequence: Synthetic oligonucleotide
  Sense strand starting at position 2634 of SEQ ID NO: 1562210
cuggguagguuguugugaa

SEQ ID NO: 1730394 - RNA, 19 nt, Artificial Sequence
  Description of Artificial Sequence: Synthetic oligonucleotide
  Antisense strand to SEQ ID NO: 1730393
uucacaacaaccuacccag

SEQ ID NO: 1730395 - RNA, 19 nt, Artificial Sequence
  Description of Artificial Sequence: Synthetic oligonucleotide
  Sense strand starting at position 2674 of SEQ ID NO: 1562210
ggauuaguaaauugugaca

SEQ ID NO: 1730396 - RNA, 19 nt, Artificial Sequence
  Description of Artificial Sequence: Synthetic oligonucleotide
  Antisense strand to SEQ ID NO: 1730395
ugucacaauuuacuaaucc

SEQ ID NO: 1730397 - RNA, 19 nt, Artificial Sequence
  Description of Artificial Sequence: Synthetic oligonucleotide
  Sense strand starting at position 2692 of SEQ ID NO: 1562210
aucauauucucugucagau

SEQ ID NO: 1730398 - RNA, 19 nt, Artificial Sequence
  Description of Artificial Sequence: Synthetic oligonucleotide
  Antisense strand to SEQ ID NO: 1730397
aucugacagagaauaugau

SEQ ID NO: 1730399 - RNA, 19 nt, Artificial Sequence
  Description of Artificial Sequence: Synthetic oligonucleotide
  Sense strand starting at position 2740 of SEQ ID NO: 1562210
gauagcauguugucucuaa

SEQ ID NO: 1730400 - RNA, 19 nt, Artificial Sequence
  Description of Artificial Sequence: Synthetic oligonucleotide
  Antisense strand to SEQ ID NO: 1730399
uuagagacaacaugcuauc

SEQ ID NO: 1730401 - RNA, 19 nt, Artificial Sequence
  Description of Artificial Sequence: Synthetic oligonucleotide
  Sense strand starting at position 2741 of SEQ ID NO: 1562210
auagcauguugucucuaau

SEQ ID NO: 1730402 - RNA, 19 nt, Artificial Sequence
  Description of Artificial Sequence: Synthetic oligonucleotide
  Antisense strand to SEQ ID NO: 1730401
auuagagacaacaugcuau

SEQ ID NO: 1730403 - RNA, 19 nt, Artificial Sequence
  Description of Artificial Sequence: Synthetic oligonucleotide
  Sense strand starting at position 2744 of SEQ ID NO: 1562210
gcauguugucucuaauacu

SEQ ID NO: 1730404 - RNA, 19 nt, Artificial Sequence
  Description of Artificial Sequence: Synthetic oligonucleotide
  Antisense strand to SEQ ID NO: 1730403
aguauuagagacaacaugc

SEQ ID NO: 1730405 - RNA, 19 nt, Artificial Sequence
  Description of Artificial Sequence: Synthetic oligonucleotide
  Sense strand starting at position 2869 of SEQ ID NO: 1562210
gagagcuaagugugaugua

SEQ ID NO: 1730406 - RNA, 19 nt, Artificial Sequence
  Description of Artificial Sequence: Synthetic oligonucleotide
  Antisense strand to SEQ ID NO: 1730405
uacaucacacuuagcucuc

SEQ ID NO: 1730407 - RNA, 19 nt, Artificial Sequence
  Description of Artificial Sequence: Synthetic oligonucleotide
  Sense strand starting at position 2890 of SEQ ID NO: 1562210
agggaauggugaagauugu

SEQ ID NO: 1730408 - RNA, 19 nt, Artificial Sequence
  Description of Artificial Sequence: Synthetic oligonucleotide
  Antisense strand to SEQ ID NO: 1730407
acaaucuucaccauucccu

SEQ ID NO: 1730409 - RNA, 19 nt, Artificial Sequence
  Description of Artificial Sequence: Synthetic oligonucleotide
  Sense strand starting at position 2899 of SEQ ID NO: 1562210
ugaagauugugacucauaa

SEQ ID NO: 1730410 - RNA, 19 nt, Artificial Sequence
  Description of Artificial Sequence: Synthetic oligonucleotide
  Antisense strand to SEQ ID NO: 1730409
uuaugagucacaaucuuca

SEQ ID NO: 1730411 - RNA, 19 nt, Artificial Sequence
  Description of Artificial Sequence: Synthetic oligonucleotide
  Sense strand starting at position 2906 of SEQ ID NO: 1562210
ugugacucauaacuaagau

SEQ ID NO: 1730412 - RNA, 19 nt, Artificial Sequence
  Description of Artificial Sequence: Synthetic oligonucleotide
  Antisense strand to SEQ ID NO: 1730411
aucuuaguuaugagucaca

SEQ ID NO: 1730413 - RNA, 19 nt, Artificial Sequence
  Description of Artificial Sequence: Synthetic oligonucleotide
  Sense strand starting at position 3009 of SEQ ID NO: 1562210
gugacucucccaggugaac

SEQ ID NO: 1730414 - RNA, 19 nt, Artificial Sequence
  Description of Artificial Sequence: Synthetic oligonucleotide
  Antisense strand to SEQ ID NO: 1730413
guucaccugggagagucac

SEQ ID NO: 1730415 - RNA, 19 nt, Artificial Sequence
  Description of Artificial Sequence: Synthetic oligonucleotide
  Sense strand starting at position 3847 of SEQ ID NO: 1562210
gaguguuguuucuuagaaa

SEQ ID NO: 1730416 - RNA, 19 nt, Artificial Sequence
  Description of Artificial Sequence: Synthetic oligonucleotide
  Antisense strand to SEQ ID NO: 1730415
uuucuaagaaacaacacuc

SEQ ID NO: 1730417 - RNA, 19 nt, Artificial Sequence
  Description of Artificial Sequence: Synthetic oligonucleotide
  Sense strand starting at position 2 of SEQ ID NO: 1562211
cuugaacguaucgacagaa

SEQ ID NO: 1730418 - RNA, 19 nt, Artificial Sequence
  Description of Artificial Sequence: Synthetic oligonucleotide
  Antisense strand to SEQ ID NO: 1730417
uucugucgauacguucaag

SEQ ID NO: 1730419 - RNA, 19 nt, Artificial Sequence
  Description of Artificial Sequence: Synthetic oligonucleotide
  Sense strand starting at position 145 of SEQ ID NO: 1562211
gugucaaaucauuaucacu

SEQ ID NO: 1730420 - RNA, 19 nt, Artificial Sequence
  Description of Artificial Sequence: Synthetic oligonucleotide
  Antisense strand to SEQ ID NO: 1730419
agugauaaugauuugacac

SEQ ID NO: 1730421 - RNA, 19 nt, Artificial Sequence
  Description of Artificial Sequence: Synthetic oligonucleotide
  Sense strand starting at position 147 of SEQ ID NO: 1562211
gucaaaucauuaucacugu

SEQ ID NO: 1730422 - RNA, 19 nt, Artificial Sequence
  Description of Artificial Sequence: Synthetic oligonucleotide
  Antisense strand to SEQ ID NO: 1730421
acagugauaaugauuugac

SEQ ID NO: 1730423 - RNA, 19 nt, Artificial Sequence
  Description of Artificial Sequence: Synthetic oligonucleotide
  Sense strand starting at position 158 of SEQ ID NO: 1562211
aucacuguccuguaucuau

SEQ ID NO: 1730424 - RNA, 19 nt, Artificial Sequence
  Description of Artificial Sequence: Synthetic oligonucleotide
  Antisense strand to SEQ ID NO: 1730423
auagauacaggacagugau

SEQ ID NO: 1730425 - RNA, 19 nt, Artificial Sequence
  Description of Artificial Sequence: Synthetic oligonucleotide
  Sense strand starting at position 169 of SEQ ID NO: 1562211
guaucuaugcuauauugga

SEQ ID NO: 1730426 - RNA, 19 nt, Artificial Sequence
  Description of Artificial Sequence: Synthetic oligonucleotide
  Antisense strand to SEQ ID NO: 1730425
uccaauauagcauagauac

SEQ ID NO: 1730427 - RNA, 19 nt, Artificial Sequence
  Description of Artificial Sequence: Synthetic oligonucleotide
  Sense strand starting at position 305 of SEQ ID NO: 1562211
auggcagaaguguaauuaa

SEQ ID NO: 1730428 - RNA, 19 nt, Artificial Sequence
  Description of Artificial Sequence: Synthetic oligonucleotide
  Antisense strand to SEQ ID NO: 1730427
uuaauuacacuucugccau

SEQ ID NO: 1730429 - RNA, 19 nt, Artificial Sequence
  Description of Artificial Sequence: Synthetic oligonucleotide
  Sense strand starting at position 308 of SEQ ID NO: 1562211
gcagaaguguaauuaagga

SEQ ID NO: 1730430 - RNA, 19 nt, Artificial Sequence
  Description of Artificial Sequence: Synthetic oligonucleotide
  Antisense strand to SEQ ID NO: 1730429
uccuuaauuacacuucugc

SEQ ID NO: 1730431 - RNA, 19 nt, Artificial Sequence
  Description of Artificial Sequence: Synthetic oligonucleotide
  Sense strand starting at position 433 of SEQ ID NO: 1562211
ucauguuuagauugcaaag

SEQ ID NO: 1730432 - RNA, 19 nt, Artificial Sequence
  Description of Artificial Sequence: Synthetic oligonucleotide
  Antisense strand to SEQ ID NO: 1730431
cuuugcaaucuaaacauga

SEQ ID NO: 1730433 - RNA, 19 nt, Artificial Sequence
  Description of Artificial Sequence: Synthetic oligonucleotide
  Sense strand starting at position 601 of SEQ ID NO: 1562211
ggagagguggugugaugaa

SEQ ID NO: 1730434 - RNA, 19 nt, Artificial Sequence
  Description of Artificial Sequence: Synthetic oligonucleotide
  Antisense strand to SEQ ID NO: 1730433
uucaucacaccaccucucc

SEQ ID NO: 1730435 - RNA, 19 nt, Artificial Sequence
  Description of Artificial Sequence: Synthetic oligonucleotide
  Sense strand starting at position 1046 of SEQ ID NO: 1562211
uuauuccugcuauggacaa

SEQ ID NO: 1730436 - RNA, 19 nt, Artificial Sequence
  Description of Artificial Sequence: Synthetic oligonucleotide
  Antisense strand to SEQ ID NO: 1730435
uuguccauagcaggaauaa

SEQ ID NO: 1730437 - RNA, 19 nt, Artificial Sequence
  Description of Artificial Sequence: Synthetic oligonucleotide
  Sense strand starting at position 1219 of SEQ ID NO: 1562211
guuagucauagugagaaag

SEQ ID NO: 1730438 - RNA, 19 nt, Artificial Sequence
  Description of Artificial Sequence: Synthetic oligonucleotide
  Antisense strand to SEQ ID NO: 1730437
cuuucucacuaugacuaac

SEQ ID NO: 1730439 - RNA, 19 nt, Artificial Sequence
  Description of Artificial Sequence: Synthetic oligonucleotide
  Sense strand starting at position 1257 of SEQ ID NO: 1562211
ugcagcagggcugauuaaa

SEQ ID NO: 1730440 - RNA, 19 nt, Artificial Sequence
  Description of Artificial Sequence: Synthetic oligonucleotide
  Antisense strand to SEQ ID NO: 1730439
uuuaaucagcccugcugca

SEQ ID NO: 1730441 - RNA, 19 nt, Artificial Sequence
  Description of Artificial Sequence: Synthetic oligonucleotide
  Sense strand starting at position 1279 of SEQ ID NO: 1562211
cucuuuaugucaguaagaa

SEQ ID NO: 1730442 - RNA, 19 nt, Artificial Sequence
  Description of Artificial Sequence: Synthetic oligonucleotide
  Antisense strand to SEQ ID NO: 1730441
uucuuacugacauaaagag

SEQ ID NO: 1730443 - RNA, 19 nt, Artificial Sequence
  Description of Artificial Sequence: Synthetic oligonucleotide
  Sense strand starting at position 1280 of SEQ ID NO: 1562211
ucuuuaugucaguaagaaa

SEQ ID NO: 1730444 - RNA, 19 nt, Artificial Sequence
  Description of Artificial Sequence: Synthetic oligonucleotide
  Antisense strand to SEQ ID NO: 1730443
uuucuuacugacauaaaga

SEQ ID NO: 1730445 - RNA, 19 nt, Artificial Sequence
  Description of Artificial Sequence: Synthetic oligonucleotide
  Sense strand starting at position 1343 of SEQ ID NO: 1562211
cucgacuuggacuaauguu

SEQ ID NO: 1730446 - RNA, 19 nt, Artificial Sequence
  Description of Artificial Sequence: Synthetic oligonucleotide
  Antisense strand to SEQ ID NO: 1730445
aacauuaguccaagucgag

SEQ ID NO: 1730447 - RNA, 19 nt, Artificial Sequence
  Description of Artificial Sequence: Synthetic oligonucleotide
  Sense strand starting at position 1485 of SEQ ID NO: 1562211
agggauuauuaauuagugu

SEQ ID NO: 1730448 - RNA, 19 nt, Artificial Sequence
  Description of Artificial Sequence: Synthetic oligonucleotide
  Antisense strand to SEQ ID NO: 1730447
acacuaauuaauaaucccu

SEQ ID NO: 1730449 - RNA, 19 nt, Artificial Sequence
  Description of Artificial Sequence: Synthetic oligonucleotide
  Sense strand starting at position 1486 of SEQ ID NO: 1562211
gggauuauuaauuaguguu

SEQ ID NO: 1730450 - RNA, 19 nt, Artificial Sequence
  Description of Artificial Sequence: Synthetic oligonucleotide
  Antisense strand to SEQ ID NO: 1730449
aacacuaauuaauaauccc

SEQ ID NO: 1730451 - RNA, 19 nt, Artificial Sequence
  Description of Artificial Sequence: Synthetic oligonucleotide
  Sense strand starting at position 1539 of SEQ ID NO: 1562211
acauccauuuagcaagaga

SEQ ID NO: 1730452 - RNA, 19 nt, Artificial Sequence
  Description of Artificial Sequence: Synthetic oligonucleotide
  Antisense strand to SEQ ID NO: 1730451
ucucuugcuaaauggaugu

SEQ ID NO: 1730453 - RNA, 19 nt, Artificial Sequence
  Description of Artificial Sequence: Synthetic oligonucleotide
  Sense strand starting at position 1561 of SEQ ID NO: 1562211
gagccauagggaugacuuu

SEQ ID NO: 1730454 - RNA, 19 nt, Artificial Sequence
  Description of Artificial Sequence: Synthetic oligonucleotide
  Antisense strand to SEQ ID NO: 1730453
aaagucaucccuauggcuc

SEQ ID NO: 1730455 - RNA, 19 nt, Artificial Sequence
  Description of Artificial Sequence: Synthetic oligonucleotide
  Sense strand starting at position 1601 of SEQ ID NO: 1562211
guuguaccuguauaaugga

SEQ ID NO: 1730456 - RNA, 19 nt, Artificial Sequence
  Description of Artificial Sequence: Synthetic oligonucleotide
  Antisense strand to SEQ ID NO: 1730455
uccauuauacagguacaac

SEQ ID NO: 1730457 - RNA, 19 nt, Artificial Sequence
  Description of Artificial Sequence: Synthetic oligonucleotide
  Sense strand starting at position 2132 of SEQ ID NO: 1562211
ucuauaauucugggucaua

SEQ ID NO: 1730458 - RNA, 19 nt, Artificial Sequence
  Description of Artificial Sequence: Synthetic oligonucleotide
  Antisense strand to SEQ ID NO: 1730457
uaugacccagaauuauaga

SEQ ID NO: 1730459 - RNA, 19 nt, Artificial Sequence
  Description of Artificial Sequence: Synthetic oligonucleotide
  Sense strand starting at position 2133 of SEQ ID NO: 1562211
cuauaauucugggucauaa

SEQ ID NO: 1730460 - RNA, 19 nt, Artificial Sequence
  Description of Artificial Sequence: Synthetic oligonucleotide
  Antisense strand to SEQ ID NO: 1730459
uuaugacccagaauuauag

SEQ ID NO: 1730461 - RNA, 19 nt, Artificial Sequence
  Description of Artificial Sequence: Synthetic oligonucleotide
  Sense strand starting at position 2207 of SEQ ID NO: 1562211
uccugaauuuaggaacagu

SEQ ID NO: 1730462 - RNA, 19 nt, Artificial Sequence
  Description of Artificial Sequence: Synthetic oligonucleotide
  Antisense strand to SEQ ID NO: 1730461
acuguuccuaaauucagga

SEQ ID NO: 1730463 - RNA, 19 nt, Artificial Sequence
  Description of Artificial Sequence: Synthetic oligonucleotide
  Sense strand starting at position 2246 of SEQ ID NO: 1562211
ggauauuuauggcauaacu

SEQ ID NO: 1730464 - RNA, 19 nt, Artificial Sequence
  Description of Artificial Sequence: Synthetic oligonucleotide
  Antisense strand to SEQ ID NO: 1730463
aguuaugccauaaauaucc

SEQ ID NO: 1730465 - RNA, 19 nt, Artificial Sequence
  Description of Artificial Sequence: Synthetic oligonucleotide
  Sense strand starting at position 2271 of SEQ ID NO: 1562211
auaugauuauggucugaau

SEQ ID NO: 1730466 - RNA, 19 nt, Artificial Sequence
  Description of Artificial Sequence: Synthetic oligonucleotide
  Antisense strand to SEQ ID NO: 1730465
auucagaccauaaucauau

SEQ ID NO: 1730467 - RNA, 19 nt, Artificial Sequence
  Description of Artificial Sequence: Synthetic oligonucleotide
  Sense strand starting at position 2273 of SEQ ID NO: 1562211
augauuauggucugaauau

SEQ ID NO: 1730468 - RNA, 19 nt, Artificial Sequence
  Description of Artificial Sequence: Synthetic oligonucleotide
  Antisense strand to SEQ ID NO: 1730467
auauucagaccauaaucau

SEQ ID NO: 1730469 - RNA, 19 nt, Artificial Sequence
  Description of Artificial Sequence: Synthetic oligonucleotide
  Sense strand starting at position 2422 of SEQ ID NO: 1562211
gguggugcacgguuguaau

SEQ ID NO: 1730470 - RNA, 19 nt, Artificial Sequence
  Description of Artificial Sequence: Synthetic oligonucleotide
  Antisense strand to SEQ ID NO: 1730469
auuacaaccgugcaccacc

SEQ ID NO: 1730471 - RNA, 19 nt, Artificial Sequence
  Description of Artificial Sequence: Synthetic oligonucleotide
  Sense strand starting at position 2464 of SEQ ID NO: 1562211
augaguauuguuugaacuc

SEQ ID NO: 1730472 - RNA, 19 nt, Artificial Sequence
  Description of Artificial Sequence: Synthetic oligonucleotide
  Antisense strand to SEQ ID NO: 1730471
gaguucaaacaauacucau

SEQ ID NO: 1730473 - RNA, 19 nt, Artificial Sequence
  Description of Artificial Sequence: Synthetic oligonucleotide
  Sense strand starting at position 2730 of SEQ ID NO: 1562211
gugaucuuugggugaugga

SEQ ID NO: 1730474 - RNA, 19 nt, Artificial Sequence
  Description of Artificial Sequence: Synthetic oligonucleotide
  Antisense strand to SEQ ID NO: 1730473
uccaucacccaaagaucac

SEQ ID NO: 1730475 - RNA, 19 nt, Artificial Sequence
  Description of Artificial Sequence: Synthetic oligonucleotide
  Sense strand starting at position 2930 of SEQ ID NO: 1562211
gcauuuaucucagugguuu

SEQ ID NO: 1730476 - RNA, 19 nt, Artificial Sequence
  Description of Artificial Sequence: Synthetic oligonucleotide
  Antisense strand to SEQ ID NO: 1730475
aaaccacugagauaaaugc

SEQ ID NO: 1730477 - RNA, 19 nt, Artificial Sequence
  Description of Artificial Sequence: Synthetic oligonucleotide
  Sense strand starting at position 2980 of SEQ ID NO: 1562211
cagaauaugccauauggua

SEQ ID NO: 1730478 - RNA, 19 nt, Artificial Sequence
  Description of Artificial Sequence: Synthetic oligonucleotide
  Antisense strand to SEQ ID NO: 1730477
uaccauauggcauauucug

SEQ ID NO: 1730479 - RNA, 19 nt, Artificial Sequence
  Description of Artificial Sequence: Synthetic oligonucleotide
  Sense strand starting at position 3060 of SEQ ID NO: 1562211
gacaacugaccuuggugau

SEQ ID NO: 1730480 - RNA, 19 nt, Artificial Sequence
  Description of Artificial Sequence: Synthetic oligonucleotide
  Antisense strand to SEQ ID NO: 1730479
aucaccaaggucaguuguc

SEQ ID NO: 1730481 - RNA, 19 nt, Artificial Sequence
  Description of Artificial Sequence: Synthetic oligonucleotide
  Sense strand starting at position 3061 of SEQ ID NO: 1562211
acaacugaccuuggugauu

SEQ ID NO: 1730482 - RNA, 19 nt, Artificial Sequence
  Description of Artificial Sequence: Synthetic oligonucleotide
  Antisense strand to SEQ ID NO: 1730481
aaucaccaaggucaguugu

SEQ ID NO: 1730483 - RNA, 19 nt, Artificial Sequence
  Description of Artificial Sequence: Synthetic oligonucleotide
  Sense strand starting at position 3066 of SEQ ID NO: 1562211
ugaccuuggugauugggaa

SEQ ID NO: 1730484 - RNA, 19 nt, Artificial Sequence
  Description of Artificial Sequence: Synthetic oligonucleotide
  Antisense strand to SEQ ID NO: 1730483
uucccaaucaccaagguca

SEQ ID NO: 1730485 - RNA, 19 nt, Artificial Sequence
  Description of Artificial Sequence: Synthetic oligonucleotide
  Sense strand starting at position 3562 of SEQ ID NO: 1562211
gaaaucaggucccuaguau

SEQ ID NO: 1730486 - RNA, 19 nt, Artificial Sequence
  Description of Artificial Sequence: Synthetic oligonucleotide
  Antisense strand to SEQ ID NO: 1730485
auacuagggaccugauuuc

SEQ ID NO: 1730487 - RNA, 19 nt, Artificial Sequence
  Description of Artificial Sequence: Synthetic oligonucleotide
  Sense strand starting at position 3584 of SEQ ID NO: 1562211
agucacugaucagcugaau

SEQ ID NO: 1730488 - RNA, 19 nt, Artificial Sequence
  Description of Artificial Sequence: Synthetic oligonucleotide
  Antisense strand to SEQ ID NO: 1730487
auucagcugaucagugacu

SEQ ID NO: 1730489 - RNA, 19 nt, Artificial Sequence
  Description of Artificial Sequence: Synthetic oligonucleotide
  Sense strand starting at position 3609 of SEQ ID NO: 1562211
uccugcauuccaggaaacu

SEQ ID NO: 1730490 - RNA, 19 nt, Artificial Sequence
  Description of Artificial Sequence: Synthetic oligonucleotide
  Antisense strand to SEQ ID NO: 1730489
aguuuccuggaaugcagga

SEQ ID NO: 1730491 - RNA, 19 nt, Artificial Sequence
  Description of Artificial Sequence: Synthetic oligonucleotide
  Sense strand starting at position 3665 of SEQ ID NO: 1562211
gugagaggaagcugaguau

SEQ ID NO: 1730492 - RNA, 19 nt, Artificial Sequence
  Description of Artificial Sequence: Synthetic oligonucleotide
  Antisense strand to SEQ ID NO: 1730491
auacucagcuuccucucac

SEQ ID NO: 1730493 - RNA, 19 nt, Artificial Sequence
  Description of Artificial Sequence: Synthetic oligonucleotide
  Sense strand starting at position 3669 of SEQ ID NO: 1562211
gaggaagcugaguauaugu

SEQ ID NO: 1730494 - RNA, 19 nt, Artificial Sequence
  Description of Artificial Sequence: Synthetic oligonucleotide
  Antisense strand to SEQ ID NO: 1730493
acauauacucagcuuccuc

SEQ ID NO: 1730495 - RNA, 19 nt, Artificial Sequence
  Description of Artificial Sequence: Synthetic oligonucleotide
  Sense strand starting at position 3872 of SEQ ID NO: 1562211
gggaaugggccaggcuaau

SEQ ID NO: 1730496 - RNA, 19 nt, Artificial Sequence
  Description of Artificial Sequence: Synthetic oligonucleotide
  Antisense strand to SEQ ID NO: 1730495
auuagccuggcccauuccc

SEQ ID NO: 1730497 - RNA, 19 nt, Artificial Sequence
  Description of Artificial Sequence: Synthetic oligonucleotide
  Sense strand starting at position 45 of SEQ ID NO: 1562212
cugaguuaccauggugagu

SEQ ID NO: 1730498 - RNA, 19 nt, Artificial Sequence
  Description of Artificial Sequence: Synthetic oligonucleotide
  Antisense strand to SEQ ID NO: 1730497
acucaccaugguaacucag

SEQ ID NO: 1730499 - RNA, 19 nt, Artificial Sequence
  Description of Artificial Sequence: Synthetic oligonucleotide
  Sense strand starting at position 105 of SEQ ID NO: 1562212
cgagaugacaggugaucaa

SEQ ID NO: 1730500 - RNA, 19 nt, Artificial Sequence
  Description of Artificial Sequence: Synthetic oligonucleotide
  Antisense strand to SEQ ID NO: 1730499
uugaucaccugucaucucg

SEQ ID NO: 1730501 - RNA, 19 nt, Artificial Sequence
  Description of Artificial Sequence: Synthetic oligonucleotide
  Sense strand starting at position 142 of SEQ ID NO: 1562212
cuagcaaucaaguggaaag

SEQ ID NO: 1730502 - RNA, 19 nt, Artificial Sequence
  Description of Artificial Sequence: Synthetic oligonucleotide
  Antisense strand to SEQ ID NO: 1730501
cuuuccacuugauugcuag

SEQ ID NO: 1730503 - RNA, 19 nt, Artificial Sequence
  Description of Artificial Sequence: Synthetic oligonucleotide
  Sense strand starting at position 176 of SEQ ID NO: 1562212
gugggucuggcagaagaaa

SEQ ID NO: 1730504 - RNA, 19 nt, Artificial Sequence
  Description of Artificial Sequence: Synthetic oligonucleotide
  Antisense strand to SEQ ID NO: 1730503
uuucuucugccagacccac

SEQ ID NO: 1730505 - RNA, 19 nt, Artificial Sequence
  Description of Artificial Sequence: Synthetic oligonucleotide
  Sense strand starting at position 206 of SEQ ID NO: 1562212
auauuacauuuccgagaaa

SEQ ID NO: 1730506 - RNA, 19 nt, Artificial Sequence
  Description of Artificial Sequence: Synthetic oligonucleotide
  Antisense strand to SEQ ID NO: 1730505
uuucucggaaauguaauau

SEQ ID NO: 1730507 - RNA, 19 nt, Artificial Sequence
  Description of Artificial Sequence: Synthetic oligonucleotide
  Sense strand starting at position 389 of SEQ ID NO: 1562212
gcaacucucuaggcaaaga

SEQ ID NO: 1730508 - RNA, 19 nt, Artificial Sequence
  Description of Artificial Sequence: Synthetic oligonucleotide
  Antisense strand to SEQ ID NO: 1730507
ucuuugccuagagaguugc

SEQ ID NO: 1730509 - RNA, 19 nt, Artificial Sequence
  Description of Artificial Sequence: Synthetic oligonucleotide
  Sense strand starting at position 626 of SEQ ID NO: 1562212
uuagguaugccucacacuu

SEQ ID NO: 1730510 - RNA, 19 nt, Artificial Sequence
  Description of Artificial Sequence: Synthetic oligonucleotide
  Antisense strand to SEQ ID NO: 1730509
aagugugaggcauaccuaa

SEQ ID NO: 1730511 - RNA, 19 nt, Artificial Sequence
  Description of Artificial Sequence: Synthetic oligonucleotide
  Sense strand starting at position 837 of SEQ ID NO: 1562212
aagaaaguuuaaggaggaa

SEQ ID NO: 1730512 - RNA, 19 nt, Artificial Sequence
  Description of Artificial Sequence: Synthetic oligonucleotide
  Antisense strand to SEQ ID NO: 1730511
uuccuccuuaaacuuucuu

SEQ ID NO: 1730513 - RNA, 19 nt, Artificial Sequence
  Description of Artificial Sequence: Synthetic oligonucleotide
  Sense strand starting at position 1055 of SEQ ID NO: 1562212
agcggagccguuucucuua

SEQ ID NO: 1730514 - RNA, 19 nt, Artificial Sequence
  Description of Artificial Sequence: Synthetic oligonucleotide
  Antisense strand to SEQ ID NO: 1730513
uaagagaaacggcuccgcu

SEQ ID NO: 1730515 - RNA, 19 nt, Artificial Sequence
  Description of Artificial Sequence: Synthetic oligonucleotide
  Sense strand starting at position 2013 of SEQ ID NO: 1562212
aggcgaugccagcaaacau

SEQ ID NO: 1730516 - RNA, 19 nt, Artificial Sequence
  Description of Artificial Sequence: Synthetic oligonucleotide
  Antisense strand to SEQ ID NO: 1730515
auguuugcuggcaucgccu

SEQ ID NO: 1730517 - RNA, 19 nt, Artificial Sequence
  Description of Artificial Sequence: Synthetic oligonucleotide
  Sense strand starting at position 2029 of SEQ ID NO: 1562212
caucgaucccgcugaacaa

SEQ ID NO: 1730518 - RNA, 19 nt, Artificial Sequence
  Description of Artificial Sequence: Synthetic oligonucleotide
  Antisense strand to SEQ ID NO: 1730517
uuguucagcgggaucgaug

SEQ ID NO: 1730519 - RNA, 19 nt, Artificial Sequence
  Description of Artificial Sequence: Synthetic oligonucleotide
  Sense strand starting at position 2030 of SEQ ID NO: 1562212
aucgaucccgcugaacaaa

SEQ ID NO: 1730520 - RNA, 19 nt, Artificial Sequence
  Description of Artificial Sequence: Synthetic oligonucleotide
  Antisense strand to SEQ ID NO: 1730519
uuuguucagcgggaucgau

SEQ ID NO: 1730521 - RNA, 19 nt, Artificial Sequence
  Description of Artificial Sequence: Synthetic oligonucleotide
  Sense strand starting at position 2345 of SEQ ID NO: 1562212
cagugugaugauggcugaa

SEQ ID NO: 1730522 - RNA, 19 nt, Artificial Sequence
  Description of Artificial Sequence: Synthetic oligonucleotide
  Antisense strand to SEQ ID NO: 1730521
uucagccaucaucacacug

SEQ ID NO: 1730523 - RNA, 19 nt, Artificial Sequence
  Description of Artificial Sequence: Synthetic oligonucleotide
  Sense strand starting at position 2347 of SEQ ID NO: 1562212
gugugaugauggcugaacu

SEQ ID NO: 1730524 - RNA, 19 nt, Artificial Sequence
  Description of Artificial Sequence: Synthetic oligonucleotide
  Antisense strand to SEQ ID NO: 1730523
aguucagccaucaucacac

SEQ ID NO: 1730525 - RNA, 19 nt, Artificial Sequence
  Description of Artificial Sequence: Synthetic oligonucleotide
  Sense strand starting at position 2446 of SEQ ID NO: 1562212
gggagaacuuagguuugcu

SEQ ID NO: 1730526 - RNA, 19 nt, Artificial Sequence
  Description of Artificial Sequence: Synthetic oligonucleotide
  Antisense strand to SEQ ID NO: 1730525
agcaaaccuaaguucuccc

SEQ ID NO: 1730527 - RNA, 19 nt, Artificial Sequence
  Description of Artificial Sequence: Synthetic oligonucleotide
  Sense strand starting at position 2486 of SEQ ID NO: 1562212
gaccuuauccagugaggau

SEQ ID NO: 1730528 - RNA, 19 nt, Artificial Sequence
  Description of Artificial Sequence: Synthetic oligonucleotide
  Antisense strand to SEQ ID NO: 1730527
auccucacuggauaagguc

SEQ ID NO: 1730529 - RNA, 19 nt, Artificial Sequence
  Description of Artificial Sequence: Synthetic oligonucleotide
  Sense strand starting at position 2595 of SEQ ID NO: 1562212
uaaucaauggguggucaca

SEQ ID NO: 1730530 - RNA, 19 nt, Artificial Sequence
  Description of Artificial Sequence: Synthetic oligonucleotide
  Antisense strand to SEQ ID NO: 1730529
ugugaccacccauugauua

SEQ ID NO: 1730531 - RNA, 19 nt, Artificial Sequence
  Description of Artificial Sequence: Synthetic oligonucleotide
  Sense strand starting at position 2597 of SEQ ID NO: 1562212
aucaauggguggucacaaa

SEQ ID NO: 1730532 - RNA, 19 nt, Artificial Sequence
  Description of Artificial Sequence: Synthetic oligonucleotide
  Antisense strand to SEQ ID NO: 1730531
uuugugaccacccauugau

SEQ ID NO: 1730533 - RNA, 19 nt, Artificial Sequence
  Description of Artificial Sequence: Synthetic oligonucleotide
  Sense strand starting at position 2670 of SEQ ID NO: 1562212
guuuccuuugaagaauguu

SEQ ID NO: 1730534 - RNA, 19 nt, Artificial Sequence
  Description of Artificial Sequence: Synthetic oligonucleotide
  Antisense strand to SEQ ID NO: 1730533
aacauucuucaaaggaaac

SEQ ID NO: 1730535 - RNA, 19 nt, Artificial Sequence
  Description of Artificial Sequence: Synthetic oligonucleotide
  Sense strand starting at position 2673 of SEQ ID NO: 1562212
uccuuugaagaauguuuau

SEQ ID NO: 1730536 - RNA, 19 nt, Artificial Sequence
  Description of Artificial Sequence: Synthetic oligonucleotide
  Antisense strand to SEQ ID NO: 1730535
auaaacauucuucaaagga

SEQ ID NO: 1730537 - RNA, 19 nt, Artificial Sequence
  Description of Artificial Sequence: Synthetic oligonucleotide
  Sense strand starting at position 2679 of SEQ ID NO: 1562212
gaagaauguuuauugagca

SEQ ID NO: 1730538 - RNA, 19 nt, Artificial Sequence
  Description of Artificial Sequence: Synthetic oligonucleotide
  Antisense strand to SEQ ID NO: 1730537
ugcucaauaaacauucuuc

SEQ ID NO: 1730539 - RNA, 19 nt, Artificial Sequence
  Description of Artificial Sequence: Synthetic oligonucleotide
  Sense strand starting at position 2750 of SEQ ID NO: 1562212
guggccauguugguauuua

SEQ ID NO: 1730540 - RNA, 19 nt, Artificial Sequence
  Description of Artificial Sequence: Synthetic oligonucleotide
  Antisense strand to SEQ ID NO: 1730539
uaaauaccaacauggccac

SEQ ID NO: 1730541 - RNA, 19 nt, Artificial Sequence
  Description of Artificial Sequence: Synthetic oligonucleotide
  Sense strand starting at position 2924 of SEQ ID NO: 1562212
cugaucagugagugucaca

SEQ ID NO: 1730542 - RNA, 19 nt, Artificial Sequence
  Description of Artificial Sequence: Synthetic oligonucleotide
  Antisense strand to SEQ ID NO: 1730541
ugugacacucacugaucag

SEQ ID NO: 1730543 - RNA, 19 nt, Artificial Sequence
  Description of Artificial Sequence: Synthetic oligonucleotide
  Sense strand starting at position 2931 of SEQ ID NO: 1562212
gugagugucacacagguua

SEQ ID NO: 1730544 - RNA, 19 nt, Artificial Sequence
  Description of Artificial Sequence: Synthetic oligonucleotide
  Antisense strand to SEQ ID NO: 1730543
uaaccugugugacacucac

SEQ ID NO: 1730545 - RNA, 19 nt, Artificial Sequence
  Description of Artificial Sequence: Synthetic oligonucleotide
  Sense strand starting at position 2959 of SEQ ID NO: 1562212
uucuauucuguugauugua

SEQ ID NO: 1730546 - RNA, 19 nt, Artificial Sequence
  Description of Artificial Sequence: Synthetic oligonucleotide
  Antisense strand to SEQ ID NO: 1730545
uacaaucaacagaauagaa

SEQ ID NO: 1730547 - RNA, 19 nt, Artificial Sequence
  Description of Artificial Sequence: Synthetic oligonucleotide
  Sense strand starting at position 2961 of SEQ ID NO: 1562212
cuauucuguugauuguaca

SEQ ID NO: 1730548 - RNA, 19 nt, Artificial Sequence
  Description of Artificial Sequence: Synthetic oligonucleotide
  Antisense strand to SEQ ID NO: 1730547
uguacaaucaacagaauag

SEQ ID NO: 1730549 - RNA, 19 nt, Artificial Sequence
  Description of Artificial Sequence: Synthetic oligonucleotide
  Sense strand starting at position 3131 of SEQ ID NO: 1562212
aggauacuuugagugauuc

SEQ ID NO: 1730550 - RNA, 19 nt, Artificial Sequence
  Description of Artificial Sequence: Synthetic oligonucleotide
  Antisense strand to SEQ ID NO: 1730549
gaaucacucaaaguauccu

SEQ ID NO: 1730551 - RNA, 19 nt, Artificial Sequence
  Description of Artificial Sequence: Synthetic oligonucleotide
  Sense strand starting at position 3142 of SEQ ID NO: 1562212
agugauucgcuccaugaag

SEQ ID NO: 1730552 - RNA, 19 nt, Artificial Sequence
  Description of Artificial Sequence: Synthetic oligonucleotide
  Antisense strand to SEQ ID NO: 1730551
cuucauggagcgaaucacu

SEQ ID NO: 1730553 - RNA, 19 nt, Artificial Sequence
  Description of Artificial Sequence: Synthetic oligonucleotide
  Sense strand starting at position 3144 of SEQ ID NO: 1562212
ugauucgcuccaugaagac

SEQ ID NO: 1730554 - RNA, 19 nt, Artificial Sequence
  Description of Artificial Sequence: Synthetic oligonucleotide
  Antisense strand to SEQ ID NO: 1730553
gucuucauggagcgaauca

SEQ ID NO: 1730555 - RNA, 19 nt, Artificial Sequence
  Description of Artificial Sequence: Synthetic oligonucleotide
  Sense strand starting at position 3167 of SEQ ID NO: 1562212
agcugagugcuguaauagu

SEQ ID NO: 1730556 - RNA, 19 nt, Artificial Sequence
  Description of Artificial Sequence: Synthetic oligonucleotide
  Antisense strand to SEQ ID NO: 1730555
acuauuacagcacucagcu

SEQ ID NO: 1730557 - RNA, 19 nt, Artificial Sequence
  Description of Artificial Sequence: Synthetic oligonucleotide
  Sense strand starting at position 3533 of SEQ ID NO: 1562212
cgaguaguguacaucguac

SEQ ID NO: 1730558 - RNA, 19 nt, Artificial Sequence
  Description of Artificial Sequence: Synthetic oligonucleotide
  Antisense strand to SEQ ID NO: 1730557
guacgauguacacuacucg

SEQ ID NO: 1730559 - RNA, 19 nt, Artificial Sequence
  Description of Artificial Sequence: Synthetic oligonucleotide
  Sense strand starting at position 3593 of SEQ ID NO: 1562212
cucgcuucugaguugccaa

SEQ ID NO: 1730560 - RNA, 19 nt, Artificial Sequence
  Description of Artificial Sequence: Synthetic oligonucleotide
  Antisense strand to SEQ ID NO: 1730559
uuggcaacucagaagcgag

SEQ ID NO: 1730561 - RNA, 19 nt, Artificial Sequence
  Description of Artificial Sequence: Synthetic oligonucleotide
  Sense strand starting at position 3604 of SEQ ID NO: 1562212
guugccaauguccaugaua

SEQ ID NO: 1730562 - RNA, 19 nt, Artificial Sequence
  Description of Artificial Sequence: Synthetic oligonucleotide
  Antisense strand to SEQ ID NO: 1730561
uaucauggacauuggcaac

SEQ ID NO: 1730563 - RNA, 19 nt, Artificial Sequence
  Description of Artificial Sequence: Synthetic oligonucleotide
  Sense strand starting at position 3606 of SEQ ID NO: 1562212
ugccaauguccaugauauc

SEQ ID NO: 1730564 - RNA, 19 nt, Artificial Sequence
  Description of Artificial Sequence: Synthetic oligonucleotide
  Antisense strand to SEQ ID NO: 1730563
gauaucauggacauuggca

SEQ ID NO: 1730565 - RNA, 19 nt, Artificial Sequence
  Description of Artificial Sequence: Synthetic oligonucleotide
  Sense strand starting at position 3607 of SEQ ID NO: 1562212
gccaauguccaugauaucu

SEQ ID NO: 1730566 - RNA, 19 nt, Artificial Sequence
  Description of Artificial Sequence: Synthetic oligonucleotide
  Antisense strand to SEQ ID NO: 1730565
agauaucauggacauuggc

SEQ ID NO: 1730567 - RNA, 19 nt, Artificial Sequence
  Description of Artificial Sequence: Synthetic oligonucleotide
  Sense strand starting at position 3667 of SEQ ID NO: 1562212
uaaccaagaacguguggua

SEQ ID NO: 1730568 - RNA, 19 nt, Artificial Sequence
  Description of Artificial Sequence: Synthetic oligonucleotide
  Antisense strand to SEQ ID NO: 1730567
uaccacacguucuugguua

SEQ ID NO: 1730569 - RNA, 19 nt, Artificial Sequence
  Description of Artificial Sequence: Synthetic oligonucleotide
  Sense strand starting at position 3768 of SEQ ID NO: 1562212
ucuuuacuauggcugagua

SEQ ID NO: 1730570 - RNA, 19 nt, Artificial Sequence
  Description of Artificial Sequence: Synthetic oligonucleotide
  Antisense strand to SEQ ID NO: 1730569
uacucagccauaguaaaga

SEQ ID NO: 1730571 - RNA, 19 nt, Artificial Sequence
  Description of Artificial Sequence: Synthetic oligonucleotide
  Sense strand starting at position 3770 of SEQ ID NO: 1562212
uuuacuauggcugaguagu

SEQ ID NO: 1730572 - RNA, 19 nt, Artificial Sequence
  Description of Artificial Sequence: Synthetic oligonucleotide
  Antisense strand to SEQ ID NO: 1730571
acuacucagccauaguaaa

SEQ ID NO: 1730573 - RNA, 19 nt, Artificial Sequence
  Description of Artificial Sequence: Synthetic oligonucleotide
  Sense strand starting at position 3772 of SEQ ID NO: 1562212
uacuauggcugaguaguau

SEQ ID NO: 1730574 - RNA, 19 nt, Artificial Sequence
  Description of Artificial Sequence: Synthetic oligonucleotide
  Antisense strand to SEQ ID NO: 1730573
auacuacucagccauagua

SEQ ID NO: 1730575 - RNA, 19 nt, Artificial Sequence
  Description of Artificial Sequence: Synthetic oligonucleotide
  Sense strand starting at position 3928 of SEQ ID NO: 1562212
gcaauugugcugcaaugaa

SEQ ID NO: 1730576 - RNA, 19 nt, Artificial Sequence
  Description of Artificial Sequence: Synthetic oligonucleotide
  Antisense strand to SEQ ID NO: 1730575
uucauugcagcacaauugc

SEQ ID NO: 1730577 - RNA, 19 nt, Artificial Sequence
  Description of Artificial Sequence: Synthetic oligonucleotide
  Sense strand starting at position 37 of SEQ ID NO: 1562213
ugaggccuucucugagaag

SEQ ID NO: 1730578 - RNA, 19 nt, Artificial Sequence
  Description of Artificial Sequence: Synthetic oligonucleotide
  Antisense strand to SEQ ID NO: 1730577
cuucucagagaaggccuca

SEQ ID NO: 1730579 - RNA, 19 nt, Artificial Sequence
  Description of Artificial Sequence: Synthetic oligonucleotide
  Sense strand starting at position 176 of SEQ ID NO: 1562213
ucuuucucaguagaaagua

SEQ ID NO: 1730580 - RNA, 19 nt, Artificial Sequence
  Description of Artificial Sequence: Synthetic oligonucleotide
  Antisense strand to SEQ ID NO: 1730579
uacuuucuacugagaaaga

SEQ ID NO: 1730581 - RNA, 19 nt, Artificial Sequence
  Description of Artificial Sequence: Synthetic oligonucleotide
  Sense strand starting at position 188 of SEQ ID NO: 1562213
gaaaguaaguuccugagaa

SEQ ID NO: 1730582 - RNA, 19 nt, Artificial Sequence
  Description of Artificial Sequence: Synthetic oligonucleotide
  Antisense strand to SEQ ID NO: 1730581
uucucaggaacuuacuuuc

SEQ ID NO: 1730583 - RNA, 19 nt, Artificial Sequence
  Description of Artificial Sequence: Synthetic oligonucleotide
  Sense strand starting at position 190 of SEQ ID NO: 1562213
aaguaaguuccugagaacg

SEQ ID NO: 1730584 - RNA, 19 nt, Artificial Sequence
  Description of Artificial Sequence: Synthetic oligonucleotide
  Antisense strand to SEQ ID NO: 1730583
cguucucaggaacuuacuu

SEQ ID NO: 1730585 - RNA, 19 nt, Artificial Sequence
  Description of Artificial Sequence: Synthetic oligonucleotide
  Sense strand starting at position 229 of SEQ ID NO: 1562213
agaagagugcuuuggacau

SEQ ID NO: 1730586 - RNA, 19 nt, Artificial Sequence
  Description of Artificial Sequence: Synthetic oligonucleotide
  Antisense strand to SEQ ID NO: 1730585
auguccaaagcacucuucu

SEQ ID NO: 1730587 - RNA, 19 nt, Artificial Sequence
  Description of Artificial Sequence: Synthetic oligonucleotide
  Sense strand starting at position 233 of SEQ ID NO: 1562213
gagugcuuuggacauaggu

SEQ ID NO: 1730588 - RNA, 19 nt, Artificial Sequence
  Description of Artificial Sequence: Synthetic oligonucleotide
  Antisense strand to SEQ ID NO: 1730587
accuauguccaaagcacuc

SEQ ID NO: 1730589 - RNA, 19 nt, Artificial Sequence
  Description of Artificial Sequence: Synthetic oligonucleotide
  Sense strand starting at position 300 of SEQ ID NO: 1562213
gcaagaauuugggaucaga

SEQ ID NO: 1730590 - RNA, 19 nt, Artificial Sequence
  Description of Artificial Sequence: Synthetic oligonucleotide
  Antisense strand to SEQ ID NO: 1730589
ucugaucccaaauucuugc

SEQ ID NO: 1730591 - RNA, 19 nt, Artificial Sequence
  Description of Artificial Sequence: Synthetic oligonucleotide
  Sense strand starting at position 344 of SEQ ID NO: 1562213
uggcucugcuauuuccuaa

SEQ ID NO: 1730592 - RNA, 19 nt, Artificial Sequence
  Description of Artificial Sequence: Synthetic oligonucleotide
  Antisense strand to SEQ ID NO: 1730591
uuaggaaauagcagagcca

SEQ ID NO: 1730593 - RNA, 19 nt, Artificial Sequence
  Description of Artificial Sequence: Synthetic oligonucleotide
  Sense strand starting at position 357 of SEQ ID NO: 1562213
uccuaacuauguccaagua

SEQ ID NO: 1730594 - RNA, 19 nt, Artificial Sequence
  Description of Artificial Sequence: Synthetic oligonucleotide
  Antisense strand to SEQ ID NO: 1730593
uacuuggacauaguuagga

SEQ ID NO: 1730595 - RNA, 19 nt, Artificial Sequence
  Description of Artificial Sequence: Synthetic oligonucleotide
  Sense strand starting at position 476 of SEQ ID NO: 1562213
auguaaugugcuuaauaga

SEQ ID NO: 1730596 - RNA, 19 nt, Artificial Sequence
  Description of Artificial Sequence: Synthetic oligonucleotide
  Antisense strand to SEQ ID NO: 1730595
ucuauuaagcacauuacau

SEQ ID NO: 1730597 - RNA, 19 nt, Artificial Sequence
  Description of Artificial Sequence: Synthetic oligonucleotide
  Sense strand starting at position 493 of SEQ ID NO: 1562213
gacagugacuugguauaaa

SEQ ID NO: 1730598 - RNA, 19 nt, Artificial Sequence
  Description of Artificial Sequence: Synthetic oligonucleotide
  Antisense strand to SEQ ID NO: 1730597
uuuauaccaagucacuguc

SEQ ID NO: 1730599 - RNA, 19 nt, Artificial Sequence
  Description of Artificial Sequence: Synthetic oligonucleotide
  Sense strand starting at position 511 of SEQ ID NO: 1562213
aagugcucaguauaugaca

SEQ ID NO: 1730600 - RNA, 19 nt, Artificial Sequence
  Description of Artificial Sequence: Synthetic oligonucleotide
  Antisense strand to SEQ ID NO: 1730599
ugucauauacugagcacuu

SEQ ID NO: 1730601 - RNA, 19 nt, Artificial Sequence
  Description of Artificial Sequence: Synthetic oligonucleotide
  Sense strand starting at position 530 of SEQ ID NO: 1562213
guguuauuaauauggaaag

SEQ ID NO: 1730602 - RNA, 19 nt, Artificial Sequence
  Description of Artificial Sequence: Synthetic oligonucleotide
  Antisense strand to SEQ ID NO: 1730601
cuuuccauauuaauaacac

SEQ ID NO: 1730603 - RNA, 19 nt, Artificial Sequence
  Description of Artificial Sequence: Synthetic oligonucleotide
  Sense strand starting at position 585 of SEQ ID NO: 1562213
acuagauacucacuguaug

SEQ ID NO: 1730604 - RNA, 19 nt, Artificial Sequence
  Description of Artificial Sequence: Synthetic oligonucleotide
  Antisense strand to SEQ ID NO: 1730603
cauacagugaguaucuagu

SEQ ID NO: 1730605 - RNA, 19 nt, Artificial Sequence
  Description of Artificial Sequence: Synthetic oligonucleotide
  Sense strand starting at position 586 of SEQ ID NO: 1562213
cuagauacucacuguauga

SEQ ID NO: 1730606 - RNA, 19 nt, Artificial Sequence
  Description of Artificial Sequence: Synthetic oligonucleotide
  Antisense strand to SEQ ID NO: 1730605
ucauacagugaguaucuag

SEQ ID NO: 1730607 - RNA, 19 nt, Artificial Sequence
  Description of Artificial Sequence: Synthetic oligonucleotide
  Sense strand starting at position 818 of SEQ ID NO: 1562213
gggaauugugucuagcaca

SEQ ID NO: 1730608 - RNA, 19 nt, Artificial Sequence
  Description of Artificial Sequence: Synthetic oligonucleotide
  Antisense strand to SEQ ID NO: 1730607
ugugcuagacacaauuccc

SEQ ID NO: 1730609 - RNA, 19 nt, Artificial Sequence
  Description of Artificial Sequence: Synthetic oligonucleotide
  Sense strand starting at position 854 of SEQ ID NO: 1562213
guuagcuaugauuaugauu

SEQ ID NO: 1730610 - RNA, 19 nt, Artificial Sequence
  Description of Artificial Sequence: Synthetic oligonucleotide
  Antisense strand to SEQ ID NO: 1730609
aaucauaaucauagcuaac

SEQ ID NO: 1730611 - RNA, 19 nt, Artificial Sequence
  Description of Artificial Sequence: Synthetic oligonucleotide
  Sense strand starting at position 951 of SEQ ID NO: 1562213
agaagaacgucuccuaaac

SEQ ID NO: 1730612 - RNA, 19 nt, Artificial Sequence
  Description of Artificial Sequence: Synthetic oligonucleotide
  Antisense strand to SEQ ID NO: 1730611
guuuaggagacguucuucu

SEQ ID NO: 1730613 - RNA, 19 nt, Artificial Sequence
  Description of Artificial Sequence: Synthetic oligonucleotide
  Sense strand starting at position 990 of SEQ ID NO: 1562213
gaaguuauaccacgaucag

SEQ ID NO: 1730614 - RNA, 19 nt, Artificial Sequence
  Description of Artificial Sequence: Synthetic oligonucleotide
  Antisense strand to SEQ ID NO: 1730613
cugaucgugguauaacuuc

SEQ ID NO: 1730615 - RNA, 19 nt, Artificial Sequence
  Description of Artificial Sequence: Synthetic oligonucleotide
  Sense strand starting at position 1090 of SEQ ID NO: 1562213
cugcuuugauaccugggau

SEQ ID NO: 1730616 - RNA, 19 nt, Artificial Sequence
  Description of Artificial Sequence: Synthetic oligonucleotide
  Antisense strand to SEQ ID NO: 1730615
aucccagguaucaaagcag

SEQ ID NO: 1730617 - RNA, 19 nt, Artificial Sequence
  Description of Artificial Sequence: Synthetic oligonucleotide
  Sense strand starting at position 1091 of SEQ ID NO: 1562213
ugcuuugauaccugggauu

SEQ ID NO: 1730618 - RNA, 19 nt, Artificial Sequence
  Description of Artificial Sequence: Synthetic oligonucleotide
  Antisense strand to SEQ ID NO: 1730617
aaucccagguaucaaagca

SEQ ID NO: 1730619 - RNA, 19 nt, Artificial Sequence
  Description of Artificial Sequence: Synthetic oligonucleotide
  Sense strand starting at position 1094 of SEQ ID NO: 1562213
uuugauaccugggauuuaa

SEQ ID NO: 1730620 - RNA, 19 nt, Artificial Sequence
  Description of Artificial Sequence: Synthetic oligonucleotide
  Antisense strand to SEQ ID NO: 1730619
uuaaaucccagguaucaaa

SEQ ID NO: 1730621 - RNA, 19 nt, Artificial Sequence
  Description of Artificial Sequence: Synthetic oligonucleotide
  Sense strand starting at position 1252 of SEQ ID NO: 1562213
caagguauccucucgcgua

SEQ ID NO: 1730622 - RNA, 19 nt, Artificial Sequence
  Description of Artificial Sequence: Synthetic oligonucleotide
  Antisense strand to SEQ ID NO: 1730621
uacgcgagaggauaccuug

SEQ ID NO: 1730623 - RNA, 19 nt, Artificial Sequence
  Description of Artificial Sequence: Synthetic oligonucleotide
  Sense strand starting at position 1491 of SEQ ID NO: 1562213
guuaacaccucacuuaagu

SEQ ID NO: 1730624 - RNA, 19 nt, Artificial Sequence
  Description of Artificial Sequence: Synthetic oligonucleotide
  Antisense strand to SEQ ID NO: 1730623
acuuaagugagguguuaac

SEQ ID NO: 1730625 - RNA, 19 nt, Artificial Sequence
  Description of Artificial Sequence: Synthetic oligonucleotide
  Sense strand starting at position 1549 of SEQ ID NO: 1562213
acguaauaauacccugagu

SEQ ID NO: 1730626 - RNA, 19 nt, Artificial Sequence
  Description of Artificial Sequence: Synthetic oligonucleotide
  Antisense strand to SEQ ID NO: 1730625
acucaggguauuauuacgu

SEQ ID NO: 1730627 - RNA, 19 nt, Artificial Sequence
  Description of Artificial Sequence: Synthetic oligonucleotide
  Sense strand starting at position 1551 of SEQ ID NO: 1562213
guaauaauacccugaguga

SEQ ID NO: 1730628 - RNA, 19 nt, Artificial Sequence
  Description of Artificial Sequence: Synthetic oligonucleotide
  Antisense strand to SEQ ID NO: 1730627
ucacucaggguauuauuac

SEQ ID NO: 1730629 - RNA, 19 nt, Artificial Sequence
  Description of Artificial Sequence: Synthetic oligonucleotide
  Sense strand starting at position 2877 of SEQ ID NO: 1562213
gacucagguguccagacuu

SEQ ID NO: 1730630 - RNA, 19 nt, Artificial Sequence
  Description of Artificial Sequence: Synthetic oligonucleotide
  Antisense strand to SEQ ID NO: 1730629
aagucuggacaccugaguc

SEQ ID NO: 1730631 - RNA, 19 nt, Artificial Sequence
  Description of Artificial Sequence: Synthetic oligonucleotide
  Sense strand starting at position 2932 of SEQ ID NO: 1562213
ugacauuuguggcuguuau

SEQ ID NO: 1730632 - RNA, 19 nt, Artificial Sequence
  Description of Artificial Sequence: Synthetic oligonucleotide
  Antisense strand to SEQ ID NO: 1730631
auaacagccacaaauguca

SEQ ID NO: 1730633 - RNA, 19 nt, Artificial Sequence
  Description of Artificial Sequence: Synthetic oligonucleotide
  Sense strand starting at position 2933 of SEQ ID NO: 1562213
gacauuuguggcuguuauu

SEQ ID NO: 1730634 - RNA, 19 nt, Artificial Sequence
  Description of Artificial Sequence: Synthetic oligonucleotide
  Antisense strand to SEQ ID NO: 1730633
aauaacagccacaaauguc

SEQ ID NO: 1730635 - RNA, 19 nt, Artificial Sequence
  Description of Artificial Sequence: Synthetic oligonucleotide
  Sense strand starting at position 3034 of SEQ ID NO: 1562213
ggagucagacucugcagau

SEQ ID NO: 1730636 - RNA, 19 nt, Artificial Sequence
  Description of Artificial Sequence: Synthetic oligonucleotide
  Antisense strand to SEQ ID NO: 1730635
aucugcagagucugacucc

SEQ ID NO: 1730637 - RNA, 19 nt, Artificial Sequence
  Description of Artificial Sequence: Synthetic oligonucleotide
  Sense strand starting at position 3205 of SEQ ID NO: 1562213
guguguauccucgcacuca

SEQ ID NO: 1730638 - RNA, 19 nt, Artificial Sequence
  Description of Artificial Sequence: Synthetic oligonucleotide
  Antisense strand to SEQ ID NO: 1730637
ugagugcgaggauacacac

SEQ ID NO: 1730639 - RNA, 19 nt, Artificial Sequence
  Description of Artificial Sequence: Synthetic oligonucleotide
  Sense strand starting at position 3217 of SEQ ID NO: 1562213
gcacucaguccuuagaaca

SEQ ID NO: 1730640 - RNA, 19 nt, Artificial Sequence
  Description of Artificial Sequence: Synthetic oligonucleotide
  Antisense strand to SEQ ID NO: 1730639
uguucuaaggacugagugc

SEQ ID NO: 1730641 - RNA, 19 nt, Artificial Sequence
  Description of Artificial Sequence: Synthetic oligonucleotide
  Sense strand starting at position 3316 of SEQ ID NO: 1562213
ugcaguugucauugauuuc

SEQ ID NO: 1730642 - RNA, 19 nt, Artificial Sequence
  Description of Artificial Sequence: Synthetic oligonucleotide
  Antisense strand to SEQ ID NO: 1730641
gaaaucaaugacaacugca

SEQ ID NO: 1730643 - RNA, 19 nt, Artificial Sequence
  Description of Artificial Sequence: Synthetic oligonucleotide
  Sense strand starting at position 3423 of SEQ ID NO: 1562213
cugccaacugccuagaauu

SEQ ID NO: 1730644 - RNA, 19 nt, Artificial Sequence
  Description of Artificial Sequence: Synthetic oligonucleotide
  Antisense strand to SEQ ID NO: 1730643
aauucuaggcaguuggcag

SEQ ID NO: 1730645 - RNA, 19 nt, Artificial Sequence
  Description of Artificial Sequence: Synthetic oligonucleotide
  Sense strand starting at position 3650 of SEQ ID NO: 1562213
ucucguggugaggaguaaa

SEQ ID NO: 1730646 - RNA, 19 nt, Artificial Sequence
  Description of Artificial Sequence: Synthetic oligonucleotide
  Antisense strand to SEQ ID NO: 1730645
uuuacuccucaccacgaga

SEQ ID NO: 1730647 - RNA, 19 nt, Artificial Sequence
  Description of Artificial Sequence: Synthetic oligonucleotide
  Sense strand starting at position 3746 of SEQ ID NO: 1562213
uuugauuacucacugugag

SEQ ID NO: 1730648 - RNA, 19 nt, Artificial Sequence
  Description of Artificial Sequence: Synthetic oligonucleotide
  Antisense strand to SEQ ID NO: 1730647
cucacagugaguaaucaaa

SEQ ID NO: 1730649 - RNA, 19 nt, Artificial Sequence
  Description of Artificial Sequence: Synthetic oligonucleotide
  Sense strand starting at position 3749 of SEQ ID NO: 1562213
gauuacucacugugaggca

SEQ ID NO: 1730650 - RNA, 19 nt, Artificial Sequence
  Description of Artificial Sequence: Synthetic oligonucleotide
  Antisense strand to SEQ ID NO: 1730649
ugccucacagugaguaauc

SEQ ID NO: 1730651 - RNA, 19 nt, Artificial Sequence
  Description of Artificial Sequence: Synthetic oligonucleotide
  Sense strand starting at position 3816 of SEQ ID NO: 1562213
ccuacacucccggaugagu

SEQ ID NO: 1730652 - RNA, 19 nt, Artificial Sequence
  Description of Artificial Sequence: Synthetic oligonucleotide
  Antisense strand to SEQ ID NO: 1730651
acucauccgggaguguagg

SEQ ID NO: 1730653 - RNA, 19 nt, Artificial Sequence
  Description of Artificial Sequence: Synthetic oligonucleotide
  Sense strand starting at position 3919 of SEQ ID NO: 1562213
acaaguguucuauacuauc

SEQ ID NO: 1730654 - RNA, 19 nt, Artificial Sequence
  Description of Artificial Sequence: Synthetic oligonucleotide
  Antisense strand to SEQ ID NO: 1730653
gauaguauagaacacuugu

SEQ ID NO: 1730655 - RNA, 19 nt, Artificial Sequence
  Description of Artificial Sequence: Synthetic oligonucleotide
  Sense strand starting at position 3964 of SEQ ID NO: 1562213
cugcucuacaggugaggaa

SEQ ID NO: 1730656 - RNA, 19 nt, Artificial Sequence
  Description of Artificial Sequence: Synthetic oligonucleotide
  Antisense strand to SEQ ID NO: 1730655
uuccucaccuguagagcag

SEQ ID NO: 1730657 - RNA, 19 nt, Artificial Sequence
  Description of Artificial Sequence: Synthetic oligonucleotide
  Sense strand starting at position 332 of SEQ ID NO: 1562214
uuaguauauugcuuaagcu

SEQ ID NO: 1730658 - RNA, 19 nt, Artificial Sequence
  Description of Artificial Sequence: Synthetic oligonucleotide
  Antisense strand to SEQ ID NO: 1730657
agcuuaagcaauauacuaa

SEQ ID NO: 1730659 - RNA, 19 nt, Artificial Sequence
  Description of Artificial Sequence: Synthetic oligonucleotide
  Sense strand starting at position 450 of SEQ ID NO: 1562214
acagcuggguccuucuuau

SEQ ID NO: 1730660 - RNA, 19 nt, Artificial Sequence
  Description of Artificial Sequence: Synthetic oligonucleotide
  Antisense strand to SEQ ID NO: 1730659
auaagaaggacccagcugu

SEQ ID NO: 1730661 - RNA, 19 nt, Artificial Sequence
  Description of Artificial Sequence: Synthetic oligonucleotide
  Sense strand starting at position 454 of SEQ ID NO: 1562214
cuggguccuucuuauauau

SEQ ID NO: 1730662 - RNA, 19 nt, Artificial Sequence
  Description of Artificial Sequence: Synthetic oligonucleotide
  Antisense strand to SEQ ID NO: 1730661
auauauaagaaggacccag

SEQ ID NO: 1730663 - RNA, 19 nt, Artificial Sequence
  Description of Artificial Sequence: Synthetic oligonucleotide
  Sense strand starting at position 456 of SEQ ID NO: 1562214
ggguccuucuuauauauca

SEQ ID NO: 1730664 - RNA, 19 nt, Artificial Sequence
  Description of Artificial Sequence: Synthetic oligonucleotide
  Antisense strand to SEQ ID NO: 1730663
ugauauauaagaaggaccc

SEQ ID NO: 1730665 - RNA, 19 nt, Artificial Sequence
  Description of Artificial Sequence: Synthetic oligonucleotide
  Sense strand starting at position 543 of SEQ ID NO: 1562214
ugggaccauuuguaaauaa

SEQ ID NO: 1730666 - RNA, 19 nt, Artificial Sequence
  Description of Artificial Sequence: Synthetic oligonucleotide
  Antisense strand to SEQ ID NO: 1730665
uuauuuacaaaugguccca

SEQ ID NO: 1730667 - RNA, 19 nt, Artificial Sequence
  Description of Artificial Sequence: Synthetic oligonucleotide
  Sense strand starting at position 563 of SEQ ID NO: 1562214
uuauuuguuugccuaucuu

SEQ ID NO: 1730668 - RNA, 19 nt, Artificial Sequence
  Description of Artificial Sequence: Synthetic oligonucleotide
  Antisense strand to SEQ ID NO: 1730667
aagauaggcaaacaaauaa

SEQ ID NO: 1730669 - RNA, 19 nt, Artificial Sequence
  Description of Artificial Sequence: Synthetic oligonucleotide
  Sense strand starting at position 592 of SEQ ID NO: 1562214
ccuccuagaucugagaugu

SEQ ID NO: 1730670 - RNA, 19 nt, Artificial Sequence
  Description of Artificial Sequence: Synthetic oligonucleotide
  Antisense strand to SEQ ID NO: 1730669
acaucucagaucuaggagg

SEQ ID NO: 1730671 - RNA, 19 nt, Artificial Sequence
  Description of Artificial Sequence: Synthetic oligonucleotide
  Sense strand starting at position 603 of SEQ ID NO: 1562214
ugagaugucuaauauguag

SEQ ID NO: 1730672 - RNA, 19 nt, Artificial Sequence
  Description of Artificial Sequence: Synthetic oligonucleotide
  Antisense strand to SEQ ID NO: 1730671
cuacauauuagacaucuca

SEQ ID NO: 1730673 - RNA, 19 nt, Artificial Sequence
  Description of Artificial Sequence: Synthetic oligonucleotide
  Sense strand starting at position 606 of SEQ ID NO: 1562214
gaugucuaauauguagcua

SEQ ID NO: 1730674 - RNA, 19 nt, Artificial Sequence
  Description of Artificial Sequence: Synthetic oligonucleotide
  Antisense strand to SEQ ID NO: 1730673
uagcuacauauuagacauc

SEQ ID NO: 1730675 - RNA, 19 nt, Artificial Sequence
  Description of Artificial Sequence: Synthetic oligonucleotide
  Sense strand starting at position 628 of SEQ ID NO: 1562214
gcugcauauggcuaguaag

SEQ ID NO: 1730676 - RNA, 19 nt, Artificial Sequence
  Description of Artificial Sequence: Synthetic oligonucleotide
  Antisense strand to SEQ ID NO: 1730675
cuuacuagccauaugcagc

SEQ ID NO: 1730677 - RNA, 19 nt, Artificial Sequence
  Description of Artificial Sequence: Synthetic oligonucleotide
  Sense strand starting at position 631 of SEQ ID NO: 1562214
gcauauggcuaguaagcau

SEQ ID NO: 1730678 - RNA, 19 nt, Artificial Sequence
  Description of Artificial Sequence: Synthetic oligonucleotide
  Antisense strand to SEQ ID NO: 1730677
augcuuacuagccauaugc

SEQ ID NO: 1730679 - RNA, 19 nt, Artificial Sequence
  Description of Artificial Sequence: Synthetic oligonucleotide
  Sense strand starting at position 651 of SEQ ID NO: 1562214
uggaaugugacuugucuga

SEQ ID NO: 1730680 - RNA, 19 nt, Artificial Sequence
  Description of Artificial Sequence: Synthetic oligonucleotide
  Antisense strand to SEQ ID NO: 1730679
ucagacaagucacauucca

SEQ ID NO: 1730681 - RNA, 19 nt, Artificial Sequence
  Description of Artificial Sequence: Synthetic oligonucleotide
  Sense strand starting at position 653 of SEQ ID NO: 1562214
gaaugugacuugucugaau

SEQ ID NO: 1730682 - RNA, 19 nt, Artificial Sequence
  Description of Artificial Sequence: Synthetic oligonucleotide
  Antisense strand to SEQ ID NO: 1730681
auucagacaagucacauuc

SEQ ID NO: 1730683 - RNA, 19 nt, Artificial Sequence
  Description of Artificial Sequence: Synthetic oligonucleotide
  Sense strand starting at position 765 of SEQ ID NO: 1562214
cugacuauauguugaaaug

SEQ ID NO: 1730684 - RNA, 19 nt, Artificial Sequence
  Description of Artificial Sequence: Synthetic oligonucleotide
  Antisense strand to SEQ ID NO: 1730683
cauuucaacauauagucag

SEQ ID NO: 1730685 - RNA, 19 nt, Artificial Sequence
  Description of Artificial Sequence: Synthetic oligonucleotide
  Sense strand starting at position 843 of SEQ ID NO: 1562214
uuuaaauguggcugcacau

SEQ ID NO: 1730686 - RNA, 19 nt, Artificial Sequence
  Description of Artificial Sequence: Synthetic oligonucleotide
  Antisense strand to SEQ ID NO: 1730685
augugcagccacauuuaaa

SEQ ID NO: 1730687 - RNA, 19 nt, Artificial Sequence
  Description of Artificial Sequence: Synthetic oligonucleotide
  Sense strand starting at position 856 of SEQ ID NO: 1562214
gcacauguggcuggcauua

SEQ ID NO: 1730688 - RNA, 19 nt, Artificial Sequence
  Description of Artificial Sequence: Synthetic oligonucleotide
  Antisense strand to SEQ ID NO: 1730687
uaaugccagccacaugugc

SEQ ID NO: 1730689 - RNA, 19 nt, Artificial Sequence
  Description of Artificial Sequence: Synthetic oligonucleotide
  Sense strand starting at position 858 of SEQ ID NO: 1562214
acauguggcuggcauuaua

SEQ ID NO: 1730690 - RNA, 19 nt, Artificial Sequence
  Description of Artificial Sequence: Synthetic oligonucleotide
  Antisense strand to SEQ ID NO: 1730689
uauaaugccagccacaugu

SEQ ID NO: 1730691 - RNA, 19 nt, Artificial Sequence
  Description of Artificial Sequence: Synthetic oligonucleotide
  Sense strand starting at position 885 of SEQ ID NO: 1562214
ggacaaugcuggucuauac

SEQ ID NO: 1730692 - RNA, 19 nt, Artificial Sequence
  Description of Artificial Sequence: Synthetic oligonucleotide
  Antisense strand to SEQ ID NO: 1730691
guauagaccagcauugucc

SEQ ID NO: 1730693 - RNA, 19 nt, Artificial Sequence
  Description of Artificial Sequence: Synthetic oligonucleotide
  Sense strand starting at position 895 of SEQ ID NO: 1562214
ggucuauaccauuagcuaa

SEQ ID NO: 1730694 - RNA, 19 nt, Artificial Sequence
  Description of Artificial Sequence: Synthetic oligonucleotide
  Antisense strand to SEQ ID NO: 1730693
uuagcuaaugguauagacc

SEQ ID NO: 1730695 - RNA, 19 nt, Artificial Sequence
  Description of Artificial Sequence: Synthetic oligonucleotide
  Sense strand starting at position 946 of SEQ ID NO: 1562214
gucccuagucucuaucaua

SEQ ID NO: 1730696 - RNA, 19 nt, Artificial Sequence
  Description of Artificial Sequence: Synthetic oligonucleotide
  Antisense strand to SEQ ID NO: 1730695
uaugauagagacuagggac

SEQ ID NO: 1730697 - RNA, 19 nt, Artificial Sequence
  Description of Artificial Sequence: Synthetic oligonucleotide
  Sense strand starting at position 964 of SEQ ID NO: 1562214
auacuagaugcucaguaag

SEQ ID NO: 1730698 - RNA, 19 nt, Artificial Sequence
  Description of Artificial Sequence: Synthetic oligonucleotide
  Antisense strand to SEQ ID NO: 1730697
cuuacugagcaucuaguau

SEQ ID NO: 1730699 - RNA, 19 nt, Artificial Sequence
  Description of Artificial Sequence: Synthetic oligonucleotide
  Sense strand starting at position 997 of SEQ ID NO: 1562214
uuugguauuuaugagaacu

SEQ ID NO: 1730700 - RNA, 19 nt, Artificial Sequence
  Description of Artificial Sequence: Synthetic oligonucleotide
  Antisense strand to SEQ ID NO: 1730699
aguucucauaaauaccaaa

SEQ ID NO: 1730701 - RNA, 19 nt, Artificial Sequence
  Description of Artificial Sequence: Synthetic oligonucleotide
  Sense strand starting at position 999 of SEQ ID NO: 1562214
ugguauuuaugagaacucu

SEQ ID NO: 1730702 - RNA, 19 nt, Artificial Sequence
  Description of Artificial Sequence: Synthetic oligonucleotide
  Antisense strand to SEQ ID NO: 1730701
agaguucucauaaauacca

SEQ ID NO: 1730703 - RNA, 19 nt, Artificial Sequence
  Description of Artificial Sequence: Synthetic oligonucleotide
  Sense strand starting at position 1005 of SEQ ID NO: 1562214
uuaugagaacucugggcuu

SEQ ID NO: 1730704 - RNA, 19 nt, Artificial Sequence
  Description of Artificial Sequence: Synthetic oligonucleotide
  Antisense strand to SEQ ID NO: 1730703
aagcccagaguucucauaa

SEQ ID NO: 1730705 - RNA, 19 nt, Artificial Sequence
  Description of Artificial Sequence: Synthetic oligonucleotide
  Sense strand starting at position 1048 of SEQ ID NO: 1562214
ccauguaugcuaugaacuu

SEQ ID NO: 1730706 - RNA, 19 nt, Artificial Sequence
  Description of Artificial Sequence: Synthetic oligonucleotide
  Antisense strand to SEQ ID NO: 1730705
aaguucauagcauacaugg

SEQ ID NO: 1730707 - RNA, 19 nt, Artificial Sequence
  Description of Artificial Sequence: Synthetic oligonucleotide
  Sense strand starting at position 1054 of SEQ ID NO: 1562214
augcuaugaacuugaggga

SEQ ID NO: 1730708 - RNA, 19 nt, Artificial Sequence
  Description of Artificial Sequence: Synthetic oligonucleotide
  Antisense strand to SEQ ID NO: 1730707
ucccucaaguucauagcau

SEQ ID NO: 1730709 - RNA, 19 nt, Artificial Sequence
  Description of Artificial Sequence: Synthetic oligonucleotide
  Sense strand starting at position 1161 of SEQ ID NO: 1562214
gucaccuacuacuauagau

SEQ ID NO: 1730710 - RNA, 19 nt, Artificial Sequence
  Description of Artificial Sequence: Synthetic oligonucleotide
  Antisense strand to SEQ ID NO: 1730709
aucuauaguaguaggugac

SEQ ID NO: 1730711 - RNA, 19 nt, Artificial Sequence
  Description of Artificial Sequence: Synthetic oligonucleotide
  Sense strand starting at position 1242 of SEQ ID NO: 1562214
uaggaagugucuugauuau

SEQ ID NO: 1730712 - RNA, 19 nt, Artificial Sequence
  Description of Artificial Sequence: Synthetic oligonucleotide
  Antisense strand to SEQ ID NO: 1730711
auaaucaagacacuuccua

SEQ ID NO: 1730713 - RNA, 19 nt, Artificial Sequence
  Description of Artificial Sequence: Synthetic oligonucleotide
  Sense strand starting at position 1349 of SEQ ID NO: 1562214
gggacuuucccagggucau

SEQ ID NO: 1730714 - RNA, 19 nt, Artificial Sequence
  Description of Artificial Sequence: Synthetic oligonucleotide
  Antisense strand to SEQ ID NO: 1730713
augacccugggaaaguccc

SEQ ID NO: 1730715 - RNA, 19 nt, Artificial Sequence
  Description of Artificial Sequence: Synthetic oligonucleotide
  Sense strand starting at position 1350 of SEQ ID NO: 1562214
ggacuuucccagggucauc

SEQ ID NO: 1730716 - RNA, 19 nt, Artificial Sequence
  Description of Artificial Sequence: Synthetic oligonucleotide
  Antisense strand to SEQ ID NO: 1730715
gaugacccugggaaagucc

SEQ ID NO: 1730717 - RNA, 19 nt, Artificial Sequence
  Description of Artificial Sequence: Synthetic oligonucleotide
  Sense strand starting at position 1362 of SEQ ID NO: 1562214
ggucaucuagcaggucaga

SEQ ID NO: 1730718 - RNA, 19 nt, Artificial Sequence
  Description of Artificial Sequence: Synthetic oligonucleotide
  Antisense strand to SEQ ID NO: 1730717
ucugaccugcuagaugacc

SEQ ID NO: 1730719 - RNA, 19 nt, Artificial Sequence
  Description of Artificial Sequence: Synthetic oligonucleotide
  Sense strand starting at position 1727 of SEQ ID NO: 1562214
gaggauguaucggaaggaa

SEQ ID NO: 1730720 - RNA, 19 nt, Artificial Sequence
  Description of Artificial Sequence: Synthetic oligonucleotide
  Antisense strand to SEQ ID NO: 1730719
uuccuuccgauacauccuc

SEQ ID NO: 1730721 - RNA, 19 nt, Artificial Sequence
  Description of Artificial Sequence: Synthetic oligonucleotide
  Sense strand starting at position 1730 of SEQ ID NO: 1562214
gauguaucggaaggaauua

SEQ ID NO: 1730722 - RNA, 19 nt, Artificial Sequence
  Description of Artificial Sequence: Synthetic oligonucleotide
  Antisense strand to SEQ ID NO: 1730721
uaauuccuuccgauacauc

SEQ ID NO: 1730723 - RNA, 19 nt, Artificial Sequence
  Description of Artificial Sequence: Synthetic oligonucleotide
  Sense strand starting at position 2971 of SEQ ID NO: 1562214
ggaagagagugcucccuga

SEQ ID NO: 1730724 - RNA, 19 nt, Artificial Sequence
  Description of Artificial Sequence: Synthetic oligonucleotide
  Antisense strand to SEQ ID NO: 1730723
ucagggagcacucucuucc

SEQ ID NO: 1730725 - RNA, 19 nt, Artificial Sequence
  Description of Artificial Sequence: Synthetic oligonucleotide
  Sense strand starting at position 3104 of SEQ ID NO: 1562214
agguacuuccuggacucua

SEQ ID NO: 1730726 - RNA, 19 nt, Artificial Sequence
  Description of Artificial Sequence: Synthetic oligonucleotide
  Antisense strand to SEQ ID NO: 1730725
uagaguccaggaaguaccu

SEQ ID NO: 1730727 - RNA, 19 nt, Artificial Sequence
  Description of Artificial Sequence: Synthetic oligonucleotide
  Sense strand starting at position 3115 of SEQ ID NO: 1562214
ggacucuaccucggaaacu

SEQ ID NO: 1730728 - RNA, 19 nt, Artificial Sequence
  Description of Artificial Sequence: Synthetic oligonucleotide
  Antisense strand to SEQ ID NO: 1730727
aguuuccgagguagagucc

SEQ ID NO: 1730729 - RNA, 19 nt, Artificial Sequence
  Description of Artificial Sequence: Synthetic oligonucleotide
  Sense strand starting at position 3125 of SEQ ID NO: 1562214
ucggaaacuucauugguga

SEQ ID NO: 1730730 - RNA, 19 nt, Artificial Sequence
  Description of Artificial Sequence: Synthetic oligonucleotide
  Antisense strand to SEQ ID NO: 1730729
ucaccaaugaaguuuccga

SEQ ID NO: 1730731 - RNA, 19 nt, Artificial Sequence
  Description of Artificial Sequence: Synthetic oligonucleotide
  Sense strand starting at position 3215 of SEQ ID NO: 1562214
gcccaugcaucucaggaau

SEQ ID NO: 1730732 - RNA, 19 nt, Artificial Sequence
  Description of Artificial Sequence: Synthetic oligonucleotide
  Antisense strand to SEQ ID NO: 1730731
auuccugagaugcaugggc

SEQ ID NO: 1730733 - RNA, 19 nt, Artificial Sequence
  Description of Artificial Sequence: Synthetic oligonucleotide
  Sense strand starting at position 3608 of SEQ ID NO: 1562214
uccuccuugucagaggaga

SEQ ID NO: 1730734 - RNA, 19 nt, Artificial Sequence
  Description of Artificial Sequence: Synthetic oligonucleotide
  Antisense strand to SEQ ID NO: 1730733
ucuccucugacaaggagga

SEQ ID NO: 1730735 - RNA, 19 nt, Artificial Sequence
  Description of Artificial Sequence: Synthetic oligonucleotide
  Sense strand starting at position 283 of SEQ ID NO: 1562215
ccaaucugcugucuugaga

SEQ ID NO: 1730736 - RNA, 19 nt, Artificial Sequence
  Description of Artificial Sequence: Synthetic oligonucleotide
  Antisense strand to SEQ ID NO: 1730735
ucucaagacagcagauugg

SEQ ID NO: 1730737 - RNA, 19 nt, Artificial Sequence
  Description of Artificial Sequence: Synthetic oligonucleotide
  Sense strand starting at position 286 of SEQ ID NO: 1562215
aucugcugucuugagaaug

SEQ ID NO: 1730738 - RNA, 19 nt, Artificial Sequence
  Description of Artificial Sequence: Synthetic oligonucleotide
  Antisense strand to SEQ ID NO: 1730737
cauucucaagacagcagau

SEQ ID NO: 1730739 - RNA, 19 nt, Artificial Sequence
  Description of Artificial Sequence: Synthetic oligonucleotide
  Sense strand starting at position 563 of SEQ ID NO: 1562215
gaaugacuuuagucugguu

SEQ ID NO: 1730740 - RNA, 19 nt, Artificial Sequence
  Description of Artificial Sequence: Synthetic oligonucleotide
  Antisense strand to SEQ ID NO: 1730739
aaccagacuaaagucauuc

SEQ ID NO: 1730741 - RNA, 19 nt, Artificial Sequence
  Description of Artificial Sequence: Synthetic oligonucleotide
  Sense strand starting at position 586 of SEQ ID NO: 1562215
cagguaugcuaagugagga

SEQ ID NO: 1730742 - RNA, 19 nt, Artificial Sequence
  Description of Artificial Sequence: Synthetic oligonucleotide
  Antisense strand to SEQ ID NO: 1730741
uccucacuuagcauaccug

SEQ ID NO: 1730743 - RNA, 19 nt, Artificial Sequence
  Description of Artificial Sequence: Synthetic oligonucleotide
  Sense strand starting at position 587 of SEQ ID NO: 1562215
agguaugcuaagugaggaa

SEQ ID NO: 1730744 - RNA, 19 nt, Artificial Sequence
  Description of Artificial Sequence: Synthetic oligonucleotide
  Antisense strand to SEQ ID NO: 1730743
uuccucacuuagcauaccu

SEQ ID NO: 1730745 - RNA, 19 nt, Artificial Sequence
  Description of Artificial Sequence: Synthetic oligonucleotide
  Sense strand starting at position 616 of SEQ ID NO: 1562215
auggcuuuguuucuaugga

SEQ ID NO: 1730746 - RNA, 19 nt, Artificial Sequence
  Description of Artificial Sequence: Synthetic oligonucleotide
  Antisense strand to SEQ ID NO: 1730745
uccauagaaacaaagccau

SEQ ID NO: 1730747 - RNA, 19 nt, Artificial Sequence
  Description of Artificial Sequence: Synthetic oligonucleotide
  Sense strand starting at position 640 of SEQ ID NO: 1562215
ccaagagaugccugcaauc

SEQ ID NO: 1730748 - RNA, 19 nt, Artificial Sequence
  Description of Artificial Sequence: Synthetic oligonucleotide
  Antisense strand to SEQ ID NO: 1730747
gauugcaggcaucucuugg

SEQ ID NO: 1730749 - RNA, 19 nt, Artificial Sequence
  Description of Artificial Sequence: Synthetic oligonucleotide
  Sense strand starting at position 789 of SEQ ID NO: 1562215
gaauaacucgugcacuucu

SEQ ID NO: 1730750 - RNA, 19 nt, Artificial Sequence
  Description of Artificial Sequence: Synthetic oligonucleotide
  Antisense strand to SEQ ID NO: 1730749
agaagugcacgaguuauuc

SEQ ID NO: 1730751 - RNA, 19 nt, Artificial Sequence
  Description of Artificial Sequence: Synthetic oligonucleotide
  Sense strand starting at position 809 of SEQ ID NO: 1562215
auacacucugccuggaauu

SEQ ID NO: 1730752 - RNA, 19 nt, Artificial Sequence
  Description of Artificial Sequence: Synthetic oligonucleotide
  Antisense strand to SEQ ID NO: 1730751
aauuccaggcagaguguau

SEQ ID NO: 1730753 - RNA, 19 nt, Artificial Sequence
  Description of Artificial Sequence: Synthetic oligonucleotide
  Sense strand starting at position 910 of SEQ ID NO: 1562215
gagggugauucccuccagu

SEQ ID NO: 1730754 - RNA, 19 nt, Artificial Sequence
  Description of Artificial Sequence: Synthetic oligonucleotide
  Antisense strand to SEQ ID NO: 1730753
acuggagggaaucacccuc

SEQ ID NO: 1730755 - RNA, 19 nt, Artificial Sequence
  Description of Artificial Sequence: Synthetic oligonucleotide
  Sense strand starting at position 1141 of SEQ ID NO: 1562215
gagaaugcauacuugagca

SEQ ID NO: 1730756 - RNA, 19 nt, Artificial Sequence
  Description of Artificial Sequence: Synthetic oligonucleotide
  Antisense strand to SEQ ID NO: 1730755
ugcucaaguaugcauucuc

SEQ ID NO: 1730757 - RNA, 19 nt, Artificial Sequence
  Description of Artificial Sequence: Synthetic oligonucleotide
  Sense strand starting at position 1224 of SEQ ID NO: 1562215
uggugagagcgcuauuacu

SEQ ID NO: 1730758 - RNA, 19 nt, Artificial Sequence
  Description of Artificial Sequence: Synthetic oligonucleotide
  Antisense strand to SEQ ID NO: 1730757
aguaauagcgcucucacca

SEQ ID NO: 1730759 - RNA, 19 nt, Artificial Sequence
  Description of Artificial Sequence: Synthetic oligonucleotide
  Sense strand starting at position 1232 of SEQ ID NO: 1562215
gcgcuauuacuguugccau

SEQ ID NO: 1730760 - RNA, 19 nt, Artificial Sequence
  Description of Artificial Sequence: Synthetic oligonucleotide
  Antisense strand to SEQ ID NO: 1730759
auggcaacaguaauagcgc

SEQ ID NO: 1730761 - RNA, 19 nt, Artificial Sequence
  Description of Artificial Sequence: Synthetic oligonucleotide
  Sense strand starting at position 1353 of SEQ ID NO: 1562215
ggcaguggucuguacacau

SEQ ID NO: 1730762 - RNA, 19 nt, Artificial Sequence
  Description of Artificial Sequence: Synthetic oligonucleotide
  Antisense strand to SEQ ID NO: 1730761
auguguacagaccacugcc

SEQ ID NO: 1730763 - RNA, 19 nt, Artificial Sequence
  Description of Artificial Sequence: Synthetic oligonucleotide
  Sense strand starting at position 1377 of SEQ ID NO: 1562215
gaggauauagguuaagcga

SEQ ID NO: 1730764 - RNA, 19 nt, Artificial Sequence
  Description of Artificial Sequence: Synthetic oligonucleotide
  Antisense strand to SEQ ID NO: 1730763
ucgcuuaaccuauauccuc

SEQ ID NO: 1730765 - RNA, 19 nt, Artificial Sequence
  Description of Artificial Sequence: Synthetic oligonucleotide
  Sense strand starting at position 1563 of SEQ ID NO: 1562215
gcggacauaugagugagau

SEQ ID NO: 1730766 - RNA, 19 nt, Artificial Sequence
  Description of Artificial Sequence: Synthetic oligonucleotide
  Antisense strand to SEQ ID NO: 1730765
aucucacucauauguccgc

SEQ ID NO: 1730767 - RNA, 19 nt, Artificial Sequence
  Description of Artificial Sequence: Synthetic oligonucleotide
  Sense strand starting at position 1564 of SEQ ID NO: 1562215
cggacauaugagugagaug

SEQ ID NO: 1730768 - RNA, 19 nt, Artificial Sequence
  Description of Artificial Sequence: Synthetic oligonucleotide
  Antisense strand to SEQ ID NO: 1730767
caucucacucauauguccg

SEQ ID NO: 1730769 - RNA, 19 nt, Artificial Sequence
  Description of Artificial Sequence: Synthetic oligonucleotide
  Sense strand starting at position 1575 of SEQ ID NO: 1562215
gugagaugcagacaccauu

SEQ ID NO: 1730770 - RNA, 19 nt, Artificial Sequence
  Description of Artificial Sequence: Synthetic oligonucleotide
  Antisense strand to SEQ ID NO: 1730769
aauggugucugcaucucac

SEQ ID NO: 1730771 - RNA, 19 nt, Artificial Sequence
  Description of Artificial Sequence: Synthetic oligonucleotide
  Sense strand starting at position 2243 of SEQ ID NO: 1562215
uguaccuguuguuuaacau

SEQ ID NO: 1730772 - RNA, 19 nt, Artificial Sequence
  Description of Artificial Sequence: Synthetic oligonucleotide
  Antisense strand to SEQ ID NO: 1730771
auguuaaacaacagguaca

SEQ ID NO: 1730773 - RNA, 19 nt, Artificial Sequence
  Description of Artificial Sequence: Synthetic oligonucleotide
  Sense strand starting at position 2311 of SEQ ID NO: 1562215
aagggaaacuggcaaucaa

SEQ ID NO: 1730774 - RNA, 19 nt, Artificial Sequence
  Description of Artificial Sequence: Synthetic oligonucleotide
  Antisense strand to SEQ ID NO: 1730773
uugauugccaguuucccuu

SEQ ID NO: 1730775 - RNA, 19 nt, Artificial Sequence
  Description of Artificial Sequence: Synthetic oligonucleotide
  Sense strand starting at position 2320 of SEQ ID NO: 1562215
uggcaaucaaggcaguaaa

SEQ ID NO: 1730776 - RNA, 19 nt, Artificial Sequence
  Description of Artificial Sequence: Synthetic oligonucleotide
  Antisense strand to SEQ ID NO: 1730775
uuuacugccuugauugcca

SEQ ID NO: 1730777 - RNA, 19 nt, Artificial Sequence
  Description of Artificial Sequence: Synthetic oligonucleotide
  Sense strand starting at position 2437 of SEQ ID NO: 1562215
gggacaucugucugucauu

SEQ ID NO: 1730778 - RNA, 19 nt, Artificial Sequence
  Description of Artificial Sequence: Synthetic oligonucleotide
  Antisense strand to SEQ ID NO: 1730777
aaugacagacagauguccc

SEQ ID NO: 1730779 - RNA, 19 nt, Artificial Sequence
  Description of Artificial Sequence: Synthetic oligonucleotide
  Sense strand starting at position 2438 of SEQ ID NO: 1562215
ggacaucugucugucauua

SEQ ID NO: 1730780 - RNA, 19 nt, Artificial Sequence
  Description of Artificial Sequence: Synthetic oligonucleotide
  Antisense strand to SEQ ID NO: 1730779
uaaugacagacagaugucc

SEQ ID NO: 1730781 - RNA, 19 nt, Artificial Sequence
  Description of Artificial Sequence: Synthetic oligonucleotide
  Sense strand starting at position 2443 of SEQ ID NO: 1562215
ucugucugucauuaacuga

SEQ ID NO: 1730782 - RNA, 19 nt, Artificial Sequence
  Description of Artificial Sequence: Synthetic oligonucleotide
  Antisense strand to SEQ ID NO: 1730781
ucaguuaaugacagacaga

SEQ ID NO: 1730783 - RNA, 19 nt, Artificial Sequence
  Description of Artificial Sequence: Synthetic oligonucleotide
  Sense strand starting at position 2450 of SEQ ID NO: 1562215
gucauuaacugagugaccu

SEQ ID NO: 1730784 - RNA, 19 nt, Artificial Sequence
  Description of Artificial Sequence: Synthetic oligonucleotide
  Antisense strand to SEQ ID NO: 1730783
aggucacucaguuaaugac

SEQ ID NO: 1730785 - RNA, 19 nt, Artificial Sequence
  Description of Artificial Sequence: Synthetic oligonucleotide
  Sense strand starting at position 2497 of SEQ ID NO: 1562215
uccguuuccuuaccugaaa

SEQ ID NO: 1730786 - RNA, 19 nt, Artificial Sequence
  Description of Artificial Sequence: Synthetic oligonucleotide
  Antisense strand to SEQ ID NO: 1730785
uuucagguaaggaaacgga

SEQ ID NO: 1730787 - RNA, 19 nt, Artificial Sequence
  Description of Artificial Sequence: Synthetic oligonucleotide
  Sense strand starting at position 2515 of SEQ ID NO: 1562215
accugauucuugcucugga

SEQ ID NO: 1730788 - RNA, 19 nt, Artificial Sequence
  Description of Artificial Sequence: Synthetic oligonucleotide
  Antisense strand to SEQ ID NO: 1730787
uccagagcaagaaucaggu

SEQ ID NO: 1730789 - RNA, 19 nt, Artificial Sequence
  Description of Artificial Sequence: Synthetic oligonucleotide
  Sense strand starting at position 2571 of SEQ ID NO: 1562215
ucauuacguucccuccaga

SEQ ID NO: 1730790 - RNA, 19 nt, Artificial Sequence
  Description of Artificial Sequence: Synthetic oligonucleotide
  Antisense strand to SEQ ID NO: 1730789
ucuggagggaacguaauga

SEQ ID NO: 1730791 - RNA, 19 nt, Artificial Sequence
  Description of Artificial Sequence: Synthetic oligonucleotide
  Sense strand starting at position 2574 of SEQ ID NO: 1562215
uuacguucccuccagacaa

SEQ ID NO: 1730792 - RNA, 19 nt, Artificial Sequence
  Description of Artificial Sequence: Synthetic oligonucleotide
  Antisense strand to SEQ ID NO: 1730791
uugucuggagggaacguaa

SEQ ID NO: 1730793 - RNA, 19 nt, Artificial Sequence
  Description of Artificial Sequence: Synthetic oligonucleotide
  Sense strand starting at position 2708 of SEQ ID NO: 1562215
ggagaacucugagccuaaa

SEQ ID NO: 1730794 - RNA, 19 nt, Artificial Sequence
  Description of Artificial Sequence: Synthetic oligonucleotide
  Antisense strand to SEQ ID NO: 1730793
uuuaggcucagaguucucc

SEQ ID NO: 1730795 - RNA, 19 nt, Artificial Sequence
  Description of Artificial Sequence: Synthetic oligonucleotide
  Sense strand starting at position 2823 of SEQ ID NO: 1562215
caguuucugccagauugag

SEQ ID NO: 1730796 - RNA, 19 nt, Artificial Sequence
  Description of Artificial Sequence: Synthetic oligonucleotide
  Antisense strand to SEQ ID NO: 1730795
cucaaucuggcagaaacug

SEQ ID NO: 1730797 - RNA, 19 nt, Artificial Sequence
  Description of Artificial Sequence: Synthetic oligonucleotide
  Sense strand starting at position 2912 of SEQ ID NO: 1562215
uucuaagauugacagacaa

SEQ ID NO: 1730798 - RNA, 19 nt, Artificial Sequence
  Description of Artificial Sequence: Synthetic oligonucleotide
  Antisense strand to SEQ ID NO: 1730797
uugucugucaaucuuagaa

SEQ ID NO: 1730799 - RNA, 19 nt, Artificial Sequence
  Description of Artificial Sequence: Synthetic oligonucleotide
  Sense strand starting at position 3009 of SEQ ID NO: 1562215
cacagauaaguguguccua

SEQ ID NO: 1730800 - RNA, 19 nt, Artificial Sequence
  Description of Artificial Sequence: Synthetic oligonucleotide
  Antisense strand to SEQ ID NO: 1730799
uaggacacacuuaucugug

SEQ ID NO: 1730801 - RNA, 19 nt, Artificial Sequence
  Description of Artificial Sequence: Synthetic oligonucleotide
  Sense strand starting at position 3010 of SEQ ID NO: 1562215
acagauaaguguguccuau

SEQ ID NO: 1730802 - RNA, 19 nt, Artificial Sequence
  Description of Artificial Sequence: Synthetic oligonucleotide
  Antisense strand to SEQ ID NO: 1730801
auaggacacacuuaucugu

SEQ ID NO: 1730803 - RNA, 19 nt, Artificial Sequence
  Description of Artificial Sequence: Synthetic oligonucleotide
  Sense strand starting at position 3018 of SEQ ID NO: 1562215
guguguccuaugcaacauu

SEQ ID NO: 1730804 - RNA, 19 nt, Artificial Sequence
  Description of Artificial Sequence: Synthetic oligonucleotide
  Antisense strand to SEQ ID NO: 1730803
aauguugcauaggacacac

SEQ ID NO: 1730805 - RNA, 19 nt, Artificial Sequence
  Description of Artificial Sequence: Synthetic oligonucleotide
  Sense strand starting at position 3038 of SEQ ID NO: 1562215
gggacacauuuauacuuua

SEQ ID NO: 1730806 - RNA, 19 nt, Artificial Sequence
  Description of Artificial Sequence: Synthetic oligonucleotide
  Antisense strand to SEQ ID NO: 1730805
uaaaguauaaauguguccc

SEQ ID NO: 1730807 - RNA, 19 nt, Artificial Sequence
  Description of Artificial Sequence: Synthetic oligonucleotide
  Sense strand starting at position 3202 of SEQ ID NO: 1562215
cuugcaguucucuagguca

SEQ ID NO: 1730808 - RNA, 19 nt, Artificial Sequence
  Description of Artificial Sequence: Synthetic oligonucleotide
  Antisense strand to SEQ ID NO: 1730807
ugaccuagagaacugcaag

SEQ ID NO: 1730809 - RNA, 19 nt, Artificial Sequence
  Description of Artificial Sequence: Synthetic oligonucleotide
  Sense strand starting at position 3204 of SEQ ID NO: 1562215
ugcaguucucuaggucaaa

SEQ ID NO: 1730810 - RNA, 19 nt, Artificial Sequence
  Description of Artificial Sequence: Synthetic oligonucleotide
  Antisense strand to SEQ ID NO: 1730809
uuugaccuagagaacugca

SEQ ID NO: 1730811 - RNA, 19 nt, Artificial Sequence
  Description of Artificial Sequence: Synthetic oligonucleotide
  Sense strand starting at position 3270 of SEQ ID NO: 1562215
gaggaagcaucaguuccuu

SEQ ID NO: 1730812 - RNA, 19 nt, Artificial Sequence
  Description of Artificial Sequence: Synthetic oligonucleotide
  Antisense strand to SEQ ID NO: 1730811
aaggaacugaugcuuccuc

SEQ ID NO: 1730813 - RNA, 19 nt, Artificial Sequence
  Description of Artificial Sequence: Synthetic oligonucleotide
  Sense strand starting at position 3486 of SEQ ID NO: 1562215
uuaaucacaucugugagau

SEQ ID NO: 1730814 - RNA, 19 nt, Artificial Sequence
  Description of Artificial Sequence: Synthetic oligonucleotide
  Antisense strand to SEQ ID NO: 1730813
aucucacagaugugauuaa

SEQ ID NO: 1730815 - RNA, 19 nt, Artificial Sequence
  Description of Artificial Sequence: Synthetic oligonucleotide
  Sense strand starting at position 111 of SEQ ID NO: 1562216
gugaguuaugaaugucuua

SEQ ID NO: 1730816 - RNA, 19 nt, Artificial Sequence
  Description of Artificial Sequence: Synthetic oligonucleotide
  Antisense strand to SEQ ID NO: 1730815
uaagacauucauaacucac

SEQ ID NO: 1730817 - RNA, 19 nt, Artificial Sequence
  Description of Artificial Sequence: Synthetic oligonucleotide
  Sense strand starting at position 143 of SEQ ID NO: 1562216
gaggaauggugacuucuuu

SEQ ID NO: 1730818 - RNA, 19 nt, Artificial Sequence
  Description of Artificial Sequence: Synthetic oligonucleotide
  Antisense strand to SEQ ID NO: 1730817
aaagaagucaccauuccuc

SEQ ID NO: 1730819 - RNA, 19 nt, Artificial Sequence
  Description of Artificial Sequence: Synthetic oligonucleotide
  Sense strand starting at position 268 of SEQ ID NO: 1562216
agugucauugauggaugau

SEQ ID NO: 1730820 - RNA, 19 nt, Artificial Sequence
  Description of Artificial Sequence: Synthetic oligonucleotide
  Antisense strand to SEQ ID NO: 1730819
aucauccaucaaugacacu

SEQ ID NO: 1730821 - RNA, 19 nt, Artificial Sequence
  Description of Artificial Sequence: Synthetic oligonucleotide
  Sense strand starting at position 269 of SEQ ID NO: 1562216
gugucauugauggaugaug

SEQ ID NO: 1730822 - RNA, 19 nt, Artificial Sequence
  Description of Artificial Sequence: Synthetic oligonucleotide
  Antisense strand to SEQ ID NO: 1730821
caucauccaucaaugacac

SEQ ID NO: 1730823 - RNA, 19 nt, Artificial Sequence
  Description of Artificial Sequence: Synthetic oligonucleotide
  Sense strand starting at position 280 of SEQ ID NO: 1562216
ggaugaugaauguaggugu

SEQ ID NO: 1730824 - RNA, 19 nt, Artificial Sequence
  Description of Artificial Sequence: Synthetic oligonucleotide
  Antisense strand to SEQ ID NO: 1730823
acaccuacauucaucaucc

SEQ ID NO: 1730825 - RNA, 19 nt, Artificial Sequence
  Description of Artificial Sequence: Synthetic oligonucleotide
  Sense strand starting at position 379 of SEQ ID NO: 1562216
ggugcaauuggucaucuua

SEQ ID NO: 1730826 - RNA, 19 nt, Artificial Sequence
  Description of Artificial Sequence: Synthetic oligonucleotide
  Antisense strand to SEQ ID NO: 1730825
uaagaugaccaauugcacc

SEQ ID NO: 1730827 - RNA, 19 nt, Artificial Sequence
  Description of Artificial Sequence: Synthetic oligonucleotide
  Sense strand starting at position 381 of SEQ ID NO: 1562216
ugcaauuggucaucuuaaa

SEQ ID NO: 1730828 - RNA, 19 nt, Artificial Sequence
  Description of Artificial Sequence: Synthetic oligonucleotide
  Antisense strand to SEQ ID NO: 1730827
uuuaagaugaccaauugca

SEQ ID NO: 1730829 - RNA, 19 nt, Artificial Sequence
  Description of Artificial Sequence: Synthetic oligonucleotide
  Sense strand starting at position 1379 of SEQ ID NO: 1562216
guaauauaauggucggcau

SEQ ID NO: 1730830 - RNA, 19 nt, Artificial Sequence
  Description of Artificial Sequence: Synthetic oligonucleotide
  Antisense strand to SEQ ID NO: 1730829
augccgaccauuauauuac

SEQ ID NO: 1730831 - RNA, 19 nt, Artificial Sequence
  Description of Artificial Sequence: Synthetic oligonucleotide
  Sense strand starting at position 1382 of SEQ ID NO: 1562216
auauaauggucggcaugua

SEQ ID NO: 1730832 - RNA, 19 nt, Artificial Sequence
  Description of Artificial Sequence: Synthetic oligonucleotide
  Antisense strand to SEQ ID NO: 1730831
uacaugccgaccauuauau

SEQ ID NO: 1730833 - RNA, 19 nt, Artificial Sequence
  Description of Artificial Sequence: Synthetic oligonucleotide
  Sense strand starting at position 1383 of SEQ ID NO: 1562216
uauaauggucggcauguau

SEQ ID NO: 1730834 - RNA, 19 nt, Artificial Sequence
  Description of Artificial Sequence: Synthetic oligonucleotide
  Antisense strand to SEQ ID NO: 1730833
auacaugccgaccauuaua

SEQ ID NO: 1730835 - RNA, 19 nt, Artificial Sequence
  Description of Artificial Sequence: Synthetic oligonucleotide
  Sense strand starting at position 1394 of SEQ ID NO: 1562216
gcauguauuguacauaugu

SEQ ID NO: 1730836 - RNA, 19 nt, Artificial Sequence
  Description of Artificial Sequence: Synthetic oligonucleotide
  Antisense strand to SEQ ID NO: 1730835
acauauguacaauacaugc

SEQ ID NO: 1730837 - RNA, 19 nt, Artificial Sequence
  Description of Artificial Sequence: Synthetic oligonucleotide
  Sense strand starting at position 1403 of SEQ ID NO: 1562216
guacauauguaucuaugga

SEQ ID NO: 1730838 - RNA, 19 nt, Artificial Sequence
  Description of Artificial Sequence: Synthetic oligonucleotide
  Antisense strand to SEQ ID NO: 1730837
uccauagauacauauguac

SEQ ID NO: 1730839 - RNA, 19 nt, Artificial Sequence
  Description of Artificial Sequence: Synthetic oligonucleotide
  Sense strand starting at position 1463 of SEQ ID NO: 1562216
guguguuguagcucuuuag

SEQ ID NO: 1730840 - RNA, 19 nt, Artificial Sequence
  Description of Artificial Sequence: Synthetic oligonucleotide
  Antisense strand to SEQ ID NO: 1730839
cuaaagagcuacaacacac

SEQ ID NO: 1730841 - RNA, 19 nt, Artificial Sequence
  Description of Artificial Sequence: Synthetic oligonucleotide
  Sense strand starting at position 1464 of SEQ ID NO: 1562216
uguguuguagcucuuuagu

SEQ ID NO: 1730842 - RNA, 19 nt, Artificial Sequence
  Description of Artificial Sequence: Synthetic oligonucleotide
  Antisense strand to SEQ ID NO: 1730841
acuaaagagcuacaacaca

SEQ ID NO: 1730843 - RNA, 19 nt, Artificial Sequence
  Description of Artificial Sequence: Synthetic oligonucleotide
  Sense strand starting at position 1467 of SEQ ID NO: 1562216
guuguagcucuuuaguuaa

SEQ ID NO: 1730844 - RNA, 19 nt, Artificial Sequence
  Description of Artificial Sequence: Synthetic oligonucleotide
  Antisense strand to SEQ ID NO: 1730843
uuaacuaaagagcuacaac

SEQ ID NO: 1730845 - RNA, 19 nt, Artificial Sequence
  Description of Artificial Sequence: Synthetic oligonucleotide
  Sense strand starting at position 1470 of SEQ ID NO: 1562216
guagcucuuuaguuaaaga

SEQ ID NO: 1730846 - RNA, 19 nt, Artificial Sequence
  Description of Artificial Sequence: Synthetic oligonucleotide
  Antisense strand to SEQ ID NO: 1730845
ucuuuaacuaaagagcuac

SEQ ID NO: 1730847 - RNA, 19 nt, Artificial Sequence
  Description of Artificial Sequence: Synthetic oligonucleotide
  Sense strand starting at position 1480 of SEQ ID NO: 1562216
aguuaaagauuguuuccuu

SEQ ID NO: 1730848 - RNA, 19 nt, Artificial Sequence
  Description of Artificial Sequence: Synthetic oligonucleotide
  Antisense strand to SEQ ID NO: 1730847
aaggaaacaaucuuuaacu

SEQ ID NO: 1730849 - RNA, 19 nt, Artificial Sequence
  Description of Artificial Sequence: Synthetic oligonucleotide
  Sense strand starting at position 1534 of SEQ ID NO: 1562216
gcccaaaggcauugucuga

SEQ ID NO: 1730850 - RNA, 19 nt, Artificial Sequence
  Description of Artificial Sequence: Synthetic oligonucleotide
  Antisense strand to SEQ ID NO: 1730849
ucagacaaugccuuugggc

SEQ ID NO: 1730851 - RNA, 19 nt, Artificial Sequence
  Description of Artificial Sequence: Synthetic oligonucleotide
  Sense strand starting at position 1538 of SEQ ID NO: 1562216
aaaggcauugucugauauu

SEQ ID NO: 1730852 - RNA, 19 nt, Artificial Sequence
  Description of Artificial Sequence: Synthetic oligonucleotide
  Antisense strand to SEQ ID NO: 1730851
aauaucagacaaugccuuu

SEQ ID NO: 1730853 - RNA, 19 nt, Artificial Sequence
  Description of Artificial Sequence: Synthetic oligonucleotide
  Sense strand starting at position 1539 of SEQ ID NO: 1562216
aaggcauugucugauauuu

SEQ ID NO: 1730854 - RNA, 19 nt, Artificial Sequence
  Description of Artificial Sequence: Synthetic oligonucleotide
  Antisense strand to SEQ ID NO: 1730853
aaauaucagacaaugccuu

SEQ ID NO: 1730855 - RNA, 19 nt, Artificial Sequence
  Description of Artificial Sequence: Synthetic oligonucleotide
  Sense strand starting at position 1541 of SEQ ID NO: 1562216
ggcauugucugauauuuag

SEQ ID NO: 1730856 - RNA, 19 nt, Artificial Sequence
  Description of Artificial Sequence: Synthetic oligonucleotide
  Antisense strand to SEQ ID NO: 1730855
cuaaauaucagacaaugcc

SEQ ID NO: 1730857 - RNA, 19 nt, Artificial Sequence
  Description of Artificial Sequence: Synthetic oligonucleotide
  Sense strand starting at position 1574 of SEQ ID NO: 1562216
cugcuagacuuauugucuu

SEQ ID NO: 1730858 - RNA, 19 nt, Artificial Sequence
  Description of Artificial Sequence: Synthetic oligonucleotide
  Antisense strand to SEQ ID NO: 1730857
aagacaauaagucuagcag

SEQ ID NO: 1730859 - RNA, 19 nt, Artificial Sequence
  Description of Artificial Sequence: Synthetic oligonucleotide
  Sense strand starting at position 1626 of SEQ ID NO: 1562216
gccucuauggacuguggua

SEQ ID NO: 1730860 - RNA, 19 nt, Artificial Sequence
  Description of Artificial Sequence: Synthetic oligonucleotide
  Antisense strand to SEQ ID NO: 1730859
uaccacaguccauagaggc

SEQ ID NO: 1730861 - RNA, 19 nt, Artificial Sequence
  Description of Artificial Sequence: Synthetic oligonucleotide
  Sense strand starting at position 1628 of SEQ ID NO: 1562216
cucuauggacugugguaaa

SEQ ID NO: 1730862 - RNA, 19 nt, Artificial Sequence
  Description of Artificial Sequence: Synthetic oligonucleotide
  Antisense strand to SEQ ID NO: 1730861
uuuaccacaguccauagag

SEQ ID NO: 1730863 - RNA, 19 nt, Artificial Sequence
  Description of Artificial Sequence: Synthetic oligonucleotide
  Sense strand starting at position 1639 of SEQ ID NO: 1562216
gugguaaagcuaggauuag

SEQ ID NO: 1730864 - RNA, 19 nt, Artificial Sequence
  Description of Artificial Sequence: Synthetic oligonucleotide
  Antisense strand to SEQ ID NO: 1730863
cuaauccuagcuuuaccac

SEQ ID NO: 1730865 - RNA, 19 nt, Artificial Sequence
  Description of Artificial Sequence: Synthetic oligonucleotide
  Sense strand starting at position 1999 of SEQ ID NO: 1562216
cccaucauuuccuagagag

SEQ ID NO: 1730866 - RNA, 19 nt, Artificial Sequence
  Description of Artificial Sequence: Synthetic oligonucleotide
  Antisense strand to SEQ ID NO: 1730865
cucucuaggaaaugauggg

SEQ ID NO: 1730867 - RNA, 19 nt, Artificial Sequence
  Description of Artificial Sequence: Synthetic oligonucleotide
  Sense strand starting at position 2100 of SEQ ID NO: 1562216
ccuagugaccgugguauga

SEQ ID NO: 1730868 - RNA, 19 nt, Artificial Sequence
  Description of Artificial Sequence: Synthetic oligonucleotide
  Antisense strand to SEQ ID NO: 1730867
ucauaccacggucacuagg

SEQ ID NO: 1730869 - RNA, 19 nt, Artificial Sequence
  Description of Artificial Sequence: Synthetic oligonucleotide
  Sense strand starting at position 2161 of SEQ ID NO: 1562216
aagggcuuucccuguccau

SEQ ID NO: 1730870 - RNA, 19 nt, Artificial Sequence
  Description of Artificial Sequence: Synthetic oligonucleotide
  Antisense strand to SEQ ID NO: 1730869
auggacagggaaagcccuu

SEQ ID NO: 1730871 - RNA, 19 nt, Artificial Sequence
  Description of Artificial Sequence: Synthetic oligonucleotide
  Sense strand starting at position 2464 of SEQ ID NO: 1562216
ggucuuaauguuugccaua

SEQ ID NO: 1730872 - RNA, 19 nt, Artificial Sequence
  Description of Artificial Sequence: Synthetic oligonucleotide
  Antisense strand to SEQ ID NO: 1730871
uauggcaaacauuaagacc

SEQ ID NO: 1730873 - RNA, 19 nt, Artificial Sequence
  Description of Artificial Sequence: Synthetic oligonucleotide
  Sense strand starting at position 2465 of SEQ ID NO: 1562216
gucuuaauguuugccauag

SEQ ID NO: 1730874 - RNA, 19 nt, Artificial Sequence
  Description of Artificial Sequence: Synthetic oligonucleotide
  Antisense strand to SEQ ID NO: 1730873
cuauggcaaacauuaagac

SEQ ID NO: 1730875 - RNA, 19 nt, Artificial Sequence
  Description of Artificial Sequence: Synthetic oligonucleotide
  Sense strand starting at position 2469 of SEQ ID NO: 1562216
uaauguuugccauaggguc

SEQ ID NO: 1730876 - RNA, 19 nt, Artificial Sequence
  Description of Artificial Sequence: Synthetic oligonucleotide
  Antisense strand to SEQ ID NO: 1730875
gacccuauggcaaacauua

SEQ ID NO: 1730877 - RNA, 19 nt, Artificial Sequence
  Description of Artificial Sequence: Synthetic oligonucleotide
  Sense strand starting at position 2499 of SEQ ID NO: 1562216
cccugaauucuccaagagc

SEQ ID NO: 1730878 - RNA, 19 nt, Artificial Sequence
  Description of Artificial Sequence: Synthetic oligonucleotide
  Antisense strand to SEQ ID NO: 1730877
gcucuuggagaauucaggg

SEQ ID NO: 1730879 - RNA, 19 nt, Artificial Sequence
  Description of Artificial Sequence: Synthetic oligonucleotide
  Sense strand starting at position 2948 of SEQ ID NO: 1562216
uuucuaucaucgucgaaag

SEQ ID NO: 1730880 - RNA, 19 nt, Artificial Sequence
  Description of Artificial Sequence: Synthetic oligonucleotide
  Antisense strand to SEQ ID NO: 1730879
cuuucgacgaugauagaaa

SEQ ID NO: 1730881 - RNA, 19 nt, Artificial Sequence
  Description of Artificial Sequence: Synthetic oligonucleotide
  Sense strand starting at position 3571 of SEQ ID NO: 1562216
acccgugaccuugguugaa

SEQ ID NO: 1730882 - RNA, 19 nt, Artificial Sequence
  Description of Artificial Sequence: Synthetic oligonucleotide
  Antisense strand to SEQ ID NO: 1730881
uucaaccaaggucacgggu

SEQ ID NO: 1730883 - RNA, 19 nt, Artificial Sequence
  Description of Artificial Sequence: Synthetic oligonucleotide
  Sense strand starting at position 3717 of SEQ ID NO: 1562216
ucaggaaaguuccuaacga

SEQ ID NO: 1730884 - RNA, 19 nt, Artificial Sequence
  Description of Artificial Sequence: Synthetic oligonucleotide
  Antisense strand to SEQ ID NO: 1730883
ucguuaggaacuuuccuga

SEQ ID NO: 1730885 - RNA, 19 nt, Artificial Sequence
  Description of Artificial Sequence: Synthetic oligonucleotide
  Sense strand starting at position 3797 of SEQ ID NO: 1562216
gggccugagcuauaaacca

SEQ ID NO: 1730886 - RNA, 19 nt, Artificial Sequence
  Description of Artificial Sequence: Synthetic oligonucleotide
  Antisense strand to SEQ ID NO: 1730885
ugguuuauagcucaggccc

SEQ ID NO: 1730887 - RNA, 19 nt, Artificial Sequence
  Description of Artificial Sequence: Synthetic oligonucleotide
  Sense strand starting at position 3841 of SEQ ID NO: 1562216
aagaaagcacuguguccua

SEQ ID NO: 1730888 - RNA, 19 nt, Artificial Sequence
  Description of Artificial Sequence: Synthetic oligonucleotide
  Antisense strand to SEQ ID NO: 1730887
uaggacacagugcuuucuu

SEQ ID NO: 1730889 - RNA, 19 nt, Artificial Sequence
  Description of Artificial Sequence: Synthetic oligonucleotide
  Sense strand starting at position 3844 of SEQ ID NO: 1562216
aaagcacuguguccuaaga

SEQ ID NO: 1730890 - RNA, 19 nt, Artificial Sequence
  Description of Artificial Sequence: Synthetic oligonucleotide
  Antisense strand to SEQ ID NO: 1730889
ucuuaggacacagugcuuu

SEQ ID NO: 1730891 - RNA, 19 nt, Artificial Sequence
  Description of Artificial Sequence: Synthetic oligonucleotide
  Sense strand starting at position 3940 of SEQ ID NO: 1562216
ccaugauccugggcuggau

SEQ ID NO: 1730892 - RNA, 19 nt, Artificial Sequence
  Description of Artificial Sequence: Synthetic oligonucleotide
  Antisense strand to SEQ ID NO: 1730891
auccagcccaggaucaugg

SEQ ID NO: 1730893 - RNA, 19 nt, Artificial Sequence
  Description of Artificial Sequence: Synthetic oligonucleotide
  Sense strand starting at position 3967 of SEQ ID NO: 1562216
agggaagagggcugcuaua

SEQ ID NO: 1730894 - RNA, 19 nt, Artificial Sequence
  Description of Artificial Sequence: Synthetic oligonucleotide
  Antisense strand to SEQ ID NO: 1730893
uauagcagcccucuucccu

SEQ ID NO: 1730895 - RNA, 19 nt, Artificial Sequence
  Description of Artificial Sequence: Synthetic oligonucleotide
  Sense strand starting at position 7 of SEQ ID NO: 1562217
gagugucuugcuccgccaa

SEQ ID NO: 1730896 - RNA, 19 nt, Artificial Sequence
  Description of Artificial Sequence: Synthetic oligonucleotide
  Antisense strand to SEQ ID NO: 1730895
uuggcggagcaagacacuc

SEQ ID NO: 1730897 - RNA, 19 nt, Artificial Sequence
  Description of Artificial Sequence: Synthetic oligonucleotide
  Sense strand starting at position 725 of SEQ ID NO: 1562217
gauuauaaggugugagcua

SEQ ID NO: 1730898 - RNA, 19 nt, Artificial Sequence
  Description of Artificial Sequence: Synthetic oligonucleotide
  Antisense strand to SEQ ID NO: 1730897
uagcucacaccuuauaauc

SEQ ID NO: 1730899 - RNA, 19 nt, Artificial Sequence
  Description of Artificial Sequence: Synthetic oligonucleotide
  Sense strand starting at position 828 of SEQ ID NO: 1562217
gggaguuggguguggguaa

SEQ ID NO: 1730900 - RNA, 19 nt, Artificial Sequence
  Description of Artificial Sequence: Synthetic oligonucleotide
  Antisense strand to SEQ ID NO: 1730899
uuacccacacccaacuccc

SEQ ID NO: 1730901 - RNA, 19 nt, Artificial Sequence
  Description of Artificial Sequence: Synthetic oligonucleotide
  Sense strand starting at position 896 of SEQ ID NO: 1562217
guaugacuucagggaagug

SEQ ID NO: 1730902 - RNA, 19 nt, Artificial Sequence
  Description of Artificial Sequence: Synthetic oligonucleotide
  Antisense strand to SEQ ID NO: 1730901
cacuucccugaagucauac

SEQ ID NO: 1730903 - RNA, 19 nt, Artificial Sequence
  Description of Artificial Sequence: Synthetic oligonucleotide
  Sense strand starting at position 905 of SEQ ID NO: 1562217
cagggaaguguucgagaua

SEQ ID NO: 1730904 - RNA, 19 nt, Artificial Sequence
  Description of Artificial Sequence: Synthetic oligonucleotide
  Antisense strand to SEQ ID NO: 1730903
uaucucgaacacuucccug

SEQ ID NO: 1730905 - RNA, 19 nt, Artificial Sequence
  Description of Artificial Sequence: Synthetic oligonucleotide
  Sense strand starting at position 906 of SEQ ID NO: 1562217
agggaaguguucgagauaa
